United States Patent Application Publication US 2013/0267429 A1 - sequence listing, part 8

SEQ ID NO: 164512 - DNA, 59 bp, Artificial
  Synthetic oligonucleotide
gcagcaaactcacgtttatttaatccaagaagcattcttaacttgattattttctcagc

SEQ ID NO: 164513 - DNA, 55 bp, Artificial
  Synthetic oligonucleotide
acttataccttgtcctatagcagcattgtacatattagcacctacacctaactgg

SEQ ID NO: 164514 - DNA, 55 bp, Artificial
  Synthetic oligonucleotide
acttaagaccatctacagggccgattacatctaattatggatggagagtacatcc

SEQ ID NO: 164515 - DNA, 55 bp, Artificial
  Synthetic oligonucleotide
actgttatgaaaggcggacctagatgtggatgtggtaatactggttgtgcagagg

SEQ ID NO: 164516 - DNA, 55 bp, Artificial
  Synthetic oligonucleotide
agtccactctgggagggtactcccaggcgagtacttaatgcttagctgcgcaccg

SEQ ID NO: 164517 - DNA, 55 bp, Artificial
  Synthetic oligonucleotide
agtattatggccattcccattcgaagcattcaaccaaattcctaatgctagaaac

SEQ ID NO: 164518 - DNA, 55 bp, Artificial
  Synthetic oligonucleotide
agtaggattcctcaagtagatagaattgtagcagaatacgcaggagtacgtgaag

SEQ ID NO: 164519 - DNA, 55 bp, Artificial
  Synthetic oligonucleotide
agtaagaaggatttagctgagataggtgttccagaacctaagactggattagtaa

SEQ ID NO: 164520 - DNA, 55 bp, Artificial
  Synthetic oligonucleotide
aggtgttatgtctggaataactatggtgtttatgccagctgttagtacattcgta

SEQ ID NO: 164521 - DNA, 55 bp, Artificial
  Synthetic oligonucleotide
aggtctaagtgattgtagtgacccatcggaactgactcttgagtgtatatgtttt

SEQ ID NO: 164522 - DNA, 55 bp, Artificial
  Synthetic oligonucleotide
aggtccaagagttccttgctaaggaatggcctatgattttattagcgatacttcg

SEQ ID NO: 164523 - DNA, 59 bp, Artificial
  Synthetic oligonucleotide
atccgccgttgtgtccggagccattaggtgatccaccgttatgtccagctccattatgg

SEQ ID NO: 164524 - DNA, 55 bp, Artificial
  Synthetic oligonucleotide
agggtaccaccttgccgaataagagctggacctatatcgtatccaccagagacag

SEQ ID NO: 164525 - DNA, 53 bp, Artificial
  Synthetic oligonucleotide
agggtaagttttcacctttggacaatgttgtctaacgttatcttcttgagtta

SEQ ID NO: 164526 - DNA, 55 bp, Artificial
  Synthetic oligonucleotide
aggctcgctggattaatctccaaatcatagtggcttattctaagtgcaggagcgt

SEQ ID NO: 164527 - DNA, 55 bp, Artificial
  Synthetic oligonucleotide
agcttgtaattcgcgacccctataatagatactagttacagagctcttcacgcca

SEQ ID NO: 164528 - DNA, 55 bp, Artificial
  Synthetic oligonucleotide
agctcaacatctgtctatggcgacgcgcaaggcacggtgaaagaaaccaccccgc

SEQ ID NO: 164529 - DNA, 55 bp, Artificial
  Synthetic oligonucleotide
agcgtaatagtagttgccatatttagctgtcttttggttgggtgttcttctagtg

SEQ ID NO: 164530 - DNA, 54 bp, Artificial
  Synthetic oligonucleotide
agcggttacatccctggataacgattttccacaagggataacgacttctaagga

SEQ ID NO: 164531 - DNA, 55 bp, Artificial
  Synthetic oligonucleotide
agcgggcccgctttgtagaaccatagaaacggcacaattggcttttggaacggca

SEQ ID NO: 164532 - DNA, 55 bp, Artificial
  Synthetic oligonucleotide
agcctttggagttgacaaataggaatttgatccgtctgtctatcataaatgtctc

SEQ ID NO: 164533 - DNA, 54 bp, Artificial
  Synthetic oligonucleotide
agcctataacggtgccttccgtctaagtctacttactaaataagctttcgatta

SEQ ID NO: 164534 - DNA, 55 bp, Artificial
  Synthetic oligonucleotide
aggaaactcgcaaatgaccccgtacttttaggataggggtgccaccatcagtggc

SEQ ID NO: 164535 - DNA, 55 bp, Artificial
  Synthetic oligonucleotide
agccctagctcaagataatcgactaaaggcaggtgtaagtctagaaggcggattc

SEQ ID NO: 164536 - DNA, 55 bp, Artificial
  Synthetic oligonucleotide
ccgcatataatagcattgatactcagtcctgtggcaacagaactcccggagacac

SEQ ID NO: 164537 - DNA, 55 bp, Artificial
  Synthetic oligonucleotide
ccgcatctctgtcagcgaagttccaagtgtattcgaacgcaaatacgtttatcac

SEQ ID NO: 164538 - DNA, 55 bp, Artificial
  Synthetic oligonucleotide
ccgcattatgcggaggcctgacctatacgcagataaccgatcctgccttacagca

SEQ ID NO: 164539 - DNA, 55 bp, Artificial
  Synthetic oligonucleotide
ccgccatagcatctatcatactgctaattctcacgaactcatcagaacctctgta

SEQ ID NO: 164540 - DNA, 55 bp, Artificial
  Synthetic oligonucleotide
ccgccgttaccgcattgcaagagatatgaagtggaccacggatacccgctacggt

SEQ ID NO: 164541 - DNA, 55 bp, Artificial
  Synthetic oligonucleotide
ccgctacaggtacttcctttaattccatcgcaaccattggtcttgctttaatggt

SEQ ID NO: 164542 - DNA, 55 bp, Artificial
  Synthetic oligonucleotide
ccgcttcctctgaaatagtaaatacagagtccgtggtggggtctgagtctcagcg

SEQ ID NO: 164543 - DNA, 55 bp, Artificial
  Synthetic oligonucleotide
ccgcttggattatagaccaggatattggcagtggaaccccagtcgcaggattccc

SEQ ID NO: 164544 - DNA, 55 bp, Artificial
  Synthetic oligonucleotide
ccggaattagggccaatgtgtgagacgagctaagcctaggctatagatgacgaga

SEQ ID NO: 164545 - DNA, 60 bp, Artificial
  Synthetic oligonucleotide
agcttcgatcataagctatatggtgtagcaagaagagcatcttacaaattcgaggtactt

SEQ ID NO: 164546 - DNA, 55 bp, Artificial
  Synthetic oligonucleotide
ccggagaatccttttagaaattcctccgcatgatatcctccgcggctgggctggt

SEQ ID NO: 164547 - DNA, 55 bp, Artificial
  Synthetic oligonucleotide
ccggataacaatgcttcgatcagctatacccacgaaaatagcaccgtttacgcgg

SEQ ID NO: 164548 - DNA, 55 bp, Artificial
  Synthetic oligonucleotide
ccggatacatgaccttgtgatgctccttcattcccagttcctactacagcacaca

SEQ ID NO: 164549 - DNA, 55 bp, Artificial
  Synthetic oligonucleotide
ccggatggcatcaattcctgactctaaggagtagtctccgtggtaacgatacgga

SEQ ID NO: 164550 - DNA, 55 bp, Artificial
  Synthetic oligonucleotide
ccggattttgcgggacaaacagagaagttacctcgttcaccataatcgacacacc

SEQ ID NO: 164551 - DNA, 55 bp, Artificial
  Synthetic oligonucleotide
ccggccggattcaccgttgttgatcacaccgctagcatcctcaagcgatttgatg

SEQ ID NO: 164552 - DNA, 55 bp, Artificial
  Synthetic oligonucleotide
ccggctgatccatcatttctctcgctatcttaattcttagctgtgcgatagtcga

SEQ ID NO: 164553 - DNA, 55 bp, Artificial
  Synthetic oligonucleotide
ccggctggcacccgtgtagagctagtccagatggacgacgcacaggcccctccag

SEQ ID NO: 164554 - DNA, 50 bp, Artificial
  Synthetic oligonucleotide
ccgggaacaaccctccttaaagtaacagcgtagaaagaatgcgggtaaag

SEQ ID NO: 164555 - DNA, 55 bp, Artificial
  Synthetic oligonucleotide
ccgggaacccgcaggagaatctcggtatcgtccgcgtggcttcaaacggtacaga

SEQ ID NO: 164556 - DNA, 57 bp, Artificial
  Synthetic oligonucleotide
agcttataagttaatgttagagtcgggacttcgtgttcacgaggtatcagctctaaa

SEQ ID NO: 164557 - DNA, 55 bp, Artificial
  Synthetic oligonucleotide
ccgggaccgcgcaggtaagctgatagcctggtgcagccaggtctggtttgatctc

SEQ ID NO: 164558 - DNA, 55 bp, Artificial
  Synthetic oligonucleotide
ccgggagacttttgagatggcatggtgcatagcaaggccgaatgcagtcgtgggg

SEQ ID NO: 164559 - DNA, 55 bp, Artificial
  Synthetic oligonucleotide
ccgggtctaatgatgataagataatagtaccattaagcacggcagaaaggcttac

SEQ ID NO: 164560 - DNA, 55 bp, Artificial
  Synthetic oligonucleotide
ccggtaagctttatcctgttaactccgcccatcggcacactttccgtgcttatcc

SEQ ID NO: 164561 - DNA, 54 bp, Artificial
  Synthetic oligonucleotide
ccggtaccctgaaatacttgcccggaatttactaagccatgcgtcaaaatctct

SEQ ID NO: 164562 - DNA, 55 bp, Artificial
  Synthetic oligonucleotide
ccggttgatagcaagcatcttaagagcggggtcagtaaggcagaaggagacagcg

SEQ ID NO: 164563 - DNA, 54 bp, Artificial
  Synthetic oligonucleotide
ccgtaaattctaaattgccttagcctcgggtgagccttcgtcttaatcttggta

SEQ ID NO: 164564 - DNA, 55 bp, Artificial
  Synthetic oligonucleotide
ccgtacttatttatggcatccaatgcatactgtgagcaagttggcgtaaatctac

SEQ ID NO: 164565 - DNA, 55 bp, Artificial
  Synthetic oligonucleotide
ccgtagcggtgcacatggatgtgttctatttcctcgcagtaaatattgcctccta

SEQ ID NO: 164566 - DNA, 55 bp, Artificial
  Synthetic oligonucleotide
ccgtagtttccaaatgcattatctgttacgagattaaatccttgtttacgccacc

SEQ ID NO: 164567 - DNA, 56 bp, Artificial
  Synthetic oligonucleotide
gacttcaatatcggcacaagtttcaattaacaactcctttaatcttgtttctacat

SEQ ID NO: 164568 - DNA, 55 bp, Artificial
  Synthetic oligonucleotide
cccctggacctatttcaattacgaagtcttcctcacatacttcagatccatctac

SEQ ID NO: 164569 - DNA, 55 bp, Artificial
  Synthetic oligonucleotide
ccccttgttcatgcgcagttagtatgtgagttaacccttctgtagaatacagggc

SEQ ID NO: 164570 - DNA, 52 bp, Artificial
  Synthetic oligonucleotide
cccggaactacaattgtgccgaaaaggaaactggacaacggccctgttatcg

SEQ ID NO: 164571 - DNA, 55 bp, Artificial
  Synthetic oligonucleotide
cccggatctattatattgctgtccagtagttgcctcaattgtacattagtgtaac

SEQ ID NO: 164572 - DNA, 55 bp, Artificial
  Synthetic oligonucleotide
cccggtcacggggacccgaccaccatcggacatgagaaacagtacaatccggtga

SEQ ID NO: 164573 - DNA, 55 bp, Artificial
  Synthetic oligonucleotide
cccggtgattgatttcccagtgcacctgttccttcggataggttaccccatccac

SEQ ID NO: 164574 - DNA, 55 bp, Artificial
  Synthetic oligonucleotide
cccgtacgcaaacgaaccagtggtgaggaagtatctaagcagccagagactgtgt

SEQ ID NO: 164575 - DNA, 55 bp, Artificial
  Synthetic oligonucleotide
cccgtctggctgtcatatccattgccgtttacaggtggaactataagcctcctag

SEQ ID NO: 164576 - DNA, 55 bp, Artificial
  Synthetic oligonucleotide
cccgttcattaactgttttctaaatgcaataaccatgatccaacaagtgcattgc

SEQ ID NO: 164577 - DNA, 55 bp, Artificial
  Synthetic oligonucleotide
ccctacgtctcctacacctagtccatctacaaagacttgacctgacactacagaa

SEQ ID NO: 164578 - DNA, 60 bp, Artificial
  Synthetic oligonucleotide
gacttcaagggcaggacgccaagcaccgccattgtaattataacgaccagctgcaaggta

SEQ ID NO: 164579 - DNA, 52 bp, Artificial
  Synthetic oligonucleotide
ccctagattttacctatgtattaccggatccaactaagtttacacctactgg

SEQ ID NO: 164580 - DNA, 55 bp, Artificial
  Synthetic oligonucleotide
ccctatttggatcgttgcctatttgaccattatgggtacctactagtcctaaaga

SEQ ID NO: 164581 - DNA, 53 bp, Artificial
  Synthetic oligonucleotide
ccctcccaggaaaggcttatcgagagacgggaaaagagtacctctgtctaacc

SEQ ID NO: 164582 - DNA, 55 bp, Artificial
  Synthetic oligonucleotide
ccctcctatattgcccttgtcaactgctgaattggacagggtttatgctctgcct

SEQ ID NO: 164583 - DNA, 53 bp, Artificial
  Synthetic oligonucleotide
ccctcgtatttgtcccgcctttacaaacaggttacaaatcaaaacctctctga

SEQ ID NO: 164584 - DNA, 55 bp, Artificial
  Synthetic oligonucleotide
ccctctgtgctagttatctacctgcatcggaggaacatccaattggcgaacgagt

SEQ ID NO: 164585 - DNA, 55 bp, Artificial
  Synthetic oligonucleotide
ccctgcagggctataaggcgggcgacattcactgtacggaggtaattccggccga

SEQ ID NO: 164586 - DNA, 55 bp, Artificial
  Synthetic oligonucleotide
ccctgcattatccatagctctagcctctattgtgtgatgacctggagataaggtc

SEQ ID NO: 164587 - DNA, 55 bp, Artificial
  Synthetic oligonucleotide
ccctgcgctataagcattttcgcctgctgtaatacatcctggtagcagttagatg

SEQ ID NO: 164588 - DNA, 55 bp, Artificial
  Synthetic oligonucleotide
cccttcctaagacagtacctatagtatcttaggcttgtagactattaccatctac

SEQ ID NO: 164589 - DNA, 54 bp, Artificial
  Synthetic oligonucleotide
agctattactcttttaatagaagaatggcttagttaaatattttgtagttaata

SEQ ID NO: 164590 - DNA, 55 bp, Artificial
  Synthetic oligonucleotide
cccttctgaaaatgaattgtctgcattactgggagtaagccgtgttacggtacgg

SEQ ID NO: 164591 - DNA, 55 bp, Artificial
  Synthetic oligonucleotide
ccgacaaaactgcatccttccggaagactcgctattgtaaccggaacatcatagg

SEQ ID NO: 164592 - DNA, 55 bp, Artificial
  Synthetic oligonucleotide
ccgacaccacgattacagggctctggacggcctgtaagagcacgttccccacagc

SEQ ID NO: 164593 - DNA, 55 bp, Artificial
  Synthetic oligonucleotide
ccgactatgtacgaataacccataggatttcttcccataaggtattccatttgac

SEQ ID NO: 164594 - DNA, 55 bp, Artificial
  Synthetic oligonucleotide
ccgactgtaacatatcatctttacaagcccgtaagcccgcaaacatagctactcc

SEQ ID NO: 164595 - DNA, 55 bp, Artificial
  Synthetic oligonucleotide
ccgatgattgctcttaagattaatgtaatcgcactgattaccagatttcctacag

SEQ ID NO: 164596 - DNA, 55 bp, Artificial
  Synthetic oligonucleotide
ccgatttgcgttcataacactcggatatgacctcaaacaataactgcgctcctat

SEQ ID NO: 164597 - DNA, 55 bp, Artificial
  Synthetic oligonucleotide
ccgcaagaggtgtgataacaacatactcatcaggggctttgtccttgaacacacc

SEQ ID NO: 164598 - DNA, 55 bp, Artificial
  Synthetic oligonucleotide
ccgcaggcaaactcaatcccgctatttcaaagcttccacccagagttttccatcc

SEQ ID NO: 164599 - DNA, 55 bp, Artificial
  Synthetic oligonucleotide
ccgcataatagggtccttttgcgaaatgagcactgtatttcctctcaagcccggg

SEQ ID NO: 164600 - DNA, 60 bp, Artificial
  Synthetic oligonucleotide
agctagcaagtagtgttaatgcagctagtgcacctgtaactatacaggtagctagtacag

SEQ ID NO: 164601 - DNA, 55 bp, Artificial
  Synthetic oligonucleotide
cctgtaatagatggaacaggagctatatgaactaaccaacctaatgctacagcgg

SEQ ID NO: 164602 - DNA, 55 bp, Artificial
  Synthetic oligonucleotide
cctgtacaggcgtaacgcttgaaaaccggcttacagatatcagcctcaacgaggt

SEQ ID NO: 164603 - DNA, 55 bp, Artificial
  Synthetic oligonucleotide
cctgttccagcggcacataccgtattcatggcgaaatctgtaactaccccatttc

SEQ ID NO: 164604 - DNA, 53 bp, Artificial
  Synthetic oligonucleotide
ccttaaatttcaaggtttagcgtctcttttacgctctataactgtcaaactcg

SEQ ID NO: 164605 - DNA, 55 bp, Artificial
  Synthetic oligonucleotide
ccttacaccaagggcgtatgtggcacaggaataccagcggtatgcaaacgtgttt

SEQ ID NO: 164606 - DNA, 55 bp, Artificial
  Synthetic oligonucleotide
ccttacggactcagacaagggcttggtgctgacagctagtgcaaacctcataacg

SEQ ID NO: 164607 - DNA, 55 bp, Artificial
  Synthetic oligonucleotide
ccttatctccttgatgcaactgtcctattgagtcataatctgttcctggtccttt

SEQ ID NO: 164608 - DNA, 55 bp, Artificial
  Synthetic oligonucleotide
ccttcactgtaatcataccgtcggacgccagcttactgcttacaacctgacttag

SEQ ID NO: 164609 - DNA, 52 bp, Artificial
  Synthetic oligonucleotide
ccttccgaaagacctaatcccctctcccctataactgtatccaagcctttgg

SEQ ID NO: 164610 - DNA, 55 bp, Artificial
  Synthetic oligonucleotide
ccttcctgaagaattagccgaaaattgaacatttaatctaggccataagctactg

SEQ ID NO: 164611 - DNA, 52 bp, Artificial
  Synthetic oligonucleotide
gttaaaagtttataaaataggaagtggtagtaaagtactatttgcaggattc

SEQ ID NO: 164612 - DNA, 57 bp, Artificial
  Synthetic oligonucleotide
caggtagaagtgtaagtgtaggagataggataactgttttagatgttagttatagta

SEQ ID NO: 164613 - DNA, 55 bp, Artificial
  Synthetic oligonucleotide
ccttggcgagaatcatcggaaggtggaggctcacgacgccaatgttaaagcgtcc

SEQ ID NO: 164614 - DNA, 55 bp, Artificial
  Synthetic oligonucleotide
ccttgttcggttaaggtgagactgtcggccttccactctgtgccgactcgctgga

SEQ ID NO: 164615 - DNA, 55 bp, Artificial
  Synthetic oligonucleotide
cctttcgttatgaagcttcctgcctaccatgtaccgggagttaagaacgtggcgc

SEQ ID NO: 164616 - DNA, 55 bp, Artificial
  Synthetic oligonucleotide
ccttttgagctgggaatggcggcttaagtctaggcattcctctttcgccctcaag

SEQ ID NO: 164617 - DNA, 55 bp, Artificial
  Synthetic oligonucleotide
ccttttgtgcagtttgaaattggtgctgaccgacttacgcaaaacagtatgacca

SEQ ID NO: 164618 - DNA, 54 bp, Artificial
  Synthetic oligonucleotide
cgaaaagggattgactatacctagttcggagtttgtaaaggccgtctgtgaagc

SEQ ID NO: 164619 - DNA, 55 bp, Artificial
  Synthetic oligonucleotide
cgaaagatggtggctgtcgtggaaagggtcaagacttatacctaaatcacgcagg

SEQ ID NO: 164620 - DNA, 55 bp, Artificial
  Synthetic oligonucleotide
cgaaagtggttgtcactggacggattcagacggggtcatatacgaacagagacgg

SEQ ID NO: 164621 - DNA, 55 bp, Artificial
  Synthetic oligonucleotide
cgaagacccttcatgatctttccgccatttgttgcggggttacatgacatacgtc

SEQ ID NO: 164622 - DNA, 55 bp, Artificial
  Synthetic oligonucleotide
cgaagtagagcaaggaccaaaaggtcttcaagctgctaacgttgtaaagttaggc

SEQ ID NO: 164623 - DNA, 58 bp, Artificial
  Synthetic oligonucleotide
agcgccggccagctgctttgatttgagatacttttctattgaaagggggtgatagtta

SEQ ID NO: 164624 - DNA, 55 bp, Artificial
  Synthetic oligonucleotide
cgaagtcgctggatactgttaaaatcgtgctgaatacagcctatccaggtgcgag

SEQ ID NO: 164625 - DNA, 55 bp, Artificial
  Synthetic oligonucleotide
cgaatattaactcctgatggctaccttgtgaaaataattcctggagacgggcatt

SEQ ID NO: 164626 - DNA, 55 bp, Artificial
  Synthetic oligonucleotide
cgactatgcaagcacaacttgaggcaataatggatggcctatgggaaccatcaca

SEQ ID NO: 164627 - DNA, 54 bp, Artificial
  Synthetic oligonucleotide
cgagaacaagggacaacagccgagtttacaggtattctatgaccttgtaacccg

SEQ ID NO: 164628 - DNA, 55 bp, Artificial
  Synthetic oligonucleotide
cgagaaggggttagtcatgcgagaaatatctagtgggattcatttagatgtgggc

SEQ ID NO: 164629 - DNA, 54 bp, Artificial
  Synthetic oligonucleotide
cgagcaaccttccataactgtaagtactttattcttccccatgttggtaccttg

SEQ ID NO: 164630 - DNA, 55 bp, Artificial
  Synthetic oligonucleotide
cgagcttccggagcttgacactatggttatcgcagagcaaagaggggagactctt

SEQ ID NO: 164631 - DNA, 55 bp, Artificial
  Synthetic oligonucleotide
cgagtcggaaacctcatccattctacggtccatatccttaagagaatcttccgcg

SEQ ID NO: 164632 - DNA, 55 bp, Artificial
  Synthetic oligonucleotide
cgatacggggctgttagatttccctacatacccctcggtattgccgtcatcttag

SEQ ID NO: 164633 - DNA, 55 bp, Artificial
  Synthetic oligonucleotide
ccgtcgcaagtacctgtctcaagagaacggctaacaccagccactaactcacact

SEQ ID NO: 164634 - DNA, 60 bp, Artificial
  Synthetic oligonucleotide
gacagttcatttctgatagtccagtatgacctcaagctaagggtatgccagtacccttcc

SEQ ID NO: 164635 - DNA, 55 bp, Artificial
  Synthetic oligonucleotide
ccgtctcgcccctcgcaccgaatgtctttgacagcatgcgcagtatggcctggac

SEQ ID NO: 164636 - DNA, 53 bp, Artificial
  Synthetic oligonucleotide
ccgtcttccctgggcacaccgtttgctttgccgcctaaacccaccacaatgtt

SEQ ID NO: 164637 - DNA, 55 bp, Artificial
  Synthetic oligonucleotide
ccgtgaggcaggtctcaatgatgtagtggttgtaaacggacgttatggactcgga

SEQ ID NO: 164638 - DNA, 55 bp, Artificial
  Synthetic oligonucleotide
ccgttagggatttagcattgtttagagtagcttatagatgtggtttaagagcctc

SEQ ID NO: 164639 - DNA, 55 bp, Artificial
  Synthetic oligonucleotide
ccgttcagtcgtatacagaatgtgtaggacataagcctagagggatatggttacc

SEQ ID NO: 164640 - DNA, 55 bp, Artificial
  Synthetic oligonucleotide
ccgttggtgcaggaacagctactatcactgtaacttgcggtgacatcacaaagac

SEQ ID NO: 164641 - DNA, 55 bp, Artificial
  Synthetic oligonucleotide
cctaagtaatctgtccaatcagaatagttcttttctccagtagttgctccacctg

SEQ ID NO: 164642 - DNA, 54 bp, Artificial
  Synthetic oligonucleotide
cctacaagcttttcaccattccaaagttcaaactcagccccttcaagtggtctt

SEQ ID NO: 164643 - DNA, 55 bp, Artificial
  Synthetic oligonucleotide
cctacagcatagcattccgctatgtttccagcacaactacctacaagtcctccaa

SEQ ID NO: 164644 - DNA, 55 bp, Artificial
  Synthetic oligonucleotide
cctagatctataaggtattacccggaaggagaatttgcatctagcattatagggt

SEQ ID NO: 164645 - DNA, 56 bp, Artificial
  Synthetic oligonucleotide
gggctatacatggaagaggtatttcagtaaataaatcctctggtttacttgcctta

SEQ ID NO: 164646 - DNA, 55 bp, Artificial
  Synthetic oligonucleotide
cctattggctgtgtatttggaggagctttgcatgactatatgagtggaatgatta

SEQ ID NO: 164647 - DNA, 55 bp, Artificial
  Synthetic oligonucleotide
cctatttagcacatgacttaaagactccgcttacaagcatcattgggtatctaac

SEQ ID NO: 164648 - DNA, 55 bp, Artificial
  Synthetic oligonucleotide
cctcaacgctttaacgggcgtacacgctgtcgtctactatatttcgagacagtgc

SEQ ID NO: 164649 - DNA, 55 bp, Artificial
  Synthetic oligonucleotide
cctcacccaattttacagtatgggcttaggattgagaacgaaccagtgatgactg

SEQ ID NO: 164650 - DNA, 55 bp, Artificial
  Synthetic oligonucleotide
cctcgtttggtcttaacccgcatgaatagagcagccgcaaaaggacggatgctgt

SEQ ID NO: 164651 - DNA, 55 bp, Artificial
  Synthetic oligonucleotide
cctctataacgccttcgatatatgcaatacagtctaatacccctatgtcattatc

SEQ ID NO: 164652 - DNA, 55 bp, Artificial
  Synthetic oligonucleotide
cctctcactgtctggatcattcgtgttgattggtatgcttttgacataaagcctg

SEQ ID NO: 164653 - DNA, 54 bp, Artificial
  Synthetic oligonucleotide
cctctgccgcggttcttccggaaaagcgtattaacgtctgtctgctaagaaaac

SEQ ID NO: 164654 - DNA, 55 bp, Artificial
  Synthetic oligonucleotide
cctgacagattgctcatcgaaggaatcggaatgcaggcacattattggaccggag

SEQ ID NO: 164655 - DNA, 55 bp, Artificial
  Synthetic oligonucleotide
cctgattcaactaaacttatttgtcccggagtaattctatccccagctagatctt

SEQ ID NO: 164656 - DNA, 59 bp, Artificial
  Synthetic oligonucleotide
agccctataagggcatactacctgcgttgcgtcttaagaagcttagattagtgccagcc

SEQ ID NO: 164657 - DNA, 55 bp, Artificial
  Synthetic oligonucleotide
cctgcatcatatcacctagaataatcctggtatattcattccacctgtaagtttg

SEQ ID NO: 164658 - DNA, 53 bp, Artificial
  Synthetic oligonucleotide
cctggaatgttaaggtttgctctacaaggggacactgttaaccttgaaaatac

SEQ ID NO: 164659 - DNA, 55 bp, Artificial
  Synthetic oligonucleotide
cctggatcaggtgtgtgacgccgccagaatagctggacaagtgtttgacgggtcc

SEQ ID NO: 164660 - DNA, 55 bp, Artificial
  Synthetic oligonucleotide
cctggatcatttactggactcagaataggtatggctacaattaaggggttaagct

SEQ ID NO: 164661 - DNA, 55 bp, Artificial
  Synthetic oligonucleotide
cctggcacctatggaatcggttaatccgaataccagacatccggccgcagtcagg

SEQ ID NO: 164662 - DNA, 55 bp, Artificial
  Synthetic oligonucleotide
cctggcagtacttgttatggggacaggacaagaacagtggggtgccaatagatgg

SEQ ID NO: 164663 - DNA, 55 bp, Artificial
  Synthetic oligonucleotide
cctgggtaggagttatagtaggggagttcttagtatctagatatggtattggata

SEQ ID NO: 164664 - DNA, 55 bp, Artificial
  Synthetic oligonucleotide
cctggtaatgaagctgcctcaaatttgtctgaactatgagtataagctaaggcgg

SEQ ID NO: 164665 - DNA, 55 bp, Artificial
  Synthetic oligonucleotide
cccagcagaccttttcgttgtgccaaactaattcctcgcctatgaactccttatc

SEQ ID NO: 164666 - DNA, 55 bp, Artificial
  Synthetic oligonucleotide
cccataaaggtcttctatttccgcttgtatatcacgtgtagacataccccgtgca

SEQ ID NO: 164667 - DNA, 60 bp, Artificial
  Synthetic oligonucleotide
catagtggttggaagccacgggattaaatgcgacacggatacctcaatggctccaagcca

SEQ ID NO: 164668 - DNA, 55 bp, Artificial
  Synthetic oligonucleotide
ccatccggtgttgttaccttaaagtatccacttccatcgattgctaaagcagtct

SEQ ID NO: 164669 - DNA, 55 bp, Artificial
  Synthetic oligonucleotide
ccatcagctatgattagcatatcataaatcggttgatcttgtctcgttctccagt

SEQ ID NO: 164670 - DNA, 55 bp, Artificial
  Synthetic oligonucleotide
cccatacctctaacttcaagcattccaaaagttatctctggcgatctacctatta

SEQ ID NO: 164671 - DNA, 55 bp, Artificial
  Synthetic oligonucleotide
ccccgtaaagctcataacacgcttttgcattaggaagcataaagacacatctatc

SEQ ID NO: 164672 - DNA, 55 bp, Artificial
  Synthetic oligonucleotide
cccatagcaactttggtcattggtgagttagcagcatgcatgtatcctcctacag

SEQ ID NO: 164673 - DNA, 55 bp, Artificial
  Synthetic oligonucleotide
cccaacaattgcattaccgcggataaacgcacaatgtctcacttctgcgtctttc

SEQ ID NO: 164674 - DNA, 55 bp, Artificial
  Synthetic oligonucleotide
ccatctatggacataccacctatgcattcagttacccagttagggtctccagcaa

SEQ ID NO: 164675 - DNA, 55 bp, Artificial
  Synthetic oligonucleotide
cccatgggttctttcttccattagcagctcttaaatttgccatcggtgactctcc

SEQ ID NO: 164676 - DNA, 55 bp, Artificial
  Synthetic oligonucleotide
ccataggctatttccaatccaactctactatgtaacgcaataatagtgtgctcac

SEQ ID NO: 164677 - DNA, 55 bp, Artificial
  Synthetic oligonucleotide
cccattccagtcgctgcttctacaatggaagcatccacattattaagcccatcta

SEQ ID NO: 164678 - DNA, 60 bp, Artificial
  Synthetic oligonucleotide
gaatgggcagaaagtaacgaaagatagcatagatagcttaaaattgggctattcatgcat

SEQ ID NO: 164679 - DNA, 55 bp, Artificial
  Synthetic oligonucleotide
cccattgtagatagtaatccagggagtcctatagtatgatcaccatgtgaatggg

SEQ ID NO: 164680 - DNA, 55 bp, Artificial
  Synthetic oligonucleotide
ccccgcataaaagtagtgatacaagtatcagacatcctactacagatttaggaca

SEQ ID NO: 164681 - DNA, 55 bp, Artificial
  Synthetic oligonucleotide
cccaatcttgccagcctatgttttgcacatgcgctctatattgaacactgtagcc

SEQ ID NO: 164682 - DNA, 55 bp, Artificial
  Synthetic oligonucleotide
cccattgtatagttactgctctagttggacagacagttggacattctccacatcc

SEQ ID NO: 164683 - DNA, 55 bp, Artificial
  Synthetic oligonucleotide
ccccaccatccgtctccggtggttgtgatagctgcttcctggtcatccactttca

SEQ ID NO: 164684 - DNA, 55 bp, Artificial
  Synthetic oligonucleotide
cccaactaacgccacaggagcgactagccttactgtagatagtgttaaagcacct

SEQ ID NO: 164685 - DNA, 55 bp, Artificial
  Synthetic oligonucleotide
ccccaccccatccaagggccatagtatcatgtgttccaggaattgataaactaga

SEQ ID NO: 164686 - DNA, 55 bp, Artificial
  Synthetic oligonucleotide
ccatggagaaccgttgataacattggtagtaaagttgcagatttgcgtacagtat

SEQ ID NO: 164687 - DNA, 55 bp, Artificial
  Synthetic oligonucleotide
ccatgcacgtctcactgagcctggagcactaaatggcgggaaagttgttccattc

SEQ ID NO: 164688 - DNA, 55 bp, Artificial
  Synthetic oligonucleotide
ccccgtgggaaccatgcccacgaagcagggcgtacaacggacagataggtcctac

SEQ ID NO: 164689 - DNA, 56 bp, Artificial
  Synthetic oligonucleotide
gaatctggtttaagttccttcataaaagaagtcatacctgttgattctaactgaaa

SEQ ID NO: 164690 - DNA, 55 bp, Artificial
  Synthetic oligonucleotide
cccactgatagtgtgacatcatcttcctgcaatccatttataccactagctcctg

SEQ ID NO: 164691 - DNA, 55 bp, Artificial
  Synthetic oligonucleotide
cccactctaatctcttaaggcgagacccaccaattaccatactattacttctggt

SEQ ID NO: 164692 - DNA, 55 bp, Artificial
  Synthetic oligonucleotide
cccagacatcaacaacagttgtctgagaatccatcgcactgtacaaaagctcagg

SEQ ID NO: 164693 - DNA, 55 bp, Artificial
  Synthetic oligonucleotide
ccattaattccgctaaatccaccctgaagagcaattgccgcccctgatatgccag

SEQ ID NO: 164694 - DNA, 54 bp, Artificial
  Synthetic oligonucleotide
agcgtgtgcctttctgtttggagagacgggggcaatagctggcagcagatggtg

SEQ ID NO: 164695 - DNA, 54 bp, Artificial
  Synthetic oligonucleotide
cgcattattctttcacgctttggttgagttatgctaccatgaagcttttcacag

SEQ ID NO: 164696 - DNA, 54 bp, Artificial
  Synthetic oligonucleotide
tgcggacagtgtggctccgtgcgtctcatcaaacatggcgctcagttcgtgtcc

SEQ ID NO: 164697 - DNA, 52 bp, Artificial
  Synthetic oligonucleotide
aatttgggtttgggcataaaaacttatatagctcaggtttcttttcaagttg

SEQ ID NO: 164698 - DNA, 54 bp, Artificial
  Synthetic oligonucleotide
agctaattatccaggatcagttcagcatgctacaggaccaagtttaattgctcg

SEQ ID NO: 164699 - DNA, 54 bp, Artificial
  Synthetic oligonucleotide
caaaggtgaaggtataagcacgcatgtgacttctggcgatgctatggttcaaat

SEQ ID NO: 164700 - DNA, 53 bp, Artificial
  Synthetic oligonucleotide
ggggacttgatgattgggagaaccttttaagcataaaagtaaattataagtta

SEQ ID NO: 164701 - DNA, 54 bp, Artificial
  Synthetic oligonucleotide
acccggtattcactctgcattatgctactccttccgcttcgctctccatcttcg

SEQ ID NO: 164702 - DNA, 54 bp, Artificial
  Synthetic oligonucleotide
gcatataagatccaagagggaagatccatgggcgataaagtttttagttatgcg

SEQ ID NO: 164703 - DNA, 54 bp, Artificial
  Synthetic oligonucleotide
agtcttgctgcctccaggattgtggaacccttgggagcttcgactgcaatgccg

SEQ ID NO: 164704 - DNA, 54 bp, Artificial
  Synthetic oligonucleotide
tgatgagatcggggaacctcttatacatcttctaaggaatgcagtagatcatgg

SEQ ID NO: 164705 - DNA, 54 bp, Artificial
  Synthetic oligonucleotide
cctaatcagagcaatcctaatctcatctgttaggccctctgcacatgtataccc

SEQ ID NO: 164706 - DNA, 54 bp, Artificial
  Synthetic oligonucleotide
acccagacgccatttgtaacagagcggatgcggttcactcataagattcttaga

SEQ ID NO: 164707 - DNA, 54 bp, Artificial
  Synthetic oligonucleotide
aggagttttaaaccgcagaacagggcttatgacattggaaagggaactatctct

SEQ ID NO: 164708 - DNA, 54 bp, Artificial
  Synthetic oligonucleotide
acaactctttcctacatgtacatcgtgaaccccttcatgttctgtagtttgggc

SEQ ID NO: 164709 - DNA, 54 bp, Artificial
  Synthetic oligonucleotide
tacggtatttaccaccggatcataacggtatcctaccagtgaaacatagggaga

SEQ ID NO: 164710 - DNA, 54 bp, Artificial
  Synthetic oligonucleotide
tatccgtagaaggacttatgatgctgggatcttgtcccccaaaagtatatagtt

SEQ ID NO: 164711 - DNA, 58 bp, Artificial
  Synthetic oligonucleotide
ggggctaatcaagttttatcaagctatgtatttacaatctgtcgtaaatctcgtataa

SEQ ID NO: 164712 - DNA, 54 bp, Artificial
  Synthetic oligonucleotide
ggcacatcctacctataatgagtccatagcggaagcattggaggattgtaacca

SEQ ID NO: 164713 - DNA, 54 bp, Artificial
  Synthetic oligonucleotide
ctacaaggggggggagcgagccgtattcctaattcaccaaaccattaacagatg

SEQ ID NO: 164714 - DNA, 54 bp, Artificial
  Synthetic oligonucleotide
ggcaatctttccaaggtctgagcctcttgtgtaaagacatatactcatctccga

SEQ ID NO: 164715 - DNA, 54 bp, Artificial
  Synthetic oligonucleotide
ggcaagggaaatcaagtctctcatgaaagagaatgggttctcattcgaggggag

SEQ ID NO: 164716 - DNA, 54 bp, Artificial
  Synthetic oligonucleotide
gctttacgaagcagttaaatgtcagttagcaaatagaagacagggtactcagtc

SEQ ID NO: 164717 - DNA, 54 bp, Artificial
  Synthetic oligonucleotide
aacagttcacctaattgaagaaccacttgcagccgctataggtgcaggactgga

SEQ ID NO: 164718 - DNA, 54 bp, Artificial
  Synthetic oligonucleotide
gattcggacggaaggtatatctgatcggctccggacagaccggttcaaaatttg

SEQ ID NO: 164719 - DNA, 54 bp, Artificial
  Synthetic oligonucleotide
catccgtccagctgctgtctaagtccaggctaccaacctgagagcgaatggact

SEQ ID NO: 164720 - DNA, 54 bp, Artificial
  Synthetic oligonucleotide
tgtgtatcagctagaccatgaacacaaacagtacctttacaagccacaacagga

SEQ ID NO: 164721 - DNA, 52 bp, Artificial
  Synthetic oligonucleotide
cttctagcttaattaagactaacaattctggcgttattaaacttccaacctt

SEQ ID NO: 164722 - DNA, 60 bp, Artificial
  Synthetic oligonucleotide
gttacataaccctgtcttactacattgccagctggatactgtactaaagctaattgcttg

SEQ ID NO: 164723 - DNA, 54 bp, Artificial
  Synthetic oligonucleotide
ggggttctgaaagcctatacgtcaagagttggcgcaggaccgttcccgacggaa

SEQ ID NO: 164724 - DNA, 54 bp, Artificial
  Synthetic oligonucleotide
gtattaagaaataccgttacattccggtctatctgaggaaagtaacagtcccat

SEQ ID NO: 164725 - DNA, 54 bp, Artificial
  Synthetic oligonucleotide
gcttgtgatatattacccagatcatagtatatttaaagcttgcataacaactta

SEQ ID NO: 164726 - DNA, 54 bp, Artificial
  Synthetic oligonucleotide
tagagtattaagggttgtaggttcatataatagtaaatctgattcttatgttaa

SEQ ID NO: 164727 - DNA, 54 bp, Artificial
  Synthetic oligonucleotide
tgtataaaagactcatcctgtgttctacacctggagaaccgtttggtatcttac

SEQ ID NO: 164728 - DNA, 54 bp, Artificial
  Synthetic oligonucleotide
gcacagctatagttgagaatctgtccaacgtacccatttctgctgccgtaagaa

SEQ ID NO: 164729 - DNA, 54 bp, Artificial
  Synthetic oligonucleotide
gtctgtgtctgaggttaaattgcggatagataagatgcttgctgaggggtacga

SEQ ID NO: 164730 - DNA, 54 bp, Artificial
  Synthetic oligonucleotide
gtcttgcagcaagtatccttggaaatagcgtagtttcctttcttggaattaaac

SEQ ID NO: 164731 - DNA, 54 bp, Artificial
  Synthetic oligonucleotide
caatacatctactctagctaaaacctctgttgcacaaagctcttgtacgagtgt

SEQ ID NO: 164732 - DNA, 54 bp, Artificial
  Synthetic oligonucleotide
caataatgatattgctaataccttgttatttgataagatactgctttcctctgt

SEQ ID NO: 164733 - DNA, 54 bp, Artificial
  Synthetic oligonucleotide
gaaaatatagcggtgggtctagcagttggagttttaggagcgttaatgccagat

SEQ ID NO: 164734 - DNA, 56 bp, Artificial
  Synthetic oligonucleotide
agcaactatagcactagttcctatagtcttagaaaactccgttgttttagataaga

SEQ ID NO: 164735 - DNA, 54 bp, Artificial
  Synthetic oligonucleotide
catgaaccaccgcatcttatagaaactgagcttactagagatggaattcactat

SEQ ID NO: 164736 - DNA, 54 bp, Artificial
  Synthetic oligonucleotide
cggtcattttccctgctggacaattcttagcatgcaacatagtctgtgcaactc

SEQ ID NO: 164737 - DNA, 54 bp, Artificial
  Synthetic oligonucleotide
tagcttgttcatcgcagcctactaatcctatgcttaatgaagcgatcatagtaa

SEQ ID NO: 164738 - DNA, 54 bp, Artificial
  Synthetic oligonucleotide
cgacgtttacactgccgtatgtatcctggattctgattccccatattgcgtcaa

SEQ ID NO: 164739 - DNA, 54 bp, Artificial
  Synthetic oligonucleotide
ggagacagagtctggcagtggacaccttgggcctttggggttagattttgtgac

SEQ ID NO: 164740 - DNA, 51 bp, Artificial
  Synthetic oligonucleotide
agggtatccttaataggtggaggaagagatttaagggtaggagaagttacc

SEQ ID NO: 164741 - DNA, 54 bp, Artificial
  Synthetic oligonucleotide
atctacagccaaagtgaaattagcaaccgctgttccattccctggagtaaattt

SEQ ID NO: 164742 - DNA, 54 bp, Artificial
  Synthetic oligonucleotide
acactgcctatggggcacttataaatcatagagctgtatgtcaaggttacgcag

SEQ ID NO: 164743 - DNA, 54 bp, Artificial
  Synthetic oligonucleotide
aagtcaaatgtagtttggggccggataatatatagaacgtaaatgcgaggcaca

SEQ ID NO: 164744 - DNA, 54 bp, Artificial
  Synthetic oligonucleotide
tcagctgtatgatgataggacgtaaatccaataagtttggcaaagctgttcgac

SEQ ID NO: 164745 - DNA, 57 bp, Artificial
  Synthetic oligonucleotide
gggtatgtggagctgactaccccagtcaaccccatagaccacccctggtctgtctac

SEQ ID NO: 164746 - DNA, 54 bp, Artificial
  Synthetic oligonucleotide
tcagctcaaggattaccctcgttgtcctatctgtaacaaaggaacctttattca

SEQ ID NO: 164747 - DNA, 54 bp, Artificial
  Synthetic oligonucleotide
ctttagtgctattgaagcaagggtaatcgcacacttagccaaggaaagatggcg

SEQ ID NO: 164748 - DNA, 54 bp, Artificial
  Synthetic oligonucleotide
agtccaccttgtctcttactttctcaaatttgtcccaggatacatatccactgg

SEQ ID NO: 164749 - DNA, 54 bp, Artificial
  Synthetic oligonucleotide
gcgtctgatgctggtgatccatactgcctggacctgcgacggaacgatacagcc

SEQ ID NO: 164750 - DNA, 54 bp, Artificial
  Synthetic oligonucleotide
taattgtacacacgtcgaagctggagaggagtttgtctatgacttcaatccccg

SEQ ID NO: 164751 - DNA, 54 bp, Artificial
  Synthetic oligonucleotide
tcacagctctgaggatgacttacaaatcgtgacaaggcgcttagcatcttgcca

SEQ ID NO: 164752 - DNA, 54 bp, Artificial
  Synthetic oligonucleotide
cattattccagaagaataatggggctcatgctcaaacacggcgaacgtgtatat

SEQ ID NO: 164753 - DNA, 54 bp, Artificial
  Synthetic oligonucleotide
tatctcctagtcttgttaccgcatgcttctaggtgcgttaccactacgctacac

SEQ ID NO: 164754 - DNA, 54 bp, Artificial
  Synthetic oligonucleotide
agtatagctgaattctcaggaatgaaagatccagttataatgggagctactgac

SEQ ID NO: 164755 - DNA, 54 bp, Artificial
  Synthetic oligonucleotide
tacataacttatgctcgtgtcaataccgattgtattagtcgcgccgtcccaggt

SEQ ID NO: 164756 - DNA, 55 bp, Artificial
  Synthetic oligonucleotide
gaactccagcctaatgtaggtatatcctacgagaacttagcctggttttactact

SEQ ID NO: 164757 - DNA, 54 bp, Artificial
  Synthetic oligonucleotide
taccgcttgactaagttcaagcccgtagcttcgtggtaagtttagcccgttaca

SEQ ID NO: 164758 - DNA, 54 bp, Artificial
  Synthetic oligonucleotide
tatgttaaaggggatagatgcatcagagcaccaaggagaaattggctggaaggc

SEQ ID NO: 164759 - DNA, 54 bp, Artificial
  Synthetic oligonucleotide
gctcgaaagaggaacgtccgtcgaaggagattctcaccctcctggactttccga

SEQ ID NO: 164760 - DNA, 54 bp, Artificial
  Synthetic oligonucleotide
ctaataagaggattatcggatgtatcccctcatcctaaagcatataaggttcag

SEQ ID NO: 164761 - DNA, 54 bp, Artificial
  Synthetic oligonucleotide
attaactacgtcgctccctctgaccgcttcttccacagaggctgccactttaac

SEQ ID NO: 164762 - DNA, 54 bp, Artificial
  Synthetic oligonucleotide
catgtccattatgtttgtaaatggaactattagtcttaacaaagtttctatcac

SEQ ID NO: 164763 - DNA, 54 bp, Artificial
  Synthetic oligonucleotide
gttattagggagcgtaactcaggttatggattagcgtgcagtcatgcaggtgcc

SEQ ID NO: 164764 - DNA, 54 bp, Artificial
  Synthetic oligonucleotide
ataagcatacttagatccttgacctataggatcactgtccacagcccctattcc

SEQ ID NO: 164765 - DNA, 54 bp, Artificial
  Synthetic oligonucleotide
acatgctcgtaataacctagcattaaaggtatgtccatattttgtcctaaataa

SEQ ID NO: 164766 - DNA, 54 bp, Artificial
  Synthetic oligonucleotide
atatccagcaccttcggtgtctcatatgaggaagcatctccgtttatggcaggc

SEQ ID NO: 164767 - DNA, 55 bp, Artificial
  Synthetic oligonucleotide
catggttgggcagaattttacttaccttattatggttggattatagccgaaccta

SEQ ID NO: 164768 - DNA, 54 bp, Artificial
  Synthetic oligonucleotide
atggactccatgacatttaaaagctgtgcccttataatgcaggaccaatacgga

SEQ ID NO: 164769 - DNA, 54 bp, Artificial
  Synthetic oligonucleotide
ccaacattctcacttcgcataagattaattgcactcgaaaattgcacttgacgg

SEQ ID NO: 164770 - DNA, 54 bp, Artificial
  Synthetic oligonucleotide
gccttggttatcaaccatatgcataaattcatgtagaaaagcactaggatcacg

SEQ ID NO: 164771 - DNA, 54 bp, Artificial
  Synthetic oligonucleotide
cttaatttgatacttaccctaccttctttaacactaactatatccgccatatac

SEQ ID NO: 164772 - DNA, 54 bp, Artificial
  Synthetic oligonucleotide
tcctactactcacggagcaataggagcaaccactaaccttgcgccagctcttac

SEQ ID NO: 164773 - DNA, 54 bp, Artificial
  Synthetic oligonucleotide
atgcgattctcttatattatgcggtattaatctccctttcggaaggctatcccc

SEQ ID NO: 164774 - DNA, 53 bp, Artificial
  Synthetic oligonucleotide
gtttcaggttgaaattaagtagaccatggcgtaagacctacgttacaggtaaa

SEQ ID NO: 164775 - DNA, 54 bp, Artificial
  Synthetic oligonucleotide
ggaggtacgggaactattggtcacggattaataagagaacttgtgcgtcacgaa

SEQ ID NO: 164776 - DNA, 54 bp, Artificial
  Synthetic oligonucleotide
atgattgaataatttcggcttatttatttgaactttatagttatcaaattctac

SEQ ID NO: 164777 - DNA, 54 bp, Artificial
  Synthetic oligonucleotide
taagcccatatagctaattgagtacaatatctatattcatctgctgatattccc

SEQ ID NO: 164778 - DNA, 60 bp, Artificial
  Synthetic oligonucleotide
catgtgaaaacatctcccacatttcgtctgcagacttcaaatagaactgatctgaaggat

SEQ ID NO: 164779 - DNA, 54 bp, Artificial
  Synthetic oligonucleotide
tccatacaaaccgcctactgcatgtgcaattgcatgaacatatcctacgtagga

SEQ ID NO: 164780 - DNA, 54 bp, Artificial
  Synthetic oligonucleotide
atcttcccgaactggtatgcggataaggatgcagaattcgtaaatcttcgtgca

SEQ ID NO: 164781 - DNA, 54 bp, Artificial
  Synthetic oligonucleotide
ctttacttacacctcctgttctagcataaactctacctgaaagggacgcctcta

SEQ ID NO: 164782 - DNA, 54 bp, Artificial
  Synthetic oligonucleotide
tcatatctattagtttcagttccattaagagatacttctaatactatagcttca

SEQ ID NO: 164783 - DNA, 54 bp, Artificial
  Synthetic oligonucleotide
ttttcaaaagttcttctgattgtgctgttttctgagcgccttcattcacaagag

SEQ ID NO: 164784 - DNA, 51 bp, Artificial
  Synthetic oligonucleotide
aaaacggcggaaagctccctgttataacctcttgtagtccggggtggataa

SEQ ID NO: 164785 - DNA, 54 bp, Artificial
  Synthetic oligonucleotide
ttcccctatgtagccacaatgggatgggtagctatcggacagattattgcatgc

SEQ ID NO: 164786 - DNA, 54 bp, Artificial
  Synthetic oligonucleotide
gtaacataactccaagggacttctacatactccctactactgaataggcctagc

SEQ ID NO: 164787 - DNA, 54 bp, Artificial
  Synthetic oligonucleotide
cttaggcttaataactgcagactgtgatgatgttacgtatacagctcttgacga

SEQ ID NO: 164788 - DNA, 54 bp, Artificial
  Synthetic oligonucleotide
acggagctcataccggactggctggcatttatccggctttcggacccgcttaat

SEQ ID NO: 164789 - DNA, 60 bp, Artificial
  Synthetic oligonucleotide
ggtatcacactaactatgactatgtcaaattatagtcatagttaggtacgcaaaagtcat

SEQ ID NO: 164790 - DNA, 54 bp, Artificial
  Synthetic oligonucleotide
cccggacaaagtgtaccaggaggacctatttgtggaggaactaacactggatca

SEQ ID NO: 164791 - DNA, 54 bp, Artificial
  Synthetic oligonucleotide
caggccaaatattatagcaagaagtctgaaaacacaaagaacgaggacagtagg

SEQ ID NO: 164792 - DNA, 54 bp, Artificial
  Synthetic oligonucleotide
agcccacttattgttaccattacacccaccacaattacggttgtgaaacttcta

SEQ ID NO: 164793 - DNA, 54 bp, Artificial
  Synthetic oligonucleotide
ttgcggctgacagggaaccactcatgtaaaacaggcacccgacgggaagtacgc

SEQ ID NO: 164794 - DNA, 52 bp, Artificial
  Synthetic oligonucleotide
aaaagttatttcggcacaagggagtcctccgttataaagggcttgcgcaagg

SEQ ID NO: 164795 - DNA, 54 bp, Artificial
  Synthetic oligonucleotide
ccagttccggatttgacatgttcgtcacaccgattcgtcggtcgattgtagcgg

SEQ ID NO: 164796 - DNA, 54 bp, Artificial
  Synthetic oligonucleotide
aaaatattccatctgataaggttgcatatgggaatccatgcagagtagttaggg

SEQ ID NO: 164797 - DNA, 54 bp, Artificial
  Synthetic oligonucleotide
ggggatcttacgaacacaactaggcttctactgataaattgagaggagagcata

SEQ ID NO: 164798 - DNA, 54 bp, Artificial
  Synthetic oligonucleotide
ttattgccactgctggaacagaaattaaccccgcagtgcttccctgtgaattag

SEQ ID NO: 164799 - DNA, 54 bp, Artificial
  Synthetic oligonucleotide
tttatgttgggagtagttgtgcatataacatgagagctagaagtagtaaatgga

SEQ ID NO: 164800 - DNA, 57 bp, Artificial
  Synthetic oligonucleotide
catttcatttcacagaacttaatgatccaacaggaatgtatttaggtactactaaaa

SEQ ID NO: 164801 - DNA, 54 bp, Artificial
  Synthetic oligonucleotide
tttcatcaggcagttgaacccgccggtacatatccgcatcctccagtacacatc

SEQ ID NO: 164802 - DNA, 54 bp, Artificial
  Synthetic oligonucleotide
cctggctataccatttcttatagccatcgtaactgtaattcctaatacaccacc

SEQ ID NO: 164803 - DNA, 53 bp, Artificial
  Synthetic oligonucleotide
gtaggttgagttgtttggttactgcctgtaaattctcccgtggaggttcctag

SEQ ID NO: 164804 - DNA, 54 bp, Artificial
  Synthetic oligonucleotide
ttttgccgcactccagatatacctcctgttttggagccatcagagcggtatgga

SEQ ID NO: 164805 - DNA, 54 bp, Artificial
  Synthetic oligonucleotide
ggttggagctggagcatcagcagctactattacaacagctttaatgtctaggtt

SEQ ID NO: 164806 - DNA, 54 bp, Artificial
  Synthetic oligonucleotide
gatgccataagtggtagttacagagtatctgaaattccagtaacaagtacagct

SEQ ID NO: 164807 - DNA, 54 bp, Artificial
  Synthetic oligonucleotide
gaagtgcaaacctgccaagtttactctgcagtagatagaggcttcgaaactgta

SEQ ID NO: 164808 - DNA, 54 bp, Artificial
  Synthetic oligonucleotide
cacgaagctccccgacagttgtcaccttgccgaagggtactctgcgcataagcg

SEQ ID NO: 164809 - DNA, 54 bp, Artificial
  Synthetic oligonucleotide
ttgaattcaaaacaagcggaaacagtgggggtatgtttccaatgcttgctaagg

SEQ ID NO: 164810 - DNA, 54 bp, Artificial
  Synthetic oligonucleotide
cttgctatcttgaaggtaggaatgtgtccattgactctatctcccatttctata

SEQ ID NO: 164811 - DNA, 54 bp, Artificial
  Synthetic oligonucleotide
catttctccgttttggcattttgccggttcggcattttgtagtttcggtgaatc

SEQ ID NO: 164812 - DNA, 54 bp, Artificial
  Synthetic oligonucleotide
gaccatccatttgactcagatatgtatccgacttcagtcccatatcctagtgtt

SEQ ID NO: 164813 - DNA, 53 bp, Artificial
  Synthetic oligonucleotide
atcgtgggagcgcagcttttgcatatacaggcgcccttcctaaatcgggcggc

SEQ ID NO: 164814 - DNA, 53 bp, Artificial
  Synthetic oligonucleotide
aagtaatggcttcatgggataggttggagtcgatggtatatagcgatcttatg

SEQ ID NO: 164815 - DNA, 53 bp, Artificial
  Synthetic oligonucleotide
aaagacggagctatacttatgctggttatagatggtaggcaagcatctagctt

SEQ ID NO: 164816 - DNA, 53 bp, Artificial
  Synthetic oligonucleotide
acatgcggggcgtatataacagcaacattaggtgtatctgcactaacatatgg

SEQ ID NO: 164817 - DNA, 53 bp, Artificial
  Synthetic oligonucleotide
gagccacaacatcattaatgctatttgtaataccagttccgaggctagtattc

SEQ ID NO: 164818 - DNA, 53 bp, Artificial
  Synthetic oligonucleotide
gaggtagcaccgttagcgatttcctctatagccttcgatatttccttagaggt

SEQ ID NO: 164819 - DNA, 53 bp, Artificial
  Synthetic oligonucleotide
tctaccttcgaaaattgacgaagtagcaggagtggagtttcaagcctacgatt

SEQ ID NO: 164820 - DNA, 53 bp, Artificial
  Synthetic oligonucleotide
ttgtaccacatgttcaacacagtgggaaaacgagtggcagtgatcctgacgac

SEQ ID NO: 164821 - DNA, 53 bp, Artificial
  Synthetic oligonucleotide
agataccaaatacggcacctgccacaacagcaccattttccgcatcctgtttt

SEQ ID NO: 164822 - DNA, 53 bp, Artificial
  Synthetic oligonucleotide
ccaaaggactaaagaagggttgagaagtgctaaagctagggggagaaatggag

SEQ ID NO: 164823 - DNA, 53 bp, Artificial
  Synthetic oligonucleotide
ggactgcaaatatttgttccggtagctgcgaagtttgactatgacactgcccg

SEQ ID NO: 164824 - DNA, 53 bp, Artificial
  Synthetic oligonucleotide
tttaccaggaaccttaaatgtctcctgtacaattccggttgtaacagaagcac

SEQ ID NO: 164825 - DNA, 53 bp, Artificial
  Synthetic oligonucleotide
tctccagtagttgctccacctgtagcatagttagttaatggtacacctaactt

SEQ ID NO: 164826 - DNA, 53 bp, Artificial
  Synthetic oligonucleotide
cagcattattatatctatatctgcaatagtctaataaaagagttttagccagg

SEQ ID NO: 164827 - DNA, 53 bp, Artificial
  Synthetic oligonucleotide
acattaccctgcagttaatacttcctgcatagtctctcataaaacgaagtact

SEQ ID NO: 164828 - DNA, 53 bp, Artificial
  Synthetic oligonucleotide
agagtagaagcacggagccgggtaaagcgttcctgcccctctgcccgaaagct

SEQ ID NO: 164829 - DNA, 52 bp, Artificial
  Synthetic oligonucleotide
gttttcgggcatagcgatacctcctatcgttcaccccggtcgggggcggttc

SEQ ID NO: 164830 - DNA, 53 bp, Artificial
  Synthetic oligonucleotide
cagattcgcaagctctgcgggaaaaggcggtttacactcgcccatgagtgcgc

SEQ ID NO: 164831 - DNA, 53 bp, Artificial
  Synthetic oligonucleotide
ccctcgatcgatgccgtaagcgcacttccctctccgcagacaaatgcccccgc

SEQ ID NO: 164832 - DNA, 53 bp, Artificial
  Synthetic oligonucleotide
cagccaatcggatgaaccgaaaagctgtactcccgttttgcgtgacagaaagt

SEQ ID NO: 164833 - DNA, 59 bp, Artificial
  Synthetic oligonucleotide
accaccgatagcagctccgttagatggaaatagcgacttcttagacaagctatttaaga

SEQ ID NO: 164834 - DNA, 58 bp, Artificial
  Synthetic oligonucleotide
gatgtacggccctacgtgggccaaaattcggcagccagatttgattatccaggccttg

SEQ ID NO: 164835 - DNA, 53 bp, Artificial
  Synthetic oligonucleotide
ttgaggattcccggtgttggtgtccaatctgccaagcgaatcgccaccacccg

SEQ ID NO: 164836 - DNA, 53 bp, Artificial
  Synthetic oligonucleotide
agggctggatccactaaccactaacctagttgtcgctgacgcaagccgcaccg

SEQ ID NO: 164837 - DNA, 53 bp, Artificial
  Synthetic oligonucleotide
taagcggcagcttagtaccgttgcaggacgaaacgagcggaagcgtcctctga

SEQ ID NO: 164838 - DNA, 53 bp, Artificial
  Synthetic oligonucleotide
gaattcttgctgtggtgatagctctatgatgaattcttgctgtggtgatgtcc

SEQ ID NO: 164839 - DNA, 53 bp, Artificial
  Synthetic oligonucleotide
tcgagggggtagcaaaatgagcccgacgtatctgaaccccctgtcagacggcg

SEQ ID NO: 164840 - DNA, 53 bp, Artificial
  Synthetic oligonucleotide
ccgggctatgaacgatatgaaggacgagatgtcagatcttgttatccttgcag

SEQ ID NO: 164841 - DNA, 53 bp, Artificial
  Synthetic oligonucleotide
aggggccaccctcatcactgttttgagtccgccaggacacatttgagcgctta

SEQ ID NO: 164842 - DNA, 51 bp, Artificial
  Synthetic oligonucleotide
aagggttggtgcttcggaaacccgcttcctttctgggtttgcggactcagg

SEQ ID NO: 164843 - DNA, 53 bp, Artificial
  Synthetic oligonucleotide
ttgatagctaaaggggaggcagatgtatactatcgctttggacttacttcgga

SEQ ID NO: 164844 - DNA, 53 bp, Artificial
  Synthetic oligonucleotide
cttggacaagtagctgtagctaatgatagtacttcaagtgcagttgtatcaac

SEQ ID NO: 164845 - DNA, 55 bp, Artificial
  Synthetic oligonucleotide
gatgggaatatggtaactggttggaaagagttaggaggaatatggtactacttaa

SEQ ID NO: 164846 - DNA, 53 bp, Artificial
  Synthetic oligonucleotide
agatgctattgtaagaccacccactgaaggtacgaaagatatactacctggtg

SEQ ID NO: 164847 - DNA, 53 bp, Artificial
  Synthetic oligonucleotide
ttgcgaagccagctctgcttccgaagggagccgtgttcccactgcaagctttc

SEQ ID NO: 164848 - DNA, 51 bp, Artificial
  Synthetic oligonucleotide
cggcgtcggtgttaatcgctcggttatcccaacggggaagtcccgccggga

SEQ ID NO: 164849 - DNA, 53 bp, Artificial
  Synthetic oligonucleotide
taaatcctcggtaggttggttccccgttatgctttcgcacctactgtctgcgg

SEQ ID NO: 164850 - DNA, 53 bp, Artificial
  Synthetic oligonucleotide
tcgggggaccatgtgagtggagcgagacatacccggatgagaacacgatcgca

SEQ ID NO: 164851 - DNA, 53 bp, Artificial
  Synthetic oligonucleotide
actggatgaagcacgctatttccaactgtaggagagcctatcagcacggtttt

SEQ ID NO: 164852 - DNA, 53 bp, Artificial
  Synthetic oligonucleotide
gctgatgctagtgggcctgatgctctagctatattgtcccaatcctcaggagt

SEQ ID NO: 164853 - DNA, 53 bp, Artificial
  Synthetic oligonucleotide
atacaatccctgtcgtcggattctagatccaaactactcatcaagaattaccc

SEQ ID NO: 164854 - DNA, 51 bp, Artificial
  Synthetic oligonucleotide
caggggtaagttcggttttaggtataacagaaagttggccactggtttcaa

SEQ ID NO: 164855 - DNA, 53 bp, Artificial
  Synthetic oligonucleotide
tagtttcccatatcccagtagcaggcaggcgaaatccccgtcggggcttactc

SEQ ID NO: 164856 - DNA, 52 bp, Artificial
  Synthetic oligonucleotide
caccggcatttttattataaagttttgataaacggtctaattcgggacttgc

SEQ ID NO: 164857 - DNA, 53 bp, Artificial
  Synthetic oligonucleotide
tagtatagctaacttacatgagtggatagaagcaggagccttcgtagtaggaa

SEQ ID NO: 164858 - DNA, 53 bp, Artificial
  Synthetic oligonucleotide
tacgcccttattcgccacacttgggcttgaaatagtcaaccgtgcgtcggcgc

SEQ ID NO: 164859 - DNA, 53 bp, Artificial
  Synthetic oligonucleotide
ccaaaggtacttcctattggacagtattcactaaccataacctctggtcttcc

SEQ ID NO: 164860 - DNA, 53 bp, Artificial
  Synthetic oligonucleotide
tagggaaccactggcctaccagaatggacagtgcgaaggtgccatacattaca

SEQ ID NO: 164861 - DNA, 53 bp, Artificial
  Synthetic oligonucleotide
cgctgatattgcaaagagtgttgacgcttatgtgcttagcgatgaggtctata

SEQ ID NO: 164862 - DNA, 52 bp, Artificial
  Synthetic oligonucleotide
aaaacgaccgtgtgtgtaaagttgtggtttattgtacgcgttgtaataagac

SEQ ID NO: 164863 - DNA, 53 bp, Artificial
  Synthetic oligonucleotide
cgcgtgagtatttgcggcgttagagacgctacctcaggttggcgtgctggtga

SEQ ID NO: 164864 - DNA, 53 bp, Artificial
  Synthetic oligonucleotide
tactgccggtgcgattgttgggaagatcagatgtccgcaggacggacaacgga

SEQ ID NO: 164865 - DNA, 53 bp, Artificial
  Synthetic oligonucleotide
cagtagtcaccttttcgtccccatcgagctgcagcaggtttactattgcagta

SEQ ID NO: 164866 - DNA, 53 bp, Artificial
  Synthetic oligonucleotide
agtttagttgcagtaaagacaggaagagtgattaccaaccctatagcaggaac

SEQ ID NO: 164867 - DNA, 53 bp, Artificial
  Synthetic oligonucleotide
ggaaaattgatgtggggacatcggtatttgaaatcagcccccagggtcgtttt

SEQ ID NO: 164868 - DNA, 53 bp, Artificial
  Synthetic oligonucleotide
ggtgcactatctaaacttatctatatcgctttttccgtcgtttggttctctag

SEQ ID NO: 164869 - DNA, 53 bp, Artificial
  Synthetic oligonucleotide
cttctacaataagagctggacctatatcgtatccaccagggacaggacgaatc

SEQ ID NO: 164870 - DNA, 53 bp, Artificial
  Synthetic oligonucleotide
gcttctataacagcaagttcctggttctacccatccatatacacgattagaat

SEQ ID NO: 164871 - DNA, 53 bp, Artificial
  Synthetic oligonucleotide
ctgcctcggcgaatcgccttagcaactgcagaaaccgcttccgactgccccac

SEQ ID NO: 164872 - DNA, 53 bp, Artificial
  Synthetic oligonucleotide
cagtctataacgtgagtaccaacggtaccaacaggctgctctatgaattatgc

SEQ ID NO: 164873 - DNA, 53 bp, Artificial
  Synthetic oligonucleotide
agacttaatattcttcgatactgctggaaggaacggccatattggaatctacc

SEQ ID NO: 164874 - DNA, 53 bp, Artificial
  Synthetic oligonucleotide
agaactagcatctataacatatgcgtcgtctccagctgatatacagctaacag

SEQ ID NO: 164875 - DNA, 53 bp, Artificial
  Synthetic oligonucleotide
gcttttgtactaactactccattatccataacccctagaacaaggtgcggcct

SEQ ID NO: 164876 - DNA, 53 bp, Artificial
  Synthetic oligonucleotide
gactttcttccatgattccttactggaacaaattctgaagtggtatcactcgg

SEQ ID NO: 164877 - DNA, 53 bp, Artificial
  Synthetic oligonucleotide
tttccgtaccacttacacaaggatgaccacctggatttggcactcctgtagac

SEQ ID NO: 164878 - DNA, 59 bp, Artificial
  Synthetic oligonucleotide
ggaaaggttcttcctataggtaatcatagatactatgctccagatctaaggacctgtta

SEQ ID NO: 164879 - DNA, 53 bp, Artificial
  Synthetic oligonucleotide
aaaatgggtttcctataccagctggtaccccagttacagcacactccactacc

SEQ ID NO: 164880 - DNA, 53 bp, Artificial
  Synthetic oligonucleotide
aatccactgtagcctctttgaacgcccataacttcaaggcctttatcaatggc

SEQ ID NO: 164881 - DNA, 53 bp, Artificial
  Synthetic oligonucleotide
gacagacaggggtaatagcagacaccagatttccgattcctaatgatataact

SEQ ID NO: 164882 - DNA, 53 bp, Artificial
  Synthetic oligonucleotide
tatggagaggtgctccattattcggtatggacaacagagacatacttagagac

SEQ ID NO: 164883 - DNA, 53 bp, Artificial
  Synthetic oligonucleotide
gctatagtaggagaggaaagttttacagttgatctaactttagagggagctac

SEQ ID NO: 164884 - DNA, 53 bp, Artificial
  Synthetic oligonucleotide
cgtagactaacgttttaccctaggtaaacagctcctagacaagttcagattca

SEQ ID NO: 164885 - DNA, 53 bp, Artificial
  Synthetic oligonucleotide
ccgtactttacgctacctgtggttgctccgctggtgtccacagtgccgccgtt

SEQ ID NO: 164886 - DNA, 53 bp, Artificial
  Synthetic oligonucleotide
tatctcccttatgagattttagtatagtttttaaaaacttatttgctgttctt

SEQ ID NO: 164887 - DNA, 53 bp, Artificial
  Synthetic oligonucleotide
cgggataacaattatatcgtaagaatcctaataaagcccctgctatacaaccg

SEQ ID NO: 164888 - DNA, 53 bp, Artificial
  Synthetic oligonucleotide
tatccaatcacagcaggtcttggtctagctggatacaacaatggtgatggtag

SEQ ID NO: 164889 - DNA, 57 bp, Artificial
  Synthetic oligonucleotide
ggaaatcataaattcttaaacacgcttcatagccatcacccttaacaatacttctag

SEQ ID NO: 164890 - DNA, 53 bp, Artificial
  Synthetic oligonucleotide
tatagatccagccaacctcataacccttgaactatctatagatttttcatccg

SEQ ID NO: 164891 - DNA, 53 bp, Artificial
  Synthetic oligonucleotide
gctcctaacatacacttagtagccaagtcaactatgggtactccacttacttt

SEQ ID NO: 164892 - DNA, 53 bp, Artificial
  Synthetic oligonucleotide
gaaatactccgcccggacagcctattcgctccgggagctaaagacccgcgagg

SEQ ID NO: 164893 - DNA, 53 bp, Artificial
  Synthetic oligonucleotide
taccaccttccgaaccacctaagtgcccgtcggttgcaccgtctaccgctcca

SEQ ID NO: 164894 - DNA, 53 bp, Artificial
  Synthetic oligonucleotide
ggtaccgcagaaattgctggacaagcatataacggtgcgttcaatatctggtt

SEQ ID NO: 164895 - DNA, 53 bp, Artificial
  Synthetic oligonucleotide
gctctatacggacttcctggaaatatgctttctgtatatgtaaactcacgtcc

SEQ ID NO: 164896 - DNA, 53 bp, Artificial
  Synthetic oligonucleotide
gctgaaagtgcaagtttctcaattgaagtaagaaagggtacagactcacttgg

SEQ ID NO: 164897 - DNA, 53 bp, Artificial
  Synthetic oligonucleotide
tttgcacgtttagcttcctgtagagttcttgctgatacccctaggattttatc

SEQ ID NO: 164898 - DNA, 53 bp, Artificial
  Synthetic oligonucleotide
acacccaatctcctactacttgaatagcatcagcccactcatcacttaatttt

SEQ ID NO: 164899 - DNA, 53 bp, Artificial
  Synthetic oligonucleotide
tataactggtatctgggctgcatcaaaaggtattatggcacttattcgagttc

SEQ ID NO: 164900 - DNA, 60 bp, Artificial
  Synthetic oligonucleotide
gatgcagctaataaaacaagtacttggttaagtcatggagataatagaaatgagctgctt

SEQ ID NO: 164901 - DNA, 53 bp, Artificial
  Synthetic oligonucleotide
accgctggctttcctcaatcacacaccttgtcggacggataaggtcgtagtat

SEQ ID NO: 164902 - DNA, 53 bp, Artificial
  Synthetic oligonucleotide
aaatgatctcaggtttatgccaagcatgcctccagaaataacggctagttctg

SEQ ID NO: 164903 - DNA, 53 bp, Artificial
  Synthetic oligonucleotide
tggctcaattctcagaggcaggccctgcgtggaaatcccaattatctgatgac

SEQ ID NO: 164904 - DNA, 53 bp, Artificial
  Synthetic oligonucleotide
caaggtagcctccgtccacaactaataccgttccgttcacgtaattggacgcc

SEQ ID NO: 164905 - DNA, 53 bp, Artificial
  Synthetic oligonucleotide
tggcgtatctgtactgaggggagattttaatactgccggctccgttatgtttt

SEQ ID NO: 164906 - DNA, 53 bp, Artificial
  Synthetic oligonucleotide
ctagtgccatacatggagcataaagtcctattcctaatgtcataagcgctcct

SEQ ID NO: 164907 - DNA, 53 bp, Artificial
  Synthetic oligonucleotide
tggccatgcgcatactcaacgactgcatccggtacaagggatgcgatctccga

SEQ ID NO: 164908 - DNA, 53 bp, Artificial
  Synthetic oligonucleotide
cacgttaccatgagataggacaagagtgcgcccatattgtggagtcggttgcc

SEQ ID NO: 164909 - DNA, 53 bp, Artificial
  Synthetic oligonucleotide
gtaacgctttgcccaaaagtttgaggtccgttattatcccagtgaagagcacc

SEQ ID NO: 164910 - DNA, 53 bp, Artificial
  Synthetic oligonucleotide
agcgtcccttgctgccttacgtaccgttgcaccgaggatagagcgcaagcgtt

SEQ ID NO: 164911 - DNA, 58 bp, Artificial
  Synthetic oligonucleotide
ggaagaactactaagactcagagttacttaattatctgagcacatggagttaactaaa

SEQ ID NO: 164912 - DNA, 53 bp, Artificial
  Synthetic oligonucleotide
ctagcaccggttgcccagcagtcgacctccctaaccgtaaaaggttgcccact

SEQ ID NO: 164913 - DNA, 53 bp, Artificial
  Synthetic oligonucleotide
gaataggagacgctagcaaccaatactggatattagagtatgttggagacgga

SEQ ID NO: 164914 - DNA, 53 bp, Artificial
  Synthetic oligonucleotide
tgcctttgccactcctactccgaccaatagtgctccgaccagtcccggaccat

SEQ ID NO: 164915 - DNA, 53 bp, Artificial
  Synthetic oligonucleotide
ctcctcgaacttactcagcgactatcaaaattcgagtttccttttacactccc

SEQ ID NO: 164916 - DNA, 53 bp, Artificial
  Synthetic oligonucleotide
ctgtaccaacggaaaccttaagaactgatacatatccattaccataagcccct

SEQ ID NO: 164917 - DNA, 51 bp, Artificial
  Synthetic oligonucleotide
accctgcctgtaggggtccaccgtagggaaacgcagggtttaagtcccgca

SEQ ID NO: 164918 - DNA, 53 bp, Artificial
  Synthetic oligonucleotide
gcatagcatatcctacatatggataagcctgatgacgatttaacccaacaagc

SEQ ID NO: 164919 - DNA, 53 bp, Artificial
  Synthetic oligonucleotide
ctgctattatgagcagccgttacgagcatccagtcatgacctataaggcgaaa

SEQ ID NO: 164920 - DNA, 53 bp, Artificial
  Synthetic oligonucleotide
gatacacggctacacaaatgctacaagacggtccacagcgaaagggaaatctt

SEQ ID NO: 164921 - DNA, 53 bp, Artificial
  Synthetic oligonucleotide
atttgttatcgcagctactcttccgagcacgtcatatgtatactccaccggtg

SEQ ID NO: 164922 - DNA, 55 bp, Artificial
  Synthetic oligonucleotide
ggaataattccattagttccaggaggtgggatgttttatacaatgttagaaagct

SEQ ID NO: 164923 - DNA, 53 bp, Artificial
  Synthetic oligonucleotide
ctcctgcaagcccgccataccatccgcctaacagcagtgccccaagtacacat

SEQ ID NO: 164924 - DNA, 53 bp, Artificial
  Synthetic oligonucleotide
gatacaaagacacccatagagtttacgatagactgcacacctagtttaccaag

SEQ ID NO: 164925 - DNA, 53 bp, Artificial
  Synthetic oligonucleotide
gatgtattctttggcaacttataagccaaggagcaatagcctatatggtcgat

SEQ ID NO: 164926 - DNA, 53 bp, Artificial
  Synthetic oligonucleotide
gtatacgcctcttcatatagtttatgtaaggtggttccgtcccatatggttcc

SEQ ID NO: 164927 - DNA, 53 bp, Artificial
  Synthetic oligonucleotide
gatggatcgctatctttggattctgaaggatatcttgttacatcaagtggtga

SEQ ID NO: 164928 - DNA, 53 bp, Artificial
  Synthetic oligonucleotide
agcctatactctccagactggcagggagcctatggacgagcgcctagcccttg

SEQ ID NO: 164929 - DNA, 53 bp, Artificial
  Synthetic oligonucleotide
tgttaggagtatcacaagatattatccgaacagcatttgcaagggcaggtgtt

SEQ ID NO: 164930 - DNA, 53 bp, Artificial
  Synthetic oligonucleotide
gattgcgtttaagtgaagggaccattggagcgtttatttatgggttttctgga

SEQ ID NO: 164931 - DNA, 53 bp, Artificial
  Synthetic oligonucleotide
gtatgtaacatccgcctcctacatatataccaacgtggtgaactgggctacca

SEQ ID NO: 164932 - DNA, 53 bp, Artificial
  Synthetic oligonucleotide
gaaggtatcagcagggtcgcagccgataaattgcgtgacggcggaagcctact

SEQ ID NO: 164933 - DNA, 56 bp, Artificial
  Synthetic oligonucleotide
agtatttaggaactcagctcggtataattgttagtagctttgtattagccttactg

SEQ ID NO: 164934 - DNA, 53 bp, Artificial
  Synthetic oligonucleotide
cacctgttaagggagatcatttagcaccatatttattaagttattctggtagt

SEQ ID NO: 164935 - DNA, 53 bp, Artificial
  Synthetic oligonucleotide
tgtgcgtcagcaagcggtgcttgcaggggtgtcactaccgtaaggggcgatat

SEQ ID NO: 164936 - DNA, 53 bp, Artificial
  Synthetic oligonucleotide
gggaggttgttttagtatatgagttctaatgcaaaggtcctacaagcaataat

SEQ ID NO: 164937 - DNA, 53 bp, Artificial
  Synthetic oligonucleotide
tgtgaccagccgcacggctctggtgtacacggaccgcatgttgacctacgggg

SEQ ID NO: 164938 - DNA, 53 bp, Artificial
  Synthetic oligonucleotide
gaatacaagtggcagtactaggcatagtacaggagagatgaagtagtcaaata

SEQ ID NO: 164939 - DNA, 53 bp, Artificial
  Synthetic oligonucleotide
ctatctgaagcaaccttagcagctagcatgccactagcaccggcgcctataat

SEQ ID NO: 164940 - DNA, 53 bp, Artificial
  Synthetic oligonucleotide
tgtatccatctgtgctgctatcaaataaatgatcacaatatgcaaagttgtcc

SEQ ID NO: 164941 - DNA, 53 bp, Artificial
  Synthetic oligonucleotide
ttagtgggctgggaatatgtccgggacacggcccgtcttgtccggcgtctggg

SEQ ID NO: 164942 - DNA, 53 bp, Artificial
  Synthetic oligonucleotide
gtccatatgcctcacattcgtcaagtgaatccaaagggactactctatgacta

SEQ ID NO: 164943 - DNA, 53 bp, Artificial
  Synthetic oligonucleotide
gtcccggctgcaacctatacacagaatccggctaccggtgtatggacggcgga

SEQ ID NO: 164944 - DNA, 58 bp, Artificial
  Synthetic oligonucleotide
cccatgaacattccagttggatcatttagttctacgtagtgaaatgggtaaccagctc

SEQ ID NO: 164945 - DNA, 58 bp, Artificial
  Synthetic oligonucleotide
gttacttctactctagaatggggtggaactaatatatcttgagatggaagtgtatacg

SEQ ID NO: 164946 - DNA, 55 bp, Artificial
  Synthetic oligonucleotide
agtattggaattactagattacataggttttagatgcaaaattgtcgttttgtaa

SEQ ID NO: 164947 - DNA, 53 bp, Artificial
  Synthetic oligonucleotide
aacccccaaggtgaacaaatttcagcttgcgtccgttagccactcctccgccc

SEQ ID NO: 164948 - DNA, 53 bp, Artificial
  Synthetic oligonucleotide
aaccggttcaggattctgaccgtggctctcggacttctgggattattcgtggg

SEQ ID NO: 164949 - DNA, 53 bp, Artificial
  Synthetic oligonucleotide
tgggattatacacagtactttggctaccaccacccatgagaagtcctacagca

SEQ ID NO: 164950 - DNA, 53 bp, Artificial
  Synthetic oligonucleotide
gtacgggcaccgaccgctggttagcgcaatgtgtaggctgttccattcccgaa

SEQ ID NO: 164951 - DNA, 53 bp, Artificial
  Synthetic oligonucleotide
cgcaagtaccactagcacgacatactacaatcggagtctcaagtacatcgcat

SEQ ID NO: 164952 - DNA, 53 bp, Artificial
  Synthetic oligonucleotide
attcatgttataagctctattaagaattgaattataatcttctctcgacatag

SEQ ID NO: 164953 - DNA, 53 bp, Artificial
  Synthetic oligonucleotide
aggatatcctgtgagtaagggacaaggtaagcgtcaagttactggtagtggtg

SEQ ID NO: 164954 - DNA, 53 bp, Artificial
  Synthetic oligonucleotide
accaaaactcttggcatagtagttattccgagcctagtacttctttgcgtagc

SEQ ID NO: 164955 - DNA, 53 bp, Artificial
  Synthetic oligonucleotide
gagtttgttgggacatgcgctgagcgaggatactagtgttatcaagagtctga

SEQ ID NO: 164956 - DNA, 53 bp, Artificial
  Synthetic oligonucleotide
ggcaaccccgacccctcggagagcataggacggagtcctataaagggcaacgc

SEQ ID NO: 164957 - DNA, 57 bp, Artificial
  Synthetic oligonucleotide
agtactattaacgtctatgttaattgttaatgtcttatctccattagaaagatatgt

SEQ ID NO: 164958 - DNA, 53 bp, Artificial
  Synthetic oligonucleotide
gccggcgagtttatcgaactgcaagccaccggggaacaggcacccttccgcgg

SEQ ID NO: 164959 - DNA, 53 bp, Artificial
  Synthetic oligonucleotide
gcccctaaaccttaactcccagcatcaacccaccactgggcgtaacaagccaa

SEQ ID NO: 164960 - DNA, 53 bp, Artificial
  Synthetic oligonucleotide
aggcattgacagctttgagttgtcagaactgtgcaaaagggtaagctttaacg

SEQ ID NO: 164961 - DNA, 53 bp, Artificial
  Synthetic oligonucleotide
gtaaaattcatggcttgttgtatttccttagtgtctatcctgtaacttgtcca

SEQ ID NO: 164962 - DNA, 53 bp, Artificial
  Synthetic oligonucleotide
attgccagcgaatgcgagtgcatgtctgagcccgtagggcgagtttgcacata

SEQ ID NO: 164963 - DNA, 53 bp, Artificial
  Synthetic oligonucleotide
ggtttcttctacagtttcctctaaagtatttagtatgcctttcaaatttactg

SEQ ID NO: 164964 - DNA, 53 bp, Artificial
  Synthetic oligonucleotide
cttcgaatacgcaacaaaacatagcggaaatccactttgctacaacggagata

SEQ ID NO: 164965 - DNA, 53 bp, Artificial
  Synthetic oligonucleotide
acccatgtctataggttcgcaataaagttcccttagcctagagcataggcaat

SEQ ID NO: 164966 - DNA, 53 bp, Artificial
  Synthetic oligonucleotide
gcatgtaaaaatagctatagtaatgcgtacgaatgttctattattacagaatt

SEQ ID NO: 164967 - DNA, 53 bp, Artificial
  Synthetic oligonucleotide
tgaggcgctgtgctaactaagatccaatgggtgccttcgattgctgtataggc

SEQ ID NO: 164968 - DNA, 59 bp, Artificial
  Synthetic oligonucleotide
cacgtttatatgtaccactagggctatctttaaaccaagcctcataggctttctcagca

SEQ ID NO: 164969 - DNA, 53 bp, Artificial
  Synthetic oligonucleotide
tcttgttatacccggaaagtaagttgccaatgtatgcctacagttaggatgta

SEQ ID NO: 164970 - DNA, 53 bp, Artificial
  Synthetic oligonucleotide
attgcgtggacacccaaaggtggctagcaaagtcaagccccatattagggggc

SEQ ID NO: 164971 - DNA, 53 bp, Artificial
  Synthetic oligonucleotide
atgtttatattggccttgactggccggtgcttgctggtgatgcgacgatgtgg

SEQ ID NO: 164972 - DNA, 53 bp, Artificial
  Synthetic oligonucleotide
ctaatgcgggacctgtggcatctgtaattgaaccagggtagttcgccacttct

SEQ ID NO: 164973 - DNA, 53 bp, Artificial
  Synthetic oligonucleotide
gataatggtgaatatagagtaccttgtaatgttattggctataatgaggaaat

SEQ ID NO: 164974 - DNA, 53 bp, Artificial
  Synthetic oligonucleotide
gtaacaacagactatttaactggtagatgtcccttcagagattattcagttca

SEQ ID NO: 164975 - DNA, 52 bp, Artificial
  Synthetic oligonucleotide
gtccatattatcatcacggctcagtcggcagtaaagggcggctgtgccgagg

SEQ ID NO: 164976 - DNA, 52 bp, Artificial
  Synthetic oligonucleotide
cggggcaaggaagcttgtgctcatgggcaaacagcagttcccgaagcgtgag

SEQ ID NO: 164977 - DNA, 52 bp, Artificial
  Synthetic oligonucleotide
gtccgtcatctggagctgccgggatgtatcgaggattccaaggcggtcgtcc

SEQ ID NO: 164978 - DNA, 52 bp, Artificial
  Synthetic oligonucleotide
gtccgatgcaatcccatgagaatcacaggggagggagaagcaccgccacagg

SEQ ID NO: 164979 - DNA, 54 bp, Artificial
  Synthetic oligonucleotide
agtaacactatttaatcttccttttgttgcgttagttctaattggaggtatata

SEQ ID NO: 164980 - DNA, 52 bp, Artificial
  Synthetic oligonucleotide
accgtcccttgccctggcgtacagcccctcgtggaaacgtagctgcttatca

SEQ ID NO: 164981 - DNA, 52 bp, Artificial
  Synthetic oligonucleotide
cggtaacaacggcaatctccctgtagcgcattcccctgtcccggcaaagccg

SEQ ID NO: 164982 - DNA, 52 bp, Artificial
  Synthetic oligonucleotide
ggttctgggtatagagatatagctggggatataagcaatataggagtagctg

SEQ ID NO: 164983 - DNA, 52 bp, Artificial
  Synthetic oligonucleotide
agcgaaagctaacaagggtttgattgagccaaggaagaaagttgatccggct

SEQ ID NO: 164984 - DNA, 52 bp, Artificial
  Synthetic oligonucleotide
agcacttccgtagcggctataggagttgcagctcacgaaaccggccacgcaa

SEQ ID NO: 164985 - DNA, 52 bp, Artificial
  Synthetic oligonucleotide
gttctgtaaacatagcttatgcactatgtaagctagggctgaaatctatgcc

SEQ ID NO: 164986 - DNA, 52 bp, Artificial
  Synthetic oligonucleotide
acatgcgcaggaacaaggaggatgcacacgtcgggaaccgccggaacgttat

SEQ ID NO: 164987 - DNA, 52 bp, Artificial
  Synthetic oligonucleotide
gtcactgtttctgtcacatcccctgcatgctccatgagcatactccaggagc

SEQ ID NO: 164988 - DNA, 52 bp, Artificial
  Synthetic oligonucleotide
aggccttggggctacagtctaacacgtccaagatatcgtccgcacccccgcg

SEQ ID NO: 164989 - DNA, 52 bp, Artificial
  Synthetic oligonucleotide
ggtgcagctcagaagcagctttggaacggcgggcgtcaagattcccggtctg

SEQ ID NO: 164990 - DNA, 53 bp, Artificial
  Synthetic oligonucleotide
agtaaaatcaatactttcaaaagtcaacataatctgggaggtggttttattaa

SEQ ID NO: 164991 - DNA, 52 bp, Artificial
  Synthetic oligonucleotide
ccacctggaacgacaatagatttagttgaaggcgaatctgagtttggttgtc

SEQ ID NO: 164992 - DNA, 52 bp, Artificial
  Synthetic oligonucleotide
ggaaacggctttggacgtagtttgcccatagatgaacaaacaaactacatcc

SEQ ID NO: 164993 - DNA, 52 bp, Artificial
  Synthetic oligonucleotide
gttcatatggtttaatttctcctatatctcgtaaagagaagtttctattctt

SEQ ID NO: 164994 - DNA, 52 bp, Artificial
  Synthetic oligonucleotide
tagaggatgaccccaaaactccaaggtatctggtgactgttcatggaattgg

SEQ ID NO: 164995 - DNA, 52 bp, Artificial
  Synthetic oligonucleotide
gggcgatggtggtataaacttcgaggacaggcagcaaggcggtggcatcgga

SEQ ID NO: 164996 - DNA, 52 bp, Artificial
  Synthetic oligonucleotide
ggaaaaggggatgctgagaaggttgtaggtggaatgggattttggacatggg

SEQ ID NO: 164997 - DNA, 52 bp, Artificial
  Synthetic oligonucleotide
ggatgttctgaggcccgctaaccttcgtgctgcgtcgtcatttgtcgcccct

SEQ ID NO: 164998 - DNA, 52 bp, Artificial
  Synthetic oligonucleotide
cggatcattcttcttatcgtgtaatcgttttcgatactcagtaggactttcg

SEQ ID NO: 164999 - DNA, 52 bp, Artificial
  Synthetic oligonucleotide
agacgattaggagacagctacttaagtcccaggggtcctaagaaatcggcat

SEQ ID NO: 165000 - DNA, 52 bp, Artificial
  Synthetic oligonucleotide
agcaccaacttttactacatacgctctaatagcagctccacttgccccacct

SEQ ID NO: 165001 - DNA, 60 bp, Artificial
  Synthetic oligonucleotide
gataggaagtacgcttacagtatccgttaacttagattcatattatcatgatatgcaata

SEQ ID NO: 165002 - DNA, 52 bp, Artificial
  Synthetic oligonucleotide
acacgccacttcagtagtgtgaggaatttgcccctctttctgttaggcaaga

SEQ ID NO: 165003 - DNA, 52 bp, Artificial
  Synthetic oligonucleotide
agcgttcttaggacaaattggtggatgtataggtgaaacatcagcacttgca

SEQ ID NO: 165004 - DNA, 52 bp, Artificial
  Synthetic oligonucleotide
ggcagcgatttacgcacagaggagcggttttgaggtgacgctctgcggacag

SEQ ID NO: 165005 - DNA, 52 bp, Artificial
  Synthetic oligonucleotide
aggggcggcgcagtgaccctccacttacctgcctggtcgggagcatagctct

SEQ ID NO: 165006 - DNA, 52 bp, Artificial
  Synthetic oligonucleotide
aggagttactttcgcccgtgcttcaggagcgcccttggtatccctggcagcg

SEQ ID NO: 165007 - DNA, 52 bp, Artificial
  Synthetic oligonucleotide
ggtgtggagcacacgccactcgatctcgttcgcggtaaaagggtactgcaat

SEQ ID NO: 165008 - DNA, 52 bp, Artificial
  Synthetic oligonucleotide
tacacccattggaggtatagtatctgccatatttccagtatggtttgcttga

SEQ ID NO: 165009 - DNA, 52 bp, Artificial
  Synthetic oligonucleotide
ctttgtgataacatattagctggggcaagaccacttggtccgccctcatagt

SEQ ID NO: 165010 - DNA, 52 bp, Artificial
  Synthetic oligonucleotide
tacacattccacccttttctcacagtactctacagcatctcaataaacgctg

SEQ ID NO: 165011 - DNA, 52 bp, Artificial
  Synthetic oligonucleotide
gtgtactccttaaatgattttacctactcagactgcaatccggacggcacaa

SEQ ID NO: 165012 - DNA, 58 bp, Artificial
  Synthetic oligonucleotide
aggtcatattagttagattaaacatgtccattatacctgtaagagatactcctattac

SEQ ID NO: 165013 - DNA, 52 bp, Artificial
  Synthetic oligonucleotide
ggggatgtcgtaataactttaacggctattttatcaaagggtgaagctaagg

SEQ ID NO: 165014 - DNA, 52 bp, Artificial
  Synthetic oligonucleotide
agcttatcatactgtacggattaagagatctttataaaacatcttaatccgc

SEQ ID NO: 165015 - DNA, 52 bp, Artificial
  Synthetic oligonucleotide
taagcggggaataatggctgcacgctcctggacattgtgcccttcatgggta

SEQ ID NO: 165016 - DNA, 52 bp, Artificial
  Synthetic oligonucleotide
cggctgttaaacatgcatcttgctttatcgatagccggatttcatgacttgc

SEQ ID NO: 165017 - DNA, 52 bp, Artificial
  Synthetic oligonucleotide
cctccgacacataacctcctccactagcagttataattccaggttctataca

SEQ ID NO: 165018 - DNA, 52 bp, Artificial
  Synthetic oligonucleotide
ccttaggaccttaactgttatgcgtgatgctgtggatatgatcaagtataac

SEQ ID NO: 165019 - DNA, 52 bp, Artificial
  Synthetic oligonucleotide
gtggatgaccccgtgaaagtcggggtggttttatcggcagccggagtgtgca

SEQ ID NO: 165020 - DNA, 52 bp, Artificial
  Synthetic oligonucleotide
cggaaagtgtggtgacgtagaaatgagcgatagcagagctgttatacaagct

SEQ ID NO: 165021 - DNA, 52 bp, Artificial
  Synthetic oligonucleotide
gttgttaatacctaattcctcatagttcaaaccatttgttagtggtagtaca

SEQ ID NO: 165022 - DNA, 52 bp, Artificial
  Synthetic oligonucleotide
ggaatcctcccacaatagccaaaagtattcctaaatgtacggattccgatgt

SEQ ID NO: 165023 - DNA, 60 bp, Artificial
  Synthetic oligonucleotide
cacttgcctttactgctagatgtttgttgtttactatgccaagtgcaagtccttcgctta

SEQ ID NO: 165024 - DNA, 51 bp, Artificial
  Synthetic oligonucleotide
cccacggtcacgccgggtaatattagtgttacgggaggctccggcacgggg

SEQ ID NO: 165025 - DNA, 52 bp, Artificial
  Synthetic oligonucleotide
gtaagtgactggctggaggccggacataacagggatgatttacttcaggctt

SEQ ID NO: 165026 - DNA, 52 bp, Artificial
  Synthetic oligonucleotide
actgaggtttgtaacaaccgctaaccagaactcccctgttacagacggcttt

SEQ ID NO: 165027 - DNA, 52 bp, Artificial
  Synthetic oligonucleotide
taaactctctagccattatataagcactccctcacactctacctcattaagc

SEQ ID NO: 165028 - DNA, 52 bp, Artificial
  Synthetic oligonucleotide
agatgcttcacttcctaatggcctgtattcggtacggtgtcagtgtgtgcat

SEQ ID NO: 165029 - DNA, 52 bp, Artificial
  Synthetic oligonucleotide
aggattcaaagcaggacgttctaatacttatttcattactgaatgtggaatt

SEQ ID NO: 165030 - DNA, 52 bp, Artificial
  Synthetic oligonucleotide
ccttcataccagttgtagcctttagcccatctatcttaactcttccttgttc

SEQ ID NO: 165031 - DNA, 52 bp, Artificial
  Synthetic oligonucleotide
acccttccggaagcacatcacgatgacaggcttatggcggagctttcccggg

SEQ ID NO: 165032 - DNA, 52 bp, Artificial
  Synthetic oligonucleotide
ggggaggctggatttctggtacttgcggagatccggacggagcttacttcgg

SEQ ID NO: 165033 - DNA, 52 bp, Artificial
  Synthetic oligonucleotide
ctgtagcgcattcccctgtcccggcaaagccgtacaatgtccctggcacaag

SEQ ID NO: 165034 - DNA, 56 bp, Artificial
  Synthetic oligonucleotide
gatacagtaggtttgctttataaagaaggttataagatagtggatatagtaaaaca

SEQ ID NO: 165035 - DNA, 52 bp, Artificial
  Synthetic oligonucleotide
aggatgcggcggtaattggacttccggacaagcgccttggtgaaatagcggc

SEQ ID NO: 165036 - DNA, 52 bp, Artificial
  Synthetic oligonucleotide
agagctttgttgacttgggggaatgctgatactagcaaaggtatattgcaac

SEQ ID NO: 165037 - DNA, 52 bp, Artificial
  Synthetic oligonucleotide
gtaacctcgtctaacctcctcccacatgttagagccatcattagaggcactt

SEQ ID NO: 165038 - DNA, 52 bp, Artificial
  Synthetic oligonucleotide
agcgtgtttagtaggtatcttatcatatgcaccagctatattatattcgact

SEQ ID NO: 165039 - DNA, 52 bp, Artificial
  Synthetic oligonucleotide
ccggcgcttttgtctcctgaatcgtaatcgtcccaatcggcacagccggtcg

SEQ ID NO: 165040 - DNA, 52 bp, Artificial
  Synthetic oligonucleotide
tgagcctgtactagtattcaaagccttataagcttccatttcgatattagca

SEQ ID NO: 165041 - DNA, 52 bp, Artificial
  Synthetic oligonucleotide
tgagcccggatgaccagtatgagaatgtactgaactctaagctgtcagtagg

SEQ ID NO: 165042 - DNA, 52 bp, Artificial
  Synthetic oligonucleotide
ccgaataccataccttaagccccaggggcggcgcagtgaccctccacttacc

SEQ ID NO: 165043 - DNA, 52 bp, Artificial
  Synthetic oligonucleotide
tgagatgcagggatactggcaatacgccgatattcctgttcgattctgcagt

SEQ ID NO: 165044 - DNA, 52 bp, Artificial
  Synthetic oligonucleotide
ttattaataacatatagtccattactataaggcaatactcgttgtgtgctac

SEQ ID NO: 165045 - DNA, 60 bp, Artificial
  Synthetic oligonucleotide
cagatacagggttatggatgtttgtataggattagtgatgatgagataacagaagaatac

SEQ ID NO: 165046 - DNA, 52 bp, Artificial
  Synthetic oligonucleotide
attgaagtcggcagctctagccggaaggaagctaaagggagttgacgcgctt

SEQ ID NO: 165047 - DNA, 52 bp, Artificial
  Synthetic oligonucleotide
ctccgccctaaaataggacgaagttacattcgcttatataccacctatggtt

SEQ ID NO: 165048 - DNA, 52 bp, Artificial
  Synthetic oligonucleotide
gccatagcagagaagccgaccatacttataagtgttaatgtcattccagata

SEQ ID NO: 165049 - DNA, 52 bp, Artificial
  Synthetic oligonucleotide
aactctcctcgaaggtcttctatttggaacagccaggggcggctttacggga

SEQ ID NO: 165050 - DNA, 52 bp, Artificial
  Synthetic oligonucleotide
ttcactcagtaagttcccgtttcggggagtccgcagagggagcccgggtagc

SEQ ID NO: 165051 - DNA, 52 bp, Artificial
  Synthetic oligonucleotide
aagaacggacataccgaccagctctgcggtcagtgacgttatcatatggagc

SEQ ID NO: 165052 - DNA, 52 bp, Artificial
  Synthetic oligonucleotide
cagaagtccgatgcccaggtccttcatggtacgcagggtcatatgtatgcgc

SEQ ID NO: 165053 - DNA, 52 bp, Artificial
  Synthetic oligonucleotide
gccgatagcttatttgctaaccccggagttaagtccgattcatgtgatacaa

SEQ ID NO: 165054 - DNA, 52 bp, Artificial
  Synthetic oligonucleotide
aagagttatagaagctgtaatccagccaggtacaactgggtctcccataaaa

SEQ ID NO: 165055 - DNA, 52 bp, Artificial
  Synthetic oligonucleotide
gaaccggacccgcagtgatctccccctttggtgtagctccgctcccggtgaa

SEQ ID NO: 165056 - DNA, 54 bp, Artificial
  Synthetic oligonucleotide
gttataggtgagtggttaaaggaataacactataaaaaactggtcggctcacca

SEQ ID NO: 165057 - DNA, 59 bp, Artificial
  Synthetic oligonucleotide
agggcaggacgccaagcaccgccattgtaattataacgaccagctgcaaggtaacgagc

SEQ ID NO: 165058 - DNA, 52 bp, Artificial
  Synthetic oligonucleotide
tcttactctgttggtgttcggtccggttggaaatacaatcggcggagcaatc

SEQ ID NO: 165059 - DNA, 52 bp, Artificial
  Synthetic oligonucleotide
catgtcggcattaacaggcggacatagggagcctgttaatgccgaacataag

SEQ ID NO: 165060 - DNA, 52 bp, Artificial
  Synthetic oligonucleotide
cgccggctccgtttacaatactgttcacacgggcacaagcgtcccaggacct

SEQ ID NO: 165061 - DNA, 52 bp, Artificial
  Synthetic oligonucleotide
tctacctgtggtattgtctggtctgtggcgtatttataggctttatatacac

SEQ ID NO: 165062 - DNA, 52 bp, Artificial
  Synthetic oligonucleotide
ttctgccggaattttacgaaaacgaacggtatcagggcagaaaaccttatgc

SEQ ID NO: 165063 - DNA, 52 bp, Artificial
  Synthetic oligonucleotide
tcgggccgtgcttcctcataaaatgcttgtctagcagcacctgcggcatggg

SEQ ID NO: 165064 - DNA, 52 bp, Artificial
  Synthetic oligonucleotide
ctcgaatgtgaaagctgacgagatagaggggatagggttatctccaattaga

SEQ ID NO: 165065 - DNA, 52 bp, Artificial
  Synthetic oligonucleotide
tcgcgttacatggatgggaagataactggtcaaatgatggacttgcattagt

SEQ ID NO: 165066 - DNA, 52 bp, Artificial
  Synthetic oligonucleotide
cagattcgtactcatcttggtgattgcgttctatctcttgagagttatcagc

SEQ ID NO: 165067 - DNA, 52 bp, Artificial
  Synthetic oligonucleotide
ttcttggtggatactacttatgggctccattcacattcgttattaagggagc

SEQ ID NO: 165068 - DNA, 60 bp, Artificial
  Synthetic oligonucleotide
agggaatcgttgcgatgtgtgctcctgccttggcagcgttcatcacatggaggttgtgtc

SEQ ID NO: 165069 - DNA, 52 bp, Artificial
  Synthetic oligonucleotide
tccggcactatccaaaatacaaggccggagacctgacactcgttgagcttgc

SEQ ID NO: 165070 - DNA, 52 bp, Artificial
  Synthetic oligonucleotide
ttgaatctttaacagattctatgggtgctactgactcaacttccgcctttgt

SEQ ID NO: 165071 - DNA, 52 bp, Artificial
  Synthetic oligonucleotide
gatttaatatattcggtatcagaagggctatggtactggaacggttaagagc

SEQ ID NO: 165072 - DNA, 52 bp, Artificial
  Synthetic oligonucleotide
ctatggccttaccaagccctactattccagctgtgttttctgtgctagccct

SEQ ID NO: 165073 - DNA, 52 bp, Artificial
  Synthetic oligonucleotide
gcaaccgtcggagtaggagctattcccagacaagccacttccgctcccaccg

SEQ ID NO: 165074 - DNA, 52 bp, Artificial
  Synthetic oligonucleotide
tgtgacacatatggagtatgttgaggaccctgcatataggaataagggtgcc

SEQ ID NO: 165075 - DNA, 52 bp, Artificial
  Synthetic oligonucleotide
ctatccctcgctttaggaggcgtaagtccttcacctagtttaacacagtcaa

SEQ ID NO: 165076 - DNA, 52 bp, Artificial
  Synthetic oligonucleotide
gcaataggctactgcatagttggattaagggataatagtgggagagctatgc

SEQ ID NO: 165077 - DNA, 52 bp, Artificial
  Synthetic oligonucleotide
aacaggcggttcccaacatgcgcaggaacaaggaggatgcacacgtcgggaa

SEQ ID NO: 165078 - DNA, 52 bp, Artificial
  Synthetic oligonucleotide
aaccccatcttctaagcttgtctcccattcaaagctgccactagctaacggt

SEQ ID NO: 165079 - DNA, 60 bp, Artificial
  Synthetic oligonucleotide
gaggagcacatacctgattcgttgaatttgcaagctttcgcatcgcactcaatttctgga

SEQ ID NO: 165080 - DNA, 52 bp, Artificial
  Synthetic oligonucleotide
tgtaatgtgtttattgcactctgtacatattgtggtcccggttctacacctg

SEQ ID NO: 165081 - DNA, 52 bp, Artificial
  Synthetic oligonucleotide
gattaggggcaaccagatggcagaccataagtaaagtaatagttccctctgc

SEQ ID NO: 165082 - DNA, 52 bp, Artificial
  Synthetic oligonucleotide
ccgaggtcacttgccgatttgcagtggtcaccggataatacgccaagcccgc

SEQ ID NO: 165083 - DNA, 52 bp, Artificial
  Synthetic oligonucleotide
ctcatagaggctctaacttgtggagtctgccctatgtaagtggtgttgagag

SEQ ID NO: 165084 - DNA, 52 bp, Artificial
  Synthetic oligonucleotide
aacgacatcagcatttgggactgtagggataacattagggcttactcctaat

SEQ ID NO: 165085 - DNA, 52 bp, Artificial
  Synthetic oligonucleotide
cgcagtgatctccccctttggtgtagctccgctcccggtgaagggatgtggt

SEQ ID NO: 165086 - DNA, 52 bp, Artificial
  Synthetic oligonucleotide
ccagccggggataatcgacacccgttctgtccaccgcctttgtacccagacc

SEQ ID NO: 165087 - DNA, 52 bp, Artificial
  Synthetic oligonucleotide
aacgatcagggagctggtacctgtcagtaatacacacatggtggacatagcc

SEQ ID NO: 165088 - DNA, 52 bp, Artificial
  Synthetic oligonucleotide
ttagacctactagaggaagtagtggcagcgagtttagaggctggacatcgca

SEQ ID NO: 165089 - DNA, 52 bp, Artificial
  Synthetic oligonucleotide
gcaggaagatccctattaaacggatttccaggagtaaaccatggagtaaaag

SEQ ID NO: 165090 - DNA, 60 bp, Artificial
  Synthetic oligonucleotide
aggcatgataggggtagattccactatttgaatgtttgatgcagtcatgagcttttcaag

SEQ ID NO: 165091 - DNA, 52 bp, Artificial
  Synthetic oligonucleotide
tgctgatagtagtcatccgtatagctcagcggcataatacataccaggtgag

SEQ ID NO: 165092 - DNA, 52 bp, Artificial
  Synthetic oligonucleotide
tgcgcgcaaactgggactccagcttgtcgtgtgtgtgccggatgagagactg

SEQ ID NO: 165093 - DNA, 52 bp, Artificial
  Synthetic oligonucleotide
tgccaatactctggcagcagagatgtagtaagacaaagagcaactatgactg

SEQ ID NO: 165094 - DNA, 52 bp, Artificial
  Synthetic oligonucleotide
aacggtctcacatttgcaacgctcctgaaccggacccgcagtgatctccccc

SEQ ID NO: 165095 - DNA, 52 bp, Artificial
  Synthetic oligonucleotide
gaactctgcttaaagtgcttcaggactcccgtctccgtatcaaacgtcgaga

SEQ ID NO: 165096 - DNA, 52 bp, Artificial
  Synthetic oligonucleotide
gcatagtctgtcttactgtagaacggctaatatcatattgttcgcatagctc

SEQ ID NO: 165097 - DNA, 52 bp, Artificial
  Synthetic oligonucleotide
ccccatgcactttgttgggagattaccgattattgtccgttgaattgtaggc

SEQ ID NO: 165098 - DNA, 52 bp, Artificial
  Synthetic oligonucleotide
gatctactattggatcagtaggaataggtgcgcttacaatctctctaccaat

SEQ ID NO: 165099 - DNA, 52 bp, Artificial
  Synthetic oligonucleotide
attttacgtcaggcaaggaggcaggttccgcagatagttgaacctatctaaa

SEQ ID NO: 165100 - DNA, 52 bp, Artificial
  Synthetic oligonucleotide
aacaaacaatatcatgtgtggtggctttagaggatttggagctcctcaggcc

SEQ ID NO: 165101 - DNA, 56 bp, Artificial
  Synthetic oligonucleotide
gagactctcgtgttttttaataggttagttttagaatatacatgaaatacgataca

SEQ ID NO: 165102 - DNA, 52 bp, Artificial
  Synthetic oligonucleotide
gatcctcgtattacagactcacccgaaggttcccctacaccacgatttggcc

SEQ ID NO: 165103 - DNA, 52 bp, Artificial
  Synthetic oligonucleotide
aagtccggtgatagtattaaggcccatcgtcgcacaccacataatgttgcta

SEQ ID NO: 165104 - DNA, 52 bp, Artificial
  Synthetic oligonucleotide
gacaaggttaaggccaccaaggcacttcctaaaaccgctgccccctcacccg

SEQ ID NO: 165105 - DNA, 52 bp, Artificial
  Synthetic oligonucleotide
aagtctcggagccgcattccacaagcttgtcgtaggatacaatttcagctcg

SEQ ID NO: 165106 - DNA, 52 bp, Artificial
  Synthetic oligonucleotide
aataggcaaggcggctatagcaaacgctacagcacttggaactagagtggat

SEQ ID NO: 165107 - DNA, 52 bp, Artificial
  Synthetic oligonucleotide
atccagagtgacggaacgactcttcctccggtaatgcggtggcccggtcaca

SEQ ID NO: 165108 - DNA, 52 bp, Artificial
  Synthetic oligonucleotide
ccggtgtggtaggtggagattacgatgttaattcggtgccaataaagggaat

SEQ ID NO: 165109 - DNA, 52 bp, Artificial
  Synthetic oligonucleotide
aaaatcgcaagagaagtagcggcagtagcacagtatcctatttgacgtaagg

SEQ ID NO: 165110 - DNA, 52 bp, Artificial
  Synthetic oligonucleotide
caggagagctattagtaaaaggtgggtacgtaaatgaaaattacgtagacgc

SEQ ID NO: 165111 - DNA, 52 bp, Artificial
  Synthetic oligonucleotide
ccgtattattaagcttagtcatattacataacaagtctaagcacttatctat

SEQ ID NO: 165112 - DNA, 60 bp, Artificial
  Synthetic oligonucleotide
gagaatatcccatgtgcaatttcaagaaaagaagaggccattataagcggcgatattgga

SEQ ID NO: 165113 - DNA, 52 bp, Artificial
  Synthetic oligonucleotide
cataacagtggtagggccctaacaaacgcacttcccgcagttcctatagcta

SEQ ID NO: 165114 - DNA, 52 bp, Artificial
  Synthetic oligonucleotide
aaaagcccagaagcattttggaccatatatatgatgaaccccacagtacggc

SEQ ID NO: 165115 - DNA, 52 bp, Artificial
  Synthetic oligonucleotide
atagcttagatggagcaatactagttatatcaggagtagaggggattcagtc

SEQ ID NO: 165116 - DNA, 52 bp, Artificial
  Synthetic oligonucleotide
tatacagcgattgggaaactcccgatttccccgcctgtgccttgcgtgacaa

SEQ ID NO: 165117 - DNA, 52 bp, Artificial
  Synthetic oligonucleotide
ctgactaatccgtgtttattacaaagcacgtagatagttccatgtccacacc

SEQ ID NO: 165118 - DNA, 52 bp, Artificial
  Synthetic oligonucleotide
aatgcagtgtcttccccgcagcaatctattgctagcctgccgtaagttcctt

SEQ ID NO: 165119 - DNA, 52 bp, Artificial
  Synthetic oligonucleotide
gctgcaacaggtggacggaaacattatctgcccgctgatcgtcggggattct

SEQ ID NO: 165120 - DNA, 52 bp, Artificial
  Synthetic oligonucleotide
agttttccaaacatcggttgcgacagtgtgccaatcgtcatatagcaagagg

SEQ ID NO: 165121 - DNA, 52 bp, Artificial
  Synthetic oligonucleotide
ctggttgcgatgtaacactatatgacgtttctccatttgataaacttatact

SEQ ID NO: 165122 - DNA, 52 bp, Artificial
  Synthetic oligonucleotide
taggctttgcctagactagaaccttgagtgatagcaatttctccttatgctc

SEQ ID NO: 165123 - DNA, 59 bp, Artificial
  Synthetic oligonucleotide
cagctagtatagttccaatattaacgcatgatgtcgttttagatactcctcccttttga

SEQ ID NO: 165124 - DNA, 52 bp, Artificial
  Synthetic oligonucleotide
gcttaatgggattactcttacaagcctacgaatttatttattcgtgggttag

SEQ ID NO: 165125 - DNA, 52 bp, Artificial
  Synthetic oligonucleotide
cagtctgaccggaaggccatagaggactttaagaattatctggaaaggcggg

SEQ ID NO: 165126 - DNA, 52 bp, Artificial
  Synthetic oligonucleotide
gcttacgaacgatctgacaccgcagactctttcgtttacctatggctctacg

SEQ ID NO: 165127 - DNA, 52 bp, Artificial
  Synthetic oligonucleotide
ccccgtgaaagtcggggtggttttatcggcagccggagtgtgcacgatggca

SEQ ID NO: 165128 - DNA, 52 bp, Artificial
  Synthetic oligonucleotide
taggcaacactgtatcatttttaacgaaatcagaatgtacataaccatagcc

SEQ ID NO: 165129 - DNA, 52 bp, Artificial
  Synthetic oligonucleotide
taggatagttgtctatgggttgtgctagagggatgaagtacactagtccttg

SEQ ID NO: 165130 - DNA, 52 bp, Artificial
  Synthetic oligonucleotide
gcttccgacggcttatccttatttgtactctgtattacttggatgcggcagg

SEQ ID NO: 165131 - DNA, 52 bp, Artificial
  Synthetic oligonucleotide
tagccaggcgcttctagccattcaccctccactgcagtttcgcaggtggcag

SEQ ID NO: 165132 - DNA, 52 bp, Artificial
  Synthetic oligonucleotide
gcttgtcacccttatcgagtacttgacctattatcctagcatatggcgtgaa

SEQ ID NO: 165133 - DNA, 52 bp, Artificial
  Synthetic oligonucleotide
gagcggaggtccgatgcttgcggggagagtgaagggatgcaagacaagcctt

SEQ ID NO: 165134 - DNA, 58 bp, Artificial
  Synthetic oligonucleotide
aggagaaggggtatatctagcatctaattcggttaaaacattgattacagttgcattg

SEQ ID NO: 165135 - DNA, 52 bp, Artificial
  Synthetic oligonucleotide
cagcatttgtccgggggtgaacttaggcgggtcaccatagccagggcactta

SEQ ID NO: 165136 - DNA, 52 bp, Artificial
  Synthetic oligonucleotide
cgcctctttagacgttttaccagtctcatcttctgctattatacatccccac

SEQ ID NO: 165137 - DNA, 52 bp, Artificial
  Synthetic oligonucleotide
tccatatgctatcatagctggtgtatataaaagcagtgcctgtgaagttagc

SEQ ID NO: 165138 - DNA, 52 bp, Artificial
  Synthetic oligonucleotide
tcccgcaccgtatctggcacatctcctgcagcgatcaggtaagcaatcccct

SEQ ID NO: 165139 - DNA, 52 bp, Artificial
  Synthetic oligonucleotide
tcccttcggacggcaaactaggctactgggatggaggccggaatacgtccat

SEQ ID NO: 165140 - DNA, 52 bp, Artificial
  Synthetic oligonucleotide
ttgcaacgctcctgaaccggacccgcagtgatctccccctttggtgtagctc

SEQ ID NO: 165141 - DNA, 52 bp, Artificial
  Synthetic oligonucleotide
atgatccgaacctgatggtcggaatcgagacctctgacgatggagctgtata

SEQ ID NO: 165142 - DNA, 52 bp, Artificial
  Synthetic oligonucleotide
tccgatagctcctgcaagcccgccataccatccgcctaacagcagtgcccca

SEQ ID NO: 165143 - DNA, 52 bp, Artificial
  Synthetic oligonucleotide
gaacaccttgtataacagctgcagcgcaagttactgcatctactccctgcca

SEQ ID NO: 165144 - DNA, 52 bp, Artificial
  Synthetic oligonucleotide
ctcgtttgcctaccaactaatatttcaaaacctcgctccgctacctcatgta

SEQ ID NO: 165145 - DNA, 54 bp, Artificial
  Synthetic oligonucleotide
ttgaaggtgtttataacgcaaaagtaattcctcgttgggatggaccaggtacaa

SEQ ID NO: 165146 - DNA, 52 bp, Artificial
  Synthetic oligonucleotide
cgaggtacttcctagaatgaggagcacatacattcacccttttgatgatatg

SEQ ID NO: 165147 - DNA, 52 bp, Artificial
  Synthetic oligonucleotide
aaagcttcacgtcttggagaattttcagcatcagaacttgcaagtgcactgg

SEQ ID NO: 165148 - DNA, 52 bp, Artificial
  Synthetic oligonucleotide
gcggtcaagagctgcctgttgatacccgaggcactcgcccaaaccgctatct

SEQ ID NO: 165149 - DNA, 52 bp, Artificial
  Synthetic oligonucleotide
atgcacttgctccaatcgcttccattctcttggataaatctataacttcacg

SEQ ID NO: 165150 - DNA, 52 bp, Artificial
  Synthetic oligonucleotide
cataggtggttggtagggtggcggcatacagtgacctggcatcattggggga

SEQ ID NO: 165151 - DNA, 52 bp, Artificial
  Synthetic oligonucleotide
atcgctgacacactggaaccaaggggtttctttgccagcaggtataacggga

SEQ ID NO: 165152 - DNA, 52 bp, Artificial
  Synthetic oligonucleotide
tcagctataagtggtaaccacgaaagtggcattgcaactgataattcaaccg

SEQ ID NO: 165153 - DNA, 52 bp, Artificial
  Synthetic oligonucleotide
ccctaaacacacgagatggtgaatgtatacctaaagcgtctttagcaccatc

SEQ ID NO: 165154 - DNA, 51 bp, Artificial
  Synthetic oligonucleotide
gtatagagtatgttactcgctatgtaggcagtccagtcatggctcagagtc

SEQ ID NO: 165155 - DNA, 51 bp, Artificial
  Synthetic oligonucleotide
ggtgagcaagcattatttgagacgggtattaatggagtacatacggagata

SEQ ID NO: 165156 - DNA, 60 bp, Artificial
  Synthetic oligonucleotide
ttgaatacattgttaggataattattttgtgcagtatctaaatttacactcataccataa

SEQ ID NO: 165157 - DNA, 51 bp, Artificial
  Synthetic oligonucleotide
ttgaagcaccaattacaccatttgcacttgcagtagaacccgctgtaatta

SEQ ID NO: 165158 - DNA, 51 bp, Artificial
  Synthetic oligonucleotide
agaccacccctggtctgtctactagactaacgaaatcatttcctctataga

SEQ ID NO: 165159 - DNA, 51 bp, Artificial
  Synthetic oligonucleotide
cgactccggactcgtggcctataattagaactgcgtttacagttatcggta

SEQ ID NO: 165160 - DNA, 51 bp, Artificial
  Synthetic oligonucleotide
gtagagcttgatatagcaaggtggaggacaagtcttaaacgtaagataatg

SEQ ID NO: 165161 - DNA, 51 bp, Artificial
  Synthetic oligonucleotide
agaaccgcatatggtaggaataggtccatttattccgcaatgtgatacccc

SEQ ID NO: 165162 - DNA, 51 bp, Artificial
  Synthetic oligonucleotide
ttttgggcttaaccaagctggttcgtatgttcgagaggaggctggcgcaaa

SEQ ID NO: 165163 - DNA, 51 bp, Artificial
  Synthetic oligonucleotide
ttaatgataaccctgacacattaccagttgatgcttcaagtgcataagacg

SEQ ID NO: 165164 - DNA, 51 bp, Artificial
  Synthetic oligonucleotide
ttattgaacaagtatttgggattgatgcaggtctaaagagtggtttaggcg

SEQ ID NO: 165165 - DNA, 51 bp, Artificial
  Synthetic oligonucleotide
ttatgtatatgttcataggaggagcccctttagcacttgcatataaggcgg

SEQ ID NO: 165166 - DNA, 51 bp, Artificial
  Synthetic oligonucleotide
actgtcatttaatttcacataggctgatactgctttttgcgtgctttcact

SEQ ID NO: 165167 - DNA, 56 bp, Artificial
  Synthetic oligonucleotide
gttatatctccttgtccataaaccttaattactggttcactctcaactataaattc

SEQ ID NO: 165168 - DNA, 60 bp, Artificial
  Synthetic oligonucleotide
ttgaccgcatctgcggacaatgttttcggaagtatgccggaggacatgtcaacggtcgga

SEQ ID NO: 165169 - DNA, 51 bp, Artificial
  Synthetic oligonucleotide
tttacagcaggcaacgtacattggaggaagtgacttaaaacctactcaaaa

SEQ ID NO: 165170 - DNA, 51 bp, Artificial
  Synthetic oligonucleotide
tttccgagctccctaattgctgccactggactaactccttgccaaattaag

SEQ ID NO: 165171 - DNA, 51 bp, Artificial
  Synthetic oligonucleotide
gtacctataaatctgcttgaacctttggcaatatccagaactcaagtagct

SEQ ID NO: 165172 - DNA, 51 bp, Artificial
  Synthetic oligonucleotide
ttcccatgtggggaacgacgcatttgactttgcaacattactggctatgct

SEQ ID NO: 165173 - DNA, 51 bp, Artificial
  Synthetic oligonucleotide
acttgagctagctggactaaaagacgttagagctaaatctttagggtctaa

SEQ ID NO: 165174 - DNA, 51 bp, Artificial
  Synthetic oligonucleotide
cggcggtccgaactcccgtttcgaggacccgacaataaatgcggccgttaa

SEQ ID NO: 165175 - DNA, 51 bp, Artificial
  Synthetic oligonucleotide
ttccggaaccgtcaccgactgctactgttccagacgtaccgacaccgtcgc

SEQ ID NO: 165176 - DNA, 51 bp, Artificial
  Synthetic oligonucleotide
ggtgcctttcgcagcacaaatgatccctctattccaaatgatagctaaagt

SEQ ID NO: 165177 - DNA, 51 bp, Artificial
  Synthetic oligonucleotide
ttttctatgtagcacgttcaattataccagtagtatggggtattgcagcac

SEQ ID NO: 165178 - DNA, 51 bp, Artificial
  Synthetic oligonucleotide
aaagtgtcatcctgagtggaagcttataccgtttcatagtacatcagttag

SEQ ID NO: 165179 - DNA, 60 bp, Artificial
  Synthetic oligonucleotide
tgcaggtgcattttatgtccaggagataagaccctctaaaattcttaccactacagacaa

SEQ ID NO: 165180 - DNA, 51 bp, Artificial
  Synthetic oligonucleotide
cgactgcctcaacccgactctctacgaatttgaaatgcgcaacttggcgcc

SEQ ID NO: 165181 - DNA, 51 bp, Artificial
  Synthetic oligonucleotide
ttttgaaagctacaccatcacggtagtgtcatcccttcgcagctataccga

SEQ ID NO: 165182 - DNA, 51 bp, Artificial
  Synthetic oligonucleotide
acgctcctatttctgctaagcttaatggacttggagcaacacatgcagtgg

SEQ ID NO: 165183 - DNA, 51 bp, Artificial
  Synthetic oligonucleotide
ccagcttctaacatatggcttaactggtccaactataattggtgctctaaa

SEQ ID NO: 165184 - DNA, 51 bp, Artificial
  Synthetic oligonucleotide
tcgacacccgttctgtccaccgcctttgtacccagacctgcaaccaaacgc

SEQ ID NO: 165185 - DNA, 51 bp, Artificial
  Synthetic oligonucleotide
tcctcgatagcaggaacggccaccatagcgcactgtgtatcgtgaccggca

SEQ ID NO: 165186 - DNA, 51 bp, Artificial
  Synthetic oligonucleotide
tccggaagcattaatttgaatctgcgaaagagaagcataccgatttgcaac

SEQ ID NO: 165187 - DNA, 51 bp, Artificial
  Synthetic oligonucleotide
gttttggatatagttatcccttaaaaaagggattgtaactattaatgtatg

SEQ ID NO: 165188 - DNA, 51 bp, Artificial
  Synthetic oligonucleotide
acagcttatgaaggctttaagctaaaggggtatccagtacttactatgagt

SEQ ID NO: 165189 - DNA, 51 bp, Artificial
  Synthetic oligonucleotide
ccttcatcaccaatacctctagtaggaactgtagacattacaaagcctact

SEQ ID NO: 165190 - DNA, 60 bp, Artificial
  Synthetic oligonucleotide
tgcagcctctcgcctttgcactttctaagtagccttgaatatcttccgattgtatatcct

SEQ ID NO: 165191 - DNA, 51 bp, Artificial
  Synthetic oligonucleotide
taacgtagctataagtttagccataggtggggcaagtggagctgctattag

SEQ ID NO: 165192 - DNA, 51 bp, Artificial
  Synthetic oligonucleotide
aagggttatgtcgccccggaaggtgccaaagtctcttccaagctcggcagg

SEQ ID NO: 165193 - DNA, 51 bp, Artificial
  Synthetic oligonucleotide
tcattggttatgaaacgggtgccgtagatgaggtaatggaacaggcagcag

SEQ ID NO: 165194 - DNA, 51 bp, Artificial
  Synthetic oligonucleotide
tcatactgctaattctcacgaactcatcagaacctctgtatcctgatgtag

SEQ ID NO: 165195 - DNA, 51 bp, Artificial
  Synthetic oligonucleotide
tcataccagggatttaaatatccctggtatgaaatgagaagtaattatcgg

SEQ ID NO: 165196 - DNA, 51 bp, Artificial
  Synthetic oligonucleotide
taagtagaaggctagaagggcttccaagacattcatcaactcacgctgcgg

SEQ ID NO: 165197 - DNA, 51 bp, Artificial
  Synthetic oligonucleotide
cttcttgatgtgcaattatatcatttggtgacacttcaaaaaaagtaggca

SEQ ID NO: 165198 - DNA, 51 bp, Artificial
  Synthetic oligonucleotide
taatgtgtggcgtttctagccttttcctgcccgtatatcgtgaccatggtc

SEQ ID NO: 165199 - DNA, 51 bp, Artificial
  Synthetic oligonucleotide
tatggctcttggtaatttcgtaggaatgttataccaagctggtcgtgatac

SEQ ID NO: 165200 - DNA, 49 bp, Artificial
  Synthetic oligonucleotide
ccacggggaaaataccggctccgcacccgttgttttgaccgtaaaacgc

SEQ ID NO: 165201 - DNA, 59 bp, Artificial
  Synthetic oligonucleotide
cgtaatagccttccatccatttgaaacaacagtgcttacagttttcaatacacttgata

SEQ ID NO: 165202 - DNA, 51 bp, Artificial
  Synthetic oligonucleotide
cttctaacttagtgcagtcagctgttaacccagtatccaaatttgatgcta

SEQ ID NO: 165203 - DNA, 51 bp, Artificial
  Synthetic oligonucleotide
tacattaataatactgaagcatttaagattcaatcgacttatattaataat

SEQ ID NO: 165204 - DNA, 51 bp, Artificial
  Synthetic oligonucleotide
tataccttaacacttctagatgaaacctcaagtacaatctgcttctcaccg

SEQ ID NO: 165205 - DNA, 51 bp, Artificial
  Synthetic oligonucleotide
acaccggtgcttctcttatacattactttctgatgcttagagaatttggtg

SEQ ID NO: 165206 - DNA, 51 bp, Artificial
  Synthetic oligonucleotide
tataattcccaataaaggtgcagcatacgcatcagttccaaagtaaggcat

SEQ ID NO: 165207 - DNA, 51 bp, Artificial
  Synthetic oligonucleotide
acaccgagtctggtttcagaggtaggctgtgacggtataacccgttataag

SEQ ID NO: 165208 - DNA, 51 bp, Artificial
  Synthetic oligonucleotide
tataatagttacgggtgataaagatgcactccagcttagctcctccataac

SEQ ID NO: 165209 - DNA, 51 bp, Artificial
  Synthetic oligonucleotide
tagtacttatccggcttgaagcggtagcgttctgctttacggcctccgctg

SEQ ID NO: 165210 - DNA, 51 bp, Artificial
  Synthetic oligonucleotide
tactgttcacacgggcacaagcgtcccaggacctgtccgactcggaacttt

SEQ ID NO: 165211 - DNA, 51 bp, Artificial
  Synthetic oligonucleotide
tacttcttagagctacatcaaactgggcaagtgtgttgacagaggagttta

SEQ ID NO: 165212 - DNA, 58 bp, Artificial
  Synthetic oligonucleotide
tgattcgaagttgtcttttcaatctgttcaactaccttaggttcattcagtggttgtc

SEQ ID NO: 165213 - DNA, 51 bp, Artificial
  Synthetic oligonucleotide
taggcagcccgtcagtccggggttcctgcgcctcgggtcactggcgtcatt

SEQ ID NO: 165214 - DNA, 51 bp, Artificial
  Synthetic oligonucleotide
ccatcggaacaaccgttgtaatcccatcgaggaagatacagtcaccttctt

SEQ ID NO: 165215 - DNA, 51 bp, Artificial
  Synthetic oligonucleotide
cgctataagtactataacttatctcacccacagaattgaggccatttagga

SEQ ID NO: 165216 - DNA, 51 bp, Artificial
  Synthetic oligonucleotide
tagataaaatacattcaccgttgctgaaagtagttagatactctttagtac

SEQ ID NO: 165217 - DNA, 51 bp, Artificial
  Synthetic oligonucleotide
gtatatagaaagttaggcacagaagcaataggtgaggtaatatttgagggc

SEQ ID NO: 165218 - DNA, 51 bp, Artificial
  Synthetic oligonucleotide
tgtgattccagaaacatcagtaggctcaagtatggcagtgggcgaaaccct

SEQ ID NO: 165219 - DNA, 51 bp, Artificial
  Synthetic oligonucleotide
tgtaggaaacgaacttggtgatgagggactaaatgatatgcatatccatct

SEQ ID NO: 165220 - DNA, 51 bp, Artificial
  Synthetic oligonucleotide
tgtacctggagtggatttagaataccaaacatatgaagttatttctgatga

SEQ ID NO: 165221 - DNA, 51 bp, Artificial
  Synthetic oligonucleotide
aaccgaggggtaaggcgtaaatcatattgcttgtgtctgatggacatggtg

SEQ ID NO: 165222 - DNA, 51 bp, Artificial
  Synthetic oligonucleotide
gtcgtatcctttttgtaaatccacatgatgtagcaaaaccacattctacta

SEQ ID NO: 165223 - DNA, 56 bp, Artificial
  Synthetic oligonucleotide
ttgccggataaacttagagaaatcgcaagggtaagattggaatataaggaagtatc

SEQ ID NO: 165224 - DNA, 51 bp, Artificial
  Synthetic oligonucleotide
tgggtgtcaccttccgatagcccggcagtgaatgttccgttggattcaggg

SEQ ID NO: 165225 - DNA, 51 bp, Artificial
  Synthetic oligonucleotide
tggggcaatagaacgttattggtatctatgggaaaaggagaactattcggc

SEQ ID NO: 165226 - DNA, 51 bp, Artificial
  Synthetic oligonucleotide
aacctaaagttcctgatatacaaggttcttcccaatggtgtagggacaccc

SEQ ID NO: 165227 - DNA, 51 bp, Artificial
  Synthetic oligonucleotide
gtgcaaccgtggcaaaaggaaagtcaatcaaacttgcagtcacagtgaatg

SEQ ID NO: 165228 - DNA, 51 bp, Artificial
  Synthetic oligonucleotide
tgcttttaccctattatgtatctcggactcctctaagcccaaattagaggg

SEQ ID NO: 165229 - DNA, 51 bp, Artificial
  Synthetic oligonucleotide
aacgccgctatccatcacatattccccgtgttaaagcgatgccataatcgc

SEQ ID NO: 165230 - DNA, 51 bp, Artificial
  Synthetic oligonucleotide
cttgcataatactcctaagtacactgaatcagctatgcagcaagtcatatc

SEQ ID NO: 165231 - DNA, 51 bp, Artificial
  Synthetic oligonucleotide
tgcaaggcttcgtgacttagtaaagcttatggagctaagatgtggtatgtg

SEQ ID NO: 165232 - DNA, 51 bp, Artificial
  Synthetic oligonucleotide
aacgtgggtggtgatgaatcgagcgccttactgtggaagcgaggggacgcc

SEQ ID NO: 165233 - DNA, 51 bp, Artificial
  Synthetic oligonucleotide
aactaagaaagctgtactagatgcatataagtcttggatagagggtgaagg

SEQ ID NO: 165234 - DNA, 60 bp, Artificial
  Synthetic oligonucleotide
tgatggatacgaagcttgtatccatctatatgagtatcaaacaacagttaatactttttg

SEQ ID NO: 165235 - DNA, 51 bp, Artificial
  Synthetic oligonucleotide
accccgctgtacagtgatcaatagtataccttagcccaaattcttcgcaaa

SEQ ID NO: 165236 - DNA, 51 bp, Artificial
  Synthetic oligonucleotide
accatgtcttatacgccaatacttagccatatctgttccttgcgtcccaat

SEQ ID NO: 165237 - DNA, 51 bp, Artificial
  Synthetic oligonucleotide
accatcgaaatcaaacttgtatatgacatcatgggacgatagctccattac

SEQ ID NO: 165238 - DNA, 51 bp, Artificial
  Synthetic oligonucleotide
tgacagatatacaattactaatctacgcgataaaactaaagttctagattt

SEQ ID NO: 165239 - DNA, 51 bp, Artificial
  Synthetic oligonucleotide
tgacagaaatgccctcataggtgggccattcgccgcactctgcgttggtga

SEQ ID NO: 165240 - DNA, 51 bp, Artificial
  Synthetic oligonucleotide
ccatatttataacagtgtatggcaagacgatatagttgcagacagtgctgt

SEQ ID NO: 165241 - DNA, 51 bp, Artificial
  Synthetic oligonucleotide
tgaaagtggcaccctgcctgtaggggtccaccgtagggaaacgcagggttt

SEQ ID NO: 165242 - DNA, 51 bp, Artificial
  Synthetic oligonucleotide
cgccgaaaatctccacacggataaccttttcagccacagctataatacggg

SEQ ID NO: 165243 - DNA, 51 bp, Artificial
  Synthetic oligonucleotide
aagagcctccgtaaaacggatcggagcattgcgccccggtaccacaaccgt

SEQ ID NO: 165244 - DNA, 51 bp, Artificial
  Synthetic oligonucleotide
tctgctgaagtattcgatccgacaggtgtactccgttgaattctggtgaac

SEQ ID NO: 165245 - DNA, 57 bp, Artificial
  Synthetic oligonucleotide
ttggggttataaaggctctgtaaggtcattggaggtcactttcaagggtgattcata

SEQ ID NO: 165246 - DNA, 51 bp, Artificial
  Synthetic oligonucleotide
cgcttcttataccactagaaggacctatgctatatccacccaaaactggac

SEQ ID NO: 165247 - DNA, 51 bp, Artificial
  Synthetic oligonucleotide
tctgcatggatctcctcggcaaagctctccgtgataacggctccgccgata

SEQ ID NO: 165248 - DNA, 51 bp, Artificial
  Synthetic oligonucleotide
aagccccttccgctggtcatccccgtacggctggcataggcgctgctcgta

SEQ ID NO: 165249 - DNA, 51 bp, Artificial
  Synthetic oligonucleotide
tcggttttgaaccaggtcaaaatgctttagatggtttgtattcacctcaag

SEQ ID NO: 165250 - DNA, 51 bp, Artificial
  Synthetic oligonucleotide
acatgagtcagtcaagagttgaactgcctattcctggtcggcaagacgtga

SEQ ID NO: 165251 - DNA, 51 bp, Artificial
  Synthetic oligonucleotide
gctgcaggttggtgtgagagccgccacctcccgtatttgcgttcttccctt

SEQ ID NO: 165252 - DNA, 51 bp, Artificial
  Synthetic oligonucleotide
ccaaactctaacagtaaaatctatagagcttgcagcatgttggcttatacc

SEQ ID NO: 165253 - DNA, 51 bp, Artificial
  Synthetic oligonucleotide
catttgagccatagttgctgggaattcatgtctatatgctaatgttccaac

SEQ ID NO: 165254 - DNA, 51 bp, Artificial
  Synthetic oligonucleotide
catttccctctgttcgtacgcctaaaacactaccttctggtatataggatg

SEQ ID NO: 165255 - DNA, 51 bp, Artificial
  Synthetic oligonucleotide
atcagccatccatggttgataggtttctgagattccgtccagttggtagct

SEQ ID NO: 165256 - DNA, 57 bp, Artificial
  Synthetic oligonucleotide
aactacttcatcattgcaagaagtatttcctataagtttacctaaagcatgtactac

SEQ ID NO: 165257 - DNA, 51 bp, Artificial
  Synthetic oligonucleotide
gcgtgtagaagttgacaacgaatcaggtaaagtgatatctacaagtgatgg

SEQ ID NO: 165258 - DNA, 49 bp, Artificial
  Synthetic oligonucleotide
ctaaaacgttcgtttaacgctccttttcgttaccattggaacgctcctt

SEQ ID NO: 165259 - DNA, 51 bp, Artificial
  Synthetic oligonucleotide
atcttcgcccgcagccccaaaccacaacaatcttccccccgggacgaaaga

SEQ ID NO: 165260 - DNA, 51 bp, Artificial
  Synthetic oligonucleotide
atgagtctttcgtcccggggggaagattgttgtggtttggggctgcgggcg

SEQ ID NO: 165261 - DNA, 51 bp, Artificial
  Synthetic oligonucleotide
ctaaatctctaactaccgagaaaccatgtttctcaacgtgtgtttgtactg

SEQ ID NO: 165262 - DNA, 51 bp, Artificial
  Synthetic oligonucleotide
atgataaccgttaaagactcaattggagatgtacaaatacctaaaaatcct

SEQ ID NO: 165263 - DNA, 51 bp, Artificial
  Synthetic oligonucleotide
gcgaaggaatacttccaaccagactatgaagcctttgcacagcagtttata

SEQ ID NO: 165264 - DNA, 51 bp, Artificial
  Synthetic oligonucleotide
gcgaaagtgctgtttccagtaattgcacctgtcgcctttattgtaccagag

SEQ ID NO: 165265 - DNA, 51 bp, Artificial
  Synthetic oligonucleotide
gcctttgatagtggatgaagctcacggagcacacttggtcttcagccctct

SEQ ID NO: 165266 - DNA, 51 bp, Artificial
  Synthetic oligonucleotide
atggattgcgtctaagggattaaactcaaattacggtgcaagagaaatcct

SEQ ID NO: 165267 - DNA, 59 bp, Artificial
  Synthetic oligonucleotide
tgatacgtgagggccttccggctattccggatatatcttggtactcaaaagaagatcta

SEQ ID NO: 165268 - DNA, 51 bp, Artificial
  Synthetic oligonucleotide
atgtacatgcattctaatagaagcttgtacatgtaccttaattcagggagc

SEQ ID NO: 165269 - DNA, 51 bp, Artificial
  Synthetic oligonucleotide
gccgcgacgtttgaggacgacggatataccgggctgaacatggagcgtccg

SEQ ID NO: 165270 - DNA, 51 bp, Artificial
  Synthetic oligonucleotide
cggtatcaacactagcacttaaagcttggtattcagcctcggcaatttcat

SEQ ID NO: 165271 - DNA, 51 bp, Artificial
  Synthetic oligonucleotide
gggagctatattccttaacataggattggtaggctttgttggctgcacccc

SEQ ID NO: 165272 - DNA, 51 bp, Artificial
  Synthetic oligonucleotide
gggaagtattacactctataatcagggagttccgcttcagatcgcgctttc

SEQ ID NO: 165273 - DNA, 51 bp, Artificial
  Synthetic oligonucleotide
agcggttttgaggtgacgctctgcggacagcacagcatagtaggcgggatg

SEQ ID NO: 165274 - DNA, 51 bp, Artificial
  Synthetic oligonucleotide
ctttaaacaagaatcccttaactataagatataaacaactcggacggcgga

SEQ ID NO: 165275 - DNA, 51 bp, Artificial
  Synthetic oligonucleotide
aggcatcgtaagcgcctttgtcatcccctgtcatgacgagggctaggccga

SEQ ID NO: 165276 - DNA, 51 bp, Artificial
  Synthetic oligonucleotide
aggcgatcctttatatcttgacgttgctacaactcttcgtgaagcaggact

SEQ ID NO: 165277 - DNA, 51 bp, Artificial
  Synthetic oligonucleotide
ggatcacctgagaatcctatttgtgatcaagttctttgtaaccctagaagt

SEQ ID NO: 165278 - DNA, 56 bp, Artificial
  Synthetic oligonucleotide
ctcttatatatcgtacgggaatacgttatataagccaattcaattatgtacgggaa

SEQ ID NO: 165279 - DNA, 53 bp, Artificial
  Synthetic oligonucleotide
ttggtaagaaaactaaatgcatcaaaggatgtaggtttatctaaacttatttt

SEQ ID NO: 165280 - DNA, 51 bp, Artificial
  Synthetic oligonucleotide
agggaccgtgctattatcctcatggctgcgacaaccggccttcgtgcctgt

SEQ ID NO: 165281 - DNA, 51 bp, Artificial
  Synthetic oligonucleotide
ggatagccattaggctcccattttattcagagcttgtgaggggatacccct

SEQ ID NO: 165282 - DNA, 51 bp, Artificial
  Synthetic oligonucleotide
agggatagaataatcacttcggtttggggatctgattacgaaagggattat

SEQ ID NO: 165283 - DNA, 51 bp, Artificial
  Synthetic oligonucleotide
ggagcgattaaatccacgaatccaattgtaccactaagtgatactgcccca

SEQ ID NO: 165284 - DNA, 51 bp, Artificial
  Synthetic oligonucleotide
agtacaaccagctccgaaatttggaggtaaagttcctaaagatgcagtagg

SEQ ID NO: 165285 - DNA, 51 bp, Artificial
  Synthetic oligonucleotide
cgtagtctcttatcattgtccaactgtttgtagatagatcctttacccaga

SEQ ID NO: 165286 - DNA, 51 bp, Artificial
  Synthetic oligonucleotide
agtcagtaccaagctccggaaggcctaggctaccaaggtcacagccaccga

SEQ ID NO: 165287 - DNA, 51 bp, Artificial
  Synthetic oligonucleotide
ggaaccttgaaagccttgaattttctgcgttacagagggcgaaaggcaaca

SEQ ID NO: 165288 - DNA, 51 bp, Artificial
  Synthetic oligonucleotide
cctaagaacaaatcagcttcataattagaggccagttgatatgctgttagc

SEQ ID NO: 165289 - DNA, 51 bp, Artificial
  Synthetic oligonucleotide
gcttctttgactttaactcctttacttcctctacagatagtcccgtcttag

SEQ ID NO: 165290 - DNA, 53 bp, Artificial
  Synthetic oligonucleotide
tgaacctcccctaatctagatttttgtctaaactttgggggggcacttcataa

SEQ ID NO: 165291 - DNA, 51 bp, Artificial
  Synthetic oligonucleotide
gcttaggtcactttgctccgtgcgggtaggtaaacctgtggcaggaccggg

SEQ ID NO: 165292 - DNA, 51 bp, Artificial
  Synthetic oligonucleotide
gcttactttatccagagataatcgtttcagaggaaggtacagatttaggga

SEQ ID NO: 165293 - DNA, 51 bp, Artificial
  Synthetic oligonucleotide
ccctttttatattttgcgccacttaaccatgctgtttgaattaaaatatca

SEQ ID NO: 165294 - DNA, 51 bp, Artificial
  Synthetic oligonucleotide
gatagaccgggtgttacaaagagcaagcaatggattcgattaaaaggaaat

SEQ ID NO: 165295 - DNA, 51 bp, Artificial
  Synthetic oligonucleotide
cactgccggaggcgtccaaccagtgggcagccatccctcaggaggttcggt

SEQ ID NO: 165296 - DNA, 51 bp, Artificial
  Synthetic oligonucleotide
gagttggctaccaaagccccgatccgggtgggataacggttgcaggcggga

SEQ ID NO: 165297 - DNA, 51 bp, Artificial
  Synthetic oligonucleotide
ctcctggatatcggaatgcatggataaggggagccgcgtagtgcttctgcg

SEQ ID NO: 165298 - DNA, 51 bp, Artificial
  Synthetic oligonucleotide
gagcttctcaatgggtatatggtgaaaatccggattatgctagacagataa

SEQ ID NO: 165299 - DNA, 51 bp, Artificial
  Synthetic oligonucleotide
gagcattgcgccccggtaccacaaccgtattggtctgtgactgcggcgttg

SEQ ID NO: 165300 - DNA, 51 bp, Artificial
  Synthetic oligonucleotide
ctgcggacggcaattctatggcttcccttgcgggtcaccgctttctctccg

SEQ ID NO: 165301 - DNA, 57 bp, Artificial
  Synthetic oligonucleotide
aaactttatagttataacaggaagaggacttgcaatatattggctaatagaggcagt

SEQ ID NO: 165302 - DNA, 51 bp, Artificial
  Synthetic oligonucleotide
ccctagtcaccgctcccatcatcggtgacctgagtagcacaccggtggctc

SEQ ID NO: 165303 - DNA, 51 bp, Artificial
  Synthetic oligonucleotide
gagacgtgtctctcaccagactaacaatagcttcgactatgcatttccaag

SEQ ID NO: 165304 - DNA, 51 bp, Artificial
  Synthetic oligonucleotide
gagacgaatatttaggaaaaggcgaattaggatattggcgagatactcaca

SEQ ID NO: 165305 - DNA, 51 bp, Artificial
  Synthetic oligonucleotide
gacaacattcttacgttgatttactagatggtcagcatagaacatctgcgc

SEQ ID NO: 165306 - DNA, 51 bp, Artificial
  Synthetic oligonucleotide
cataagttctggagcattataggtatctgccattcttacaaccatgtctac

SEQ ID NO: 165307 - DNA, 51 bp, Artificial
  Synthetic oligonucleotide
cccgggcgccttcttccgtagtcttatacattttgcgccgcgggtctgagg

SEQ ID NO: 165308 - DNA, 51 bp, Artificial
  Synthetic oligonucleotide
ctgacgtccaagtgctattgtatagactcttgatacaaagttcgcaacatc

SEQ ID NO: 165309 - DNA, 51 bp, Artificial
  Synthetic oligonucleotide
gacgtcctatcttatgaagataatctggacgcttatatcctagaagcatag

SEQ ID NO: 165310 - DNA, 51 bp, Artificial
  Synthetic oligonucleotide
gacggagcggtaaacgttatcagtgctaacggacctaaacttggatcacat

SEQ ID NO: 165311 - DNA, 51 bp, Artificial
  Synthetic oligonucleotide
cccgcgcctatggggagtgggcctcggcatccatcaagacaaagcggggcg

SEQ ID NO: 165312 - DNA, 57 bp, Artificial
  Synthetic oligonucleotide
cgcgagggtggacgtcgactaaacactcaccacactacgtttgcgaggtggatagtc

SEQ ID NO: 165313 - DNA, 51 bp, Artificial
  Synthetic oligonucleotide
cagtccctcctctgtcacccggcagattccccttgtgacggttccgctgtc

SEQ ID NO: 165314 - DNA, 51 bp, Artificial
  Synthetic oligonucleotide
attcctgtaccgcttgtactacttccacttgtagtacctgtactaggtttt

SEQ ID NO: 165315 - DNA, 51 bp, Artificial
  Synthetic oligonucleotide
gcccatccttaggagtgccagtcgtaattacactaactggtacttccttag

SEQ ID NO: 165316 - DNA, 51 bp, Artificial
  Synthetic oligonucleotide
ccggctgcttcatggcagaggacaagcagcgatacatcccggctccccatg

SEQ ID NO: 165317 - DNA, 51 bp, Artificial
  Synthetic oligonucleotide
attgacattcatcaccccaacacctttcgtctcattacggacaaccatgta

SEQ ID NO: 165318 - DNA, 51 bp, Artificial
  Synthetic oligonucleotide
attggatgtctgacggagcctatatttatgctggacgtacaccccttccaa

SEQ ID NO: 165319 - DNA, 51 bp, Artificial
  Synthetic oligonucleotide
ctactatagatactgctggtgatatgagcattgctagcatcattggtacat

SEQ ID NO: 165320 - DNA, 51 bp, Artificial
  Synthetic oligonucleotide
catgcatggcttattaagaaccgttcatttgctagcttgggatatgatatg

SEQ ID NO: 165321 - DNA, 51 bp, Artificial
  Synthetic oligonucleotide
gaactgatcaagccccttccgctggtcatccccgtacggctggcataggcg

SEQ ID NO: 165322 - DNA, 51 bp, Artificial
  Synthetic oligonucleotide
gaactgccaacagtaacattctatacttagtactggcatttgctacaagca

SEQ ID NO: 165323 - DNA, 53 bp, Artificial
  Synthetic oligonucleotide
aaggacggtagcatggtgaatctaaacggagttgagagagggtttacccttat

SEQ ID NO: 165324 - DNA, 51 bp, Artificial
  Synthetic oligonucleotide
caacgcccgcttacagagatgctcccatgtgtcctcccgaatcttgccgcg

SEQ ID NO: 165325 - DNA, 51 bp, Artificial
  Synthetic oligonucleotide
caagtgctaatggatttgctcccgatgtcgttgaatgttcccaagattcca

SEQ ID NO: 165326 - DNA, 51 bp, Artificial
  Synthetic oligonucleotide
caatacttggcgtcgcagatccaagtacaagtttacatcccttaagcttac

SEQ ID NO: 165327 - DNA, 51 bp, Artificial
  Synthetic oligonucleotide
caatagttcggggccttcttctccgactaaattccagccacgtttagcatt

SEQ ID NO: 165328 - DNA, 51 bp, Artificial
  Synthetic oligonucleotide
ctatataagcgtaaagttcacaagctctatcccagttactagatactggac

SEQ ID NO: 165329 - DNA, 51 bp, Artificial
  Synthetic oligonucleotide
gcaattcaaattcgctaccctgcccggatgatgagaccaaaatctctcctc

SEQ ID NO: 165330 - DNA, 51 bp, Artificial
  Synthetic oligonucleotide
ctggacttgattcatctccagcctttgtaatgattaataatcgttcagctg

SEQ ID NO: 165331 - DNA, 51 bp, Artificial
  Synthetic oligonucleotide
gcaataattgcccaggttgcgctcacagccgacggccatatcgctgtagaa

SEQ ID NO: 165332 - DNA, 51 bp, Artificial
  Synthetic oligonucleotide
gaaggcatatggatgtgattatatgtcggcagcatctaacggaccaaggtt

SEQ ID NO: 165333 - DNA, 51 bp, Artificial
  Synthetic oligonucleotide
cacagttattgtccgatattttattaggacaacttccgcatacatcatccg

SEQ ID NO: 165334 - DNA, 60 bp, Artificial
  Synthetic oligonucleotide
tcctggagattctggagctatattattagatagaaatcataatgttatagggattcttat

SEQ ID NO: 165335 - DNA, 51 bp, Artificial
  Synthetic oligonucleotide
gaaggtggaatcgttaataggttaagttggtatcctgaatttagggctgtt

SEQ ID NO: 165336 - DNA, 51 bp, Artificial
  Synthetic oligonucleotide
gggtcatgattgtcagtatatcatgactgcttgaagatacattttgtacgg

SEQ ID NO: 165337 - DNA, 51 bp, Artificial
  Synthetic oligonucleotide
cgggcataattacatgtggtactcctaacggtaatggtattatgacctata

SEQ ID NO: 165338 - DNA, 51 bp, Artificial
  Synthetic oligonucleotide
ggtagcggcgttactgttcacacaggtgtttccgccaggtgttttcgtgca

SEQ ID NO: 165339 - DNA, 51 bp, Artificial
  Synthetic oligonucleotide
ggggccagatatgatgacgtgatcgcaggccatgagcccagcggacgggtt

SEQ ID NO: 165340 - DNA, 51 bp, Artificial
  Synthetic oligonucleotide
ccaagcatttgaataagtcctattagtgtacctgccataccaaaagctggt

SEQ ID NO: 165341 - DNA, 51 bp, Artificial
  Synthetic oligonucleotide
ctgtccgtatggcgtgtcaggacaggttccgcttgtacccccgctgtcgtc

SEQ ID NO: 165342 - DNA, 51 bp, Artificial
  Synthetic oligonucleotide
agagattctggccgataaggttccggtgtctattaaactgggcgtcctgtc

SEQ ID NO: 165343 - DNA, 51 bp, Artificial
  Synthetic oligonucleotide
cctgcccctctaccataaaacattaaatccccgactgcattcccttttaca

SEQ ID NO: 165344 - DNA, 51 bp, Artificial
  Synthetic oligonucleotide
agcaccgttgccggtaagcaccgcatctccgggacccacttcggtgatagt

SEQ ID NO: 165345 - DNA, 59 bp, Artificial
  Synthetic oligonucleotide
cgtgagatattaagtaaaagactccgaaggattgactgcttaacgaaaagtctgatgca

SEQ ID NO: 165346 - DNA, 51 bp, Artificial
  Synthetic oligonucleotide
agacggagcttaccatttatccggaacgtgcgcagtggcaggtctgggacc

SEQ ID NO: 165347 - DNA, 50 bp, Artificial
  Synthetic oligonucleotide
actgcggctatgaagggctgcaatacgactccagcctgctttggggcgga

SEQ ID NO: 165348 - DNA, 50 bp, Artificial
  Synthetic oligonucleotide
cgaagtccataagaatcggctcatgcgcacggattttccttcctgtcgga

SEQ ID NO: 165349 - DNA, 50 bp, Artificial
  Synthetic oligonucleotide
aactgcgtcggagagggcaataacgcgctggagctccgcatagctgtcgg

SEQ ID NO: 165350 - DNA, 49 bp, Artificial
  Synthetic oligonucleotide
attcgtttcgcgggaaccctttcccgaatgacgggccggtggttaagcc

SEQ ID NO: 165351 - DNA, 50 bp, Artificial
  Synthetic oligonucleotide
tggattaacggttgctctagttccaactgtacgtctaggcacgtttacta

SEQ ID NO: 165352 - DNA, 50 bp, Artificial
  Synthetic oligonucleotide
tgaatcattgacgtttgggtaaaacttgccagggtcttatgtgtgctgtg

SEQ ID NO: 165353 - DNA, 50 bp, Artificial
  Synthetic oligonucleotide
attctggcagctgctaacgccgcttcaacgcctgcatgaccagctccaac

SEQ ID NO: 165354 - DNA, 50 bp, Artificial
  Synthetic oligonucleotide
actgggatccgacggacccgtccattcagcgctagcccatctgtgcggaa

SEQ ID NO: 165355 - DNA, 50 bp, Artificial
  Synthetic oligonucleotide
aactcctgcaacatccgaatcatatttccgttctgtaattaaattatgca

SEQ ID NO: 165356 - DNA, 58 bp, Artificial
  Synthetic oligonucleotide
aaacataattcttcctatgtctttataagtataaccagcattatataagtccattatc

SEQ ID NO: 165357 - DNA, 50 bp, Artificial
  Synthetic oligonucleotide
attgagggctcatcacgtaggcgcaggccagtacatgggggagctgtgag

SEQ ID NO: 165358 - DNA, 50 bp, Artificial
  Synthetic oligonucleotide
gcatttagggataaaagcggtaatcttcttggagtggctactgctgatat

SEQ ID NO: 165359 - DNA, 50 bp, Artificial
  Synthetic oligonucleotide
attgccgctgtgcctaccgtcaccgtgatagtcggtgctttcacgccgct

SEQ ID NO: 165360 - DNA, 50 bp, Artificial
  Synthetic oligonucleotide
ggttagaaagggttgacaggttaacagaacagcttgatccagcaagtgcc

SEQ ID NO: 165361 - DNA, 50 bp, Artificial
  Synthetic oligonucleotide
ccagacgatcggaaagaaacgaatgtactatgagaagaaatgtacgggat

SEQ ID NO: 165362 - DNA, 50 bp, Artificial
  Synthetic oligonucleotide
ccggcagttgctttccacggctggcggctcttcgcagaatacccagacac

SEQ ID NO: 165363 - DNA, 50 bp, Artificial
  Synthetic oligonucleotide
ccggaagtaatcgccccgcgcaccacaggagtcgttccgagttgcacttt

SEQ ID NO: 165364 - DNA, 50 bp, Artificial
  Synthetic oligonucleotide
aagcactatttaagtccccaatacttactccctgagtagaactatcattc

SEQ ID NO: 165365 - DNA, 50 bp, Artificial
  Synthetic oligonucleotide
aagcacgccggtcattctgcgtcatccagttcccaaattcaccgccacgg

SEQ ID NO: 165366 - DNA, 50 bp, Artificial
  Synthetic oligonucleotide
atgtacggccggtctttcctgcccgcatccgtcacggtactgtctcctgt

SEQ ID NO: 165367 - DNA, 57 bp, Artificial
  Synthetic oligonucleotide
tcggaagccctacgatgtcggttgaggtaggcgttattgctctccgaccattccgtc

SEQ ID NO: 165368 - DNA, 50 bp, Artificial
  Synthetic oligonucleotide
tctgccacataattcacaggggtcatatgcatgcagtaagatgtgcgggg

SEQ ID NO: 165369 - DNA, 50 bp, Artificial
  Synthetic oligonucleotide
aacctgcgcagtaccttcccggtagcaaacaaaccgcactggctgtccct

SEQ ID NO: 165370 - DNA, 50 bp, Artificial
  Synthetic oligonucleotide
cgccgcgtcagtttctccctaccactgcattatggccgcagcggaccagc

SEQ ID NO: 165371 - DNA, 50 bp, Artificial
  Synthetic oligonucleotide
atgtcttgtagaattcaatatggatcctcgcctgacgtcgcgcgccgcta

SEQ ID NO: 165372 - DNA, 50 bp, Artificial
  Synthetic oligonucleotide
aaccttccagcaccgggcaggcgtcagcccctatacatcagctttcgctt

SEQ ID NO: 165373 - DNA, 50 bp, Artificial
  Synthetic oligonucleotide
aagataatcgctccgagcctgccgcgccagctttgcccactgggcatatt

SEQ ID NO: 165374 - DNA, 50 bp, Artificial
  Synthetic oligonucleotide
atgtgccatctggttctgggaattacgtgcgcctgcgctcccgtaggggc

SEQ ID NO: 165375 - DNA, 50 bp, Artificial
  Synthetic oligonucleotide
actgcccgggagcgatggagcaggccgggattgcatatgctacggaccag

SEQ ID NO: 165376 - DNA, 50 bp, Artificial
  Synthetic oligonucleotide
cgccgaccatcttccactggccgacaacgtagtttccatcctcgccccgg

SEQ ID NO: 165377 - DNA, 50 bp, Artificial
  Synthetic oligonucleotide
attcaggccagaccgccgttcagacgaagaccgtccattcatgccagacc

SEQ ID NO: 165378 - DNA, 53 bp, Artificial
  Synthetic oligonucleotide
tttcagtattcccaactagtacctcaaaaggttctatgaataaattttccctg

SEQ ID NO: 165379 - DNA, 50 bp, Artificial
  Synthetic oligonucleotide
attccacttcccgtccagtccgctgtcagaaagagagccgcggtccggct

SEQ ID NO: 165380 - DNA, 50 bp, Artificial
  Synthetic oligonucleotide
aagacgggggaggattgcgggacatggaaacgaaaggccccggcgtattt

SEQ ID NO: 165381 - DNA, 50 bp, Artificial
  Synthetic oligonucleotide
attccctggcgtggcttgccaccaatggaactgcggcgatcgtttgcttc

SEQ ID NO: 165382 - DNA, 50 bp, Artificial
  Synthetic oligonucleotide
actgccgcacaccgcctccgttcctgctggaaccgccatgtccgatggaa

SEQ ID NO: 165383 - DNA, 50 bp, Artificial
  Synthetic oligonucleotide
attcggttgcggttacggtcctggctccggtctcagaagcggacggactt

SEQ ID NO: 165384 - DNA, 50 bp, Artificial
  Synthetic oligonucleotide
aacggggaacagccgggagaagctgtgaccgccgctatgttccaagccat

SEQ ID NO: 165385 - DNA, 50 bp, Artificial
  Synthetic oligonucleotide
gcagatgagaacggaatactcctaacgaacaaaccaatgcttcctacaat

SEQ ID NO: 165386 - DNA, 50 bp, Artificial
  Synthetic oligonucleotide
aacgggatatacgagataggcatgtaaacgtataacctccttcaggaaga

SEQ ID NO: 165387 - DNA, 50 bp, Artificial
  Synthetic oligonucleotide
gcagtcccattctaatcccttcgatttatgataagttgtaaccgtgactt

SEQ ID NO: 165388 - DNA, 50 bp, Artificial
  Synthetic oligonucleotide
ccggacgtaaccggccggcgctttaatctcacaaagcacatagcagccgg

SEQ ID NO: 165389 - DNA, 60 bp, Artificial
  Synthetic oligonucleotide
acatctgtaccattccaatccgcagtatcgtagttaatcatgctaacaccaccacgtttc

SEQ ID NO: 165390 - DNA, 54 bp, Artificial
  Synthetic oligonucleotide
tttcacaaacccaagttcctgtacctaaaggaccatcaaatttgtcataacatt

SEQ ID NO: 165391 - DNA, 50 bp, Artificial
  Synthetic oligonucleotide
gcaggtagaatcgctgaggcaacagggcttcaagagaagtttaccgaaat

SEQ ID NO: 165392 - DNA, 50 bp, Artificial
  Synthetic oligonucleotide
aacggcggggtctgcgtccataggctcggcttcctcggaaaagggcaagc

SEQ ID NO: 165393 - DNA, 50 bp, Artificial
  Synthetic oligonucleotide
gcagggcgttcactctcagctgatgcgatagccggttcggctacccgtat

SEQ ID NO: 165394 - DNA, 50 bp, Artificial
  Synthetic oligonucleotide
tgctccagatgacaatcctagtatgtaaggatcacctaaagggttttgta

SEQ ID NO: 165395 - DNA, 50 bp, Artificial
  Synthetic oligonucleotide
caaatgttccgctgggagcgcagacaggggctacaccggacggacgactt

SEQ ID NO: 165396 - DNA, 50 bp, Artificial
  Synthetic oligonucleotide
tgctgcaagaatgcatctaggagttgtagatgttaagggaccaggtatag

SEQ ID NO: 165397 - DNA, 50 bp, Artificial
  Synthetic oligonucleotide
aacgcgtcggtcctgtgctcgttcctgcgcacaaaccgggccacaatcac

SEQ ID NO: 165398 - DNA, 50 bp, Artificial
  Synthetic oligonucleotide
ccggaccttcctatgaagggatctgagtcgcgcagcaaaccccagcggta

SEQ ID NO: 165399 - DNA, 50 bp, Artificial
  Synthetic oligonucleotide
aacgccgcataatcgtacccgagtttcgcgatatcccccgcccggaacgg

SEQ ID NO: 165400 - DNA, 50 bp, Artificial
  Synthetic oligonucleotide
caacacctattagaccagattggatactattaggtaatgcactagcacca

SEQ ID NO: 165401 - DNA, 60 bp, Artificial
  Synthetic oligonucleotide
tcgtctccatgtcttactggatttccagtcatgtctgcatttatgtttgcattgtttagc

SEQ ID NO: 165402 - DNA, 50 bp, Artificial
  Synthetic oligonucleotide
actgtcggggcactatcacggcggaatcgtcaggatcccgggtatcgggg

SEQ ID NO: 165403 - DNA, 50 bp, Artificial
  Synthetic oligonucleotide
cggctttaccatgctcctatttaagttataggcaactgtataggatttgt

SEQ ID NO: 165404 - DNA, 50 bp, Artificial
  Synthetic oligonucleotide
caacgggcagctctgaccgcttgaggaggaattctcccgccgtagtcccc

SEQ ID NO: 165405 - DNA, 50 bp, Artificial
  Synthetic oligonucleotide
atttcacggtggcagactcccacgcagggctgcccataattcccacagcc

SEQ ID NO: 165406 - DNA, 50 bp, Artificial
  Synthetic oligonucleotide
gaacgtatactaaatgagctaaataatagtaaaccgaatgaaacaggcgg

SEQ ID NO: 165407 - DNA, 50 bp, Artificial
  Synthetic oligonucleotide
aacgtgaacccggtacggagccaagtgccggagagctggcagcactgatt

SEQ ID NO: 165408 - DNA, 50 bp, Artificial
  Synthetic oligonucleotide
aacgtcgcgccaccgtcagctcttttgggtttagcggaaccaacgcccat

SEQ ID NO: 165409 - DNA, 50 bp, Artificial
  Synthetic oligonucleotide
aacgagacctccaagcaccctctggcagtcatcctccggcaccggaagat

SEQ ID NO: 165410 - DNA, 50 bp, Artificial
  Synthetic oligonucleotide
agagtggcgtatggcataccggcatgaatcggcaggcggagagcgtcgct

SEQ ID NO: 165411 - DNA, 50 bp, Artificial
  Synthetic oligonucleotide
aacgtccgggtgctctttgtccgcacattcaaccgctgtcgttgtccccg

SEQ ID NO: 165412 - DNA, 56 bp, Artificial
  Synthetic oligonucleotide
tttagtatagcttaacactagctttcacacctcctcaattcctaagtactaatttc

SEQ ID NO: 165413 - DNA, 50 bp, Artificial
  Synthetic oligonucleotide
aacgtccggctcaggttactccaatcccggggcgtaacgatgacgtcccg

SEQ ID NO: 165414 - DNA, 50 bp, Artificial
  Synthetic oligonucleotide
aacggtttcacccgtcaaaaggctgtcgggggtcgcttccggctgctgct

SEQ ID NO: 165415 - DNA, 50 bp, Artificial
  Synthetic oligonucleotide
aacggtttcaaagcccaggtggtctgcgtgtcccgtgacgcttgcgtgaa

SEQ ID NO: 165416 - DNA, 50 bp, Artificial
  Synthetic oligonucleotide
cgacgcaaggtgcacgactttacatagggatattaggacgctttaatagc

SEQ ID NO: 165417 - DNA, 50 bp, Artificial
  Synthetic oligonucleotide
tgcatcggcatcggaggctgaggtgtaacgccactgccttacaggctcgc

SEQ ID NO: 165418 - DNA, 50 bp, Artificial
  Synthetic oligonucleotide
actggttgcaaggaccgtgcccttgcggtctacaatgtcacctctgcgga

SEQ ID NO: 165419 - DNA, 50 bp, Artificial
  Synthetic oligonucleotide
ccattctgccggaatgcgatgtgccggtgagactgccggaggaagactgc

SEQ ID NO: 165420 - DNA, 50 bp, Artificial
  Synthetic oligonucleotide
aacgggtgcaacaggagcaactggagccacaggccccgcaggcccgacag

SEQ ID NO: 165421 - DNA, 50 bp, Artificial
  Synthetic oligonucleotide
aacgggtatctgggggtacgatacgcggtggatgagccggttcccggaca

SEQ ID NO: 165422 - DNA, 50 bp, Artificial
  Synthetic oligonucleotide
aacggggaccggaaaggcctgatacgcgcctcgaagtttcggattggacg

SEQ ID NO: 165423 - DNA, 49 bp, Artificial
  Synthetic oligonucleotide
aaaccttttaaactaactattcctttgtcattactctttaagtcccaag

SEQ ID NO: 165424 - DNA, 49 bp, Artificial
  Synthetic oligonucleotide
aacggggaacgcgttgcaaaaacccccatcctctggttacccccaagcc

SEQ ID NO: 165425 - DNA, 50 bp, Artificial
  Synthetic oligonucleotide
aagggttgcactgccatcctcaccggtggtcagcccctcttttaccaggg

SEQ ID NO: 165426 - DNA, 50 bp, Artificial
  Synthetic oligonucleotide
aagggttgatacgctgcggcttcctgccacgctccaagtaggggcgcgta

SEQ ID NO: 165427 - DNA, 50 bp, Artificial
  Synthetic oligonucleotide
aagggttctgcctgacctttcaataaccatacaaatttatccccaccagt

SEQ ID NO: 165428 - DNA, 50 bp, Artificial
  Synthetic oligonucleotide
actccgccttgaacgcccttactcccgctcagtgtgccgggcctcatctg

SEQ ID NO: 165429 - DNA, 50 bp, Artificial
  Synthetic oligonucleotide
atgagtctttcgtcctgggggaggattgtcgtagtgtggggcggagggcg

SEQ ID NO: 165430 - DNA, 50 bp, Artificial
  Synthetic oligonucleotide
aagggcgcagacgtatccccggattccgctccccctgtagcaatagagta

SEQ ID NO: 165431 - DNA, 50 bp, Artificial
  Synthetic oligonucleotide
cgggtgggcatctggcgtcaaaccttgggtgcgtggaacttacgatcgca

SEQ ID NO: 165432 - DNA, 50 bp, Artificial
  Synthetic oligonucleotide
aagggaggtattttccgaccgctcgtcctcggttcgggaaatgacggcgg

SEQ ID NO: 165433 - DNA, 50 bp, Artificial
  Synthetic oligonucleotide
aaggcttagcgcgctgggaattgttcgctcccggcagggaaagggtacct

SEQ ID NO: 165434 - DNA, 60 bp, Artificial
  Synthetic oligonucleotide
tttacacctgcaactatcacagaagtgttcaaaagcacctcatagccttccatgtcagag

SEQ ID NO: 165435 - DNA, 50 bp, Artificial
  Synthetic oligonucleotide
atgagtgggtgctgaacatccgggagcaatgcgtgagtgcgggggtgacg

SEQ ID NO: 165436 - DNA, 50 bp, Artificial
  Synthetic oligonucleotide
aaggcgcgtttcccattctgccgtaagctgcggggacgtaaggctgtcgg

SEQ ID NO: 165437 - DNA, 50 bp, Artificial
  Synthetic oligonucleotide
tccccggagaagatggttgtgagttgggactgcgggcgaagataaagtct

SEQ ID NO: 165438 - DNA, 50 bp, Artificial
  Synthetic oligonucleotide
cctgagcggttgtttcccctccggttgtttccccactggctgccgttgtc

SEQ ID NO: 165439 - DNA, 50 bp, Artificial
  Synthetic oligonucleotide
aaggcgcctgtttcacacattcctactgtgcaacaccgctctgcggccca

SEQ ID NO: 165440 - DNA, 50 bp, Artificial
  Synthetic oligonucleotide
atgatccccggcatccgtcctcaggtccgaagtcctgccctggtgtatgc

SEQ ID NO: 165441 - DNA, 50 bp, Artificial
  Synthetic oligonucleotide
aaggcgccgccgtaagtgcgagtcagaaatccctcgctctccagctgttt

SEQ ID NO: 165442 - DNA, 50 bp, Artificial
  Synthetic oligonucleotide
atgcaccagcttgtaaagagccatgaactgcgcctgcagcccctgcttct

SEQ ID NO: 165443 - DNA, 50 bp, Artificial
  Synthetic oligonucleotide
aaggcgacatcgggaggggaaaagccccgcagtattgcgatgaccccgga

SEQ ID NO: 165444 - DNA, 50 bp, Artificial
  Synthetic oligonucleotide
atgccctgcgccaatcccatcacaagctgtagggctgcatcaaggagcat

SEQ ID NO: 165445 - DNA, 60 bp, Artificial
  Synthetic oligonucleotide
aaactcctattatccaacctgcgtatatatatagagggcatactcctactgatactattg

SEQ ID NO: 165446 - DNA, 50 bp, Artificial
  Synthetic oligonucleotide
aagtccgtgaggtaaccgtaaggagccagcggccgaaggtggggtcgatg

SEQ ID NO: 165447 - DNA, 50 bp, Artificial
  Synthetic oligonucleotide
atccgagcactttgggaggccaaggcgggcggatcatgaggtcaggagat

SEQ ID NO: 165448 - DNA, 50 bp, Artificial
  Synthetic oligonucleotide
aagtccgccaggctggccccatgcatgataatgtccacgtccccactgag

SEQ ID NO: 165449 - DNA, 50 bp, Artificial
  Synthetic oligonucleotide
atccgcggtacccctgtcgcagtacagcacacattccggcacatagcggg

SEQ ID NO: 165450 - DNA, 50 bp, Artificial
  Synthetic oligonucleotide
atccttccggcttccccctgcctgcggctttccatggaagcgatctcagc

SEQ ID NO: 165451 - DNA, 50 bp, Artificial
  Synthetic oligonucleotide
atcgcctcctgtcaaacggaatccggccgccctttccttaggccgtcaca

SEQ ID NO: 165452 - DNA, 50 bp, Artificial
  Synthetic oligonucleotide
acgttgtccgttggggcgtaaaccgcatccacggcacctaccatggactg

SEQ ID NO: 165453 - DNA, 50 bp, Artificial
  Synthetic oligonucleotide
ccggtaaaggagggaatcccggcttccggccgtttggatgaaccggtcac

SEQ ID NO: 165454 - DNA, 50 bp, Artificial
  Synthetic oligonucleotide
atctagccggggattcgtaaggcaggcgggagccgcttgtggggaacggc

SEQ ID NO: 165455 - DNA, 50 bp, Artificial
  Synthetic oligonucleotide
atctgaaatgcgacggggcggtgcagattacggccagccaccatcccttt

SEQ ID NO: 165456 - DNA, 60 bp, Artificial
  Synthetic oligonucleotide
tctgcaaatacacccatcatctttaacataccttctgtcattgggtctaactcttttgta

SEQ ID NO: 165457 - DNA, 50 bp, Artificial
  Synthetic oligonucleotide
tcatatcctgcgtggccctttaactggattccacggcagttcccatcaga

SEQ ID NO: 165458 - DNA, 50 bp, Artificial
  Synthetic oligonucleotide
atctgcccgcagattcatagacataggcgctccgcatacggggcagtggg

SEQ ID NO: 165459 - DNA, 50 bp, Artificial
  Synthetic oligonucleotide
atcttcaaagaccacacactgcgtcggttgcacgcccatacgctgcgcgc

SEQ ID NO: 165460 - DNA, 50 bp, Artificial
  Synthetic oligonucleotide
tcatttcccggtaaatgcgaagagccatgtcgagaaggggcatcactgct

SEQ ID NO: 165461 - DNA, 50 bp, Artificial
  Synthetic oligonucleotide
tccaacaggaataactgctgttgaaagaagggctatcgaggaagctagta

SEQ ID NO: 165462 - DNA, 50 bp, Artificial
  Synthetic oligonucleotide
cgcctggattggccgactgaaggccgaggcttaaccggttgattccggag

SEQ ID NO: 165463 - DNA, 50 bp, Artificial
  Synthetic oligonucleotide
aaggtacgggagagcggctatacgctaatggaggaatgcgccgggagcgt

SEQ ID NO: 165464 - DNA, 50 bp, Artificial
  Synthetic oligonucleotide
aaggtaacttagcggcggacgggtgagtaacgcgtgggcaacctgcctgt

SEQ ID NO: 165465 - DNA, 50 bp, Artificial
  Synthetic oligonucleotide
actatctgcatcccaccgcgattctcggctttcgcaccgcttcagcggca

SEQ ID NO: 165466 - DNA, 50 bp, Artificial
  Synthetic oligonucleotide
tcgggccatctgtctgctgcactgtaccagttgcgtgtcagacctcagga

SEQ ID NO: 165467 - DNA, 60 bp, Artificial
  Synthetic oligonucleotide
tctgcaacagatccttttactatatcgtaattatgagtatatccttcattcattctatta

SEQ ID NO: 165468 - DNA, 50 bp, Artificial
  Synthetic oligonucleotide
gccttgcatatgcgcgcaaactgggactccagcttgtcgtgtgtgtgccg

SEQ ID NO: 165469 - DNA, 50 bp, Artificial
  Synthetic oligonucleotide
agatggcttagtcttggccctctgcgtactctgacctgaccgcggctggg

SEQ ID NO: 165470 - DNA, 50 bp, Artificial
  Synthetic oligonucleotide
aagccttggactttcgacctgctcctacacgggcaccgccacggtttgtt

SEQ ID NO: 165471 - DNA, 50 bp, Artificial
  Synthetic oligonucleotide
atggcaggcggggcattcaggggcaagcacaacgatgaataccctctgga

SEQ ID NO: 165472 - DNA, 50 bp, Artificial
  Synthetic oligonucleotide
aagcctgcttgagcctgcgcggccatgagtgtgataccgctattgccgcg

SEQ ID NO: 165473 - DNA, 50 bp, Artificial
  Synthetic oligonucleotide
aagcctgaggctgcccaaaccgttgcggctaaaccggaccagtcggaaaa

SEQ ID NO: 165474 - DNA, 50 bp, Artificial
  Synthetic oligonucleotide
aagccggaccatacatgacccactggtcccgaccgcctacttttacgccg

SEQ ID NO: 165475 - DNA, 50 bp, Artificial
  Synthetic oligonucleotide
atggcccgcttgctgaaaactaccgttcaggacgtacagcgccacaggct

SEQ ID NO: 165476 - DNA, 50 bp, Artificial
  Synthetic oligonucleotide
aagcccctctgtctccacactcactcttggtacctccacctgcaattgac

SEQ ID NO: 165477 - DNA, 50 bp, Artificial
  Synthetic oligonucleotide
aagccccggcccccactttatggagcgccgttggcgcaatgaaaattcaa

SEQ ID NO: 165478 - DNA, 60 bp, Artificial
  Synthetic oligonucleotide
tcttcagtttcatttggtgctcaaccaatacacgctgatgggctagaaggagttagaact

SEQ ID NO: 165479 - DNA, 50 bp, Artificial
  Synthetic oligonucleotide
catgtttattacaacctgagtaccccctctaaagtcgattccaaagttca

SEQ ID NO: 165480 - DNA, 50 bp, Artificial
  Synthetic oligonucleotide
aagcccccaaaacttgccgtctttgccgtcagcaccgtcacagggctgca

SEQ ID NO: 165481 - DNA, 50 bp, Artificial
  Synthetic oligonucleotide
aagccatggggagtgcgtcatcatcgcagctgacctagctaccccacctg

SEQ ID NO: 165482 - DNA, 50 bp, Artificial
  Synthetic oligonucleotide
aagcatgggcgactcaggtcagcggttgcggaatacctaccgctctgctt

SEQ ID NO: 165483 - DNA, 50 bp, Artificial
  Synthetic oligonucleotide
atggggtggagatacgcagtgcggaagggcttggaaccactctggtggtg

SEQ ID NO: 165484 - DNA, 50 bp, Artificial
  Synthetic oligonucleotide
aagcatccaccgccgtacttccggagatcacaccggctgcaccgtttacg

SEQ ID NO: 165485 - DNA, 50 bp, Artificial
  Synthetic oligonucleotide
aagcatagcagagccccatggtgacatacgggccggcgtcttccggtgta

SEQ ID NO: 165486 - DNA, 50 bp, Artificial
  Synthetic oligonucleotide
actctccggagcacggtccctattctctcggcgcagcctgcgaccaggga

SEQ ID NO: 165487 - DNA, 50 bp, Artificial
  Synthetic oligonucleotide
aaggccccgcctgagggctttatctcacaggttatctcccggccggtgga

SEQ ID NO: 165488 - DNA, 50 bp, Artificial
  Synthetic oligonucleotide
aaggcccagttggagggcgcggacgccattcccacgggaagcacggtcaa

SEQ ID NO: 165489 - DNA, 60 bp, Artificial
  Synthetic oligonucleotide
tcttgatggtgttaaatcgtcagcaaaattatgtgcagcctgaggagacatataataatc

SEQ ID NO: 165490 - DNA, 50 bp, Artificial
  Synthetic oligonucleotide
atgcggtcatggtggacaggctgaaagccgccctgcctttgctgtcggat

SEQ ID NO: 165491 - DNA, 50 bp, Artificial
  Synthetic oligonucleotide
agcaatccccttaaccttccagcaccgggcaggcgtcagcccctatacat

SEQ ID NO: 165492 - DNA, 50 bp, Artificial
  Synthetic oligonucleotide
aaggattctgtcagccgtggcggcgtagtatggcacacacagggctctgg

SEQ ID NO: 165493 - DNA, 50 bp, Artificial
  Synthetic oligonucleotide
aaggacagccccgcaagggtgtagtcccaatcctctggcaaggacagcat

SEQ ID NO: 165494 - DNA, 50 bp, Artificial
  Synthetic oligonucleotide
aaggaaccggagactttcggtcacggcaatcctgagggcgtctacgctgc

SEQ ID NO: 165495 - DNA, 50 bp, Artificial
  Synthetic oligonucleotide
aaggaaatccgcgataccgagggggcgttcgatacccatgtgccgcacaa

SEQ ID NO: 165496 - DNA, 50 bp, Artificial
  Synthetic oligonucleotide
cgcctatgcggcagcttccctttaccctgcacctttgcaaaccggccggg

SEQ ID NO: 165497 - DNA, 50 bp, Artificial
  Synthetic oligonucleotide
tcctttcctgggagggtagcagccacaatgatgggatccgccgagacgat

SEQ ID NO: 165498 - DNA, 50 bp, Artificial
  Synthetic oligonucleotide
aagctgcctctcactgtgaccccggtggacggatcccgaagcgtacgctc

SEQ ID NO: 165499 - DNA, 50 bp, Artificial
  Synthetic oligonucleotide
atgcgtaccacaggcaccggacgtcgaaccgtaagtcaccacgccaaaga

SEQ ID NO: 165500 - DNA, 55 bp, Artificial
  Synthetic oligonucleotide
ctctaacttttgctttggtagtgcgaataccttagtaactggcttatattagtgg

SEQ ID NO: 165501 - DNA, 57 bp, Artificial
  Synthetic oligonucleotide
tctttaagttacggtaatgacaatgttcaaacttccattattggtggtgataatgaa

SEQ ID NO: 165502 - DNA, 50 bp, Artificial
  Synthetic oligonucleotide
cttgctggccagatgtggggaatatatacaaatcgttctcttgtacttgc

SEQ ID NO: 165503 - DNA, 50 bp, Artificial
  Synthetic oligonucleotide
tcgcagccgttgctctaagcttgtgtggagagtatcctttatcgcgagaa

SEQ ID NO: 165504 - DNA, 50 bp, Artificial
  Synthetic oligonucleotide
cgccgggtgccacaagcctggaatcttatgcgttccagggaacaagtgct

SEQ ID NO: 165505 - DNA, 50 bp, Artificial
  Synthetic oligonucleotide
aagcggcctgcattgaagcggtctgtaatgaaccggcccgcattgaaccg

SEQ ID NO: 165506 - DNA, 50 bp, Artificial
  Synthetic oligonucleotide
atggaatcctggtggacgcgggaagaacagcgaagcagatggagggggca

SEQ ID NO: 165507 - DNA, 50 bp, Artificial
  Synthetic oligonucleotide
aagcgccgatcccctccgggcgcatatcttccacatagagctggtactgc

SEQ ID NO: 165508 - DNA, 50 bp, Artificial
  Synthetic oligonucleotide
aagcgaaacgtcgcaggttcgactcctgtctgggacgccacaaactccgc

SEQ ID NO: 165509 - DNA, 50 bp, Artificial
  Synthetic oligonucleotide
ccctccttttgtcagagcggattttattacgccctctattttcccagggg

SEQ ID NO: 165510 - DNA, 50 bp, Artificial
  Synthetic oligonucleotide
aaagctcacagcaccgcccggagcaaagttcacagcaccgcccaggataa

SEQ ID NO: 165511 - DNA, 50 bp, Artificial
  Synthetic oligonucleotide
agaagcgcccgcaggctacaacaagctgacaggtgccgtgtccatcacag

SEQ ID NO: 165512 - DNA, 55 bp, Artificial
  Synthetic oligonucleotide
tgtttgtatacttacttctggataaacggtttttatagcatctggtaaacctcta

SEQ ID NO: 165513 - DNA, 50 bp, Artificial
  Synthetic oligonucleotide
cataggaccattccgcgccgagaaagtcttccgtcggttccgccgggata

SEQ ID NO: 165514 - DNA, 50 bp, Artificial
  Synthetic oligonucleotide
ttgcaaacactgggtacgggcgtgatagcagtctcatgcgacgttacaga

SEQ ID NO: 165515 - DNA, 50 bp, Artificial
  Synthetic oligonucleotide
ccctcccacgaggaaccaccggatcactaagcccgactttcgtccctgct

SEQ ID NO: 165516 - DNA, 50 bp, Artificial
  Synthetic oligonucleotide
aaagcgtgaaagaggcggaagacgaggccctatgggcggtggcggcccaa

SEQ ID NO: 165517 - DNA, 50 bp, Artificial
  Synthetic oligonucleotide
aaagcgctgagggggcagctcccgcatttgggaacgccgttcggaaggca

SEQ ID NO: 165518 - DNA, 50 bp, Artificial
  Synthetic oligonucleotide
cagcctatccgatgctggtccggtatctctgccctgcgccttggaacggc

SEQ ID NO: 165519 - DNA, 50 bp, Artificial
  Synthetic oligonucleotide
cagcctccggcgcagtgcgtgatactctggcagctcttgagtggcttagg

SEQ ID NO: 165520 - DNA, 50 bp, Artificial
  Synthetic oligonucleotide
aaagccgtcgcgcttctcaaacccgcccggtccctgtcctgccgtacgca

SEQ ID NO: 165521 - DNA, 50 bp, Artificial
  Synthetic oligonucleotide
aaagcagtgcctccgggggatataggagtggtgcgggaggctttgaccgc

SEQ ID NO: 165522 - DNA, 50 bp, Artificial
  Synthetic oligonucleotide
aaagagcgtgccgtgtgacgcgcctttttctccaagcgccttagcctgta

SEQ ID NO: 165523 - DNA, 58 bp, Artificial
  Synthetic oligonucleotide
ccttaatccattgtatttaaatagcaatccacaactagcaaaatccgttaccattgca

SEQ ID NO: 165524 - DNA, 50 bp, Artificial
  Synthetic oligonucleotide
ccctcaagaattgccagcaagcgaggatcagtataacctccgctcacctg

SEQ ID NO: 165525 - DNA, 50 bp, Artificial
  Synthetic oligonucleotide
agaaggggccctgaccgccttagcgggtttggcgtgtgtgatttttcccg

SEQ ID NO: 165526 - DNA, 50 bp, Artificial
  Synthetic oligonucleotide
agaagtgccggaagagtgggtgaaagcgcagggcttgctggaagtacgct

SEQ ID NO: 165527 - DNA, 50 bp, Artificial
  Synthetic oligonucleotide
agaattatggataaatatgatttaatttgggcaactagtcattggaaagg

SEQ ID NO: 165528 - DNA, 50 bp, Artificial
  Synthetic oligonucleotide
aaactgctgctccttgccgctggcaacaataaactgccactcctgcggga

SEQ ID NO: 165529 - DNA, 50 bp, Artificial
  Synthetic oligonucleotide
ttccagaatgtcgaaatacataccggagattgaaccgtatagggaaaacc

SEQ ID NO: 165530 - DNA, 50 bp, Artificial
  Synthetic oligonucleotide
cagaatccaacgtctgctgtgccgtgtaaccaaagatacggttggcatcc

SEQ ID NO: 165531 - DNA, 50 bp, Artificial
  Synthetic oligonucleotide
ctcctgctgtactcctgatacatcttatgatttggcggcgccatcacaag

SEQ ID NO: 165532 - DNA, 50 bp, Artificial
  Synthetic oligonucleotide
aaagttcctgacctattagacggaatagataggcttcataatgccacagt

SEQ ID NO: 165533 - DNA, 50 bp, Artificial
  Synthetic oligonucleotide
ttccgtccgtcgttcgggaacattctttcagcctcccgtcagggtccagc

SEQ ID NO: 165534 - DNA, 56 bp, Artificial
  Synthetic oligonucleotide
tgttccttctggtagtaaaaatttgggaagctttgaagtatgaaaatcataatgaa

SEQ ID NO: 165535 - DNA, 50 bp, Artificial
  Synthetic oligonucleotide
cagaccatcctccattacccgctcgcagatgccgttaaaaagcgccggga

SEQ ID NO: 165536 - DNA, 50 bp, Artificial
  Synthetic oligonucleotide
aaagtctttataaagtaaaacttccaatgaattaaatccctcaataggtg

SEQ ID NO: 165537 - DNA, 50 bp, Artificial
  Synthetic oligonucleotide
catatgtcccaactggtaacttaatcgccccaactgtcagtatcttgctc

SEQ ID NO: 165538 - DNA, 50 bp, Artificial
  Synthetic oligonucleotide
aaagtacccagccctacatgctgctcccgatatcccctgaaccccgcacc

SEQ ID NO: 165539 - DNA, 50 bp, Artificial
  Synthetic oligonucleotide
aaagtaatccttgcccgcgtccatacaccgcagaccaacctcgcaccgct

SEQ ID NO: 165540 - DNA, 50 bp, Artificial
  Synthetic oligonucleotide
aaaggttgtgggtgaagccataggcgagggtaaaaccctaaactggaagg

SEQ ID NO: 165541 - DNA, 50 bp, Artificial
  Synthetic oligonucleotide
ccctgagctgtaattcccagcgggtcgcttatcgccactcccacggtctt

SEQ ID NO: 165542 - DNA, 50 bp, Artificial
  Synthetic oligonucleotide
agactgcatttgggcccttcccacctcgtcgatgctgcactgctccacat

SEQ ID NO: 165543 - DNA, 50 bp, Artificial
  Synthetic oligonucleotide
aaaggggtgccatcctcttttaccctggagctcccgccctaccgaaggcc

SEQ ID NO: 165544 - DNA, 50 bp, Artificial
  Synthetic oligonucleotide
ccccgggccacaccatacaagttgcagagttccctctctccgggaagctt

SEQ ID NO: 165545 - DNA, 57 bp, Artificial
  Synthetic oligonucleotide
tgtatgcaatttagggggaatggaatacctagtggaggtggcgaaggtggtctagta

SEQ ID NO: 165546 - DNA, 50 bp, Artificial
  Synthetic oligonucleotide
aaaggggatgaccaggggagaaccccctccggttcagagcggaaggaata

SEQ ID NO: 165547 - DNA, 50 bp, Artificial
  Synthetic oligonucleotide
aaaggaattgtgagccacgcggaggagattaaggcgaatggcgcccggta

SEQ ID NO: 165548 - DNA, 50 bp, Artificial
  Synthetic oligonucleotide
ccctctggtcgggcggcctgcatcgttgggggcaaaatggtcgattgaat

SEQ ID NO: 165549 - DNA, 50 bp, Artificial
  Synthetic oligonucleotide
ccctcgcttcaacctggccatggataggtcacccggtttcgggtctacgg

SEQ ID NO: 165550 - DNA, 50 bp, Artificial
  Synthetic oligonucleotide
cgatatccgtacagcatgcggacttatcagtggaagtacgttgattaaaa

SEQ ID NO: 165551 - DNA, 50 bp, Artificial
  Synthetic oligonucleotide
aaaatgcgaagacaccagaatcgctggcgtattcttagggaactctagtt

SEQ ID NO: 165552 - DNA, 50 bp, Artificial
  Synthetic oligonucleotide
ccaattttggggcattactccacccttaagcacttgatgcatgagttctg

SEQ ID NO: 165553 - DNA, 50 bp, Artificial
  Synthetic oligonucleotide
tttctccagtagttatagtttcaatatgcttaccatcttgagttatttca

SEQ ID NO: 165554 - DNA, 50 bp, Artificial
  Synthetic oligonucleotide
agacccatcgctgatgcccgtctgtctgacggctccagggtccatgtggt

SEQ ID NO: 165555 - DNA, 50 bp, Artificial
  Synthetic oligonucleotide
agaccccgccagcgttcgcgtaaagttagagaggctcgatgccgccgcca

SEQ ID NO: 165556 - DNA, 58 bp, Artificial
  Synthetic oligonucleotide
tgtagttaccagcttctaaattattaactgttatcttaccagtattatctgtagtata

SEQ ID NO: 165557 - DNA, 50 bp, Artificial
  Synthetic oligonucleotide
agacccggtcaaattcgcccacaccctcgaaaaggccgccaacacctgcg

SEQ ID NO: 165558 - DNA, 50 bp, Artificial
  Synthetic oligonucleotide
agaccggtgaacaccccggatatacaggcacgggcagcaagaccggtgaa

SEQ ID NO: 165559 - DNA, 50 bp, Artificial
  Synthetic oligonucleotide
aaaacttgccgtctttgccgtcagcaccgtcacagggctgcaatctcgct

SEQ ID NO: 165560 - DNA, 50 bp, Artificial
  Synthetic oligonucleotide
aaaactctgcctgccgcatggacggattcggagcacaggcaaagcgccat

SEQ ID NO: 165561 - DNA, 50 bp, Artificial
  Synthetic oligonucleotide
caggggtggacgcctccctatgatcctgggacagcccttgattggaacga

SEQ ID NO: 165562 - DNA, 50 bp, Artificial
  Synthetic oligonucleotide
caggtacctgccggagccaatgggatgctccccgtaatccggtccatagg

SEQ ID NO: 165563 - DNA, 50 bp, Artificial
  Synthetic oligonucleotide
cccgctctttagaaagtcccaggcagctgcataccccggcagccgccatt

SEQ ID NO: 165564 - DNA, 50 bp, Artificial
  Synthetic oligonucleotide
aaaaccggatctgttcctcacggctcatggccctgtgggtccccaccgca

SEQ ID NO: 165565 - DNA, 50 bp, Artificial
  Synthetic oligonucleotide
agaccgtgcgccgaaacacataacgcctctccgggcggagctggatttaa

SEQ ID NO: 165566 - DNA, 50 bp, Artificial
  Synthetic oligonucleotide
cagtggttgaagcaaagaaaacttcagtggatgctatagttggaagacag

SEQ ID NO: 165567 - DNA, 55 bp, Artificial
  Synthetic oligonucleotide
ttaacgtatattttccgcgttttgcgagcactacccgcttttgtgtagtctgaac

SEQ ID NO: 165568 - DNA, 50 bp, Artificial
  Synthetic oligonucleotide
cagttactcccacatgtgtagctccgccctcaattcccgctatggcattt

SEQ ID NO: 165569 - DNA, 50 bp, Artificial
  Synthetic oligonucleotide
ccagttagtaatattgcaatgcctagtagcaaggtagcaacgcaaccaat

SEQ ID NO: 165570 - DNA, 50 bp, Artificial
  Synthetic oligonucleotide
aaactgcccgataaagggcgcctcccccaatcccgtccggaacactcccc

SEQ ID NO: 165571 - DNA, 50 bp, Artificial
  Synthetic oligonucleotide
aaactcccgttcttcctgtggggccgttccgccggagcatatctctgcct

SEQ ID NO: 165572 - DNA, 50 bp, Artificial
  Synthetic oligonucleotide
aaacgggcgtaagtctggtggtccgttcctcacagggaacgcgcagtgag

SEQ ID NO: 165573 - DNA, 50 bp, Artificial
  Synthetic oligonucleotide
agacaagggatggccgtatgcagggcggtgccatgtatgtactggagcgg

SEQ ID NO: 165574 - DNA, 50 bp, Artificial
  Synthetic oligonucleotide
ggtcagccacatctgatcctataccagttgaaccatatactaattcctta

SEQ ID NO: 165575 - DNA, 50 bp, Artificial
  Synthetic oligonucleotide
aaaccttccgttgggcaatgcagggagaagaagaggcggcagctgcgcaa

SEQ ID NO: 165576 - DNA, 50 bp, Artificial
  Synthetic oligonucleotide
aaaccgtctgcgggcaggtgcaggtgtccccatcgtcaaggacaatgcag

SEQ ID NO: 165577 - DNA, 50 bp, Artificial
  Synthetic oligonucleotide
aaaccggcaagagtccctcaaactgtcgtggctcctgattgctggggcga

SEQ ID NO: 165578 - DNA, 60 bp, Artificial
  Synthetic oligonucleotide
ttaatgccattagttcctggacttgctataacaaattcacttcgtgatataatagatgga

SEQ ID NO: 165579 - DNA, 50 bp, Artificial
  Synthetic oligonucleotide
aaaccgcttggacgggctcctccgttttattggcaaccgttacccggcaa

SEQ ID NO: 165580 - DNA, 50 bp, Artificial
  Synthetic oligonucleotide
tttatgttccgcagttacctgctctgcgtactctctgtcgcatccctggt

SEQ ID NO: 165581 - DNA, 50 bp, Artificial
  Synthetic oligonucleotide
agacataggcgctccgcatacggggcagtggggcactaattcaccgggca

SEQ ID NO: 165582 - DNA, 50 bp, Artificial
  Synthetic oligonucleotide
aaaccgccggggtctggtattcctggcagccgcctcaccggatgtattag

SEQ ID NO: 165583 - DNA, 50 bp, Artificial
  Synthetic oligonucleotide
aaaccgccgatattgagtttgcatggacgcgggaagctgccggagatcgc

SEQ ID NO: 165584 - DNA, 50 bp, Artificial
  Synthetic oligonucleotide
aaaccgccccgttggccgcgttatccgtaatcatgtacgcctccggcaat

SEQ ID NO: 165585 - DNA, 50 bp, Artificial
  Synthetic oligonucleotide
cagcgttcgcgtaaagttagagaggctcgatgccgccgccagtcgttccg

SEQ ID NO: 165586 - DNA, 50 bp, Artificial
  Synthetic oligonucleotide
aaacccaggacacacatgcgggaggcagcggatgtgcatgttcggcaacg

SEQ ID NO: 165587 - DNA, 50 bp, Artificial
  Synthetic oligonucleotide
cagcttaggtcccgactaaccctgggcggacgagccttccccaggaaacc

SEQ ID NO: 165588 - DNA, 50 bp, Artificial
  Synthetic oligonucleotide
cataccgcccaggggtctgccggtgcccgtactccacataggacgcatac

SEQ ID NO: 165589 - DNA, 55 bp, Artificial
  Synthetic oligonucleotide
tgtaaactggtactaataccacgtagactcttaccgtccattaatgccctgttta

SEQ ID NO: 165590 - DNA, 50 bp, Artificial
  Synthetic oligonucleotide
gacacttttcaagcgtacatgagtttgctgtctcaccatggtaggctggc

SEQ ID NO: 165591 - DNA, 50 bp, Artificial
  Synthetic oligonucleotide
aaccccggtaggcgctctgtcctccggcggctttgttgaggtgtccgatt

SEQ ID NO: 165592 - DNA, 50 bp, Artificial
  Synthetic oligonucleotide
tgtaatagcggtagcctgtcgcctcatctacgtatttgggcctcaaaagt

SEQ ID NO: 165593 - DNA, 50 bp, Artificial
  Synthetic oligonucleotide
ctatatacccttgttacgaaagaacgaccacccagtcgttaaaatgtgga

SEQ ID NO: 165594 - DNA, 50 bp, Artificial
  Synthetic oligonucleotide
caattagtgtatcggctgaaactctagctaatggagtgcaaactgttgaa

SEQ ID NO: 165595 - DNA, 50 bp, Artificial
  Synthetic oligonucleotide
ccgccccctgctgccccttgcacaacaagtggtttccacatatctgctct

SEQ ID NO: 165596 - DNA, 50 bp, Artificial
  Synthetic oligonucleotide
aaccccaaccgaccgggccttgaagtctggtcctgccatgaggataccgc

SEQ ID NO: 165597 - DNA, 50 bp, Artificial
  Synthetic oligonucleotide
agagcgggaggcggctggattaagatccgctacggggaacaggagggtta

SEQ ID NO: 165598 - DNA, 50 bp, Artificial
  Synthetic oligonucleotide
aaccattttgtcagccgggccctgacgccttaccagacgcagatggagga

SEQ ID NO: 165599 - DNA, 50 bp, Artificial
  Synthetic oligonucleotide
aaccacgctccggacatgggaagcgtgataggcgggctatgggaacgctt

SEQ ID NO: 165600 - DNA, 60 bp, Artificial
  Synthetic oligonucleotide
ttacgaacgtgtcacacttttaccagcacctacacagtgtgccaacaatgatgacttacc

SEQ ID NO: 165601 - DNA, 50 bp, Artificial
  Synthetic oligonucleotide
agagcccaagcggcatccttctgggtagaaccatagctgatgcccagcgc

SEQ ID NO: 165602 - DNA, 50 bp, Artificial
  Synthetic oligonucleotide
gcaagtccccaagctatccgcgtactgcacaaagctgcacggctctcgta

SEQ ID NO: 165603 - DNA, 50 bp, Artificial
  Synthetic oligonucleotide
aaccacagcccccagcagagtgcacgtcactgcctgtaacggcaggatca

SEQ ID NO: 165604 - DNA, 50 bp, Artificial
  Synthetic oligonucleotide
gcaacgtctccctcaatctttatcgctgagcgaagtttggtaccttccgg

SEQ ID NO: 165605 - DNA, 50 bp, Artificial
  Synthetic oligonucleotide
acttttctgcttgcatcataatgcctaacaagcttatccattgtcaaatc

SEQ ID NO: 165606 - DNA, 50 bp, Artificial
  Synthetic oligonucleotide
cacagaagggggctacatcggtcccgcctccgccaaagctcacccgcagg

SEQ ID NO: 165607 - DNA, 50 bp, Artificial
  Synthetic oligonucleotide
cacagccagcgaagttcccggtatcaggagctggtctgtacgcagccctt

SEQ ID NO: 165608 - DNA, 50 bp, Artificial
  Synthetic oligonucleotide
aaccacacggatttatctgcggcgaagcagcacggaacaggcccggattg

SEQ ID NO: 165609 - DNA, 50 bp, Artificial
  Synthetic oligonucleotide
aaccacaccggaagaagcgcacaaaatcggcatggaacttgccggggcgg

SEQ ID NO: 165610 - DNA, 50 bp, Artificial
  Synthetic oligonucleotide
ccccagtatgatctcgtgcttcacaaggtgtagaatgatccgctgtaacc

SEQ ID NO: 165611 - DNA, 60 bp, Artificial
  Synthetic oligonucleotide
taaaaatggagtgctagtatataataatgatcatggattagcaccagttgatctaccaca

SEQ ID NO: 165612 - DNA, 60 bp, Artificial
  Synthetic oligonucleotide
ttacgtgctaaagggtaatctctaataggagatccatatagatgtcctccaatgattgaa

SEQ ID NO: 165613 - DNA, 50 bp, Artificial
  Synthetic oligonucleotide
aacctcgtttccggttcgggatttcagcagccggactgcctccagacggt

SEQ ID NO: 165614 - DNA, 50 bp, Artificial
  Synthetic oligonucleotide
aacctcatagccggccactgcaacgttatcggtcgagggggaccacttga

SEQ ID NO: 165615 - DNA, 50 bp, Artificial
  Synthetic oligonucleotide
caaggatcagtttgtagcgaacagatggttgaatgtcaagctggaaacgt

SEQ ID NO: 165616 - DNA, 50 bp, Artificial
  Synthetic oligonucleotide
caaggggcaccccgtaactcatgccctttgggcgggtccgcagtaaactg

SEQ ID NO: 165617 - DNA, 50 bp, Artificial
  Synthetic oligonucleotide
catctgcctgacggaccgccggggttctgtggtgcggagaagcttgcgta

SEQ ID NO: 165618 - DNA, 50 bp, Artificial
  Synthetic oligonucleotide
agaggccggctgactacctcccgcttctcattccggcaggccacaccatc

SEQ ID NO: 165619 - DNA, 50 bp, Artificial
  Synthetic oligonucleotide
agaggcatccatggcacggcttaattccaggccgcgcacctgtgcaatgc

SEQ ID NO: 165620 - DNA, 50 bp, Artificial
  Synthetic oligonucleotide
gcaccctgtttcggatgtctgcatgctcccttcccacgcggtttctgtgg

SEQ ID NO: 165621 - DNA, 50 bp, Artificial
  Synthetic oligonucleotide
ccccaacgtcggaccaaccttattcacggatatagtcttaagtgtaactg

SEQ ID NO: 165622 - DNA, 50 bp, Artificial
  Synthetic oligonucleotide
aaccggtagtccttccctccggaatgcacaaaccgctcccaggctgcgcc

SEQ ID NO: 165623 - DNA, 60 bp, Artificial
  Synthetic oligonucleotide
ccttatcctttgatgcagcaacttcaagattaacatcatcaaagggaagttgatccttcc

SEQ ID NO: 165624 - DNA, 50 bp, Artificial
  Synthetic oligonucleotide
aaccgggaagcactccgctcgtgggcttcagggccgtccgattcccatat

SEQ ID NO: 165625 - DNA, 50 bp, Artificial
  Synthetic oligonucleotide
ccacagattgtctccaaccttaaatggggagggccctgtcgcggccacta

SEQ ID NO: 165626 - DNA, 50 bp, Artificial
  Synthetic oligonucleotide
aaccgcgcaacactgcggaacacactgctgcggcccaggtgggtaattgc

SEQ ID NO: 165627 - DNA, 50 bp, Artificial
  Synthetic oligonucleotide
aaccgccgatatcatttggcaaagcgacagcgagggcacctctcaccgca

SEQ ID NO: 165628 - DNA, 50 bp, Artificial
  Synthetic oligonucleotide
tggtgccggaagcgtattgtcccaaacaaggggcggtaccggtacatgga

SEQ ID NO: 165629 - DNA, 50 bp, Artificial
  Synthetic oligonucleotide
cgggagacggtctgctgactcactgcaatgccggacagctggcaactgta

SEQ ID NO: 165630 - DNA, 50 bp, Artificial
  Synthetic oligonucleotide
aaccgagcctaagctcacaacggtgcgcagagaactgcccaacgcagact

SEQ ID NO: 165631 - DNA, 50 bp, Artificial
  Synthetic oligonucleotide
aaccctgcggcagcgggctccctccacacaggatgtcccctcccagacgg

SEQ ID NO: 165632 - DNA, 50 bp, Artificial
  Synthetic oligonucleotide
ttaggctcaaatcccatggacctgagaaaaccgtatacctttcccttcac

SEQ ID NO: 165633 - DNA, 50 bp, Artificial
  Synthetic oligonucleotide
cacgccgcaaacggggagagtccagaacccgcggaaaacgtacggaaccc

SEQ ID NO: 165634 - DNA, 60 bp, Artificial
  Synthetic oligonucleotide
ttagctactatgcttaccttatctccttgatgcaactgtcctattgagtcataatctgtt

SEQ ID NO: 165635 - DNA, 50 bp, Artificial
  Synthetic oligonucleotide
gatcgggcagtccatgctgccttgttccgaaaaattctccgggccccctt

SEQ ID NO: 165636 - DNA, 50 bp, Artificial
  Synthetic oligonucleotide
cacggcagtttccgtagggacggccaatttccggaatccttatgcggcgg

SEQ ID NO: 165637 - DNA, 50 bp, Artificial
  Synthetic oligonucleotide
aaatgacgccgatgcccggttgtccggtgactccagccgacggcctggtt

SEQ ID NO: 165638 - DNA, 50 bp, Artificial
  Synthetic oligonucleotide
aaatcttcggtggcggtccgtcctcatcgaagcactccggtgctgcgtat

SEQ ID NO: 165639 - DNA, 50 bp, Artificial
  Synthetic oligonucleotide
aaatctctacctgactcgcccggatatgggccgccgcctgtgtgcagaag

SEQ ID NO: 165640 - DNA, 50 bp, Artificial
  Synthetic oligonucleotide
ctcccagagctttcaactgatacagcggagtatgagacgaaggtaaagtc

SEQ ID NO: 165641 - DNA, 50 bp, Artificial
  Synthetic oligonucleotide
aaatcgcatcaagactggggcaaagtccgccgtatgcctgcagcacgtcc

SEQ ID NO: 165642 - DNA, 50 bp, Artificial
  Synthetic oligonucleotide
agaaataccagccgctccgagatgttacacggcccgccacacggcctgta

SEQ ID NO: 165643 - DNA, 50 bp, Artificial
  Synthetic oligonucleotide
aaatcctcgcaaggtcggcttgcagcttcacgccctgcataaaggggaga

SEQ ID NO: 165644 - DNA, 50 bp, Artificial
  Synthetic oligonucleotide
agagaaccgtcgtccacgggtattcagcggcctacggtccggagcagaac

SEQ ID NO: 165645 - DNA, 54 bp, Artificial
  Synthetic oligonucleotide
ttaggacaaacaaccatacaacgctttcttttttcaccacatttacaaaaagca

SEQ ID NO: 165646 - DNA, 50 bp, Artificial
  Synthetic oligonucleotide
aaatatggcgccgggactctgccaccatgtttctggcccacatgttccgc

SEQ ID NO: 165647 - DNA, 49 bp, Artificial
  Synthetic oligonucleotide
aaataccttttcggggctgggatcgtagggcgggtaatcccggggcgaa

SEQ ID NO: 165648 - DNA, 50 bp, Artificial
  Synthetic oligonucleotide
aaataccgggtgcagacaagggatggccgtatgcagggcggtgccatgta

SEQ ID NO: 165649 - DNA, 50 bp, Artificial
  Synthetic oligonucleotide
ttcaccttctgatgggtctagtaatcctctcataaacagagcatgttcca

SEQ ID NO: 165650 - DNA, 50 bp, Artificial
  Synthetic oligonucleotide
cacttttaacattaacgggagtaggcttaggcagcctacttccagatcta

SEQ ID NO: 165651 - DNA, 50 bp, Artificial
  Synthetic oligonucleotide
agactttatcttcgcccgcagccccaaaccacgacaatcttcccccggga

SEQ ID NO: 165652 - DNA, 50 bp, Artificial
  Synthetic oligonucleotide
aacattccgaatgcgctccatgttgcctctgcatacccggagcggctgct

SEQ ID NO: 165653 - DNA, 50 bp, Artificial
  Synthetic oligonucleotide
gattctccatcttccagcggaaattcattgatatactggctgccttcccc

SEQ ID NO: 165654 - DNA, 50 bp, Artificial
  Synthetic oligonucleotide
tgttgtctattaatgaagagtgtttaacgctacttcggtaaaggtagact

SEQ ID NO: 165655 - DNA, 50 bp, Artificial
  Synthetic oligonucleotide
aacagtccaacagcatccgacggcccccatacggaggcgcgccacacagc

SEQ ID NO: 165656 - DNA, 59 bp, Artificial
  Synthetic oligonucleotide
ttagttatagtaagcaattagctttagtacagtatccagcaggtagtgtagtaagacag

SEQ ID NO: 165657 - DNA, 50 bp, Artificial
  Synthetic oligonucleotide
ctgcttgggacaggacttcgtatctctgaattatgcggtctgactacaaa

SEQ ID NO: 165658 - DNA, 50 bp, Artificial
  Synthetic oligonucleotide
aacaggcgccatcgggagtgaccatagagtttgccacgggatgcgggatt

SEQ ID NO: 165659 - DNA, 50 bp, Artificial
  Synthetic oligonucleotide
aacagcaatgcggagaaatccaccgggcggcggcagcttgacgcgctgct

SEQ ID NO: 165660 - DNA, 50 bp, Artificial
  Synthetic oligonucleotide
ccccatagaggcgaacatgtcggcgtacatattgcaaacggtctcaatgg

SEQ ID NO: 165661 - DNA, 50 bp, Artificial
  Synthetic oligonucleotide
aacagcaaaaacagctggccgatcctgctttccgcgctcgtgcgcaaggt

SEQ ID NO: 165662 - DNA, 50 bp, Artificial
  Synthetic oligonucleotide
aacacttcgaacccggagtctgaggcgattcccatagcatgcccggtggg

SEQ ID NO: 165663 - DNA, 50 bp, Artificial
  Synthetic oligonucleotide
cgcaccttgctacatctataggaattgcggcagcaaaacgtagatatagt

SEQ ID NO: 165664 - DNA, 50 bp, Artificial
  Synthetic oligonucleotide
aacactcccaggtctgatgcccatgtgcggatgccgccgaatggctgtca

SEQ ID NO: 165665 - DNA, 50 bp, Artificial
  Synthetic oligonucleotide
aacacggcattccacgaggtagcggtcccccatgccatgtcgcagcatgt

SEQ ID NO: 165666 - DNA, 50 bp, Artificial
  Synthetic oligonucleotide
aacaccggggaagccactgacagcgtggtgagtccgtttgagtgcggagc

SEQ ID NO: 165667 - DNA, 50 bp, Artificial
  Synthetic oligonucleotide
aaatttaactctaccggaatccttaaagatgttttaattaacaccattaa

SEQ ID NO: 165668 - DNA, 50 bp, Artificial
  Synthetic oligonucleotide
caccgttactcccccgatcccatgcacctttgctaacagccgttccgcta

SEQ ID NO: 165669 - DNA, 50 bp, Artificial
  Synthetic oligonucleotide
cacgccgattcgtttcaccggagtcgggcatgtttcgctgagcgcttcac

SEQ ID NO: 165670 - DNA, 50 bp, Artificial
  Synthetic oligonucleotide
aacaaaggccttccgccgatctctgtttcggtcaacgtctcccgtgcgga

SEQ ID NO: 165671 - DNA, 50 bp, Artificial
  Synthetic oligonucleotide
ttaggagaactatctttactatctaaccaggacgctacagcagaaccagg

SEQ ID NO: 165672 - DNA, 50 bp, Artificial
  Synthetic oligonucleotide
aggagggcgcagaccgtcagagaggccagcatgacaagcaccgcggctat

SEQ ID NO: 165673 - DNA, 50 bp, Artificial
  Synthetic oligonucleotide
acccaaacctgagcaaggagctgggcaccagacacagagctgcgctgggt

SEQ ID NO: 165674 - DNA, 50 bp, Artificial
  Synthetic oligonucleotide
accattcctgcgccgcgctcatttcaatgcgggtcggcttccatttgccg

SEQ ID NO: 165675 - DNA, 50 bp, Artificial
  Synthetic oligonucleotide
accattccatccggcacctcgcacacaatgtcgccccatgcagcggcaaa

SEQ ID NO: 165676 - DNA, 50 bp, Artificial
  Synthetic oligonucleotide
aggaggtttcgtcgcgcttcatcactccggcaattaccgtctcggccgga

SEQ ID NO: 165677 - DNA, 50 bp, Artificial
  Synthetic oligonucleotide
accatgcaagaccgggaatagaggcaccaagaagctccggcctgcgtcgt

SEQ ID NO: 165678 - DNA, 55 bp, Artificial
  Synthetic oligonucleotide
aacctccgcaagtttatttatactggttgcttgtccaccagttgacgtctactat

SEQ ID NO: 165679 - DNA, 50 bp, Artificial
  Synthetic oligonucleotide
acggaggattatgaggcgctgggggcacttgtagcggcaaaaggacggga

SEQ ID NO: 165680 - DNA, 50 bp, Artificial
  Synthetic oligonucleotide
aggatacggaacagatacccaggcgcttcgggcactcatggccgggctcc

SEQ ID NO: 165681 - DNA, 50 bp, Artificial
  Synthetic oligonucleotide
accaggtattggccaggcttatactgccgccgtctgtggctgccaccaaa

SEQ ID NO: 165682 - DNA, 50 bp, Artificial
  Synthetic oligonucleotide
accaggggaggactgcgtacgatactgatcagcggcatacccgcagccgg

SEQ ID NO: 165683 - DNA, 50 bp, Artificial
  Synthetic oligonucleotide
accaggatggggccgcccatttttccacaccaggcaatgacggtagctga

SEQ ID NO: 165684 - DNA, 50 bp, Artificial
  Synthetic oligonucleotide
aggcactggtgaccggaaaaggcgtatacacggatgatctggcaccggct

SEQ ID NO: 165685 - DNA, 50 bp, Artificial
  Synthetic oligonucleotide
accagaacgcgtggaatctgccgccctccgctcacagaccggtcccctcc

SEQ ID NO: 165686 - DNA, 50 bp, Artificial
  Synthetic oligonucleotide
accagaacaggctacacctttgccggatggacggaaaacggcgtggcagc

SEQ ID NO: 165687 - DNA, 50 bp, Artificial
  Synthetic oligonucleotide
accacgggatcacggacactgccagcacccgcgttccgttctggtacaca

SEQ ID NO: 165688 - DNA, 50 bp, Artificial
  Synthetic oligonucleotide
cgctttacttctaacgcacaacagcggtcattctataaactgcaccgggt

SEQ ID NO: 165689 - DNA, 56 bp, Artificial
  Synthetic oligonucleotide
ttctttttagtagctagaaacgtctgcaaatcaacaattagggcttctaagtgttc

SEQ ID NO: 165690 - DNA, 50 bp, Artificial
  Synthetic oligonucleotide
accaaactgatagggctcaggctccaggtgacggcagccgagacagctcc

SEQ ID NO: 165691 - DNA, 50 bp, Artificial
  Synthetic oligonucleotide
agcccctccattcagtttgcccccggcaggcgtacactctacttcccgtc

SEQ ID NO: 165692 - DNA, 50 bp, Artificial
  Synthetic oligonucleotide
acattgctaaagcggccggagtggcccagggcaccgtttccaacgttctc

SEQ ID NO: 165693 - DNA, 50 bp, Artificial
  Synthetic oligonucleotide
agcggtattgttggcggtggtcatcgcctgctggctggatgtggacgcga

SEQ ID NO: 165694 - DNA, 50 bp, Artificial
  Synthetic oligonucleotide
acggaggagctataaggctagcaggttctgtaaaagctagaaaggcgtca

SEQ ID NO: 165695 - DNA, 50 bp, Artificial
  Synthetic oligonucleotide
agcgtattggtgtgatcccccagctcacggtgtgttaagccgtgcaggga

SEQ ID NO: 165696 - DNA, 50 bp, Artificial
  Synthetic oligonucleotide
agctccggctcaccttgaccgaccctccgtcccggaacagcctccggatt

SEQ ID NO: 165697 - DNA, 50 bp, Artificial
  Synthetic oligonucleotide
accctgacacgcggttacggggtgtccctccgtcgcagcctactaggtcc

SEQ ID NO: 165698 - DNA, 50 bp, Artificial
  Synthetic oligonucleotide
agctgcgccaggaaacttatggagatgcagggagcggccccctttggaga

SEQ ID NO: 165699 - DNA, 50 bp, Artificial
  Synthetic oligonucleotide
acccggcagaggaggttcccggaagcatggacagggacggttctccctcc

SEQ ID NO: 165700 - DNA, 59 bp, Artificial
  Synthetic oligonucleotide
tgccatgctctttaagtccacttgtagcatttttaaattcgctttgaataactttcata

SEQ ID NO: 165701 - DNA, 50 bp, Artificial
  Synthetic oligonucleotide
accccttgattcccgccgacggggactcgcaatgggaccgttccctatat

SEQ ID NO: 165702 - DNA, 50 bp, Artificial
  Synthetic oligonucleotide
agctgtccggtgactttcgcgagctcctctcagggacgtcgacaggcgga

SEQ ID NO: 165703 - DNA, 50 bp, Artificial
  Synthetic oligonucleotide
accccgtttaacacggcagcagccctgagaaaagcgcggacagacaagcg

SEQ ID NO: 165704 - DNA, 50 bp, Artificial
  Synthetic oligonucleotide
aggacgttcttatagagtagcatcccatttggctacacaagcaagagatc

SEQ ID NO: 165705 - DNA, 50 bp, Artificial
  Synthetic oligonucleotide
aggactgccgcctcccttcaacgagtgttgtgacacgcgccgcttacctg

SEQ ID NO: 165706 - DNA, 50 bp, Artificial
  Synthetic oligonucleotide
accccggatgccgtcggtcctcctgaccatatgccacagcagatcgggca

SEQ ID NO: 165707 - DNA, 50 bp, Artificial
  Synthetic oligonucleotide
aggagacgcagagcgccaaatggaccgccctctcgtttgcaatccccact

SEQ ID NO: 165708 - DNA, 50 bp, Artificial
  Synthetic oligonucleotide
accccatacgccaaggcccgccccgattgctacgaccagggtcttcagag

SEQ ID NO: 165709 - DNA, 50 bp, Artificial
  Synthetic oligonucleotide
accccaacgtcagatcaaccgctgaggccccgtttcatagggcggcagtc

SEQ ID NO: 165710 - DNA, 50 bp, Artificial
  Synthetic oligonucleotide
aggagataggactgcggcgggggaaggtccgcctgaggaaagtgtgcctt

SEQ ID NO: 165711 - DNA, 60 bp, Artificial
  Synthetic oligonucleotide
ttctactaagctacattcacgataagtcagtcagtagttcgtccccattgcacattttgg

SEQ ID NO: 165712 - DNA, 50 bp, Artificial
  Synthetic oligonucleotide
aggaggctatggcgaggtccccgtataccggaaccgtgacggccacaatt

SEQ ID NO: 165713 - DNA, 50 bp, Artificial
  Synthetic oligonucleotide
acccacaaggtaccattcctgcgccgcgctcatttcaatgcgggtcggct

SEQ ID NO: 165714 - DNA, 50 bp, Artificial
  Synthetic oligonucleotide
acagtctttataccgtggggcgcagaggcgttgcgggggcggttcttgta

SEQ ID NO: 165715 - DNA, 50 bp, Artificial
  Synthetic oligonucleotide
acggcgtcgtcgcattccctttccacacggccttgtacgaactcaccgct

SEQ ID NO: 165716 - DNA, 50 bp, Artificial
  Synthetic oligonucleotide
acagtcagagctgcgcctgacagacaggaggtcccgcccggatcggatag

SEQ ID NO: 165717 - DNA, 50 bp, Artificial
  Synthetic oligonucleotide
acaggttctggcacagccccgggaagaatctgaactcctgagccgtccgc

SEQ ID NO: 165718 - DNA, 50 bp, Artificial
  Synthetic oligonucleotide
acaggtccaacgggcgcaacaggagcaactggagccacaggccccgcagg

SEQ ID NO: 165719 - DNA, 50 bp, Artificial
  Synthetic oligonucleotide
acaggggcggggcatccgttatgtccccagcggctgtacccggaagattt

SEQ ID NO: 165720 - DNA, 50 bp, Artificial
  Synthetic oligonucleotide
acggctgtacccgtgggaatatggatggcccgtacaccggtctccacctt

SEQ ID NO: 165721 - DNA, 50 bp, Artificial
  Synthetic oligonucleotide
agggatttcagatgcagaatatgtaaaggtaggttgcactatagcttctc

SEQ ID NO: 165722 - DNA, 55 bp, Artificial
  Synthetic oligonucleotide
ccctctgcaagagttctgtctgaaaagaccgcactcccactttcccaaagtgggg

SEQ ID NO: 165723 - DNA, 52 bp, Artificial
  Synthetic oligonucleotide
aaagtatgagtacctaagttatcaaccccaaaattcttgcctacttctttaa

SEQ ID NO: 165724 - DNA, 50 bp, Artificial
  Synthetic oligonucleotide
acagggagcggctgggcgtgtttctcccctactttgagagcgccgggtca

SEQ ID NO: 165725 - DNA, 50 bp, Artificial
  Synthetic oligonucleotide
cgcttaggtgtgtgtctaccaatatccataaacaaaaggcacggtggtag

SEQ ID NO: 165726 - DNA, 50 bp, Artificial
  Synthetic oligonucleotide
acaggagcaggagttaccggagccacaggtccaacgggcgcaacaggagc

SEQ ID NO: 165727 - DNA, 50 bp, Artificial
  Synthetic oligonucleotide
agggcatcctggtccgcagtgttaaatccggcggtacgtggtgtcactga

SEQ ID NO: 165728 - DNA, 50 bp, Artificial
  Synthetic oligonucleotide
agggccctccccatttaaggttagagacaatcagcggccggaacggacca

SEQ ID NO: 165729 - DNA, 50 bp, Artificial
  Synthetic oligonucleotide
agggcctaaccgcctgacggcgtatcatgacccccgaaaactctgctcag

SEQ ID NO: 165730 - DNA, 50 bp, Artificial
  Synthetic oligonucleotide
acagcggttcgaaaggccgctctgacctatcaggccaacggaggaacggg

SEQ ID NO: 165731 - DNA, 50 bp, Artificial
  Synthetic oligonucleotide
agggcgcctcccccaatcccgtccggaacactccccttcctgtatactgc

SEQ ID NO: 165732 - DNA, 50 bp, Artificial
  Synthetic oligonucleotide
acagccgggagaagctgtgaccgccgctatgttccaagccatgcgggaca

SEQ ID NO: 165733 - DNA, 50 bp, Artificial
  Synthetic oligonucleotide
acgggctctactgcgttgccacagcgggagaggagacgacgaaaaacggc

SEQ ID NO: 165734 - DNA, 53 bp, Artificial
  Synthetic oligonucleotide
aaagtcacccacctgggagtgcctagggtgtgaatttacttagccaccggtgt

SEQ ID NO: 165735 - DNA, 50 bp, Artificial
  Synthetic oligonucleotide
aggccaaggcgggcggatcatgaggtcaggagatcgagaccattctggct

SEQ ID NO: 165736 - DNA, 50 bp, Artificial
  Synthetic oligonucleotide
aggccagagagtcgcgcggcagaggctaacaggctgtctttcggtgttcc

SEQ ID NO: 165737 - DNA, 50 bp, Artificial
  Synthetic oligonucleotide
aggccaggtaaacagtcggtattcctcgcacagcggggtacagatcgcgc

SEQ ID NO: 165738 - DNA, 50 bp, Artificial
  Synthetic oligonucleotide
aggcccatgttccttaagccccgcgatgtgagctttcgtgccatacccct

SEQ ID NO: 165739 - DNA, 50 bp, Artificial
  Synthetic oligonucleotide
acatgtggtttgggctgcacagctggcctgtgcctcatcgtggcagatgg

SEQ ID NO: 165740 - DNA, 50 bp, Artificial
  Synthetic oligonucleotide
aggccgtcgaaatggaagggacgctcctcgtgtatggctgtccggcagag

SEQ ID NO: 165741 - DNA, 50 bp, Artificial
  Synthetic oligonucleotide
aggcgaatgtaccacgggagcagcatttgccacctgcgccggatttctgg

SEQ ID NO: 165742 - DNA, 50 bp, Artificial
  Synthetic oligonucleotide
acggatgaactggcacggtccatgagactggcggcacgcagaggagttga

SEQ ID NO: 165743 - DNA, 50 bp, Artificial
  Synthetic oligonucleotide
aggcgggatggagtgactctcatccgtggggcttctggaccagtgaggcg

SEQ ID NO: 165744 - DNA, 50 bp, Artificial
  Synthetic oligonucleotide
aggcggtttcaggccattctggaccgatttggtgactgcccgggagcgat

SEQ ID NO: 165745 - DNA, 58 bp, Artificial
  Synthetic oligonucleotide
ttcgtttggatatatcgtagtcgaatccatatactttcccgtatcacttaatatacaa

SEQ ID NO: 165746 - DNA, 50 bp, Artificial
  Synthetic oligonucleotide
acatccgcctgaatgtggcctgcccaagggccgtgctttccgaggggctt

SEQ ID NO: 165747 - DNA, 50 bp, Artificial
  Synthetic oligonucleotide
gttgactagctttacacccatccctataaagagcgattccttttacacct

SEQ ID NO: 165748 - DNA, 50 bp, Artificial
  Synthetic oligonucleotide
gttgcactcttctatggatgctttaacggaattcttgtggcatacgtagg

SEQ ID NO: 165749 - DNA, 50 bp, Artificial
  Synthetic oligonucleotide
acatcccgccggcaatgcggcagtctccattcttgtgggcgctcacggcc

SEQ ID NO: 165750 - DNA, 50 bp, Artificial
  Synthetic oligonucleotide
acatcagcgacggcagatgcacaggcggtgttcgtcctgccttgtggctc

SEQ ID NO: 165751 - DNA, 50 bp, Artificial
  Synthetic oligonucleotide
acatcaaggcggaagtttcccgccgttcccttgctgtgggcgtagcgcgg

SEQ ID NO: 165752 - DNA, 50 bp, Artificial
  Synthetic oligonucleotide
acatacgggccggcgtcttccggtgtattggtcggggcgggaatcagatc

SEQ ID NO: 165753 - DNA, 50 bp, Artificial
  Synthetic oligonucleotide
agcccctacctccggatcactcaggcgctccagtgtgtatgccacatcct

SEQ ID NO: 165754 - DNA, 50 bp, Artificial
  Synthetic oligonucleotide
acggatgattcccattccatctattttccccgcctctatgtagctgtcgt

SEQ ID NO: 165755 - DNA, 50 bp, Artificial
  Synthetic oligonucleotide
agggaggttctgccagagccgcctgcaaactgatccgggcgcgttacaaa

SEQ ID NO: 165756 - DNA, 60 bp, Artificial
  Synthetic oligonucleotide
ttcctagctaagtcgattattccagctgataactcacttggtataagtgttgagcctgta

SEQ ID NO: 165757 - DNA, 50 bp, Artificial
  Synthetic oligonucleotide
acgctgaacccggtctctctgcgaagccgcgtcggacttgttccccagag

SEQ ID NO: 165758 - DNA, 50 bp, Artificial
  Synthetic oligonucleotide
acgcacccggtccgaaagggggagaagtgtctggtgaccctctatgtgga

SEQ ID NO: 165759 - DNA, 50 bp, Artificial
  Synthetic oligonucleotide
acgacggactttacgacgtgcggagggcctactttacctcgggcggcaaa

SEQ ID NO: 165760 - DNA, 50 bp, Artificial
  Synthetic oligonucleotide
acgaactattaaaagagagcatagaggaaaaactagagatcttggtagat

SEQ ID NO: 165761 - DNA, 50 bp, Artificial
  Synthetic oligonucleotide
acctttgtgcgtgatcacaaacgacctgcccggccctttcacccggtgca

SEQ ID NO: 165762 - DNA, 50 bp, Artificial
  Synthetic oligonucleotide
acctttctcgtcatcggtgccccgcaatccgcacatacagcaatgccgga

SEQ ID NO: 165763 - DNA, 50 bp, Artificial
  Synthetic oligonucleotide
cggaggaagtgcgctaggggttgtatttgcaagtttagaatttgcacagg

SEQ ID NO: 165764 - DNA, 50 bp, Artificial
  Synthetic oligonucleotide
acctcctatggtagtgctggaggcgtgcaccccaagccccgtaccgccgc

SEQ ID NO: 165765 - DNA, 50 bp, Artificial
  Synthetic oligonucleotide
ccatgaaatgcggaagcgtatatgccatctgcagagtatcgccaatctga

SEQ ID NO: 165766 - DNA, 50 bp, Artificial
  Synthetic oligonucleotide
acctaccggcccccgtggcgttaccggaactaccggcgctgctgaaacga

SEQ ID NO: 165767 - DNA, 56 bp, Artificial
  Synthetic oligonucleotide
ttcctacattttggattgctaacgctttacaaaatgaatgacgtaaagcatggggg

SEQ ID NO: 165768 - DNA, 50 bp, Artificial
  Synthetic oligonucleotide
agcctgcataccgtctcgcccctcgcaccgaatgtctttgacagcatgcg

SEQ ID NO: 165769 - DNA, 50 bp, Artificial
  Synthetic oligonucleotide
accgtttccggctcccccggtataagagggctgcggacagctccccgtca

SEQ ID NO: 165770 - DNA, 50 bp, Artificial
  Synthetic oligonucleotide
accgttgcgcgcctatggtccgaatttctccggccaccttttcccaggca

SEQ ID NO: 165771 - DNA, 50 bp, Artificial
  Synthetic oligonucleotide
agccttgagatatgaaattgatttcccgacccaaaccttaactggggatc

SEQ ID NO: 165772 - DNA, 50 bp, Artificial
  Synthetic oligonucleotide
accgttgccccctgttcgcccctgtgtggcgagaatgacggcggagtgga

SEQ ID NO: 165773 - DNA, 50 bp, Artificial
  Synthetic oligonucleotide
accgttccggaaatgtatcccggacggctgtgattccggcctgtgtggta

SEQ ID NO: 165774 - DNA, 50 bp, Artificial
  Synthetic oligonucleotide
accgtgcctcctccccatctgatacggactcagtggaaacagcgcccagc

SEQ ID NO: 165775 - DNA, 50 bp, Artificial
  Synthetic oligonucleotide
accgtctgttcctgatacaggggcgcggtacggtccatatccgcctcccg

SEQ ID NO: 165776 - DNA, 50 bp, Artificial
  Synthetic oligonucleotide
agccctttcccctggcctatcctgcgtatgagcgcctcggaggacacacg

SEQ ID NO: 165777 - DNA, 50 bp, Artificial
  Synthetic oligonucleotide
agccgactccccgaatagacggcaaggccattgtaacaggttccgcggag

SEQ ID NO: 165778 - DNA, 56 bp, Artificial
  Synthetic oligonucleotide
tggaatttggacggctgtacttgatctattacaaataaccgtacggaagcagtaaa

SEQ ID NO: 165779 - DNA, 50 bp, Artificial
  Synthetic oligonucleotide
agccgagggaggcacatcaggtagacccgaccacccgatatgtcacggag

SEQ ID NO: 165780 - DNA, 50 bp, Artificial
  Synthetic oligonucleotide
ccatgtggtactcccgcccattgccctggatggccctgcagtgaccatcc

SEQ ID NO: 165781 - DNA, 50 bp, Artificial
  Synthetic oligonucleotide
acgcgtgcggggttcattccatgcccctttcattcaggtgaccgtcaggc

SEQ ID NO: 165782 - DNA, 50 bp, Artificial
  Synthetic oligonucleotide
agccgatgcatatgctccccctggagaatgcgcacctgcgtgtctgccgc

SEQ ID NO: 165783 - DNA, 50 bp, Artificial
  Synthetic oligonucleotide
agccggggccgcagggtaaggcacatcgagttcccggattaccgggagcc

SEQ ID NO: 165784 - DNA, 50 bp, Artificial
  Synthetic oligonucleotide
agccgggggtatggcggccctgtgacagtcagactgaccgtttcagacta

SEQ ID NO: 165785 - DNA, 50 bp, Artificial
  Synthetic oligonucleotide
acgcggagcccggcaggacagtgagcgttgaagtgcgcggacggatggtg

SEQ ID NO: 165786 - DNA, 50 bp, Artificial
  Synthetic oligonucleotide
acgcggaccctgccccttgcagtctactcaaatgtagcggcgggggacat

SEQ ID NO: 165787 - DNA, 50 bp, Artificial
  Synthetic oligonucleotide
acgcgcctgaggtggtttccgccatcggacgggagggttctgactggttt

SEQ ID NO: 165788 - DNA, 50 bp, Artificial
  Synthetic oligonucleotide
acgcctctatccgggaggagcgtctgaggtgcaagcggctttcccaggtt

SEQ ID NO: 165789 - DNA, 58 bp, Artificial
  Synthetic oligonucleotide
ttcaaaacagacagtacttaatgttgataccaatgcaactgtaatcaatgttttaacc

SEQ ID NO: 165790 - DNA, 50 bp, Artificial
  Synthetic oligonucleotide
agccggtgccgcctggggaccgtccgtattcctgtggattaccctgggaa

SEQ ID NO: 165791 - DNA, 50 bp, Artificial
  Synthetic oligonucleotide
acgcctcctccacagagcgggcggcttactgcgaaaacctcaactcagcc

SEQ ID NO: 165792 - DNA, 50 bp, Artificial
  Synthetic oligonucleotide
acgccggatcacagtgaccgttgattgcagcatgaaggaaggggccggtt

SEQ ID NO: 165793 - DNA, 50 bp, Artificial
  Synthetic oligonucleotide
agccgtatctgctgacaggcggcggccccaatatgactacgaccacatgg

SEQ ID NO: 165794 - DNA, 50 bp, Artificial
  Synthetic oligonucleotide
gtatacactttcctgccaggtattatggtttgattttagagagctgagag

SEQ ID NO: 165795 - DNA, 50 bp, Artificial
  Synthetic oligonucleotide
acgcagccatatcatatcgtgggtgaggccggacggtacatttgccgccc

SEQ ID NO: 165796 - DNA, 50 bp, Artificial
  Synthetic oligonucleotide
agcctagatttactgtagattcgactcctcccattgcctttgatacagta

SEQ ID NO: 165797 - DNA, 50 bp, Artificial
  Synthetic oligonucleotide
gtcgggtgggtatttctacagagcgtatcttaactagtacacaactggac

SEQ ID NO: 165798 - DNA, 50 bp, Artificial
  Synthetic oligonucleotide
accggcggacaccgcctactcatgggactcaaatccctccgacaggtccc

SEQ ID NO: 165799 - DNA, 50 bp, Artificial
  Synthetic oligonucleotide
agcgccggattcacaggccttcacgcatttcatacagccgatgcagccca

SEQ ID NO: 165800 - DNA, 57 bp, Artificial
  Synthetic oligonucleotide
ttatttctttcgctaattatttttggataacctccacgccagccatcaccggcacaa

SEQ ID NO: 165801 - DNA, 50 bp, Artificial
  Synthetic oligonucleotide
accggcccctgacaatggcccattgtaccataaatgcgcgcctttggcaa

SEQ ID NO: 165802 - DNA, 50 bp, Artificial
  Synthetic oligonucleotide
accggccactcacgcggggaagcgcaatacttctcaatacgggggaggaa

SEQ ID NO: 165803 - DNA, 50 bp, Artificial
  Synthetic oligonucleotide
cggactatattgcgggagttgccacggacccggattaccgccatcaggga

SEQ ID NO: 165804 - DNA, 50 bp, Artificial
  Synthetic oligonucleotide
accggagcgcgacggtgtatgaggcgcagggagcgtttacccatcaccgg

SEQ ID NO: 165805 - DNA, 50 bp, Artificial
  Synthetic oligonucleotide
accggagccacaggtccaacgggcgcaacaggagcaactggagccacagg

SEQ ID NO: 165806 - DNA, 50 bp, Artificial
  Synthetic oligonucleotide
agcgcgtcagggattgccggatggaatcaatgccgacagtgttgtccgca

SEQ ID NO: 165807 - DNA, 50 bp, Artificial
  Synthetic oligonucleotide
accgcttgtggaaggcggactatattgcgggagttgccacggacccggat

SEQ ID NO: 165808 - DNA, 50 bp, Artificial
  Synthetic oligonucleotide
agcggaggccttgagaaacgctgcccagtatgacgacgggctgtacggct

SEQ ID NO: 165809 - DNA, 50 bp, Artificial
  Synthetic oligonucleotide
agcggatcagccccgtccaggtgaaacgtcatgctgtcgtaggttccgtg

SEQ ID NO: 165810 - DNA, 50 bp, Artificial
  Synthetic oligonucleotide
accgctgctccgatgcggacgaaacatccggccccttcacaaaggcaatc

SEQ ID NO: 165811 - DNA, 60 bp, Artificial
  Synthetic oligonucleotide
ccttcactaaattcattcatagtattttctatagctcgctctgttatggaatctaagcta

SEQ ID NO: 165812 - DNA, 50 bp, Artificial
  Synthetic oligonucleotide
accgctcacctgacgtctggcttccctgacctggttcagagcatccccta

SEQ ID NO: 165813 - DNA, 50 bp, Artificial
  Synthetic oligonucleotide
accgcggcaaataaaagaaaccggcgcccctgccaaccgtgtgttgaggg

SEQ ID NO: 165814 - DNA, 50 bp, Artificial
  Synthetic oligonucleotide
accgcaagtggggcaagctttgtcccaaggagacacctacggccgactcc

SEQ ID NO: 165815 - DNA, 50 bp, Artificial
  Synthetic oligonucleotide
accgatttggtgactgcccgggagcgatggagcaggccgggattgcatat

SEQ ID NO: 165816 - DNA, 50 bp, Artificial
  Synthetic oligonucleotide
accgatcggatgaaacagcctgacgtgggagaagacgggggcagacggaa

SEQ ID NO: 165817 - DNA, 50 bp, Artificial
  Synthetic oligonucleotide
accgaagcggggacgatgctgtggaacgcctgaatggtggggaggcccca

SEQ ID NO: 165818 - DNA, 50 bp, Artificial
  Synthetic oligonucleotide
acgctgccgtccgcgtgttcctttttcaccacccgcttcagcccggcttc

SEQ ID NO: 165819 - DNA, 50 bp, Artificial
  Synthetic oligonucleotide
accgtcctccgggtaacggtcagggattccgtctccatgtgcacgccgca

SEQ ID NO: 165820 - DNA, 50 bp, Artificial
  Synthetic oligonucleotide
agcgacagagtcaacaactaacacgtctacagcatttgatcttacaaggg

SEQ ID NO: 165821 - DNA, 50 bp, Artificial
  Synthetic oligonucleotide
accgtccattcaggccggaccgccgttcggacgaagaccgtccattcagg

SEQ ID NO: 165822 - DNA, 60 bp, Artificial
  Synthetic oligonucleotide
tggatatataagaagtgatttcgttaagctagactcatctgagattaattataatgctgt

SEQ ID NO: 165823 - DNA, 50 bp, Artificial
  Synthetic oligonucleotide
accgtcagaaatacgaggtaggcctgcgccaaagcgtccggcaaaaccga

SEQ ID NO: 165824 - DNA, 50 bp, Artificial
  Synthetic oligonucleotide
accgtaaaccggaacggcgtcgtcgcattccctttccacacggccttgta

SEQ ID NO: 165825 - DNA, 50 bp, Artificial
  Synthetic oligonucleotide
accggtcgcactcacagcctacgcggcagtctgggcttccgcagccctta

SEQ ID NO: 165826 - DNA, 50 bp, Artificial
  Synthetic oligonucleotide
accggtcagccctgccagtacctccgtaccttccggcactccgatatcca

SEQ ID NO: 165827 - DNA, 50 bp, Artificial
  Synthetic oligonucleotide
agcccgtcctactctccggagcacggtccctattctctcggcgcagcctg

SEQ ID NO: 165828 - DNA, 50 bp, Artificial
  Synthetic oligonucleotide
agcgcactccaggcgtttggcagtctttcccccgacgctgtaccggagga

SEQ ID NO: 165829 - DNA, 50 bp, Artificial
  Synthetic oligonucleotide
accgggggaactgcggaaacatgtcctcggccgttgggccctttgcgatt

SEQ ID NO: 165830 - DNA, 50 bp, Artificial
  Synthetic oligonucleotide
accggggcgacacagcggcttatccgtatcacgaggacggggatacggct

SEQ ID NO: 165831 - DNA, 50 bp, Artificial
  Synthetic oligonucleotide
agcgccaacacaattgcggacggtacggctgtaaagcgggtcggtgagaa

SEQ ID NO: 165832 - DNA, 50 bp, Artificial
  Synthetic oligonucleotide
accgggcggctgcgtcggctatgataaaatcgctctcatgggcctgccgg

SEQ ID NO: 165833 - DNA, 57 bp, Artificial
  Synthetic oligonucleotide
acttcagtccaccctttatacgctatgcttccgtttatccatagcaaaattccttga

SEQ ID NO: 165834 - DNA, 60 bp, Artificial
  Synthetic oligonucleotide
ttattaagtgtgctaagcttcaaattacgagctacggtatcagcatataatactaagtta

SEQ ID NO: 165835 - DNA, 50 bp, Artificial
  Synthetic oligonucleotide
agcgccaggacacaaaagagcgggggatacggcattggactgtccgtagc

SEQ ID NO: 165836 - DNA, 50 bp, Artificial
  Synthetic oligonucleotide
agcgccgacgggcccatcaaaccgccatacgcagtgtactttcagggagg

SEQ ID NO: 165837 - DNA, 50 bp, Artificial
  Synthetic oligonucleotide
accgggagaaccgctggaagaactgcattctgaccaacggagagcggcca

SEQ ID NO: 165838 - DNA, 50 bp, Artificial
  Synthetic oligonucleotide
accggctggggaagtacgccgtgacccccgcttctggccaccttgaccag

SEQ ID NO: 165839 - DNA, 50 bp, Artificial
  Synthetic oligonucleotide
accggctcctgcagccgtaccatcggcagaattgaacgtggggagcgaaa

SEQ ID NO: 165840 - DNA, 50 bp, Artificial
  Synthetic oligonucleotide
aatgctcgcggtcacgtaccacgggtaatcgctgcaaccgacggcacggc

SEQ ID NO: 165841 - DNA, 50 bp, Artificial
  Synthetic oligonucleotide
ataagagccggcagaaggctgatcccgccgcacagaagaccggtgtaaga

SEQ ID NO: 165842 - DNA, 50 bp, Artificial
  Synthetic oligonucleotide
aatgcggggagggattccggcagtatcagggtaatgccccaccttgcgag

SEQ ID NO: 165843 - DNA, 50 bp, Artificial
  Synthetic oligonucleotide
aatgccgtcaagggcggcttcaatggctcttgcctgccgggagagggaaa

SEQ ID NO: 165844 - DNA, 50 bp, Artificial
  Synthetic oligonucleotide
aatgccgcccggtccgatcccagcacccggttgctcagcacaaatccatg

SEQ ID NO: 165845 - DNA, 60 bp, Artificial
  Synthetic oligonucleotide
tggcaactggatggaaagagttaggaggaatatggtactacttaaatgagagtggagcaa

SEQ ID NO: 165846 - DNA, 50 bp, Artificial
  Synthetic oligonucleotide
aatgccgacgttccgcatagcttcgtgcaactgctcctttgtggcgggca

SEQ ID NO: 165847 - DNA, 50 bp, Artificial
  Synthetic oligonucleotide
ataaggcttacaccattccttactcgctaagactacttccatatagctac

SEQ ID NO: 165848 - DNA, 50 bp, Artificial
  Synthetic oligonucleotide
ataccgcacccgggagaggcatattccaattccgcacagcgacccctcct

SEQ ID NO: 165849 - DNA, 50 bp, Artificial
  Synthetic oligonucleotide
tataagataagctgcaccagctaatgaagccaatccaccacctacgaagt

SEQ ID NO: 165850 - DNA, 50 bp, Artificial
  Synthetic oligonucleotide
aatgcccggatgtgtcctgcgctccctccccgtcagactcacggcaggct

SEQ ID NO: 165851 - DNA, 50 bp, Artificial
  Synthetic oligonucleotide
atacgatccagctctgtcctgggcagcatgccaagaagctcccagccgat

SEQ ID NO: 165852 - DNA, 50 bp, Artificial
  Synthetic oligonucleotide
aatgcactgccgcggatgggaactcacacgccgcccataggaggccctgt

SEQ ID NO: 165853 - DNA, 50 bp, Artificial
  Synthetic oligonucleotide
atacgcatgtgcggaacatgagtttacagttgctacggaaaatagtgctg

SEQ ID NO: 165854 - DNA, 50 bp, Artificial
  Synthetic oligonucleotide
agcatctccaccttacattttctcgtgaccgtatcaagaatcggcacacc

SEQ ID NO: 165855 - DNA, 50 bp, Artificial
  Synthetic oligonucleotide
acgtatgaggggacaagccgggggtatggcggccctgtgacagtcagact

SEQ ID NO: 165856 - DNA, 57 bp, Artificial
  Synthetic oligonucleotide
ttatctatgttaagacctaaattacaacattcttcatatttactcactttagaatcc

SEQ ID NO: 165857 - DNA, 50 bp, Artificial
  Synthetic oligonucleotide
atagggaagaattcccacccgctccaccttgcaggctccgctgctcccat

SEQ ID NO: 165858 - DNA, 50 bp, Artificial
  Synthetic oligonucleotide
tatactacgaaaacactcaacggctcttggtcaacaccagaacgattatt

SEQ ID NO: 165859 - DNA, 50 bp, Artificial
  Synthetic oligonucleotide
aatgacctctcagctacgctggcggagtatgtggtaaacgggcaggcggg

SEQ ID NO: 165860 - DNA, 50 bp, Artificial
  Synthetic oligonucleotide
agcaggggagccgctggctgttcagaaggcaaagtcgtttcgcaggcaat

SEQ ID NO: 165861 - DNA, 50 bp, Artificial
  Synthetic oligonucleotide
tagctgtttctgagattccccaatttcccatgtaattcactcctccacat

SEQ ID NO: 165862 - DNA, 50 bp, Artificial
  Synthetic oligonucleotide
agttacgctgccattcgaacttccgggggcattcccaccgccggttgaag

SEQ ID NO: 165863 - DNA, 50 bp, Artificial
  Synthetic oligonucleotide
aattcacaggggtaactgtgcccgcccctgccgggacaacacaggctata

SEQ ID NO: 165864 - DNA, 50 bp, Artificial
  Synthetic oligonucleotide
taggagcgagtgttgatcagcgtcttcaatggccaccaagtaaaggtact

SEQ ID NO: 165865 - DNA, 50 bp, Artificial
  Synthetic oligonucleotide
taggaggcttatagttccacctgtaaacggcaatggatatgacagccaga

SEQ ID NO: 165866 - DNA, 50 bp, Artificial
  Synthetic oligonucleotide
ccgttgccacaattgagcaaatgccgggcaacaagcagcgcatagttgta

SEQ ID NO: 165867 - DNA, 52 bp, Artificial
  Synthetic oligonucleotide
cggaacggtagttgggaaaggcccacagagacggactaatttagcctctcgg

SEQ ID NO: 165868 - DNA, 50 bp, Artificial
  Synthetic oligonucleotide
agttgaccgatccggagaggggatgcccggtctgggacaaagagcttggg

SEQ ID NO: 165869 - DNA, 50 bp, Artificial
  Synthetic oligonucleotide
aattaatcggaggaatagtatgagcgtaggtagaattgctaggagaacaa

SEQ ID NO: 165870 - DNA, 50 bp, Artificial
  Synthetic oligonucleotide
agccaccaactgggggctgagcaaatccaccgaccgggtctcttatggcg

SEQ ID NO: 165871 - DNA, 50 bp, Artificial
  Synthetic oligonucleotide
cgctaaaacagacggagtcccctgcggtatccgagacggcctgttccgga

SEQ ID NO: 165872 - DNA, 50 bp, Artificial
  Synthetic oligonucleotide
acgtaaccagcccggctgtgatcagtggacccgtcactcgtacctgcggc

SEQ ID NO: 165873 - DNA, 50 bp, Artificial
  Synthetic oligonucleotide
aatgtgctcccggcagaactgatccacctcgggcgtatagaacgggctgg

SEQ ID NO: 165874 - DNA, 50 bp, Artificial
  Synthetic oligonucleotide
agtttcccgtcgcacgggctgacaagtgtatcaggaccgccttccatggg

SEQ ID NO: 165875 - DNA, 50 bp, Artificial
  Synthetic oligonucleotide
ccgttccggccgctgattgtctccaaccttaaatggggaggaccctgtcg

SEQ ID NO: 165876 - DNA, 50 bp, Artificial
  Synthetic oligonucleotide
ataaactctcctccgcgccggaaggtcaagcccgaccgcgcctgtctgcg

SEQ ID NO: 165877 - DNA, 50 bp, Artificial
  Synthetic oligonucleotide
aatgtaatcccgtggcacctgtcctccccctggcacagaagcaccgtcac

SEQ ID NO: 165878 - DNA, 56 bp, Artificial
  Synthetic oligonucleotide
tcccttgtgctcgaatataatctatattcgagcacaagggggggaaagccgttttc

SEQ ID NO: 165879 - DNA, 50 bp, Artificial
  Synthetic oligonucleotide
aatgggtcgagctcaggtcgtacaggccgaagcggcaggaaaggcccctg

SEQ ID NO: 165880 - DNA, 50 bp, Artificial
  Synthetic oligonucleotide
cgcgtgaggtatcctccgcgccagtggaacagcagtggtttccccttcct

SEQ ID NO: 165881 - DNA, 50 bp, Artificial
  Synthetic oligonucleotide
aatggatggcggcggaaatgactgcttaggcggtagcgttgatggtgcgg

SEQ ID NO: 165882 - DNA, 50 bp, Artificial
  Synthetic oligonucleotide
atcacaaacgacctgcccggccctttcacccggtgcagcactgtcccgat

SEQ ID NO: 165883 - DNA, 50 bp, Artificial
  Synthetic oligonucleotide
aatcatgggggcgttctgcttgtccagcgcggcttgtccctttttctgcg

SEQ ID NO: 165884 - DNA, 50 bp, Artificial
  Synthetic oligonucleotide
aatcagttgaggggcagagctggcaggcagggtgaccccggttcttcacg

SEQ ID NO: 165885 - DNA, 50 bp, Artificial
  Synthetic oligonucleotide
aatcagccgcgccccggtctgtcggatagctctctctatgcgctcatcgg

SEQ ID NO: 165886 - DNA, 50 bp, Artificial
  Synthetic oligonucleotide
aatcagccatacgtccagggagcgcccatttgcgttcacccgaaaccggc

SEQ ID NO: 165887 - DNA, 50 bp, Artificial
  Synthetic oligonucleotide
acgttgacctcgggcatttaagcaagccgcgggtctgcggacgggagcat

SEQ ID NO: 165888 - DNA, 50 bp, Artificial
  Synthetic oligonucleotide
aatcacgtccgcctccacactgcactggtccagggacgggaacacgggat

SEQ ID NO: 165889 - DNA, 58 bp, Artificial
  Synthetic oligonucleotide
tttgaagaatagaggtgttaaacaaatactaattgcatgtatggatgggcttagaggt

SEQ ID NO: 165890 - DNA, 50 bp, Artificial
  Synthetic oligonucleotide
cggtaaactatgtccttgtggaaatcgtggctgtttagaacagtattgtt

SEQ ID NO: 165891 - DNA, 50 bp, Artificial
  Synthetic oligonucleotide
atccaggcgctttaaggaagggcggatgtccctcacgcccccaaaggaga

SEQ ID NO: 165892 - DNA, 50 bp, Artificial
  Synthetic oligonucleotide
tattgcaatttactggttaattgaatcagtaccctatatggcattacccc

SEQ ID NO: 165893 - DNA, 50 bp, Artificial
  Synthetic oligonucleotide
aatagcctggatgacgggggctgcctcaggggagagcaggtagcgcagag

SEQ ID NO: 165894 - DNA, 50 bp, Artificial
  Synthetic oligonucleotide
aataaataatgcgtcaagaaatttttccatacaatttcatcaccatgcca

SEQ ID NO: 165895 - DNA, 50 bp, Artificial
  Synthetic oligonucleotide
aagtttttataagctttgcctaagttgcgagaaacttttaaatctaatgc

SEQ ID NO: 165896 - DNA, 50 bp, Artificial
  Synthetic oligonucleotide
cgcgacagggccctccccatttaaggttggagacaatcagcggccggaag

SEQ ID NO: 165897 - DNA, 50 bp, Artificial
  Synthetic oligonucleotide
atccctctgtgcatgctccgcaatctgccgtgctgctgccgcgatatagg

SEQ ID NO: 165898 - DNA, 50 bp, Artificial
  Synthetic oligonucleotide
gcgtgtcaggacaggttccgcttgtacccccgctgtcgtccgtagatggg

SEQ ID NO: 165899 - DNA, 50 bp, Artificial
  Synthetic oligonucleotide
tcaccccgtcaatacctgcaaggtacgaccgctccaatgctttgagcgcc

SEQ ID NO: 165900 - DNA, 55 bp, Artificial
  Synthetic oligonucleotide
cgttaaatacacgagcacttgatacttcccaattacctgtattaggaaaagtata

SEQ ID NO: 165901 - DNA, 50 bp, Artificial
  Synthetic oligonucleotide
aagtctggggcaccgtgtgattgagccgcttccggcgcttgtgcagttaa

SEQ ID NO: 165902 - DNA, 50 bp, Artificial
  Synthetic oligonucleotide
aatctgcgagggagaaattttccgctctggacgtcggagccgggtgtggg

SEQ ID NO: 165903 - DNA, 50 bp, Artificial
  Synthetic oligonucleotide
aatctcccggtgccccatgccgcacagataggacaccgccttgctggtac

SEQ ID NO: 165904 - DNA, 50 bp, Artificial
  Synthetic oligonucleotide
aatcggcgacggatttgtggacctgacgatccggaaagtaggccgggtga

SEQ ID NO: 165905 - DNA, 50 bp, Artificial
  Synthetic oligonucleotide
aatcgcttcccccgcctttgcccgctgctcaaaatctgcaacggtgggcg

SEQ ID NO: 165906 - DNA, 50 bp, Artificial
  Synthetic oligonucleotide
aatcgcagccggaaccgtgtccccacgtattgcttccttccgccttctgg

SEQ ID NO: 165907 - DNA, 50 bp, Artificial
  Synthetic oligonucleotide
acgtgggacgaccaggatacaccaagcgttctggcgcccttcggagactt

SEQ ID NO: 165908 - DNA, 50 bp, Artificial
  Synthetic oligonucleotide
aatcgagtcgcccggccttaccagctgtcctgccattggaaggatggtgg

SEQ ID NO: 165909 - DNA, 50 bp, Artificial
  Synthetic oligonucleotide
aatccgttaaggactcctagcgcttggacgctcgcttgagggcagcagga

SEQ ID NO: 165910 - DNA, 50 bp, Artificial
  Synthetic oligonucleotide
atatcccttccggactgccgcacaccgcctccgttcctgctggaaccgcc

SEQ ID NO: 165911 - DNA, 54 bp, Artificial
  Synthetic oligonucleotide
tccatacagttgttttataaaaggtagccattatttttagttccatattgtaaa

SEQ ID NO: 165912 - DNA, 50 bp, Artificial
  Synthetic oligonucleotide
atatgctccccctggagaatgcgcacctgcgtgtctgccgcaaggaatcc

SEQ ID NO: 165913 - DNA, 50 bp, Artificial
  Synthetic oligonucleotide
aatccggccatggagcccacggctcccgataactgcccaacaaaacagcg

SEQ ID NO: 165914 - DNA, 50 bp, Artificial
  Synthetic oligonucleotide
atattagctaatacttgccttaattcctcaccttctgcgtttagattaac

SEQ ID NO: 165915 - DNA, 50 bp, Artificial
  Synthetic oligonucleotide
atattccatataacgcctgcccgcgtaagtcgggatatagcaattgtcca

SEQ ID NO: 165916 - DNA, 49 bp, Artificial
  Synthetic oligonucleotide
aatccccgtcggggcttactcctgaaaccggggtaagggcgtcggcgcg

SEQ ID NO: 165917 - DNA, 48 bp, Artificial
  Synthetic oligonucleotide
aatccccgcgtaccccctgtaccgttcgaggggaaaaccgcccggata

SEQ ID NO: 165918 - DNA, 50 bp, Artificial
  Synthetic oligonucleotide
tatggaatcgagtcagaattgccggcggggcatatggagccatggcagga

SEQ ID NO: 165919 - DNA, 50 bp, Artificial
  Synthetic oligonucleotide
atcaaccgctgaggccccgtttcatagggcggcagtccgtgagcaggtac

SEQ ID NO: 165920 - DNA, 50 bp, Artificial
  Synthetic oligonucleotide
aatcccattcccacccgcgcagctgactccggcctccgtttgatcaggct

SEQ ID NO: 165921 - DNA, 50 bp, Artificial
  Synthetic oligonucleotide
atcaagctcaacaggagcgagaaaaaatagttgctagaataaatcaagga

SEQ ID NO: 165922 - DNA, 60 bp, Artificial
  Synthetic oligonucleotide
tccagtctgtcaggagggtaggacctatctgtccgttgtacgccctgcttcgtgggcatg

SEQ ID NO: 165923 - DNA, 50 bp, Artificial
  Synthetic oligonucleotide
acacggccggaaaccgccggagtgagagaacgcttcagggctccgtgcat

SEQ ID NO: 165924 - DNA, 50 bp, Artificial
  Synthetic oligonucleotide
tacaagggcttaatccttggaagctgtacctacaacaacggacttttccc

SEQ ID NO: 165925 - DNA, 50 bp, Artificial
  Synthetic oligonucleotide
acacggccccggaagacgcgtgcagtgcctgctacggctcccttatatat

SEQ ID NO: 165926 - DNA, 50 bp, Artificial
  Synthetic oligonucleotide
acacgctcagtttcccgtcgcacgggctgacaagtgtatcaggaccgcct

SEQ ID NO: 165927 - DNA, 50 bp, Artificial
  Synthetic oligonucleotide
aggtcgctcagcaatgcgaccgcagcgatctgtggcgtgtaaaggggaat

SEQ ID NO: 165928 - DNA, 50 bp, Artificial
  Synthetic oligonucleotide
acacgccggtcctaccagctgtccccacgggtgattgacgagaccaatgg

SEQ ID NO: 165929 - DNA, 50 bp, Artificial
  Synthetic oligonucleotide
aggtgtattagcaacagcaacagttgtaggaggagtaattccaactacag

SEQ ID NO: 165930 - DNA, 50 bp, Artificial
  Synthetic oligonucleotide
cctatgtactctaaatgctccagtcggctaattagggcttttaataccgt

SEQ ID NO: 165931 - DNA, 50 bp, Artificial
  Synthetic oligonucleotide
acacgcaacggcaaaatcctccccgccgcagttcagcgtagacagccggt

SEQ ID NO: 165932 - DNA, 50 bp, Artificial
  Synthetic oligonucleotide
acacctcggtcctcccgtatcccggggaaatctcgcagtccgccacattg

SEQ ID NO: 165933 - DNA, 60 bp, Artificial
  Synthetic oligonucleotide
ccggtgcttgtcccgtaagttcccatatgcgtccccatgcataccatgtgcagtttccta

SEQ ID NO: 165934 - DNA, 50 bp, Artificial
  Synthetic oligonucleotide
acggggccatactccgtccaatcgcggtgaccccctgttcttccgatgtc

SEQ ID NO: 165935 - DNA, 50 bp, Artificial
  Synthetic oligonucleotide
agtacatgcagtacgccgcaaagataccgatagccggggctccccgcacc

SEQ ID NO: 165936 - DNA, 50 bp, Artificial
  Synthetic oligonucleotide
agtacccatctagtgactgctacgttccgggctgcgttccaggaccgcga

SEQ ID NO: 165937 - DNA, 50 bp, Artificial
  Synthetic oligonucleotide
taccagggctaaagccccataatataatacgaacgtttcagtaaacactc

SEQ ID NO: 165938 - DNA, 50 bp, Artificial
  Synthetic oligonucleotide
acacctcccgtccgtttcgggatcaccgcctccctgtaatggcgggacgc

SEQ ID NO: 165939 - DNA, 50 bp, Artificial
  Synthetic oligonucleotide
cgctgatgcccgtctgtctgacggctccagggtccatgtggtactcccgc

SEQ ID NO: 165940 - DNA, 50 bp, Artificial
  Synthetic oligonucleotide
acaccgtgccagaaccacctacgaatttccgggcggacacagagagcccg

SEQ ID NO: 165941 - DNA, 50 bp, Artificial
  Synthetic oligonucleotide
agtagccatccgctgtgtccgcccacgaaatcctaccggggtggaatgga

SEQ ID NO: 165942 - DNA, 50 bp, Artificial
  Synthetic oligonucleotide
acgggggaaagccggtcgtgtataaggagctgtactcgggggaggttgcg

SEQ ID NO: 165943 - DNA, 50 bp, Artificial
  Synthetic oligonucleotide
acagcccggttgcgtgctggggtgacagatgcggaaaatggagcgggaca

SEQ ID NO: 165944 - DNA, 60 bp, Artificial
  Synthetic oligonucleotide
ccaataacattatcactagcagcagatggaaaagatggtatgtctatgactgttgcagat

SEQ ID NO: 165945 - DNA, 59 bp, Artificial
  Synthetic oligonucleotide
ccggtccaattggtatggctacttttctacaatattagctttgccagttgccagaggca

SEQ ID NO: 165946 - DNA, 50 bp, Artificial
  Synthetic oligonucleotide
acagcccagacaatgcatgcccgcacccatcagaatcggagcgacgccct

SEQ ID NO: 165947 - DNA, 50 bp, Artificial
  Synthetic oligonucleotide
aggggataaacttatagttccaactttaggaccgtctggtactgcggaac

SEQ ID NO: 165948 - DNA, 50 bp, Artificial
  Synthetic oligonucleotide
acagcagacagccggcaagagccgtgaggacacaggaccggaacggcttt

SEQ ID NO: 165949 - DNA, 50 bp, Artificial
  Synthetic oligonucleotide
taactcgctctgaagtttatctaagacaagagtctctgaagctcagacaa

SEQ ID NO: 165950 - DNA, 50 bp, Artificial
  Synthetic oligonucleotide
aggggcagaaggcggttgccaagcggaatgtggatcggcagctgcaatgg

SEQ ID NO: 165951 - DNA, 50 bp, Artificial
  Synthetic oligonucleotide
aggggcatacgcgcttgtcgtcagctctccgagaaagatgataggggcgc

SEQ ID NO: 165952 - DNA, 50 bp, Artificial
  Synthetic oligonucleotide
cgtaaacccgaactcggtcgcctatgatctgatggatagcggcaatcagg

SEQ ID NO: 165953 - DNA, 50 bp, Artificial
  Synthetic oligonucleotide
acagaggtatgcccagggttaagccgcccaggactgtggaccagggtctg

SEQ ID NO: 165954 - DNA, 50 bp, Artificial
  Synthetic oligonucleotide
agggtgagcggggaacctgcaatcgtgatgccacccggattgaagggctc

SEQ ID NO: 165955 - DNA, 50 bp, Artificial
  Synthetic oligonucleotide
acagaccgtgatcacctgtacggggctggaagagttcgtaagaaaccggt

SEQ ID NO: 165956 - DNA, 53 bp, Artificial
  Synthetic oligonucleotide
tccaagctaagttaagggttgttaaagttgactctaaatacagtaaaccacta

SEQ ID NO: 165957 - DNA, 50 bp, Artificial
  Synthetic oligonucleotide
acacttcgatgctcgtatccggcctgatcccccatccggtcagacacgga

SEQ ID NO: 165958 - DNA, 50 bp, Artificial
  Synthetic oligonucleotide
acactgtcaaacggagcgttgtgacgaggggagccgaagcgataccgggg

SEQ ID NO: 165959 - DNA, 50 bp, Artificial
  Synthetic oligonucleotide
aggtagccgtcgagatatccccggcgcaccccttcattgactgcttccgt

SEQ ID NO: 165960 - DNA, 50 bp, Artificial
  Synthetic oligonucleotide
acactcatagccggggtggtagcggcgtgtgctgcctgtcctgcggtatt

SEQ ID NO: 165961 - DNA, 50 bp, Artificial
  Synthetic oligonucleotide
aggtccaagctctggtgattctcgtgtcatccgtggcggtgcttggggtg

SEQ ID NO: 165962 - DNA, 50 bp, Artificial
  Synthetic oligonucleotide
aggtccccgtataccggaaccgtgacggccacaatttatgcggccacagg

SEQ ID NO: 165963 - DNA, 50 bp, Artificial
  Synthetic oligonucleotide
aggtcctgcctttcgaaaactgggcccactgcggctatgaagggctgcaa

SEQ ID NO: 165964 - DNA, 50 bp, Artificial
  Synthetic oligonucleotide
acacggtgcgagttccattgacattgcagcccgcatctgggtcgcaaccg

SEQ ID NO: 165965 - DNA, 50 bp, Artificial
  Synthetic oligonucleotide
agtcgctggacaacaccgacgccgttgtctggatgaccaccggcaccaca

SEQ ID NO: 165966 - DNA, 50 bp, Artificial
  Synthetic oligonucleotide
ggaacaatacttattggtaagcaagcagttgattgcggacttatagacga

SEQ ID NO: 165967 - DNA, 60 bp, Artificial
  Synthetic oligonucleotide
aagtaacttcatatcgaagtatctctcggtaagctctatagctttatctatcatttcatg

SEQ ID NO: 165968 - DNA, 50 bp, Artificial
  Synthetic oligonucleotide
acaaagcggatacagcactctgtcaggcgaaacgcgcgaaagggaccgga

SEQ ID NO: 165969 - DNA, 50 bp, Artificial
  Synthetic oligonucleotide
acaaacgttcaccataggcatcgggatcctccccgggctgcagagcgacc

SEQ ID NO: 165970 - DNA, 50 bp, Artificial
  Synthetic oligonucleotide
agtctttcgtcctgggggaagattgtcgtagtttggggctacgggcgaag

SEQ ID NO: 165971 - DNA, 50 bp, Artificial
  Synthetic oligonucleotide
agtgacaggccgggccagatacacggatgacctgtgcgggaaagaggcgt

SEQ ID NO: 165972 - DNA, 50 bp, Artificial
  Synthetic oligonucleotide
ggaaacccctcctgattgaggtgcttgtcccacgccaacacaaggcccac

SEQ ID NO: 165973 - DNA, 50 bp, Artificial
  Synthetic oligonucleotide
agtgactgctacgttccgggctgcgttccaggaccgcgactcaccgcagg

SEQ ID NO: 165974 - DNA, 50 bp, Artificial
  Synthetic oligonucleotide
agtgcctgttggagtgcatcccagcactggatggcaaccgcgttgcattc

SEQ ID NO: 165975 - DNA, 50 bp, Artificial
  Synthetic oligonucleotide
agtgcggcagtcgtaaaagagggtggcgctgagctgaacacgacagctct

SEQ ID NO: 165976 - DNA, 50 bp, Artificial
  Synthetic oligonucleotide
aatttccagtgcggttgccagccgctgtgcctccggttcatcctgccccc

SEQ ID NO: 165977 - DNA, 50 bp, Artificial
  Synthetic oligonucleotide
aattgccagcccgaaacggtccttgttgtctccacacgcctcggtcgcaa

SEQ ID NO: 165978 - DNA, 59 bp, Artificial
  Synthetic oligonucleotide
aagtatgtgaaggatatacaatcggaagatattcaaggctacttagaaagtgcaaaggc

SEQ ID NO: 165979 - DNA, 50 bp, Artificial
  Synthetic oligonucleotide
ctttttgctgtcgggcaaccccgacccctcggagagcataggacggagtc

SEQ ID NO: 165980 - DNA, 50 bp, Artificial
  Synthetic oligonucleotide
acggtcctctgaccgtcgactgcataagtgccgagggccctgccgatcac

SEQ ID NO: 165981 - DNA, 50 bp, Artificial
  Synthetic oligonucleotide
agccatttgatgggatctgcataccggagaggcgtcacgcggtagggagc

SEQ ID NO: 165982 - DNA, 50 bp, Artificial
  Synthetic oligonucleotide
aattctcctcgcactgtgcgcagcctatcccctaggcggctgaatccggc

SEQ ID NO: 165983 - DNA, 50 bp, Artificial
  Synthetic oligonucleotide
aattcggccgcaacgagagtcccgccctccgacggatagaactccacata

SEQ ID NO: 165984 - DNA, 50 bp, Artificial
  Synthetic oligonucleotide
aattccataaagtgcaccaataatatgagcctgtgaatgaccaacatggg

SEQ ID NO: 165985 - DNA, 50 bp, Artificial
  Synthetic oligonucleotide
tagctagagataatatcttagtagaagcgggacaagcaatgctagttcag

SEQ ID NO: 165986 - DNA, 50 bp, Artificial
  Synthetic oligonucleotide
agtcacctagaacacagcgtgttgcgatatgactcattgccactccggtg

SEQ ID NO: 165987 - DNA, 50 bp, Artificial
  Synthetic oligonucleotide
acacccacggcccgactgcggcgtgcaactcggtctcccgtctcgaccac

SEQ ID NO: 165988 - DNA, 50 bp, Artificial
  Synthetic oligonucleotide
taccttaagccccaggggcggcgcagtgaccctccacttacctgcctggt

SEQ ID NO: 165989 - DNA, 57 bp, Artificial
  Synthetic oligonucleotide
ttttagcagataaataatatctaatagttactaactttattacttcatcccttgatg

SEQ ID NO: 165990 - DNA, 50 bp, Artificial
  Synthetic oligonucleotide
acggtcagtgcccctatggctgcctcggctatggcgactgcacccacgcg

SEQ ID NO: 165991 - DNA, 50 bp, Artificial
  Synthetic oligonucleotide
acacatggagtacggggcgtatggtggtacgccggatcgcctgccggaga

SEQ ID NO: 165992 - DNA, 50 bp, Artificial
  Synthetic oligonucleotide
agtccgctacgttgaggttcgcgccgcagttgacacagagccctctgcaa

SEQ ID NO: 165993 - DNA, 50 bp, Artificial
  Synthetic oligonucleotide
acacagggagccacgatgcgcaccctctcatagggaatgtccagggacgc

SEQ ID NO: 165994 - DNA, 50 bp, Artificial
  Synthetic oligonucleotide
acaatttccggctcccttcgtgaagcggcatttcttgacggctgcgggga

SEQ ID NO: 165995 - DNA, 50 bp, Artificial
  Synthetic oligonucleotide
ggaactgaaacgttcgtataatattatggggcgtagccctgtttactttt

SEQ ID NO: 165996 - DNA, 50 bp, Artificial
  Synthetic oligonucleotide
acaatgctctcaaagaccgcaccccggacgatcagccgatggctgcgcgt

SEQ ID NO: 165997 - DNA, 50 bp, Artificial
  Synthetic oligonucleotide
acaagcgtccgcgaactttgggtgcaggcggccataaggatgagccggtt

SEQ ID NO: 165998 - DNA, 50 bp, Artificial
  Synthetic oligonucleotide
acaagcagccctcccacgaatatccgcttagccggtgacggaaggtgcct

SEQ ID NO: 165999 - DNA, 50 bp, Artificial
  Synthetic oligonucleotide
cttttgctgataaactatcataaccagttttttttgatatatcagccatt

SEQ ID NO: 166000 - DNA, 54 bp, Artificial
  Synthetic oligonucleotide
ctaacttacctcctatcaaataatctaatagggggtaatattaatcctattgtg

SEQ ID NO: 166001 - DNA, 50 bp, Artificial
  Synthetic oligonucleotide
acaacgggccccgcacattgggaactgcttgtaagagccagagcccttga

SEQ ID NO: 166002 - DNA, 50 bp, Artificial
  Synthetic oligonucleotide
agccccctctgatctctggccgtcttaggagccagcgcaacgcttacctg

SEQ ID NO: 166003 - DNA, 50 bp, Artificial
  Synthetic oligonucleotide
acaaccgtggaattctccgtccccgtcagtgtggccgagggctccaccga

SEQ ID NO: 166004 - DNA, 50 bp, Artificial
  Synthetic oligonucleotide
acaaccccgattctcccagccgcatactgactcccgccgctagattccct

SEQ ID NO: 166005 - DNA, 50 bp, Artificial
  Synthetic oligonucleotide
tactgtgctagaagttataacatctccaagtgcatctaaagcagaggctt

SEQ ID NO: 166006 - DNA, 48 bp, Artificial
  Synthetic oligonucleotide
gagtctttcgtcccaggggaagattattgtggtttgggacttcgggcg

SEQ ID NO: 166007 - DNA, 60 bp, Artificial
  Synthetic oligonucleotide
tcagaaactctaatgccagttttccatagtgtgcttataatagctttgtctcttatatta

SEQ ID NO: 166008 - DNA, 58 bp, Artificial
  Synthetic oligonucleotide
ctaagaggtatagttactagtgtagacaagaattctaaaagcgattctgttcttgatg

SEQ ID NO: 166009 - DNA, 58 bp, Artificial
  Synthetic oligonucleotide
tcaattaagctactacaatacatcttctgttggttgtccttggactagggagaacgaa

SEQ ID NO: 166010 - DNA, 60 bp, Artificial
  Synthetic oligonucleotide
tcaaagtgttcatatgtacgacataactcaattatgtctgcaccaacaacacaattatga

SEQ ID NO: 166011 - DNA, 53 bp, Artificial
  Synthetic oligonucleotide
accgctaaaaggtatcacagcacccctgcaagaataaaaacggtcacaggggt

SEQ ID NO: 166012 - DNA, 56 bp, Artificial
  Synthetic oligonucleotide
actgtttcttacgcaaatggtgaactagctttatttaaggatcagataattacaac

SEQ ID NO: 166013 - DNA, 60 bp, Artificial
  Synthetic oligonucleotide
aatagaattcttatctaggataataaatacactagaagcatctgcaacaaaactttgcac

SEQ ID NO: 166014 - DNA, 57 bp, Artificial
  Synthetic oligonucleotide
tatttaagataatagtttcttagtagtggagtgcctgtcctggtggagtttgcttta

SEQ ID NO: 166015 - DNA, 60 bp, Artificial
  Synthetic oligonucleotide
tattctttaacagcatataagatgctaaagaatgcaggtattgagagcagaataggggtt

SEQ ID NO: 166016 - DNA, 60 bp, Artificial
  Synthetic oligonucleotide
aatatagcttgtgcaatagttacactagcaaaaatactatattgagcctgtgtaactata

SEQ ID NO: 166017 - DNA, 59 bp, Artificial
  Synthetic oligonucleotide
tattcctatattgtttactaactaaggccacgtcaggatattaattcgagcatgtaatg

SEQ ID NO: 166018 - DNA, 57 bp, Artificial
  Synthetic oligonucleotide
tattcaaggaagggatagacctataaatttaactgattgtgcattaggattattaac

SEQ ID NO: 166019 - DNA, 58 bp, Artificial
  Synthetic oligonucleotide
cgtgcttgatctatacggaattaggaaacaaggtacaacatctactgaggtacacgtc

SEQ ID NO: 166020 - DNA, 55 bp, Artificial
  Synthetic oligonucleotide
tttctaaaaggagtaaagatatgtatccacaattaacagacaactcttttgtaaa

SEQ ID NO: 166021 - DNA, 59 bp, Artificial
  Synthetic oligonucleotide
ggttcaagggattataaaagtaatgtattgtgcagatttagattctcgcacatgtagtg

SEQ ID NO: 166022 - DNA, 59 bp, Artificial
  Synthetic oligonucleotide
gattatggttctgtatggaatgcacatcctattttagttatagacgtatatgaacacgc

SEQ ID NO: 166023 - DNA, 60 bp, Artificial
  Synthetic oligonucleotide
ggttacaggttaatatatattctcctttgctatcacgtactaaacatcctattgatgctg

SEQ ID NO: 166024 - DNA, 59 bp, Artificial
  Synthetic oligonucleotide
gcactgattctaaagccatcatatcaaatctatcactcattccgtaaatagaaaccatg

SEQ ID NO: 166025 - DNA, 58 bp, Artificial
  Synthetic oligonucleotide
cctctcggtctgccaccatagagatagaccctaaggggcagtcggagaggcattaccc

SEQ ID NO: 166026 - DNA, 59 bp, Artificial
  Synthetic oligonucleotide
gaggggagcatatgatttaagtagaatgcttatcttacaagaattagattatgcagtgc

SEQ ID NO: 166027 - DNA, 56 bp, Artificial
  Synthetic oligonucleotide
tacaggtgaggctagggacggaaggtcggccttatgtgatacggtggtaattcgtg

SEQ ID NO: 166028 - DNA, 59 bp, Artificial
  Synthetic oligonucleotide
cggtatggcgcagagaggtggcagcgtgaccacacaggttcgatacggtaagaaggttc

SEQ ID NO: 166029 - DNA, 59 bp, Artificial
  Synthetic oligonucleotide
gactacagtccggtcaagtctattacctttatttgatacaaacatgtactcacacgcta

SEQ ID NO: 166030 - DNA, 55 bp, Artificial
  Synthetic oligonucleotide
ggtggtttaagcttagttgggtgtcaagctgtattattagttactaaactaatca

SEQ ID NO: 166031 - DNA, 59 bp, Artificial
  Synthetic oligonucleotide
tcttcgttatcgcattgcagaattttaccttctagatacattcgatacataaactcagc

SEQ ID NO: 166032 - DNA, 59 bp, Artificial
  Synthetic oligonucleotide
gtggtcgttttgcagatgcaaaggcatctgaaattgtattaagtaatactaaagctaag

SEQ ID NO: 166033 - DNA, 56 bp, Artificial
  Synthetic oligonucleotide
tccgtcacctacaggtgaggctagggacggaaggtcggccttatgtgatacggtgg

SEQ ID NO: 166034 - DNA, 60 bp, Artificial
  Synthetic oligonucleotide
ccaatttcaggtgctgaatttgagatggtgaaggctgataataacgaagtagttgagaaa

SEQ ID NO: 166035 - DNA, 57 bp, Artificial
  Synthetic oligonucleotide
cctaatataacagagcatactatttcataaaacagactaatgttcgtaatttataat

SEQ ID NO: 166036 - DNA, 59 bp, Artificial
  Synthetic oligonucleotide
cttgttggctaagaatagtatagcttcaataggcttttcaaagtgttcatatgtacgac

SEQ ID NO: 166037 - DNA, 53 bp, Artificial
  Synthetic oligonucleotide
gttaaagttgggattatacctacttgttttactcttccgtctttatgatatgt

SEQ ID NO: 166038 - DNA, 58 bp, Artificial
  Synthetic oligonucleotide
agtctttcactattttttacatagcccattctatttgaattaggtgaaggatcatatc

SEQ ID NO: 166039 - DNA, 59 bp, Artificial
  Synthetic oligonucleotide
ctaagatctccatataatgttgctgtagttgcacttatgctaatttcaggtacatatcc

SEQ ID NO: 166040 - DNA, 59 bp, Artificial
  Synthetic oligonucleotide
gaaactcacaaagataatctaacttcaaaagagatgtctaagctatatctaacccctgc

SEQ ID NO: 166041 - DNA, 59 bp, Artificial
  Synthetic oligonucleotide
cgacttatagaaagtatcaagctattagaatttctcatggtaatatctctgatgacggg

SEQ ID NO: 166042 - DNA, 59 bp, Artificial
  Synthetic oligonucleotide
ctatacattttggcaagtgttggtcttttatgtacatctgtcatatctgatgaacctac

SEQ ID NO: 166043 - DNA, 54 bp, Artificial
  Synthetic oligonucleotide
gtaggacttaaagctaatcaagtagtttcgggacttacactaagtatatttgga

SEQ ID NO: 166044 - DNA, 54 bp, Artificial
  Synthetic oligonucleotide
cgtacgggaatacgttatataagccaattcaattatgtacgggaatacataaaa

SEQ ID NO: 166045 - DNA, 60 bp, Artificial
  Synthetic oligonucleotide
ccaatttcatccgcatctattgtgctacaatctatacaaccaccgtcaatagtagtccta

SEQ ID NO: 166046 - DNA, 59 bp, Artificial
  Synthetic oligonucleotide
gtagacataatgagcgtaactctaaattaatgctaggcgatgatagagctagaaagtta

SEQ ID NO: 166047 - DNA, 59 bp, Artificial
  Synthetic oligonucleotide
cttcagtaggatgtaaaataacagactttctaggattcactatagttacagatggtctg

SEQ ID NO: 166048 - DNA, 59 bp, Artificial
  Synthetic oligonucleotide
cagtgttaatggtagatttaaatgtagaggttagagtatctgtcaccttagtcatcatc

SEQ ID NO: 166049 - DNA, 59 bp, Artificial
  Synthetic oligonucleotide
gatacaacaccatttagagttactatgaacggagagcctctaaagatatttaatagcac

SEQ ID NO: 166050 - DNA, 55 bp, Artificial
  Synthetic oligonucleotide
gacccccaccccgttgcacactatattagctgtagagatttgaaccgcccctacc

SEQ ID NO: 166051 - DNA, 59 bp, Artificial
  Synthetic oligonucleotide
ccggtatctacaattataatttcgtctactatatcctttacacattctaagcatctgcc

SEQ ID NO: 166052 - DNA, 59 bp, Artificial
  Synthetic oligonucleotide
gtaaagctaagcatacttgatagtttgttgcatatgagtatgaatagattgtttgggcc

SEQ ID NO: 166053 - DNA, 53 bp, Artificial
  Synthetic oligonucleotide
ggttggttcgaccttttgagcgtgggtaaacttgctccgttgggagtattgac

SEQ ID NO: 166054 - DNA, 59 bp, Artificial
  Synthetic oligonucleotide
tgctacagtactcattgccgccaggtctccggcaaaacgagctgcaaaggtatcgcctg

SEQ ID NO: 166055 - DNA, 55 bp, Artificial
  Synthetic oligonucleotide
gatttacgggtaattaatatagaaagtagtaaactctatggctatgcaagggtaa

SEQ ID NO: 166056 - DNA, 59 bp, Artificial
  Synthetic oligonucleotide
ggttctggcagtgtaggaatagcttgtgcaaatataaatagaaagtttgttggaataga

SEQ ID NO: 166057 - DNA, 59 bp, Artificial
  Synthetic oligonucleotide
gcttacttctattcatgatgctgtgtagagctatcacgcgtattcttatggcggaattt

SEQ ID NO: 166058 - DNA, 59 bp, Artificial
  Synthetic oligonucleotide
cagatactgatatagttacagctccaatagttgagtaatgatatcctctagccttaatc

SEQ ID NO: 166059 - DNA, 57 bp, Artificial
  Synthetic oligonucleotide
aattcttcgctcagtgaaaattatagatgcttgtgaccttccattaatcggggttaa

SEQ ID NO: 166060 - DNA, 55 bp, Artificial
  Synthetic oligonucleotide
agttggtggtacgtggtcgaaccaaatctgcggcgtgtctagtttcctagcgccc

SEQ ID NO: 166061 - DNA, 59 bp, Artificial
  Synthetic oligonucleotide
ctggagtcacaggttctactggtgcgactggaataaccggacctacaggaggcattgga

SEQ ID NO: 166062 - DNA, 59 bp, Artificial
  Synthetic oligonucleotide
gctatgttggattacataattgcatggttgcattatatggcaagtcatattatgagagc

SEQ ID NO: 166063 - DNA, 55 bp, Artificial
  Synthetic oligonucleotide
gatcccattttaaacccattcaaatttataattggtaataccacaccagactctg

SEQ ID NO: 166064 - DNA, 58 bp, Artificial
  Synthetic oligonucleotide
catgtagcaccaacggggtataggtattattcacaagagcaacttaatcacttcttag

SEQ ID NO: 166065 - DNA, 59 bp, Artificial
  Synthetic oligonucleotide
ttttccatacttctttaaatccaaatctatgtataatgctctaaactgtcttatatagc

SEQ ID NO: 166066 - DNA, 59 bp, Artificial
  Synthetic oligonucleotide
tccctatctttaggtgtacaggaatgagcgtgatgccgacgtaacgggcaggtgtggga

SEQ ID NO: 166067 - DNA, 58 bp, Artificial
  Synthetic oligonucleotide
ggttctttgtccatgtagcatatttaccactccaactcaaagcatttaatcctttaga

SEQ ID NO: 166068 - DNA, 55 bp, Artificial
  Synthetic oligonucleotide
tatggtgtaccagctgtttcgccggaagcaaaggtgggtagctttgtcggaacgg

SEQ ID NO: 166069 - DNA, 59 bp, Artificial
  Synthetic oligonucleotide
acatcttgatagtgtgcgtaaaacgttccgcgattaatgtctgcacgcttaacgatatc

SEQ ID NO: 166070 - DNA, 59 bp, Artificial
  Synthetic oligonucleotide
catctccaactacagtattaacatctatcatgtctcttatgttttccattgttgtaccc

SEQ ID NO: 166071 - DNA, 59 bp, Artificial
  Synthetic oligonucleotide
ctacagatactatacaggcagaagaactatatacatttggaggacaagatcccagcatc

SEQ ID NO: 166072 - DNA, 53 bp, Artificial
  Synthetic oligonucleotide
ctagaaacgcaactgtacttaaaagaccaaccgctgtcataactttattaaac

SEQ ID NO: 166073 - DNA, 59 bp, Artificial
  Synthetic oligonucleotide
tactatagcgccatcagctctcatagcctctgcccaagctcctatcctctgacctgtga

SEQ ID NO: 166074 - DNA, 56 bp, Artificial
  Synthetic oligonucleotide
ctacttcaattcaaaataagttagaagcaaagagagttgctgaaaattttgtacaa

SEQ ID NO: 166075 - DNA, 59 bp, Artificial
  Synthetic oligonucleotide
tggattaattgaaggtgaggattacaggaaggctggtagagtatggctaattacaagag

SEQ ID NO: 166076 - DNA, 59 bp, Artificial
  Synthetic oligonucleotide
gagctagtgaccatttaggagatagcgtaggagcctatataggctacacagtaaatggc

SEQ ID NO: 166077 - DNA, 59 bp, Artificial
  Synthetic oligonucleotide
taccggcagatgcaaagcgcacttcggctacgttaccttcttgtcgctgcaataaggca

SEQ ID NO: 166078 - DNA, 55 bp, Artificial
  Synthetic oligonucleotide
actctatacccttgttaaatagtttctcgtatagtttaaatccttcttctgcatc

SEQ ID NO: 166079 - DNA, 59 bp, Artificial
  Synthetic oligonucleotide
tcgtaagaaccgcaatgcttacagcacgtagggccgcaaccgcagcatggattaggtct

SEQ ID NO: 166080 - DNA, 54 bp, Artificial
  Synthetic oligonucleotide
ttatgggggaatttcgttcaacaaccttgggtaatgctagagtttgatggtaag

SEQ ID NO: 166081 - DNA, 58 bp, Artificial
  Synthetic oligonucleotide
tcggagtcgtgcaccgaagcacatgctaaggctgcaacggattcacccgttatagtga

SEQ ID NO: 166082 - DNA, 58 bp, Artificial
  Synthetic oligonucleotide
gcatgtggagcagactttgcatattgccagatgccgtcagtatcggatctatggggtt

SEQ ID NO: 166083 - DNA, 58 bp, Artificial
  Synthetic oligonucleotide
ctcgtaccagtatctgttccgttaacatctatcttaactattgtattactatctcctg

SEQ ID NO: 166084 - DNA, 58 bp, Artificial
  Synthetic oligonucleotide
ccttaaataatttggatcgtaatactcagatgcaccttctattaatgaagatggtggg

SEQ ID NO: 166085 - DNA, 56 bp, Artificial
  Synthetic oligonucleotide
ctggcggactaatttaagcgtcttaagatgcaacgtaggtagtatgcccttatagg

SEQ ID NO: 166086 - DNA, 58 bp, Artificial
  Synthetic oligonucleotide
gtctagtttgcaataatatggagaagtataatgtgttccatgaccaccaaatctatcc

SEQ ID NO: 166087 - DNA, 54 bp, Artificial
  Synthetic oligonucleotide
aacctacgaaacgcacgtacagaatataggttggcaagattgggtttacgatgg

SEQ ID NO: 166088 - DNA, 57 bp, Artificial
  Synthetic oligonucleotide
cttacagcaggtcaattattaggaagcaagttagtattaaacgaattcgttgcattc

SEQ ID NO: 166089 - DNA, 57 bp, Artificial
  Synthetic oligonucleotide
actcactccttttgctttcgcaaaagaatctattcttgttatcgcttctttactcaa

SEQ ID NO: 166090 - DNA, 58 bp, Artificial
  Synthetic oligonucleotide
gtcgctaaagtgtcggtttatagtcgcttttacgacaacatcttatcaattagatatg

SEQ ID NO: 166091 - DNA, 58 bp, Artificial
  Synthetic oligonucleotide
gtcctaatagataaaggagaacacttagtgaaggcacatcaactaaccttaaatgatc

SEQ ID NO: 166092 - DNA, 58 bp, Artificial
  Synthetic oligonucleotide
tacgacccgtcgcaaaacataacaaagccctgccgcttgctgtataggctcgtcctta

SEQ ID NO: 166093 - DNA, 54 bp, Artificial
  Synthetic oligonucleotide
ccgctcctttacggtacgacttcagcccggttacgacgctctcctaccgcttga

SEQ ID NO: 166094 - DNA, 57 bp, Artificial
  Synthetic oligonucleotide
ccagttcttaataattcactaaatccaactaaagcaccataatatacagcttcaggg

SEQ ID NO: 166095 - DNA, 58 bp, Artificial
  Synthetic oligonucleotide
gactttatatcaccagtaatttctgcaatatttccgtctgtgacatcttgtctgacgc

SEQ ID NO: 166096 - DNA, 55 bp, Artificial
  Synthetic oligonucleotide
tcggtaagagcggccgaagggtgagtacgcgtgggtacctacctgtaccacgata

SEQ ID NO: 166097 - DNA, 58 bp, Artificial
  Synthetic oligonucleotide
aagccctcaatgagttgcagaaagaggctgaaaatcgatgtgagagctattataatag

SEQ ID NO: 166098 - DNA, 58 bp, Artificial
  Synthetic oligonucleotide
gggttatggatgtttgtataggattagtgatgatgagataacagaagaatacgaaagg

SEQ ID NO: 166099 - DNA, 58 bp, Artificial
  Synthetic oligonucleotide
ctgtatatacctttgtacgtaatgatctatcattataggctggtgtcttataacctcc

SEQ ID NO: 166100 - DNA, 60 bp, Artificial
  Synthetic oligonucleotide
actattacttcccacattttgaacgctgtcattttgagagctgtcattttgactgttctc

SEQ ID NO: 166101 - DNA, 54 bp, Artificial
  Synthetic oligonucleotide
cgggaagttttcacatttcgtataagacagtgtaattctaaagccgttatacta

SEQ ID NO: 166102 - DNA, 58 bp, Artificial
  Synthetic oligonucleotide
gtaatctaacatgatctcatgtacttgattccacctcatacgcattaattctggtgag

SEQ ID NO: 166103 - DNA, 58 bp, Artificial
  Synthetic oligonucleotide
gtcactttatgaagttgcagtagctatccaatcagtttacaactcatttaaggtagac

SEQ ID NO: 166104 - DNA, 57 bp, Artificial
  Synthetic oligonucleotide
cactccaacctaataagaatactagtgaatatggtaccattgttgatataagggttc

SEQ ID NO: 166105 - DNA, 57 bp, Artificial
  Synthetic oligonucleotide
cctaaatgatagttctactcaaggagtaagtattggagacctaaatagtgcttattg

SEQ ID NO: 166106 - DNA, 55 bp, Artificial
  Synthetic oligonucleotide
agaagaatacgaaaggatttacgaggctatgattcaggaaattcgggcaaaagaa

SEQ ID NO: 166107 - DNA, 55 bp, Artificial
  Synthetic oligonucleotide
catttctaaagttgttgcaccagttctcggaataataagaattggacctaaacaa

SEQ ID NO: 166108 - DNA, 57 bp, Artificial
  Synthetic oligonucleotide
attgtctacagatggttcttttatgccatccggtatggaaaaaacaggagattattg

SEQ ID NO: 166109 - DNA, 58 bp, Artificial
  Synthetic oligonucleotide
tctgcccacgccgccatttttccggctcgtaggttacatgtgtgtatgtccgtctgat

SEQ ID NO: 166110 - DNA, 58 bp, Artificial
  Synthetic oligonucleotide
gctaaggagcttctagtagacttaaataagctgaaagatggtactatgatatttcctg

SEQ ID NO: 166111 - DNA, 60 bp, Artificial
  Synthetic oligonucleotide
actataaacaatataaagatgttgcgatattgcaagatatattcaatcattcagcaccaa

SEQ ID NO: 166112 - DNA, 58 bp, Artificial
  Synthetic oligonucleotide
gaaatggatttaagaacactgcgttcaaaagtttcagttgcaatgcaggatgtatttc

SEQ ID NO: 166113 - DNA, 58 bp, Artificial
  Synthetic oligonucleotide
aggcccacagagacggactgatttagcctctcggtctgccaccatagagctagaccct

SEQ ID NO: 166114 - DNA, 52 bp, Artificial
  Synthetic oligonucleotide
ttcaatctatattaatttaccttaggggtttgaacaggaaacggctactccc

SEQ ID NO: 166115 - DNA, 57 bp, Artificial
  Synthetic oligonucleotide
gattatatcggtaaaagtgacgaattaaaatctcaaataggtgcacttgtagtggac

SEQ ID NO: 166116 - DNA, 58 bp, Artificial
  Synthetic oligonucleotide
gctacatgttggatagagttactagatttatcggagatagtcatagtaggaattatgg

SEQ ID NO: 166117 - DNA, 58 bp, Artificial
  Synthetic oligonucleotide
ctaatgaagttactagtcctaatatagaatatggttctcagtactcaactgaactgcc

SEQ ID NO: 166118 - DNA, 57 bp, Artificial
  Synthetic oligonucleotide
gaggggaatactatttagtagttggaggattaagattaaatgactataagacagcag

SEQ ID NO: 166119 - DNA, 55 bp, Artificial
  Synthetic oligonucleotide
gaatcaacctttataactctaactttggcttgtataggagagttcttaatgtatt

SEQ ID NO: 166120 - DNA, 58 bp, Artificial
  Synthetic oligonucleotide
agtataagcagcggcgaggtcattatggacggcaggactgtgaaccaggttccgccaa

SEQ ID NO: 166121 - DNA, 58 bp, Artificial
  Synthetic oligonucleotide
atcaactaccatctggggcgctctttattatgccccgtgggaaccatgcccacgaagc

SEQ ID NO: 166122 - DNA, 60 bp, Artificial
  Synthetic oligonucleotide
ctggagatatacctcttattattagtatgtctagcataattgcaagcatattagaacaat

SEQ ID NO: 166123 - DNA, 54 bp, Artificial
  Synthetic oligonucleotide
gtaatacaccaaatctatctctcaaagggggcgttaaaagtcccaatctagtag

SEQ ID NO: 166124 - DNA, 58 bp, Artificial
  Synthetic oligonucleotide
ctggacttgctataacaaattcacttcgtgatataatagatggaaacttagttgcagg

SEQ ID NO: 166125 - DNA, 58 bp, Artificial
  Synthetic oligonucleotide
gcagctgcaccggctattttatgcactagtacggtaccagcaacccctctgcgtccta

SEQ ID NO: 166126 - DNA, 55 bp, Artificial
  Synthetic oligonucleotide
ttaagttaggaaaaagagaaacagtatgtgtagatgggtttaagtacacaacaga

SEQ ID NO: 166127 - DNA, 58 bp, Artificial
  Synthetic oligonucleotide
tgctttagctcctaggggtgtgtgtagagttacgtggtagtatgcttgataaaaccag

SEQ ID NO: 166128 - DNA, 58 bp, Artificial
  Synthetic oligonucleotide
gaggtgcttacatgagcaccttatttcctgtatagtcataagatcttattaagttgac

SEQ ID NO: 166129 - DNA, 52 bp, Artificial
  Synthetic oligonucleotide
cttgtaaaatcttttcgtaaggtggaaaacggtgatttaaaggtatccatca

SEQ ID NO: 166130 - DNA, 57 bp, Artificial
  Synthetic oligonucleotide
cttacaggcgtatctaagatatcaataagtgtatcactaacttctgcgttagattcc

SEQ ID NO: 166131 - DNA, 57 bp, Artificial
  Synthetic oligonucleotide
catcattggtaacttgtggagtatacaacctatattgaagcatttcgctatcttctg

SEQ ID NO: 166132 - DNA, 56 bp, Artificial
  Synthetic oligonucleotide
tagtcatagttaggtacgcaaaagtcatagttaggtacgcaaaagtcatagttagg

SEQ ID NO: 166133 - DNA, 57 bp, Artificial
  Synthetic oligonucleotide
cactaaacagcagcatattcgctacatcagaagaagacgtttctaaatgtgaatatg

SEQ ID NO: 166134 - DNA, 53 bp, Artificial
  Synthetic oligonucleotide
ccactctaagccacaaaaacgccctataaaatcccgctttaatcccactttga

SEQ ID NO: 166135 - DNA, 57 bp, Artificial
  Synthetic oligonucleotide
cttatacttgttgcaagcttttataacagacaaatatccatgctgaactaaatcctc

SEQ ID NO: 166136 - DNA, 56 bp, Artificial
  Synthetic oligonucleotide
ctagtggagtttcaataggttctaagatggtagatggctttataaaagaagttcac

SEQ ID NO: 166137 - DNA, 57 bp, Artificial
  Synthetic oligonucleotide
gaatttaccatgatctattacagattcattccaactttcgtaaactctccaccttgc

SEQ ID NO: 166138 - DNA, 57 bp, Artificial
  Synthetic oligonucleotide
ccagctaatagcttgggcaattttgaaactaaatcatgagagaagaaagcttttctc

SEQ ID NO: 166139 - DNA, 57 bp, Artificial
  Synthetic oligonucleotide
gcctagtgttagttgtggaaactgtgcttatgatatgattaatagtggtatattgcc

SEQ ID NO: 166140 - DNA, 57 bp, Artificial
  Synthetic oligonucleotide
agataaaggagaacacttagtgaaggcacatcaactaaccttaaatgatcatgtaac

SEQ ID NO: 166141 - DNA, 57 bp, Artificial
  Synthetic oligonucleotide
catctgggtttatccaaccagtagcttttgtattatctgatctatagtaactccaag

SEQ ID NO: 166142 - DNA, 55 bp, Artificial
  Synthetic oligonucleotide
tacgtcaagagttggcgcaggaccgttcccgacggaacagaacaacgaaataggc

SEQ ID NO: 166143 - DNA, 57 bp, Artificial
  Synthetic oligonucleotide
gatcttcccatccgtgtattgcacatacatatatcaatgaattagctccattaccaa

SEQ ID NO: 166144 - DNA, 54 bp, Artificial
  Synthetic oligonucleotide
ttatggggaaatttcgttcaacaaccttgggtaatgctagaattcgatggaaag

SEQ ID NO: 166145 - DNA, 60 bp, Artificial
  Synthetic oligonucleotide
cttatgcaccaacttttgaatggtttgagcttgtccagcacttatattcattgttagaga

SEQ ID NO: 166146 - DNA, 57 bp, Artificial
  Synthetic oligonucleotide
cttcgtattcttcatcggatggtatatgtcctccttgaagtgcttcatttacctgtg

SEQ ID NO: 166147 - DNA, 57 bp, Artificial
  Synthetic oligonucleotide
acttcctggaactcttaatatcctagttgcatctaaggcttgtctatctgctccaaa

SEQ ID NO: 166148 - DNA, 57 bp, Artificial
  Synthetic oligonucleotide
catgctcccatattcgtcaaaccttactgaaaattcaactcctggtattataattgg

SEQ ID NO: 166149 - DNA, 53 bp, Artificial
  Synthetic oligonucleotide
ggaatcggcgcgtctaaatttattgggaaagctttaaaagtctatttaggtga

SEQ ID NO: 166150 - DNA, 57 bp, Artificial
  Synthetic oligonucleotide
cgatatacctaccaagatgaaagtactatagtaattcgttggaattacaggagagag

SEQ ID NO: 166151 - DNA, 57 bp, Artificial
  Synthetic oligonucleotide
ccctaacgttctatcccatattccagcaaatccagtaatataattaggaacatgttg

SEQ ID NO: 166152 - DNA, 57 bp, Artificial
  Synthetic oligonucleotide
cgcaaatgctatattagatagagttttgcaccatgctcatgttgtacctattaatgg

SEQ ID NO: 166153 - DNA, 54 bp, Artificial
  Synthetic oligonucleotide
ccgtttctataggattaaaagttgacctagtttcatttccagacataagcaaac

SEQ ID NO: 166154 - DNA, 57 bp, Artificial
  Synthetic oligonucleotide
tcttaggtgctattgagggaacggtcgtaacaacagctatgccaaccattgttaggg

SEQ ID NO: 166155 - DNA, 57 bp, Artificial
  Synthetic oligonucleotide
gcactttctacaaagtgttacatcacacatatcacaactaaattggtcgtatactgc

SEQ ID NO: 166156 - DNA, 60 bp, Artificial
  Synthetic oligonucleotide
gtagtaatggaactgtactttatacaagtgatgattcttcagtttcatttggtgctcaac

SEQ ID NO: 166157 - DNA, 51 bp, Artificial
  Synthetic oligonucleotide
cctacaaaacttaactaaggataacacaactccccacttagtaactttaga

SEQ ID NO: 166158 - DNA, 57 bp, Artificial
  Synthetic oligonucleotide
aacttactcctttagagtgctggagacttgtgggattttcgtctgaagattactggc

SEQ ID NO: 166159 - DNA, 57 bp, Artificial
  Synthetic oligonucleotide
ctggtactgctccagtgtataatgttactcccaatactaccatagtaattgataaac

SEQ ID NO: 166160 - DNA, 56 bp, Artificial
  Synthetic oligonucleotide
gctcactattggatatttcccaatcagtagttttaggaaaagtataactcgtacca

SEQ ID NO: 166161 - DNA, 57 bp, Artificial
  Synthetic oligonucleotide
atataaagttgcccgctttgctatcgggtatgtcgcttgagtctatcggtgacggta

SEQ ID NO: 166162 - DNA, 57 bp, Artificial
  Synthetic oligonucleotide
gctccccatgattgaaacattgtaagcgtaacagtatctacaagaaccagtaaggct

SEQ ID NO: 166163 - DNA, 57 bp, Artificial
  Synthetic oligonucleotide
cgtaagtcttattgaaactctgatgaagatgtttagtctaagtagctctatacgagc

SEQ ID NO: 166164 - DNA, 57 bp, Artificial
  Synthetic oligonucleotide
gtatccaacagagggtgagataattattaacggtagtaaatggactagacattgcct

SEQ ID NO: 166165 - DNA, 55 bp, Artificial
  Synthetic oligonucleotide
gtatccaaataccataaattcagttgattcgtcctattctaacccagtattttcg

SEQ ID NO: 166166 - DNA, 56 bp, Artificial
  Synthetic oligonucleotide
gcgacaactgtatggtcgcattgctataaacataagacatatactttgatttgctc

SEQ ID NO: 166167 - DNA, 56 bp, Artificial
  Synthetic oligonucleotide
gtatatccaaattgtctaaagatatcatctcctttggacctcctttaaatacctcg

SEQ ID NO: 166168 - DNA, 51 bp, Artificial
  Synthetic oligonucleotide
gcgttagttttaacacccctattttttagagaagttccttcagaaactgta

SEQ ID NO: 166169 - DNA, 56 bp, Artificial
  Synthetic oligonucleotide
gttaattgagtggctatgttactcttagagctgtagtatacaactctttatcctgc

SEQ ID NO: 166170 - DNA, 56 bp, Artificial
  Synthetic oligonucleotide
caaggagcataatgtaaaatggttacggttgaattgtggtacatttagagataggc

SEQ ID NO: 166171 - DNA, 56 bp, Artificial
  Synthetic oligonucleotide
tacaatgcgtggttactaaggtgcaagtgtagggaagaacatttcctgctctgcac

SEQ ID NO: 166172 - DNA, 56 bp, Artificial
  Synthetic oligonucleotide
cccgctcgttcggtacagccacatataactcttcgactgtgccgccttccctggtt

SEQ ID NO: 166173 - DNA, 56 bp, Artificial
  Synthetic oligonucleotide
gcttgtttaagtcagtggtattactcttattttaagattgatggtattgcatattg

SEQ ID NO: 166174 - DNA, 56 bp, Artificial
  Synthetic oligonucleotide
tggataacttgctaatatgtttctgtgctgacgttctatactctgcttacttgtac

SEQ ID NO: 166175 - DNA, 56 bp, Artificial
  Synthetic oligonucleotide
ggctcaattgattcaggaggaataattaattttacacgagagccgtccaataattc

SEQ ID NO: 166176 - DNA, 56 bp, Artificial
  Synthetic oligonucleotide
gatacggtatatgaatatagcttgtgaaattttgaggagagcacatgaaactacgg

SEQ ID NO: 166177 - DNA, 56 bp, Artificial
  Synthetic oligonucleotide
gtagtgcgataccgtggggcacccgccgaagattcgatactccccatcctcgtcag

SEQ ID NO: 166178 - DNA, 55 bp, Artificial
  Synthetic oligonucleotide
cttacaattttgactggtaaacctgcatctggtaaatcaactatagttaaccagt

SEQ ID NO: 166179 - DNA, 56 bp, Artificial
  Synthetic oligonucleotide
gacgaattgattgtagatataaacgatttaaaagcacttgtgacgacgagcagtag

SEQ ID NO: 166180 - DNA, 55 bp, Artificial
  Synthetic oligonucleotide
cgtcttttatgtatcccgtacataattgaattggcttatataacgtatcccgtac

SEQ ID NO: 166181 - DNA, 54 bp, Artificial
  Synthetic oligonucleotide
tcgccccaaacccccagtgagccacacgggacggaacacccgcgttgcggctat

SEQ ID NO: 166182 - DNA, 56 bp, Artificial
  Synthetic oligonucleotide
ctggcatagtatcgcccctttcaacataataagcagagaacataatcactatattc

SEQ ID NO: 166183 - DNA, 56 bp, Artificial
  Synthetic oligonucleotide
ggatagcctaatcttataggagaactaactatacctaaatcatagagttctcgtgc

SEQ ID NO: 166184 - DNA, 52 bp, Artificial
  Synthetic oligonucleotide
caaaagtcaacataatctgggaggtggttttattaataacgacgttttgaac

SEQ ID NO: 166185 - DNA, 56 bp, Artificial
  Synthetic oligonucleotide
gatatcgtatgtgtaacgtacaacatcactcatggtagcttctataaagtcagttg

SEQ ID NO: 166186 - DNA, 56 bp, Artificial
  Synthetic oligonucleotide
tcgtccctattcgcagcttgacgggtatggccaagtggcgtggaagtatagcgggt

SEQ ID NO: 166187 - DNA, 56 bp, Artificial
  Synthetic oligonucleotide
gagccgatgttacttcatacatgttctacttggttagaaatggaagtaagatagac

SEQ ID NO: 166188 - DNA, 56 bp, Artificial
  Synthetic oligonucleotide
gcataatagacctatagttgttgcaccacttgttggtttagcactaggtaatttac

SEQ ID NO: 166189 - DNA, 52 bp, Artificial
  Synthetic oligonucleotide
acctttcactatcaaaaggttatctttaaatcttatttgactatcaaaaggt

SEQ ID NO: 166190 - DNA, 56 bp, Artificial
  Synthetic oligonucleotide
ggccttaatttctattgctgtagtaggtatatggagctgtataggatataacatgg

SEQ ID NO: 166191 - DNA, 56 bp, Artificial
  Synthetic oligonucleotide
cctgagtatttgtatgagtactaatgaaggcagtaagttctggttatctccacata

SEQ ID NO: 166192 - DNA, 56 bp, Artificial
  Synthetic oligonucleotide
gtttcaatgggtatcattgactcaaaggttatttcatcaattctagtacccttatc

SEQ ID NO: 166193 - DNA, 56 bp, Artificial
  Synthetic oligonucleotide
cctgttgtattaatctatcaagtacagtaggtattccaagcaatctaattccaccg

SEQ ID NO: 166194 - DNA, 56 bp, Artificial
  Synthetic oligonucleotide
gcggtcattggtaggcctgtaacctcaggtgctatgtttataccaatcttatcctc

SEQ ID NO: 166195 - DNA, 56 bp, Artificial
  Synthetic oligonucleotide
gttgaagaacaaagagactctgttaaagctgcaggacgtaatgatcaacaattaag

SEQ ID NO: 166196 - DNA, 56 bp, Artificial
  Synthetic oligonucleotide
gttctagtaccatgtatatctgctatagctgagtatttagtacatgggaaagttcc

SEQ ID NO: 166197 - DNA, 56 bp, Artificial
  Synthetic oligonucleotide
tggggtataagtgcgcccttcagttttcactacgggattgcccatactcataattc

SEQ ID NO: 166198 - DNA, 53 bp, Artificial
  Synthetic oligonucleotide
gatgaccaaagatcaaaggctaactatagaaaaggggtttgtcttaacttact

SEQ ID NO: 166199 - DNA, 56 bp, Artificial
  Synthetic oligonucleotide
atccgttgctagagaatggaactatatatcacaaaatagtctttcaaatagtgagc

SEQ ID NO: 166200 - DNA, 56 bp, Artificial
  Synthetic oligonucleotide
gtatccgtatttttacatcttaatagcgtatgtattacaacacacctaaacaacga

SEQ ID NO: 166201 - DNA, 56 bp, Artificial
  Synthetic oligonucleotide
cctaaatgtatttgagcatctatacttgatagtgcatttcgaggattggagatgtg

SEQ ID NO: 166202 - DNA, 56 bp, Artificial
  Synthetic oligonucleotide
cactcagtaagaatgtcaactaaacattctatcctttgtaacgtaaggaacacgtc

SEQ ID NO: 166203 - DNA, 55 bp, Artificial
  Synthetic oligonucleotide
gggctgagtttgaactttggaatggtgaaaatcttgtaggaaattacacaactaa

SEQ ID NO: 166204 - DNA, 54 bp, Artificial
  Synthetic oligonucleotide
ggagaggaacacccgttaaatttaactgattgtgcattgggattattaactaag

SEQ ID NO: 166205 - DNA, 56 bp, Artificial
  Synthetic oligonucleotide
gctgatccataagatacttgagtaggctttaaccattgatattctggaatcttagc

SEQ ID NO: 166206 - DNA, 56 bp, Artificial
  Synthetic oligonucleotide
ataaagtccagctttatctattgcacttgcaatagattctgctatagcatttgata

SEQ ID NO: 166207 - DNA, 56 bp, Artificial
  Synthetic oligonucleotide
gtactagtaaatactaacgcatatgttgacgattttactttgtacggtctgtacgc

SEQ ID NO: 166208 - DNA, 56 bp, Artificial
  Synthetic oligonucleotide
gaccattgtaattcgtctaaaagcagctttatatgataaccatctactgtagcatg

SEQ ID NO: 166209 - DNA, 56 bp, Artificial
  Synthetic oligonucleotide
tgcaactattttaaccgttgattcacctatagtctcatgttcaaatacagtatgac

SEQ ID NO: 166210 - DNA, 56 bp, Artificial
  Synthetic oligonucleotide
ataaacatttacaaggagtgcatcatgttaatacaaagcttaaaacgtggcgaatt

SEQ ID NO: 166211 - DNA, 53 bp, Artificial
  Synthetic oligonucleotide
acctggagagcattcttggtttaatcttaaagaaggtggaaatagttatttag

SEQ ID NO: 166212 - DNA, 55 bp, Artificial
  Synthetic oligonucleotide
gccactattaagggacaagaaagtttaattggagactatctaaatcctagtggaa

SEQ ID NO: 166213 - DNA, 56 bp, Artificial
  Synthetic oligonucleotide
gggccgacttgacccgatgtcatttctccggcggtacaaattccagcagatcgcta

SEQ ID NO: 166214 - DNA, 54 bp, Artificial
  Synthetic oligonucleotide
atacccccttggaactattcagtacggcatattcttacttgggaccatacttac

SEQ ID NO: 166215 - DNA, 56 bp, Artificial
  Synthetic oligonucleotide
tgccgccaggtctccggcaaaacgagctgcaaaggtatcgcctgtaacggcagtat

SEQ ID NO: 166216 - DNA, 56 bp, Artificial
  Synthetic oligonucleotide
ggagttatctcaaaggcaacaggttctattatgggagttcaatttagaaatgtagc

SEQ ID NO: 166217 - DNA, 54 bp, Artificial
  Synthetic oligonucleotide
cttatggaatcttcgtctctaaaagtttcccttaaagcattaactcccataaga

SEQ ID NO: 166218 - DNA, 56 bp, Artificial
  Synthetic oligonucleotide
cctcctggagaagattataatgcttgggatgtagcaaaacaagattttgtaaatgg

SEQ ID NO: 166219 - DNA, 56 bp, Artificial
  Synthetic oligonucleotide
cttaacactagctttcacacctcctcaattcctaagtactaatttcttcaatctcc

SEQ ID NO: 166220 - DNA, 56 bp, Artificial
  Synthetic oligonucleotide
gaatttctcttatcattcatatctcttggtccagcaatggaaaatccttgacatgg

SEQ ID NO: 166221 - DNA, 56 bp, Artificial
  Synthetic oligonucleotide
cctatacttataggcatagttaatattgttcccaatgtggttactcctataagcgc

SEQ ID NO: 166222 - DNA, 53 bp, Artificial
  Synthetic oligonucleotide
acctcttaggatactacctaaaaagtgcttgaaattctcttataaatttgtta

SEQ ID NO: 166223 - DNA, 56 bp, Artificial
  Synthetic oligonucleotide
actcattgccgctagttctccagcaaaacgagcttcaaaggtatcgcctgtaacgg

SEQ ID NO: 166224 - DNA, 54 bp, Artificial
  Synthetic oligonucleotide
gtatccttttgggccccttctagtactttaatatcgccaactatatacttatta

SEQ ID NO: 166225 - DNA, 56 bp, Artificial
  Synthetic oligonucleotide
cacatctaatgagaatctatcagtagtagtagctcctttgatgggaacattctatg

SEQ ID NO: 166226 - DNA, 56 bp, Artificial
  Synthetic oligonucleotide
cttgcccctccaggacatggtcagcctcggttctgcagtaaccacagcaacggtag

SEQ ID NO: 166227 - DNA, 55 bp, Artificial
  Synthetic oligonucleotide
gggaaacctacattacttataagcattataatttcgtcaaacatgttcccaccac

SEQ ID NO: 166228 - DNA, 56 bp, Artificial
  Synthetic oligonucleotide
gcaccatctatagaatctccagtagtaacatctgtcttactaaagtctaattctcc

SEQ ID NO: 166229 - DNA, 56 bp, Artificial
  Synthetic oligonucleotide
gcaatcgcatcagcggtgatatccatctattcaatagttaatattgtttcaccaac

SEQ ID NO: 166230 - DNA, 55 bp, Artificial
  Synthetic oligonucleotide
gcatcatgatttcctatagtagttgctactggaagcgacttaagagcatctgcac

SEQ ID NO: 166231 - DNA, 55 bp, Artificial
  Synthetic oligonucleotide
gagtattaagagagaactttccacatttaaagtctagtatgcctagcatgtggac

SEQ ID NO: 166232 - DNA, 55 bp, Artificial
  Synthetic oligonucleotide
gagtaccagcattaccaggaaatatgcttatgctagcatacttaaaagacgttgc

SEQ ID NO: 166233 - DNA, 58 bp, Artificial
  Synthetic oligonucleotide
accgccactaaaacttgctatatattgcattctgtacttcaccatcctttatttttgc

SEQ ID NO: 166234 - DNA, 59 bp, Artificial
  Synthetic oligonucleotide
gtatgtattataaataggtttcaatttgatgcattagatttcactgtacaggtaaatta

SEQ ID NO: 166235 - DNA, 55 bp, Artificial
  Synthetic oligonucleotide
gagcgtttacggcttttgcgtggacaaaacaccgctaaaaggtatcacagcaccc

SEQ ID NO: 166236 - DNA, 55 bp, Artificial
  Synthetic oligonucleotide
gagcgatagaataacgacaccgcttagtacagccagcgttacggtacagattttc

SEQ ID NO: 166237 - DNA, 55 bp, Artificial
  Synthetic oligonucleotide
gatagggcagcaccctctacggtcctaggctctgaaggctccggcatattcccta

SEQ ID NO: 166238 - DNA, 55 bp, Artificial
  Synthetic oligonucleotide
gagtccaagccattccttagcaaacccacctgttcctttgtgtcttactgttatc

SEQ ID NO: 166239 - DNA, 54 bp, Artificial
  Synthetic oligonucleotide
gagcctttagtgaaaacaggaaatcccgtcgcaaagtttgtagctggtttaggc

SEQ ID NO: 166240 - DNA, 55 bp, Artificial
  Synthetic oligonucleotide
gagcctgatcggtcatatggcttatgattctacatcttggagaaatgcgatcaga

SEQ ID NO: 166241 - DNA, 55 bp, Artificial
  Synthetic oligonucleotide
gagccgtttgggttggaaatgacactatgacagaaataccaggtttcagcagcag

SEQ ID NO: 166242 - DNA, 55 bp, Artificial
  Synthetic oligonucleotide
gagtccagcctccaactacatcacttatataatggacacctacatatactctgct

SEQ ID NO: 166243 - DNA, 55 bp, Artificial
  Synthetic oligonucleotide
cgatagtcaagtcagcccctacctccttcgccgtagcactcttgttgatcacaac

SEQ ID NO: 166244 - DNA, 55 bp, Artificial
  Synthetic oligonucleotide
gagcagaaactttggttcagctcatcctgaagggtacagaaaagctcttagacag

SEQ ID NO: 166245 - DNA, 56 bp, Artificial
  Synthetic oligonucleotide
gtattatccataaatccatacttacctaactgatttctatatggtaaaaacttaga

SEQ ID NO: 166246 - DNA, 55 bp, Artificial
  Synthetic oligonucleotide
gagtgtactcagggatatctatggtaacatatctgcctataggttttcccatagc

SEQ ID NO: 166247 - DNA, 55 bp, Artificial
  Synthetic oligonucleotide
gagtaaggcaatcgtataaagattccccgaagctgcttaaccctactatcactac

SEQ ID NO: 166248 - DNA, 55 bp, Artificial
  Synthetic oligonucleotide
gaggtatatatcccagagatgcaattgtaaaggaatcatactcaggacctagaag

SEQ ID NO: 166249 - DNA, 55 bp, Artificial
  Synthetic oligonucleotide
gagtgcaggtgtatctactgatgtaggaggtcattctcaagatgagcatgatact

SEQ ID NO: 166250 - DNA, 55 bp, Artificial
  Synthetic oligonucleotide
gccctccatagattaaagattagaccaggagtattagttggtaaatctccgttag

SEQ ID NO: 166251 - DNA, 55 bp, Artificial
  Synthetic oligonucleotide
gccattgtgtacgtgctgtttgtggacgtctggaactcggttggctttaactacg

SEQ ID NO: 166252 - DNA, 55 bp, Artificial
  Synthetic oligonucleotide
cggaatagacttcgtataaggctcacactatcccttactcgctaagactacattc

SEQ ID NO: 166253 - DNA, 55 bp, Artificial
  Synthetic oligonucleotide
gatactaattggaggatagttggtgctgtgagcttgacagtcttagactctacag

SEQ ID NO: 166254 - DNA, 55 bp, Artificial
  Synthetic oligonucleotide
gaggaagtgttactggtacgccaagtggtagatcattaagaatgagagctacagc

SEQ ID NO: 166255 - DNA, 55 bp, Artificial
  Synthetic oligonucleotide
gaggaagtcctagagatacttgatgtcggtaccaaagaggagggcgacatagcgt

SEQ ID NO: 166256 - DNA, 58 bp, Artificial
  Synthetic oligonucleotide
ccattgtagttgtacatccagttcttaataattcactaaatccaactaaagcaccata

SEQ ID NO: 166257 - DNA, 55 bp, Artificial
  Synthetic oligonucleotide
gatactatgctccagatctaaggacctgttattgtctaaacacaggggcactgaa

SEQ ID NO: 166258 - DNA, 55 bp, Artificial
  Synthetic oligonucleotide
gaggaaccataataggagctttactacaaacaggacttggggatatcatatggcc

SEQ ID NO: 166259 - DNA, 55 bp, Artificial
  Synthetic oligonucleotide
gatacagcccggctacactcagtatgacgcagatccagattttcagtccctggcc

SEQ ID NO: 166260 - DNA, 55 bp, Artificial
  Synthetic oligonucleotide
gatagaattccagcagaaaagtgggctgagccatttgatttaatgggtgcagttg

SEQ ID NO: 166261 - DNA, 55 bp, Artificial
  Synthetic oligonucleotide
gagcttccatacttctacatataccatctgttcctaaacatcctactacggtagt

SEQ ID NO: 166262 - DNA, 55 bp, Artificial
  Synthetic oligonucleotide
gcccgtctatgagatgtaatttaaggtgcacaggttgttacgctgcaaattatag

SEQ ID NO: 166263 - DNA, 55 bp, Artificial
  Synthetic oligonucleotide
gatagcacctgtatcagtaccttcatctacaaaatggacagtgcaacctgatacc

SEQ ID NO: 166264 - DNA, 55 bp, Artificial
  Synthetic oligonucleotide
cggaatgcttcttaagccaagttgcagaataatgacgtaggcagtgagcgtagca

SEQ ID NO: 166265 - DNA, 55 bp, Artificial
  Synthetic oligonucleotide
gagctgcctcaacggacacagcagacatttcggttccccattcggcacacataca

SEQ ID NO: 166266 - DNA, 55 bp, Artificial
  Synthetic oligonucleotide
gagctgaggaatgtgcgtagacgtggaattgttataatgggcaagctcataggac

SEQ ID NO: 166267 - DNA, 60 bp, Artificial
  Synthetic oligonucleotide
gtccagtgcatgactagatcccacacatcgcgatgtctgcgctagttcggatatatacat

SEQ ID NO: 166268 - DNA, 55 bp, Artificial
  Synthetic oligonucleotide
gagtcgccctcctcagagctctactggaatatttatggatggacgccggaccggg

SEQ ID NO: 166269 - DNA, 55 bp, Artificial
  Synthetic oligonucleotide
gagtgaaaacggcttttctctttgtagtcgtatacgctctgaagtagattgccca

SEQ ID NO: 166270 - DNA, 55 bp, Artificial
  Synthetic oligonucleotide
gccccttgctgtcgaatccgcagggtacaaccagccccggcagtcctgcaatatt

SEQ ID NO: 166271 - DNA, 55 bp, Artificial
  Synthetic oligonucleotide
cggagaaggataggatgtgctagctattggatgctagtctaagcgtttagggagt

SEQ ID NO: 166272 - DNA, 55 bp, Artificial
  Synthetic oligonucleotide
gcagaggtctggaaggaagtattagaactcaagcgtgtaggcattcatgaagatt

SEQ ID NO: 166273 - DNA, 55 bp, Artificial
  Synthetic oligonucleotide
cgccctcggtcataagagcgttaatccctgctatagcttcctgtccaaagatagt

SEQ ID NO: 166274 - DNA, 55 bp, Artificial
  Synthetic oligonucleotide
gcagaccggagcggtggacggtaatatgaacggctatcagactctgtattccggt

SEQ ID NO: 166275 - DNA, 55 bp, Artificial
  Synthetic oligonucleotide
gcatcgcccaagcggagaagttcacacttgatttgcccatcggattgaataccgc

SEQ ID NO: 166276 - DNA, 55 bp, Artificial
  Synthetic oligonucleotide
gcagaattaatcaaggtagattcagaaactaaaagaccacttgaaggggctgagt

SEQ ID NO: 166277 - DNA, 55 bp, Artificial
  Synthetic oligonucleotide
cgcaatattagtgtacctcttttggacgtgcttgtaaaggagaacgtatgtatgg

SEQ ID NO: 166278 - DNA, 60 bp, Artificial
  Synthetic oligonucleotide
ctggtacactagcttcaacaatcattccaccacctgcatctacacgtttgtacacccaac

SEQ ID NO: 166279 - DNA, 55 bp, Artificial
  Synthetic oligonucleotide
gcagaatccctgtagaagtagatgttgcatctgagttccgttaccgtgatcctct

SEQ ID NO: 166280 - DNA, 55 bp, Artificial
  Synthetic oligonucleotide
gcactttggtaggaacttgtccgattaagggaacaggcgattggcagacttgggc

SEQ ID NO: 166281 - DNA, 55 bp, Artificial
  Synthetic oligonucleotide
cgcaggacttattagcgatggccccaccgtgtcgaagttggcggacaatctcctg

SEQ ID NO: 166282 - DNA, 55 bp, Artificial
  Synthetic oligonucleotide
cgcgaacggtaaacgtttactaatatgcgatgctatgagtaatagggatttacaa

SEQ ID NO: 166283 - DNA, 55 bp, Artificial
  Synthetic oligonucleotide
gcacgccatggaagcggtacgaatgaaccaattgagcctgtaataatctcatagc

SEQ ID NO: 166284 - DNA, 55 bp, Artificial
  Synthetic oligonucleotide
cgatttctcatcttcgtccacggacgaatacatttcaggcggtgttcagagtgcg

SEQ ID NO: 166285 - DNA, 55 bp, Artificial
  Synthetic oligonucleotide
gcacctttagcccataaaactataggatcattccctcaaggtacactaagattta

SEQ ID NO: 166286 - DNA, 55 bp, Artificial
  Synthetic oligonucleotide
gcatgtagcaacccataatctaacgttactctacgatcagcacttccaaattcat

SEQ ID NO: 166287 - DNA, 55 bp, Artificial
  Synthetic oligonucleotide
cgcgagtacagaaagctacaagcattataagtaccatctgtgcaacatcgtacaa

SEQ ID NO: 166288 - DNA, 55 bp, Artificial
  Synthetic oligonucleotide
gcaccggaactagctagcgagtttcctgcaattccccataccgactttcaccggc

SEQ ID NO: 166289 - DNA, 60 bp, Artificial
  Synthetic oligonucleotide
tagatcatactaaacagttagcgttagtacaatatcctgcaggaactatttatagacaag

SEQ ID NO: 166290 - DNA, 55 bp, Artificial
  Synthetic oligonucleotide
gcatttactgattgaggggttaagccgatatgtgcaactacaggtatagaggctc

SEQ ID NO: 166291 - DNA, 55 bp, Artificial
  Synthetic oligonucleotide
gcatcaaggtcagcaccgaaatctgctactccgtatttccccggaactatagttg

SEQ ID NO: 166292 - DNA, 55 bp, Artificial
  Synthetic oligonucleotide
cgcgccgacaataaaatacagctccgcatccggatactctgccttgaaatgctgc

SEQ ID NO: 166293 - DNA, 55 bp, Artificial
  Synthetic oligonucleotide
gcatatcaggagtaagtccctttagcttagggatatcttgtagctttcctaaatt

SEQ ID NO: 166294 - DNA, 55 bp, Artificial
  Synthetic oligonucleotide
gcatccttaacaacggtaagcttatctacgaatgcagttgcaaatctatctgcta

SEQ ID NO: 166295 - DNA, 55 bp, Artificial
  Synthetic oligonucleotide
cgcatcccaccttaaccctattatctcgctcctacgcagaccatagtaagccgct

SEQ ID NO: 166296 - DNA, 55 bp, Artificial
  Synthetic oligonucleotide
gcatacgaaattccggagtcctcaagaacagccagaggaacagctatcgtaaatc

SEQ ID NO: 166297 - DNA, 55 bp, Artificial
  Synthetic oligonucleotide
cgcatcatcaggtaactatggtttacaaggcataacttatcctgctgcttacgat

SEQ ID NO: 166298 - DNA, 55 bp, Artificial
  Synthetic oligonucleotide
cgccagagataacttttggaatgcttgaagttagaggtatgggaataatcgatgt

SEQ ID NO: 166299 - DNA, 55 bp, Artificial
  Synthetic oligonucleotide
gcatatccagttgctgttggtggatgagcgtgtacaactgctcctacatcttctc

SEQ ID NO: 166300 - DNA, 60 bp, Artificial
  Synthetic oligonucleotide
tagattctatagcaataagcttattatcatgctgctctaacacttgatattgcaatttta

SEQ ID NO: 166301 - DNA, 55 bp, Artificial
  Synthetic oligonucleotide
gcagtggccatacattttattgtggtgtggctcttatcttcgcctactcccgctc

SEQ ID NO: 166302 - DNA, 55 bp, Artificial
  Synthetic oligonucleotide
gcagtggatattaagccatagcatttaagcataagacaggagatgattactgtct

SEQ ID NO: 166303 - DNA, 55 bp, Artificial
  Synthetic oligonucleotide
gcagtagttggacctgtcccagttggaacaaatcctccaataagctttgcgagcg

SEQ ID NO: 166304 - DNA, 55 bp, Artificial
  Synthetic oligonucleotide
gcaggataatagattttgtggggccgactattacctcaggaatgatggccggtgt

SEQ ID NO: 166305 - DNA, 55 bp, Artificial
  Synthetic oligonucleotide
gcagcttatttagttgcgagaactataaacggcagaactatctacgctacaatac

SEQ ID NO: 166306 - DNA, 55 bp, Artificial
  Synthetic oligonucleotide
cgccatttctactaatcactacttattgctttgcgaaagggtcttcccggttcca

SEQ ID NO: 166307 - DNA, 55 bp, Artificial
  Synthetic oligonucleotide
gcagcgctaccttctaatagccctaggaagtaatcaaagagtccacgatgggata

SEQ ID NO: 166308 - DNA, 55 bp, Artificial
  Synthetic oligonucleotide
gcagccttctccatctagtaatgtatcacttgccataacagtttgcatgttctta

SEQ ID NO: 166309 - DNA, 55 bp, Artificial
  Synthetic oligonucleotide
cgcccagtatttcagcccatagtatcgcttagaacaggagatgtcctaggctatg

SEQ ID NO: 166310 - DNA, 55 bp, Artificial
  Synthetic oligonucleotide
gcagcaagggtaatgcgacttagtggaagtgtaaatcaaaagaatggacatgccg

SEQ ID NO: 166311 - DNA, 60 bp, Artificial
  Synthetic oligonucleotide
tagcccattcagtgcgctaccgactagtactcacattttccgacgctagccctacagcga

SEQ ID NO: 166312 - DNA, 55 bp, Artificial
  Synthetic oligonucleotide
cgcaaacaggcgagcaatctcgaatgtgcgatcggacgggatactccaccaatag

SEQ ID NO: 166313 - DNA, 55 bp, Artificial
  Synthetic oligonucleotide
gcagatacaaaggtggctaggtggacatgctcctagttgtagctcactattcgtg

SEQ ID NO: 166314 - DNA, 55 bp, Artificial
  Synthetic oligonucleotide
cgcaccaagcaaatcccatagaatgcgcaactgtagcccaattacgtataaaagt

SEQ ID NO: 166315 - DNA, 55 bp, Artificial
  Synthetic oligonucleotide
gcaaagaggcagcttcgtttggaatcgtggagcctagtaattttaactgccctgg

SEQ ID NO: 166316 - DNA, 55 bp, Artificial
  Synthetic oligonucleotide
cgctgtctatgtactcgatcctgaaatgcaggttgctgggactttctatgagccg

SEQ ID NO: 166317 - DNA, 55 bp, Artificial
  Synthetic oligonucleotide
gatttactaccacctcgtccacgtgtagaatgacctccagaaccaactttagaaa

SEQ ID NO: 166318 - DNA, 55 bp, Artificial
  Synthetic oligonucleotide
gattgagaacgcagttaatagtaccgctggtgaggttttagtgtacaaaggtgaa

SEQ ID NO: 166319 - DNA, 55 bp, Artificial
  Synthetic oligonucleotide
cgcttaacgcctcccttatacttgcacgacttactccaagttgacttacaagctc

SEQ ID NO: 166320 - DNA, 54 bp, Artificial
  Synthetic oligonucleotide
gccacttctttaggacctccacataagccggatccttaaattctccggacgacg

SEQ ID NO: 166321 - DNA, 55 bp, Artificial
  Synthetic oligonucleotide
cgcttacgagggttataagagcagaagttatgcagattatggagtctgactatac

SEQ ID NO: 166322 - DNA, 59 bp, Artificial
  Synthetic oligonucleotide
ccgcccgttctgcaagtgtccgctttacatcggccagtttatgctccacactctccagt

SEQ ID NO: 166323 - DNA, 55 bp, Artificial
  Synthetic oligonucleotide
cgcttattcttctgtgcgggactagggtattgaatagtcacaccgtgcgacagcc

SEQ ID NO: 166324 - DNA, 55 bp, Artificial
  Synthetic oligonucleotide
gatggcttaggtgattatgacagatctaaaggatatacgcaaggcgcagttacac

SEQ ID NO: 166325 - DNA, 55 bp, Artificial
  Synthetic oligonucleotide
gatgctaaagaatgcaggtattgagagcagaataggggttggcactaataaggga

SEQ ID NO: 166326 - DNA, 55 bp, Artificial
  Synthetic oligonucleotide
gccagtgtaactttagtagagggcttagaggtaacagttgatgcaagtaggggag

SEQ ID NO: 166327 - DNA, 55 bp, Artificial
  Synthetic oligonucleotide
gatgcagcaacttcaagattaacatcatcaaagggaagttgatccttccaaaggt

SEQ ID NO: 166328 - DNA, 55 bp, Artificial
  Synthetic oligonucleotide
gatgagggaactgtattgacaccatctcacttagcacaaattgcctctcttggta

SEQ ID NO: 166329 - DNA, 54 bp, Artificial
  Synthetic oligonucleotide
gccatgaaatggataagtagtaaccctggtattttaaataaactaggtcggagc

SEQ ID NO: 166330 - DNA, 55 bp, Artificial
  Synthetic oligonucleotide
gatctcaggaggattagatagtattctagcagctaaactaatgaaggatcaagga

SEQ ID NO: 166331 - DNA, 55 bp, Artificial
  Synthetic oligonucleotide
gatctatgaaatttagatccgtgagacattggacctctatgtccattccacctct

SEQ ID NO: 166332 - DNA, 55 bp, Artificial
  Synthetic oligonucleotide
gatccaggatcagatttgccgacattacttcaattcccgttgcagtggtggcagg

SEQ ID NO: 166333 - DNA, 60 bp, Artificial
  Synthetic oligonucleotide
taggaaactgcacatggtatgcatggggacgcatatgggaacttacgggacaagcaccgg

SEQ ID NO: 166334 - DNA, 55 bp, Artificial
  Synthetic oligonucleotide
gcatcagggatacttatgagaataggtgagggacatgctctcccttggatagtat

SEQ ID NO: 166335 - DNA, 55 bp, Artificial
  Synthetic oligonucleotide
gatatgcacaccatataggaccataatcgtgaagatctgaccctgtaattctaag

SEQ ID NO: 166336 - DNA, 55 bp, Artificial
  Synthetic oligonucleotide
cgcgggcggaattgaagatttcaggaccaaccagctgccctatgttatggacatc

SEQ ID NO: 166337 - DNA, 55 bp, Artificial
  Synthetic oligonucleotide
cgctaaagtagaaatcgaagcaatacggggaatgggctatcgtttatttcaggtg

SEQ ID NO: 166338 - DNA, 54 bp, Artificial
  Synthetic oligonucleotide
gccaacgctctaataccacgtcctgtagtaacagaactaagtaaccgtcctgtt

SEQ ID NO: 166339 - DNA, 55 bp, Artificial
  Synthetic oligonucleotide
gcacagggtattaccaagcttggcttagggactacggaattagctgtacgctatt

SEQ ID NO: 166340 - DNA, 55 bp, Artificial
  Synthetic oligonucleotide
gcacaggagggttaggattacctggagattatactcctgtttctcgttttgttag

SEQ ID NO: 166341 - DNA, 55 bp, Artificial
  Synthetic oligonucleotide
gcacaacttggaggacatgcaaactatttagatacaagtacaatgcaagtatccc

SEQ ID NO: 166342 - DNA, 55 bp, Artificial
  Synthetic oligonucleotide
gccaagcccggtatcacttccgtcttctcccaaaatcctgacaaatggtcgttcg

SEQ ID NO: 166343 - DNA, 55 bp, Artificial
  Synthetic oligonucleotide
cgctatgttcatggtgataacttgacaataagccgtgaaagggaataccgtgctc

SEQ ID NO: 166344 - DNA, 55 bp, Artificial
  Synthetic oligonucleotide
gtgagggagaaaataaagctataacaagacaacaagcccttaatatattaaaaga

SEQ ID NO: 166345 - DNA, 55 bp, Artificial
  Synthetic oligonucleotide
aattatataagggggatgtagttttaatagtatcaaagaatggagactggtataa

SEQ ID NO: 166346 - DNA, 55 bp, Artificial
  Synthetic oligonucleotide
cgctccatatcctctgtatgcccctgacgacatcttattcgtatagacaacatca

SEQ ID NO: 166347 - DNA, 55 bp, Artificial
  Synthetic oligonucleotide
gcatcaatagttctacctccagctacgccatcaactgctatgttataattgtgat

SEQ ID NO: 166348 - DNA, 55 bp, Artificial
  Synthetic oligonucleotide
gccaatattcgggcctattatgagaagcagaaaccctatagtcgtttccagaaag

SEQ ID NO: 166349 - DNA, 55 bp, Artificial
  Synthetic oligonucleotide
cgattccgtaaatatctgccacttctggatgtacttctcccaagtatcctactac

SEQ ID NO: 166350 - DNA, 55 bp, Artificial
  Synthetic oligonucleotide
cgctccgttggaactaatttggcacaataaccactgctttagtcgtattgggtct

SEQ ID NO: 166351 - DNA, 55 bp, Artificial
  Synthetic oligonucleotide
cgctggttgcattgaatcatcatgagagatgcgacggtaaaggttatccaatggc

SEQ ID NO: 166352 - DNA, 55 bp, Artificial
  Synthetic oligonucleotide
gcaagtcgcaattacaaccaggcgattgtgtgttctttggctcaccggtacacca

SEQ ID NO: 166353 - DNA, 55 bp, Artificial
  Synthetic oligonucleotide
gcaagcacagccgaaccaatcggcacgtcgagttaaaatgtgtgatttccctgga

SEQ ID NO: 166354 - DNA, 55 bp, Artificial
  Synthetic oligonucleotide
gcaagactaatagaaggttgcgcaatatgtaacttctctccggctgcagttgcac

SEQ ID NO: 166355 - DNA, 55 bp, Artificial
  Synthetic oligonucleotide
gcaacgggacagcggatccggagcccttctggcatgtatttgtgggaattgccgc

SEQ ID NO: 166356 - DNA, 56 bp, Artificial
  Synthetic oligonucleotide
taggataattattttgtgcagtatctaaatttacactcataccataacccggaccc

SEQ ID NO: 166357 - DNA, 55 bp, Artificial
  Synthetic oligonucleotide
gcaaccagcgaatctacaatagatgccatatcgcttctcgcaatcagattgcagg

SEQ ID NO: 166358 - DNA, 55 bp, Artificial
  Synthetic oligonucleotide
gcaacagcttttgaagtagcaactacataacggccatagtcaccagcatcatgcc

SEQ ID NO: 166359 - DNA, 55 bp, Artificial
  Synthetic oligonucleotide
ctgctgcgtcaggagaacttcccctaagtgattttatgaaagcgcttatagtatc

SEQ ID NO: 166360 - DNA, 55 bp, Artificial
  Synthetic oligonucleotide
ctgctgatttagttatgagcggaattgtaagtatgataccttttgacgaagcagt

SEQ ID NO: 166361 - DNA, 55 bp, Artificial
  Synthetic oligonucleotide
ctgctcactccggtaaatatttacgttatcacaacggctttaccatgctcctatt

SEQ ID NO: 166362 - DNA, 55 bp, Artificial
  Synthetic oligonucleotide
ctgctagaattgtaccagctattcctagtaaaacagagacagtagatccgaatcg

SEQ ID NO: 166363 - DNA, 55 bp, Artificial
  Synthetic oligonucleotide
ctgcccagtttcaatggcactaatagtttgtcgggatacgccaataagttctgct

SEQ ID NO: 166364 - DNA, 55 bp, Artificial
  Synthetic oligonucleotide
ctgcccaatttgtgttggtatcgcaggattacctcctataaatgcatttcctaca

SEQ ID NO: 166365 - DNA, 55 bp, Artificial
  Synthetic oligonucleotide
cgtcagcaaaattatgtgcagcctgaggagacatataataatcttgagcatgaat

SEQ ID NO: 166366 - DNA, 55 bp, Artificial
  Synthetic oligonucleotide
ctgattgtgctggctgaatacttcctaatcctggacctcctctaacgatgtttat

SEQ ID NO: 166367 - DNA, 57 bp, Artificial
  Synthetic oligonucleotide
ctagttatatcagtatcgcaccatccgttaatcaagaataaagaaacttctttcgga

SEQ ID NO: 166368 - DNA, 55 bp, Artificial
  Synthetic oligonucleotide
ctgattcccacaaggaagaagcggacgggtgatttaatcgagaaaagacacggca

SEQ ID NO: 166369 - DNA, 55 bp, Artificial
  Synthetic oligonucleotide
ctgatgcccgaacgtgaagtcgcaaatacgccacagtgagtctgtttccaagccc

SEQ ID NO: 166370 - DNA, 55 bp, Artificial
  Synthetic oligonucleotide
cgtcagcagctcgccaaatcatctgtaaagaaataccaagccatgcagaatgctg

SEQ ID NO: 166371 - DNA, 55 bp, Artificial
  Synthetic oligonucleotide
ctgacatacgccttacatcttgaactgcttctctgtcttgtgggtctgacatggc

SEQ ID NO: 166372 - DNA, 55 bp, Artificial
  Synthetic oligonucleotide
ctgaagctttagttgcttcgtcaagagctgtatacgtaacatcatcacagtctgc

SEQ ID NO: 166373 - DNA, 55 bp, Artificial
  Synthetic oligonucleotide
ctgaaccaaaacaatcatatgcagtacaccctttaaaacctcgcttcataagact

SEQ ID NO: 166374 - DNA, 55 bp, Artificial
  Synthetic oligonucleotide
ctgaaactcttacgacgtcaaacatattcgcatctctcatgccctccgctacaac

SEQ ID NO: 166375 - DNA, 55 bp, Artificial
  Synthetic oligonucleotide
cgtcccctccgtcaggctgcttacatagaccatattcctggtcagatacggaacc

SEQ ID NO: 166376 - DNA, 55 bp, Artificial
  Synthetic oligonucleotide
ctcttgatggatccttaagccaaggatcgctccaatataaaacccaaggaatctc

SEQ ID NO: 166377 - DNA, 55 bp, Artificial
  Synthetic oligonucleotide
ctctggtgctgcatggggcatagctattccaggagctataacaatataagggccc

SEQ ID NO: 166378 - DNA, 60 bp, Artificial
  Synthetic oligonucleotide
taggcgaaatactcaatcctcagcgtaagtgcaaaagtgctatcgaataggaatctccgc

SEQ ID NO: 166379 - DNA, 55 bp, Artificial
  Synthetic oligonucleotide
ctctggtgccataggatgttgtaaccagcatgaaacctcctgtgtatcactaatc

SEQ ID NO: 166380 - DNA, 55 bp, Artificial
  Synthetic oligonucleotide
ctctggccatataggcattgccgcagggcacaaacggaacacggtctgttgactc

SEQ ID NO: 166381 - DNA, 55 bp, Artificial
  Synthetic oligonucleotide
ctctatttcttctttgtggtacaccatagtttgctgcatccataacttgtggttc

SEQ ID NO: 166382 - DNA, 55 bp, Artificial
  Synthetic oligonucleotide
cgtctccccgccaaattcgtaaccgcccactgcctgtgccccgcaccctatttca

SEQ ID NO: 166383 - DNA, 55 bp, Artificial
  Synthetic oligonucleotide
ctctagagcttctagttaaaactagacgtttacctacgttataggtctgagagga

SEQ ID NO: 166384 - DNA, 55 bp, Artificial
  Synthetic oligonucleotide
ctctacgtacgattaccgaccgtacgaaagggtatcgattcgccacttcacactg

SEQ ID NO: 166385 - DNA, 55 bp, Artificial
  Synthetic oligonucleotide
cgtctgcaaatcaacaattagggcttctaagtgttcttctgtataacttgtgcca

SEQ ID NO: 166386 - DNA, 55 bp, Artificial
  Synthetic oligonucleotide
cttatgatggctcactctccgaagagaaaagtcgcattttgcagtacttccccgg

SEQ ID NO: 166387 - DNA, 55 bp, Artificial
  Synthetic oligonucleotide
cttagcagcattaagaccaacttcggcaaccttattaatgtcagcattagttctg

SEQ ID NO: 166388 - DNA, 55 bp, Artificial
  Synthetic oligonucleotide
cttagcaaatacgcttgctcctactctagctccacttctaaattgaactcctact

SEQ ID NO: 166389 - DNA, 55 bp, Artificial
  Synthetic oligonucleotide
tagggcaaaagtatactaaaggtcttactgaaagtgaggcaaaaaggtatataca

SEQ ID NO: 166390 - DNA, 55 bp, Artificial
  Synthetic oligonucleotide
cttacgattggaacgtccttctacaagcttgaatccactccaccgtttaccctca

SEQ ID NO: 166391 - DNA, 55 bp, Artificial
  Synthetic oligonucleotide
cggttccagtagcatatcgtaaatcagtgctaataacctcgtaaagttttactag

SEQ ID NO: 166392 - DNA, 55 bp, Artificial
  Synthetic oligonucleotide
cttaccttattatggttggattatagccgaacctacagtgtcaagcctcagaact

SEQ ID NO: 166393 - DNA, 55 bp, Artificial
  Synthetic oligonucleotide
cggtttgggaagacgcacggtcccttgaaatgtactttcaaaatactgctggagc

SEQ ID NO: 166394 - DNA, 55 bp, Artificial
  Synthetic oligonucleotide
cttaatccatgcaaagcgccgtttgtattccttgctatacgcctttaaagccgga

SEQ ID NO: 166395 - DNA, 55 bp, Artificial
  Synthetic oligonucleotide
cttaaatagaatccacatcgaagaggacgcaggaaagcttgtgcacgatgatgtt

SEQ ID NO: 166396 - DNA, 55 bp, Artificial
  Synthetic oligonucleotide
ctgttgtcggtgcaaccgtaagcaaagcggaagatgtaaattcagctataatgcc

SEQ ID NO: 166397 - DNA, 55 bp, Artificial
  Synthetic oligonucleotide
ctgtgtcctacggaatttaactgatcagcgcaggcaagtcccgacggaccggatc

SEQ ID NO: 166398 - DNA, 55 bp, Artificial
  Synthetic oligonucleotide
ctgtctttctctattagctaataccggaggagttatataccttacctctgttacg

SEQ ID NO: 166399 - DNA, 55 bp, Artificial
  Synthetic oligonucleotide
ctgtatattacctatgttactctgcgaccccaagcaagcatctatagccaagaag

SEQ ID NO: 166400 - DNA, 60 bp, Artificial
  Synthetic oligonucleotide
taggtgtacaggaatgagcgtgatgccgacgtaacgggcaggtgtgggagttctaggagc

SEQ ID NO: 166401 - DNA, 55 bp, Artificial
  Synthetic oligonucleotide
ctgtaggattaagagcagttacatcatcagacggaatgacttcaaactgggctca

SEQ ID NO: 166402 - DNA, 53 bp, Artificial
  Synthetic oligonucleotide
ctgtagcgttagttcttccccatctagaaacctctttcgttgaagtatttacc

SEQ ID NO: 166403 - DNA, 55 bp, Artificial
  Synthetic oligonucleotide
ctgtaacaggatgtactctaggtccaaatggatctgtaactccacctggagccgg

SEQ ID NO: 166404 - DNA, 55 bp, Artificial
  Synthetic oligonucleotide
ctggttgctctatctgcataataccacatcctgcactggcacaccttgaagcacc

SEQ ID NO: 166405 - DNA, 55 bp, Artificial
  Synthetic oligonucleotide
ctggttcgttctcaatcctaagcccatactgtaaaattgggtgaggaggtgaact

SEQ ID NO: 166406 - DNA, 55 bp, Artificial
  Synthetic oligonucleotide
ctggttaccttgacgggagttttaagcggtcttgcggttatagttgcaatggcca

SEQ ID NO: 166407 - DNA, 55 bp, Artificial
  Synthetic oligonucleotide
ctggtccagaatggttaacagcattcggcggattcacatttgcagatgcaggtct

SEQ ID NO: 166408 - DNA, 55 bp, Artificial
  Synthetic oligonucleotide
cgtatacaagttgaaggaggtcttgtacaaggtataggtatggctatgtttgagg

SEQ ID NO: 166409 - DNA, 55 bp, Artificial
  Synthetic oligonucleotide
ctggattattctatggatgtcagagttttagacaacttgtaagagagtttggagc

SEQ ID NO: 166410 - DNA, 55 bp, Artificial
  Synthetic oligonucleotide
cgtatggaatgttcggtgaaaagaacaggtagtaacagccgaatctatcgaatgg

SEQ ID NO: 166411 - DNA, 58 bp, Artificial
  Synthetic oligonucleotide
tagtaacacttatgggagcttgtgctttactggaacatggaggttcaagtagtaataa

SEQ ID NO: 166412 - DNA, 55 bp, Artificial
  Synthetic oligonucleotide
cgtcacgagtggtattcctactgaaccaaatgctgttggtgtactgttagcaacc

SEQ ID NO: 166413 - DNA, 55 bp, Artificial
  Synthetic oligonucleotide
ctggaccaagctctacaaataatctaacaccacgttcaaacattgatgtagcagc

SEQ ID NO: 166414 - DNA, 55 bp, Artificial
  Synthetic oligonucleotide
ctggaattgcatgagtaactaataattgtctttctaaacccttgctatccgtcca

SEQ ID NO: 166415 - DNA, 55 bp, Artificial
  Synthetic oligonucleotide
ctggaacccaagttacaaatccagttgcaccgttaaatggttgatctactattga

SEQ ID NO: 166416 - DNA, 55 bp, Artificial
  Synthetic oligonucleotide
cgtgtaagcagagcatgaaatactgcatcaaaacccgttgcccaaatctgtgacc

SEQ ID NO: 166417 - DNA, 53 bp, Artificial
  Synthetic oligonucleotide
ctattcctttgtcattactctttaagtcccaagtttgtcctttcattaggccg

SEQ ID NO: 166418 - DNA, 54 bp, Artificial
  Synthetic oligonucleotide
ctattaggtcttctagaagaaacagcgggactggaagttaatcttcctccaagg

SEQ ID NO: 166419 - DNA, 55 bp, Artificial
  Synthetic oligonucleotide
cgttaccacataacggagcagtaattacgctgctggcaatcacgcaaatgagaca

SEQ ID NO: 166420 - DNA, 55 bp, Artificial
  Synthetic oligonucleotide
cgttccttcacagacacatatttccaagtagcacaggaaccgataacgattcccg

SEQ ID NO: 166421 - DNA, 55 bp, Artificial
  Synthetic oligonucleotide
ctatgctgagtattgcacaatgtaccaaccggaactttactgtaagctgagcatg

SEQ ID NO: 166422 - DNA, 58 bp, Artificial
  Synthetic oligonucleotide
ccggaagtttatcctacacgtgttagaggcagtggagccggttgggcagctgcaattg

SEQ ID NO: 166423 - DNA, 55 bp, Artificial
  Synthetic oligonucleotide
cgttgtcaaattcacattgctctccgagacaccctcaagctttcttgtgacacgc

SEQ ID NO: 166424 - DNA, 55 bp, Artificial
  Synthetic oligonucleotide
ctatgaaggcggtccgagtggtcttgctccagctaacatgttatcacaaagtcta

SEQ ID NO: 166425 - DNA, 55 bp, Artificial
  Synthetic oligonucleotide
cgttgtgatgtggagtgcattcctcatatgatcaggcagcttaagtactataaac

SEQ ID NO: 166426 - DNA, 55 bp, Artificial
  Synthetic oligonucleotide
ctatcacagaagtgttcaaaagcacctcatagccttccatgtcagagtagctgac

SEQ ID NO: 166427 - DNA, 54 bp, Artificial
  Synthetic oligonucleotide
ctatatcagagccccaaattttagcgtttgttttagcctctttacatttacctc

SEQ ID NO: 166428 - DNA, 55 bp, Artificial
  Synthetic oligonucleotide
ctatagcagccttatattctataccagttccaactattggtgcactcgccttaag

SEQ ID NO: 166429 - DNA, 55 bp, Artificial
  Synthetic oligonucleotide
cgtttcaccaagttacctcgggagagcacaaggaaatgggcgggaagcatcactt

SEQ ID NO: 166430 - DNA, 55 bp, Artificial
  Synthetic oligonucleotide
cgtttccatacggcccggtcgcatctccggcgtcacactgactcccgcgtatttc

SEQ ID NO: 166431 - DNA, 55 bp, Artificial
  Synthetic oligonucleotide
ctaaaatcaacccattgacaagtgtcattgctgaattttgccaaaatgggtcttt

SEQ ID NO: 166432 - DNA, 55 bp, Artificial
  Synthetic oligonucleotide
ctaaagtggctgccataataacagggataccaaacccagttctaggtggcgtagg

SEQ ID NO: 166433 - DNA, 60 bp, Artificial
  Synthetic oligonucleotide
tagtgtcacttagtgtcacactttgacatcgtaatagcactacaatgtatactctttaca

SEQ ID NO: 166434 - DNA, 55 bp, Artificial
  Synthetic oligonucleotide
ctaaatgaaggatgcggacttcctgagcgtgaaagcatggtggaaagcttatacg

SEQ ID NO: 166435 - DNA, 55 bp, Artificial
  Synthetic oligonucleotide
ctagtatgcttcaggtgccgaatatcattagaaatcccttcgtatggataccacc

SEQ ID NO: 166436 - DNA, 55 bp, Artificial
  Synthetic oligonucleotide
ctaggagcggctgtaagcagcataatgagtcttatagactcagctttggtacccc

SEQ ID NO: 166437 - DNA, 55 bp, Artificial
  Synthetic oligonucleotide
ctaagtgtctcataaggaacatagtcgaaattttcgtttggcataggggtcactc

SEQ ID NO: 166438 - DNA, 55 bp, Artificial
  Synthetic oligonucleotide
ctagatacttacttgttgcagctcccttttcgtcagttgttaatctatcaacttc

SEQ ID NO: 166439 - DNA, 55 bp, Artificial
  Synthetic oligonucleotide
ctactgtttgcgcaacgtattggagggcaaatgaagcgaacactgaggttatttc

SEQ ID NO: 166440 - DNA, 55 bp, Artificial
  Synthetic oligonucleotide
ctactagtccacctaatgcacttcctacaccatcagataatactccagcggccac

SEQ ID NO: 166441 - DNA, 51 bp, Artificial
  Synthetic oligonucleotide
ctacaagttcgttattaggaggaaaggtggggtttgctaaaacagaaggaa

SEQ ID NO: 166442 - DNA, 55 bp, Artificial
  Synthetic oligonucleotide
ctactacccaatcccttgtacgagcacctattctattatggtctgcatgatagct

SEQ ID NO: 166443 - DNA, 55 bp, Artificial
  Synthetic oligonucleotide
ctacgactactgtcgccagtagcctctagcgacctacctacgggacaaagacggg

SEQ ID NO: 166444 - DNA, 60 bp, Artificial
  Synthetic oligonucleotide
tataagctttcaacatgacttatagttattgtttttctagcataatggtcttgtgaaaca

SEQ ID NO: 166445 - DNA, 52 bp, Artificial
  Synthetic oligonucleotide
ctaccaaccttctttacactttgtccgaatttaggagaaatcacacctttag

SEQ ID NO: 166446 - DNA, 55 bp, Artificial
  Synthetic oligonucleotide
ctacagtgcttatatcttccatagctactggcgctggattagctttgggtatagc

SEQ ID NO: 166447 - DNA, 55 bp, Artificial
  Synthetic oligonucleotide
ctcgttaatacgacaatgttaaccaatggaccatgtgatatacctgtatgcaatc

SEQ ID NO: 166448 - DNA, 55 bp, Artificial
  Synthetic oligonucleotide
ctcgtggtcatgttcaattcatgagtgcagggtcaggggtatatcatagtgagca

SEQ ID NO: 166449 - DNA, 55 bp, Artificial
  Synthetic oligonucleotide
ctcgtcaagtaggggtgagtgagccaacaattatacgttttgtgaaaagtatagg

SEQ ID NO: 166450 - DNA, 55 bp, Artificial
  Synthetic oligonucleotide
ctcggtggtctatcactacttatagcaattcaatcaattggtggattcggcgaac

SEQ ID NO: 166451 - DNA, 55 bp, Artificial
  Synthetic oligonucleotide
ctcgggtaggcaatttcccagaccgtcacagtagctgtctgatataagttttgcc

SEQ ID NO: 166452 - DNA, 55 bp, Artificial
  Synthetic oligonucleotide
ctcggctgaaagacagttcaggtttcctcttgaattgggaagtcagagaactccc

SEQ ID NO: 166453 - DNA, 55 bp, Artificial
  Synthetic oligonucleotide
cgtctgcactaattttggagagcgtagaccctactactcctttgatggctcgtcc

SEQ ID NO: 166454 - DNA, 55 bp, Artificial
  Synthetic oligonucleotide
ctcgccgcgctgcgcaaggagtatagaagcttaaacgacaggaaaaccaaattgt

SEQ ID NO: 166455 - DNA, 50 bp, Artificial
  Synthetic oligonucleotide
cccccctttaacttcgcaacaagttgcttgcttttccccaaggggaaaca

SEQ ID NO: 166456 - DNA, 59 bp, Artificial
  Synthetic oligonucleotide
tataataatcttgagcatgaattatttcaattcccgtatccatataatctaacggttta

SEQ ID NO: 166457 - DNA, 55 bp, Artificial
  Synthetic oligonucleotide
ctcgagaagtttcggttatacattggggtattaacgcagtaagggcatgaatacg

SEQ ID NO: 166458 - DNA, 55 bp, Artificial
  Synthetic oligonucleotide
ctccttggctgcaaacagtatctttcccggctgaaagacctggatactccacaga

SEQ ID NO: 166459 - DNA, 55 bp, Artificial
  Synthetic oligonucleotide
ctcctgttctagcataaactctacctgaaagggacgcctctactctatcactctc

SEQ ID NO: 166460 - DNA, 55 bp, Artificial
  Synthetic oligonucleotide
ctcctgcaacttggcataagaagtcctcgcaaataaaagaaacatgttccttcgc

SEQ ID NO: 166461 - DNA, 54 bp, Artificial
  Synthetic oligonucleotide
ctcctgaaagaccgccgctgtgttttcaacgcataagcctaaaaggccgccccg

SEQ ID NO: 166462 - DNA, 55 bp, Artificial
  Synthetic oligonucleotide
cgtctgcgaacgagaaacgtgtttgtgggagagaagcatgaacagctcatcggag

SEQ ID NO: 166463 - DNA, 55 bp, Artificial
  Synthetic oligonucleotide
ctccgtaagcataccctgcggtatctataacaatccttccagactcggcgttcag

SEQ ID NO: 166464 - DNA, 55 bp, Artificial
  Synthetic oligonucleotide
ctcccttgctgaggtagtgctattttatcctgagcagtgaagtctgctaaagtat

SEQ ID NO: 166465 - DNA, 55 bp, Artificial
  Synthetic oligonucleotide
ctccactcactcatgttgtacgcaaccataaatagtatcgctgctatacaaggca

SEQ ID NO: 166466 - DNA, 54 bp, Artificial
  Synthetic oligonucleotide
cgtctggtaaacgcttccggcattaaaccctcctccgcttggaaccatgaacga

SEQ ID NO: 166467 - DNA, 59 bp, Artificial
  Synthetic oligonucleotide
tataatagccaccagtcagaagaattcgtactattgctttttgtaccttgaactggaga

SEQ ID NO: 166468 - DNA, 55 bp, Artificial
  Synthetic oligonucleotide
ctccaccttgctataatagttattattccaccattaacatgctcctgagttggca

SEQ ID NO: 166469 - DNA, 55 bp, Artificial
  Synthetic oligonucleotide
cgtcttcaggtctgccttggtagcagtcagtttgttaagatcgtcagttgtaacc

SEQ ID NO: 166470 - DNA, 55 bp, Artificial
  Synthetic oligonucleotide
ctcatgactcagtgcggactatttataccagcagatgagagtagccagataccag

SEQ ID NO: 166471 - DNA, 55 bp, Artificial
  Synthetic oligonucleotide
cgtgccttaagggatgtagatttcactaatcatggtaatcctaaggatcatccca

SEQ ID NO: 166472 - DNA, 55 bp, Artificial
  Synthetic oligonucleotide
ctcatcagccaggattaagtgttagggtgagtcaaggagcaccagataatttcgt

SEQ ID NO: 166473 - DNA, 55 bp, Artificial
  Synthetic oligonucleotide
ctcaggacctagaagtaattgtcttgtattaggctgaagtgacaaatccaatctt

SEQ ID NO: 166474 - DNA, 55 bp, Artificial
  Synthetic oligonucleotide
ctcaccattttctcgaatgatgtaaattgctcggtttcccataggcacctcactt

SEQ ID NO: 166475 - DNA, 55 bp, Artificial
  Synthetic oligonucleotide
ctcaagtggaaatggtaacccttgacgatgctcttgaattttcactgctctatca

SEQ ID NO: 166476 - DNA, 55 bp, Artificial
  Synthetic oligonucleotide
cgtggatgtggattcggatcctgtagtcatggatgttttactagttgtggtattg

SEQ ID NO: 166477 - DNA, 54 bp, Artificial
  Synthetic oligonucleotide
ctattggtatccaacgaggtcggaacgcccttgttagcttggttaatcttacac

SEQ ID NO: 166478 - DNA, 60 bp, Artificial
  Synthetic oligonucleotide
aatgatgccggtactgcaaacagagctggtacagatctccgggggacgcaatctcggacg

SEQ ID NO: 166479 - DNA, 55 bp, Artificial
  Synthetic oligonucleotide
gacccttaaggtgacgcttgccggactcagggagagcatacacaagggacgtacc

SEQ ID NO: 166480 - DNA, 55 bp, Artificial
  Synthetic oligonucleotide
gacccataggcattgcccaagttatacgtctaacgttgctttgagagaatccagc

SEQ ID NO: 166481 - DNA, 55 bp, Artificial
  Synthetic oligonucleotide
gacccatacaatttgaccgcccgtcagagattgcttgtatattctttcgtcaagg

SEQ ID NO: 166482 - DNA, 55 bp, Artificial
  Synthetic oligonucleotide
gacccaagtagaataatatctggtacatttggagaatgttggatagatggtaggc

SEQ ID NO: 166483 - DNA, 55 bp, Artificial
  Synthetic oligonucleotide
gaccatggcctgttactcaaggattggttacccttgagatgcatagaaatttatc

SEQ ID NO: 166484 - DNA, 55 bp, Artificial
  Synthetic oligonucleotide
cggctttgcaccgtcagttaagtaaccgtcgggagcttcactctcaacaatacgg

SEQ ID NO: 166485 - DNA, 55 bp, Artificial
  Synthetic oligonucleotide
gacagtcctccaattacaagtccactgcacagctcgatacgatttgcgccaccct

SEQ ID NO: 166486 - DNA, 55 bp, Artificial
  Synthetic oligonucleotide
gacacgtgttggtagtaaataggttaagtgagggagtagcgatatgtttcagagt

SEQ ID NO: 166487 - DNA, 55 bp, Artificial
  Synthetic oligonucleotide
gacaaagtgcagtagtattaggggcaggatgtattggtcttgttacactactagc

SEQ ID NO: 166488 - DNA, 55 bp, Artificial
  Synthetic oligonucleotide
gaatggtatcttcaatcaacccacaagtgcctccaatgaaaccataatcaagtcc

SEQ ID NO: 166489 - DNA, 56 bp, Artificial
  Synthetic oligonucleotide
ctaggaaccaatggttctttagcaaaattaaattcataggattaatcgcactagtg

SEQ ID NO: 166490 - DNA, 55 bp, Artificial
  Synthetic oligonucleotide
cgggatataaaattccgtcgagggtcgaagataacacaaccctgtttgatatgat

SEQ ID NO: 166491 - DNA, 53 bp, Artificial
  Synthetic oligonucleotide
cgggcacaacggatacatggacctcgaaaacggtcttaagggagaacctccga

SEQ ID NO: 166492 - DNA, 55 bp, Artificial
  Synthetic oligonucleotide
cgggcagatgaccagtcctcttttgaggcgtgtgaggaacagatgaagcagtata

SEQ ID NO: 166493 - DNA, 55 bp, Artificial
  Synthetic oligonucleotide
cgggcatttctttcttaggttgagatgttacagaagtcactacaaaagtttctcc

SEQ ID NO: 166494 - DNA, 55 bp, Artificial
  Synthetic oligonucleotide
gaatagtcccatatcaacgatgaatagtctgaaattactgcatctgcgcaacata

SEQ ID NO: 166495 - DNA, 55 bp, Artificial
  Synthetic oligonucleotide
gaatacagctataactatacctataagcgcatcccctgccacaagtcctgatgcc

SEQ ID NO: 166496 - DNA, 55 bp, Artificial
  Synthetic oligonucleotide
gaagtagaatgcgtatctgtgctactcataacaagacctagagccttattgcttt

SEQ ID NO: 166497 - DNA, 55 bp, Artificial
  Synthetic oligonucleotide
cgggcgtacacgctgtcgtctactatatttcgagacagtgctcaaagatgcattc

SEQ ID NO: 166498 - DNA, 55 bp, Artificial
  Synthetic oligonucleotide
gaagtagaaagagccacaaaatctgccacaaaggcttataagcagtggttaaagg

SEQ ID NO: 166499 - DNA, 55 bp, Artificial
  Synthetic oligonucleotide
gaaggtgaaatgtacattgtagatgatgaagctatattaggaagtgcactagctg

SEQ ID NO: 166500 - DNA, 58 bp, Artificial
  Synthetic oligonucleotide
aatcgtgttgaggagtatatcacgtaaaaacaagcgaccgactaatcaatcggtgctg

SEQ ID NO: 166501 - DNA, 55 bp, Artificial
  Synthetic oligonucleotide
gaaggtatgtgcagaatggaagatggtagcttaaaggctacaggccttagagagt

SEQ ID NO: 166502 - DNA, 55 bp, Artificial
  Synthetic oligonucleotide
gaaggcttgctagaaaagctatgagattccacttctgcgaattcctctattccag

SEQ ID NO: 166503 - DNA, 55 bp, Artificial
  Synthetic oligonucleotide
gaaggattccattaccgatgcatactaaaacaaccgccttcgaaggatgtaatgc

SEQ ID NO: 166504 - DNA, 55 bp, Artificial
  Synthetic oligonucleotide
gaagcttgtatcgctgactgagaacgggctggaggcttataaaacgatctgtgag

SEQ ID NO: 166505 - DNA, 54 bp, Artificial
  Synthetic oligonucleotide
cggggactcccttgcccgggagatggaggcattttacgaccagggtatgttcgc

SEQ ID NO: 166506 - DNA, 54 bp, Artificial
  Synthetic oligonucleotide
cggggatgcttttcgtatggatttcggtcctgtgggtttaccggcagtcttaca

SEQ ID NO: 166507 - DNA, 55 bp, Artificial
  Synthetic oligonucleotide
gaagcagataagacggaacgtatgcaggtgctaggtaatattctaggtttaagtg

SEQ ID NO: 166508 - DNA, 55 bp, Artificial
  Synthetic oligonucleotide
gagagcagccaacgccggaggaagtcactacctacatatctggatgatcattcgg

SEQ ID NO: 166509 - DNA, 55 bp, Artificial
  Synthetic oligonucleotide
gagaattttcatcagtagaaaccttacgattgttcttttgtggaggaacaccctc

SEQ ID NO: 166510 - DNA, 52 bp, Artificial
  Synthetic oligonucleotide
gagaacttaacctaaccagagtatcgtcgcctttattcgttttaccagaaac

SEQ ID NO: 166511 - DNA, 55 bp, Artificial
  Synthetic oligonucleotide
tatatatcggtgtattacccttatgagtttctaatatagtctttaaaagcttatt

SEQ ID NO: 166512 - DNA, 55 bp, Artificial
  Synthetic oligonucleotide
cggattgctgctatagtgtttggtccatgtatacccataacccatagtgcttgag

SEQ ID NO: 166513 - DNA, 52 bp, Artificial
  Synthetic oligonucleotide
gactttaaggaatggctcaaccatgggtattacaaagaccgttttataacgg

SEQ ID NO: 166514 - DNA, 55 bp, Artificial
  Synthetic oligonucleotide
gacttgttttacaccgctttgcagcttcctcctgtgtccaattgttaattactct

SEQ ID NO: 166515 - DNA, 55 bp, Artificial
  Synthetic oligonucleotide
gacttgaaacagtaatttcttctgttcatcacttatccctataccggtatccgtt

SEQ ID NO: 166516 - DNA, 55 bp, Artificial
  Synthetic oligonucleotide
cggcaaatttacttgtagcatattgcattttagctaccgaattagctggtaagct

SEQ ID NO: 166517 - DNA, 53 bp, Artificial
  Synthetic oligonucleotide
gacttattataatgaatagtttagaaggcgaggttcaaaagggagggttaaca

SEQ ID NO: 166518 - DNA, 55 bp, Artificial
  Synthetic oligonucleotide
gacttatagagctctcccgcttcacaggctgttccgattagcaatccttctctgt

SEQ ID NO: 166519 - DNA, 54 bp, Artificial
  Synthetic oligonucleotide
cggcaataccgaggggtatgtagggaaatctaacagccccgtatcgacttatag

SEQ ID NO: 166520 - DNA, 55 bp, Artificial
  Synthetic oligonucleotide
cggccatcggaagggatttagcgcctagaatatcagcgaggatacacactggtct

SEQ ID NO: 166521 - DNA, 55 bp, Artificial
  Synthetic oligonucleotide
gactgagtaacatacttgtaggtctaggatgggaccctgtacaacaatctggtgg

SEQ ID NO: 166522 - DNA, 60 bp, Artificial
  Synthetic oligonucleotide
tatatcccagagatgcaattgtaaaggaatcatactcaggacctagaagtaattgtcttg

SEQ ID NO: 166523 - DNA, 54 bp, Artificial
  Synthetic oligonucleotide
gactcttggagcaaaagacgtaaaggtcaccttgaagggattaacgattgacgg

SEQ ID NO: 166524 - DNA, 55 bp, Artificial
  Synthetic oligonucleotide
gactcctactaaggcgttattgatgtctgccacattgaattttgtaggagccatg

SEQ ID NO: 166525 - DNA, 55 bp, Artificial
  Synthetic oligonucleotide
gactcccctgtgcgtctgaagaacatgtaatgtgagatactggtacaccacttga

SEQ ID NO: 166526 - DNA, 55 bp, Artificial
  Synthetic oligonucleotide
gactaccggatcaatataacttaaagctgctacgctctgagcagaaagttctcgc

SEQ ID NO: 166527 - DNA, 55 bp, Artificial
  Synthetic oligonucleotide
gacggaagggttaaggaactggatttcaagttggagaacgactgtgcattgagcc

SEQ ID NO: 166528 - DNA, 55 bp, Artificial
  Synthetic oligonucleotide
gacgcttctttagcagtgtagaatccctgtttgtactgagtatcagttatcataa

SEQ ID NO: 166529 - DNA, 55 bp, Artificial
  Synthetic oligonucleotide
gacgcaatatcagaatccgagattccgatgagaactccatggaaacccatgatcg

SEQ ID NO: 166530 - DNA, 55 bp, Artificial
  Synthetic oligonucleotide
cggctccttgtgctcgggaatttcaatggtattcccacgcgggacgctgatgtac

SEQ ID NO: 166531 - DNA, 55 bp, Artificial
  Synthetic oligonucleotide
gacgagtctactataacttcctcggggtcaaagagccaagcatgctatacaatga

SEQ ID NO: 166532 - DNA, 55 bp, Artificial
  Synthetic oligonucleotide
gacctgataatggaacaatctatacgctttgagccaaactccttgcaatatgtct

SEQ ID NO: 166533 - DNA, 60 bp, Artificial
  Synthetic oligonucleotide
ccggagccattaggtgatccaccgttatgtccagctccattatgggatccgccgttgtgc

SEQ ID NO: 166534 - DNA, 55 bp, Artificial
  Synthetic oligonucleotide
cggctgtgctaatacaagctttgcaaaccctaatggtcttcatgaccctagccat

SEQ ID NO: 166535 - DNA, 55 bp, Artificial
  Synthetic oligonucleotide
gacctcccggaccctgaagctgacggctccctttaccacccaatacacctatcta

SEQ ID NO: 166536 - DNA, 55 bp, Artificial
  Synthetic oligonucleotide
gacctaaaccctttaatacttgaaggaccctgttgtgttgacccagatgcattag

SEQ ID NO: 166537 - DNA, 55 bp, Artificial
  Synthetic oligonucleotide
gaccgtgcggcagtaacggatgcgatcgacagaaggttattcggctcttttatcg

SEQ ID NO: 166538 - DNA, 55 bp, Artificial
  Synthetic oligonucleotide
gaccgggtgtgccgcaagatgagacaggtgattgacgaccggctcagcgactcgt

SEQ ID NO: 166539 - DNA, 55 bp, Artificial
  Synthetic oligonucleotide
cttgtcagtcatcagacgttcctcaaacagaggggtattctttaaggacttgggg

SEQ ID NO: 166540 - DNA, 55 bp, Artificial
  Synthetic oligonucleotide
cgggtggtcatgacttagagctatgtgtatcgctggtcttttacccgttatcctg

SEQ ID NO: 166541 - DNA, 55 bp, Artificial
  Synthetic oligonucleotide
cttgtagtaccctcaaaatcataccaccaaactttagttaaaagctcatctcgtg

SEQ ID NO: 166542 - DNA, 55 bp, Artificial
  Synthetic oligonucleotide
cttgtaagaaacattatagcccgaacctgtcggaacatacatggagtaagtggct

SEQ ID NO: 166543 - DNA, 55 bp, Artificial
  Synthetic oligonucleotide
cttggggatttagattaatgtcaaggggacctagatttatgtcgtgcagatttag

SEQ ID NO: 166544 - DNA, 53 bp, Artificial
  Synthetic oligonucleotide
tatcttaggatttcttcccttagatttgtaatatggatttttaacgtaaggtg

SEQ ID NO: 166545 - DNA, 55 bp, Artificial
  Synthetic oligonucleotide
cttggatgtaatgcagcaggaatcataggatgtagaatcattaactctcctagag

SEQ ID NO: 166546 - DNA, 55 bp, Artificial
  Synthetic oligonucleotide
cttggacttcactttcagtatgaagtgcagtatgagccaaaaggacttgcggaag

SEQ ID NO: 166547 - DNA, 55 bp, Artificial
  Synthetic oligonucleotide
cttgccttcatcgcttccatcgagagatttctatcaagggaacgtatcttttctt

SEQ ID NO: 166548 - DNA, 55 bp, Artificial
  Synthetic oligonucleotide
cttgcctccccgctcgttcgatacagccacatataactcttcgactgtgccgcct

SEQ ID NO: 166549 - DNA, 55 bp, Artificial
  Synthetic oligonucleotide
cggtgattacactggcggcataccccatctcacaggatcgcgtgaagtatcacag

SEQ ID NO: 166550 - DNA, 55 bp, Artificial
  Synthetic oligonucleotide
cggtgttgtctgcatctcattaggatcaaaggtatagccgatacagctcgtaccg

SEQ ID NO: 166551 - DNA, 55 bp, Artificial
  Synthetic oligonucleotide
cttgcatatgcattttaagctgattcgcccatgcatcaattctaatcctacagga

SEQ ID NO: 166552 - DNA, 55 bp, Artificial
  Synthetic oligonucleotide
cggtgtttctacgtgggtaataagcaggatttcatacctggagggtgcatccaga

SEQ ID NO: 166553 - DNA, 55 bp, Artificial
  Synthetic oligonucleotide
cttgcagtgtatcaacgcctccgcaggttacttgagaattaggaaaaccattagt

SEQ ID NO: 166554 - DNA, 55 bp, Artificial
  Synthetic oligonucleotide
cttgaaggcggttatatgcaaggaataacagtacttgcaagggttaagaaactaa

SEQ ID NO: 166555 - DNA, 60 bp, Artificial
  Synthetic oligonucleotide
tatgcaagctctcaactatgttctgaatgtggctataagaatatagaagttaaaaaccta

SEQ ID NO: 166556 - DNA, 55 bp, Artificial
  Synthetic oligonucleotide
cttctgaactatagccattagaacaaataagaccgctaacaaaggtaccatggcc

SEQ ID NO: 166557 - DNA, 55 bp, Artificial
  Synthetic oligonucleotide
cttctcctccaaagtcagcatgaccaggagtgtctactatatttattttaactcc

SEQ ID NO: 166558 - DNA, 55 bp, Artificial
  Synthetic oligonucleotide
cttctagtgcgcaaaacaatgatgcccaatattggcttataaatcctgtttcaga

SEQ ID NO: 166559 - DNA, 55 bp, Artificial
  Synthetic oligonucleotide
cttctaacaggtgctccagttattccatagtttgctcttgcgataggctgtccat

SEQ ID NO: 166560 - DNA, 55 bp, Artificial
  Synthetic oligonucleotide
cttcgtggattgaaaatatatacccggcagggagaggatataggagttgttcaag

SEQ ID NO: 166561 - DNA, 55 bp, Artificial
  Synthetic oligonucleotide
cggttatgacgtacgaagcacttagacagctagattacccaggaatgagataaac

SEQ ID NO: 166562 - DNA, 55 bp, Artificial
  Synthetic oligonucleotide
cttcgccaagatataaacttcggcaaatcatcctttcagtaatcatctacactcg

SEQ ID NO: 166563 - DNA, 54 bp, Artificial
  Synthetic oligonucleotide
cggttcagttatagtattggcctttattaaactgttggctccaacatacgtacc

SEQ ID NO: 166564 - DNA, 55 bp, Artificial
  Synthetic oligonucleotide
cttccttttgttgcgttagttctaattggaggtatatatcccagagatgcaattg

SEQ ID NO: 166565 - DNA, 55 bp, Artificial
  Synthetic oligonucleotide
cttcccatccccttaccgcgatattttcgtgaaacttgcatcatatctaatacta

SEQ ID NO: 166566 - DNA, 60 bp, Artificial
  Synthetic oligonucleotide
gtgctaccatcttacgaatacagtgaatccctgtatctgcttcttggtacttatctctaa

SEQ ID NO: 166567 - DNA, 60 bp, Artificial
  Synthetic oligonucleotide
tatgggacagtgttaatcagccacacgtcccgcttattcctcgtagtcggcatgagcgcg

SEQ ID NO: 166568 - DNA, 55 bp, Artificial
  Synthetic oligonucleotide
cttccaaaacagctactttatttgcgttggaacttccaccaaaggtctgtgtcca

SEQ ID NO: 166569 - DNA, 55 bp, Artificial
  Synthetic oligonucleotide
cttcatggatggacagtatatatagcaccatgtatgaatccagatggagttatag

SEQ ID NO: 166570 - DNA, 55 bp, Artificial
  Synthetic oligonucleotide
cttcacgctcctgcttgtcaaaattctaaaaccgtcatcacaacatcattataac

SEQ ID NO: 166571 - DNA, 55 bp, Artificial
  Synthetic oligonucleotide
gaagatgcagcgcttaccttagaggtacttataggacacgatgcaaaggacagca

SEQ ID NO: 166572 - DNA, 55 bp, Artificial
  Synthetic oligonucleotide
gaagacatttccgagttttccgaccgcatatacaacgaagcaaggcatctcatag

SEQ ID NO: 166573 - DNA, 55 bp, Artificial
  Synthetic oligonucleotide
gaagaacatggtaaacttatgtacccagaatcaatggccatatctgagacacttg

SEQ ID NO: 166574 - DNA, 55 bp, Artificial
  Synthetic oligonucleotide
gaactgacttagttggtaaccacactgttgctacaggatcagctcctcaggctgt

SEQ ID NO: 166575 - DNA, 55 bp, Artificial
  Synthetic oligonucleotide
gaacggagatctatggatgtcctatggttcatggtttggcggaatctttatgcta

SEQ ID NO: 166576 - DNA, 55 bp, Artificial
  Synthetic oligonucleotide
gaacctataaggtctgtaagtcttcttggtgtagttccttgagatgccatagaac

SEQ ID NO: 166577 - DNA, 55 bp, Artificial
  Synthetic oligonucleotide
gaaccatattagaatcgggacttcaactaagcacaattggtcaagttctacttga

SEQ ID NO: 166578 - DNA, 55 bp, Artificial
  Synthetic oligonucleotide
tatggttcatttggtgcttataaaagtttaagtcaactagaattagacttgaagg

SEQ ID NO: 166579 - DNA, 55 bp, Artificial
  Synthetic oligonucleotide
gaaccactaagatagaatggactgacaggacgtggaatccagtaacgggctgcac

SEQ ID NO: 166580 - DNA, 55 bp, Artificial
  Synthetic oligonucleotide
gaacagtcgcaccgtctatacacataaccagcgtaggcaaagcgattttcgtgta

SEQ ID NO: 166581 - DNA, 55 bp, Artificial
  Synthetic oligonucleotide
gaacagagccgcaaaactgatatacgaagaaactagactaggcagaaacaagctg

SEQ ID NO: 166582 - DNA, 55 bp, Artificial
  Synthetic oligonucleotide
gaacaagtgattctcaatggtgacgtaaacagagatggagcagtagatgccttgg

SEQ ID NO: 166583 - DNA, 55 bp, Artificial
  Synthetic oligonucleotide
gaacaagctactaaaatgggaatacaatgtcatgatctgcgaaggggttttgcta

SEQ ID NO: 166584 - DNA, 55 bp, Artificial
  Synthetic oligonucleotide
gaaattgtatctttggagagagttagaatggattgagtgtgcagaagataggttc

SEQ ID NO: 166585 - DNA, 55 bp, Artificial
  Synthetic oligonucleotide
gaaattaaagctgtctacggaagcttttatggagccatatggaacggtggaagac

SEQ ID NO: 166586 - DNA, 49 bp, Artificial
  Synthetic oligonucleotide
cggggcttttacaacgaacttttaaattactacaacgccataaacggta

SEQ ID NO: 166587 - DNA, 55 bp, Artificial
  Synthetic oligonucleotide
gaaatataggttggtgttcaagtgagttcctaaccaatccagtaacatcacaaag

SEQ ID NO: 166588 - DNA, 55 bp, Artificial
  Synthetic oligonucleotide
gaaagtttccatcctctccactccggttgaacttcccatctgttgtataagtctg

SEQ ID NO: 166589 - DNA, 60 bp, Artificial
  Synthetic oligonucleotide
acagctaaagtagatgagcgtgtaaaatattcatacgaagctacagtaactacaatatta

SEQ ID NO: 166590 - DNA, 55 bp, Artificial
  Synthetic oligonucleotide
gaaagcttcaatgttgggagcatagtcggcatcggttgcagattcggcatagcga

SEQ ID NO: 166591 - DNA, 55 bp, Artificial
  Synthetic oligonucleotide
gaaagagcgtccttgtgagtctcagcgtaaactgcctgtgccgctttccatccga

SEQ ID NO: 166592 - DNA, 55 bp, Artificial
  Synthetic oligonucleotide
gaaacccctatgctttcaagtgcctctctcgttccacagtcggggcaaatcggcg

SEQ ID NO: 166593 - DNA, 55 bp, Artificial
  Synthetic oligonucleotide
gaaaatgtcaatgagcgaatttgtcaactccaagaatcgattaataagcttgccc

SEQ ID NO: 166594 - DNA, 55 bp, Artificial
  Synthetic oligonucleotide
cttttcgcggctgccagaccgtagcaacgtgacgtgacacgtgccgctagtaaca

SEQ ID NO: 166595 - DNA, 55 bp, Artificial
  Synthetic oligonucleotide
cttttcaatacgcttcaaactggtgcagtgtaggggagcttaaagcactagctga

SEQ ID NO: 166596 - DNA, 55 bp, Artificial
  Synthetic oligonucleotide
ctttaagcaacgggatttatccgttggcgctgtgcgttagcactttaagcaacgg

SEQ ID NO: 166597 - DNA, 55 bp, Artificial
  Synthetic oligonucleotide
cttgttaggttcttacaccaacgttgcttgcatggtcttagactacgttgtgcca

SEQ ID NO: 166598 - DNA, 55 bp, Artificial
  Synthetic oligonucleotide
cttgtgtttcgccgaaacgagggcttacagcggtaacaacataagtatgatcccc

SEQ ID NO: 166599 - DNA, 55 bp, Artificial
  Synthetic oligonucleotide
cttgtggtctactagcaagcttaaaccataatgctccaagaactggtcctaatac

SEQ ID NO: 166600 - DNA, 55 bp, Artificial
  Synthetic oligonucleotide
taacaatggattcttctaccacagttaataatgttataaaacaagaacttaaatc

SEQ ID NO: 166601 - DNA, 55 bp, Artificial
  Synthetic oligonucleotide
cttgtctatatgagccaccataatcatgctacggattcgactcctgcggatactc

SEQ ID NO: 166602 - DNA, 55 bp, Artificial
  Synthetic oligonucleotide
taaaagatctgctcacgagaaacagtaatatacgtgccatatcggtttacggagc

SEQ ID NO: 166603 - DNA, 54 bp, Artificial
  Synthetic oligonucleotide
gttttgtctataaacttggtcggtgagggtttaagaaatgctatagacccaaga

SEQ ID NO: 166604 - DNA, 51 bp, Artificial
  Synthetic oligonucleotide
gtttggacgttaaaggttactggaaagtcacccacctgggagtgcctaggg

SEQ ID NO: 166605 - DNA, 55 bp, Artificial
  Synthetic oligonucleotide
gtttgagtttcattaggctctaagaatatttggcttcctcccattgatgatgcag

SEQ ID NO: 166606 - DNA, 55 bp, Artificial
  Synthetic oligonucleotide
gtttgaagtcattccgtctgatgatgtaactgctcttaatcctacagtgtggcag

SEQ ID NO: 166607 - DNA, 55 bp, Artificial
  Synthetic oligonucleotide
gtttcggcggtcaaggtaatcattatggttatggaactaatacattgccatcaca

SEQ ID NO: 166608 - DNA, 55 bp, Artificial
  Synthetic oligonucleotide
gttgtctatgaacttaaggtggtagcacgaagatttatctctcgtccttttgata

SEQ ID NO: 166609 - DNA, 55 bp, Artificial
  Synthetic oligonucleotide
gttggtaatactagacctgagcgactttgaacctatgacgttgtaatgacgtgga

SEQ ID NO: 166610 - DNA, 55 bp, Artificial
  Synthetic oligonucleotide
gttggctccaacatacgtaccctcacttaaaacagcccctggaagcactacacta

SEQ ID NO: 166611 - DNA, 51 bp, Artificial
  Synthetic oligonucleotide
cccttacagtagtcggtaattggacttttccattacaactaactttattaa

SEQ ID NO: 166612 - DNA, 55 bp, Artificial
  Synthetic oligonucleotide
gttggcgcagaagtttcaggtagtttacaacttgctggaggtatattccctgtat

SEQ ID NO: 166613 - DNA, 55 bp, Artificial
  Synthetic oligonucleotide
gttgcggattgtgcatgtcgtacatccatgagagttattgggcaaggctgcggac

SEQ ID NO: 166614 - DNA, 55 bp, Artificial
  Synthetic oligonucleotide
gttgaacggcacggtttctcttgtgacagacggaaggttttcaggagccacacgg

SEQ ID NO: 166615 - DNA, 55 bp, Artificial
  Synthetic oligonucleotide
gttcgcttgtaaccacgctagaattagtccagatttcatgtgcctttctaagggg

SEQ ID NO: 166616 - DNA, 55 bp, Artificial
  Synthetic oligonucleotide
gttcgaggtattggctgtgcaattgcaatgcaaggttcaggtatagcttatattg

SEQ ID NO: 166617 - DNA, 55 bp, Artificial
  Synthetic oligonucleotide
gttcctatagtcttagaaaactccgttgttttagataagaagccaactgctccat

SEQ ID NO: 166618 - DNA, 55 bp, Artificial
  Synthetic oligonucleotide
gttcccactctatatttagatcctctttaggccaacttattatctgaccaggtac

SEQ ID NO: 166619 - DNA, 55 bp, Artificial
  Synthetic oligonucleotide
gttcacagtaatgaatcccttttccatggaagttattttcttcaggaataggcag

SEQ ID NO: 166620 - DNA, 55 bp, Artificial
  Synthetic oligonucleotide
gttagaggaggtccaggattaggaagtattcagccagcacaatcagattatttcc

SEQ ID NO: 166621 - DNA, 55 bp, Artificial
  Synthetic oligonucleotide
gttactacatttacagtacctccacccttataatctggattccctctctcaaagg

SEQ ID NO: 166622 - DNA, 53 bp, Artificial
  Synthetic oligonucleotide
ctcctacaccttctactaaagattttattgtaacaggtaaagtaccataacta

SEQ ID NO: 166623 - DNA, 55 bp, Artificial
  Synthetic oligonucleotide
gttacacctcgagttccctcaactagcattaaaggtccaactacttctcgtacag

SEQ ID NO: 166624 - DNA, 55 bp, Artificial
  Synthetic oligonucleotide
gttaattcgacactaccaatacttctaacaggcacgatattaccagctacattag

SEQ ID NO: 166625 - DNA, 55 bp, Artificial
  Synthetic oligonucleotide
gttaacgcctacaaccgtaatgagcggaatcagcgcattgggaagacagtggcgg

SEQ ID NO: 166626 - DNA, 55 bp, Artificial
  Synthetic oligonucleotide
gtgttgaagcctggtggtcaactctttatctctgacccaactccaaatgaacgcg

SEQ ID NO: 166627 - DNA, 55 bp, Artificial
  Synthetic oligonucleotide
gtgttcgctcaacattaggtggtcaacctaaccctcaaacaatctgggctaatcc

SEQ ID NO: 166628 - DNA, 55 bp, Artificial
  Synthetic oligonucleotide
gtgttaaacaaatactaattgcatgtatggatgggcttagaggtttaccagatgc

SEQ ID NO: 166629 - DNA, 55 bp, Artificial
  Synthetic oligonucleotide
gtgtcgtaattctcatactcatgtatctcgtcgaatataagacaagcactacgtt

SEQ ID NO: 166630 - DNA, 55 bp, Artificial
  Synthetic oligonucleotide
gtgtagacaagaattctaaaagcgattctgttcttgatggtgttaaatcgtcagc

SEQ ID NO: 166631 - DNA, 55 bp, Artificial
  Synthetic oligonucleotide
gtgtaacaagaccaatacatcctgcccctaatactactgcactttgtcctgcatg

SEQ ID NO: 166632 - DNA, 55 bp, Artificial
  Synthetic oligonucleotide
gtggtatcccagaacatatctccctctgctaaattgatatccggaggagcatttt

SEQ ID NO: 166633 - DNA, 55 bp, Artificial
  Synthetic oligonucleotide
acagcaaccgacttgacaacgtagcgtttaaagagcgtagttagacaaccaagga

SEQ ID NO: 166634 - DNA, 55 bp, Artificial
  Synthetic oligonucleotide
gtggtacactttaagtacaagttacacaccttcttagtatagtagatgctggagg

SEQ ID NO: 166635 - DNA, 55 bp, Artificial
  Synthetic oligonucleotide
gtggtacaagggccatagtcgttaactgacctatgtgaccgcctgattccatacc

SEQ ID NO: 166636 - DNA, 55 bp, Artificial
  Synthetic oligonucleotide
gtggaatagtagttacaagtagaattggttcagcatctgctatagcaggtacagg

SEQ ID NO: 166637 - DNA, 55 bp, Artificial
  Synthetic oligonucleotide
tagggtattgcagtctgtgagaaatggatgaccacctagctcctttacaacgtcg

SEQ ID NO: 166638 - DNA, 55 bp, Artificial
  Synthetic oligonucleotide
taggcatctcgccacatgtacaagcaatggtctccacggtggtagggtcagttgc

SEQ ID NO: 166639 - DNA, 53 bp, Artificial
  Synthetic oligonucleotide
taggcaccttctccgtttagaaaggttactcctcttcctaaagcctccattac

SEQ ID NO: 166640 - DNA, 55 bp, Artificial
  Synthetic oligonucleotide
taggattaaaagttgacctagtttcatttccagacataagcaaacctacagcacg

SEQ ID NO: 166641 - DNA, 55 bp, Artificial
  Synthetic oligonucleotide
tagctaaattatagcatattaaattaacctgaaataggtcataccatgtatttat

SEQ ID NO: 166642 - DNA, 55 bp, Artificial
  Synthetic oligonucleotide
tagcggcaaggcgggaaaagcttttattaatgccatatatcaagagaaagacatt

SEQ ID NO: 166643 - DNA, 55 bp, Artificial
  Synthetic oligonucleotide
tagcataatccggattttcaccatatacccattgagaagctctaatgtcatcccc

SEQ ID NO: 166644 - DNA, 57 bp, Artificial
  Synthetic oligonucleotide
taaggtaagtccaagtggatacttaagaccatctacagggccgattacatctaatta

SEQ ID NO: 166645 - DNA, 55 bp, Artificial
  Synthetic oligonucleotide
tagcacctgatatacttccaagacctaaggaatggtctccaccaataaccaaagg

SEQ ID NO: 166646 - DNA, 55 bp, Artificial
  Synthetic oligonucleotide
tagaatgtcaagtagagatgtattttatggaggtggagttgtaaatggagctcgt

SEQ ID NO: 166647 - DNA, 55 bp, Artificial
  Synthetic oligonucleotide
tagaaggtccagtttcaatagctttcggttacgaagatgctactgctccagctag

SEQ ID NO: 166648 - DNA, 55 bp, Artificial
  Synthetic oligonucleotide
tactttagagggactaggggtagatgctttaggtgtcaattgttccctagggcca

SEQ ID NO: 166649 - DNA, 55 bp, Artificial
  Synthetic oligonucleotide
tactgaggtcctctgtcgtaaaattgcccgccggggtctgtagggtcgatttggc

SEQ ID NO: 166650 - DNA, 55 bp, Artificial
  Synthetic oligonucleotide
tactagaaagtggggtttcactaccgactatcacagtactagtaggagctgtgcc

SEQ ID NO: 166651 - DNA, 55 bp, Artificial
  Synthetic oligonucleotide
tacgagtatcgagtaatctctccaatgtatgattcatgcctatttgcaacactgg

SEQ ID NO: 166652 - DNA, 55 bp, Artificial
  Synthetic oligonucleotide
tacctcatcttgacgtagcgttaggttatccgtattttcgactaccttacgcatc

SEQ ID NO: 166653 - DNA, 55 bp, Artificial
  Synthetic oligonucleotide
taccggcaattactatcccgctggtatttcggtctaatcgattgcataccgatgg

SEQ ID NO: 166654 - DNA, 55 bp, Artificial
  Synthetic oligonucleotide
taaacgcttagactagcatccaatagctagcacatcctatccttctccgtcacac

SEQ ID NO: 166655 - DNA, 54 bp, Artificial
  Synthetic oligonucleotide
taatagggttgtgcatcccaagttcatggggaattattttaacgtgattttttc

SEQ ID NO: 166656 - DNA, 55 bp, Artificial
  Synthetic oligonucleotide
taaagatcacgggagacagcgtgtttgagatcatcaaaagcgggcttgccagcgc

SEQ ID NO: 166657 - DNA, 55 bp, Artificial
  Synthetic oligonucleotide
taaatgggttagatattgcctatgtattatccacaagattttggccaacaagggg

SEQ ID NO: 166658 - DNA, 55 bp, Artificial
  Synthetic oligonucleotide
taaatggtaaagggagtagatataagagtcattacagagctttgttgacttgggg

SEQ ID NO: 166659 - DNA, 55 bp, Artificial
  Synthetic oligonucleotide
taacagcacaaaatccaaaagcagaagatagcaccttcaaagctgattcatctcc

SEQ ID NO: 166660 - DNA, 55 bp, Artificial
  Synthetic oligonucleotide
taaccataaccctagcaaattacccatctgaaatgcttgctaatatgttcgccca

SEQ ID NO: 166661 - DNA, 55 bp, Artificial
  Synthetic oligonucleotide
taacgaattgctcgtatgttggttgagaacttctatggtctgatagtgctatttc

SEQ ID NO: 166662 - DNA, 55 bp, Artificial
  Synthetic oligonucleotide
taactcgcgtagctgccagccatatacgtgttggtacatttgaatacgtttcaag

SEQ ID NO: 166663 - DNA, 55 bp, Artificial
  Synthetic oligonucleotide
taagtgaaactgggaagtcttgtccacaacgtttcttaatctcttgtacaacttc

SEQ ID NO: 166664 - DNA, 55 bp, Artificial
  Synthetic oligonucleotide
taagttagatcctccacccaaggctgatgaagacataataagctttattgagaac

SEQ ID NO: 166665 - DNA, 55 bp, Artificial
  Synthetic oligonucleotide
taatggctcttttctgccgctattacccatagttgctaaaagccctggtagtcct

SEQ ID NO: 166666 - DNA, 60 bp, Artificial
  Synthetic oligonucleotide
taatcttgtccagttggattcagtgcacctgtatttagacaataacaggtccttagatct

SEQ ID NO: 166667 - DNA, 55 bp, Artificial
  Synthetic oligonucleotide
taattgtagggactggcccagcatcatacggtggcgatgatggaacaaaaggtgg

SEQ ID NO: 166668 - DNA, 55 bp, Artificial
  Synthetic oligonucleotide
tacaaggaccagagggaccacaaggaccaccatctcaatggataaatagtgtatg

SEQ ID NO: 166669 - DNA, 55 bp, Artificial
  Synthetic oligonucleotide
taccatatgaaagtccactacgttttgcagttacaaactttcctgaacagcggta

SEQ ID NO: 166670 - DNA, 55 bp, Artificial
  Synthetic oligonucleotide
taccatcacggagcaaggtcagcaccacaccttctcactgggtgcaagcaccgcc

SEQ ID NO: 166671 - DNA, 53 bp, Artificial
  Synthetic oligonucleotide
tacccacgataaatagtagtttaacaccttcccagttaacgccgataaatcca

SEQ ID NO: 166672 - DNA, 55 bp, Artificial
  Synthetic oligonucleotide
gtatgtggtcatctttacgaagggcagcgcgtatgatacgagatacaacgggtta

SEQ ID NO: 166673 - DNA, 55 bp, Artificial
  Synthetic oligonucleotide
gtatgctaggtgggccatatagagtaactgaaaatactcttgagactttggtttg

SEQ ID NO: 166674 - DNA, 55 bp, Artificial
  Synthetic oligonucleotide
gtatcgcaccatccgttaatcaagaataaagaaacttctttcggagctaggtggc

SEQ ID NO: 166675 - DNA, 55 bp, Artificial
  Synthetic oligonucleotide
gtatcatggttgaggcggacagtgatagcacgtccttagagaatatagcgtatac

SEQ ID NO: 166676 - DNA, 55 bp, Artificial
  Synthetic oligonucleotide
gtatatcccgtaaaaggcttatctgattcaccaaatcctctctggtctataccta

SEQ ID NO: 166677 - DNA, 60 bp, Artificial
  Synthetic oligonucleotide
gtgggtgattgtagaccgccatgtgttctcgcttgtcctggtggaacggattgtcaggga

SEQ ID NO: 166678 - DNA, 56 bp, Artificial
  Synthetic oligonucleotide
ctccaatttgttttaacgccatatgtggcatttatagcctcttgaattttaaataa

SEQ ID NO: 166679 - DNA, 55 bp, Artificial
  Synthetic oligonucleotide
gtataccttgttcaggagtcatatatcctaacattgctggtatatcaacctttgc

SEQ ID NO: 166680 - DNA, 53 bp, Artificial
  Synthetic oligonucleotide
gtagtgtcttcaggacagttaaccccaatgaatctaaccctttccccagtatt

SEQ ID NO: 166681 - DNA, 55 bp, Artificial
  Synthetic oligonucleotide
gtaggtaaatggattccactgggaattgcagaaggcttaaaggctacaacaggaa

SEQ ID NO: 166682 - DNA, 55 bp, Artificial
  Synthetic oligonucleotide
gtaggatggatacccactttctgttccattctcactcctttatggatgctttcag

SEQ ID NO: 166683 - DNA, 55 bp, Artificial
  Synthetic oligonucleotide
gtaggagcatggatatgcaactccattgtaacaatgtggactaacgtatggagcg

SEQ ID NO: 166684 - DNA, 55 bp, Artificial
  Synthetic oligonucleotide
gtagaagattgctcgtaatagcatcagaagacataggtttagcataccctcaagc

SEQ ID NO: 166685 - DNA, 55 bp, Artificial
  Synthetic oligonucleotide
gtagaaaagggcagacaacacacagaccagagtcgccacaatgatagtcactatc

SEQ ID NO: 166686 - DNA, 55 bp, Artificial
  Synthetic oligonucleotide
gtacttgattgcatggggggagataattcgcctaaggctcatgtagagggtgcga

SEQ ID NO: 166687 - DNA, 55 bp, Artificial
  Synthetic oligonucleotide
gtactgggaacagctaccccatccatagaaagttactatgcctctaaaatagggg

SEQ ID NO: 166688 - DNA, 55 bp, Artificial
  Synthetic oligonucleotide
gtactgccagtgtagttctttcatactccgtaggtcgtcctaaatccagtactcc

SEQ ID NO: 166689 - DNA, 60 bp, Artificial
  Synthetic oligonucleotide
tacaactcactattatttaattcatatgctactatatctctagtatctaagatttgttgt

SEQ ID NO: 166690 - DNA, 55 bp, Artificial
  Synthetic oligonucleotide
gtactccttctgttattgcatatatgggagaggttatcggtgatactttaggtct

SEQ ID NO: 166691 - DNA, 55 bp, Artificial
  Synthetic oligonucleotide
gtactatagaagcagctagagttgtacatgatgcagcagttaaggcaggcgcacc

SEQ ID NO: 166692 - DNA, 55 bp, Artificial
  Synthetic oligonucleotide
gtactagttataccttgatatgtattaccatccaaagtaacttccgcagttgcag

SEQ ID NO: 166693 - DNA, 55 bp, Artificial
  Synthetic oligonucleotide
gtactagctcacgtaacaactcaaatggaagctataagacaaggggcgcctacag

SEQ ID NO: 166694 - DNA, 55 bp, Artificial
  Synthetic oligonucleotide
gtacctcaaagctaatgctacggactgcttctactttccgatcttttgacacttg

SEQ ID NO: 166695 - DNA, 55 bp, Artificial
  Synthetic oligonucleotide
gtacccaaaattgttattggatcatcctttagttgcagatgggagcgggaaaatt

SEQ ID NO: 166696 - DNA, 55 bp, Artificial
  Synthetic oligonucleotide
gtacagcgatgccaagagaaatatacctttctggttgcaatgggagctttgcaac

SEQ ID NO: 166697 - DNA, 55 bp, Artificial
  Synthetic oligonucleotide
gtaatctccccattgacagcggcggccacagaaaacttatgtcctacaaccggct

SEQ ID NO: 166698 - DNA, 55 bp, Artificial
  Synthetic oligonucleotide
gtaatcgaaggtatgggtagaggaaatataccaccagaaatgtttagaggacttg

SEQ ID NO: 166699 - DNA, 55 bp, Artificial
  Synthetic oligonucleotide
gtaagtgcgtgatctgcaaagctgtttagtgtttctacgtctggtagaccattga

SEQ ID NO: 166700 - DNA, 53 bp, Artificial
  Synthetic oligonucleotide
tacaattgggaaaaaatatgtccccacgaaaacagtaggctttgcctacttcc

SEQ ID NO: 166701 - DNA, 55 bp, Artificial
  Synthetic oligonucleotide
gtaacttatggattcccatgtgtcgatataagcttagctggaagctgtaagggaa

SEQ ID NO: 166702 - DNA, 55 bp, Artificial
  Synthetic oligonucleotide
gtaacccttccattgagcctaaagtagaatccggtacaaaagtacagggcatagc

SEQ ID NO: 166703 - DNA, 55 bp, Artificial
  Synthetic oligonucleotide
gtaacaggatggggtaaaccatctacaggatgtattatgggtgtacaagctaggt

SEQ ID NO: 166704 - DNA, 55 bp, Artificial
  Synthetic oligonucleotide
gtaacaggactgaagccccgcgataatttcctcctccggataagtccagattccg

SEQ ID NO: 166705 - DNA, 55 bp, Artificial
  Synthetic oligonucleotide
gtaaacctaccaacaactggattatagaatctagcacgtagataatactgctgcg

SEQ ID NO: 166706 - DNA, 55 bp, Artificial
  Synthetic oligonucleotide
gtaaacaggacgtttacttagccctgttgccacaggacgtgacattagggcgcta

SEQ ID NO: 166707 - DNA, 55 bp, Artificial
  Synthetic oligonucleotide
ggttgttttgtacctttaggaggcccaactaaagcaattgcaggagatgctatag

SEQ ID NO: 166708 - DNA, 55 bp, Artificial
  Synthetic oligonucleotide
gtggaagctgcatttggagggcaggcgaatgtgatagatattccacaatctacag

SEQ ID NO: 166709 - DNA, 55 bp, Artificial
  Synthetic oligonucleotide
gtgctgcttaatcgcaacactcttgaactttctaacttaacccaatacttattcc

SEQ ID NO: 166710 - DNA, 55 bp, Artificial
  Synthetic oligonucleotide
gtgctacatctcttgatagtcctccttgtttaacctcttgctctaagctatccat

SEQ ID NO: 166711 - DNA, 54 bp, Artificial
  Synthetic oligonucleotide
tacacccaaccaaaattataatatccaccctttccatctggttcagtagttccc

SEQ ID NO: 166712 - DNA, 55 bp, Artificial
  Synthetic oligonucleotide
gtgcgttatcacccacaatcatgttggcaatgcttgcaggttccggttatgtggc

SEQ ID NO: 166713 - DNA, 55 bp, Artificial
  Synthetic oligonucleotide
gtgccatattgttctaaatgactagcagatactttaggaaccctcaaccaaaagc

SEQ ID NO: 166714 - DNA, 55 bp, Artificial
  Synthetic oligonucleotide
gtgcacttgtaactaccatgtccgctcccatcttaactgcactcttaggtaaact

SEQ ID NO: 166715 - DNA, 55 bp, Artificial
  Synthetic oligonucleotide
gtgcaatctccgcagatgagaacggaatactcctaacgaacaaaccaatgcttcc

SEQ ID NO: 166716 - DNA, 55 bp, Artificial
  Synthetic oligonucleotide
gtgattttccccggcatatccacttacgtgggaggagatattacggcaggattgt

SEQ ID NO: 166717 - DNA, 55 bp, Artificial
  Synthetic oligonucleotide
gtgatggattatatgtaatagataaaggagatggttggatattaggggaaccctc

SEQ ID NO: 166718 - DNA, 55 bp, Artificial
  Synthetic oligonucleotide
gtgatccagcatctgcgggtgggtcgaaacatgactatagcgcttttcttgttgg

SEQ ID NO: 166719 - DNA, 55 bp, Artificial
  Synthetic oligonucleotide
gtgagttcaaactggcacagacgcaagcaaaagcgttcggttcggcagcagacca

SEQ ID NO: 166720 - DNA, 55 bp, Artificial
  Synthetic oligonucleotide
gtgagcaatcctaatagtatgactgtaggaaatggtggacctggaataagtcttg

SEQ ID NO: 166721 - DNA, 55 bp, Artificial
  Synthetic oligonucleotide
gtgacgtcatcccgcaatttgtaagaaatcgtataatttctgctctggcccaatg

SEQ ID NO: 166722 - DNA, 60 bp, Artificial
  Synthetic oligonucleotide
tacactccatactcgagtcattattcctgaaaccgtgccatatattgtattccatacgga

SEQ ID NO: 166723 - DNA, 55 bp, Artificial
  Synthetic oligonucleotide
gtgacggactgttctctaccacaaaagagccagttacatatgaaatgggacctgt

SEQ ID NO: 166724 - DNA, 55 bp, Artificial
  Synthetic oligonucleotide
gtgaaggactccgcagggcaggattaactgatcttccaaattacgtggcaaatac

SEQ ID NO: 166725 - DNA, 55 bp, Artificial
  Synthetic oligonucleotide
gtcttcgtacttgaaccgctactagttgcagtagtagtgcctatacttatactac

SEQ ID NO: 166726 - DNA, 55 bp, Artificial
  Synthetic oligonucleotide
gtattggagtttcaaatgttaggggagttggatctttaggatgtttggttacaga

SEQ ID NO: 166727 - DNA, 55 bp, Artificial
  Synthetic oligonucleotide
gtatttctgaagcttcgtaatctcttccgcctctatgatctgatgacccgcagct

SEQ ID NO: 166728 - DNA, 55 bp, Artificial
  Synthetic oligonucleotide
gtcaagggtgtatttgtcatactcgctatgacccattacgaacacgtctcttgaa

SEQ ID NO: 166729 - DNA, 55 bp, Artificial
  Synthetic oligonucleotide
gtcacttacagggtgcagtgctgacgttgcagttggaaagggatcgggtattaca

SEQ ID NO: 166730 - DNA, 55 bp, Artificial
  Synthetic oligonucleotide
gtcagacggatggaagtcggacgtatattgccaaccgaggcagcagtcatattga

SEQ ID NO: 166731 - DNA, 55 bp, Artificial
  Synthetic oligonucleotide
gtcagatgcatgtatattagggtatggacgaataggaaaagcccttgctagaaga

SEQ ID NO: 166732 - DNA, 55 bp, Artificial
  Synthetic oligonucleotide
gtcaggacaaataagggaacactgtctaatgccaagctttgtatcatagcagagt

SEQ ID NO: 166733 - DNA, 60 bp, Artificial
  Synthetic oligonucleotide
tacagtagcattagtatcaatttttaatactgattgcttggaattaatccatataggtgt

SEQ ID NO: 166734 - DNA, 54 bp, Artificial
  Synthetic oligonucleotide
gtcaggatagttgtttattacccgtgagacggtacttcttgaaactccgacgat

SEQ ID NO: 166735 - DNA, 55 bp, Artificial
  Synthetic oligonucleotide
gtccaactagttcagcatctgctgcacaacaggatatcataagccttcctaccgc

SEQ ID NO: 166736 - DNA, 55 bp, Artificial
  Synthetic oligonucleotide
gtccatggcctgattattgtttagtatagtgcctataactcccctttcggcctca

SEQ ID NO: 166737 - DNA, 55 bp, Artificial
  Synthetic oligonucleotide
gtcccacgaagctttaagaacaacattcaagaatataaatggcagtcccgtgcag

SEQ ID NO: 166738 - DNA, 55 bp, Artificial
  Synthetic oligonucleotide
gtccgaacaccccattctcgaagcctgcacacgtgaatatacttcgcgtaagctg

SEQ ID NO: 166739 - DNA, 55 bp, Artificial
  Synthetic oligonucleotide
gtcctaggcaatcacctatacatctatccgtgccaatacatacaataatagtatc

SEQ ID NO: 166740 - DNA, 55 bp, Artificial
  Synthetic oligonucleotide
gtcgtataaaattaaaagcgccatattcagacgctttacgttggtaagtcagctt

SEQ ID NO: 166741 - DNA, 55 bp, Artificial
  Synthetic oligonucleotide
gtcgtgagactctaatcggctagcagactgtctgcactatgttcatctagcatgg

SEQ ID NO: 166742 - DNA, 55 bp, Artificial
  Synthetic oligonucleotide
gtctaagctactggaatccagacagagtattgatcgatcctttctgtgggtctgg

SEQ ID NO: 166743 - DNA, 55 bp, Artificial
  Synthetic oligonucleotide
gtctcttttatcaggaggtatagatagcccagtggctacatggatggttgcaaaa

SEQ ID NO: 166744 - DNA, 60 bp, Artificial
  Synthetic oligonucleotide
ctcactaagaaggggcttgaaaagctcatgactgcatcaaacattcaaatagtggaatct

SEQ ID NO: 166745 - DNA, 55 bp, Artificial
  Synthetic oligonucleotide
ttacttgatttaactatgccctcatcgaaggtcagctaatctgcctgatagcggc

SEQ ID NO: 166746 - DNA, 55 bp, Artificial
  Synthetic oligonucleotide
ttacctgccgctgatacacttactacatccggatcttgaaccgaccatgcaatac

SEQ ID NO: 166747 - DNA, 55 bp, Artificial
  Synthetic oligonucleotide
tgttttggagcagatagacaagcattagatgcaactaggatattaagagtaccag

SEQ ID NO: 166748 - DNA, 55 bp, Artificial
  Synthetic oligonucleotide
tgttctataggtggtattccacgacgttctgccacaataataagataaggtgctg

SEQ ID NO: 166749 - DNA, 55 bp, Artificial
  Synthetic oligonucleotide
tgttcggggcatttcagggcacggcgctccaggatatctatgataccatattctg

SEQ ID NO: 166750 - DNA, 55 bp, Artificial
  Synthetic oligonucleotide
tgttcatggtgataacttgacaataagccgtaaaagggaataccgtgctcttgac

SEQ ID NO: 166751 - DNA, 55 bp, Artificial
  Synthetic oligonucleotide
tgtgtaaatcaaatctaggcacgttctctaagggttatcaacaaacatgcctgaa

SEQ ID NO: 166752 - DNA, 55 bp, Artificial
  Synthetic oligonucleotide
tgtgctggctgaatacttcctaatcctgggcctcctctaacgatgtttattataa

SEQ ID NO: 166753 - DNA, 55 bp, Artificial
  Synthetic oligonucleotide
tgtagggttcggcgctcaggtcttcccagattcctagagacatcatagttccacg

SEQ ID NO: 166754 - DNA, 55 bp, Artificial
  Synthetic oligonucleotide
tgtagacggccacgagtacgttgtgtagtaggttaagcacttaagtgtggagccg

SEQ ID NO: 166755 - DNA, 60 bp, Artificial
  Synthetic oligonucleotide
ccgcaatgcttacagcacgtagggccgcaaccgcagcatggattaggtctaggagggttg

SEQ ID NO: 166756 - DNA, 55 bp, Artificial
  Synthetic oligonucleotide
tgtacctgccttgaaggtatgtgcagatacaaaggtggctaggtggacatgctcc

SEQ ID NO: 166757 - DNA, 55 bp, Artificial
  Synthetic oligonucleotide
tgtaccactacgtcgaaggtagagcggaagcgtcttgcggaataatatgtaatat

SEQ ID NO: 166758 - DNA, 55 bp, Artificial
  Synthetic oligonucleotide
tgtaaatctatcggagttagtagaacaccagcgagagaagcattaactaggttag

SEQ ID NO: 166759 - DNA, 55 bp, Artificial
  Synthetic oligonucleotide
tggttgtctgacaggagagttatgtggatcaagtgaatgtggtttaacaagaagc

SEQ ID NO: 166760 - DNA, 55 bp, Artificial
  Synthetic oligonucleotide
tggtgttcaggtgcgcccagtatctccattctggctggaaaagggccgttattcg

SEQ ID NO: 166761 - DNA, 55 bp, Artificial
  Synthetic oligonucleotide
tggtgtagcaagaagagcatcttacaaattcgaggtacttcctagaatgaggagc

SEQ ID NO: 166762 - DNA, 55 bp, Artificial
  Synthetic oligonucleotide
tggtcttgtactgtaggaaaacctgaaacgccgactataaaaggtacattctatg

SEQ ID NO: 166763 - DNA, 55 bp, Artificial
  Synthetic oligonucleotide
tggtagacagaccaaatctcactaggattgaagctgaaggacttttagcgggtat

SEQ ID NO: 166764 - DNA, 50 bp, Artificial
  Synthetic oligonucleotide
tgggtagtaatttgggtagtagtttgggtagtagtttgggtagtagtttg

SEQ ID NO: 166765 - DNA, 55 bp, Artificial
  Synthetic oligonucleotide
tggggacttctggcgattacagcttgccgcagggactgatccgcggggcgtgttg

SEQ ID NO: 166766 - DNA, 60 bp, Artificial
  Synthetic oligonucleotide
tacgtgggccaaaattcggcagccagatttgattatccaggccttggatcactccaggga

SEQ ID NO: 166767 - DNA, 55 bp, Artificial
  Synthetic oligonucleotide
tggctgtaagggttaaaattttcgcatctgttactgagccatcagctatctgtgc

SEQ ID NO: 166768 - DNA, 55 bp, Artificial
  Synthetic oligonucleotide
tggcaagtgtcacgtacagggatgattaatcctgtagcaagatttaaacctgttg

SEQ ID NO: 166769 - DNA, 55 bp, Artificial
  Synthetic oligonucleotide
tggattagaaaccggcctaatcgtctgtgttatcgtccgtccggaaaatccctca

SEQ ID NO: 166770 - DNA, 55 bp, Artificial
  Synthetic oligonucleotide
tggacttgcttactttatgacagaagccggtcccaactatcacctgttattagcc

SEQ ID NO: 166771 - DNA, 55 bp, Artificial
  Synthetic oligonucleotide
tggaagcggacacattaacgacacctttcttctgactttcagtctacccgggact

SEQ ID NO: 166772 - DNA, 55 bp, Artificial
  Synthetic oligonucleotide
tggaacgaacatggcataactagctttaattatggaactggaggccaaccaatag

SEQ ID NO: 166773 - DNA, 55 bp, Artificial
  Synthetic oligonucleotide
tgctgtcagaaaacttacactcaggtggtggttctaaagctttcactccgagata

SEQ ID NO: 166774 - DNA, 55 bp, Artificial
  Synthetic oligonucleotide
tgctggacggtgagatggaaatcccactggctgacggattagtgctgtacggagg

SEQ ID NO: 166775 - DNA, 55 bp, Artificial
  Synthetic oligonucleotide
tgcgtgggatgcttaacatgcacaactgcttgtatagtttctcatgattcagagg

SEQ ID NO: 166776 - DNA, 55 bp, Artificial
  Synthetic oligonucleotide
tgcctggtgcgttattgcgcttggtcctgcagttttcgttcttatccgtaggccg

SEQ ID NO: 166777 - DNA, 60 bp, Artificial
  Synthetic oligonucleotide
tactacttagctacaagcactataaaagtcataatgtttactgctaaagtcaataatgat

SEQ ID NO: 166778 - DNA, 55 bp, Artificial
  Synthetic oligonucleotide
tgccgattccatagtatctggattccctactgcccttatttcataaggctcaaaa

SEQ ID NO: 166779 - DNA, 55 bp, Artificial
  Synthetic oligonucleotide
ttttgtaatgctcttcgcgatactaggggtaaccataccgagtttcgtactagca

SEQ ID NO: 166780 - DNA, 55 bp, Artificial
  Synthetic oligonucleotide
ttttcctgcataaaataaagatgcaactggagctctccaatcaacaactatcggc

SEQ ID NO: 166781 - DNA, 55 bp, Artificial
  Synthetic oligonucleotide
ttttacgataagattggactcgtgaaaccgataaagatcgatccaagaaccggat

SEQ ID NO: 166782 - DNA, 55 bp, Artificial
  Synthetic oligonucleotide
tttgtgctacgctagcaactagcctatgggctggggcatcaactaaagtctacgc

SEQ ID NO: 166783 - DNA, 55 bp, Artificial
  Synthetic oligonucleotide
tttggctagacttattaagggtggaaatatggatagcgtaattaggaggatagga

SEQ ID NO: 166784 - DNA, 55 bp, Artificial
  Synthetic oligonucleotide
tttgacgcggtaacaaatccaagcttcttcggatcaataatcctctgtgcaccgg

SEQ ID NO: 166785 - DNA, 55 bp, Artificial
  Synthetic oligonucleotide
tttctcggaaaactttatacttgtactctcccatgacgaagtagtacacggcaaa

SEQ ID NO: 166786 - DNA, 53 bp, Artificial
  Synthetic oligonucleotide
tttcggtccgaccttttcgtaggttggatatcacaaccaccctttcgtgagta

SEQ ID NO: 166787 - DNA, 55 bp, Artificial
  Synthetic oligonucleotide
tttcgccgaatctcattaacttataagttctcaatgtagtggtctgtagcctagc

SEQ ID NO: 166788 - DNA, 57 bp, Artificial
  Synthetic oligonucleotide
actcaataattataacgcattaccgtctcaactacttaattcgtatcaaagctaggc

SEQ ID NO: 166789 - DNA, 55 bp, Artificial
  Synthetic oligonucleotide
gttattgtgaaggttactagagaaatcaatccaataattctaccgtcaccgcttt

SEQ ID NO: 166790 - DNA, 57 bp, Artificial
  Synthetic oligonucleotide
gatctaccttggctaaaatacttgctatggagatgctacctatttattgtataggtg

SEQ ID NO: 166791 - DNA, 57 bp, Artificial
  Synthetic oligonucleotide
gtggtgtggtctgcgttttgcgtcatggcattcaccctaccccgccgtaacttccca

SEQ ID NO: 166792 - DNA, 57 bp, Artificial
  Synthetic oligonucleotide
gtagtcagaaaatattagattctggaggtgaatggaaatggacgaaatagctatgag

SEQ ID NO: 166793 - DNA, 57 bp, Artificial
  Synthetic oligonucleotide
gaatgtatcgaagatacataaattacagcaaactaatccattccacaaaaaagacgg

SEQ ID NO: 166794 - DNA, 57 bp, Artificial
  Synthetic oligonucleotide
cttatcaattccgcacttagctaccgagccatgctagtggcctaacaactcgtacac

SEQ ID NO: 166795 - DNA, 54 bp, Artificial
  Synthetic oligonucleotide
tttgtgggtcgtgttaatttcattaagggagttgcaaaagacggctttgttgaa

SEQ ID NO: 166796 - DNA, 56 bp, Artificial
  Synthetic oligonucleotide
gagctagttggtaaaggacaaggacttgattatgtttacactgaaaatctaggaac

SEQ ID NO: 166797 - DNA, 55 bp, Artificial
  Synthetic oligonucleotide
tgccacaacgaatcctggtaccgatataccaattgtagtcaaaactcttaaaaac

SEQ ID NO: 166798 - DNA, 56 bp, Artificial
  Synthetic oligonucleotide
gtctattcctgatacaattgtcctaagaccagcagatgcaaacgaggttaggctat

SEQ ID NO: 166799 - DNA, 56 bp, Artificial
  Synthetic oligonucleotide
tcccccaacacgtcatttcgctcgaaatgtagctagcgaagtgtagtcaatctagc

SEQ ID NO: 166800 - DNA, 59 bp, Artificial
  Synthetic oligonucleotide
gttaggtataatttcattacactcgtgctacagtagagatgacgtgttgggtgtacttc

SEQ ID NO: 166801 - DNA, 54 bp, Artificial
  Synthetic oligonucleotide
ctgttgggataaatcaacctagcgaaagacgaactaaaatatacgaacaaattg

SEQ ID NO: 166802 - DNA, 56 bp, Artificial
  Synthetic oligonucleotide
gggtctacgacaatctgattgtagtcggattctaaaacattaggtgtcacaaaagt

SEQ ID NO: 166803 - DNA, 56 bp, Artificial
  Synthetic oligonucleotide
tcatcatcagaataaattctcgatgtttcagccattatagtcctgtaatttgtagg

SEQ ID NO: 166804 - DNA, 56 bp, Artificial
  Synthetic oligonucleotide
gctagattaaccgtgttcgagataacatataagaaattgtaaccgcttaatatatg

SEQ ID NO: 166805 - DNA, 56 bp, Artificial
  Synthetic oligonucleotide
ctctccactacggttgagatgacgtgttaagagctttgctttgtaaaggcgatacg

SEQ ID NO: 166806 - DNA, 56 bp, Artificial
  Synthetic oligonucleotide
tacgtaaacagtgtcatcatcaaaccctaaagtgtgagaattagcgaacactggga

SEQ ID NO: 166807 - DNA, 56 bp, Artificial
  Synthetic oligonucleotide
gcttggtaattgatattaggggcaataagatattgactatgggtgatttgtcttcg

SEQ ID NO: 166808 - DNA, 56 bp, Artificial
  Synthetic oligonucleotide
ggacacaaaattgtactacgctgggtgtcttttaaccaatggcagaatgcctaata

SEQ ID NO: 166809 - DNA, 53 bp, Artificial
  Synthetic oligonucleotide
agagttcgtttgcccgctaatttgaaacccggttacagttcgcggtgtctggc

SEQ ID NO: 166810 - DNA, 56 bp, Artificial
  Synthetic oligonucleotide
atgtgttccgtattagctgtaacaacaagcgttgtaaatgcaataggtatgggttc

SEQ ID NO: 166811 - DNA, 60 bp, Artificial
  Synthetic oligonucleotide
agcagatgcaatttaccaaatcgttggtggaattagagccggcatgggatatacaggtgc

SEQ ID NO: 166812 - DNA, 56 bp, Artificial
  Synthetic oligonucleotide
atcaagtagcatctgtcttacaaagtttgtcccatattcaggtatccctaaagtac

SEQ ID NO: 166813 - DNA, 55 bp, Artificial
  Synthetic oligonucleotide
gattaccttttgaattctggttacgtcgatgtttcctccggatactacgcagcat

SEQ ID NO: 166814 - DNA, 55 bp, Artificial
  Synthetic oligonucleotide
gcaaagtatcccttgcttacaacataatcaatagcagtcttagcccaatggccgc

SEQ ID NO: 166815 - DNA, 55 bp, Artificial
  Synthetic oligonucleotide
gcaagagacacttatctgtcagaagttgtgaacgaatggaatgtgggagttgcgg

SEQ ID NO: 166816 - DNA, 55 bp, Artificial
  Synthetic oligonucleotide
gcaagttgattctatggaaacttcacttgcccacttagtgccagaatttacggca

SEQ ID NO: 166817 - DNA, 55 bp, Artificial
  Synthetic oligonucleotide
gcaatcatggttccaaactgagtgccatagtcaccgatatagttggtagctattg

SEQ ID NO: 166818 - DNA, 55 bp, Artificial
  Synthetic oligonucleotide
atcgtcccaatatcattagaagaacctccacggaaagtctcaccttgccgacggg

SEQ ID NO: 166819 - DNA, 55 bp, Artificial
  Synthetic oligonucleotide
gcacgtatgcaagattttccctagctgctcctaccttgtgtactacgttttctgt

SEQ ID NO: 166820 - DNA, 55 bp, Artificial
  Synthetic oligonucleotide
agacccatcagcaatgtttccacacataaaagtaggaacatatgtaggaagtcac

SEQ ID NO: 166821 - DNA, 55 bp, Artificial
  Synthetic oligonucleotide
gcagttgtcgattgcggaactgttatgaataccaaattagcgacagttcaagtcg

SEQ ID NO: 166822 - DNA, 59 bp, Artificial
  Synthetic oligonucleotide
ctctatggagccctatgttcccatggacagcttgtggtgcttaccaaatgggagtttta

SEQ ID NO: 166823 - DNA, 55 bp, Artificial
  Synthetic oligonucleotide
gttatatcctaggttcagcattctcaatgctaactggttttatcggaatgagaac

SEQ ID NO: 166824 - DNA, 55 bp, Artificial
  Synthetic oligonucleotide
gccaactccaacttcgaattcagataccttcctataggtcgctacaagctccaag

SEQ ID NO: 166825 - DNA, 55 bp, Artificial
  Synthetic oligonucleotide
gccagcctttaaaagcttggtgcccttataggctgtgtggagtcttaagcccttg

SEQ ID NO: 166826 - DNA, 54 bp, Artificial
  Synthetic oligonucleotide
gccagtccctcttgtaaattcgcttacttcctacgcttttatgcttaacggccc

SEQ ID NO: 166827 - DNA, 55 bp, Artificial
  Synthetic oligonucleotide
gccatcctatggtcaagtcgtggacgtagacatatctaaggaagcctccgacatc

SEQ ID NO: 166828 - DNA, 52 bp, Artificial
  Synthetic oligonucleotide
gtgtaacacctaggattagggaaagaacggtagataccaagattccccaaag

SEQ ID NO: 166829 - DNA, 55 bp, Artificial
  Synthetic oligonucleotide
gcccacggagtatctgaatatattggttcaatcgaagtcggtaaacgtgcagacc

SEQ ID NO: 166830 - DNA, 55 bp, Artificial
  Synthetic oligonucleotide
atcgtaacactcgtaacagcgtcttgatttctcgccaagatccttgtatggctcc

SEQ ID NO: 166831 - DNA, 55 bp, Artificial
  Synthetic oligonucleotide
atcccaatgaagccaagtgaagcgaaggctgaattgaggaaggtcagatgcagtc

SEQ ID NO: 166832 - DNA, 55 bp, Artificial
  Synthetic oligonucleotide
gcctcttactccgtttcctgtttctaacagtttcttagctactgtcagtttacca

SEQ ID NO: 166833 - DNA, 60 bp, Artificial
  Synthetic oligonucleotide
agctatggattatggcgaagtgatgcttcgttatcgcgagttgttagcaacgggtcgagt

SEQ ID NO: 166834 - DNA, 55 bp, Artificial
  Synthetic oligonucleotide
gcgaagtgatgcttcgttatcgcgagttgttagcaacgggtcgagttgcgtttac

SEQ ID NO: 166835 - DNA, 55 bp, Artificial
  Synthetic oligonucleotide
gcgagtgcagctccaaagatgcccatgtgtaactcgactatgaataagtagtcga

SEQ ID NO: 166836 - DNA, 55 bp, Artificial
  Synthetic oligonucleotide
gcgcatcaaaagctggtgtaaacggatttatgagaacagccgcccttgaactttc

SEQ ID NO: 166837 - DNA, 55 bp, Artificial
  Synthetic oligonucleotide
gctaaacgaatcccacggtaggccaacagataattatagactaaggaatttcttg

SEQ ID NO: 166838 - DNA, 55 bp, Artificial
  Synthetic oligonucleotide
gctaaaggatcaagtcctccagacaacgtcttacctgaataaggacttgtaacat

SEQ ID NO: 166839 - DNA, 55 bp, Artificial
  Synthetic oligonucleotide
gctaagccttcctcggctaagctctataagagatcctaccatgatccttacctgg

SEQ ID NO: 166840 - DNA, 54 bp, Artificial
  Synthetic oligonucleotide
taccgtctcaactacttaattcgtatcaaagctaggcggggaattactataccg

SEQ ID NO: 166841 - DNA, 55 bp, Artificial
  Synthetic oligonucleotide
cttagagctctttgctctgtttcgtattggctattaagtatctcatatctactgc

SEQ ID NO: 166842 - DNA, 55 bp, Artificial
  Synthetic oligonucleotide
cttatacgtcatctcgactgtaacgaagcgaagtagggtgtagcgaatctagccc

SEQ ID NO: 166843 - DNA, 55 bp, Artificial
  Synthetic oligonucleotide
attcaacagttgcattgtgataacctatttcggaagtagctcctataacggcatt

SEQ ID NO: 166844 - DNA, 52 bp, Artificial
  Synthetic oligonucleotide
caagacccttttcaactttcattctcctacacttagcctttaattctaaagg

SEQ ID NO: 166845 - DNA, 55 bp, Artificial
  Synthetic oligonucleotide
cttcggtacaccatttgacccatggtacgcttataactctgaaggaccttacaac

SEQ ID NO: 166846 - DNA, 55 bp, Artificial
  Synthetic oligonucleotide
agaagactatgactgtatttattgtatagccgacatgcacgccataaccgtccct

SEQ ID NO: 166847 - DNA, 55 bp, Artificial
  Synthetic oligonucleotide
ctttatgattgctatgatccgtcagttattcgttcaattcatcgtgttgtggaca

SEQ ID NO: 166848 - DNA, 55 bp, Artificial
  Synthetic oligonucleotide
cttttgggaaatgatagcatgggcaggtgcgttttatcgagaatactgttcgggg

SEQ ID NO: 166849 - DNA, 52 bp, Artificial
  Synthetic oligonucleotide
gaagacctttgggttaaggataagaggggagtcgatgccctaaagggcctta

SEQ ID NO: 166850 - DNA, 55 bp, Artificial
  Synthetic oligonucleotide
tacatatggaccgaagtcagacttaattggacttccatttacaagcacgttcgcg

SEQ ID NO: 166851 - DNA, 55 bp, Artificial
  Synthetic oligonucleotide
gacaaactaggcaccctttatgataagaccggtcgtctccaagccctgactgaac

SEQ ID NO: 166852 - DNA, 55 bp, Artificial
  Synthetic oligonucleotide
gacaacatgaggattgccttcctctattgcgacaaggactactctgaaaaggacc

SEQ ID NO: 166853 - DNA, 55 bp, Artificial
  Synthetic oligonucleotide
gaccaagagcaggtataggggaaataaatctaccggcaagacaaaatggttcttc

SEQ ID NO: 166854 - DNA, 55 bp, Artificial
  Synthetic oligonucleotide
atgtccccatccctaagatatgtgttgccccttgggactatactcttatggtctc

SEQ ID NO: 166855 - DNA, 58 bp, Artificial
  Synthetic oligonucleotide
atttgaaactaagcgatgttaatacgaatcttgattggaatctaagtggcaggttcga

SEQ ID NO: 166856 - DNA, 55 bp, Artificial
  Synthetic oligonucleotide
gacgcaagaaactaccgtcacatacctggatggaccctagcaagtgaccctcaac

SEQ ID NO: 166857 - DNA, 55 bp, Artificial
  Synthetic oligonucleotide
gactaggccttttacgaagctaatgatatcatccataacctcggttgccctaggg

SEQ ID NO: 166858 - DNA, 55 bp, Artificial
  Synthetic oligonucleotide
gacttgcttgcgcttttctaccaagtgtaacttccatgtagaatagaggtatccc

SEQ ID NO: 166859 - DNA, 55 bp, Artificial
  Synthetic oligonucleotide
gagaatcttacggacaatcttacggagtagaaatcggagtgtactcggacattaa

SEQ ID NO: 166860 - DNA, 55 bp, Artificial
  Synthetic oligonucleotide
atggttgcaaactatgtgcgggatgtacaggatgtatgttctgtggtcctagtcc

SEQ ID NO: 166861 - DNA, 55 bp, Artificial
  Synthetic oligonucleotide
gagcaaattatttagtactacaaacttacgcactattttggtgcataaggctgcg

SEQ ID NO: 166862 - DNA, 55 bp, Artificial
  Synthetic oligonucleotide
gaggggacgagtctgcctataggaggaaattccagtcataccgtcataacagctc

SEQ ID NO: 166863 - DNA, 55 bp, Artificial
  Synthetic oligonucleotide
gagggtctatctcgaggggaataaagtagtaagagtagtagattatctatcaacc

SEQ ID NO: 166864 - DNA, 55 bp, Artificial
  Synthetic oligonucleotide
taattctgtagtaatctttactctccctgaagtaatagtctttttatcgtgatct

SEQ ID NO: 166865 - DNA, 55 bp, Artificial
  Synthetic oligonucleotide
taatgtatctaacaagttctagtcctttgttctcaaccaatctagtcaccatggc

SEQ ID NO: 166866 - DNA, 60 bp, Artificial
  Synthetic oligonucleotide
gtctcaaagtgctaggtcctaatctagctcctcttattgaagctcccatatctaagggta

SEQ ID NO: 166867 - DNA, 55 bp, Artificial
  Synthetic oligonucleotide
atgagtaagtccatcaacctcctggagggatccattagccggggactcttgagac

SEQ ID NO: 166868 - DNA, 55 bp, Artificial
  Synthetic oligonucleotide
atctgtcttaaaatcgcttgttacataattaaagaatcctttcttgcacctatga

SEQ ID NO: 166869 - DNA, 55 bp, Artificial
  Synthetic oligonucleotide
gttgtccaacccaatccgagatcagaatattttgcgtaaggattatctatactgt

SEQ ID NO: 166870 - DNA, 55 bp, Artificial
  Synthetic oligonucleotide
gatgattctcatattttcagcttagaccacagtgttagattgacaaatgctaagg

SEQ ID NO: 166871 - DNA, 55 bp, Artificial
  Synthetic oligonucleotide
ggcgcaacaaatacaagagcgaacatctcattgtatgccattggattatcatctc

SEQ ID NO: 166872 - DNA, 55 bp, Artificial
  Synthetic oligonucleotide
ggcgtcaagagggaggttagactcacgggccttggattcaagagcaggtatatcc

SEQ ID NO: 166873 - DNA, 55 bp, Artificial
  Synthetic oligonucleotide
ggctagcaatccaagtatcatgataagtccgccgattatattgatccaaatcggt

SEQ ID NO: 166874 - DNA, 55 bp, Artificial
  Synthetic oligonucleotide
ggctgcggttgtgatagtaaaggacaatataggactggtaacagatttcgttctg

SEQ ID NO: 166875 - DNA, 55 bp, Artificial
  Synthetic oligonucleotide
ggcttggcgaaggattttatcgataacaagggtttcagtgtggatccgttgaacg

SEQ ID NO: 166876 - DNA, 55 bp, Artificial
  Synthetic oligonucleotide
aggaacattcggtgcacaactgcattgttatgtaattactgatgcgattagagac

SEQ ID NO: 166877 - DNA, 60 bp, Artificial
  Synthetic oligonucleotide
ctgtatgaatttgtcctggagctccgattattgacggaataccataacaagaagcggctg

SEQ ID NO: 166878 - DNA, 55 bp, Artificial
  Synthetic oligonucleotide
gtcgtaattacacttacttttaaatccgttgctaaagctcgaatggaaggcagta

SEQ ID NO: 166879 - DNA, 55 bp, Artificial
  Synthetic oligonucleotide
gtcctatgaaacttgacctaacaacgggagaagcaacaataccaagggaaataga

SEQ ID NO: 166880 - DNA, 55 bp, Artificial
  Synthetic oligonucleotide
gggcaggatctgttgcatcgtggatgcctcctggtcttagtgaatctcccagtga

SEQ ID NO: 166881 - DNA, 55 bp, Artificial
  Synthetic oligonucleotide
gtccaaagtgtcacctagcaataattccgtccctacggctattatttgaactttc

SEQ ID NO: 166882 - DNA, 55 bp, Artificial
  Synthetic oligonucleotide
gggccttgccgtgtattagcctaagagacttttccccttctatatggtcgagcca

SEQ ID NO: 166883 - DNA, 55 bp, Artificial
  Synthetic oligonucleotide
gtatttagtgattttagcgacataaatgttacccagctcactatcgtaatctccc

SEQ ID NO: 166884 - DNA, 55 bp, Artificial
  Synthetic oligonucleotide
ggggctgttgcagaatgaataaatcgtcccaatatcattagaagaacctccacgg

SEQ ID NO: 166885 - DNA, 55 bp, Artificial
  Synthetic oligonucleotide
gtaggatgtaatgtcttgggttctgcgttatgcatggacaagggatacactaacg

SEQ ID NO: 166886 - DNA, 55 bp, Artificial
  Synthetic oligonucleotide
gtagcaagtccacgtataataagtgttgatgattgcgatccagagtttccgcccg

SEQ ID NO: 166887 - DNA, 55 bp, Artificial
  Synthetic oligonucleotide
gtacctaccgatgcaagtgtcgctgcagcaattaccgtcaagaaattttgtggag

SEQ ID NO: 166888 - DNA, 58 bp, Artificial
  Synthetic oligonucleotide
aggacagtctttaagtaatggcaaaccagtctgggataatataatgttggctttgcca

SEQ ID NO: 166889 - DNA, 55 bp, Artificial
  Synthetic oligonucleotide
gtacagccaaaatcctagtattcattttggacttgcatctatgttctatacgcac

SEQ ID NO: 166890 - DNA, 54 bp, Artificial
  Synthetic oligonucleotide
ggtctacccatttaactacagcacgggcgattaaaaccttataattctcaccca

SEQ ID NO: 166891 - DNA, 55 bp, Artificial
  Synthetic oligonucleotide
aggctgacgctcaaaacggtgtcgcccttgctgttttctaccactagtcggctgg

SEQ ID NO: 166892 - DNA, 55 bp, Artificial
  Synthetic oligonucleotide
ggtctcggagatattggatcttttgggtcttctgcttgtaaactttcccaatccg

SEQ ID NO: 166893 - DNA, 55 bp, Artificial
  Synthetic oligonucleotide
gtaatcgaagcctatgacatggtggtagagtcctgtgtggtaaaactaatgtgga

SEQ ID NO: 166894 - DNA, 49 bp, Artificial
  Synthetic oligonucleotide
aggggtaaggtaaaaccactggtataatctgggaaggtccttattccgt

SEQ ID NO: 166895 - DNA, 55 bp, Artificial
  Synthetic oligonucleotide
gtaatactaccgctttagccgctattccttcaccggttcctgtgaatcctaagcc

SEQ ID NO: 166896 - DNA, 55 bp, Artificial
  Synthetic oligonucleotide
ggtctttgctgtaagctcccgctgaaccgattctgataagattttcaactccgta

SEQ ID NO: 166897 - DNA, 55 bp, Artificial
  Synthetic oligonucleotide
agggactttattcactatatagcatcaacccttggtgcttttgcacaggtctctc

SEQ ID NO: 166898 - DNA, 55 bp, Artificial
  Synthetic oligonucleotide
ggtttgtactatccaaacgtgatgatggcggcaagtacacaagctataatcgcac

SEQ ID NO: 166899 - DNA, 58 bp, Artificial
  Synthetic oligonucleotide
cgtcccgctaccaaactaagctttctctatatacctcatctcgagcggagtgtaacga

SEQ ID NO: 166900 - DNA, 60 bp, Artificial
  Synthetic oligonucleotide
attcagtcgttccatacatttttttagtagcaagcatcataagtctaacagatactacac

SEQ ID NO: 166901 - DNA, 55 bp, Artificial
  Synthetic oligonucleotide
atccacagttcccgttggaccgtttctgtgttttgcgacgataatttccgcgatg

SEQ ID NO: 166902 - DNA, 55 bp, Artificial
  Synthetic oligonucleotide
gctactcgccttaattctctttacaagacctgccttctcgctcatttctatcccc

SEQ ID NO: 166903 - DNA, 55 bp, Artificial
  Synthetic oligonucleotide
gtgggtttcgtgttataattatgacaagggcagatagtaacgatgaatacaggat

SEQ ID NO: 166904 - DNA, 55 bp, Artificial
  Synthetic oligonucleotide
gctagggcttcataagaataaaagtctgacatatcacgagcgacattgtgaccta

SEQ ID NO: 166905 - DNA, 55 bp, Artificial
  Synthetic oligonucleotide
gctataacaggcgtacctgtcgcagcctaaactcttgtctcggtgcgataactcc

SEQ ID NO: 166906 - DNA, 55 bp, Artificial
  Synthetic oligonucleotide
gctataccaactggggctgtcaacctcgatatagccctcggtatcggtggaatcc

SEQ ID NO: 166907 - DNA, 55 bp, Artificial
  Synthetic oligonucleotide
gctcctgttacgatatctctaggtttaagctcatctgtaaagcgatccccatggc

SEQ ID NO: 166908 - DNA, 55 bp, Artificial
  Synthetic oligonucleotide
gctcggaggtacaattgcaaccatcggatggctgttgattacactgttgtactcg

SEQ ID NO: 166909 - DNA, 55 bp, Artificial
  Synthetic oligonucleotide
gtgcgatgcgaacaacaatccgctaagtaaagctagtaaatctccaagccatgcc

SEQ ID NO: 166910 - DNA, 54 bp, Artificial
  Synthetic oligonucleotide
gcttcgtacaatccttcgcgggtggatacggtgttgtaactaacggtatgtacg

SEQ ID NO: 166911 - DNA, 57 bp, Artificial
  Synthetic oligonucleotide
gagcaaatggtctaaaggaaattactttgttcgtgaaacatatattgccaaactcga

SEQ ID NO: 166912 - DNA, 55 bp, Artificial
  Synthetic oligonucleotide
gcttgctgtatcctttgtagtccttctaactatcaactggcaactttccctaatt

SEQ ID NO: 166913 - DNA, 55 bp, Artificial
  Synthetic oligonucleotide
gcttgtcaagcccgtctgcaattccgggaatgtttattttgggattgtgggcatc

SEQ ID NO: 166914 - DNA, 55 bp, Artificial
  Synthetic oligonucleotide
agctcgaatagattatcatagtcttcagagaatgatgtttctacagccttgcctg

SEQ ID NO: 166915 - DNA, 55 bp, Artificial
  Synthetic oligonucleotide
ggacagtaagaagacccactcctagaactcctaggcctcctactcctataccgcc

SEQ ID NO: 166916 - DNA, 55 bp, Artificial
  Synthetic oligonucleotide
ggagaacttatagttagaggctcttacacaatttatggctattataagctcccag

SEQ ID NO: 166917 - DNA, 55 bp, Artificial
  Synthetic oligonucleotide
atacactgaacgaagtggcgacatagacgataggttcagaaatgtgttcgacaga

SEQ ID NO: 166918 - DNA, 55 bp, Artificial
  Synthetic oligonucleotide
ggagcttaagataatgctctcagccgtgtcagatttaacagaatccatggaggcg

SEQ ID NO: 166919 - DNA, 55 bp, Artificial
  Synthetic oligonucleotide
gtcttcgtcataacccagaccacttatgtcaagataggactcgtcaattgagact

SEQ ID NO: 166920 - DNA, 55 bp, Artificial
  Synthetic oligonucleotide
agtcggccatgtgcgattttctcctaaagactatcgatacaaaccagaaggatac

SEQ ID NO: 166921 - DNA, 55 bp, Artificial
  Synthetic oligonucleotide
ggatgaatggttgttgtgtccctggagaaagacgaatatatgtaacagttgacgg

SEQ ID NO: 166922 - DNA, 56 bp, Artificial
  Synthetic oligonucleotide
ggtggggttatatacctcacctgggcttacttcatatagggatagaattgttgtag

SEQ ID NO: 166923 - DNA, 55 bp, Artificial
  Synthetic oligonucleotide
ggattgctcatgtctggttcactaactatttcaattagtggaactcccgccctgt

SEQ ID NO: 166924 - DNA, 55 bp, Artificial
  Synthetic oligonucleotide
ggcagaaatcgcacaagtttctggacttgcaagataaattttggcatctcttgtg

SEQ ID NO: 166925 - DNA, 55 bp, Artificial
  Synthetic oligonucleotide
ggcatatttgtgccaaggtcaagacgtgcatcagctaactacaatttaggatccg

SEQ ID NO: 166926 - DNA, 55 bp, Artificial
  Synthetic oligonucleotide
gtctccaggacgtttggataggtcaccaactactgctgtcttagtgtgagtgttg

SEQ ID NO: 166927 - DNA, 55 bp, Artificial
  Synthetic oligonucleotide
ggccactagcgtttatcacatatttggcctcatagctttcgccagtagagcaagt

SEQ ID NO: 166928 - DNA, 54 bp, Artificial
  Synthetic oligonucleotide
ggcctaagccttttcgccctatctacaatccttggttgggcctactacggagag

SEQ ID NO: 166929 - DNA, 55 bp, Artificial
  Synthetic oligonucleotide
ggcctaaggaatctagaagcttttcataggtcgtaaatatttcgtaggcgagctt

SEQ ID NO: 166930 - DNA, 55 bp, Artificial
  Synthetic oligonucleotide
ggcgacctctcttatggaaggctctcgtgcaaaagagagaagcacacttatcggt

SEQ ID NO: 166931 - DNA, 55 bp, Artificial
  Synthetic oligonucleotide
aagctttcctatatcatttgtagcgccggttataggatcagtcgatgcaactatc

SEQ ID NO: 166932 - DNA, 55 bp, Artificial
  Synthetic oligonucleotide
ccgaagtcttcacaccattcacaatcccgtacttgtctacatcttcccacgaaac

SEQ ID NO: 166933 - DNA, 60 bp, Artificial
  Synthetic oligonucleotide
gagtatgtccacgcatactccacattgtcagatagtctaactctggattagcacataacg

SEQ ID NO: 166934 - DNA, 55 bp, Artificial
  Synthetic oligonucleotide
ccgcgactgccaccctaattagcataagctctctcaactaataacgcatcgaagt

SEQ ID NO: 166935 - DNA, 55 bp, Artificial
  Synthetic oligonucleotide
tgtagttgggagggttatttgcgttgagattcttcgactcattacgttcgctcag

SEQ ID NO: 166936 - DNA, 54 bp, Artificial
  Synthetic oligonucleotide
ccgcttaaaagcctgtttacctcggtttgtacttgctggtagttatagcctgcc

SEQ ID NO: 166937 - DNA, 55 bp, Artificial
  Synthetic oligonucleotide
cataccttcagaaatcgtagtaataaacagggtaaatgcatactagtcacaaggc

SEQ ID NO: 166938 - DNA, 55 bp, Artificial
  Synthetic oligonucleotide
ccgggttctacaaataaaagacctctatcctgtgcattgttaagtccgtatgcag

SEQ ID NO: 166939 - DNA, 55 bp, Artificial
  Synthetic oligonucleotide
cagtgatgatttcagtggagctacaaccgaacaaaacagaactgatacaatgatc

SEQ ID NO: 166940 - DNA, 55 bp, Artificial
  Synthetic oligonucleotide
ccgttgacgtatgtgttgggtagtgcgtagaatgtgaagaatgtcgtcccactga

SEQ ID NO: 166941 - DNA, 55 bp, Artificial
  Synthetic oligonucleotide
tgaattcttctcgattaattccctgtatggatctagtgggtgaccagagatgtac

SEQ ID NO: 166942 - DNA, 55 bp, Artificial
  Synthetic oligonucleotide
cctatgattatttgccacactggtaaggtgcaaggaacgttgaaggctagtagta

SEQ ID NO: 166943 - DNA, 55 bp, Artificial
  Synthetic oligonucleotide
cctcatcttaatctcgacctcggtttaaacccactcaagcaaagggagagtctca

SEQ ID NO: 166944 - DNA, 54 bp, Artificial
  Synthetic oligonucleotide
atcgaaggtcccatacggttttaaagagagaccaaattgcgatggaccatattt

SEQ ID NO: 166945 - DNA, 55 bp, Artificial
  Synthetic oligonucleotide
cctgcaactgaattcgaagctgcaaagtttgacgaacctgtgggaatcctaaacc

SEQ ID NO: 166946 - DNA, 55 bp, Artificial
  Synthetic oligonucleotide
tctagctccccatctagattcattagataagaatggggcgtttgacatactttca

SEQ ID NO: 166947 - DNA, 55 bp, Artificial
  Synthetic oligonucleotide
caggctacacatccgctgtcattgagtctctatgcaggaagcatgacattcccta

SEQ ID NO: 166948 - DNA, 55 bp, Artificial
  Synthetic oligonucleotide
cctggctatcaaataggtaactggtcgcaagaaggcaatcctacaagtggcttgc

SEQ ID NO: 166949 - DNA, 55 bp, Artificial
  Synthetic oligonucleotide
acaaacaatcagttcacgtttacggcccagaagctaaaagcaacgaaagaactgc

SEQ ID NO: 166950 - DNA, 55 bp, Artificial
  Synthetic oligonucleotide
ccttgtagcagttggaagttagcttaccataaagaggctcaggcttgcccttcac

SEQ ID NO: 166951 - DNA, 55 bp, Artificial
  Synthetic oligonucleotide
tcgataatttcgtgtctaccacttaaagcttccaaaacttcttggtctgtcgatg

SEQ ID NO: 166952 - DNA, 55 bp, Artificial
  Synthetic oligonucleotide
cgaattttgggtgtaaatggcaagaaggatgaatgtattacttcggcttacactt

SEQ ID NO: 166953 - DNA, 55 bp, Artificial
  Synthetic oligonucleotide
cagcactacattcgatgactgaaaatgtcagcattcaatcgttgggtgcgagtag

SEQ ID NO: 166954 - DNA, 55 bp, Artificial
  Synthetic oligonucleotide
cagatcttgtaggccctggtatcaccactataacacaaaacacctggggagtcgg

SEQ ID NO: 166955 - DNA, 55 bp, Artificial
  Synthetic oligonucleotide
agtatatattttctaatagcgatttaacaaacaataattgcgagtatattttttc

SEQ ID NO: 166956 - DNA, 53 bp, Artificial
  Synthetic oligonucleotide
acacctataagaattgagtttctagttccaaggaacaactgtcctaaaagtgg

SEQ ID NO: 166957 - DNA, 55 bp, Artificial
  Synthetic oligonucleotide
cgccatattttgtatcgtttaaggatgatatagcctcatttaggttatctgtatc

SEQ ID NO: 166958 - DNA, 55 bp, Artificial
  Synthetic oligonucleotide
cgcccctaacacgtcatctcgaccgaaatgagtgaaacgaatggagcggagagat

SEQ ID NO: 166959 - DNA, 55 bp, Artificial
  Synthetic oligonucleotide
cgcctgatacggtaaatccaagtttgtggagacatacgcaacttaatgcctatgc

SEQ ID NO: 166960 - DNA, 54 bp, Artificial
  Synthetic oligonucleotide
aaaccaagggcttgtaagaagtagggcttcatacttttatcgctcacacggaaa

SEQ ID NO: 166961 - DNA, 55 bp, Artificial
  Synthetic oligonucleotide
ttgtgcctatggttttctgtggtgtctatcctggcgaaggcgaagagtacaacaa

SEQ ID NO: 166962 - DNA, 55 bp, Artificial
  Synthetic oligonucleotide
ttgtctacgctcgagatgacgtgttgagggcatcactctactcagtactatgacg

SEQ ID NO: 166963 - DNA, 55 bp, Artificial
  Synthetic oligonucleotide
cattagtatgtagtgtactgagcactaaatgtcctgttattgaggctctaagaga

SEQ ID NO: 166964 - DNA, 55 bp, Artificial
  Synthetic oligonucleotide
ttggataggggagcgtgatatggcatgcagataacagactttatccctctctcac

SEQ ID NO: 166965 - DNA, 55 bp, Artificial
  Synthetic oligonucleotide
ttgaaacgcctttgctatataatccacttgctgcagaatatagccaacaacccgt

SEQ ID NO: 166966 - DNA, 56 bp, Artificial
  Synthetic oligonucleotide
gccgttacaagtgctttaatcggtaacttgggagcagttataggtagtatcgtatc

SEQ ID NO: 166967 - DNA, 55 bp, Artificial
  Synthetic oligonucleotide
catatctctctacctcatcatcagtagcaattggtcccatatatcctaatacatg

SEQ ID NO: 166968 - DNA, 55 bp, Artificial
  Synthetic oligonucleotide
ccaattttcgtaagctagacgatgcgtgttacgacttttattccgtatcttcgtg

SEQ ID NO: 166969 - DNA, 55 bp, Artificial
  Synthetic oligonucleotide
ttcgcatttaactgtcaccaagctttgcgctgcttcgtctatgtctgcggctcca

SEQ ID NO: 166970 - DNA, 55 bp, Artificial
  Synthetic oligonucleotide
catatctattgtccaaactctatttcttgtacccctcaattaaaggcaaggatgg

SEQ ID NO: 166971 - DNA, 55 bp, Artificial
  Synthetic oligonucleotide
ccactgcgctgcttaaatttccgtaagatctacgagtagcgaagctttgcgtgtc

SEQ ID NO: 166972 - DNA, 53 bp, Artificial
  Synthetic oligonucleotide
ccagttgtgcctaaagttagtaagcgtagaagtggaaggttgctcgggaaacg

SEQ ID NO: 166973 - DNA, 55 bp, Artificial
  Synthetic oligonucleotide
ttccactaattgaaatagttagtgaaccagacatgagcaatcctgatgaagcgag

SEQ ID NO: 166974 - DNA, 55 bp, Artificial
  Synthetic oligonucleotide
ttccaaacgccgttagtgaatccgttacaatgtctgatacagtacctaaattttc

SEQ ID NO: 166975 - DNA, 55 bp, Artificial
  Synthetic oligonucleotide
cccagtgtgtctgataatagtagggttatactgccaagtattgctgagaacggta

SEQ ID NO: 166976 - DNA, 55 bp, Artificial
  Synthetic oligonucleotide
ccccaatcgaatggtctccaccttgcagtattgactacacttacatctggataag

SEQ ID NO: 166977 - DNA, 60 bp, Artificial
  Synthetic oligonucleotide
ggtagagttaataagtaatatctatgagatattacttgggcgagaagcaagagcaaaaga

SEQ ID NO: 166978 - DNA, 55 bp, Artificial
  Synthetic oligonucleotide
ttcacacgctcgacttttccttctgcgtcagtacttctctcaatcacaatcttgt

SEQ ID NO: 166979 - DNA, 55 bp, Artificial
  Synthetic oligonucleotide
ccccttgtaggttgggctgctatcaaaagatcgggattgtttgtaatctctcttg

SEQ ID NO: 166980 - DNA, 55 bp, Artificial
  Synthetic oligonucleotide
ttagtctatcgtatttactagccacgtaacattcgatttggtcggtcattccgac

SEQ ID NO: 166981 - DNA, 55 bp, Artificial
  Synthetic oligonucleotide
cccgatatgacatttacaatcacgctaacaaccggaattctagtgttaaacacag

SEQ ID NO: 166982 - DNA, 54 bp, Artificial
  Synthetic oligonucleotide
cccggaggaaaaccctcaacttatgctttatgggctaggagcctaccgagccta

SEQ ID NO: 166983 - DNA, 55 bp, Artificial
  Synthetic oligonucleotide
catataagctctatccatatttgagagatgccctttatgacaataaggactccga

SEQ ID NO: 166984 - DNA, 55 bp, Artificial
  Synthetic oligonucleotide
ttaaaaacggttgaggtaacattacgacagctgaattgtcagaacgaagcatata

SEQ ID NO: 166985 - DNA, 55 bp, Artificial
  Synthetic oligonucleotide
ccctggagtggacgtgggccatagaaaggacctgaccaagcaacaggacccgacc

SEQ ID NO: 166986 - DNA, 55 bp, Artificial
  Synthetic oligonucleotide
ccctgtagtcatctggcacaaggtctgttacagttggcctgtccttttcatcaga

SEQ ID NO: 166987 - DNA, 55 bp, Artificial
  Synthetic oligonucleotide
cccttatacgtcatcttgagcgaaacgtagcatagcggagtgtagtcgaaagatc

SEQ ID NO: 166988 - DNA, 57 bp, Artificial
  Synthetic oligonucleotide
gctactaaccgaagttatttcccttatacgtcatcttgagcgaaacgtagcatagcg

SEQ ID NO: 166989 - DNA, 55 bp, Artificial
  Synthetic oligonucleotide
cgtctagatgcatgtatcgactacatccgtaagactcctgttgttcgtgacgtac

SEQ ID NO: 166990 - DNA, 55 bp, Artificial
  Synthetic oligonucleotide
caccaattgcatgtacgcaccctttccaacaggaacatcgtctaatggagaatcc

SEQ ID NO: 166991 - DNA, 55 bp, Artificial
  Synthetic oligonucleotide
cgttcaaagatactcaggaagtagccgtgttgaaactgcagttaacgttagtaag

SEQ ID NO: 166992 - DNA, 55 bp, Artificial
  Synthetic oligonucleotide
ctaagagcatgcgaaaatgccatagattctgtaggttttatcgactctatgcctg

SEQ ID NO: 166993 - DNA, 55 bp, Artificial
  Synthetic oligonucleotide
cacattactgttataaaatcttggctgctccgcgataaactaacccagctattgg

SEQ ID NO: 166994 - DNA, 55 bp, Artificial
  Synthetic oligonucleotide
tattgatgggcgacaggagccttcctcttagcagggtcgtaaccatagttgaagc

SEQ ID NO: 166995 - DNA, 55 bp, Artificial
  Synthetic oligonucleotide
ctaggtcagctcctgcttccttgcccatagtgataccatcgcctcttatggaatc

SEQ ID NO: 166996 - DNA, 55 bp, Artificial
  Synthetic oligonucleotide
cacatgccaatcatagaagcaagtggtactgtaaatgatagtatgcctgaatggg

SEQ ID NO: 166997 - DNA, 55 bp, Artificial
  Synthetic oligonucleotide
ctatctcttcagctatggcaacagacctgtggaagcctccagtgcaacctatccc

SEQ ID NO: 166998 - DNA, 54 bp, Artificial
  Synthetic oligonucleotide
ctccataacttctacgtttgcttctaggaaactgtcgttttccacaaagtctac

SEQ ID NO: 166999 - DNA, 59 bp, Artificial
  Synthetic oligonucleotide
ggataaggtctgctcccacatacttgtcaagattttggctggtagcaagaaccgcaacc

SEQ ID NO: 167000 - DNA, 55 bp, Artificial
  Synthetic oligonucleotide
tatcccttattcctcgcgggacgcatacaacgtgtaaactggtctgccagttgcg

SEQ ID NO: 167001 - DNA, 55 bp, Artificial
  Synthetic oligonucleotide
caatgtattagccattgattgaacaccgaatcttgaaattgaaccatacgttggc

SEQ ID NO: 167002 - DNA, 55 bp, Artificial
  Synthetic oligonucleotide
actatcgtgatacccctccttataggctcactgccaacgaatttgtggattaccc

SEQ ID NO: 167003 - DNA, 55 bp, Artificial
  Synthetic oligonucleotide
caagtcccaactctcctcgggatttgaggtaaagctcctcagctcgctaggttcc

SEQ ID NO: 167004 - DNA, 55 bp, Artificial
  Synthetic oligonucleotide
caagacttattcgtggatattgggttgacgtaaaccatgtgggagcaaaggtaac

SEQ ID NO: 167005 - DNA, 55 bp, Artificial
  Synthetic oligonucleotide
ctctgccgattatctcgtcgttaaagactataattgctccgattggaatatcacc

SEQ ID NO: 167006 - DNA, 55 bp, Artificial
  Synthetic oligonucleotide
ctgctatatagcccataacagcacttacagcacaagtttctggacttgctagata

SEQ ID NO: 167007 - DNA, 55 bp, Artificial
  Synthetic oligonucleotide
agaaatacagactccctgctttctaaacattgagtcctttggtctatgagacatc

SEQ ID NO: 167008 - DNA, 55 bp, Artificial
  Synthetic oligonucleotide
ctggggttgactcgtcgcctaccatgtccattagctcatcacctgtggagtcttc

SEQ ID NO: 167009 - DNA, 55 bp, Artificial
  Synthetic oligonucleotide
tagagacaatccggtggtccttgttgaccaagacgcagcccacaaaggcccggtc

SEQ ID NO: 167010 - DNA, 57 bp, Artificial
  Synthetic oligonucleotide
acttttggggcaagcatcacgaaattcctaatgataggggcgaatatcttttgcagg

SEQ ID NO: 167011 - DNA, 57 bp, Artificial
  Synthetic oligonucleotide
ggacttgtagaaagacccaattcagttgcaacataacttgcaacaactacacccgga

SEQ ID NO: 167012 - DNA, 55 bp, Artificial
  Synthetic oligonucleotide
ctgtcaggagcagtagagccagtagctgcagtactaaccatcctcctatcaggaa

SEQ ID NO: 167013 - DNA, 54 bp, Artificial
  Synthetic oligonucleotide
attgtgtttccgtagaatagtaatccctctccctcattggaatttgttacgtag

SEQ ID NO: 167014 - DNA, 55 bp, Artificial
  Synthetic oligonucleotide
acagaagcggttggttaaagattctgctggggtggcatagagggtaaacttgatg

SEQ ID NO: 167015 - DNA, 55 bp, Artificial
  Synthetic oligonucleotide
cgggtcgctgcaggaaaaggtaagcgtacatttggtccaacatgaagcctggtca

SEQ ID NO: 167016 - DNA, 55 bp, Artificial
  Synthetic oligonucleotide
cactaccaaaacctctccaatgcgaggtgggaagagggagctcgattggcagtag

SEQ ID NO: 167017 - DNA, 55 bp, Artificial
  Synthetic oligonucleotide
cacggacttatatttgcgacacttatgggagtttacccgataggaataagctatg

SEQ ID NO: 167018 - DNA, 55 bp, Artificial
  Synthetic oligonucleotide
cacctgatttaaagccgtggggttctctaaacagatgacgctatttatgctgcgt

SEQ ID NO: 167019 - DNA, 50 bp, Artificial
  Synthetic oligonucleotide
cggaatacctaagggttgggaagaagttagactaggtgagtttataaatt

SEQ ID NO: 167020 - DNA, 54 bp, Artificial
  Synthetic oligonucleotide
cgtatcaagtccaacatctattgacataatacttacacccgttttttttagacc

SEQ ID NO: 167021 - DNA, 55 bp, Artificial
  Synthetic oligonucleotide
cggacattctattgcaggtaatagacaagttcctatttgtgctcctaccgcccct

SEQ ID NO: 167022 - DNA, 59 bp, Artificial
  Synthetic oligonucleotide
ggagtggggttctatgattttagaagcgagagattcaatatttattaagccagaactca

SEQ ID NO: 167023 - DNA, 55 bp, Artificial
  Synthetic oligonucleotide
cggggaatccgagggaaatgatggccgaaacttgagtctggccacaaagtcctac

SEQ ID NO: 167024 - DNA, 55 bp, Artificial
  Synthetic oligonucleotide
tccacgatgtcaactcccgattcacaagcgttgattatcgtagcgactccgtttc

SEQ ID NO: 167025 - DNA, 53 bp, Artificial
  Synthetic oligonucleotide
cgtcaagggtttcaacagggtccccttgctctggttctgtagtaattccttgg

SEQ ID NO: 167026 - DNA, 54 bp, Artificial
  Synthetic oligonucleotide
agcttcaatctgatgaggagtgtcttaactgcaggattgcaagcggatgcactt

SEQ ID NO: 167027 - DNA, 54 bp, Artificial
  Synthetic oligonucleotide
gctacacatttgtgattagggatccacagatgtttaccctcttgcaggtggcaa

SEQ ID NO: 167028 - DNA, 54 bp, Artificial
  Synthetic oligonucleotide
tagttgacatcccaccaaggggaagacttgtcccctcaacttgggcgactcccc

SEQ ID NO: 167029 - DNA, 52 bp, Artificial
  Synthetic oligonucleotide
ctcggaggtacaggtaacgaaaaggaccacaaaagacacccaactgttggta

SEQ ID NO: 167030 - DNA, 54 bp, Artificial
  Synthetic oligonucleotide
tcggtgcattgtatttcttagttagacttacagctgataagctatctgcaaaca

SEQ ID NO: 167031 - DNA, 54 bp, Artificial
  Synthetic oligonucleotide
gaatccttgtgagtcatcgtaccctcacgcaaatacgttatcgtctcaatccca

SEQ ID NO: 167032 - DNA, 54 bp, Artificial
  Synthetic oligonucleotide
aggaggcgcaccaacgactattatggcaggattgaattgcggaacaacttgtag

SEQ ID NO: 167033 - DNA, 59 bp, Artificial
  Synthetic oligonucleotide
ggagagatctcaagagatttctccactcgtgcactcggtcgaaatgagaaattttttag

SEQ ID NO: 167034 - DNA, 54 bp, Artificial
  Synthetic oligonucleotide
gcgcccactacgacgtagtttatgacacacaaggtggctctccacttccaactc

SEQ ID NO: 167035 - DNA, 54 bp, Artificial
  Synthetic oligonucleotide
tcctaccaaaacttgcaaggtcacttgttacgatgttggctggataaattatag

SEQ ID NO: 167036 - DNA, 53 bp, Artificial
  Synthetic oligonucleotide
ctttgagacgaactttagtgagtcctaagaacttaccgccgtgaacacggtgg

SEQ ID NO: 167037 - DNA, 54 bp, Artificial
  Synthetic oligonucleotide
gtgtaccgttaggtgccggaatatctactccggagtgaaatctggatatcttaa

SEQ ID NO: 167038 - DNA, 54 bp, Artificial
  Synthetic oligonucleotide
tactccaattaccacgacacacgtgaagtgaacagatagatttgtctctatcga

SEQ ID NO: 167039 - DNA, 54 bp, Artificial
  Synthetic oligonucleotide
tttgagagtaccgtgaatccgaataggcggataagcggacatccgatgtttaac

SEQ ID NO: 167040 - DNA, 54 bp, Artificial
  Synthetic oligonucleotide
aaaatcgcttgggagattaggattacaaacataggtcctgcaaggcctattatt

SEQ ID NO: 167041 - DNA, 54 bp, Artificial
  Synthetic oligonucleotide
catcttgcgttacgggacttacaactgtaaatacggctgaacattggaatacat

SEQ ID NO: 167042 - DNA, 54 bp, Artificial
  Synthetic oligonucleotide
gtaaatacggcacataagcctttctaactcttgtatcctcgacttattattaat

SEQ ID NO: 167043 - DNA, 54 bp, Artificial
  Synthetic oligonucleotide
aatggcaagagagcatttcgcaataatggagtcaatctttaaagcccatggcat

SEQ ID NO: 167044 - DNA, 55 bp, Artificial
  Synthetic oligonucleotide
aaaacttccatagggaaaggaatataagcatcgcccggcattgtaacactcaaaa

SEQ ID NO: 167045 - DNA, 54 bp, Artificial
  Synthetic oligonucleotide
cacccttggttgccacagtatagaaataggtgtagcctaggttgctaacaggaa

SEQ ID NO: 167046 - DNA, 54 bp, Artificial
  Synthetic oligonucleotide
acagtggtctctgcaagcaagtgccatagaaagttgcatcgactcaatccagtt

SEQ ID NO: 167047 - DNA, 54 bp, Artificial
  Synthetic oligonucleotide
agaagtaggactcggtgcagaccttacaaccttaaacgaagctcacgaatacgt

SEQ ID NO: 167048 - DNA, 54 bp, Artificial
  Synthetic oligonucleotide
gagcttcaataagaggagctagattaggacctagcgctttgcgactaaatggac

SEQ ID NO: 167049 - DNA, 54 bp, Artificial
  Synthetic oligonucleotide
gtggagaagctatcatggaagctctttctgaatcaggcgtaactccattagcta

SEQ ID NO: 167050 - DNA, 54 bp, Artificial
  Synthetic oligonucleotide
acgatgcttcacatctggagggttatcgggaaccttgttgtttcacaataaatc

SEQ ID NO: 167051 - DNA, 54 bp, Artificial
  Synthetic oligonucleotide
tgacctataaactagaaggtaagtacaatgtattgcgtcctagtgggaaattgg

SEQ ID NO: 167052 - DNA, 54 bp, Artificial
  Synthetic oligonucleotide
gatttacgggtcgggagtaggtattgtacttaataactacgcatcaactggtgg

SEQ ID NO: 167053 - DNA, 54 bp, Artificial
  Synthetic oligonucleotide
atcaggtgacaacgtaggactcctactaagaggtgtacaaagaaacgaaatctc

SEQ ID NO: 167054 - DNA, 54 bp, Artificial
  Synthetic oligonucleotide
ataacatcccaagtccggaaggtgcaatattagggtcggtaacttttacatatc

SEQ ID NO: 167055 - DNA, 54 bp, Artificial
  Synthetic oligonucleotide
ccaagtataatcgttaaaattccacctgtgaaaagtcccgacgatacaatccta

SEQ ID NO: 167056 - DNA, 54 bp, Artificial
  Synthetic oligonucleotide
gtgatattgcatcacaaacggtagtcaaaattggtccactcatagatgcgggat

SEQ ID NO: 167057 - DNA, 54 bp, Artificial
  Synthetic oligonucleotide
atagcaatcctgaaatttcacatggagatatgtggaagagaggaacgacctgac

SEQ ID NO: 167058 - DNA, 54 bp, Artificial
  Synthetic oligonucleotide
ggacaacgagccaccccatttctatcactcttgttatacccacgaatacacaag

SEQ ID NO: 167059 - DNA, 54 bp, Artificial
  Synthetic oligonucleotide
gcttactatcggctagagctaccattactcctagaaatttagatatggttagag

SEQ ID NO: 167060 - DNA, 53 bp, Artificial
  Synthetic oligonucleotide
accacagaagcaaccgcaagttggggatatccatccacctttacaagaacttc

SEQ ID NO: 167061 - DNA, 53 bp, Artificial
  Synthetic oligonucleotide
tggtcacgctatcggtgctgttcttttatatatggcaggtcttatcggtggca

SEQ ID NO: 167062 - DNA, 53 bp, Artificial
  Synthetic oligonucleotide
tgggtctctggtatgatctcgtcgcttattacgaagagcatggctcctcctgc

SEQ ID NO: 167063 - DNA, 53 bp, Artificial
  Synthetic oligonucleotide
tggggctgtatctttaggtcctgctttgattatatttggaagttgcgtatact

SEQ ID NO: 167064 - DNA, 53 bp, Artificial
  Synthetic oligonucleotide
tttttctcgagtagaagaggtaatgagtttaccaaacctccttgacgtgcaga

SEQ ID NO: 167065 - DNA, 53 bp, Artificial
  Synthetic oligonucleotide
tccgacccagcaaggccagacgccccatacaagtggatccacgatgctagagt

SEQ ID NO: 167066 - DNA, 57 bp, Artificial
  Synthetic oligonucleotide
tttgtcgggagaaaatgatcctatagaagccttttattcagattcaaataaatccta

SEQ ID NO: 167067 - DNA, 51 bp, Artificial
  Synthetic oligonucleotide
taagcggaactaaggttaggtgtatttcaaggtcgcctttaaaggacccaa

SEQ ID NO: 167068 - DNA, 53 bp, Artificial
  Synthetic oligonucleotide
tgtagaaaacactctaggattaaagtttaacatatcccatacagaagacttgg

SEQ ID NO: 167069 - DNA, 53 bp, Artificial
  Synthetic oligonucleotide
tgtagttgagaggttttgtgttgtagactattccgtttacaccatctctatgc

SEQ ID NO: 167070 - DNA, 53 bp, Artificial
  Synthetic oligonucleotide
aaagatggtagcgaagtaggaaaagacgccccacttccagaaggatggcatag

SEQ ID NO: 167071 - DNA, 53 bp, Artificial
  Synthetic oligonucleotide
tattttaagagagggaccgggttgttgttataatgacagcgtaatcggatttg

SEQ ID NO: 167072 - DNA, 53 bp, Artificial
  Synthetic oligonucleotide
agaatcaggtataaaaggagacgcccctgtggctataattaatttgtcgtagg

SEQ ID NO: 167073 - DNA, 53 bp, Artificial
  Synthetic oligonucleotide
ttaagatttgcaaccggagactatgaggatgcaaccgaacaatttaaggcggc

SEQ ID NO: 167074 - DNA, 53 bp, Artificial
  Synthetic oligonucleotide
cccaacacgtcatcttgagcgaagtgaaacgaagtcgaaagatctcataaagc

SEQ ID NO: 167075 - DNA, 53 bp, Artificial
  Synthetic oligonucleotide
cctaggagatccgacccaaccagtgctatggagaggaccgatcgttggtcaag

SEQ ID NO: 167076 - DNA, 53 bp, Artificial
  Synthetic oligonucleotide
attccatcaactgtatcatcacagctcggcaacagaatagtacaccaactgag

SEQ ID NO: 167077 - DNA, 55 bp, Artificial
  Synthetic oligonucleotide
ccacgttagatacagagtaacaccgatttttgtaggtaacgaacttgtcgcaaga

SEQ ID NO: 167078 - DNA, 53 bp, Artificial
  Synthetic oligonucleotide
cctagtaaggtatttaactacggcaacttaaaagtggatcgcatgaatctcta

SEQ ID NO: 167079 - DNA, 48 bp, Artificial
  Synthetic oligonucleotide
ctctaagggttttgcctaccccttggtttattcctttaaggattcccg

SEQ ID NO: 167080 - DNA, 53 bp, Artificial
  Synthetic oligonucleotide
gaagcaacaaggttcttgggcactctctatacaaaacatcgtgtaaagttgtg

SEQ ID NO: 167081 - DNA, 53 bp, Artificial
  Synthetic oligonucleotide
atgccctaattatgttaagggagaacttttaattggtggggtaggtgtcgcta

SEQ ID NO: 167082 - DNA, 53 bp, Artificial
  Synthetic oligonucleotide
gagtaagttttccacgagttaggcatatgggcataatttttcctatggagcca

SEQ ID NO: 167083 - DNA, 53 bp, Artificial
  Synthetic oligonucleotide
cacaagtggagcagtaactcccaatgtcaatgcttttccgattccttggagtg

SEQ ID NO: 167084 - DNA, 53 bp, Artificial
  Synthetic oligonucleotide
agtattctttatcatgagaccagcctttacctctcacttgatacaattttgct

SEQ ID NO: 167085 - DNA, 53 bp, Artificial
  Synthetic oligonucleotide
cgaagttataagagctatggctactgttaagtatgcttgtgctatggctaatt

SEQ ID NO: 167086 - DNA, 53 bp, Artificial
  Synthetic oligonucleotide
ccggagcaagaagtgctaatgccgccactaataacagaattctttgccatgcc

SEQ ID NO: 167087 - DNA, 53 bp, Artificial
  Synthetic oligonucleotide
ggtcttgtaaccttatcaatggtcttatcatcagttggtcttccagtagaagg

SEQ ID NO: 167088 - DNA, 55 bp, Artificial
  Synthetic oligonucleotide
ccctcggaggttatacccgttcgactccagagcctagcggctctttcgctcaggg

SEQ ID NO: 167089 - DNA, 51 bp, Artificial
  Synthetic oligonucleotide
ccgctaaacttagtttacgttatatatctcggttttatttccccgcacgcc

SEQ ID NO: 167090 - DNA, 52 bp, Artificial
  Synthetic oligonucleotide
tgtagacaacttgtccgaagaatctcgcggctctcattctactgtataacgg

SEQ ID NO: 167091 - DNA, 52 bp, Artificial
  Synthetic oligonucleotide
taataaagttgccttgggccatcacatgaacgatgcaatcgaaacgactttg

SEQ ID NO: 167092 - DNA, 52 bp, Artificial
  Synthetic oligonucleotide
taaccttcaaatagtgggtcaaatcctaggcccttagcacgaaggttgccaa

SEQ ID NO: 167093 - DNA, 52 bp, Artificial
  Synthetic oligonucleotide
gatctctattgaaatccaagtcctaaattagccggacaggcatctggcgact

SEQ ID NO: 167094 - DNA, 52 bp, Artificial
  Synthetic oligonucleotide
tggtatagcaaagagtaggtgcttggatcttgttctggccttacaccatagg

SEQ ID NO: 167095 - DNA, 52 bp, Artificial
  Synthetic oligonucleotide
tacggttatgagtttagtcatacactagaatcacaaatcggaggtcagttaa

SEQ ID NO: 167096 - DNA, 52 bp, Artificial
  Synthetic oligonucleotide
agaaccgaatgccaaccattctattgcgcttatttcttcgtctacatagggt

SEQ ID NO: 167097 - DNA, 52 bp, Artificial
  Synthetic oligonucleotide
atttactagctttacttagcggattgttgttcgcatcacacatcatcgcagt

SEQ ID NO: 167098 - DNA, 52 bp, Artificial
  Synthetic oligonucleotide
tgattgaaggggcatttaatgtgtcaacagatgtccctaaagaaattgggac

SEQ ID NO: 167099 - DNA, 55 bp, Artificial
  Synthetic oligonucleotide
ttggttggggaccaaactacgctgtctctaattggccggaacaccttgacacgcc

SEQ ID NO: 167100 - DNA, 52 bp, Artificial
  Synthetic oligonucleotide
taggtaggttttatacctacaagtccacaaaaacttgcaggttgtcttgtag

SEQ ID NO: 167101 - DNA, 52 bp, Artificial
  Synthetic oligonucleotide
aattacaaatgggcggctctgatcaatggtcaaatattttaggcggatacga

SEQ ID NO: 167102 - DNA, 52 bp, Artificial
  Synthetic oligonucleotide
tagtggtccagtgtttagttgaacccacttagtccacaaaagtccacttaac

SEQ ID NO: 167103 - DNA, 52 bp, Artificial
  Synthetic oligonucleotide
acggaaagctaactgatatagtaggtggaggttggctcgacttaatggctgg

SEQ ID NO: 167104 - DNA, 52 bp, Artificial
  Synthetic oligonucleotide
tctaattggaaaagaggttgctattcacgatggaattggagcatctgaccac

SEQ ID NO: 167105 - DNA, 52 bp, Artificial
  Synthetic oligonucleotide
ctacgtttcgctcaagatgacgtgttgggggggttctttgctgggtgctatg

SEQ ID NO: 167106 - DNA, 52 bp, Artificial
  Synthetic oligonucleotide
acacccccgactgctccttagcggagtgcgaaaccagaagtttgcctacggc

SEQ ID NO: 167107 - DNA, 52 bp, Artificial
  Synthetic oligonucleotide
tcgactgtgaaccgttccattggaaacgtgaggtcaactggttagtaaccgg

SEQ ID NO: 167108 - DNA, 52 bp, Artificial
  Synthetic oligonucleotide
caccctcgtcatttgccttaactaggttttcgtagagtcctattggtgagga

SEQ ID NO: 167109 - DNA, 52 bp, Artificial
  Synthetic oligonucleotide
cgattgtgcctgcttcggcgattcttcctatggcaaactcgctagtaaggcc

SEQ ID NO: 167110 - DNA, 58 bp, Artificial
  Synthetic oligonucleotide
ttcccgactatatatgttccaatgccaggagaatgtgccaattccgggccttcttccc

SEQ ID NO: 167111 - DNA, 52 bp, Artificial
  Synthetic oligonucleotide
ggggaactattgtggaccaggttatggcggaaaggattcagatgaaccagtt

SEQ ID NO: 167112 - DNA, 52 bp, Artificial
  Synthetic oligonucleotide
ggggccgtaactttggcgagagagtacatagaaagacgaattgcccactttt

SEQ ID NO: 167113 - DNA, 52 bp, Artificial
  Synthetic oligonucleotide
ttgtgccctcgtcatttgccgcacctacttgagagtgaagcataaattcgtg

SEQ ID NO: 167114 - DNA, 52 bp, Artificial
  Synthetic oligonucleotide
ttgtcgctaatggattatactcaggaggagttgaagttccaatctcagacat

SEQ ID NO: 167115 - DNA, 52 bp, Artificial
  Synthetic oligonucleotide
ttgtagcgtctccatacggctcaactgcttacaattactcatgtaagggctc

SEQ ID NO: 167116 - DNA, 52 bp, Artificial
  Synthetic oligonucleotide
catcctagatgccaaatctcgtggcgaagacataagaggtgcaaccctttat

SEQ ID NO: 167117 - DNA, 52 bp, Artificial
  Synthetic oligonucleotide
ggccactacgtcctagaagaatttaggggacctgcaggttacgaaagagatc

SEQ ID NO: 167118 - DNA, 52 bp, Artificial
  Synthetic oligonucleotide
ccagtcgtcggattcatcattacgattgaacctttctttccgtctagcaaat

SEQ ID NO: 167119 - DNA, 52 bp, Artificial
  Synthetic oligonucleotide
cccaagagcatattgccttatacaaggatagacaagactctcgtgcggacca

SEQ ID NO: 167120 - DNA, 52 bp, Artificial
  Synthetic oligonucleotide
aaaatcgaaggtcgcagaatattacaccaatccaaatggtgcgattgtggga

SEQ ID NO: 167121 - DNA, 57 bp, Artificial
  Synthetic oligonucleotide
tagggtttgtgttcccgcgttgcctcccattccggttacgattggcattgctgcgga

SEQ ID NO: 167122 - DNA, 56 bp, Artificial
  Synthetic oligonucleotide
ttatcataggggtgatggcgttgactcgtttttaagagttttgactacaataggta

SEQ ID NO: 167123 - DNA, 49 bp, Artificial
  Synthetic oligonucleotide
aaccccttccgttaccccctccgggcgaccactctcgtgggacaaggag

SEQ ID NO: 167124 - DNA, 47 bp, Artificial
  Synthetic oligonucleotide
ccctttaaaaccccttccgttaccccctccgggcgaccactctcgtg

SEQ ID NO: 167125 - DNA, 52 bp, Artificial
  Synthetic oligonucleotide
tgttcccactattgtctcgccaaaacactgagtcattatagatccattatcc

SEQ ID NO: 167126 - DNA, 52 bp, Artificial
  Synthetic oligonucleotide
atcgtcactgtgaattgattgtgggccgcctgtcaaaattattccgtccaaa

SEQ ID NO: 167127 - DNA, 52 bp, Artificial
  Synthetic oligonucleotide
ccctctcggctacacccccgactgctccttagcggagtgcgaaaccagaagt

SEQ ID NO: 167128 - DNA, 52 bp, Artificial
  Synthetic oligonucleotide
gccacaaacagttctcccatcctgtgtaataggctctagcttagcaggcgca

SEQ ID NO: 167129 - DNA, 52 bp, Artificial
  Synthetic oligonucleotide
gccatcgtagctggagtatttgtagttagcggaaagattcctagaaaatcta

SEQ ID NO: 167130 - DNA, 52 bp, Artificial
  Synthetic oligonucleotide
ttacctgagttatcagtaatagagttagtacttccatgtcccgaaaaagtaa

SEQ ID NO: 167131 - DNA, 52 bp, Artificial
  Synthetic oligonucleotide
atccaacgtttgggatagcgaattaaattgcgttattgttgccatgtcctcg

SEQ ID NO: 167132 - DNA, 52 bp, Artificial
  Synthetic oligonucleotide
ggttgaagtcttcggtgtagtttactccgtcttcttctaggatatcgacaag

SEQ ID NO: 167133 - DNA, 59 bp, Artificial
  Synthetic oligonucleotide
ttactcttacatagccatctggtctaaccattgggtctgtagcacttgggtcgtaagga

SEQ ID NO: 167134 - DNA, 51 bp, Artificial
  Synthetic oligonucleotide
catcgactttgtccgtttcttgaactatattatcctctggttctgtagtgg

SEQ ID NO: 167135 - DNA, 51 bp, Artificial
  Synthetic oligonucleotide
catgaagcctgctacggtttgggacggtttagatgaggctacaggaggata

SEQ ID NO: 167136 - DNA, 51 bp, Artificial
  Synthetic oligonucleotide
catgtcagatgctttgacaagccttataaccctaattggagctaaggcaag

SEQ ID NO: 167137 - DNA, 51 bp, Artificial
  Synthetic oligonucleotide
cctgtaatagggttatagacttgacctactagtctatccttggcgtttgcg

SEQ ID NO: 167138 - DNA, 51 bp, Artificial
  Synthetic oligonucleotide
cctgctgttaatgcatctgcgaagttttctccacttgcgataactgctgcg

SEQ ID NO: 167139 - DNA, 51 bp, Artificial
  Synthetic oligonucleotide
acacgttactgccccttaaactcattgtagtaatcttatatagccaaccgt

SEQ ID NO: 167140 - DNA, 51 bp, Artificial
  Synthetic oligonucleotide
acacctggtagacaccgtcctggtcatagaaggcgactccagcgaccccct

SEQ ID NO: 167141 - DNA, 51 bp, Artificial
  Synthetic oligonucleotide
cgacagggctatgtagcggatctcaattttgggttccgggtggagaaaaag

SEQ ID NO: 167142 - DNA, 46 bp, Artificial
  Synthetic oligonucleotide
catcgggtcccctttaaaaccccttccgttaccccctccgggcgac

SEQ ID NO: 167143 - DNA, 51 bp, Artificial
  Synthetic oligonucleotide
tctttatgccctgttattacttctatcactggtattggtgatgtcttaggc

SEQ ID NO: 167144 - DNA, 58 bp, Artificial
  Synthetic oligonucleotide
ttacacaaatgagaattgatggactaccttgttataggttatcggataggaatattta

SEQ ID NO: 167145 - DNA, 51 bp, Artificial
  Synthetic oligonucleotide
cattagaaatagaccgaatatttcactcttaggctcaccgacagtcttagt

SEQ ID NO: 167146 - DNA, 51 bp, Artificial
  Synthetic oligonucleotide
cctagtcccatctctgtcaatcctacccatatgctaaattgtaacatggca

SEQ ID NO: 167147 - DNA, 51 bp, Artificial
  Synthetic oligonucleotide
aaagataatttctgaggtaacagaatgtatcacagcgactatgattacgga

SEQ ID NO: 167148 - DNA, 51 bp, Artificial
  Synthetic oligonucleotide
tgataacatcgaccctgattctactctcgtaattaccactcacttggttag

SEQ ID NO: 167149 - DNA, 51 bp, Artificial
  Synthetic oligonucleotide
ttgacgacagttggtaggactttgtagcgtcgaagccctagccgaaatctt

SEQ ID NO: 167150 - DNA, 51 bp, Artificial
  Synthetic oligonucleotide
ccacaacgagttggaagtccgcagggtacttaacatttgcgttggcacggg

SEQ ID NO: 167151 - DNA, 51 bp, Artificial
  Synthetic oligonucleotide
ttcctttatcgcttccatacagctctgagcatattgatggatgtacagttc

SEQ ID NO: 167152 - DNA, 51 bp, Artificial
  Synthetic oligonucleotide
aatgaccgcaatgacaaagcagcccagtagggcttgcaaaaaccgggcccg

SEQ ID NO: 167153 - DNA, 51 bp, Artificial
  Synthetic oligonucleotide
cctagaatcggaatatccaagttaaattcgttgagaacttcctttgcgatg

SEQ ID NO: 167154 - DNA, 51 bp, Artificial
  Synthetic oligonucleotide
cctacccttccacgatgcttcgtatcgggtgggttcctgggaaccttgttg

SEQ ID NO: 167155 - DNA, 57 bp, Artificial
  Synthetic oligonucleotide
tgtgccaaactgaattccacttgctcctaaaacttccgcagcaaaaatttgcctacc

SEQ ID NO: 167156 - DNA, 51 bp, Artificial
  Synthetic oligonucleotide
cccctgtatttggtcccatgttgccgtcaaagatttgcttatggtccttac

SEQ ID NO: 167157 - DNA, 51 bp, Artificial
  Synthetic oligonucleotide
ccgttgtatgatattatgtatcgtgggatggataatagacaacagccactt

SEQ ID NO: 167158 - DNA, 51 bp, Artificial
  Synthetic oligonucleotide
aagtggacacccccatcctgggaaccgtggctggtggagccaatgcccgtc

SEQ ID NO: 167159 - DNA, 51 bp, Artificial
  Synthetic oligonucleotide
tgtagccgagaggggtctaaggggaggcgagtgagggaccctgcggaaggt

SEQ ID NO: 167160 - DNA, 51 bp, Artificial
  Synthetic oligonucleotide
gcccttgttggtctaaaggtaacaggccctaatatgagagctacaagtagg

SEQ ID NO: 167161 - DNA, 51 bp, Artificial
  Synthetic oligonucleotide
gcacagagcctttggtacgttttgccaataattgatggagtcgttgtgtta

SEQ ID NO: 167162 - DNA, 51 bp, Artificial
  Synthetic oligonucleotide
gttcgcataagtatcctgtttcaaggtctcgagcttttgtattacgtatct

SEQ ID NO: 167163 - DNA, 51 bp, Artificial
  Synthetic oligonucleotide
gctccgcaaagcaaggcgaagacgtagctgagcggcttagcccagaccact

SEQ ID NO: 167164 - DNA, 51 bp, Artificial
  Synthetic oligonucleotide
atcgttcccacttacaagtcacttcctaacacaggattaatcgtagagtat

SEQ ID NO: 167165 - DNA, 51 bp, Artificial
  Synthetic oligonucleotide
taatctaccaatgcgtcacttccacgcattcttagagccatatgaaccatc

SEQ ID NO: 167166 - DNA, 58 bp, Artificial
  Synthetic oligonucleotide
aaggctattgccacgtttgagtggtgggctgatgggtcgtgggggtttgccgatgcaa

SEQ ID NO: 167167 - DNA, 51 bp, Artificial
  Synthetic oligonucleotide
gcttaggggaaataaggggaaaatcgaacatattgtttgcaacggtcttga

SEQ ID NO: 167168 - DNA, 51 bp, Artificial
  Synthetic oligonucleotide
ggaatcactagaagagatttgtcatccacatctcactaaagctatccacca

SEQ ID NO: 167169 - DNA, 51 bp, Artificial
  Synthetic oligonucleotide
ctttatcatagaaaggtaccgcatctctaattaccttgtatgcaagcgaag

SEQ ID NO: 167170 - DNA, 51 bp, Artificial
  Synthetic oligonucleotide
ggctaacgaataatccatactatcaagtatatctcgtttctcacgcaccaa

SEQ ID NO: 167171 - DNA, 51 bp, Artificial
  Synthetic oligonucleotide
ctggtcttaaagttgttataaaggaagctagaccagaagctggattagatg

SEQ ID NO: 167172 - DNA, 51 bp, Artificial
  Synthetic oligonucleotide
gtctacaggtcattcgagtcttgctgatataaacgagcttgagtccttctc

SEQ ID NO: 167173 - DNA, 51 bp, Artificial
  Synthetic oligonucleotide
tagtctaggccagctgtatctgcctttgttctaacaaggtcgtaacgtatt

SEQ ID NO: 167174 - DNA, 51 bp, Artificial
  Synthetic oligonucleotide
actaaaggtaaagctattgcaaatagcatgtactcatcaggtgttgatatg

SEQ ID NO: 167175 - DNA, 51 bp, Artificial
  Synthetic oligonucleotide
gggcaccctcgtcgcctttgcagtgccagacccatctaactatgcttggcc

SEQ ID NO: 167176 - DNA, 51 bp, Artificial
  Synthetic oligonucleotide
gggcattgcataggtggaatgatatcttgtgaattagctcgagaactatta

SEQ ID NO: 167177 - DNA, 54 bp, Artificial
  Synthetic oligonucleotide
tgtaccaaaatacgaaaacaacaccgtataggacagaaattctatcctatacgg

SEQ ID NO: 167178 - DNA, 51 bp, Artificial
  Synthetic oligonucleotide
tatgaaggagatgcactttgtcttgtggttgcggagaatgataaggtcctt

SEQ ID NO: 167179 - DNA, 51 bp, Artificial
  Synthetic oligonucleotide
tatggtaacagattctaggtcgtaaacatcgacatcagcccttatagtcct

SEQ ID NO: 167180 - DNA, 51 bp, Artificial
  Synthetic oligonucleotide
aggatccttaatcttgtaataggcttgtaggtattcaactacttccgagcc

SEQ ID NO: 167181 - DNA, 51 bp, Artificial
  Synthetic oligonucleotide
tattcgttgaagccgcgtagcacctgtctgtcctttgagtgggcagcccta

SEQ ID NO: 167182 - DNA, 51 bp, Artificial
  Synthetic oligonucleotide
cgggttccgccgaagcttccgggctaagtcttctgtactcgtccgcccact

SEQ ID NO: 167183 - DNA, 51 bp, Artificial
  Synthetic oligonucleotide
cgtaattatctccaaccacaaccctcttgtacacatcaaaccccaactccc

SEQ ID NO: 167184 - DNA, 51 bp, Artificial
  Synthetic oligonucleotide
ggtcctgtcacataagccataagttgacttgattctattacttgaccaatg

SEQ ID NO: 167185 - DNA, 51 bp, Artificial
  Synthetic oligonucleotide
ctaagcccagtgtcgggccaagtaggaagtgggtccatggtgagcgaggct

SEQ ID NO: 167186 - DNA, 50 bp, Artificial
  Synthetic oligonucleotide
aggtccaaattgatctttgattagacctttgtacacttcagatcctgtcg

SEQ ID NO: 167187 - DNA, 50 bp, Artificial
  Synthetic oligonucleotide
aaccctcttgggcctggtagggtcagggcttattggggcccggtccctcc

SEQ ID NO: 167188 - DNA, 60 bp, Artificial
  Synthetic oligonucleotide
tgcataccagcttacatcgacacaattttcaagccccaaccagatctgttccatttgcca

SEQ ID NO: 167189 - DNA, 50 bp, Artificial
  Synthetic oligonucleotide
cccgagagcactccgaccgaatcgacgtctagcccggccggcgagacagt

SEQ ID NO: 167190 - DNA, 49 bp, Artificial
  Synthetic oligonucleotide
agctaagggctcgagagacctttaaccggggctttacccgggggcggac

SEQ ID NO: 167191 - DNA, 50 bp, Artificial
  Synthetic oligonucleotide
aaagctacttatcctgaaattggagccccaggctcaatggatatggaggg

SEQ ID NO: 167192 - DNA, 50 bp, Artificial
  Synthetic oligonucleotide
ggtctagaatttgcaaacggcataccaggcacagtaggaggagccatgac

SEQ ID NO: 167193 - DNA, 50 bp, Artificial
  Synthetic oligonucleotide
aaacaacgtccaacaagaaagttggagtgatagctacaaaagctaccgta

SEQ ID NO: 167194 - DNA, 50 bp, Artificial
  Synthetic oligonucleotide
agtattccaacaccttcacactgtattcgtctgcatcactcttcacagtg

SEQ ID NO: 167195 - DNA, 50 bp, Artificial
  Synthetic oligonucleotide
ggacccaagccatcctggccctattagaaggggcccacctcctcctgtct

SEQ ID NO: 167196 - DNA, 50 bp, Artificial
  Synthetic oligonucleotide
ggaggtgggccccttctaatagggccaggatggcttgggtccagacttcc

SEQ ID NO: 167197 - DNA, 50 bp, Artificial
  Synthetic oligonucleotide
ggtacagttggacaacctggggttgcaaaggacgctttaactgttgcggc

SEQ ID NO: 167198 - DNA, 50 bp, Artificial
  Synthetic oligonucleotide
tttaaggggccatgtggaagtagaccagctttcccccagtggccgtcgga

SEQ ID NO: 167199 - DNA, 60 bp, Artificial
  Synthetic oligonucleotide
tctttctagcgatgatatgctaatatgtgatgatgtaaagcctatagctatcgcaggagt

SEQ ID NO: 167200 - DNA, 50 bp, Artificial
  Synthetic oligonucleotide
ccaactagtccgccgctaggtctggtagggtgactccatggtcccgggcc

SEQ ID NO: 167201 - DNA, 50 bp, Artificial
  Synthetic oligonucleotide
gggaagtctggacccaagccatcctggccctattagaaggggcccacctc

SEQ ID NO: 167202 - DNA, 50 bp, Artificial
  Synthetic oligonucleotide
catttctctagcaggtcctgcttatgcgattccaatttccgcattatgtc

SEQ ID NO: 167203 - DNA, 50 bp, Artificial
  Synthetic oligonucleotide
gggaccctgcggaaggtcccttgggcctccccttaatacggagcagtcat

SEQ ID NO: 167204 - DNA, 50 bp, Artificial
  Synthetic oligonucleotide
gtagtgttgacttatgtgctagatctgctcttcgaagtggaagtggatta

SEQ ID NO: 167205 - DNA, 50 bp, Artificial
  Synthetic oligonucleotide
cggaggaagcccaaattccatgaacggcattcgtcccggtgcaggcacta

SEQ ID NO: 167206 - DNA, 50 bp, Artificial
  Synthetic oligonucleotide
cgctggcttcatagtagtggggttgccgcatccaggtcagaccggcagaa

SEQ ID NO: 167207 - DNA, 50 bp, Artificial
  Synthetic oligonucleotide
tcaagagctctgttattcccaatggagagtgtatacgaaagctatgttgc

SEQ ID NO: 167208 - DNA, 50 bp, Artificial
  Synthetic oligonucleotide
tcctctgtcggggagctgcagcctaccattcatccaaggtggccatggcc

SEQ ID NO: 167209 - DNA, 50 bp, Artificial
  Synthetic oligonucleotide
tcaacagctggtgtgttgtcgcagctccaagtgttggctgggcgaagaga

SEQ ID NO: 167210 - DNA, 57 bp, Artificial
  Synthetic oligonucleotide
aattttccttatacgtcatcttgagcgaaacgtagtgtagtcgaaagatctcatact

SEQ ID NO: 167211 - DNA, 50 bp, Artificial
  Synthetic oligonucleotide
ctaagggcaacaaactcttacggccaaaacggcaacccagcctatacaga

SEQ ID NO: 167212 - DNA, 50 bp, Artificial
  Synthetic oligonucleotide
acaattcacagtggagtatcctaaaatggaccaaagccttaatcttatag

SEQ ID NO: 167213 - DNA, 50 bp, Artificial
  Synthetic oligonucleotide
tctaaataattagcgaaagctatcgttccgtagaatttatctacatccct

SEQ ID NO: 167214 - DNA, 50 bp, Artificial
  Synthetic oligonucleotide
cctggtggctccaatcgtggatgctaggcgagggcgggtctatacgggcc

SEQ ID NO: 167215 - DNA, 50 bp, Artificial
  Synthetic oligonucleotide
tctcttcgcccagccaacacttggagctgcgacaacacaccagctgttga

SEQ ID NO: 167216 - DNA, 50 bp, Artificial
  Synthetic oligonucleotide
ctccgtcacccatactatacaaatgatatcctcctaattctctcgctctg

SEQ ID NO: 167217 - DNA, 50 bp, Artificial
  Synthetic oligonucleotide
acttacaggaccacttcgtgacagatttggaattatgttaagtcttgaac

SEQ ID NO: 167218 - DNA, 50 bp, Artificial
  Synthetic oligonucleotide
ctgggctatttggaagtggacacccccatcctgggaaccgtggctggtgg

SEQ ID NO: 167219 - DNA, 50 bp, Artificial
  Synthetic oligonucleotide
tacttgccagatgccccctaccatggacaaaggcagagtccggacctgga

SEQ ID NO: 167220 - DNA, 50 bp, Artificial
  Synthetic oligonucleotide
agaacttcgctgttctttgtgattagagaagtgtaaccgtcggagcagga

SEQ ID NO: 167221 - DNA, 59 bp, Artificial
  Synthetic oligonucleotide
cggtctagatatttaccttcgtactgtgtcatatcgactttgtcattgcccgctgttat

SEQ ID NO: 167222 - DNA, 50 bp, Artificial
  Synthetic oligonucleotide
taccccctccgggcgaccactctcgtgggacaaggagtttgtcttcggca

SEQ ID NO: 167223 - DNA, 49 bp, Artificial
  Synthetic oligonucleotide
tacccccacccggtttacactatcttggaccaccccttggagggtccct

SEQ ID NO: 167224 - DNA, 50 bp, Artificial
  Synthetic oligonucleotide
atggccggcctaatgaccgtatccacttaggcttggcagccgaccagaga

SEQ ID NO: 167225 - DNA, 50 bp, Artificial
  Synthetic oligonucleotide
tggtcggctgccaagcctaagtggatacggtcattaggccggccatcgct

SEQ ID NO: 167226 - DNA, 50 bp, Artificial
  Synthetic oligonucleotide
tacactgtccatggcagtgggcagctagtgaagcaggttccccaaccggg

SEQ ID NO: 167227 - DNA, 50 bp, Artificial
  Synthetic oligonucleotide
ccggatggagcaagcctggtctaggtcctgggcccaagtcaggtcttcta

SEQ ID NO: 167228 - DNA, 50 bp, Artificial
  Synthetic oligonucleotide
gttgaccggtagtcgtagtatcataaacgtgaactgacgcttcattatat

SEQ ID NO: 167229 - DNA, 50 bp, Artificial
  Synthetic oligonucleotide
gcagaggtggccttcacgataggccataccccctggaaccttggttcccg

SEQ ID NO: 167230 - DNA, 50 bp, Artificial
  Synthetic oligonucleotide
agaggacggcctgcaatcggctaccctgcctggtagtccccggatgatag

SEQ ID NO: 167231 - DNA, 48 bp, Artificial
  Synthetic oligonucleotide
ttaaaccccttccgttaccccctccgagcggcccctctcgggggacaa

SEQ ID NO: 167232 - DNA, 56 bp, Artificial
  Synthetic oligonucleotide
tactaaacgaagttgtttcacttatacgtcatctcgactgtaacgaagcgaagtag

SEQ ID NO: 167233 - DNA, 60 bp, Artificial
  Synthetic oligonucleotide
cggaaatgccgtgcccataactcattgttgcaagttctgccgctcctatatcggatacag

SEQ ID NO: 167234 - DNA, 50 bp, Artificial
  Synthetic oligonucleotide
ccctatcggggcaagaggaatgaaccggcctatgtccgccatgtagggga

SEQ ID NO: 167235 - DNA, 50 bp, Artificial
  Synthetic oligonucleotide
aactagcaacatttcctgttggaactacataagcgattgacttacaagcg

SEQ ID NO: 167236 - DNA, 60 bp, Artificial
  Synthetic oligonucleotide
tatacgagcctctgcatgatagtggagtgattcaaattcataagcttcccatacacctgg

SEQ ID NO: 167237 - DNA, 58 bp, Artificial
  Synthetic oligonucleotide
tatttgtcggacttaaaataactccacatataatgcgaagaagtgtagataaacacat

SEQ ID NO: 167238 - DNA, 58 bp, Artificial
  Synthetic oligonucleotide
accgtagccaaagccatgggtcgtgattatttgacaatcacatgccctttttattgcg

SEQ ID NO: 167239 - DNA, 60 bp, Artificial
  Synthetic oligonucleotide
tcacgaccaatggttctcgtaatggtgccgagcatggagtcgatgcccttatcgaagtaa

SEQ ID NO: 167240 - DNA, 58 bp, Artificial
  Synthetic oligonucleotide
cgcctggcgaatatgtgccaactccccctgtatttggtcccatgttgccgtcaaagat

SEQ ID NO: 167241 - DNA, 58 bp, Artificial
  Synthetic oligonucleotide
cagaaagaccaactactacaccattgcttctattaaggacagtggagcttggtctttc

SEQ ID NO: 167242 - DNA, 56 bp, Artificial
  Synthetic oligonucleotide
cgatattaagcaaaacaacgcccctaacacgtcatctcgaccgaaatgagtgaaac

SEQ ID NO: 167243 - DNA, 56 bp, Artificial
  Synthetic oligonucleotide
tcccgtagagtgtgaggggataagttaagagatagtgaaaagaaccttagagctta

SEQ ID NO: 167244 - DNA, 60 bp, Artificial
  Synthetic oligonucleotide
cgatatcataacgattggctatctcgttagactttttgtgcagattatctagtctttggt

SEQ ID NO: 167245 - DNA, 56 bp, Artificial
  Synthetic oligonucleotide
cgtctagcactaaaacagcgacttttcccttatacgtcatttcgaccgtagcgata

SEQ ID NO: 167246 - DNA, 60 bp, Artificial
  Synthetic oligonucleotide
tcgcagatcctgagggcgattcataaatgtcaggacgagtaaagccgccacctatccgag

SEQ ID NO: 167247 - DNA, 57 bp, Artificial
  Synthetic oligonucleotide
tcgctaggctatacgttgaacctacctatgagtaaaaaattgccccacaatattgta

SEQ ID NO: 167248 - DNA, 55 bp, Artificial
  Synthetic oligonucleotide
acaaccattggagtggaaaagattgtcctcacgaaatacgagcaggtaaaaatgg

SEQ ID NO: 167249 - DNA, 52 bp, Artificial
  Synthetic oligonucleotide
gacctcccctataggttccgtctgacaatttaaccctgtaaacctgtcctaa

SEQ ID NO: 167250 - DNA, 56 bp, Artificial
  Synthetic oligonucleotide
ccggctgatggaggcatttagcccgtcggcaaggtgagactttccgtggaggttct

SEQ ID NO: 167251 - DNA, 59 bp, Artificial
  Synthetic oligonucleotide
ctcccatccaaacacctacagtatagtaaggactatagcctattgaccagaaatccaca

SEQ ID NO: 167252 - DNA, 53 bp, Artificial
  Synthetic oligonucleotide
cttaaaatgtagtcgataatttcgtgtcttccacttaaagcttccaaaacttc

SEQ ID NO: 167253 - DNA, 59 bp, Artificial
  Synthetic oligonucleotide
ccggtgggcatattagtgcctgcctactgatggaggaggttagcccgtcggcgttatga

SEQ ID NO: 167254 - DNA, 59 bp, Artificial
  Synthetic oligonucleotide
cctggcctactgccctcattatttggtagggagatcccgtgacatctcctgcggcgaaa

SEQ ID NO: 167255 - DNA, 56 bp, Artificial
  Synthetic oligonucleotide
tccacaattcaggcaagggggccaagtatactagggcaaggctcccggtaaggctc

SEQ ID NO: 167256 - DNA, 53 bp, Artificial
  Synthetic oligonucleotide
ctagtttagttctaactcaggtattaggtacaactttgtggggtcacattaaa

SEQ ID NO: 167257 - DNA, 59 bp, Artificial
  Synthetic oligonucleotide
tagtgcggggatttgacttcgccaaaatattcgggctgtgcgtagacttcacgggcaga

SEQ ID NO: 167258 - DNA, 57 bp, Artificial
  Synthetic oligonucleotide
tacccaaaccatcctagggatccagccccaagcggcaatcgttaagtcaggctcagt

SEQ ID NO: 167259 - DNA, 59 bp, Artificial
  Synthetic oligonucleotide
tacagtctaagggtctgacagcccccttatctcgagcggagcgaagcgaagtcgagaga

SEQ ID NO: 167260 - DNA, 58 bp, Artificial
  Synthetic oligonucleotide
gtgcctgcctactgatggaggaggttagcccgtcggcgttatgagactttccgtggag

SEQ ID NO: 167261 - DNA, 56 bp, Artificial
  Synthetic oligonucleotide
agctcggcatgctttagggcgcttttccccttgtaggttagattgtggccacggcc

SEQ ID NO: 167262 - DNA, 57 bp, Artificial
  Synthetic oligonucleotide
agcttgcttataccgagtaatacttcataagttgtagaataaacagcaaactttgaa

SEQ ID NO: 167263 - DNA, 58 bp, Artificial
  Synthetic oligonucleotide
gtattggatcctatattgatattcggatttggatttgttaaaccaatgggcatcaaag

SEQ ID NO: 167264 - DNA, 59 bp, Artificial
  Synthetic oligonucleotide
agtcttctttaacagagaactcaacaaatctatatcgtatgatatgcacctcactagcc

SEQ ID NO: 167265 - DNA, 59 bp, Artificial
  Synthetic oligonucleotide
ggtctgacagcccccttatctcgagcggagcgaagcgaagtcgagagatctctggtagg

SEQ ID NO: 167266 - DNA, 55 bp, Artificial
  Synthetic oligonucleotide
ataagttactactatcgtagtctctctttggtctggactacttgtatttggttcg

SEQ ID NO: 167267 - DNA, 54 bp, Artificial
  Synthetic oligonucleotide
ctccatgtatgcccttttagtcgtaattacacttacttttaaatccgttgctaa

SEQ ID NO: 167268 - DNA, 59 bp, Artificial
  Synthetic oligonucleotide
agtatgcctaactatccaagtatgcctaactatccaagtatgcctaactatccaagtat

SEQ ID NO: 167269 - DNA, 58 bp, Artificial
  Synthetic oligonucleotide
gcatggaaaatccattggataagtcactaaatataagtgatggtaaacgactgttacc

SEQ ID NO: 167270 - DNA, 58 bp, Artificial
  Synthetic oligonucleotide
gtggagcttggtctttctatatctgactgatccctactaacaattggacttgtaaatg

SEQ ID NO: 167271 - DNA, 58 bp, Artificial
  Synthetic oligonucleotide
gagtcactagagatagggtttatgacaaagttgaatggataggtcatgaatttatact

SEQ ID NO: 167272 - DNA, 58 bp, Artificial
  Synthetic oligonucleotide
ggtcttgctaaacctatggcataggctagtcctatttcaactttatcgcaaactccag

SEQ ID NO: 167273 - DNA, 57 bp, Artificial
  Synthetic oligonucleotide
gaggtttacaaactgatgactcttgatttgaagggtaggtaaactcagacttgtcgc

SEQ ID NO: 167274 - DNA, 58 bp, Artificial
  Synthetic oligonucleotide
tagtcctacacgtttagcaagagaacccactcttgaggctatagcatcatgaattccc

SEQ ID NO: 167275 - DNA, 56 bp, Artificial
  Synthetic oligonucleotide
gtaatcggtggttacgagggcagtaagcctagaaaagttttggtagatcatagcta

SEQ ID NO: 167276 - DNA, 58 bp, Artificial
  Synthetic oligonucleotide
tttcataagctctggcggttgcaggatttccatatttaattaagctgtagtaaacatg

SEQ ID NO: 167277 - DNA, 57 bp, Artificial
  Synthetic oligonucleotide
tctagctattaaacgaaggtactttccttatacgtcatctcgactgtaacgaagtga

SEQ ID NO: 167278 - DNA, 59 bp, Artificial
  Synthetic oligonucleotide
gttcatctcgagatttaacgtgtatttctacgatcctatccatcttatattggttaaca

SEQ ID NO: 167279 - DNA, 58 bp, Artificial
  Synthetic oligonucleotide
tccgtcaggtaggctaatgtcttctagggtgtgaccacaaacaagctggctggcccta

SEQ ID NO: 167280 - DNA, 56 bp, Artificial
  Synthetic oligonucleotide
ctacgtttcgctcaagatgacgtgttggggagatttgttttgctaggtactaagac

SEQ ID NO: 167281 - DNA, 54 bp, Artificial
  Synthetic oligonucleotide
taggtcggccacgcacaagggaggggttttcgataagaccttccagactttgac

SEQ ID NO: 167282 - DNA, 57 bp, Artificial
  Synthetic oligonucleotide
ttatggcacccttgcttgcagagtaggcgctttccatgcttgagccttcttcgcccc

SEQ ID NO: 167283 - DNA, 57 bp, Artificial
  Synthetic oligonucleotide
tttgcttttgacagtagggaataatctccagcagttatctcttttggggactagcgc

SEQ ID NO: 167284 - DNA, 57 bp, Artificial
  Synthetic oligonucleotide
catgtcagttacattgctcgtatcaaacttatctccgaggttgattgtagtaacttg

SEQ ID NO: 167285 - DNA, 57 bp, Artificial
  Synthetic oligonucleotide
catctttaatttgaacgaatgactgtgcgatcattgtaatgccgatatttctactac

SEQ ID NO: 167286 - DNA, 57 bp, Artificial
  Synthetic oligonucleotide
catctgtatatgattcttctgaggaaagactaccatctaaaagtctagttaccccat

SEQ ID NO: 167287 - DNA, 57 bp, Artificial
  Synthetic oligonucleotide
gcccctggtttgggcagagtttaggccgtaggctgtggcaattcctgtctcgcttgc

SEQ ID NO: 167288 - DNA, 57 bp, Artificial
  Synthetic oligonucleotide
gcacaactcaccgaaatagaccgctttgcatcagatagttctattaacgtaatgatt

SEQ ID NO: 167289 - DNA, 55 bp, Artificial
  Synthetic oligonucleotide
agcgcatttggggcgctaccggcgtgagatcgctattgccagccctttccccggc

SEQ ID NO: 167290 - DNA, 55 bp, Artificial
  Synthetic oligonucleotide
ccgggtaggagtagctggaagaccgcacggtggctgggtttgaggaaagtgcaca

SEQ ID NO: 167291 - DNA, 55 bp, Artificial
  Synthetic oligonucleotide
ccggtcggaataggttgcattgaagcgtagcattattccgctttcccgtcaacgg

SEQ ID NO: 167292 - DNA, 55 bp, Artificial
  Synthetic oligonucleotide
cgacacaactcatgcgcctcccttaaggatgattggtagtaatctttgacgtccg

SEQ ID NO: 167293 - DNA, 55 bp, Artificial
  Synthetic oligonucleotide
gatgaagatctccacaacgtgagggtcgccattttctatcccgaacagatggtcg

SEQ ID NO: 167294 - DNA, 52 bp, Artificial
  Synthetic oligonucleotide
ttgaccccggggtacggcacaaccgggctcccaggcgcccctaccgcgcgat

SEQ ID NO: 167295 - DNA, 55 bp, Artificial
  Synthetic oligonucleotide
ttcgccgttgtacacctctatctgttccggcctcccctggtctgcgttccacgcc

SEQ ID NO: 167296 - DNA, 55 bp, Artificial
  Synthetic oligonucleotide
tcttcccgcactcagcgtatctttcctgcggtctcgccgcaagggaagtcgagcg

SEQ ID NO: 167297 - DNA, 55 bp, Artificial
  Synthetic oligonucleotide
tcctatgcgaagagggtgttttggtgtgtattcgcctgaacggtcccgaaccgtc

SEQ ID NO: 167298 - DNA, 55 bp, Artificial
  Synthetic oligonucleotide
gtgggtgcaggttctgcgcgggaggagtcagtacgcccgcctgccgaggagctca

SEQ ID NO: 167299 - DNA, 55 bp, Artificial
  Synthetic oligonucleotide
ggcggacctcttttcatgataacccgccacgcgctttctgtcaaggttaagagaa

SEQ ID NO: 167300 - DNA, 55 bp, Artificial
  Synthetic oligonucleotide
agacggctccggggcaaaaggcgcggtctgcacggctcgcgggtgactaggctgg

SEQ ID NO: 167301 - DNA, 55 bp, Artificial
  Synthetic oligonucleotide
gcgaaacttgagctagcagccgtttacaggacttaacaggtgatcggagggctcg

SEQ ID NO: 167302 - DNA, 55 bp, Artificial
  Synthetic oligonucleotide
gcacacaggagacaccctgagttatatccgtgagacaacaggggtgcgaaacgca

SEQ ID NO: 167303 - DNA, 55 bp, Artificial
  Synthetic oligonucleotide
acatgcgcactgaaccccaccactgacgcgaacgtgcactttcgtgaagcccgcg

SEQ ID NO: 167304 - DNA, 53 bp, Artificial
  Synthetic oligonucleotide
gggtgactcgacatgcaggcaaagggcaccattcgcagtccgatagccgcctt

SEQ ID NO: 167305 - DNA, 53 bp, Artificial
  Synthetic oligonucleotide
tattcccgccctttctcggtgagccggaggtgggcattgtcctgccggagcat

SEQ ID NO: 167306 - DNA, 53 bp, Artificial
  Synthetic oligonucleotide
tcctaggcaacacgtctacagatcgggtcacgggtgcgtccggtcaaccgaag

SEQ ID NO: 167307 - DNA, 53 bp, Artificial
  Synthetic oligonucleotide
gaccgcgtgaataacggggtcatctgccatgtgggacgtcttcctcgggtgct

SEQ ID NO: 167308 - DNA, 52 bp, Artificial
  Synthetic oligonucleotide
tcatctctgcacacaatcatccaccctcccacgtgtctcaacgaaggaaagg

SEQ ID NO: 167309 - DNA, 51 bp, Artificial
  Synthetic oligonucleotide
acccgagatcgcttcgataccccatgtcgtcatatggagaggcaggcgaaa

SEQ ID NO: 167310 - DNA, 50 bp, Artificial
  Synthetic oligonucleotide
gagtatacggtaaatgggaaccatagtgatgacagagcgaacagtcccat

SEQ ID NO: 167311 - DNA, 55 bp, Artificial
  Synthetic oligonucleotide
aggtagcgtgctcccgtaatgtatccggcgatggctggaaaggagtgaccggaat

SEQ ID NO: 167312 - DNA, 50 bp, Artificial
  Synthetic oligonucleotide
tgccgatagtatacggcaccccttccaacccctattcacattttggcagc

SEQ ID NO: 167313 - DNA, 50 bp, Artificial
  Synthetic oligonucleotide
agctcggttcgaggcggaatgtgcacgtggggttcgggtcggactgcaca

SEQ ID NO: 167314 - DNA, 50 bp, Artificial
  Synthetic oligonucleotide
agcggggcttcaaaggcaagattcgaattgtccgggcattcatggcgcct

SEQ ID NO: 167315 - DNA, 50 bp, Artificial
  Synthetic oligonucleotide
aacacgaaaggccgccatcccagggaagccgaagacctatccgccccgta

SEQ ID NO: 167316 - DNA, 50 bp, Artificial
  Synthetic oligonucleotide
aacagttgtcccggatgtgagcgcccgaacttgacccttcacgaccgtgg

SEQ ID NO: 167317 - DNA, 50 bp, Artificial
  Synthetic oligonucleotide
aacctcacgcctctcgccgtgagcgataccatttcggaggcccaagagtg

SEQ ID NO: 167318 - DNA, 50 bp, Artificial
  Synthetic oligonucleotide
aacgcccggaaagtggcgatgcgtaccctcggccttctgcaaccggagcg

SEQ ID NO: 167319 - DNA, 50 bp, Artificial
  Synthetic oligonucleotide
aacgctcaggtcgctgaatcgggtccattcgatgtccacggtgggatccc

SEQ ID NO: 167320 - DNA, 50 bp, Artificial
  Synthetic oligonucleotide
aacggacatacgagcgagagctgcgaggttacccaccgtaccatccgcgg

SEQ ID NO: 167321 - DNA, 50 bp, Artificial
  Synthetic oligonucleotide
aaggcgccatgaatgcccggacaatccgaatcttgcctttgaagccccgc

SEQ ID NO: 167322 - DNA, 55 bp, Artificial
  Synthetic oligonucleotide
agtacatatcgtgaggattcaagcccgttcgcacacttctacaatgcatcatcgg

SEQ ID NO: 167323 - DNA, 50 bp, Artificial
  Synthetic oligonucleotide
aaggctgacctggcatcggagagcgcatagtacccaacccagccccgcaa

SEQ ID NO: 167324 - DNA, 50 bp, Artificial
  Synthetic oligonucleotide
acaaggccttgcggcacaggcgtttccgggtaggagtagctggaagaccg

SEQ ID NO: 167325 - DNA, 50 bp, Artificial
  Synthetic oligonucleotide
acacctgtggttcgaggcggaatgtgcaccaagcctacccggttccctgc

SEQ ID NO: 167326 - DNA, 50 bp, Artificial
  Synthetic oligonucleotide
acacgccgtctccggtggtgcgctttcgaggcagatctccgctaggatgg

SEQ ID NO: 167327 - DNA, 50 bp, Artificial
  Synthetic oligonucleotide
acaggacggatcgccccgttgcgaacctcagccaccacgaggatgttgcg

SEQ ID NO: 167328 - DNA, 50 bp, Artificial
  Synthetic oligonucleotide
acatgcaccagacaaccctcggacatacagcccccgggcatcataccgca

SEQ ID NO: 167329 - DNA, 50 bp, Artificial
  Synthetic oligonucleotide
acattcttagcacgagaggacgaagcggtgggttaggtctgggcgcccgg

SEQ ID NO: 167330 - DNA, 50 bp, Artificial
  Synthetic oligonucleotide
accaatcgttcacaggagggattcgcaccctgggccctgttcccctgccg

SEQ ID NO: 167331 - DNA, 50 bp, Artificial
  Synthetic oligonucleotide
acccgagccgtgggtgcaggttctgcgcgggaggagtcagtacgcccgcc

SEQ ID NO: 167332 - DNA, 50 bp, Artificial
  Synthetic oligonucleotide
acgatcggcagaagggacatgtggagctcttcgacaaccgggaccacggc

SEQ ID NO: 167333 - DNA, 55 bp, Artificial
  Synthetic oligonucleotide
cagctagttagatttcccaccttggatcttggtctagatagcgtacagacgggtc

SEQ ID NO: 167334 - DNA, 50 bp, Artificial
  Synthetic oligonucleotide
acggaccccgctacatggacggcctcgcaaccgtaccacatcgtcctaat

SEQ ID NO: 167335 - DNA, 50 bp, Artificial
  Synthetic oligonucleotide
acggcctcacgcaagttcttgttgccgcccctcaggctgatgaccgtcac

SEQ ID NO: 167336 - DNA, 50 bp, Artificial
  Synthetic oligonucleotide
acggttgaggtctacttcgattgtgagccggactgccggacgcacccacg

SEQ ID NO: 167337 - DNA, 50 bp, Artificial
  Synthetic oligonucleotide
acgtcccgtcagcaggtccgcccttccccctgcaccgaaccttctgaacg

SEQ ID NO: 167338 - DNA, 50 bp, Artificial
  Synthetic oligonucleotide
acgtctggcacacggatctcggcggggagggaactggcgtccggcggtag

SEQ ID NO: 167339 - DNA, 50 bp, Artificial
  Synthetic oligonucleotide
acgtgggtgcgtccggcagtccggctcacaatcgaagtagacctcaaccg

SEQ ID NO: 167340 - DNA, 50 bp, Artificial
  Synthetic oligonucleotide
actcacgtggacgccgcgtatgagcttggccgcagggcaggcatacttgg

SEQ ID NO: 167341 - DNA, 50 bp, Artificial
  Synthetic oligonucleotide
actgcgaaatagcttgttcaagtctgccgggcccctccttccgcagggct

SEQ ID NO: 167342 - DNA, 50 bp, Artificial
  Synthetic oligonucleotide
agacaaccctcggacatacagcccccgggcatcataccgcaaccacacgt

SEQ ID NO: 167343 - DNA, 50 bp, Artificial
  Synthetic oligonucleotide
agatcaggtctagcggcaatagcaacacgggagccggtgcggttggtacg

SEQ ID NO: 167344 - DNA, 55 bp, Artificial
  Synthetic oligonucleotide
cagtcggcgcatcctcgtgcagccctcctccagcgatgaataccggatcttctgc

SEQ ID NO: 167345 - DNA, 50 bp, Artificial
  Synthetic oligonucleotide
agcagatgactctgcttgggacagccccgtctgcttgctaccgggttggg

SEQ ID NO: 167346 - DNA, 50 bp, Artificial
  Synthetic oligonucleotide
agccataggagtctacctcccctggacagtggtcctgccccggcacgaaa

SEQ ID NO: 167347 - DNA, 55 bp, Artificial
  Synthetic oligonucleotide
catcggggtccgtccacgtgtattcgccagcatactgcggccacatgccgtacga

SEQ ID NO: 167348 - DNA, 52 bp, Artificial
  Synthetic oligonucleotide
ccaagcccattacgaccggcccttataccggaggccggtccgaactctatac

SEQ ID NO: 167349 - DNA, 55 bp, Artificial
  Synthetic oligonucleotide
ccctgcggacctcgcgaaagacgcttaccaatgtgttgatgtactggtacaccga

SEQ ID NO: 167350 - DNA, 59 bp, Artificial
  Synthetic oligonucleotide
gtgacggatcgtgcctaaggaacatatcgtattatccgcgctacaccagggtatgtggg

SEQ ID NO: 167351 - DNA, 57 bp, Artificial
  Synthetic oligonucleotide
gttcgtgttaaacataacaaagtcagatgcaccacctaaggccgaaccattggcgga

SEQ ID NO: 167352 - DNA, 51 bp, Artificial
  Synthetic oligonucleotide
accgctgatttcgtggttgccgacctcatggaccttcagacggccccacat

SEQ ID NO: 167353 - DNA, 51 bp, Artificial
  Synthetic oligonucleotide
ctcgcaccccggaatgccgtcacgacccttgatgcaatctttcgttcggca

SEQ ID NO: 167354 - DNA, 50 bp, Artificial
  Synthetic oligonucleotide
ttgcgatgtcccgggagcagataccgctacgcacacagccgggagtctcc

SEQ ID NO: 167355 - DNA, 50 bp, Artificial
  Synthetic oligonucleotide
ccaccctaaatcctgcccgtcatcagtgcacgccccgtacgttaaccccc

SEQ ID NO: 167356 - DNA, 50 bp, Artificial
  Synthetic oligonucleotide
ccaccgcgagctacaatgacccgccaacctgggaaacgccgggctaggat

SEQ ID NO: 167357 - DNA, 50 bp, Artificial
  Synthetic oligonucleotide
ccacttgtccccggcctacgtcgtacacggctatgacggctatcgtggct

SEQ ID NO: 167358 - DNA, 50 bp, Artificial
  Synthetic oligonucleotide
catgcccattcgacacctggaggggaattccttcccggttaaggcggccg

SEQ ID NO: 167359 - DNA, 50 bp, Artificial
  Synthetic oligonucleotide
ccattcagtaccgcggggatggaaactgggtgtgcgaccctatgcgcgat

SEQ ID NO: 167360 - DNA, 50 bp, Artificial
  Synthetic oligonucleotide
cccacacttcgtcttatcaaggagcaacggccgcgggggaacccgacatc

SEQ ID NO: 167361 - DNA, 50 bp, Artificial
  Synthetic oligonucleotide
gcggggccaatttccgtgcaggatgttacgctgtcgccgcacgcacccta

SEQ ID NO: 167362 - DNA, 56 bp, Artificial
  Synthetic oligonucleotide
ctccattggggtgcctgggcacccgagtgcacgagcccagttagccgcgtacttag

SEQ ID NO: 167363 - DNA, 50 bp, Artificial
  Synthetic oligonucleotide
cccaccgacatcgtaccggaggcgaaacgcgatggcaacggcgaaagtgc

SEQ ID NO: 167364 - DNA, 50 bp, Artificial
  Synthetic oligonucleotide
cccacgtcggtttcgtggtggaagggggcattgtgaacttccgaccgtgc

SEQ ID NO: 167365 - DNA, 50 bp, Artificial
  Synthetic oligonucleotide
ccccacagagtgcttgtggtatcgttggcattgggcctcgtcgggcttgt

SEQ ID NO: 167366 - DNA, 50 bp, Artificial
  Synthetic oligonucleotide
ccccgccgacataaggcccacacttcgtcttatcaaggagcaacggccgc

SEQ ID NO: 167367 - DNA, 50 bp, Artificial
  Synthetic oligonucleotide
ctggtgtccatcctttggcgaggcgtaaccgtcgcacctgaacccccaac

SEQ ID NO: 167368 - DNA, 50 bp, Artificial
  Synthetic oligonucleotide
ccccgcggtgtatgccggcgctgtggagggcaaggggtttgacgaccctg

SEQ ID NO: 167369 - DNA, 50 bp, Artificial
  Synthetic oligonucleotide
tatgcccttcaccgtgcgttggcactgggcgcattatatggctcacctct

SEQ ID NO: 167370 - DNA, 50 bp, Artificial
  Synthetic oligonucleotide
cccgaggcaagccccctgccggttatgctaacgtggcctgggaggcggga

SEQ ID NO: 167371 - DNA, 50 bp, Artificial
  Synthetic oligonucleotide
ccggccccctttaggacgccggtgttcacactgactggccaccccacgac

SEQ ID NO: 167372 - DNA, 50 bp, Artificial
  Synthetic oligonucleotide
tcccgggagcagataccgctacgcacacagccgggagtctccacgatacg

SEQ ID NO: 167373 - DNA, 55 bp, Artificial
  Synthetic oligonucleotide
gcggcgtaatttgtaggcagggttggtactgggctatgacatgccggagggtccg

SEQ ID NO: 167374 - DNA, 50 bp, Artificial
  Synthetic oligonucleotide
aagggtgcttgcatggtgacatccggggacggcgcgttgcccctgtttcg

SEQ ID NO: 167375 - DNA, 50 bp, Artificial
  Synthetic oligonucleotide
aatcagtacggtgggagccccctgacgccccagtttgtcacgggacggtc

SEQ ID NO: 167376 - DNA, 50 bp, Artificial
  Synthetic oligonucleotide
aatcgttaaatggagcgtgtcgccaggcgtcgggacctgttgcccgaata

SEQ ID NO: 167377 - DNA, 50 bp, Artificial
  Synthetic oligonucleotide
aattgcaccgcgagcggagcaccctgatcagccatcgttatcctcccgtc

SEQ ID NO: 167378 - DNA, 50 bp, Artificial
  Synthetic oligonucleotide
acaatggcccgtcgtttgccgagccgcgataacacccggtcatagaacgc

SEQ ID NO: 167379 - DNA, 50 bp, Artificial
  Synthetic oligonucleotide
acaatgtggacagggcagcgctgaaacacacgcaccaacgagtggtcggg

SEQ ID NO: 167380 - DNA, 50 bp, Artificial
  Synthetic oligonucleotide
acaggtaggcagaggcttgggggcgctcctcagatacgccgtggggaagc

SEQ ID NO: 167381 - DNA, 50 bp, Artificial
  Synthetic oligonucleotide
acatggcggtttgggagccgcgaatccccattttgtcctcgatccgaccg

SEQ ID NO: 167382 - DNA, 50 bp, Artificial
  Synthetic oligonucleotide
accaaaggggtggattcgacgtcgtgtagcggaggtcatgcgacgacgcg

SEQ ID NO: 167383 - DNA, 50 bp, Artificial
  Synthetic oligonucleotide
accaactggcggaagcccgccaagtcaaacgggccgtcttaatccatcct

SEQ ID NO: 167384 - DNA, 55 bp, Artificial
  Synthetic oligonucleotide
gcggaaattgcgcgacattcagggccataccaagtaagtgagttcgtgcagctcc

SEQ ID NO: 167385 - DNA, 50 bp, Artificial
  Synthetic oligonucleotide
accaaggcccacccggcgttttacgtgcgggacattcaggcgttgcggga

SEQ ID NO: 167386 - DNA, 50 bp, Artificial
  Synthetic oligonucleotide
accaaggccgactaaggcccaagccttcttgaatcggagcccgcacttcc

SEQ ID NO: 167387 - DNA, 50 bp, Artificial
  Synthetic oligonucleotide
accatcatggtcgaaacccgtgcctgagggctcgtgaccggggacattgg

SEQ ID NO: 167388 - DNA, 50 bp, Artificial
  Synthetic oligonucleotide
accatccccactgcttccgcaaggcccggtcgttgggaaacgcgtcaatc

SEQ ID NO: 167389 - DNA, 50 bp, Artificial
  Synthetic oligonucleotide
acccccgacggttcgtccaatgtgttgacgttttccgggattgagcgcgg

SEQ ID NO: 167390 - DNA, 50 bp, Artificial
  Synthetic oligonucleotide
acccccgtccggtttttcgacccaggtggccgcgtaacatcaggcgttct

SEQ ID NO: 167391 - DNA, 50 bp, Artificial
  Synthetic oligonucleotide
accccttacgttccagcgcctcaatgatgcgagaggctgtgggcccggcc

SEQ ID NO: 167392 - DNA, 50 bp, Artificial
  Synthetic oligonucleotide
acccggcataacgtgggcatttaacctgaacgattgcacccacccgggcc

SEQ ID NO: 167393 - DNA, 50 bp, Artificial
  Synthetic oligonucleotide
acccggcgtgccccaaggaatattgagcctattggttggaagccggctcc

SEQ ID NO: 167394 - DNA, 50 bp, Artificial
  Synthetic oligonucleotide
acccggcttccgaatgggggaaccggaaatgccttcccttttgcgcgtcc

SEQ ID NO: 167395 - DNA, 52 bp, Artificial
  Synthetic oligonucleotide
cggggtggtgagaggcgccaggaaccgaatcacgttcccgtaaatcccggcc

SEQ ID NO: 167396 - DNA, 50 bp, Artificial
  Synthetic oligonucleotide
accctcggtactcccgcttccgccggtgctacaggcgatatcatggaggc

SEQ ID NO: 167397 - DNA, 50 bp, Artificial
  Synthetic oligonucleotide
accgattatcacggagtcccggggccttccgcaatagtcctctgcgcggg

SEQ ID NO: 167398 - DNA, 50 bp, Artificial
  Synthetic oligonucleotide
aaaactgacgcgttacgaggccgcgggggcaagacatccgggcgtttggt

SEQ ID NO: 167399 - DNA, 50 bp, Artificial
  Synthetic oligonucleotide
aaaccgtcgcgttagcctggctgattgcccatcccggagtcgtggcgatt

SEQ ID NO: 167400 - DNA, 50 bp, Artificial
  Synthetic oligonucleotide
aaacgactgctctccgtgaatcaacccggcgaccatctgaagccccggaa

SEQ ID NO: 167401 - DNA, 50 bp, Artificial
  Synthetic oligonucleotide
aaacgcgccccatgactcggacgggtccaagccccaatgtctgtcgactc

SEQ ID NO: 167402 - DNA, 50 bp, Artificial
  Synthetic oligonucleotide
aaacgctattgggagccgctgtcacccactcggtagtcttgcgccctgcc

SEQ ID NO: 167403 - DNA, 50 bp, Artificial
  Synthetic oligonucleotide
aaagggcgcgctttgggccaacgtacgaatcccgtaccctgacaccatgt

SEQ ID NO: 167404 - DNA, 50 bp, Artificial
  Synthetic oligonucleotide
aaaggtcgtggatccgctgactgccgcccacaatctcaccatagccctcg

SEQ ID NO: 167405 - DNA, 50 bp, Artificial
  Synthetic oligonucleotide
aaattcgtaaaggagcggtgggggctatcgctcactgggcagccgactct

SEQ ID NO: 167406 - DNA, 55 bp, Artificial
  Synthetic oligonucleotide
cgtcaactcgcgacacaacagtagacagcggcagaggtgtgacggtaggaatcga

SEQ ID NO: 167407 - DNA, 50 bp, Artificial
  Synthetic oligonucleotide
aacacaggagcccgaccgtcgaaatggtcgtatgccccgcctcgccggct

SEQ ID NO: 167408 - DNA, 50 bp, Artificial
  Synthetic oligonucleotide
aacacgtggagcggagcggggcaaagattgtcctaatcggcgatgagcga

SEQ ID NO: 167409 - DNA, 50 bp, Artificial
  Synthetic oligonucleotide
aacccggcccatttgtaacatcccgtgcacaatcacccccgggagcccca

SEQ ID NO: 167410 - DNA, 50 bp, Artificial
  Synthetic oligonucleotide
aaccgagcacgctaaacacgaccgacaccagtccccggcgtaagccatac

SEQ ID NO: 167411 - DNA, 50 bp, Artificial
  Synthetic oligonucleotide
aaccttggtcaccctcggtactcccgcttccgccggtgctacaggcgata

SEQ ID NO: 167412 - DNA, 50 bp, Artificial
  Synthetic oligonucleotide
aacgaaggtcgcctacccggcttccgaatgggggaaccggaaatgccttc

SEQ ID NO: 167413 - DNA, 50 bp, Artificial
  Synthetic oligonucleotide
aacggcccgtgagtaatgggcggtgcgggaaataaagagcgccagtccta

SEQ ID NO: 167414 - DNA, 50 bp, Artificial
  Synthetic oligonucleotide
aacggtctccagtaagacacgcccgcccgaatggaccactcgtgaagcca

SEQ ID NO: 167415 - DNA, 50 bp, Artificial
  Synthetic oligonucleotide
aacgtacggcctcaggaggctttacatgcccattcgacacctggagggga

SEQ ID NO: 167416 - DNA, 50 bp, Artificial
  Synthetic oligonucleotide
aactgtcccgaggggtgacacattccgtgctgccacccccaatgtcgagc

SEQ ID NO: 167417 - DNA, 55 bp, Artificial
  Synthetic oligonucleotide
ctatatgataccggagcacgggtccaagaaatcgcggatttacggaccgaggacg

SEQ ID NO: 167418 - DNA, 50 bp, Artificial
  Synthetic oligonucleotide
aagcacaggaatggtaaccgctagcgtggcaccggcgacgggtaggacca

SEQ ID NO: 167419 - DNA, 50 bp, Artificial
  Synthetic oligonucleotide
aaggagcggtgggggctatcgctcactgggcagccgactcttccgaccgt

SEQ ID NO: 167420 - DNA, 50 bp, Artificial
  Synthetic oligonucleotide
aaggcaggcacatccggcaagaccgtcccgtcatacgaaagggtgccgtt

SEQ ID NO: 167421 - DNA, 50 bp, Artificial
  Synthetic oligonucleotide
aaggctctttggcagggagaggtccgcgtttatgggggcttagccggcgt

SEQ ID NO: 167422 - DNA, 50 bp, Artificial
  Synthetic oligonucleotide
aagggcccgtatcagcctcccgacagttgatggcggagacctatggggca

SEQ ID NO: 167423 - DNA, 50 bp, Artificial
  Synthetic oligonucleotide
aagggtatgatggcataagcaccgtccagtggccgttggagcccggaccg

SEQ ID NO: 167424 - DNA, 50 bp, Artificial
  Synthetic oligonucleotide
aggtctggatgcgtggtgccccacccccttaacacgcgccaacaggtgcc

SEQ ID NO: 167425 - DNA, 50 bp, Artificial
  Synthetic oligonucleotide
agtggaaggtaaacggggcgggatgacgccaagggtggaggtctgctagc

SEQ ID NO: 167426 - DNA, 50 bp, Artificial
  Synthetic oligonucleotide
atccacaggccactcccccgttcgtccgatcagtcccggttatcggtagg

SEQ ID NO: 167427 - DNA, 50 bp, Artificial
  Synthetic oligonucleotide
atccgcaggctaccggtgtgggacagtcaataggccgtacagccgctagc

SEQ ID NO: 167428 - DNA, 55 bp, Artificial
  Synthetic oligonucleotide
ctcacccataaagatcgattgctacgtttcggtgcggagttggtgttcgcgatct

SEQ ID NO: 167429 - DNA, 50 bp, Artificial
  Synthetic oligonucleotide
atccgcttaggcatccgcaggctaccggtgtgggacagtcaataggccgt

SEQ ID NO: 167430 - DNA, 50 bp, Artificial
  Synthetic oligonucleotide
atcgaggatcctcctcccggctagcgccctccttggttgggtcgctgcaa

SEQ ID NO: 167431 - DNA, 50 bp, Artificial
  Synthetic oligonucleotide
atgcgggcaccacctcagcatcggtattcggccgcgaaagacgggccatt

SEQ ID NO: 167432 - DNA, 50 bp, Artificial
  Synthetic oligonucleotide
attgttgcggactcggggcgtggccgactctaccttcctgcctatgcgca

SEQ ID NO: 167433 - DNA, 50 bp, Artificial
  Synthetic oligonucleotide
caacccgaaggggagcagccggtgacctcttttgtcaagggtccggccct

SEQ ID NO: 167434 - DNA, 50 bp, Artificial
  Synthetic oligonucleotide
caaccggcccgtccaccatagatgggtccaaggctcgtcaactacgccca

SEQ ID NO: 167435 - DNA, 50 bp, Artificial
  Synthetic oligonucleotide
caagcagcgtctacgctctcgcctacacggatcccgcgttccccgcccag

SEQ ID NO: 167436 - DNA, 50 bp, Artificial
  Synthetic oligonucleotide
caagggtactcccaaaggggcgccgtaaatggcttgccacaagggtccaa

SEQ ID NO: 167437 - DNA, 50 bp, Artificial
  Synthetic oligonucleotide
caccaatgttccccgaggttgcgccaacgatgggcaaggttcgagcgaca

SEQ ID NO: 167438 - DNA, 50 bp, Artificial
  Synthetic oligonucleotide
cacggtccaactgcgatggtttcacgggaatgccgggttctgtttgggcc

SEQ ID NO: 167439 - DNA, 54 bp, Artificial
  Synthetic oligonucleotide
agacgtcgaccgaggggtccgccaatggcccgccggacttccaaatccggtgca

SEQ ID NO: 167440 - DNA, 50 bp, Artificial
  Synthetic oligonucleotide
cactactttgggagcggaagcgttgtttgcgcgtgttcgggcccagcttt

SEQ ID NO: 167441 - DNA, 50 bp, Artificial
  Synthetic oligonucleotide
caggacgaaccagactcccagcgactggagcccggatttcaggtggaggc

SEQ ID NO: 167442 - DNA, 50 bp, Artificial
  Synthetic oligonucleotide
caggagtggccgtcccagaagcgaccaaattacgtccgcgggtgctagga

SEQ ID NO: 167443 - DNA, 50 bp, Artificial
  Synthetic oligonucleotide
catcctcttagcaaccttggtcaccctcggtactcccgcttccgccggtg

SEQ ID NO: 167444 - DNA, 50 bp, Artificial
  Synthetic oligonucleotide
catcctcttcgtgcacgcgtggcgcccctagaaagacctccggaccgggc

SEQ ID NO: 167445 - DNA, 50 bp, Artificial
  Synthetic oligonucleotide
catcggtaccgaatggaaggtccgaatggaaggtcggagcggtcaggccc

SEQ ID NO: 167446 - DNA, 50 bp, Artificial
  Synthetic oligonucleotide
accggaattggggcactctggaaacagaggaggcctgatgccatggtgcg

SEQ ID NO: 167447 - DNA, 50 bp, Artificial
  Synthetic oligonucleotide
accggtatggcccgaacgtcacgatagcgcgtggggtcttcaagggatcg

SEQ ID NO: 167448 - DNA, 50 bp, Artificial
  Synthetic oligonucleotide
accgtcggcactcggtccgttaccgcgtcccgtactaccctctgctttcg

SEQ ID NO: 167449 - DNA, 50 bp, Artificial
  Synthetic oligonucleotide
accgtgaccctgcgcacggtatcacctcccctccgtcgcctccccacagt

SEQ ID NO: 167450 - DNA, 55 bp, Artificial
  Synthetic oligonucleotide
acttgcgacgagggaagattatacaaggttatgtcacgcatagacgcaaaccggc

SEQ ID NO: 167451 - DNA, 50 bp, Artificial
  Synthetic oligonucleotide
acggcaaacccgtgtccgagacgctgtaacacagtggcgaggtccacgag

SEQ ID NO: 167452 - DNA, 50 bp, Artificial
  Synthetic oligonucleotide
acggcctctagtgaagcggatccctctgggagtcaagctgcccgggctaa

SEQ ID NO: 167453 - DNA, 50 bp, Artificial
  Synthetic oligonucleotide
acgtcgaccgtttgccaatccatggtatccaccggtttaaccgcgatgtc

SEQ ID NO: 167454 - DNA, 50 bp, Artificial
  Synthetic oligonucleotide
actgcacgacctttgccgcggtcacgttggacgtcaacagggcggtgaca

SEQ ID NO: 167455 - DNA, 50 bp, Artificial
  Synthetic oligonucleotide
actgcttccgcaaggcccggtcgttgggaaacgcgtcaatcggagccccc

SEQ ID NO: 167456 - DNA, 50 bp, Artificial
  Synthetic oligonucleotide
agagggaacctcgtgagggggcacatccgaaagcggggaaacaagtgggc

SEQ ID NO: 167457 - DNA, 50 bp, Artificial
  Synthetic oligonucleotide
agcaccagagggacctgcgggggaccagtacgcaactaccccgggaaagg

SEQ ID NO: 167458 - DNA, 50 bp, Artificial
  Synthetic oligonucleotide
agccctcggtccgttgacccgctcgctggatccgtgatagcgtcgtgaca

SEQ ID NO: 167459 - DNA, 50 bp, Artificial
  Synthetic oligonucleotide
agcctggacggagggagtcctccttgacgccaagataggtgtgtaggcgc

SEQ ID NO: 167460 - DNA, 50 bp, Artificial
  Synthetic oligonucleotide
agcgcacgggggtgccagtgtacgacctctacggaaagaaccgcgatgcc

SEQ ID NO: 167461 - DNA, 60 bp, Artificial
  Synthetic oligonucleotide
catcagttcccggaccccaccgactttatagcgcattgtgcagacatcgagcattgggta

SEQ ID NO: 167462 - DNA, 55 bp, Artificial
  Synthetic oligonucleotide
gccgctgcatgcgacgttttcggatgtcatacccgccccacgccgactttccttc

SEQ ID NO: 167463 - DNA, 50 bp, Artificial
  Synthetic oligonucleotide
agcgtggcatacttccggatggtctcgaggtgaggctccgtaccggtctc

SEQ ID NO: 167464 - DNA, 50 bp, Artificial
  Synthetic oligonucleotide
aggccccacccttgtcatgtctcgacgtccaacgtgattccccatgggag

SEQ ID NO: 167465 - DNA, 50 bp, Artificial
  Synthetic oligonucleotide
aggctcaatgatccggtgaccccgggaagccactcccatgccctggcgta

SEQ ID NO: 167466 - DNA, 50 bp, Artificial
  Synthetic oligonucleotide
agggacccaactgcacgacctttgccgcggtcacgttggacgtcaacagg

SEQ ID NO: 167467 - DNA, 50 bp, Artificial
  Synthetic oligonucleotide
agggagggaatactaacgccctggttcgggagccttcgccgtggcaaggg

SEQ ID NO: 167468 - DNA, 50 bp, Artificial
  Synthetic oligonucleotide
agggctacaggggacgggcgattggttgcgctgcccacgacagaccaaca

SEQ ID NO: 167469 - DNA, 50 bp, Artificial
  Synthetic oligonucleotide
aggggatccctccttctgaatcggacattccggttccccgtcaagccgcg

SEQ ID NO: 167470 - DNA, 55 bp, Artificial
  Synthetic oligonucleotide
ctcccagtagtccttgccacgcttacggatcatttccgtgatctccctctcctgg

SEQ ID NO: 167471 - DNA, 55 bp, Artificial
  Synthetic oligonucleotide
accgatctggcttacaggccgatggtcccgctctctgtggtcgcaccccgcaatt

SEQ ID NO: 167472 - DNA, 55 bp, Artificial
  Synthetic oligonucleotide
gccagcagttttgtaggctatcaagtctggctagggaccgatacctggggtgtcg

SEQ ID NO: 167473 - DNA, 55 bp, Artificial
  Synthetic oligonucleotide
gacgtcaggggaatcagcactttccaccccaacgccattaaatggtcaggacgga

SEQ ID NO: 167474 - DNA, 55 bp, Artificial
  Synthetic oligonucleotide
ctccctgcagcggcttttcccgcaatgtcttctgggttctgatgcccaatgggcc

SEQ ID NO: 167475 - DNA, 55 bp, Artificial
  Synthetic oligonucleotide
ctgcgttacaagttcgtccgtccggatgtggaagccaccaaagtcaatactggaa

SEQ ID NO: 167476 - DNA, 55 bp, Artificial
  Synthetic oligonucleotide
accgtgccgcttgaatctcttcgggctggggagaaaggctgcccctaacatattc

SEQ ID NO: 167477 - DNA, 53 bp, Artificial
  Synthetic oligonucleotide
acgccgtccccactcaccctgtcagcaacgttagttccgaaccgtggaactaa

SEQ ID NO: 167478 - DNA, 55 bp, Artificial
  Synthetic oligonucleotide
catctcttaacagatcttacttcgatcttaggttcatgctcaaaacagggtcaag

SEQ ID NO: 167479 - DNA, 54 bp, Artificial
  Synthetic oligonucleotide
taacgcgctaacggccgtccacccgccaaggggtggagacattggatcccgtcg

SEQ ID NO: 167480 - DNA, 55 bp, Artificial
  Synthetic oligonucleotide
ccacacgagtccttcaatatactcttcggtccccgtgcgaaactcggccatgggg

SEQ ID NO: 167481 - DNA, 55 bp, Artificial
  Synthetic oligonucleotide
ccaggtaaatcttggtgtatgctgcggtatgacgcgaacccgttactgcgggcgg

SEQ ID NO: 167482 - DNA, 55 bp, Artificial
  Synthetic oligonucleotide
cccaattgtccatcgccggcccaactgggagatgtcacatcccatatagtttccg

SEQ ID NO: 167483 - DNA, 55 bp, Artificial
  Synthetic oligonucleotide
cacagttgtcgtgaatgcggtgtgcataagcccataacggccgaccatagcggtc

SEQ ID NO: 167484 - DNA, 53 bp, Artificial
  Synthetic oligonucleotide
cccaccggtcggacgttggaacggggtgacattaatgcgataaggacggccca

SEQ ID NO: 167485 - DNA, 55 bp, Artificial
  Synthetic oligonucleotide
attcgcgtaatggcctatggctcgatcacccgccaaccgctcacaccggaactcg

SEQ ID NO: 167486 - DNA, 55 bp, Artificial
  Synthetic oligonucleotide
attaaccgtggatgcgaccctcagtccgccatgccgttgcgagtgcctgcagggt

SEQ ID NO: 167487 - DNA, 53 bp, Artificial
  Synthetic oligonucleotide
ccggcggcaagcttacttgaccgtcgggatttatttcggccgacaagaggacc

SEQ ID NO: 167488 - DNA, 55 bp, Artificial
  Synthetic oligonucleotide
ccgtgagtgatccgggaccccttcggttacattttggctgagtgattgcgtcgcg

SEQ ID NO: 167489 - DNA, 53 bp, Artificial
  Synthetic oligonucleotide
ccgttatttcgtcgagttaacgtaatccgatactaacgtgtaggccaagtcac

SEQ ID NO: 167490 - DNA, 60 bp, Artificial
  Synthetic oligonucleotide
aacgagggtcggcacaagacctacggagtgcgtagatgtcatcatgtcacgcggttcgag

SEQ ID NO: 167491 - DNA, 55 bp, Artificial
  Synthetic oligonucleotide
cctgacctcgatcgcaacaaccctcagggcaaaggagtggacggcagagtgggag

SEQ ID NO: 167492 - DNA, 54 bp, Artificial
  Synthetic oligonucleotide
agggtgagacgcgcttgatttgggttttcgtaacgtcgtggccgaatagcgagg

SEQ ID NO: 167493 - DNA, 55 bp, Artificial
  Synthetic oligonucleotide
cctgccgatgtgtgtacgtatcgtagcatcacggtgtcacagccaccatccgagt

SEQ ID NO: 167494 - DNA, 55 bp, Artificial
  Synthetic oligonucleotide
cgacccgtctagcgaaagtaacaatcgtaggaatcagactttgtgcgaggagacg

SEQ ID NO: 167495 - DNA, 55 bp, Artificial
  Synthetic oligonucleotide
cgcttggagacggtgaacgcagcctacacgtcccaggagtgcccgcagtgcgatt

SEQ ID NO: 167496 - DNA, 55 bp, Artificial
  Synthetic oligonucleotide
cggaaagataccaggattgcgagggattcccatgactttaaccgatgtcttggcc

SEQ ID NO: 167497 - DNA, 54 bp, Artificial
  Synthetic oligonucleotide
cggacgcatagaagtaaagagtacggtgggacaaggtacgcgatttaccctgtg

SEQ ID NO: 167498 - DNA, 55 bp, Artificial
  Synthetic oligonucleotide
cgggctatcccgacatgtatgccctctggcgctttgccgaggccacagggatgaa

SEQ ID NO: 167499 - DNA, 54 bp, Artificial
  Synthetic oligonucleotide
ggcgtaccctcttcggtgtaccggtgggtgtggttaagtataagctgccagacg

SEQ ID NO: 167500 - DNA, 55 bp, Artificial
  Synthetic oligonucleotide
ggcgtggagagtggcagccagacctatacggtgtaccattcgtgcccgtcgtacc

SEQ ID NO: 167501 - DNA, 58 bp, Artificial
  Synthetic oligonucleotide
agtgtcacactatctctgtgcctattcgtaaagacgagcgcaaaagcctcccttttcg

SEQ ID NO: 167502 - DNA, 55 bp, Artificial
  Synthetic oligonucleotide
gggtgatctacggattccctcattaataactccatctcgggagttacgacgggat

SEQ ID NO: 167503 - DNA, 55 bp, Artificial
  Synthetic oligonucleotide
ggtaggtaaggatagccgcggtgcagctaactacaccgttattacgatagttgtg

SEQ ID NO: 167504 - DNA, 53 bp, Artificial
  Synthetic oligonucleotide
ggtgacctggcggttaaaacctatcgcgaattagtccatgccccgggattttg

SEQ ID NO: 167505 - DNA, 55 bp, Artificial
  Synthetic oligonucleotide
gtcgtcgattgaattttgtcatctggccggattaaactacgtcagttgttccccg

SEQ ID NO: 167506 - DNA, 55 bp, Artificial
  Synthetic oligonucleotide
gtggaagtagtgtcgaattggattgcagaaacctaagctggatcgagcctggtgg

SEQ ID NO: 167507 - DNA, 55 bp, Artificial
  Synthetic oligonucleotide
aaggcgcaagcggtccatgactcgacgggcggcctcaattccgcctttaacccca

SEQ ID NO: 167508 - DNA, 55 bp, Artificial
  Synthetic oligonucleotide
gttgccgacctcatggaccttcagacggccccacatgcggttaagcgggcccaat

SEQ ID NO: 167509 - DNA, 55 bp, Artificial
  Synthetic oligonucleotide
gttggcgtagccagtctcgctcgtcaaaattgtggacgtgactgaagtcgtaacc

SEQ ID NO: 167510 - DNA, 55 bp, Artificial
  Synthetic oligonucleotide
tatggccatccaccagtaattgggtcggcatacggtttggatactcccttaagcc

SEQ ID NO: 167511 - DNA, 55 bp, Artificial
  Synthetic oligonucleotide
tcacgtcgacccagcgctgactccgccgcaggatgaaagtcacctccgcgtggtt

SEQ ID NO: 167512 - DNA, 57 bp, Artificial
  Synthetic oligonucleotide
ataccaaagactatagccaaggatatgtggccgggtgggcgaatggcgatccgaaaa

SEQ ID NO: 167513 - DNA, 55 bp, Artificial
  Synthetic oligonucleotide
tcgcatttgcctaatcataccattggctacaagcatccgttgagcctctcgtacg

SEQ ID NO: 167514 - DNA, 55 bp, Artificial
  Synthetic oligonucleotide
tcggaggcttcgaatgtccatagcgcaccttcctaagcgatttcgccattataac

SEQ ID NO: 167515 - DNA, 55 bp, Artificial
  Synthetic oligonucleotide
tgacccgctcgctggatccgtgatagcgtcgtgacagacaacggggtctggccat

SEQ ID NO: 167516 - DNA, 55 bp, Artificial
  Synthetic oligonucleotide
tgccaagtgccccgcttgaagcctgacccacttgggctactcccgagttcggcga

SEQ ID NO: 167517 - DNA, 54 bp, Artificial
  Synthetic oligonucleotide
tgtccaacctcgttcccaggtatatgaggggcttgaccgctttaacaccctggg

SEQ ID NO: 167518 - DNA, 55 bp, Artificial
  Synthetic oligonucleotide
ttgcggcctcatcgcgtttacgctgtacctcccctaggcggcgttgtagcgtctc

SEQ ID NO: 167519 - DNA, 55 bp, Artificial
  Synthetic oligonucleotide
ttggatcgaaccgtccggggcccactcgcctagccagagttcagacgcgtcccaa

SEQ ID NO: 167520 - DNA, 55 bp, Artificial
  Synthetic oligonucleotide
gctgtcgatttgggttcgatagatataagattcttacgcgaacgcttacacaagc

SEQ ID NO: 167521 - DNA, 55 bp, Artificial
  Synthetic oligonucleotide
gctggcctggttcaccttatcggctcaatgggtcactcctggcgactcccattgg

SEQ ID NO: 167522 - DNA, 55 bp, Artificial
  Synthetic oligonucleotide
gcgtacggtatggcaccgcgaacacccgtgacccaacacatctggcaatgggagg

SEQ ID NO: 167523 - DNA, 60 bp, Artificial
  Synthetic oligonucleotide
attgagacgcgcgtcgatcccttaagtcttgccgcgccattgcgcacgacctacgccacg

SEQ ID NO: 167524 - DNA, 55 bp, Artificial
  Synthetic oligonucleotide
gcgtaacacgtctgccgaactcgccaaggtgtctcgttcagaggccccatatccc

SEQ ID NO: 167525 - DNA, 55 bp, Artificial
  Synthetic oligonucleotide
ggccccatcgctcagaccataaccacgtaatacttccaccacgtcagactcggta

SEQ ID NO: 167526 - DNA, 55 bp, Artificial
  Synthetic oligonucleotide
gcggctttgggttgatcaatcgtcgaggtaaaatgcatggagaaatcctccgggg

SEQ ID NO: 167527 - DNA, 55 bp, Artificial
  Synthetic oligonucleotide
ggcccgctaaaatgtaaagcccgccaaagaacgctcctccgagagcccataggat

SEQ ID NO: 167528 - DNA, 54 bp, Artificial
  Synthetic oligonucleotide
atactggcggtagggctcgcactgagtatcgactgagagtcttgggtgagacta

SEQ ID NO: 167529 - DNA, 54 bp, Artificial
  Synthetic oligonucleotide
cccctgccggttatgctaacgtggcctgggaggcgggaacagacatggaccaaa

SEQ ID NO: 167530 - DNA, 54 bp, Artificial
  Synthetic oligonucleotide
aagagagtgtcgatcgactgtggggtgccgtaaccgatgtgggcgccagtgagg

SEQ ID NO: 167531 - DNA, 54 bp, Artificial
  Synthetic oligonucleotide
atggcactgggctccatctcgttttgatacggcgtatgccacggaccatgccaa

SEQ ID NO: 167532 - DNA, 54 bp, Artificial
  Synthetic oligonucleotide
ggaatttgttctaagaggtcgatacgcgatgccccgtcaagtgtttgaatgtgg

SEQ ID NO: 167533 - DNA, 54 bp, Artificial
  Synthetic oligonucleotide
tcgtgcgggtcccttgcgaaagccacgtgtccgtactcacttgtaaaatcccta

SEQ ID NO: 167534 - DNA, 53 bp, Artificial
  Synthetic oligonucleotide
atgttcgggagaccgcattcgatttcttgggatttaccttcttttgggccgtg

SEQ ID NO: 167535 - DNA, 54 bp, Artificial
  Synthetic oligonucleotide
atagcggctctcccggagggttagcctacagccggtgaaggagctagcgcctgg

SEQ ID NO: 167536 - DNA, 54 bp, Artificial
  Synthetic oligonucleotide
gccggtctatactgagaacagaaggaatcagttataactcaggagggcgttaca

SEQ ID NO: 167537 - DNA, 54 bp, Artificial
  Synthetic oligonucleotide
tgtgcatgggcatcgacatatcctgcgggctacccatcccgtcgttcttcgtgt

SEQ ID NO: 167538 - DNA, 54 bp, Artificial
  Synthetic oligonucleotide
ggggacgtcgtcgggtagcacgtcctcggccccttccgcttgcacgccgtctgc

SEQ ID NO: 167539 - DNA, 53 bp, Artificial
  Synthetic oligonucleotide
ctcttcaaagcgcccagcacctcattccagggagcatcggccacctcaggttt

SEQ ID NO: 167540 - DNA, 53 bp, Artificial
  Synthetic oligonucleotide
atctagccggcaggaaattcttgggtatccggagaatcatccggttaaagggg

SEQ ID NO: 167541 - DNA, 53 bp, Artificial
  Synthetic oligonucleotide
gccaatccctccaaacctcgagcttccttcaagtttgacccacgctcagtgag

SEQ ID NO: 167542 - DNA, 52 bp, Artificial
  Synthetic oligonucleotide
cccctctgcgccggtctacgcagtcggtctacgcaacccgtggtcttcgcta

SEQ ID NO: 167543 - DNA, 52 bp, Artificial
  Synthetic oligonucleotide
gcaagttgatccgattctgccgtgtccttatcaaggctttgcgacagtaccg

SEQ ID NO: 167544 - DNA, 52 bp, Artificial
  Synthetic oligonucleotide
gcacggggctccttggatccgtatcacgtggcgcattctaggcatcgcgggg

SEQ ID NO: 167545 - DNA, 59 bp, Artificial
  Synthetic oligonucleotide
gtcgcgagcaagggacccgtgcgctgacggaccgcttggacgggatggcgaccattgtg

SEQ ID NO: 167546 - DNA, 52 bp, Artificial
  Synthetic oligonucleotide
tattagaacagcacactacaggggaccgttcaacgttgaacggtgtggaacc

SEQ ID NO: 167547 - DNA, 51 bp, Artificial
  Synthetic oligonucleotide
atcccttaagtcttgccgcgccattgcgcacgacctacgccacggattacg

SEQ ID NO: 167548 - DNA, 51 bp, Artificial
  Synthetic oligonucleotide
acccgccaaggggtggagacattggatcccgtcggcaaaccaacacgaccg

SEQ ID NO: 167549 - DNA, 51 bp, Artificial
  Synthetic oligonucleotide
ttaaacgagcgtttagtggccgctgattcccctcgtccctcgaataagggg

SEQ ID NO: 167550 - DNA, 51 bp, Artificial
  Synthetic oligonucleotide
cagctagtgcgtttcttaccgtttctcgcccaacgtcatcaaatcttcgca

SEQ ID NO: 167551 - DNA, 51 bp, Artificial
  Synthetic oligonucleotide
acgccggtgttcacactgactggccaccccacgaccttagcgcgcgggacg

SEQ ID NO: 167552 - DNA, 51 bp, Artificial
  Synthetic oligonucleotide
aatcccgcctacgccggatttgaacaattatgctacaattaaccgcaactt

SEQ ID NO: 167553 - DNA, 51 bp, Artificial
  Synthetic oligonucleotide
gggtacgcgtagggtgcccgatagacctccgggacgaaaggcccgagcccg

SEQ ID NO: 167554 - DNA, 51 bp, Artificial
  Synthetic oligonucleotide
gtgtcgcggcaccgcaacctgcccctgtattccattggcgcggtgtgccac

SEQ ID NO: 167555 - DNA, 51 bp, Artificial
  Synthetic oligonucleotide
aacgacccttccgaacactgagtggccgcacatcgcccacttgtatgccgt

SEQ ID NO: 167556 - DNA, 52 bp, Artificial
  Synthetic oligonucleotide
gtaaaagagttttctttacgttcaccctttaagttatgtccttgcggtgata

SEQ ID NO: 167557 - DNA, 55 bp, Artificial
  Synthetic oligonucleotide
ggtctcgtttaaccccattggatctaggcctagctcgtctgaacctgtgcgagcg

SEQ ID NO: 167558 - DNA, 55 bp, Artificial
  Synthetic oligonucleotide
ggtttaagtcatcaagtgcacctggagattcagcataggcgttttcacctaaggc

SEQ ID NO: 167559 - DNA, 55 bp, Artificial
  Synthetic oligonucleotide
cgccttgtgccaccctatctattaagctaatgttcatgtccccgctatcgcaaat

SEQ ID NO: 167560 - DNA, 55 bp, Artificial
  Synthetic oligonucleotide
cgccgacttatgtgataactgaaactcaacctggccttttaggagccgcagcata

SEQ ID NO: 167561 - DNA, 55 bp, Artificial
  Synthetic oligonucleotide
cgccgaactattcacttcactcgtcgcctgcataccataatgtagaaggccaaca

SEQ ID NO: 167562 - DNA, 55 bp, Artificial
  Synthetic oligonucleotide
cgacattacttgtgcttatcatctgcgcaagttctttgggtagctcagtcactac

SEQ ID NO: 167563 - DNA, 55 bp, Artificial
  Synthetic oligonucleotide
cctgacctaattctagccctataacacccggaccaaatactgcgacagactttgg

SEQ ID NO: 167564 - DNA, 55 bp, Artificial
  Synthetic oligonucleotide
ccatggctactcaaggtgaacaagcttcatttcgcccagtaaccgcattatggat

SEQ ID NO: 167565 - DNA, 55 bp, Artificial
  Synthetic oligonucleotide
caggtttggctttagtaatgagttggtttaacgcgacttgcataggcacaccaga

SEQ ID NO: 167566 - DNA, 55 bp, Artificial
  Synthetic oligonucleotide
taaagcggatagttgtgcaattcgctctttagctgacgggttaggagcactgcgg

SEQ ID NO: 167567 - DNA, 55 bp, Artificial
  Synthetic oligonucleotide
gcggtatcacagatgtgcttaaagcaaagttacctggtgttagtgatccgagcat

SEQ ID NO: 167568 - DNA, 55 bp, Artificial
  Synthetic oligonucleotide
tacgccaagccagtggtgagttagtgtatcaattagatttgtggcttgtcgggga

SEQ ID NO: 167569 - DNA, 55 bp, Artificial
  Synthetic oligonucleotide
tagtacgcaggacaatgtagtcgcgccagatgcacagttagtctttgtacccggt

SEQ ID NO: 167570 - DNA, 55 bp, Artificial
  Synthetic oligonucleotide
tatcgtccatacctatggtccagctttgcatttccagggtacgttgccaattagg

SEQ ID NO: 167571 - DNA, 55 bp, Artificial
  Synthetic oligonucleotide
tgcggttaccgatccaatcatgggcaacttagccgataaaacccgcactaagtgg

SEQ ID NO: 167572 - DNA, 55 bp, Artificial
  Synthetic oligonucleotide
aaacctgcgcccaaagtagattcagcgatagtacgtttaattcctcatgcgcata

SEQ ID NO: 167573 - DNA, 54 bp, Artificial
  Synthetic oligonucleotide
gcgtaggaagcgtttgtcttcataatgcggggattaaccatcatgataagcccc

SEQ ID NO: 167574 - DNA, 54 bp, Artificial
  Synthetic oligonucleotide
gccgccttaacaacaggtgacatagcacgttgattcagaccttttgcgacacta

SEQ ID NO: 167575 - DNA, 53 bp, Artificial
  Synthetic oligonucleotide
ttattagttgccttagcgttaacaggatcatctggccaataatgcctaggata

SEQ ID NO: 167576 - DNA, 53 bp, Artificial
  Synthetic oligonucleotide
acacagggttggacaagatgaattgcgccccggtggcactgtctctggtcccg

SEQ ID NO: 167577 - DNA, 53 bp, Artificial
  Synthetic oligonucleotide
atctcgccgcggcaataattgcggtgcccatagcaaagcgtgtcggcttaggc

SEQ ID NO: 167578 - DNA, 55 bp, Artificial
  Synthetic oligonucleotide
gcctaacccataacggtaatactgttcgtcaatatcggatggcgagtactcacgc

SEQ ID NO: 167579 - DNA, 53 bp, Artificial
  Synthetic oligonucleotide
cggcacacaaattgccatgcccacccacaacgccgcgacattccaggtattcc

SEQ ID NO: 167580 - DNA, 53 bp, Artificial
  Synthetic oligonucleotide
ctagggtataggtcggcacacaaattgccatgcccacccacaacgccgcgaca

SEQ ID NO: 167581 - DNA, 52 bp, Artificial
  Synthetic oligonucleotide
cgcgcggtttacatcacgagatgtggctacatgcggccggttgtcgcaaata

SEQ ID NO: 167582 - DNA, 52 bp, Artificial
  Synthetic oligonucleotide
gtcgacgcaacagagttacgcgcagcggccagactatatgctaacgcgggta

SEQ ID NO: 167583 - DNA, 52 bp, Artificial
  Synthetic oligonucleotide
ggcttcattttgcattcttgctataggtgcacgtgaattaagtggcgagtta

SEQ ID NO: 167584 - DNA, 52 bp, Artificial
  Synthetic oligonucleotide
tagcggatgaccccactgtgcaagcaacagcggaggctgctgtcgtgactgc

SEQ ID NO: 167585 - DNA, 52 bp, Artificial
  Synthetic oligonucleotide
taggcgtgaagccataatgtggcgtggctatggctggctaggtgcagggtta

SEQ ID NO: 167586 - DNA, 52 bp, Artificial
  Synthetic oligonucleotide
tcgcttacgggcgtgccattttctcgcattatgcgccgtgtgcaaagagagc

SEQ ID NO: 167587 - DNA, 52 bp, Artificial
  Synthetic oligonucleotide
tgccatgcccacccacaacgccgcgacattccaggtattccaagtcctgtct

SEQ ID NO: 167588 - DNA, 51 bp, Artificial
  Synthetic oligonucleotide
taacgccggactcgaaagtatggggcacttgggacggtgttaaggccggta

SEQ ID NO: 167589 - DNA, 55 bp, Artificial
  Synthetic oligonucleotide
gatgcgaatgcgtgaagtgggtgaaatcactatcaaggctaacagcaaagttgtg

SEQ ID NO: 167590 - DNA, 51 bp, Artificial
  Synthetic oligonucleotide
actcgtagtaaaccaagctgtgatatatgccccgttgagcaaagttgccta

SEQ ID NO: 167591 - DNA, 51 bp, Artificial
  Synthetic oligonucleotide
tagccccatgcgccatggtcggccaaaagtatcggtgatcaccactccaac

SEQ ID NO: 167592 - DNA, 51 bp, Artificial
  Synthetic oligonucleotide
aacgtcgcttcactgccgcgttgtatggttgaaccccaaccacccgccacg

SEQ ID NO: 167593 - DNA, 51 bp, Artificial
  Synthetic oligonucleotide
aacggtaggaaccagattaacccctgcatcaataataaccgcgtttcgacc

SEQ ID NO: 167594 - DNA, 50 bp, Artificial
  Synthetic oligonucleotide
atggccgctaacatgctggggctagataacgctgctactccgcttggcct

SEQ ID NO: 167595 - DNA, 50 bp, Artificial
  Synthetic oligonucleotide
cggtcattgccagtcctaccgcttcagccccaccttgctctgtggcagta

SEQ ID NO: 167596 - DNA, 55 bp, Artificial
  Synthetic oligonucleotide
gaatactactacgtcatgttgtttcgttaatgacagacaagggctttcaactagg

SEQ ID NO: 167597 - DNA, 55 bp, Artificial
  Synthetic oligonucleotide
ctgtgccaagacttgttatcttggctataggctcgagtgtaactattcaaactcc

SEQ ID NO: 167598 - DNA, 55 bp, Artificial
  Synthetic oligonucleotide
gcttgtcctgcgggtaagacggcattacgttggcgagagatacggcgctctgagt

SEQ ID NO: 167599 - DNA, 55 bp, Artificial
  Synthetic oligonucleotide
cgtgaatataccgtcaagtactgccgacgtatcaagtgcggtcgtattgttcaca

SEQ ID NO: 167600 - DNA, 55 bp, Artificial
  Synthetic oligonucleotide
ggcgatagcatctaagcggaatatcttaacgccgatgtctaggtactgcctgatg

SEQ ID NO: 167601 - DNA, 60 bp, Artificial
  Synthetic oligonucleotide
agccgggtcgttggctgaatcaatctgcgcattcagggactgaataaggctcaatcggtt

SEQ ID NO: 167602 - DNA, 60 bp, Artificial
  Synthetic oligonucleotide
gcaccggccatgaacacaacagcggccgctacgtggaacagctccacaagccccgactcc

SEQ ID NO: 167603 - DNA, 59 bp, Artificial
  Synthetic oligonucleotide
tgttgataacttgccataatctgtggataaattaccgtcgtagcatccgcgcttttacc

SEQ ID NO: 167604 - DNA, 51 bp, Artificial
  Synthetic oligonucleotide
gactggccccgtacgcattggagccgccaacacgggagcgagttgttgagc

SEQ ID NO: 167605 - DNA, 51 bp, Artificial
  Synthetic oligonucleotide
cttattggttccttcgagctttattgatacggacttgtcagtggtgcgtgt

SEQ ID NO: 167606 - DNA, 51 bp, Artificial
  Synthetic oligonucleotide
accagggtttggggccgccacagagcccagacgcgaaatgcgcccagcggg

SEQ ID NO: 167607 - DNA, 51 bp, Artificial
  Synthetic oligonucleotide
ccatagcaaggtccgtggaagcagatgccaatagttacgccagtcaactca

SEQ ID NO: 167608 - DNA, 51 bp, Artificial
  Synthetic oligonucleotide
aaaccgcttggcggttttgtatacgggtaggcttgctaaaggtatcaaatt

SEQ ID NO: 167609 - DNA, 51 bp, Artificial
  Synthetic oligonucleotide
atggacaatatcgacgtcttggtactcaaggcattgcgtgactggcgctcg

SEQ ID NO: 167610 - DNA, 51 bp, Artificial
  Synthetic oligonucleotide
gtaaggaccgagttattggccttcgcaatgagtcgggccagatctatcggc

SEQ ID NO: 167611 - DNA, 51 bp, Artificial
  Synthetic oligonucleotide
gaaaactgatcagcgactgcatacaggccaatagaagcggacgacataatg

SEQ ID NO: 167612 - DNA, 51 bp, Artificial
  Synthetic oligonucleotide
aatagccttgatgaccactaggatcggaacccctagcaaaagtccccatat

SEQ ID NO: 167613 - DNA, 51 bp, Artificial
  Synthetic oligonucleotide
gtccggcgtagcccggacccatgaaggccgtggacgcacccaggcaggcaa

SEQ ID NO: 167614 - DNA, 53 bp, Artificial
  Synthetic oligonucleotide
cgccccaacgggtcaggtagcgcttactggcgtggttttccaaggattggtag

SEQ ID NO: 167615 - DNA, 51 bp, Artificial
  Synthetic oligonucleotide
gcaatgttggcgaaatacgagttgggtgtggggcgaaagacgagtcaaatg

SEQ ID NO: 167616 - DNA, 51 bp, Artificial
  Synthetic oligonucleotide
gacaagaaagttgtacgccgtgaatctcactgtgcgactaacgtcatcacg

SEQ ID NO: 167617 - DNA, 51 bp, Artificial
  Synthetic oligonucleotide
cggagagaggggtggtgttcatggtttcagcatgccactggcgatacggga

SEQ ID NO: 167618 - DNA, 51 bp, Artificial
  Synthetic oligonucleotide
tgtgcgcttttgtccgcactgtgaccgagtgcatacggccgaccgatacct

SEQ ID NO: 167619 - DNA, 51 bp, Artificial
  Synthetic oligonucleotide
ctcaagccccttgtagatttgaacgacaaaaacgactttcgcgtactgctg

SEQ ID NO: 167620 - DNA, 51 bp, Artificial
  Synthetic oligonucleotide
gcaaccgctgcgaagtcacaacctaccagctcttgaagctcctggacaaaa

SEQ ID NO: 167621 - DNA, 51 bp, Artificial
  Synthetic oligonucleotide
tgttgaatgtcaacattcccaatatgccgtatgacgcattgcggcccttgc

SEQ ID NO: 167622 - DNA, 51 bp, Artificial
  Synthetic oligonucleotide
tgttgagtttggccaatatctcgttgcgctcttgcgtcaagatcgccaatt

SEQ ID NO: 167623 - DNA, 51 bp, Artificial
  Synthetic oligonucleotide
gtgtccgaacgctccgttcacgtactccaatgccttgggttgcgcgtcccg

SEQ ID NO: 167624 - DNA, 51 bp, Artificial
  Synthetic oligonucleotide
gatgtaggcgtccagactggtttcaatcacgttgccgtcctggcgtacaca

SEQ ID NO: 167625 - DNA, 56 bp, Artificial
  Synthetic oligonucleotide
cgccgcgccgaaggcgtcaggaaatgcctgaaaagaccctactctgacgccctttc

SEQ ID NO: 167626 - DNA, 51 bp, Artificial
  Synthetic oligonucleotide
ctttgcgttcgttaccctggccgaccgcactgaagcgcctgccatgggaat

SEQ ID NO: 167627 - DNA, 51 bp, Artificial
  Synthetic oligonucleotide
gatcggtgtagagccgggccgtgcgtgggttgtaattgccagtggacaggt

SEQ ID NO: 167628 - DNA, 51 bp, Artificial
  Synthetic oligonucleotide
ttcatggggttcttctacagcgtgaaagtgagtcggagtgccagcgcggaa

SEQ ID NO: 167629 - DNA, 51 bp, Artificial
  Synthetic oligonucleotide
ttcacatagcgcaacgctcggatgcgacagagagattcggcagagtccctc

SEQ ID NO: 167630 - DNA, 51 bp, Artificial
  Synthetic oligonucleotide
acgcggcatgctcagtgagcctggcagtctcgccattgtgacagcggtaat

SEQ ID NO: 167631 - DNA, 50 bp, Artificial
  Synthetic oligonucleotide
cgatcaaaccataaacgtcatggaaaattggaatcgtggttgactttacg

SEQ ID NO: 167632 - DNA, 50 bp, Artificial
  Synthetic oligonucleotide
caagaggtgctactcgggcccagccccaaaccgacatatcgaccaccgtg

SEQ ID NO: 167633 - DNA, 50 bp, Artificial
  Synthetic oligonucleotide
aatgcccccatgtcgtggtacttgccagtcacccgcactgcgatcggcaa

SEQ ID NO: 167634 - DNA, 50 bp, Artificial
  Synthetic oligonucleotide
aatgaaggttcaaggccgatgctgcaagctggtgcgtcgcatggtcgtgg

SEQ ID NO: 167635 - DNA, 50 bp, Artificial
  Synthetic oligonucleotide
tatcctcgcttccgccgattccaccccactgatggggctaaggctcccgg

SEQ ID NO: 167636 - DNA, 60 bp, Artificial
  Synthetic oligonucleotide
cgccggattgtgggttggcgagtcagcagccacatgcgcactgactttgttgtggatgca

SEQ ID NO: 167637 - DNA, 50 bp, Artificial
  Synthetic oligonucleotide
cgacggcagatggagtgtctgcaatgcccagtgcggagttgatgcgcgca

SEQ ID NO: 167638 - DNA, 50 bp, Artificial
  Synthetic oligonucleotide
aatccaacgacttcgcgttcagacaggctgaactcgcctgcgccttgcga

SEQ ID NO: 167639 - DNA, 50 bp, Artificial
  Synthetic oligonucleotide
aatatcgagatcggtcgcacccgcagctgtgccacggaaagtccgggtcg

SEQ ID NO: 167640 - DNA, 50 bp, Artificial
  Synthetic oligonucleotide
aatgcagcgtggaacccagagacttcacaagccccacgagtccccgtgcc

SEQ ID NO: 167641 - DNA, 50 bp, Artificial
  Synthetic oligonucleotide
aatcaggcggtataacgtggcggcgctcacccctagtaagccgtcgtgcc

SEQ ID NO: 167642 - DNA, 50 bp, Artificial
  Synthetic oligonucleotide
caagatgacaccaaaacgtcaccaacttccaaagagtgaggttgtgacag

SEQ ID NO: 167643 - DNA, 50 bp, Artificial
  Synthetic oligonucleotide
aatccaatctcatggccggcgcctgaaagtctgcgctgctcctccgggta

SEQ ID NO: 167644 - DNA, 50 bp, Artificial
  Synthetic oligonucleotide
tcactgcgtgatcacgagtccgccttaccccatcgccaaaggacgcgcct

SEQ ID NO: 167645 - DNA, 50 bp, Artificial
  Synthetic oligonucleotide
aatcggctgggcgtgttggcactaagccaccaccacaccccctatgcgac

SEQ ID NO: 167646 - DNA, 50 bp, Artificial
  Synthetic oligonucleotide
aatcacgtcgattgcccccgcctgcagtagctgcaccccgcgattttgcg

SEQ ID NO: 167647 - DNA, 57 bp, Artificial
  Synthetic oligonucleotide
attatccgatttctggtcgtgtaatctcgaatttcccattgatatattccgtcactt

SEQ ID NO: 167648 - DNA, 50 bp, Artificial
  Synthetic oligonucleotide
aatcggcgccccaacgcggaaacgcctgcgggtcggaaagggccactgga

SEQ ID NO: 167649 - DNA, 50 bp, Artificial
  Synthetic oligonucleotide
tcacgcgcatccccagcaatgcgggcaacattccatccaggctgggattt

SEQ ID NO: 167650 - DNA, 50 bp, Artificial
  Synthetic oligonucleotide
tatgctgcgccaaacgcccccatgttttgcttcaagtactgggccacccc

SEQ ID NO: 167651 - DNA, 50 bp, Artificial
  Synthetic oligonucleotide
aatcacttacgggccccaacggtagcctcttgcctcatgcagcgtccagc

SEQ ID NO: 167652 - DNA, 50 bp, Artificial
  Synthetic oligonucleotide
aatcttgtgggctacgcatgcctgattctgctcgtaggcgtgccatgcgc

SEQ ID NO: 167653 - DNA, 50 bp, Artificial
  Synthetic oligonucleotide
aatcgttcgtgaacgcgaaggcggagcgcagacagcacaaatacacggca

SEQ ID NO: 167654 - DNA, 50 bp, Artificial
  Synthetic oligonucleotide
tcaattacctgcgccccatatgctgcgccaaacgcccccatgttttgctt

SEQ ID NO: 167655 - DNA, 50 bp, Artificial
  Synthetic oligonucleotide
aatcagcgggcatcaggaatcccccgcagacggatttccacggagcccaa

SEQ ID NO: 167656 - DNA, 50 bp, Artificial
  Synthetic oligonucleotide
cgagcccacaatgcaggctcggcatgcaaccagcgattcctaatggcacc

SEQ ID NO: 167657 - DNA, 50 bp, Artificial
  Synthetic oligonucleotide
aatgcaattgagcgcgagtacccgatcgctgggctaattcgcccctgtgc

SEQ ID NO: 167658 - DNA, 60 bp, Artificial
  Synthetic oligonucleotide
tgtctggatcggggatttgcttgccaagagcgtacaggcgctgctgtatcgcaactgcgg

SEQ ID NO: 167659 - DNA, 50 bp, Artificial
  Synthetic oligonucleotide
atgggctgctttcgcgcataggtattgcaggcttggctggcgtcacagaa

SEQ ID NO: 167660 - DNA, 50 bp, Artificial
  Synthetic oligonucleotide
cgcctcgcgaacccaagcggtcaatgtcccacgaccggggtagcccagcg

SEQ ID NO: 167661 - DNA, 50 bp, Artificial
  Synthetic oligonucleotide
acaaggtgcccgtgtgtccgctcgatccgggtttggtggtgctactgagc

SEQ ID NO: 167662 - DNA, 50 bp, Artificial
  Synthetic oligonucleotide
acaatcccgtcgggctgagatcaagacacgccaactcgcgccaaggccct

SEQ ID NO: 167663 - DNA, 50 bp, Artificial
  Synthetic oligonucleotide
atgtttgtgcgaggggcgccgtactgcgggcaaaatgtcccgatggacac

SEQ ID NO: 167664 - DNA, 50 bp, Artificial
  Synthetic oligonucleotide
cgcgaatgatacccggcggttgctgcatccttcgtagcaaagggtaggca

SEQ ID NO: 167665 - DNA, 50 bp, Artificial
  Synthetic oligonucleotide
cgcgcacgctccccatcggcatccgtgcgtacatgggggactacttccag

SEQ ID NO: 167666 - DNA, 50 bp, Artificial
  Synthetic oligonucleotide
gtgtagagggggttggggggttagctgatcaagcgctaaggcttgtttgt

SEQ ID NO: 167667 - DNA, 50 bp, Artificial
  Synthetic oligonucleotide
atgtgagagcccccactgcgctcgcatgcacgtggttgccggcctagggg

SEQ ID NO: 167668 - DNA, 50 bp, Artificial
  Synthetic oligonucleotide
acaatgtccgatggcctggaccaagagcccacgattgctgccagccacct

SEQ ID NO: 167669 - DNA, 53 bp, Artificial
  Synthetic oligonucleotide
atggagccgacttattccgggaaacaagcgacttcaaacgaactaggccctct

SEQ ID NO: 167670 - DNA, 50 bp, Artificial
  Synthetic oligonucleotide
acaccccggattctccgaagcgggtccactccaaaggcacgacacccatg

SEQ ID NO: 167671 - DNA, 50 bp, Artificial
  Synthetic oligonucleotide
atgtccctggttgcgcctgaaaactgatgaacccccatccttgagcccgc

SEQ ID NO: 167672 - DNA, 50 bp, Artificial
  Synthetic oligonucleotide
acaccggctatcagttccctgcgttgtttgcgccgccaagcggagatcgc

SEQ ID NO: 167673 - DNA, 50 bp, Artificial
  Synthetic oligonucleotide
acacctgcaaggcggtgagatgcggtcgggtctgggtgacctggaacctg

SEQ ID NO: 167674 - DNA, 50 bp, Artificial
  Synthetic oligonucleotide
acagtcaccgagtggcactgcaccaggaccggtagtgacgttcacaggga

SEQ ID NO: 167675 - DNA, 50 bp, Artificial
  Synthetic oligonucleotide
acacgcggctgattgacaacctcgaagtctgaaccgcccggccttgggcg

SEQ ID NO: 167676 - DNA, 50 bp, Artificial
  Synthetic oligonucleotide
acacggctgacccaagctgtccgacatcttggatgaggcacgccccctac

SEQ ID NO: 167677 - DNA, 50 bp, Artificial
  Synthetic oligonucleotide
cgcggtgccttgggaaggccgcgtcgtcacaatgatgggtcttccggttg

SEQ ID NO: 167678 - DNA, 50 bp, Artificial
  Synthetic oligonucleotide
cgcgtcggcgcccaaaacaagaggtgctactcgggcccagccccaaaccg

SEQ ID NO: 167679 - DNA, 50 bp, Artificial
  Synthetic oligonucleotide
acactaggccagggccgtttgctatttgcccgcaggcatgactactgcgc

SEQ ID NO: 167680 - DNA, 60 bp, Artificial
  Synthetic oligonucleotide
cgctggcgttcgatattgcatcaatagttcgtgcgtcagtttcatggctgtatgatgcgt

SEQ ID NO: 167681 - DNA, 50 bp, Artificial
  Synthetic oligonucleotide
acagaccgcgcgcttgtaaatcggccgcaaggccactgggaatgaatccg

SEQ ID NO: 167682 - DNA, 50 bp, Artificial
  Synthetic oligonucleotide
cgcgtgtcgggtcgggctgtcaaagtggcagccggttgggatttcggggc

SEQ ID NO: 167683 - DNA, 50 bp, Artificial
  Synthetic oligonucleotide
atgtaatggcaggtgctggccccgataaacttgtgtcccccgcactgcac

SEQ ID NO: 167684 - DNA, 50 bp, Artificial
  Synthetic oligonucleotide
acaggcaaacctgtgctgatacgacccagtttggcgcgcacccgactcgc

SEQ ID NO: 167685 - DNA, 50 bp, Artificial
  Synthetic oligonucleotide
acaggcacgtaaacaccccgttaccgcggcttgacctgccccggcaagaa

SEQ ID NO: 167686 - DNA, 50 bp, Artificial
  Synthetic oligonucleotide
acaggccgccatacccgctcacttcgcgcctacacgccgccgtgggggtg

SEQ ID NO: 167687 - DNA, 50 bp, Artificial
  Synthetic oligonucleotide
acagggcccacaaggacgctggatggatcgggtaccgggggttttgacgt

SEQ ID NO: 167688 - DNA, 50 bp, Artificial
  Synthetic oligonucleotide
aatgcgccagtcatagcgtcccgcatggtttagcgacatcccttgcccca

SEQ ID NO: 167689 - DNA, 50 bp, Artificial
  Synthetic oligonucleotide
aatgctgcaacagggccggggccgcagtcgggctagtgtcgtgtcacgga

SEQ ID NO: 167690 - DNA, 50 bp, Artificial
  Synthetic oligonucleotide
aatggccaaggggacgtggcagggttgtcgcgccttgctacacacacttg

SEQ ID NO: 167691 - DNA, 58 bp, Artificial
  Synthetic oligonucleotide
cgcttggacgaaagtggaggcaggtaagagtccgctgccgcttgagacgttcgtccgc

SEQ ID NO: 167692 - DNA, 50 bp, Artificial
  Synthetic oligonucleotide
taggggcctgacgcttgctaccacccgccattcaagtctcctggatcgtg

SEQ ID NO: 167693 - DNA, 50 bp, Artificial
  Synthetic oligonucleotide
cgatctggatggcccccaggtccagcaacgtagcaccgggcaatgggtcc

SEQ ID NO: 167694 - DNA, 50 bp, Artificial
  Synthetic oligonucleotide
caacccgaagtccatcctggactcagatcacgcaagtggcctgcctcggg

SEQ ID NO: 167695 - DNA, 50 bp, Artificial
  Synthetic oligonucleotide
acagtgctggccggaccgctactcctgttcgcaacgcttgccatacctgc

SEQ ID NO: 167696 - DNA, 50 bp, Artificial
  Synthetic oligonucleotide
aatgggacaattcatcgggacaaaccatgggacaaccggagcgccgcagg

SEQ ID NO: 167697 - DNA, 50 bp, Artificial
  Synthetic oligonucleotide
aatgggtgtagctggcacgatgggaacatcatggcccaaccgcggcggct

SEQ ID NO: 167698 - DNA, 50 bp, Artificial
  Synthetic oligonucleotide
atttgagtccggagttgttcagggtgcactcgcgccgacggggtaccttg

SEQ ID NO: 167699 - DNA, 50 bp, Artificial
  Synthetic oligonucleotide
gtcctggatggctgccaccggatgtgacagagggctgacgcccgaagtat

SEQ ID NO: 167700 - DNA, 50 bp, Artificial
  Synthetic oligonucleotide
aattccgcaaggttgcagccaacgaggcgcggtggggtgttctcgaattg

SEQ ID NO: 167701 - DNA, 50 bp, Artificial
  Synthetic oligonucleotide
tacggaagtgcagacccgctgcacggcacagatgcagtcgctggcacggg

SEQ ID NO: 167702 - DNA, 60 bp, Artificial
  Synthetic oligonucleotide
tgtacacatcgtgcaggccgcgagaggcggatttttcgtccaacaccgcatatgagccca

SEQ ID NO: 167703 - DNA, 50 bp, Artificial
  Synthetic oligonucleotide
aattcgcggcggaatgattgagcggcggttatgcagcgtgggcaatcgca

SEQ ID NO: 167704 - DNA, 50 bp, Artificial
  Synthetic oligonucleotide
aattcgtcagggcagccgcagtcacggcctttccgatccttaaggcggac

SEQ ID NO: 167705 - DNA, 50 bp, Artificial
  Synthetic oligonucleotide
tacgctgagccatcgaacgcgctgacaaggctacccttttggtccctggc

SEQ ID NO: 167706 - DNA, 50 bp, Artificial
  Synthetic oligonucleotide
attgcccagggcgctcaagggtcaatagtgcagacgggcctaccggcgtc

SEQ ID NO: 167707 - DNA, 50 bp, Artificial
  Synthetic oligonucleotide
aattgcccttcttctgggcgggtgccctgttgcaagcgtcggcacgcagt

SEQ ID NO: 167708 - DNA, 50 bp, Artificial
  Synthetic oligonucleotide
aatttcgcaggtccgaccacgtacagggcataaccccgctcgcgtgcctt

SEQ ID NO: 167709 - DNA, 50 bp, Artificial
  Synthetic oligonucleotide
aatttcggggccccttggcccgttacgttctgcgacgacagccataccgt

SEQ ID NO: 167710 - DNA, 50 bp, Artificial
  Synthetic oligonucleotide
cgccccgcctccaaaatcccaggtggcgacaacagagtgacctttcgggt

SEQ ID NO: 167711 - DNA, 50 bp, Artificial
  Synthetic oligonucleotide
attcgcagcctccaagagtgcacaggccgcctatgggtcgaaacgaacgg

SEQ ID NO: 167712 - DNA, 50 bp, Artificial
  Synthetic oligonucleotide
taagctgcaagcgggccggacaactttcggctcggtccaagttacgacgg

SEQ ID NO: 167713 - DNA, 60 bp, Artificial
  Synthetic oligonucleotide
tcacaggctgcgaatgtggcttgctctccaaatgtcttgcgaaacgattgtgatccgcac

SEQ ID NO: 167714 - DNA, 55 bp, Artificial
  Synthetic oligonucleotide
aaaaacggaactggcgctcgacgtatcgacgccgcccggttatatcacttcggca

SEQ ID NO: 167715 - DNA, 50 bp, Artificial
  Synthetic oligonucleotide
taagcgccgtaacgccgtgtagccctgccggctgaaagacgaatcgggct

SEQ ID NO: 167716 - DNA, 50 bp, Artificial
  Synthetic oligonucleotide
acaaaaagatgccgcatgcgtgcaaccagaggttatgggcgggccgttgg

SEQ ID NO: 167717 - DNA, 50 bp, Artificial
  Synthetic oligonucleotide
taaacgccgtgactgcgttgtttataaatccgtacaggccggtcaaccaa

SEQ ID NO: 167718 - DNA, 50 bp, Artificial
  Synthetic oligonucleotide
acagtgcaccaccctgtcactgtggcatccaacttgctgggcacactccc

SEQ ID NO: 167719 - DNA, 50 bp, Artificial
  Synthetic oligonucleotide
cgcccttggacacccggcgcgctgtaccgacttgcgttaagttgtcagtg

SEQ ID NO: 167720 - DNA, 50 bp, Artificial
  Synthetic oligonucleotide
acaaagccccgtagcctagcgggttgccatggggccaggatcagggttta

SEQ ID NO: 167721 - DNA, 50 bp, Artificial
  Synthetic oligonucleotide
attcatcgggacaaaccatgggacaaccggagcgccgcaggcctcttgca

SEQ ID NO: 167722 - DNA, 50 bp, Artificial
  Synthetic oligonucleotide
aacagcaacgcttcgtgatgggaagcgtcatatccgggcgggaccacccc

SEQ ID NO: 167723 - DNA, 50 bp, Artificial
  Synthetic oligonucleotide
ccccatggagaggtgacctggctcaaccgggccctgcatgaatacgccta

SEQ ID NO: 167724 - DNA, 49 bp, Artificial
  Synthetic oligonucleotide
aaccaaaacaggggtcggagactccaacggggtgttgggaagttgcccc

SEQ ID NO: 167725 - DNA, 59 bp, Artificial
  Synthetic oligonucleotide
aaaaagcgtgaaatcgagagcccagacggccggtaagtgacgctcctatgccctgagca

SEQ ID NO: 167726 - DNA, 50 bp, Artificial
  Synthetic oligonucleotide
aaccacgatgcgcactgcacagccttgtgccacttcggaagccacgtcag

SEQ ID NO: 167727 - DNA, 50 bp, Artificial
  Synthetic oligonucleotide
ttcaccgaccgaaaacgctgctaaggcgtcattcacgcctcttccagaac

SEQ ID NO: 167728 - DNA, 50 bp, Artificial
  Synthetic oligonucleotide
aacccaccggcctcatgattcgtcacggccctggattgctccagcgttaa

SEQ ID NO: 167729 - DNA, 50 bp, Artificial
  Synthetic oligonucleotide
aaccccaaaagagccgcgagactgatgtcccgcatagctgggtcgggtga

SEQ ID NO: 167730 - DNA, 50 bp, Artificial
  Synthetic oligonucleotide
aacccctggcaaccgaactcccggagaactccacaccaaagcatgcgacc

SEQ ID NO: 167731 - DNA, 50 bp, Artificial
  Synthetic oligonucleotide
aaccctttggattggcggctgccccacgggacaaccgcttgttcactggc

SEQ ID NO: 167732 - DNA, 50 bp, Artificial
  Synthetic oligonucleotide
aaccgacgcaccaccgaattcaactcccgccaagactgcccgcatggcca

SEQ ID NO: 167733 - DNA, 50 bp, Artificial
  Synthetic oligonucleotide
ccccgccttggcgtacaaccgggttaagtgactcagcgagtcgcatgcac

SEQ ID NO: 167734 - DNA, 50 bp, Artificial
  Synthetic oligonucleotide
aaccgcacccatggagtgaagagtctttgagccccggccatccgacttga

SEQ ID NO: 167735 - DNA, 50 bp, Artificial
  Synthetic oligonucleotide
tgtcttttgggtacgaggattgctaggctagtggtctttccatcgacccc

SEQ ID NO: 167736 - DNA, 57 bp, Artificial
  Synthetic oligonucleotide
ttttagccctgaggtacgtgaacgtgccgtacgtttggtgcaggagtgccaagcgga

SEQ ID NO: 167737 - DNA, 50 bp, Artificial
  Synthetic oligonucleotide
aaccggaccggtttgcctgcgacatctgccgtgaagtccaggccaggtct

SEQ ID NO: 167738 - DNA, 50 bp, Artificial
  Synthetic oligonucleotide
aaccggcagcgtagaccggccccagaaaatacagcccatccggagcaaag

SEQ ID NO: 167739 - DNA, 50 bp, Artificial
  Synthetic oligonucleotide
tgcggcgagtgtcagacgaaattccctagataaaacgctcggatcagaga

SEQ ID NO: 167740 - DNA, 50 bp, Artificial
  Synthetic oligonucleotide
aactttgcggcagtgagtaccccatccgaccgcgtccttgaaagcaggct

SEQ ID NO: 167741 - DNA, 50 bp, Artificial
  Synthetic oligonucleotide
cccttttggtccctggccagcaccttgtatcccgtccacgcggcaacctt

SEQ ID NO: 167742 - DNA, 50 bp, Artificial
  Synthetic oligonucleotide
aactactcattccgcacgtttgcccatgaccaactctgtgtgatgcgcca

SEQ ID NO: 167743 - DNA, 50 bp, Artificial
  Synthetic oligonucleotide
cagtcacttgagttgctgcggcccccatgtccctggttgcgcctgaaaac

SEQ ID NO: 167744 - DNA, 50 bp, Artificial
  Synthetic oligonucleotide
aacgtccgcccccgcggactctcagctcctttccatgatcgtggtcgaca

SEQ ID NO: 167745 - DNA, 50 bp, Artificial
  Synthetic oligonucleotide
aacggtccgcagtttcagagccgtcggccttgaatagtgccgagatccga

SEQ ID NO: 167746 - DNA, 50 bp, Artificial
  Synthetic oligonucleotide
cccgctcggagagaagatcatgcatcccctgccgggctagccagcaccgc

SEQ ID NO: 167747 - DNA, 58 bp, Artificial
  Synthetic oligonucleotide
tttgcgagggtgtcaagaaccgtctacgcgatgggtagtgcaagtcccatgcttccct

SEQ ID NO: 167748 - DNA, 50 bp, Artificial
  Synthetic oligonucleotide
tggacatcgttgggcatgcaatctcctgagcgctgtttggccaagcctaa

SEQ ID NO: 167749 - DNA, 50 bp, Artificial
  Synthetic oligonucleotide
aacgctgtcggtgcaaatcgggtgcttgccgtgcgcgcatacgaatcttc

SEQ ID NO: 167750 - DNA, 50 bp, Artificial
  Synthetic oligonucleotide
aacgcgtccttcagtccgggaaaccagcgtttgcgctacaccggcacttg

SEQ ID NO: 167751 - DNA, 50 bp, Artificial
  Synthetic oligonucleotide
aacgcgaaggcggagcgcagacagcacagatatgcggcaagcgacgccgg

SEQ ID NO: 167752 - DNA, 50 bp, Artificial
  Synthetic oligonucleotide
aacgcagcagttggcgtgactgcaccgcagtgattccctgtgtgcgagcc

SEQ ID NO: 167753 - DNA, 50 bp, Artificial
  Synthetic oligonucleotide
aacgcaaggacagcaagcaggtgagcccgtccatgcaggtgcgggtgaaa

SEQ ID NO: 167754 - DNA, 50 bp, Artificial
  Synthetic oligonucleotide
aacctgggtaggcttgatggctcccgcgaagcttcccgccgagttggcaa

SEQ ID NO: 167755 - DNA, 50 bp, Artificial
  Synthetic oligonucleotide
aaccggtaagtcgagacaggcactctatcggtgggctgcgcccgcctact

SEQ ID NO: 167756 - DNA, 50 bp, Artificial
  Synthetic oligonucleotide
aaaccgcccttcccaaaccccagccccctccgataatgggccgtcgcacc

SEQ ID NO: 167757 - DNA, 50 bp, Artificial
  Synthetic oligonucleotide
aaacccttagtcggcttcgcaagcgcgggaagatttaggcgctgcctggg

SEQ ID NO: 167758 - DNA, 57 bp, Artificial
  Synthetic oligonucleotide
tttcgcgggcgaaagagctacagctccccgaatcgttgattcaggtaacgttgatgt

SEQ ID NO: 167759 - DNA, 50 bp, Artificial
  Synthetic oligonucleotide
aaaccatcgcacgcatagtgcccctgcatgaaagcgaccccaggtcccga

SEQ ID NO: 167760 - DNA, 50 bp, Artificial
  Synthetic oligonucleotide
ttgttttcattcgcgcaagacgaccatcaggcccatcatcctgcgggttc

SEQ ID NO: 167761 - DNA, 50 bp, Artificial
  Synthetic oligonucleotide
cattattagcagcacccgtctcgctattcttgattcggatgacatgcgct

SEQ ID NO: 167762 - DNA, 50 bp, Artificial
  Synthetic oligonucleotide
aaaccaggtgggcgcaatgcccgcaattgaatacccgcatgccgtagagc

SEQ ID NO: 167763 - DNA, 50 bp, Artificial
  Synthetic oligonucleotide
tttagctgaatttataaagcgcccgcaagctgtagcaaatcggcgcgggg

SEQ ID NO: 167764 - DNA, 50 bp, Artificial
  Synthetic oligonucleotide
aaaagtgctcgcggggaggggcgaaaaactgcatgggcggacgcttgcta

SEQ ID NO: 167765 - DNA, 50 bp, Artificial
  Synthetic oligonucleotide
aaaactcgcttgtgtggctgccggatacggagtgctctcgacgctcccta

SEQ ID NO: 167766 - DNA, 50 bp, Artificial
  Synthetic oligonucleotide
ccaggatggaacccgccacgcgggtcgctttgcaatgcttcatgctttct

SEQ ID NO: 167767 - DNA, 50 bp, Artificial
  Synthetic oligonucleotide
tttcgggcaagaggctgggctggggttctaggaacatggttttctccaaa

SEQ ID NO: 167768 - DNA, 50 bp, Artificial
  Synthetic oligonucleotide
tttgggggacgacatggggccacattatcccggcgtttacggcagacctg

SEQ ID NO: 167769 - DNA, 60 bp, Artificial
  Synthetic oligonucleotide
tttcctatgtcgatccagccgcagagtctttgatgcatcaatcgcgctggatcggtcttt

SEQ ID NO: 167770 - DNA, 50 bp, Artificial
  Synthetic oligonucleotide
aaaaccaactccgactcgtgcttcgcggggtaagaccggcgcagtagcgc

SEQ ID NO: 167771 - DNA, 50 bp, Artificial
  Synthetic oligonucleotide
cattcgatcattgttgggtcaatctcaagagcccattcgaaattttcctt

SEQ ID NO: 167772 - DNA, 50 bp, Artificial
  Synthetic oligonucleotide
ccactttcaagcgtagattggccttccccctgaacgccatagcgcaccga

SEQ ID NO: 167773 - DNA, 50 bp, Artificial
  Synthetic oligonucleotide
ttttggcggaatacagcaattgccgcgatccatgggcctggggcatgtat

SEQ ID NO: 167774 - DNA, 50 bp, Artificial
  Synthetic oligonucleotide
aaaacacccgccttagcctcatttcgtctggagagcggagggagccgaga

SEQ ID NO: 167775 - DNA, 50 bp, Artificial
  Synthetic oligonucleotide
aacacgcccctcggccacacaggttggaagcggtcaattcgagtgtccgc

SEQ ID NO: 167776 - DNA, 50 bp, Artificial
  Synthetic oligonucleotide
aacaatacggcctcgttgggcctcgcaagtacacgcctgcagaccgtccg

SEQ ID NO: 167777 - DNA, 50 bp, Artificial
  Synthetic oligonucleotide
aacaacacgttgggtcacttgcgtgtgccccaggcagcaatcgaagggtt

SEQ ID NO: 167778 - DNA, 50 bp, Artificial
  Synthetic oligonucleotide
catccatagatcttatgcggtattagcaaagctttcgcctcgttatcccc

SEQ ID NO: 167779 - DNA, 50 bp, Artificial
  Synthetic oligonucleotide
aaatgccgggtttcccccgaacacagtcaggacaccccatggacgcagaa

SEQ ID NO: 167780 - DNA, 58 bp, Artificial
  Synthetic oligonucleotide
ccacttaacaaagcttcggcatgcacgattcggacaggttgcggtacctaactgaaca

SEQ ID NO: 167781 - DNA, 50 bp, Artificial
  Synthetic oligonucleotide
aaatcttggtgacaaggggcgcgtcttcgccagtcgcatgctcgggcgta

SEQ ID NO: 167782 - DNA, 50 bp, Artificial
  Synthetic oligonucleotide
ccccacaggatcttcgagaggctcgcccatgcgttatcccggcccgcgcg

SEQ ID NO: 167783 - DNA, 50 bp, Artificial
  Synthetic oligonucleotide
catcgaacgcgctgacaaggctacccttttggtccctggccagcaccttg

SEQ ID NO: 167784 - DNA, 50 bp, Artificial
  Synthetic oligonucleotide
cccaatagccggctttccgcccgacggggtcacctccatcgaattcagct

SEQ ID NO: 167785 - DNA, 50 bp, Artificial
  Synthetic oligonucleotide
ttgccacaatggtgcggctatgtgcagtgatccacccgcgctccgttacc

SEQ ID NO: 167786 - DNA, 50 bp, Artificial
  Synthetic oligonucleotide
aaactgcccatcgtcatgcttcacggcgggttccacaacggaaccggcta

SEQ ID NO: 167787 - DNA, 50 bp, Artificial
  Synthetic oligonucleotide
ccatggcgaacacctgggcgtccaaggatcagttgggagccaccatccag

SEQ ID NO: 167788 - DNA, 50 bp, Artificial
  Synthetic oligonucleotide
aaacgaccgcccacggggaccgagtaaaccagaccaacgctactcgcgtc

SEQ ID NO: 167789 - DNA, 50 bp, Artificial
  Synthetic oligonucleotide
aaaccttggcccccacgttcgctcactgcgtcggcttctatgccaactca

SEQ ID NO: 167790 - DNA, 50 bp, Artificial
  Synthetic oligonucleotide
aaaccttcgttctcaacagtgtgggagggcggtttgcacggcgcatcacg

SEQ ID NO: 167791 - DNA, 58 bp, Artificial
  Synthetic oligonucleotide
ccagattttgtcggcttgtttttctgacaagtccacgacatcggatgaaatattatcc

SEQ ID NO: 167792 - DNA, 50 bp, Artificial
  Synthetic oligonucleotide
aaggcatggtgctgggttgtcgcgttagccgcggacgagcgaacttcggg

SEQ ID NO: 167793 - DNA, 50 bp, Artificial
  Synthetic oligonucleotide
tcggcatggtcacttgctataaaagaactagcggcttaggaagattggac

SEQ ID NO: 167794 - DNA, 50 bp, Artificial
  Synthetic oligonucleotide
aaggcccacaggtagcgtcccagcaccgaggtctggttcatgagccgcat

SEQ ID NO: 167795 - DNA, 50 bp, Artificial
  Synthetic oligonucleotide
caccaacccaaaggtcagcgacaggctgctaaaagcgcagctggctacga

SEQ ID NO: 167796 - DNA, 50 bp, Artificial
  Synthetic oligonucleotide
tcgcccaatatgccagtggcacctccagcactgactgatcattgccctgg

SEQ ID NO: 167797 - DNA, 50 bp, Artificial
  Synthetic oligonucleotide
aaggccctcaaactcacgagccccgtgcaggcgcccaaacgcatgaaaca

SEQ ID NO: 167798 - DNA, 50 bp, Artificial
  Synthetic oligonucleotide
aaggcccttcgaacgattgcaaagatgggggcgcgcattcggcggaatac

SEQ ID NO: 167799 - DNA, 50 bp, Artificial
  Synthetic oligonucleotide
aaggcgcatggtaactgccgccctgttcaaaactggcgcctcctgcgacg

SEQ ID NO: 167800 - DNA, 50 bp, Artificial
  Synthetic oligonucleotide
aaggctccagttgattgagacccaaccctgcgttccagccgacccgctac

SEQ ID NO: 167801 - DNA, 50 bp, Artificial
  Synthetic oligonucleotide
tcgatcacagcttaaagggccttcacatagaatgcaacgattgtattggc

SEQ ID NO: 167802 - DNA, 53 bp, Artificial
  Synthetic oligonucleotide
aaacaaagtttcgacgtagccagggacgacaaaaccttttacttgcagcatcc

SEQ ID NO: 167803 - DNA, 50 bp, Artificial
  Synthetic oligonucleotide
tcgagggtgaacacgctagagcccagcttccgaatggtgaggcacgatcc

SEQ ID NO: 167804 - DNA, 50 bp, Artificial
  Synthetic oligonucleotide
aagggagcgaagcctggggtggccatcactgataccctggatgccaacgc

SEQ ID NO: 167805 - DNA, 50 bp, Artificial
  Synthetic oligonucleotide
aagggccgtcgattgctcaggcgatccgctcaaaaatcaacgccgacgta

SEQ ID NO: 167806 - DNA, 50 bp, Artificial
  Synthetic oligonucleotide
aatacgccttcggaggttggggcacgaacgaagtcatgggcacgccttgg

SEQ ID NO: 167807 - DNA, 50 bp, Artificial
  Synthetic oligonucleotide
tcccacgccaaatacaaagtcgtgctggagtcccttggctcgcctgaccc

SEQ ID NO: 167808 - DNA, 50 bp, Artificial
  Synthetic oligonucleotide
aagtggcagcgctgaagagccaagcccactgcgtcgtgcccgcgtggggc

SEQ ID NO: 167809 - DNA, 50 bp, Artificial
  Synthetic oligonucleotide
aagtggagggctgaatgggtagccaggttggctccagaaagtgggggcgc

SEQ ID NO: 167810 - DNA, 50 bp, Artificial
  Synthetic oligonucleotide
cgacaattctttgagatgtacggtgcccttattgtcacaactgacgcgac

SEQ ID NO: 167811 - DNA, 50 bp, Artificial
  Synthetic oligonucleotide
tccgtcgcagaggcaacgtagacctgctgtcacgttgtcacgtccatttt

SEQ ID NO: 167812 - DNA, 50 bp, Artificial
  Synthetic oligonucleotide
aagtatggtctgcagtgggcattctctgacacccatcgtggcggccccgg

SEQ ID NO: 167813 - DNA, 58 bp, Artificial
  Synthetic oligonucleotide
ttgttctagcggcgtgtcgggagcgccgaactcagcgtagggaccgcttgcgtagacc

SEQ ID NO: 167814 - DNA, 50 bp, Artificial
  Synthetic oligonucleotide
aagtacggcccctgcctacaacgccggttgggcagaagaaatcgcactgg

SEQ ID NO: 167815 - DNA, 50 bp, Artificial
  Synthetic oligonucleotide
caatggcagtaacgggattcagtgcgaagagagttcacgcgccgtagact

SEQ ID NO: 167816 - DNA, 50 bp, Artificial
  Synthetic oligonucleotide
aagtacaccggccccttcgatgtacgcatgttcccggagcgccactcctc

SEQ ID NO: 167817 - DNA, 50 bp, Artificial
  Synthetic oligonucleotide
cacacctgcagcgcagacctggcgaatcaggtcctatggagcggctcccg

SEQ ID NO: 167818 - DNA, 50 bp, Artificial
  Synthetic oligonucleotide
tcctgggcccatctcgtgcttccagcagtcacggtgggtgtaatagcccg

SEQ ID NO: 167819 - DNA, 50 bp, Artificial
  Synthetic oligonucleotide
cctttgggcgtttcgtagacgcgcaagccccagtccgggtgcctggctga

SEQ ID NO: 167820 - DNA, 50 bp, Artificial
  Synthetic oligonucleotide
aaggtctcgtacggcactttgcatcccgttgtgggctggttgcaccgcta

SEQ ID NO: 167821 - DNA, 50 bp, Artificial
  Synthetic oligonucleotide
aagggcttctcttggccgactgcggcactactcgtgtgtgcgtacatgcg

SEQ ID NO: 167822 - DNA, 50 bp, Artificial
  Synthetic oligonucleotide
aagggcgatgcctggagccgtaaagactggcgctccccgatttatcgctt

SEQ ID NO: 167823 - DNA, 50 bp, Artificial
  Synthetic oligonucleotide
aagcatccaagtcgtcaggtgggaccaccagccgcatactacgcagaggc

SEQ ID NO: 167824 - DNA, 60 bp, Artificial
  Synthetic oligonucleotide
gcagaagttccgattggcgccaaagaatcaaataagcgcatgcatcctgagagcatcgta

SEQ ID NO: 167825 - DNA, 60 bp, Artificial
  Synthetic oligonucleotide
ccatgattcacggctcatgctcggactaccgcgccgccgcaacaattgaccttgaacacg

SEQ ID NO: 167826 - DNA, 50 bp, Artificial
  Synthetic oligonucleotide
cctaggagccataattcatggcaacgacagaggtgtttatgagcaacagg

SEQ ID NO: 167827 - DNA, 50 bp, Artificial
  Synthetic oligonucleotide
aagcacgctgtcctggtgcgaaaactccagcgcacctgcccacgcagatg

SEQ ID NO: 167828 - DNA, 50 bp, Artificial
  Synthetic oligonucleotide
ccgtttgccggggcacgcgatacatgccgtctgcggagaccatttgcatg

SEQ ID NO: 167829 - DNA, 50 bp, Artificial
  Synthetic oligonucleotide
ccggccgtaaggcaaggtggcagttcgtgtgcagatcctgtcagtgcacc

SEQ ID NO: 167830 - DNA, 50 bp, Artificial
  Synthetic oligonucleotide
ccggcccaccaattgatcgagggtgaacacgctagagcccagcttccgaa

SEQ ID NO: 167831 - DNA, 50 bp, Artificial
  Synthetic oligonucleotide
tgcaaccccgcattcgttcatgtgagcggcttcgcacacgaggagctact

SEQ ID NO: 167832 - DNA, 50 bp, Artificial
  Synthetic oligonucleotide
aagcacgacctcttggcagctcacatggacgacgtaggggtgccgacccg

SEQ ID NO: 167833 - DNA, 50 bp, Artificial
  Synthetic oligonucleotide
aagacgagcatgaggggccatggttgcactctcccgtcggacgacacgcc

SEQ ID NO: 167834 - DNA, 50 bp, Artificial
  Synthetic oligonucleotide
ccgcaggccccaatcgactggcatgaagtacagcgttcgcacccatcgga

SEQ ID NO: 167835 - DNA, 50 bp, Artificial
  Synthetic oligonucleotide
aagacacgccaactcgcgccaaggcccttcgaacgattgcaaagatgggg

SEQ ID NO: 167836 - DNA, 60 bp, Artificial
  Synthetic oligonucleotide
catggcagggtcaagttattcatgaggtgaaattcctcgccgggaaactggcgagtcaga

SEQ ID NO: 167837 - DNA, 50 bp, Artificial
  Synthetic oligonucleotide
cagccggttcctttctccttcagcgggtatgccgacttcgtgggggagtg

SEQ ID NO: 167838 - DNA, 50 bp, Artificial
  Synthetic oligonucleotide
cagccttcatggcggtggctactagtgagggcgcctcagatgctcagcgg

SEQ ID NO: 167839 - DNA, 50 bp, Artificial
  Synthetic oligonucleotide
aagacaactcctcggggtgcgtgcagcgacctattttgccagcgtgcaag

SEQ ID NO: 167840 - DNA, 50 bp, Artificial
  Synthetic oligonucleotide
cagcgggaggatatcgggttagctgccgccagaccgggcaagcgtaagac

SEQ ID NO: 167841 - DNA, 50 bp, Artificial
  Synthetic oligonucleotide
tgcggcgaagatctgtcacctgctgcatgttctcaccaatgctgtagatg

SEQ ID NO: 167842 - DNA, 50 bp, Artificial
  Synthetic oligonucleotide
caccccacatgcgctcgtgcaagtcacgtacctccttagccacgtacggc

SEQ ID NO: 167843 - DNA, 50 bp, Artificial
  Synthetic oligonucleotide
tcgttctacgtccaccgagggccaacaatgcgccccctgacgttcaatga

SEQ ID NO: 167844 - DNA, 50 bp, Artificial
  Synthetic oligonucleotide
aaggaacccggagcgtagcaatgtctcgccgatccattccaggcccatcc

SEQ ID NO: 167845 - DNA, 50 bp, Artificial
  Synthetic oligonucleotide
cacccggtgcgtccacgtttccccaaggaaccgtgccggtgtggcaaggc

SEQ ID NO: 167846 - DNA, 50 bp, Artificial
  Synthetic oligonucleotide
aagcgtgtggggccagggttatcgcagccgcctcgaacgatgaaaaatgc

SEQ ID NO: 167847 - DNA, 58 bp, Artificial
  Synthetic oligonucleotide
ccccatattccaccgggaacattaactgtcgcatcccgtacgatcatatggtcgcttg

SEQ ID NO: 167848 - DNA, 50 bp, Artificial
  Synthetic oligonucleotide
aagcgggctactggtcaggtgatttggtgagcacccaaatgcacgcgggg

SEQ ID NO: 167849 - DNA, 50 bp, Artificial
  Synthetic oligonucleotide
aagcggccccctgctgcgggtattcattgaccaggcctaaacgcacattt

SEQ ID NO: 167850 - DNA, 50 bp, Artificial
  Synthetic oligonucleotide
aagcgcgtgcgatggagggctcggggctacgggtgaacccggatgactcg

SEQ ID NO: 167851 - DNA, 50 bp, Artificial
  Synthetic oligonucleotide
aagcgcatctactcccttcgccgtagctccaaaaccccgcatctaggccg

SEQ ID NO: 167852 - DNA, 50 bp, Artificial
  Synthetic oligonucleotide
aagcgacacctcgattgttcggcgtccgccccactggagaaacagtggat

SEQ ID NO: 167853 - DNA, 50 bp, Artificial
  Synthetic oligonucleotide
aagcctgggccgcaacgctggtccccgacgtgacaatgaagcacttatca

SEQ ID NO: 167854 - DNA, 50 bp, Artificial
  Synthetic oligonucleotide
aagccgtcactggtgcgccaatcggtcccttgaatccataccgcagggat

SEQ ID NO: 167855 - DNA, 50 bp, Artificial
  Synthetic oligonucleotide
cacgatgagagcggtgccaggtgaggtctaacgtcggagatgaccggcgg

SEQ ID NO: 167856 - DNA, 50 bp, Artificial
  Synthetic oligonucleotide
tcttgaaggtagaggctggcgagtaacgccgagcggaacgcgacacgttg

SEQ ID NO: 167857 - DNA, 50 bp, Artificial
  Synthetic oligonucleotide
cacgcctaaacctggctgacgtatgtccgccgcccttaaccctggtggga

SEQ ID NO: 167858 - DNA, 60 bp, Artificial
  Synthetic oligonucleotide
ttggctacccgtgcccgtatctgtctggctggccgcacccgattggcaccatattcccgc

SEQ ID NO: 167859 - DNA, 50 bp, Artificial
  Synthetic oligonucleotide
aagccctgcattccaacgcggatacggattgcccttcaccgcaaacgccg

SEQ ID NO: 167860 - DNA, 50 bp, Artificial
  Synthetic oligonucleotide
aagcatgcaacacggcactagccccggtcccggtggatgacgggtcgccc

SEQ ID NO: 167861 - DNA, 50 bp, Artificial
  Synthetic oligonucleotide
agatgaaggatattggcgcggtagtccgggttccaggcagcggccttgcg

SEQ ID NO: 167862 - DNA, 50 bp, Artificial
  Synthetic oligonucleotide
agatctgggaggcacttgagtcctcccgttcgcacaatctgccgcttcga

SEQ ID NO: 167863 - DNA, 50 bp, Artificial
  Synthetic oligonucleotide
agatcggctatcacgcctgtctgccaaaggggcggccattgagagcgctc

SEQ ID NO: 167864 - DNA, 50 bp, Artificial
  Synthetic oligonucleotide
agatccctcctatatgcgtacaagtctggtcgggattgtggcaaacgcag

SEQ ID NO: 167865 - DNA, 50 bp, Artificial
  Synthetic oligonucleotide
agagtgaaaacgtgaggccatcaatatgctcctggaaatggtcctacagt

SEQ ID NO: 167866 - DNA, 50 bp, Artificial
  Synthetic oligonucleotide
aggtctaacgtcggagatgaccggcggacagtaggcgggcaaaggcactc

SEQ ID NO: 167867 - DNA, 50 bp, Artificial
  Synthetic oligonucleotide
agagcgtgttcgagctgcggtgcatcagccgagcccacagcctgaacgtt

SEQ ID NO: 167868 - DNA, 50 bp, Artificial
  Synthetic oligonucleotide
gcccagagcttcgggtgactggaacacgcgagcacaactcgtgggtgagt

SEQ ID NO: 167869 - DNA, 59 bp, Artificial
  Synthetic oligonucleotide
ttgcgcgactctgctagatttttatccgaccttacggttagccactcagtcagctcctt

SEQ ID NO: 167870 - DNA, 50 bp, Artificial
  Synthetic oligonucleotide
agagcctgtggcaaccccgcgactggatctccgtcatgtcctgatgcgtg

SEQ ID NO: 167871 - DNA, 50 bp, Artificial
  Synthetic oligonucleotide
agagccgtcggccttgaatagtgccgagatccgacccatggggtaagccc

SEQ ID NO: 167872 - DNA, 50 bp, Artificial
  Synthetic oligonucleotide
aggtgcccgcccccgctgcatgcggtgaaaaactccctacaacattctgc

SEQ ID NO: 167873 - DNA, 50 bp, Artificial
  Synthetic oligonucleotide
agagaggttggaacggtctttcacacccggattgtcgctttggcgcgggg

SEQ ID NO: 167874 - DNA, 50 bp, Artificial
  Synthetic oligonucleotide
ctgacctatacggaagtgcagacccgctgcacggcacagatgcagtcgct

SEQ ID NO: 167875 - DNA, 50 bp, Artificial
  Synthetic oligonucleotide
gcccctgcgagcgtcatgcagtagtgctcgttggccacgaggtgaggtgt

SEQ ID NO: 167876 - DNA, 50 bp, Artificial
  Synthetic oligonucleotide
aggtgccgagtcagcaacagccagatctcttgcacaggcctcggtagcgc

SEQ ID NO: 167877 - DNA, 50 bp, Artificial
  Synthetic oligonucleotide
agccaccggtgctctgatcactgcccgcagcttggatgcttgtgcccttc

SEQ ID NO: 167878 - DNA, 50 bp, Artificial
  Synthetic oligonucleotide
agccaaaggcaaccgcggcatagcccgagtaggtgcccgtaccaagggag

SEQ ID NO: 167879 - DNA, 50 bp, Artificial
  Synthetic oligonucleotide
aggtagacggaacgatcccgccctcatagccgcacgaggactttgccctc

SEQ ID NO: 167880 - DNA, 55 bp, Artificial
  Synthetic oligonucleotide
ccccgtcgtttcgttcgttgttcgcctatttcgcgcgccgacaagcgagcggagc

SEQ ID NO: 167881 - DNA, 50 bp, Artificial
  Synthetic oligonucleotide
agcatgaattccgtcggggcttcggaaacgacgtatcgggtgtggacgga

SEQ ID NO: 167882 - DNA, 50 bp, Artificial
  Synthetic oligonucleotide
agcataaggaaccgcgctatctcggcctggaagcttgggtgcggatacga

SEQ ID NO: 167883 - DNA, 50 bp, Artificial
  Synthetic oligonucleotide
gcagaggccgggcgctaggtaggaggggatgcaattgctcgatggggcat

SEQ ID NO: 167884 - DNA, 50 bp, Artificial
  Synthetic oligonucleotide
aggtcaacggacgttcatccacgcggggccacagcgcctgtcaatccacg

SEQ ID NO: 167885 - DNA, 50 bp, Artificial
  Synthetic oligonucleotide
gcagcgatgctcagatctggacgggatgccagagggttttgcggcagata

SEQ ID NO: 167886 - DNA, 50 bp, Artificial
  Synthetic oligonucleotide
agcacgaggacttgacaccgaatcggtcagagccgtagcgcaactggcca

SEQ ID NO: 167887 - DNA, 50 bp, Artificial
  Synthetic oligonucleotide
agcaccgcacccgtgtggctgagttggtgcccgtcgaacagcattctgct

SEQ ID NO: 167888 - DNA, 50 bp, Artificial
  Synthetic oligonucleotide
aggtccgcgtggcatttcggctgtacccattgcgcccgtacccctggcat

SEQ ID NO: 167889 - DNA, 50 bp, Artificial
  Synthetic oligonucleotide
gcagggaggccttctcgcatgtgggggcgggaacagtcagtcgggcatgg

SEQ ID NO: 167890 - DNA, 50 bp, Artificial
  Synthetic oligonucleotide
agcacccaaaccagggtcctgcccacttggaattcctcccggtcgggata

SEQ ID NO: 167891 - DNA, 51 bp, Artificial
  Synthetic oligonucleotide
ttgccgggcggttagcggggccggattttagacccaacctttggagaatac

SEQ ID NO: 167892 - DNA, 50 bp, Artificial
  Synthetic oligonucleotide
agcacacgcgaactgaggatcctgacgccgaggaccggccaagtgtctac

SEQ ID NO: 167893 - DNA, 50 bp, Artificial
  Synthetic oligonucleotide
agattcggtggggtacggactggggtcagcgcatggacagtagcacgggc

SEQ ID NO: 167894 - DNA, 50 bp, Artificial
  Synthetic oligonucleotide
gcgaccctgaccgtgtctgctgggacagttacgaaatgcgcgtcaacggg

SEQ ID NO: 167895 - DNA, 50 bp, Artificial
  Synthetic oligonucleotide
acttgtgccggtagaagcggccccctgctgcgggtattcattgaccaggc

SEQ ID NO: 167896 - DNA, 50 bp, Artificial
  Synthetic oligonucleotide
acttgggcgcactgaccgcgagtccgtcggtacccaccgagaatccgatg

SEQ ID NO: 167897 - DNA, 50 bp, Artificial
  Synthetic oligonucleotide
acttgcgtttcttcccccgcaactgcatcaagcggttctcccctgcccga

SEQ ID NO: 167898 - DNA, 50 bp, Artificial
  Synthetic oligonucleotide
acttgcgaccgatcggggtgggctgaaggaacctgaagggccgtttgcgt

SEQ ID NO: 167899 - DNA, 50 bp, Artificial
  Synthetic oligonucleotide
acttcggctttggcactcgctcgcaaggagtgctaacatcccggcctgca

SEQ ID NO: 167900 - DNA, 50 bp, Artificial
  Synthetic oligonucleotide
gcgcatagcacgcgtgtcgggtcgggctgtcaaagtggcagccggttggg

SEQ ID NO: 167901 - DNA, 50 bp, Artificial
  Synthetic oligonucleotide
gcgcatgtcagaggcacgtgcagcttttaccaaggaatcggccctgcacc

SEQ ID NO: 167902 - DNA, 60 bp, Artificial
  Synthetic oligonucleotide
ttgcaggcacctggcgctcgaggtccccaggtgcgctatcgaagcaacactgaaattcgc

SEQ ID NO: 167903 - DNA, 50 bp, Artificial
  Synthetic oligonucleotide
agtcctgggggcggggctacacgctgtatctagaggaattgcctgtgccc

SEQ ID NO: 167904 - DNA, 50 bp, Artificial
  Synthetic oligonucleotide
gcgccgaagaatgggtgattctcgcgctcgatgcccctaactgagccaca

SEQ ID NO: 167905 - DNA, 50 bp, Artificial
  Synthetic oligonucleotide
ctccttcaaacggccgctttgggtccccggtcatgtaccgatgcaacgca

SEQ ID NO: 167906 - DNA, 50 bp, Artificial
  Synthetic oligonucleotide
actgcccccacgacttcgggacagcgcccgaatttttaccccacaggttc

SEQ ID NO: 167907 - DNA, 50 bp, Artificial
  Synthetic oligonucleotide
agtcgctcgaaatccgcgcgcccaattcttgtggtgccgggagggaggtc

SEQ ID NO: 167908 - DNA, 50 bp, Artificial
  Synthetic oligonucleotide
actcgcttttgggcacgtcgcactgctggaccacgcagatttcgctctcg

SEQ ID NO: 167909 - DNA, 50 bp, Artificial
  Synthetic oligonucleotide
agtgacccgccgggctactcactcagtaaccccctcagcgtaggccataa

SEQ ID NO: 167910 - DNA, 50 bp, Artificial
  Synthetic oligonucleotide
agagaaggcgcctatctgctgaatgcttgactcacgcggtgttgctgaag

SEQ ID NO: 167911 - DNA, 50 bp, Artificial
  Synthetic oligonucleotide
gccctcagggcacggacacccaatcagggctggaagtccagctgatagtt

SEQ ID NO: 167912 - DNA, 50 bp, Artificial
  Synthetic oligonucleotide
agagaagcatcggggttccgccacccagagtaatccacagcgcttctgcg

SEQ ID NO: 167913 - DNA, 60 bp, Artificial
  Synthetic oligonucleotide
ttgacccaaagcgtgcacgaaagcatgagtacgttgtatgtgtacaaaatcgtgtctccg

SEQ ID NO: 167914 - DNA, 50 bp, Artificial
  Synthetic oligonucleotide
ctgaagccggagcgccctgaatgcaagctggtatgagtccgcatccgcca

SEQ ID NO: 167915 - DNA, 50 bp, Artificial
  Synthetic oligonucleotide
agacggacagtctgacgcgctcatccaagcctttcagggcgctccggttc

SEQ ID NO: 167916 - DNA, 50 bp, Artificial
  Synthetic oligonucleotide
aggttcgcgcctgcagtcgacattacgttagaccgcacgaacggagccgg

SEQ ID NO: 167917 - DNA, 50 bp, Artificial
  Synthetic oligonucleotide
agaccgcttggggcatccggtcaagccgagggaatggtttttggtgccgt

SEQ ID NO: 167918 - DNA, 50 bp, Artificial
  Synthetic oligonucleotide
agaccgactgcccatgcccacacggggaggcagccaagacaacaaggagg

SEQ ID NO: 167919 - DNA, 50 bp, Artificial
  Synthetic oligonucleotide
agacatacccttgctgccgtttcaacgctgcgattttctgccgggcctgg

SEQ ID NO: 167920 - DNA, 50 bp, Artificial
  Synthetic oligonucleotide
agacactttgcgtgcggttttggccgcttgaggggaggggtaggcagcag

SEQ ID NO: 167921 - DNA, 50 bp, Artificial
  Synthetic oligonucleotide
agaagcgctcactctgcgaggcaaagaacgcgcaagccagaatcagcgca

SEQ ID NO: 167922 - DNA, 50 bp, Artificial
  Synthetic oligonucleotide
agtcaacccacgctgttcacgcaattggcccatatttcgggctagagtgt

SEQ ID NO: 167923 - DNA, 50 bp, Artificial
  Synthetic oligonucleotide
agaaacgacggtttcacggcgacctttgcgtgtgagcgagcgagcttgct

SEQ ID NO: 167924 - DNA, 60 bp, Artificial
  Synthetic oligonucleotide
ttgaatgcctgcctcgaatcctgctttgcgtggcgtcatggctgcgtccttcgtgtggta

SEQ ID NO: 167925 - DNA, 50 bp, Artificial
  Synthetic oligonucleotide
agtccgtagctccggcgacccttgcttcaccgtcaaggcactacgctcca

SEQ ID NO: 167926 - DNA, 50 bp, Artificial
  Synthetic oligonucleotide
acttgtggcttagtccaccgtaacgtcgtccgtgcaacgcactggggcgg

SEQ ID NO: 167927 - DNA, 50 bp, Artificial
  Synthetic oligonucleotide
acttgtgcgcggagtctgcgtggagccgctcatgccagtactgtttgacc

SEQ ID NO: 167928 - DNA, 50 bp, Artificial
  Synthetic oligonucleotide
gcgaatggatacgacatgggttgaactcctgtgcgaggattgtatatgcc

SEQ ID NO: 167929 - DNA, 50 bp, Artificial
  Synthetic oligonucleotide
aggatacggttacggtgagggttacggggccgtggtctggcaggcgaaag

SEQ ID NO: 167930 - DNA, 50 bp, Artificial
  Synthetic oligonucleotide
aggcttgtggtcgcgctttccatgcctttgacgccttggccgctcagaac

SEQ ID NO: 167931 - DNA, 50 bp, Artificial
  Synthetic oligonucleotide
aggagcggcgcgagtcattctgcaaggcgacactggtctcgaaagccaat

SEQ ID NO: 167932 - DNA, 50 bp, Artificial
  Synthetic oligonucleotide
aggagcgcgcattctagggagtggtgccttgcgacgggataatcgcgccc

SEQ ID NO: 167933 - DNA, 50 bp, Artificial
  Synthetic oligonucleotide
aggactgcacggtcgtagcagacacttctgcgacccatcgggctctccgc

SEQ ID NO: 167934 - DNA, 50 bp, Artificial
  Synthetic oligonucleotide
gacgatatggaccgtgggttgcatggcggacacagcagtgcagcggcaaa

SEQ ID NO: 167935 - DNA, 60 bp, Artificial
  Synthetic oligonucleotide
gcagcctgagccgttccccgagcacatgatcggtcaggacccggacttcttctatgagac

SEQ ID NO: 167936 - DNA, 60 bp, Artificial
  Synthetic oligonucleotide
ttcgtagcccctcgaccagaagcattgaatcgcggcatcgagggccactgcttcgtcaaa

SEQ ID NO: 167937 - DNA, 50 bp, Artificial
  Synthetic oligonucleotide
gacgccaatgtcggctcggtcttgggcttcggattccccgcatggacagg

SEQ ID NO: 167938 - DNA, 50 bp, Artificial
  Synthetic oligonucleotide
aggaagcaatcccatgaagccatggagggcgtcgggctatttgcggcgtt

SEQ ID NO: 167939 - DNA, 50 bp, Artificial
  Synthetic oligonucleotide
aggggaaggccggatcagagaagtggacgctcgttccgccctctgctttc

SEQ ID NO: 167940 - DNA, 50 bp, Artificial
  Synthetic oligonucleotide
agcttcagtgcagggaccagccgcctggttcacaggccgggtacgcatcg

SEQ ID NO: 167941 - DNA, 50 bp, Artificial
  Synthetic oligonucleotide
gacttgcgacagcgtgcattcgtgccgttctacgtcgctccgtgggctct

SEQ ID NO: 167942 - DNA, 50 bp, Artificial
  Synthetic oligonucleotide
gagaagatcatgcatcccctgccgggctagccagcaccgctactgggtta

SEQ ID NO: 167943 - DNA, 50 bp, Artificial
  Synthetic oligonucleotide
agctgacgttcacagaccgcttccatcgcgagctgtctccggcatggctg

SEQ ID NO: 167944 - DNA, 50 bp, Artificial
  Synthetic oligonucleotide
aggggacatggcggacccgcagcacatacgctttcccacccaactcatcg

SEQ ID NO: 167945 - DNA, 50 bp, Artificial
  Synthetic oligonucleotide
agctctcgccttgccctaccgagaacgccgcttcgtcccatgcagtgagg

SEQ ID NO: 167946 - DNA, 50 bp, Artificial
  Synthetic oligonucleotide
agctcctcgagtacctgcgactcaatccggggaagctcgcttacgcctcg

SEQ ID NO: 167947 - DNA, 60 bp, Artificial
  Synthetic oligonucleotide
atccacgagtgcgcgtgcgcagcgctcaccgcgtgtgttcgacgcgcaatcaccaggccc

SEQ ID NO: 167948 - DNA, 50 bp, Artificial
  Synthetic oligonucleotide
aggcgctggctaacacacctgcccccttgaatactccggcaaacgccgaa

SEQ ID NO: 167949 - DNA, 50 bp, Artificial
  Synthetic oligonucleotide
gaaaccgatctgatacgcacggagatgctgatcactgaaggagtggtacg

SEQ ID NO: 167950 - DNA, 50 bp, Artificial
  Synthetic oligonucleotide
aggcgctaatcccgcctccttgcgttggtacgaagaacgcagcgtgtcgc

SEQ ID NO: 167951 - DNA, 50 bp, Artificial
  Synthetic oligonucleotide
aggcggacgcgtgactttcatgagcgtagcggcgtacgagatggcaaccg

SEQ ID NO: 167952 - DNA, 50 bp, Artificial
  Synthetic oligonucleotide
aggccgcgggacatcgaccgatcaaacgttaggcgacaggcagcgcaaac

SEQ ID NO: 167953 - DNA, 50 bp, Artificial
  Synthetic oligonucleotide
aggcggagcgcagacagcaccaatgcacggcaagcgacgccggcaaagtg

SEQ ID NO: 167954 - DNA, 50 bp, Artificial
  Synthetic oligonucleotide
gaaggccagcgcaataccggattcaagtcgtgacatggttgccgccacct

SEQ ID NO: 167955 - DNA, 50 bp, Artificial
  Synthetic oligonucleotide
cttgcgcaagtcaagggctgccaaaacccagcccgcgacgacacagacgg

SEQ ID NO: 167956 - DNA, 50 bp, Artificial
  Synthetic oligonucleotide
gaagtttaaagatgtcatccgcagccaacccaatatctacgggctgttta

SEQ ID NO: 167957 - DNA, 50 bp, Artificial
  Synthetic oligonucleotide
aggccaaccccggaggctgggtctatcaaatcgcgggaagcttcggcccg

SEQ ID NO: 167958 - DNA, 59 bp, Artificial
  Synthetic oligonucleotide
atcagttcgtacactcggtgtatgggacgcagtcagagggggaggcacggcttactcac

SEQ ID NO: 167959 - DNA, 50 bp, Artificial
  Synthetic oligonucleotide
gaatacagcgcctgacgctcccacttttgacaaatgatagtccgcactca

SEQ ID NO: 167960 - DNA, 50 bp, Artificial
  Synthetic oligonucleotide
aggcgggtgcaagatgcggacggttgcgtcagcaagctcatttccacaag

SEQ ID NO: 167961 - DNA, 50 bp, Artificial
  Synthetic oligonucleotide
cttcgttgaccgtttgccggggcacgcgatacatgccgtctgcggagacc

SEQ ID NO: 167962 - DNA, 50 bp, Artificial
  Synthetic oligonucleotide
aggcagcgagtggcctcacctcgccagaaagaagggtggcggtaaccccg

SEQ ID NO: 167963 - DNA, 50 bp, Artificial
  Synthetic oligonucleotide
aggatgccttgtaccggcgtctgcatcgatggcacatgcccatgtccccg

SEQ ID NO: 167964 - DNA, 50 bp, Artificial
  Synthetic oligonucleotide
gatgcgggggaggccactacggacaacgcacaaccgtccggactccagaa

SEQ ID NO: 167965 - DNA, 50 bp, Artificial
  Synthetic oligonucleotide
agcgagcagcaacttttgcatgatgcctcccttggacgcacagacacgct

SEQ ID NO: 167966 - DNA, 50 bp, Artificial
  Synthetic oligonucleotide
agcgagatatgcgccagacccagggatgcaggtcccgcctcatgcgcctg

SEQ ID NO: 167967 - DNA, 50 bp, Artificial
  Synthetic oligonucleotide
agcgaacgtgcgcaaatggccaaggggacgtggcagggttgtcgcgcctt

SEQ ID NO: 167968 - DNA, 50 bp, Artificial
  Synthetic oligonucleotide
gcaaaggcgaccttttgcgattcgtaacgtcgggctaaggcctgccgctc

SEQ ID NO: 167969 - DNA, 60 bp, Artificial
  Synthetic oligonucleotide
tgacgaggcagttcagcagaccgttagtatctctgtccacgtcggcgtacgccagtaatt

SEQ ID NO: 167970 - DNA, 50 bp, Artificial
  Synthetic oligonucleotide
agcgaaccattcagggcaggtgcgacggatagacgcattgcctgaggccg

SEQ ID NO: 167971 - DNA, 50 bp, Artificial
  Synthetic oligonucleotide
agcgaaagtctgcgtggggagcgtacaccttgttcgcttgagcggccatt

SEQ ID NO: 167972 - DNA, 50 bp, Artificial
  Synthetic oligonucleotide
agcctcggtggttggcgtacagagtggcgaggggatcgacggaattcgtg

SEQ ID NO: 167973 - DNA, 50 bp, Artificial
  Synthetic oligonucleotide
gcaagtggcctgcctcgggtaaccaaccaccccaaatagacccattggcc

SEQ ID NO: 167974 - DNA, 50 bp, Artificial
  Synthetic oligonucleotide
agccggtaccgacaaagcggtctggctcgggtgacgcggtgtgaagcctt

SEQ ID NO: 167975 - DNA, 50 bp, Artificial
  Synthetic oligonucleotide
ctggtactcacttcaccgccctatcctctggccaacccgcgggcctatgg

SEQ ID NO: 167976 - DNA, 50 bp, Artificial
  Synthetic oligonucleotide
agccgggctgtttgcaacgacgcgaaacaggttgggtaatgttgccaccg

SEQ ID NO: 167977 - DNA, 50 bp, Artificial
  Synthetic oligonucleotide
ctgggcgtcttaatccgggttgggcggtagagacttgggggtgctcgaca

SEQ ID NO: 167978 - DNA, 50 bp, Artificial
  Synthetic oligonucleotide
agccccctcaagtgaaccttgagccgtcggtccacacggaagcctgaccg

SEQ ID NO: 167979 - DNA, 50 bp, Artificial
  Synthetic oligonucleotide
agcccccgaacagccgcttactgccccgcttcaggttatagaaacgcacc

SEQ ID NO: 167980 - DNA, 60 bp, Artificial
  Synthetic oligonucleotide
cgttgcagcgatcgatggccgcttgcagtcttcccgctgtaacccgtccagcgcgttcca

SEQ ID NO: 167981 - DNA, 50 bp, Artificial
  Synthetic oligonucleotide
agccattcggcaggccttgccagttgggcagggggtcgtcttcccgcacg

SEQ ID NO: 167982 - DNA, 50 bp, Artificial
  Synthetic oligonucleotide
agctccgggcctgtctggccgcgagtgtgaacccgaagccccgttgccca

SEQ ID NO: 167983 - DNA, 50 bp, Artificial
  Synthetic oligonucleotide
agctccacgctgattgctccctcggcgttaacttctgcgatcgaggggtt

SEQ ID NO: 167984 - DNA, 50 bp, Artificial
  Synthetic oligonucleotide
agcgttcttgtgcagggccatcgacatggcttgacactccccggggtgga

SEQ ID NO: 167985 - DNA, 50 bp, Artificial
  Synthetic oligonucleotide
agcgtgtcctcgtgcacagggcatcgggtgctccccgcagcgaaataaag

SEQ ID NO: 167986 - DNA, 50 bp, Artificial
  Synthetic oligonucleotide
agcgtgcattcgtgccgttctacgtcgctccgtgggctcttattgtcggg

SEQ ID NO: 167987 - DNA, 50 bp, Artificial
  Synthetic oligonucleotide
agcgtctggacgtaccgaagcacgaagacttggcgcaggggcggggcttg

SEQ ID NO: 167988 - DNA, 50 bp, Artificial
  Synthetic oligonucleotide
gaggtgacctggctcaaccgggccctgcatgaatacgcctaccgggaagt

SEQ ID NO: 167989 - DNA, 50 bp, Artificial
  Synthetic oligonucleotide
aggggacgtggcagggttgtcgcgccttgctacacacacttgcgagcttg

SEQ ID NO: 167990 - DNA, 50 bp, Artificial
  Synthetic oligonucleotide
agcggctcccggggagtcaaatgcgggtcaagacgtattcgacgtgagct

SEQ ID NO: 167991 - DNA, 57 bp, Artificial
  Synthetic oligonucleotide
ctacccagaggcttattgctgcaacgggggtcaggcgggcgtaaacccgtgaatgca

SEQ ID NO: 167992 - DNA, 50 bp, Artificial
  Synthetic oligonucleotide
agggggctcgcgacagtagtcagtttcccgtgggcgaacaatcgggcctt

SEQ ID NO: 167993 - DNA, 50 bp, Artificial
  Synthetic oligonucleotide
ctggtaggtagcgacatgggtctttgaaggaagttaaatcgcggcttccg

SEQ ID NO: 167994 - DNA, 50 bp, Artificial
  Synthetic oligonucleotide
gatagcgctgtcccagccgtgggtgctccgtaaaaacccgagacacccag

SEQ ID NO: 167995 - DNA, 50 bp, Artificial
  Synthetic oligonucleotide
agcgctgtgttgctgtccagtgactggggcttggacgagatcggttgaga

SEQ ID NO: 167996 - DNA, 50 bp, Artificial
  Synthetic oligonucleotide
agcgccactgtagaccgctgaattcatcgaaccgctgaactgccgcgggg

SEQ ID NO: 167997 - DNA, 50 bp, Artificial
  Synthetic oligonucleotide
gatctggttggcgtcccgtgtccgtcaatgctcggcagcgcaataggcga

SEQ ID NO: 167998 - DNA, 50 bp, Artificial
  Synthetic oligonucleotide
agcgcaaagaaatagatgcaggccaacgaccgggtttgactacagatgaa

SEQ ID NO: 167999 - DNA, 50 bp, Artificial
  Synthetic oligonucleotide
agcgatctggagggtgcgatgtgcgtcaccagcatgaattccgtcggggc

SEQ ID NO: 168000 - DNA, 50 bp, Artificial
  Synthetic oligonucleotide
accggtcggcgcaaaccccaaaagagccgcgagactgatgtcccgcatag

SEQ ID NO: 168001 - DNA, 50 bp, Artificial
  Synthetic oligonucleotide
accgggggctgagtagttacggcgtcacgagctttggagcaccaatggct

SEQ ID NO: 168002 - DNA, 60 bp, Artificial
  Synthetic oligonucleotide
tgaaattcgccgctaaattggactgccgtcgcaaatgacggcgttgccgcagggatgcga

SEQ ID NO: 168003 - DNA, 50 bp, Artificial
  Synthetic oligonucleotide
accggcttggaatggcaactacacggaagtgactgtctcgggcgggcgcc

SEQ ID NO: 168004 - DNA, 50 bp, Artificial
  Synthetic oligonucleotide
atgaaccacagtcacttgagttgctgcggcccccatgtccctggttgcgc

SEQ ID NO: 168005 - DNA, 50 bp, Artificial
  Synthetic oligonucleotide
gggcgatgccccaaactgcacacaaagacgtgttttggcggtcggcactg

SEQ ID NO: 168006 - DNA, 50 bp, Artificial
  Synthetic oligonucleotide
cggcccccatgtccctggttgcgcctgaaaactgatgaacccccatcctt

SEQ ID NO: 168007 - DNA, 50 bp, Artificial
  Synthetic oligonucleotide
accgcgtttggcttgtccgggaaaggcgtaaaccccgagcacttgctcga

SEQ ID NO: 168008 - DNA, 50 bp, Artificial
  Synthetic oligonucleotide
accgcgcaggatgacactgaccgattttgtgttgccacgcgcctggcagg

SEQ ID NO: 168009 - DNA, 50 bp, Artificial
  Synthetic oligonucleotide
accgcgagcatagcggtagctgtctgccttgaccatgccggttcatccca

SEQ ID NO: 168010 - DNA, 50 bp, Artificial
  Synthetic oligonucleotide
accgccagccgaggaaaaagttttcgcgcttgaagcccaacagggtggta

SEQ ID NO: 168011 - DNA, 50 bp, Artificial
  Synthetic oligonucleotide
acccttcccacgccctcgcgtttttcgcagttctacgcgctcaccaagcc

SEQ ID NO: 168012 - DNA, 50 bp, Artificial
  Synthetic oligonucleotide
accctgggcgccggagacaccacttcgccggaataatcgggggatgaaca

SEQ ID NO: 168013 - DNA, 55 bp, Artificial
  Synthetic oligonucleotide
ctacgttcattttttaggtccagacttggttcaacagcctcagttgtcggagtta

SEQ ID NO: 168014 - DNA, 50 bp, Artificial
  Synthetic oligonucleotide
accctgcttcgatgtgaatcagcgggcatcaggaatcccccgcagacgga

SEQ ID NO: 168015 - DNA, 50 bp, Artificial
  Synthetic oligonucleotide
atgaggttggcatcacctccattgcagcctgcccacctgcctcgatcgca

SEQ ID NO: 168016 - DNA, 50 bp, Artificial
  Synthetic oligonucleotide
accctagggccgttgctatggtgcgggcccggaaattgcgttatgttcgg

SEQ ID NO: 168017 - DNA, 50 bp, Artificial
  Synthetic oligonucleotide
atgcacgtggttgccggcctagggggcacttacactccggccatatgaga

SEQ ID NO: 168018 - DNA, 50 bp, Artificial
  Synthetic oligonucleotide
atcgttctcaggcctgctaccgcaacatcgcagcgtgagcttgtgtcggg

SEQ ID NO: 168019 - DNA, 50 bp, Artificial
  Synthetic oligonucleotide
acctggctgacgtatgtccgccgcccttaaccctggtgggatcaatcccc

SEQ ID NO: 168020 - DNA, 50 bp, Artificial
  Synthetic oligonucleotide
acctgcccaaccgtgcagtcattcgggccaaggtggaaggcctatgctgg

SEQ ID NO: 168021 - DNA, 50 bp, Artificial
  Synthetic oligonucleotide
acctgagcagtgggggtctcacctcgccaagtagggtggcggtggcccat

SEQ ID NO: 168022 - DNA, 50 bp, Artificial
  Synthetic oligonucleotide
cgggatagacccagaccagggtttggggccgccacagagcccagacgcga

SEQ ID NO: 168023 - DNA, 50 bp, Artificial
  Synthetic oligonucleotide
cgggaatgcagcgtcgggctttctattcgttcggcgcacgagggattgga

SEQ ID NO: 168024 - DNA, 60 bp, Artificial
  Synthetic oligonucleotide
tgcattcgacatgtacggcaccctctacgatgtgcattcggtagtggacgcatgtgagaa

SEQ ID NO: 168025 - DNA, 50 bp, Artificial
  Synthetic oligonucleotide
acctcgcgccacaccgtctatcgtgcttcggtgcgcccatggctctggta

SEQ ID NO: 168026 - DNA, 50 bp, Artificial
  Synthetic oligonucleotide
atctaccacgtgacggtccgcccatcgctgtggctgttgacgctctccaa

SEQ ID NO: 168027 - DNA, 50 bp, Artificial
  Synthetic oligonucleotide
atctccaatgcagcggtcatgtcagtgagccccctgcatttcgccgtccg

SEQ ID NO: 168028 - DNA, 50 bp, Artificial
  Synthetic oligonucleotide
accgtgcagatgggcgatgctgtcgtgaaggcgctgagatagttggcccc

SEQ ID NO: 168029 - DNA, 50 bp, Artificial
  Synthetic oligonucleotide
gggaaatcatcggccgattgtaggcaggcgccctagaccctgcgtgcacg

SEQ ID NO: 168030 - DNA, 50 bp, Artificial
  Synthetic oligonucleotide
accgtgcagacaccaagcctgtgacgcctttagcacccccggggactcaa

SEQ ID NO: 168031 - DNA, 50 bp, Artificial
  Synthetic oligonucleotide
gggacgttttgtaggccttgtgcgcaaagtaccgatgcgacccgccctcc

SEQ ID NO: 168032 - DNA, 50 bp, Artificial
  Synthetic oligonucleotide
accgtatcgccagggtgtgcttcgccggccttatcggtgtaacgaaccga

SEQ ID NO: 168033 - DNA, 50 bp, Artificial
  Synthetic oligonucleotide
gggatgcacgcatgcggctttaacggatagctgcgcactgcacgtcgaac

SEQ ID NO: 168034 - DNA, 50 bp, Artificial
  Synthetic oligonucleotide
accggtggaagcacgcaaggttcccagatccatgctttcaccttccgccc

SEQ ID NO: 168035 - DNA, 60 bp, Artificial
  Synthetic oligonucleotide
tgccaatacccctacgaggccaaccatcgtggcgcaaagttcttgctacaagatgtgacc

SEQ ID NO: 168036 - DNA, 50 bp, Artificial
  Synthetic oligonucleotide
cgctgggccctcgaggattctcgctaggcgtcggaacgcgcggctcctat

SEQ ID NO: 168037 - DNA, 50 bp, Artificial
  Synthetic oligonucleotide
accagggtgcccgcacgatcaagggttcaccagaccgcttcgaggctttc

SEQ ID NO: 168038 - DNA, 50 bp, Artificial
  Synthetic oligonucleotide
accagccgatccaaacccacccgcaaaagtgggcacggtgttggactcaa

SEQ ID NO: 168039 - DNA, 50 bp, Artificial
  Synthetic oligonucleotide
accagcaaaacgccccacgtcagggaagtcggttgaagctgcgctgcgca

SEQ ID NO: 168040 - DNA, 50 bp, Artificial
  Synthetic oligonucleotide
gtaaggcgacgtcctggatggctgccaccggatgtgacagagggctgacg

SEQ ID NO: 168041 - DNA, 50 bp, Artificial
  Synthetic oligonucleotide
atggacccggtggagctacgccgccgtaacgacaccgacaggaactgggt

SEQ ID NO: 168042 - DNA, 50 bp, Artificial
  Synthetic oligonucleotide
accactggtgtgcgatttgttcgtggggccgttcacagtgcagacgggtg

SEQ ID NO: 168043 - DNA, 50 bp, Artificial
  Synthetic oligonucleotide
accactcgctacggcgacatggagtgcctgtcgggggacagcgttgtgtc

SEQ ID NO: 168044 - DNA, 50 bp, Artificial
  Synthetic oligonucleotide
accacgaacgtgcccaagtgcacagagcatcgggtgctccccgcagcgaa

SEQ ID NO: 168045 - DNA, 50 bp, Artificial
  Synthetic oligonucleotide
accaccgaattcaactcccgccaagactgcccgcatggccagagtcccgt

SEQ ID NO: 168046 - DNA, 56 bp, Artificial
  Synthetic oligonucleotide
agcaaaaaaccgcctcatccgtcataaattgccagaagccaagcacgacaaggggt

SEQ ID NO: 168047 - DNA, 55 bp, Artificial
  Synthetic oligonucleotide
cgtccattttgtagatcgaccgagcggcgatctaccgaataattggccgttttgg

SEQ ID NO: 168048 - DNA, 50 bp, Artificial
  Synthetic oligonucleotide
accacagcgttgtttcacgcaacgagggcctgataccggaacggaggggg

SEQ ID NO: 168049 - DNA, 50 bp, Artificial
  Synthetic oligonucleotide
accaatgtctattcagcataaacccgcgcccggctagggcccgcgcccta

SEQ ID NO: 168050 - DNA, 50 bp, Artificial
  Synthetic oligonucleotide
accaaggtaggcaccgtgcagatgggcgatgctgtcgtgaaggcgctgag

SEQ ID NO: 168051 - DNA, 50 bp, Artificial
  Synthetic oligonucleotide
accaacacacgcggctggcagttaccaaagcgccgagtcccgcatgcttt

SEQ ID NO: 168052 - DNA, 50 bp, Artificial
  Synthetic oligonucleotide
acatggccaccctctgacaagcccgcagcacgcaaacccaggcccacctg

SEQ ID NO: 168053 - DNA, 50 bp, Artificial
  Synthetic oligonucleotide
acatgagtgaggtttcttcccgggtcctcgcgtggcttgacacaggggga

SEQ ID NO: 168054 - DNA, 50 bp, Artificial
  Synthetic oligonucleotide
accctagccgacaaggtggatgccacgcgaaccatacccctgtcacccta

SEQ ID NO: 168055 - DNA, 50 bp, Artificial
  Synthetic oligonucleotide
acccgttcttaccccttgcgccatgggtgccgtgtctaggcatcctgtcc

SEQ ID NO: 168056 - DNA, 50 bp, Artificial
  Synthetic oligonucleotide
acccgtgtggctgagttggtgcccgtcgaacagcattctgctcgccgctt

SEQ ID NO: 168057 - DNA, 50 bp, Artificial
  Synthetic oligonucleotide
acccgtgatgtgaccgcaacctccaactgggcgtcaggcacccccagtgt

SEQ ID NO: 168058 - DNA, 58 bp, Artificial
  Synthetic oligonucleotide
tctgctctggggtcaatcccgcatagacgggtacggtgggctgctcgtccgtaaacag

SEQ ID NO: 168059 - DNA, 50 bp, Artificial
  Synthetic oligonucleotide
cggagacgctacgtccgggtttgcccttcaccgtgcccagttcagagtcg

SEQ ID NO: 168060 - DNA, 50 bp, Artificial
  Synthetic oligonucleotide
atgcgaggacgagtttcatggcgggaatgctttcgggaaaggggttcaca

SEQ ID NO: 168061 - DNA, 50 bp, Artificial
  Synthetic oligonucleotide
acccggcgtccttttcccctcgtgatgtttgtgcggcccagcacgatagg

SEQ ID NO: 168062 - DNA, 50 bp, Artificial
  Synthetic oligonucleotide
acccgcctggattaccgtggggccaagctgtggtttactctggtcaccgc

SEQ ID NO: 168063 - DNA, 50 bp, Artificial
  Synthetic oligonucleotide
acccgacttgtgggattggccggcgattgagaagcacgcacgacggctga

SEQ ID NO: 168064 - DNA, 50 bp, Artificial
  Synthetic oligonucleotide
accccgttaccgcggcttgacctgccccggcaagaaacaacggccccacc

SEQ ID NO: 168065 - DNA, 50 bp, Artificial
  Synthetic oligonucleotide
ggtatgcggcgacagcctcggtaagtaggccccggcccaccaattgatcg

SEQ ID NO: 168066 - DNA, 50 bp, Artificial
  Synthetic oligonucleotide
acccaggccgacttgcttggtagcaagacaaccaccgtgccgctacacgg

SEQ ID NO: 168067 - DNA, 50 bp, Artificial
  Synthetic oligonucleotide
acccagcccatccgaccacccgagctgtcgcgtttgcaaatcgaggcttc

SEQ ID NO: 168068 - DNA, 50 bp, Artificial
  Synthetic oligonucleotide
acccacatcaagcacggtgtcaccatgcctgagtgccagctgcgagatgg

SEQ ID NO: 168069 - DNA, 60 bp, Artificial
  Synthetic oligonucleotide
ctatcgcataggtaggtttacaggctgcgatgccgtgtcgctcacgatgctttttaactt

SEQ ID NO: 168070 - DNA, 50 bp, Artificial
  Synthetic oligonucleotide
ggtcgcgattaggcgtaatagccgtgacggagggtttgcaattctcgttt

SEQ ID NO: 168071 - DNA, 50 bp, Artificial
  Synthetic oligonucleotide
accatgtccaacgaacccgcccgcgctttatcgggcctgcgcaactgaca

SEQ ID NO: 168072 - DNA, 50 bp, Artificial
  Synthetic oligonucleotide
ggtcttgcatgaggctatttccttggtgtcgagtcaaaagaagaggtttg

SEQ ID NO: 168073 - DNA, 50 bp, Artificial
  Synthetic oligonucleotide
accatgacctccgcgctcccaacccttgtccgcactgcggatcccattga

SEQ ID NO: 168074 - DNA, 50 bp, Artificial
  Synthetic oligonucleotide
acgtagacgagcactgcgtcgttgcgtgcatcgggggcgtaggcctggga

SEQ ID NO: 168075 - DNA, 50 bp, Artificial
  Synthetic oligonucleotide
atacagcgcagcatttggcgaaaccgggtgtgggagtgaagctcggaccg

SEQ ID NO: 168076 - DNA, 50 bp, Artificial
  Synthetic oligonucleotide
acggtggtcagttcgcatgggcattcgcaatcagcggtcgggctctatcg

SEQ ID NO: 168077 - DNA, 50 bp, Artificial
  Synthetic oligonucleotide
acgggtttacccgaaatttcgagccgcaagtgtgccgcaacggcccccaa

SEQ ID NO: 168078 - DNA, 50 bp, Artificial
  Synthetic oligonucleotide
acgggttgggcgaccaagcgcacaccgagggcggcacagacgcggcttac

SEQ ID NO: 168079 - DNA, 50 bp, Artificial
  Synthetic oligonucleotide
cgttgcgccgactgctggtgagagaggccaactggcaatcgctggttgga

SEQ ID NO: 168080 - DNA, 54 bp, Artificial
  Synthetic oligonucleotide
cgtcaaatttggtttccagtagcaaacgcaattgctggccggattcggttttcg

SEQ ID NO: 168081 - DNA, 50 bp, Artificial
  Synthetic oligonucleotide
acgggtctggatctcagcacgctggcgcgtacaccccggagcacgggcat

SEQ ID NO: 168082 - DNA, 49 bp, Artificial
  Synthetic oligonucleotide
acgggggcacccctaaaatcgccggtcgtccacgaacccccacccgatg

SEQ ID NO: 168083 - DNA, 50 bp, Artificial
  Synthetic oligonucleotide
acggggctttgggccttggaagcgaagcgttggacacgctccaacacgac

SEQ ID NO: 168084 - DNA, 50 bp, Artificial
  Synthetic oligonucleotide
acgggcctgaagatagccattcggcaggccttgccagttgggcagggggt

SEQ ID NO: 168085 - DNA, 50 bp, Artificial
  Synthetic oligonucleotide
atagtcctcctcgttgacgtaccactctcgggtcgcgtgccccagcatgc

SEQ ID NO: 168086 - DNA, 50 bp, Artificial
  Synthetic oligonucleotide
acggcggtacgtcgcaatgcagatgcttccagcggtggtgtgactgggcg

SEQ ID NO: 168087 - DNA, 50 bp, Artificial
  Synthetic oligonucleotide
atatcgtggtgagccctgaggcccgaaaacgtacagcgggaagcggccag

SEQ ID NO: 168088 - DNA, 50 bp, Artificial
  Synthetic oligonucleotide
gctgtcaaagtggcagccggttgggatttcggggctccgagaacctgggc

SEQ ID NO: 168089 - DNA, 50 bp, Artificial
  Synthetic oligonucleotide
atattgcgtatgtggacgcgggtatgcggcctagggggaaaccctggaga

SEQ ID NO: 168090 - DNA, 50 bp, Artificial
  Synthetic oligonucleotide
acggcccactgagttgccaacaagcgctgtcccctgacccgttttggctc

SEQ ID NO: 168091 - DNA, 52 bp, Artificial
  Synthetic oligonucleotide
cggttgtgcccggtcgcaggtagagggttgaacggtcgacgacctgggtcgt

SEQ ID NO: 168092 - DNA, 50 bp, Artificial
  Synthetic oligonucleotide
gcgctccgtcttgccgcaaggcaacaacctcgaatagcccttgtgaggcc

SEQ ID NO: 168093 - DNA, 50 bp, Artificial
  Synthetic oligonucleotide
actccgggctcccccgcaagagacaatgcgacgtttgagcgcctgtaagt

SEQ ID NO: 168094 - DNA, 50 bp, Artificial
  Synthetic oligonucleotide
agtgagtaccccatccgaccgcgtccttgaaagcaggcttctcgcgctca

SEQ ID NO: 168095 - DNA, 50 bp, Artificial
  Synthetic oligonucleotide
actccaagcgagctccgcatgaggcccaacaggtcagtcaacacggccgt

SEQ ID NO: 168096 - DNA, 50 bp, Artificial
  Synthetic oligonucleotide
actcaatgacatggctgtcatgcccgcccttccgaggcgcacgcttctgc

SEQ ID NO: 168097 - DNA, 50 bp, Artificial
  Synthetic oligonucleotide
actcaatccggggaagctcgcttacgcctcgtgcgggaatggctcgatcc

SEQ ID NO: 168098 - DNA, 50 bp, Artificial
  Synthetic oligonucleotide
actagcatcggggcctaaccgcgcaatcgacagcgacacttggcaatcgc

SEQ ID NO: 168099 - DNA, 50 bp, Artificial
  Synthetic oligonucleotide
gcgggtcaaattccgcccttaagtctggctgtgccttggcgtactgacgc

SEQ ID NO: 168100 - DNA, 50 bp, Artificial
  Synthetic oligonucleotide
acgtggacgatttggccccgagaggatcgttcaagcactttgcgcggtcc

SEQ ID NO: 168101 - DNA, 50 bp, Artificial
  Synthetic oligonucleotide
acgtgaaccgggggcgcttcccgcagaggttggggcgtgggtcccctccg

SEQ ID NO: 168102 - DNA, 59 bp, Artificial
  Synthetic oligonucleotide
aactcctgagaggattgagtcatgaacactaaagctgctcgttttagccctgaggtacg

SEQ ID NO: 168103 - DNA, 50 bp, Artificial
  Synthetic oligonucleotide
agtgggggcaggccaaggcgtggcactgacgagcggcggggcatttttga

SEQ ID NO: 168104 - DNA, 50 bp, Artificial
  Synthetic oligonucleotide
acgtctgcgtgacccggcgtccttttcccctcgtgatgtttgtgcggccc

SEQ ID NO: 168105 - DNA, 50 bp, Artificial
  Synthetic oligonucleotide
agtggtgagcggtgcgaaattcgtcgcgagtcggtgctttggctcgtgat

SEQ ID NO: 168106 - DNA, 50 bp, Artificial
  Synthetic oligonucleotide
acgtcgatgggtcaacccgtgatgtgaccgcaacctccaactgggcgtca

SEQ ID NO: 168107 - DNA, 50 bp, Artificial
  Synthetic oligonucleotide
acgtcatttgccaccaatcaagacaggggatgtgccgtgggccgatgccc

SEQ ID NO: 168108 - DNA, 50 bp, Artificial
  Synthetic oligonucleotide
agtttgcttttgggcgggtactatacaagcccgcgtccttccggaggccg

SEQ ID NO: 168109 - DNA, 50 bp, Artificial
  Synthetic oligonucleotide
acgcattgtgcgtgtacagcagcattcacgagtggcggagcggggaacct

SEQ ID NO: 168110 - DNA, 50 bp, Artificial
  Synthetic oligonucleotide
atcgcagggcattagccacgagaggccctttcggtcggaataggtgcgtg

SEQ ID NO: 168111 - DNA, 50 bp, Artificial
  Synthetic oligonucleotide
acgcaaatagctgcgcggacgaaatgcggggcaacacactagcctgccct

SEQ ID NO: 168112 - DNA, 50 bp, Artificial
  Synthetic oligonucleotide
acgagggcgagattaagggcgatgcctggagccgtaaagactggcgctcc

SEQ ID NO: 168113 - DNA, 60 bp, Artificial
  Synthetic oligonucleotide
ctcctgacttcacggttcccgtgatggatgcgattgtgcatttgatcgctgtatgagccg

SEQ ID NO: 168114 - DNA, 50 bp, Artificial
  Synthetic oligonucleotide
acgagggaagttagcgcgtcccgcccccgtgttcggtcggggcattcctc

SEQ ID NO: 168115 - DNA, 50 bp, Artificial
  Synthetic oligonucleotide
acgagcccaatccgagcgatagcccgaatgacgtcgcaggtactcccagg

SEQ ID NO: 168116 - DNA, 50 bp, Artificial
  Synthetic oligonucleotide
acgactggtcgacgagggaagttagcgcgtcccgcccccgtgttcggtcg

SEQ ID NO: 168117 - DNA, 50 bp, Artificial
  Synthetic oligonucleotide
acgacgccgaccaaacggttgttgccacaagaggcgttcggttccacgtc

SEQ ID NO: 168118 - DNA, 50 bp, Artificial
  Synthetic oligonucleotide
acgacctcccaggcacagcgtacctcagccttcatggcggtggctactag

SEQ ID NO: 168119 - DNA, 50 bp, Artificial
  Synthetic oligonucleotide
atcggccgcagtgcatcgcgggtcggcaatggaccgcagaaaccgtgagg

SEQ ID NO: 168120 - DNA, 50 bp, Artificial
  Synthetic oligonucleotide
ggcccccaggtccagcaacgtagcaccgggcaatgggtccaccaataagt

SEQ ID NO: 168121 - DNA, 50 bp, Artificial
  Synthetic oligonucleotide
atcgtgccgacccacgatggccggacttttagcagggggattctagccga

SEQ ID NO: 168122 - DNA, 50 bp, Artificial
  Synthetic oligonucleotide
accttccgtgtgaccaactgaccccgaaatcgcatgcaagcccttgccga

SEQ ID NO: 168123 - DNA, 50 bp, Artificial
  Synthetic oligonucleotide
ggcctaagtttgggtcgcaacggcctaccaatgcgcgagcgaacttcagc

SEQ ID NO: 168124 - DNA, 56 bp, Artificial
  Synthetic oligonucleotide
atgccgtacaactacctcgtaagttcacggctgatccgaaggtactgggagatccc

SEQ ID NO: 168125 - DNA, 50 bp, Artificial
  Synthetic oligonucleotide
ggcctagcgcgtatgcttatgccctgtaaagcgcacaacaggctcccgtg

SEQ ID NO: 168126 - DNA, 50 bp, Artificial
  Synthetic oligonucleotide
acctgtgccatggaaggttcagatgaggcggcatgggcgcaactcgcagc

SEQ ID NO: 168127 - DNA, 50 bp, Artificial
  Synthetic oligonucleotide
gcttgacctgccccggcaagaaacaacggccccaccaagccctggtcacg

SEQ ID NO: 168128 - DNA, 50 bp, Artificial
  Synthetic oligonucleotide
acggatgcacgagagcacgcgaagtgaaagaccccgcatggcaaggcggc

SEQ ID NO: 168129 - DNA, 50 bp, Artificial
  Synthetic oligonucleotide
acggagtgggcaccccgcgtattccagcgcaatgggcgtcccgttttgac

SEQ ID NO: 168130 - DNA, 50 bp, Artificial
  Synthetic oligonucleotide
atcccggtgcgtcagatttgcttcggcgacccctcgggcgattgagcaag

SEQ ID NO: 168131 - DNA, 50 bp, Artificial
  Synthetic oligonucleotide
acggacccaactccggccgacggtgccaccaagccagccggcgcctatga

SEQ ID NO: 168132 - DNA, 50 bp, Artificial
  Synthetic oligonucleotide
acggacagcgcgccatatgcagcctgcccggaaggaggtcgtgccttgca

SEQ ID NO: 168133 - DNA, 50 bp, Artificial
  Synthetic oligonucleotide
acgctttcagcacccggatgccgcattgccgattgagcgttctgtggcca

SEQ ID NO: 168134 - DNA, 50 bp, Artificial
  Synthetic oligonucleotide
ggactcttcagttttgctcttcgtcgtccggcatgcgcaatggagcgggc

SEQ ID NO: 168135 - DNA, 60 bp, Artificial
  Synthetic oligonucleotide
tgcgtgattcatcgcctctgcggtcaaatggtggatactgcccagcccagacgatccgta

SEQ ID NO: 168136 - DNA, 50 bp, Artificial
  Synthetic oligonucleotide
acgcgcttcagaaagggcgttgacctgaaagagccgtgatgcagggccct

SEQ ID NO: 168137 - DNA, 50 bp, Artificial
  Synthetic oligonucleotide
acgcgcgtggtcgagcctaattctcagaccgcttcgcagcatctcgtccc

SEQ ID NO: 168138 - DNA, 50 bp, Artificial
  Synthetic oligonucleotide
acgcgccaaattggacgaacttggtggcgcagagtggctgcgatcccagt

SEQ ID NO: 168139 - DNA, 50 bp, Artificial
  Synthetic oligonucleotide
acgcctgttcgtgtgcccgctcgcgttttggcggatccggtccaataacg

SEQ ID NO: 168140 - DNA, 50 bp, Artificial
  Synthetic oligonucleotide
acgccgggtgctggcacggagcatcgaccgatccatcgatagcaaaaggg

SEQ ID NO: 168141 - DNA, 50 bp, Artificial
  Synthetic oligonucleotide
atcgcaagcgcatttgcacggggcctgtacacgagcggagggcgttatgc

SEQ ID NO: 168142 - DNA, 50 bp, Artificial
  Synthetic oligonucleotide
acgcccagtcgtagctttcacgcccccgtgtaaacatcacaccgcttcgc

SEQ ID NO: 168143 - DNA, 50 bp, Artificial
  Synthetic oligonucleotide
ggatgaattcgactcttgcatggtgtgcactctggacagttaagtgcaca

SEQ ID NO: 168144 - DNA, 55 bp, Artificial
  Synthetic oligonucleotide
cggaaattatcaatagggccctgtttggtacctcagttatcccaacatctaaagc

SEQ ID NO: 168145 - DNA, 60 bp, Artificial
  Synthetic oligonucleotide
agataggacgcgctgtaaggcttcatcgtggcccactggcgcagtacctcagtccgatcc

SEQ ID NO: 168146 - DNA, 60 bp, Artificial
  Synthetic oligonucleotide
atccttcaaagggtcaaggatggctgatctgcgctcccggcctgggctcctggtgccgct

SEQ ID NO: 168147 - DNA, 55 bp, Artificial
  Synthetic oligonucleotide
aacgtagcctggtcggccttcggtggatggcggtagctgtcccgggagagcccca

SEQ ID NO: 168148 - DNA, 50 bp, Artificial
  Synthetic oligonucleotide
ctcttgaaggcgggaacgataaacagggggttggggaacgataaacaggg

SEQ ID NO: 168149 - DNA, 55 bp, Artificial
  Synthetic oligonucleotide
tgctccagctatttttacgtgaatttttaagtaattactcatttgagtttttcga

SEQ ID NO: 168150 - DNA, 60 bp, Artificial
  Synthetic oligonucleotide
atcgccttcagcagtcacccgttctagtgagattcgcacttcgtcgcttatgcgaatgat

SEQ ID NO: 168151 - DNA, 60 bp, Artificial
  Synthetic oligonucleotide
tggcatggctcaaactctcatgagagcaaaggataggacttcagatactcgagcaaggtc

SEQ ID NO: 168152 - DNA, 60 bp, Artificial
  Synthetic oligonucleotide
tctagcgcaccacaacaaatgaaaccgagctatgaaaactgcaattcgcgagagccatct

SEQ ID NO: 168153 - DNA, 60 bp, Artificial
  Synthetic oligonucleotide
tggcgcgatgacagggcgcgtgatttgacgtgggggatcatgatggttcgaagatccttt

SEQ ID NO: 168154 - DNA, 60 bp, Artificial
  Synthetic oligonucleotide
atcggagtcgcttgtccttggtgcctaggcgctttgtcgcatgaggcccagctgactccg

SEQ ID NO: 168155 - DNA, 59 bp, Artificial
  Synthetic oligonucleotide
gtgggcacagggagccgctacggcggccgtggagcctcgcaaggcccaagaggctccgc

SEQ ID NO: 168156 - DNA, 60 bp, Artificial
  Synthetic oligonucleotide
agagtctatgcaatcgtccgggatgcgacaattaacagccaatctggttgccggctatat

SEQ ID NO: 168157 - DNA, 56 bp, Artificial
  Synthetic oligonucleotide
aagctgctcgttttagccctgaggtacgtgaacgtgccgtacgtttggtgcaggag

SEQ ID NO: 168158 - DNA, 59 bp, Artificial
  Synthetic oligonucleotide
tctgtggataaattaccgtcgtagcatccgcgcttttaccgtcgtagcatccgcgcgta

SEQ ID NO: 168159 - DNA, 59 bp, Artificial
  Synthetic oligonucleotide
agttgcaactgaatccaccgaccgtgatcatgggagcactttgacttgtccagcgatta

SEQ ID NO: 168160 - DNA, 58 bp, Artificial
  Synthetic oligonucleotide
ctcggctctttctggctcggataacgtgactttgtaatgttccatcccccattgtcca

SEQ ID NO: 168161 - DNA, 59 bp, Artificial
  Synthetic oligonucleotide
gggatgcgctgtctgttggtgtccctgtgacatgtgggtaaactgagcgcacaaaagaa

SEQ ID NO: 168162 - DNA, 56 bp, Artificial
  Synthetic oligonucleotide
tcctggaaaacgtcgttgggttaacgcattgttgcaagcgagcggagtgggtgaac

SEQ ID NO: 168163 - DNA, 59 bp, Artificial
  Synthetic oligonucleotide
gagcagtctcatacaagtgcgaaaacggttcctcgctgatgcctagagccgcgcgtttt

SEQ ID NO: 168164 - DNA, 59 bp, Artificial
  Synthetic oligonucleotide
gcaagcggcgcacaaaattggatgggcaccgcccggcaaagcaagctgaaggttcacag

SEQ ID NO: 168165 - DNA, 58 bp, Artificial
  Synthetic oligonucleotide
ccaaaaaaaggcgtcgcatctgctaggagacgcgacgctaaccgttggatcacacgct

SEQ ID NO: 168166 - DNA, 58 bp, Artificial
  Synthetic oligonucleotide
ggggtgcctcaaccggtgtaccgatgtgaccgccccaatcttcagctcgctcagccga

SEQ ID NO: 168167 - DNA, 60 bp, Artificial
  Synthetic oligonucleotide
tatggcctcttgtaaggtcgaagtttataactatagacttgatgcctgatgagaagcgcc

SEQ ID NO: 168168 - DNA, 57 bp, Artificial
  Synthetic oligonucleotide
ctttcacgccacttgggcaaagcaaacggctcaaagcgtgaggcgatttgcgggtcc

SEQ ID NO: 168169 - DNA, 58 bp, Artificial
  Synthetic oligonucleotide
tagggttggagggtgcgcggcgtggcaagaaggtgtgcacaacacgcccagatgtggc

SEQ ID NO: 168170 - DNA, 53 bp, Artificial
  Synthetic oligonucleotide
accccgtattcaaagggatgtttcatccggttttcagacgaagctcagtcccg

SEQ ID NO: 168171 - DNA, 54 bp, Artificial
  Synthetic oligonucleotide
tttttaacttgagcaatgggaacgccccacaacgcggctaattcacgatccggt

SEQ ID NO: 168172 - DNA, 57 bp, Artificial
  Synthetic oligonucleotide
tttacgtatcccgagaccgtgggattcacccaccagtgcacgaaacggtctcgatca

SEQ ID NO: 168173 - DNA, 58 bp, Artificial
  Synthetic oligonucleotide
tgcgattgtgcccacagcgccggttcccgaatcgctctattgcagcatgaaagtctgg

SEQ ID NO: 168174 - DNA, 58 bp, Artificial
  Synthetic oligonucleotide
tgccgaggctgcgtcagtggggaacgccgccatcgaggcttccgcgtcggtaatggtc

SEQ ID NO: 168175 - DNA, 58 bp, Artificial
  Synthetic oligonucleotide
tgcatcgcgatgagcaatgcaggcgttcccatggctgtcctggcgaacgccgaacgcc

SEQ ID NO: 168176 - DNA, 56 bp, Artificial
  Synthetic oligonucleotide
cccggtttcattcgttcgaacgggaagaaatgatgcgtgcgtcttcgaagcactac

SEQ ID NO: 168177 - DNA, 58 bp, Artificial
  Synthetic oligonucleotide
ccccgcaggtagcacgccttatgtacatcctgcgtgtcgtacgccccatcaccggtaa

SEQ ID NO: 168178 - DNA, 60 bp, Artificial
  Synthetic oligonucleotide
gccatcaggtggttctgtagctctcggttggccgcattcggtgcacgggcagtttgtttc

SEQ ID NO: 168179 - DNA, 57 bp, Artificial
  Synthetic oligonucleotide
atgtggatttccacggattgctggggcacggcacgcggggcacctgtgagggaaaaa

SEQ ID NO: 168180 - DNA, 58 bp, Artificial
  Synthetic oligonucleotide
ttgcccgtgggccgagctagccactgcatatccctatcgagccaaatggtcagctcac

SEQ ID NO: 168181 - DNA, 57 bp, Artificial
  Synthetic oligonucleotide
gctttgggtgagtacgctctcttgcattcagtttttccgaatggaggttcgaacaaa

SEQ ID NO: 168182 - DNA, 57 bp, Artificial
  Synthetic oligonucleotide
agaacaagtcgtgtcaccagtcgctgcttcccgaaccttgtgacgctgatgacgcgt

SEQ ID NO: 168183 - DNA, 57 bp, Artificial
  Synthetic oligonucleotide
cacaaggttcttcgttccatagaacgtcaggcgcccttgtctcatgaaagcaagtgc

SEQ ID NO: 168184 - DNA, 57 bp, Artificial
  Synthetic oligonucleotide
actggtgacaggtcaaagcggcgtttcagactcgctgcgggctaggcctgcgttcgt

SEQ ID NO: 168185 - DNA, 57 bp, Artificial
  Synthetic oligonucleotide
ggcgtcagtcccttcacccacacggcaatcgaaatcgcagcccatagcctgttgacc

SEQ ID NO: 168186 - DNA, 57 bp, Artificial
  Synthetic oligonucleotide
ccagtgacatgtatttgccgactacgcttttggatatcttgaggttacggcctacct

SEQ ID NO: 168187 - DNA, 57 bp, Artificial
  Synthetic oligonucleotide
ggcaaacgcccacgatccttctgccgagatcatctcgaaccgctgggtcatgtgcat

SEQ ID NO: 168188 - DNA, 57 bp, Artificial
  Synthetic oligonucleotide
cgtcgtggaaacagcgttttggggtcgctaggacgagcgcagacaaagatgctgggg

SEQ ID NO: 168189 - DNA, 54 bp, Artificial
  Synthetic oligonucleotide
tatctgacgcgggtttagagggtattcgggttccgggtagctacggaccgcatc

SEQ ID NO: 168190 - DNA, 57 bp, Artificial
  Synthetic oligonucleotide
acggcccgttgtattgacacccggaaagtcgatggctttaatctggcacagcggcat

SEQ ID NO: 168191 - DNA, 57 bp, Artificial
  Synthetic oligonucleotide
gtagaggatcaatacgtgagcttttatgggactctcttggacgtgttgcccccctag

SEQ ID NO: 168192 - DNA, 57 bp, Artificial
  Synthetic oligonucleotide
tcacccttgccgaattcataggcaatatcgagcttcaaccgtttgtaatcacctttt

SEQ ID NO: 168193 - DNA, 57 bp, Artificial
  Synthetic oligonucleotide
tttccggcgccgtgcggccctctgcatgagcgtggcgcattcggcaaagccttagaa

SEQ ID NO: 168194 - DNA, 57 bp, Artificial
  Synthetic oligonucleotide
tgtgcgcagctcgtaccgctgtgaaaccgcagacatcaggcgagacgaaacggcccg

SEQ ID NO: 168195 - DNA, 56 bp, Artificial
  Synthetic oligonucleotide
caggccataggaagtacgcgccaaaccgtgacttcggcacgtattcagcaccaagc

SEQ ID NO: 168196 - DNA, 56 bp, Artificial
  Synthetic oligonucleotide
cagggagattgaaaatgaccgagttcgagacgaagctcttgcaagcattcaccgcc

SEQ ID NO: 168197 - DNA, 54 bp, Artificial
  Synthetic oligonucleotide
aatgcggagcaagtagggtttgaagaggggggcagaaccgatggatgttcccgt

SEQ ID NO: 168198 - DNA, 56 bp, Artificial
  Synthetic oligonucleotide
acatcgaccactgagctgcaatacgcatccgaggtccagtcgtatcgctttgtgga

SEQ ID NO: 168199 - DNA, 56 bp, Artificial
  Synthetic oligonucleotide
attggctgactgcgagccgcgcaggaacgtggttcccttgccctcatccttccccc

SEQ ID NO: 168200 - DNA, 59 bp, Artificial
  Synthetic oligonucleotide
tcaggtcaccgcgtttttttgattgaactcggagcgcgtccattcgtccttctcaagca

SEQ ID NO: 168201 - DNA, 60 bp, Artificial
  Synthetic oligonucleotide
gcccatgtcacgcatgtctagcgtcagtttgcgatacccatacacaccaccactttctaa

SEQ ID NO: 168202 - DNA, 56 bp, Artificial
  Synthetic oligonucleotide
gcgtccggcaacgaaaagtcgggggccctgtctccctccttcagcgcagcgtgcct

SEQ ID NO: 168203 - DNA, 56 bp, Artificial
  Synthetic oligonucleotide
tccactcgcacggcgaaatgactggagcgcaaaacttgcgttgccgctgtcactcc

SEQ ID NO: 168204 - DNA, 56 bp, Artificial
  Synthetic oligonucleotide
ccgctttccaagctctgccagtagctcaggcggccattgcatgttctcaaacgcgc

SEQ ID NO: 168205 - DNA, 56 bp, Artificial
  Synthetic oligonucleotide
tctggcaactcatcggactcgacaagcgtttttactgtgcggcgaaactctcgcaa

SEQ ID NO: 168206 - DNA, 56 bp, Artificial
  Synthetic oligonucleotide
tcatgttttcacctctgttggattgcactctgtcgcaaattctagcgctttcccgg

SEQ ID NO: 168207 - DNA, 56 bp, Artificial
  Synthetic oligonucleotide
cctgctgcggaaacaaagaggataaatgcttccaggctcgtctgaccagcagcgta

SEQ ID NO: 168208 - DNA, 56 bp, Artificial
  Synthetic oligonucleotide
ccgttagccatcgaagtgcagtggcgtctggatgacctcatcggctacctcaacac

SEQ ID NO: 168209 - DNA, 56 bp, Artificial
  Synthetic oligonucleotide
tgaccggttgtagtctcgccgtccacatgccttgcgctcaccaggcaacgacacag

SEQ ID NO: 168210 - DNA, 55 bp, Artificial
  Synthetic oligonucleotide
cgtgcaaagcggcgaaagccaaatcctggccgcccgcgaaatgaaagcggtgtgc

SEQ ID NO: 168211 - DNA, 52 bp, Artificial
  Synthetic oligonucleotide
cgtgaaacccttcggaaaattccgaaaagcccacgagtatagcaggcgggct

SEQ ID NO: 168212 - DNA, 56 bp, Artificial
  Synthetic oligonucleotide
tatacggggcgcggggtgcctcaaccggtgtaccgatgtgaccgccccaatcttca

SEQ ID NO: 168213 - DNA, 55 bp, Artificial
  Synthetic oligonucleotide
tgacccgtgacccggtggacgtggccaacgatgccgccttcctgtgcgccctgct

SEQ ID NO: 168214 - DNA, 55 bp, Artificial
  Synthetic oligonucleotide
cgggctcgccatggcccaacaattgcgaacccacttcggactcatgccaccgtga

SEQ ID NO: 168215 - DNA, 55 bp, Artificial
  Synthetic oligonucleotide
tggccgctgcccggacagccttgacgcagaaggtcacattagtctggcagccaaa

SEQ ID NO: 168216 - DNA, 55 bp, Artificial
  Synthetic oligonucleotide
cgggtccttcgccggtatatgcagccgtcaccggcatcagtgctacgagttgcac

SEQ ID NO: 168217 - DNA, 55 bp, Artificial
  Synthetic oligonucleotide
tgctgtcacacacgacaagagtaagagacccatggcgattgttgtcaacaaaccc

SEQ ID NO: 168218 - DNA, 55 bp, Artificial
  Synthetic oligonucleotide
cgggttgactgtgttgcaaacgaaaccggtgtgttgggtcactgcttcggtcagt

SEQ ID NO: 168219 - DNA, 55 bp, Artificial
  Synthetic oligonucleotide
cgggttgttcaggtagagtgcaggcggcaccgtcagtccgccttctgcaatgaac

SEQ ID NO: 168220 - DNA, 55 bp, Artificial
  Synthetic oligonucleotide
cggtgtacccatcttggccatgcggccggttgtgtagagaaatagacatggggtt

SEQ ID NO: 168221 - DNA, 55 bp, Artificial
  Synthetic oligonucleotide
tgcgttgaatgacatgccaaagtctaggaacgccctccccgcggaacaagccaga

SEQ ID NO: 168222 - DNA, 55 bp, Artificial
  Synthetic oligonucleotide
cggttacagcgtaacgccccagcgctccacccaactgcgtatcatcggccacaac

SEQ ID NO: 168223 - DNA, 59 bp, Artificial
  Synthetic oligonucleotide
gccccatgtcccgttcgagcttctttcgcgctcgcgttttgatgctgtcgtgttcggtg

SEQ ID NO: 168224 - DNA, 55 bp, Artificial
  Synthetic oligonucleotide
tgcatacacggctgttcaaagagggaagacatagaaccatggaactcacgccccg

SEQ ID NO: 168225 - DNA, 55 bp, Artificial
  Synthetic oligonucleotide
tgcgtctcactcgtccagcctatacccagcataccacgggtataccagcgatcct

SEQ ID NO: 168226 - DNA, 55 bp, Artificial
  Synthetic oligonucleotide
cgtcgggtgaatgttgaaattccccagccggttgtgaagcagcgtccatgcggcg

SEQ ID NO: 168227 - DNA, 55 bp, Artificial
  Synthetic oligonucleotide
cgtcgcacaaccctgctgcctgtatgtatgggaccgggcatcataattcagccat

SEQ ID NO: 168228 - DNA, 55 bp, Artificial
  Synthetic oligonucleotide
cgtagtacagaggctctgaacccttctcgacagtgatgacgagaacgccgagccc

SEQ ID NO: 168229 - DNA, 55 bp, Artificial
  Synthetic oligonucleotide
tgcgtcccggcctcagagttacccactaccggaagcgctccgttatcgcgttctc

SEQ ID NO: 168230 - DNA, 55 bp, Artificial
  Synthetic oligonucleotide
tgcggctagagcatcgggtaaggtgctaacagtcgtcgagcctgagggcagctgt

SEQ ID NO: 168231 - DNA, 54 bp, Artificial
  Synthetic oligonucleotide
cgctacggcgttttctgaccattggccagccctgacccctcggacacccggaaa

SEQ ID NO: 168232 - DNA, 55 bp, Artificial
  Synthetic oligonucleotide
cgctatgattcgagtcttgcatgaggggcggattctacgtttcggctatggccgg

SEQ ID NO: 168233 - DNA, 55 bp, Artificial
  Synthetic oligonucleotide
tgtctcgtgagcacgtaggcattctggacagccgttgcaggcacctggcgctcga

SEQ ID NO: 168234 - DNA, 60 bp, Artificial
  Synthetic oligonucleotide
ctggtgagcactctggtgccatcgatgtaggcccgcaagtggatgtgcacggcgcggccc

SEQ ID NO: 168235 - DNA, 55 bp, Artificial
  Synthetic oligonucleotide
cgctgccccacatgcgcaactggatcgaggcaatcatctacggtctgttcccggt

SEQ ID NO: 168236 - DNA, 55 bp, Artificial
  Synthetic oligonucleotide
tgtctccgaactcgagcagtgttttcggatcgcgcctacttggggctgacccgag

SEQ ID NO: 168237 - DNA, 55 bp, Artificial
  Synthetic oligonucleotide
cgctgtgcgcgtatttgttcaatagtcacatctcgatcagcaagaatcgcaacgc

SEQ ID NO: 168238 - DNA, 55 bp, Artificial
  Synthetic oligonucleotide
cgcttccactgcgataaccgggacaacatctctgacggtaaacggaaaggcactg

SEQ ID NO: 168239 - DNA, 55 bp, Artificial
  Synthetic oligonucleotide
tgtagaaaccaaccccgcactagatgttccgttctggaccagtgtggttggcagc

SEQ ID NO: 168240 - DNA, 55 bp, Artificial
  Synthetic oligonucleotide
tgggtttgatagtggggtgcaggaaagcaactcgaccttaaatagctgtaccaca

SEQ ID NO: 168241 - DNA, 55 bp, Artificial
  Synthetic oligonucleotide
cgctttgacacgggcgggcgattctcagcaagcggtgtgccccggatcgattgct

SEQ ID NO: 168242 - DNA, 55 bp, Artificial
  Synthetic oligonucleotide
tgggtgtaacccagttctcccagagcgcggtatgccgccgaaccatccgtgcgta

SEQ ID NO: 168243 - DNA, 55 bp, Artificial
  Synthetic oligonucleotide
cggccaaccggtcacactggagttagcgcttgctcagcgagaatccgttgtcagg

SEQ ID NO: 168244 - DNA, 55 bp, Artificial
  Synthetic oligonucleotide
cggccagtaaccgcgggatctagacatggcgtgcatacggcgtcccctgaagttc

SEQ ID NO: 168245 - DNA, 60 bp, Artificial
  Synthetic oligonucleotide
cttcgctgcagaagaagttttttcgcgagagttcgctcgggagtcattgacgccacgtca

SEQ ID NO: 168246 - DNA, 55 bp, Artificial
  Synthetic oligonucleotide
tgggctttaggcgcaactcagcgcattggttatttaaatggctgagcagaccatg

SEQ ID NO: 168247 - DNA, 55 bp, Artificial
  Synthetic oligonucleotide
cggcccggtactcgagccacgtggagaccagccagacgtcgccagtcgaggggta

SEQ ID NO: 168248 - DNA, 55 bp, Artificial
  Synthetic oligonucleotide
cggccgtgagtaccccgtgtacatgagacggcgatacactacaggtagtgcccag

SEQ ID NO: 168249 - DNA, 55 bp, Artificial
  Synthetic oligonucleotide
cggcctagttttgaaatcgggatgggtcgttcgttcgattgataactgcaatcct

SEQ ID NO: 168250 - DNA, 55 bp, Artificial
  Synthetic oligonucleotide
cggcgctcgactagttcgttaccctactgtgccccgagttgcacgctcttgaccc

SEQ ID NO: 168251 - DNA, 55 bp, Artificial
  Synthetic oligonucleotide
tggcggcctacgaggcgagcagcggagagcctagaagcggtagcggagaggctat

SEQ ID NO: 168252 - DNA, 55 bp, Artificial
  Synthetic oligonucleotide
cggcgctgtcacgcgagcaaaggcattgctgagaccaggcacttgatcggcactc

SEQ ID NO: 168253 - DNA, 55 bp, Artificial
  Synthetic oligonucleotide
cggctcgaacggcttacgttccttgacgtgagccatgaaggcttcttcgtccttc

SEQ ID NO: 168254 - DNA, 54 bp, Artificial
  Synthetic oligonucleotide
cggctctacgcagggtaaaccccagtacttggccccttgattccacccgcgatg

SEQ ID NO: 168255 - DNA, 55 bp, Artificial
  Synthetic oligonucleotide
cggctgtctcgcgtgacgtagacgagctggttgggcttggtcgatgtatcgaggt

SEQ ID NO: 168256 - DNA, 57 bp, Artificial
  Synthetic oligonucleotide
tcgttaacgagtcggttgtcaataacaggtgattcggtaagcaagtcacaggccgtg

SEQ ID NO: 168257 - DNA, 55 bp, Artificial
  Synthetic oligonucleotide
cgggcataggttctatgcgatcgctccccgctgtcgactactagacgaaactcac

SEQ ID NO: 168258 - DNA, 55 bp, Artificial
  Synthetic oligonucleotide
cgggcatcaaagtctatccgtctgaatacaagggatgggcagcattcttggaaaa

SEQ ID NO: 168259 - DNA, 55 bp, Artificial
  Synthetic oligonucleotide
cgggccagtggagcgcacgggttcgtccacaagcgggaatcgcccgagacattcc

SEQ ID NO: 168260 - DNA, 55 bp, Artificial
  Synthetic oligonucleotide
ctgaggaattacatagctgtcctacttgttggtgcctagttgacaacactcttgc

SEQ ID NO: 168261 - DNA, 55 bp, Artificial
  Synthetic oligonucleotide
ctgatcccattgcgcccggggaggagcatcttgaagaggtcaaatctttgcggca

SEQ ID NO: 168262 - DNA, 55 bp, Artificial
  Synthetic oligonucleotide
ctgcgccaaattgaaagactgcgggcttgcaagcaacagctccttcgtcgatcgg

SEQ ID NO: 168263 - DNA, 55 bp, Artificial
  Synthetic oligonucleotide
ctgcgcccttgtccaccagactcatgccctcactcctcgtcgttcagcgtttcgc

SEQ ID NO: 168264 - DNA, 55 bp, Artificial
  Synthetic oligonucleotide
ctgcgtgccgatcagccctcccaacgtaaagcgagggaacaggtctgccatggct

SEQ ID NO: 168265 - DNA, 55 bp, Artificial
  Synthetic oligonucleotide
ctggaaccggcaagccactcgtaagaaacgccgaagtggttggatatccactcga

SEQ ID NO: 168266 - DNA, 55 bp, Artificial
  Synthetic oligonucleotide
ctgggccgcactgcaacgcatcttcgctgaaacccctaccccgctgttaatcggc

SEQ ID NO: 168267 - DNA, 57 bp, Artificial
  Synthetic oligonucleotide
aaggcagaggtaaaccaaatggttgacacgaatttcaaagatcatttctccagcggc

SEQ ID NO: 168268 - DNA, 55 bp, Artificial
  Synthetic oligonucleotide
tctactgacgtgcctgccctagaggcgggactgagaacggcgttgtgccttccgt

SEQ ID NO: 168269 - DNA, 55 bp, Artificial
  Synthetic oligonucleotide
ctgtaagcaccacaggcggtctgcggtagaggtccgggacttgttgtactcataa

SEQ ID NO: 168270 - DNA, 55 bp, Artificial
  Synthetic oligonucleotide
ctgtcccgtcgcgcctcgagggatcaggatgtcttggccgtagcgcttgtcctca

SEQ ID NO: 168271 - DNA, 55 bp, Artificial
  Synthetic oligonucleotide
ctgtccgacgtgtttgacaaccagattgaaaagcagtggcgtgatgacctgtggc

SEQ ID NO: 168272 - DNA, 55 bp, Artificial
  Synthetic oligonucleotide
ctgtcgccatacgtcccaaggtggttcggcaaggtgctatttccttgcttcggtc

SEQ ID NO: 168273 - DNA, 55 bp, Artificial
  Synthetic oligonucleotide
cttcccgactatgccatccggcgctgtcaacgcaccaaaggtcgctatacgtggc

SEQ ID NO: 168274 - DNA, 55 bp, Artificial
  Synthetic oligonucleotide
cttcccgcttgcatgatttaccgccctgatccgtacttcaaccgcgcggcagatc

SEQ ID NO: 168275 - DNA, 55 bp, Artificial
  Synthetic oligonucleotide
tcgttctcttagatcacgcctcacgcgtcagttcagtgcgcacggctgcgatggc

SEQ ID NO: 168276 - DNA, 55 bp, Artificial
  Synthetic oligonucleotide
cttcgctgtagcgatccatgcattgcgtatttccccttagcccctgtgacggcgc

SEQ ID NO: 168277 - DNA, 55 bp, Artificial
  Synthetic oligonucleotide
tcggtcgttcagtttcagaaacggactgatgagaatcaggcgatcctttgccgtt

SEQ ID NO: 168278 - DNA, 58 bp, Artificial
  Synthetic oligonucleotide
aggctctacggcgggagcagctggcaagggggaaagcccaaacaattcacggtcatca

SEQ ID NO: 168279 - DNA, 55 bp, Artificial
  Synthetic oligonucleotide
cttctggcaacgaccacgcttgcccgtgggccgagctagccactgcatatcccta

SEQ ID NO: 168280 - DNA, 55 bp, Artificial
  Synthetic oligonucleotide
cttgcagccacgtgagcatgttcgtgcgagctgcgtaactgggcctcaggtacca

SEQ ID NO: 168281 - DNA, 55 bp, Artificial
  Synthetic oligonucleotide
cttggaggcgtgactgacccgagacttgcgcgaaactgaaccgatgcttacggat

SEQ ID NO: 168282 - DNA, 55 bp, Artificial
  Synthetic oligonucleotide
tcggatctatgcaggcaggttatttgaccaatcgccttgttcctacggtacgcgc

SEQ ID NO: 168283 - DNA, 55 bp, Artificial
  Synthetic oligonucleotide
tcgccacctaccgaattagctccagactgctcgctggacatatatgtcgttctga

SEQ ID NO: 168284 - DNA, 55 bp, Artificial
  Synthetic oligonucleotide
tcgcaggcgtcatgcaggcgtcttcataccaaacaccatgagtacacccactttt

SEQ ID NO: 168285 - DNA, 55 bp, Artificial
  Synthetic oligonucleotide
gaaagtggggagtcccttcgtatttgctgaaatacctcgaagcgaagtctgccgg

SEQ ID NO: 168286 - DNA, 55 bp, Artificial
  Synthetic oligonucleotide
cgtgctcgcttcggagacggtatctttcacgttaaccgcaaggcttcgatccgac

SEQ ID NO: 168287 - DNA, 55 bp, Artificial
  Synthetic oligonucleotide
cgtgtgcgtccgttgtagcacctcgctcctaatttgaatagaccgagattcctac

SEQ ID NO: 168288 - DNA, 55 bp, Artificial
  Synthetic oligonucleotide
cgttaccgacaccggtctgtgtgcctgtcccggttaacgatcgagcacttgtatt

SEQ ID NO: 168289 - DNA, 55 bp, Artificial
  Synthetic oligonucleotide
gaaaactccgggttccgagtcggggatcagggtcaatatcgtctatgttgtcgcg

SEQ ID NO: 168290 - DNA, 55 bp, Artificial
  Synthetic oligonucleotide
cgttcaatcgtcgggcggtcgatcccgatcactgataacggttgttcttcccgag

SEQ ID NO: 168291 - DNA, 55 bp, Artificial
  Synthetic oligonucleotide
tgaacagcgcatggtgcgagtctgcctctctcaacagcaccacaagctcggctct

SEQ ID NO: 168292 - DNA, 55 bp, Artificial
  Synthetic oligonucleotide
cgttgcccgggaacatcgagaagaacgtttccggcgctgaaatggtggcgggcac

SEQ ID NO: 168293 - DNA, 55 bp, Artificial
  Synthetic oligonucleotide
ctaatcccgttgatggttcgaccgcgatttactcggccggttcacttacgcactg

SEQ ID NO: 168294 - DNA, 55 bp, Artificial
  Synthetic oligonucleotide
tgaacaaggccagtcgccgcttgtcggcgtatagcgcgtgcgccgtcggatgggg

SEQ ID NO: 168295 - DNA, 55 bp, Artificial
  Synthetic oligonucleotide
tgaaacgtagtgtgggcgtccggccgtgcagatacacaggcatacggaaccccgt

SEQ ID NO: 168296 - DNA, 55 bp, Artificial
  Synthetic oligonucleotide
ctacttgcggacatcagcggggttttggattcgctgcatgcgcacttttccggcc

SEQ ID NO: 168297 - DNA, 55 bp, Artificial
  Synthetic oligonucleotide
ctagttcagggatgtcgattcaggcccatcccgaacgtctagtagatgagcggta

SEQ ID NO: 168298 - DNA, 55 bp, Artificial
  Synthetic oligonucleotide
tctgccagaaattactacctcaccaatgtgattctggcccacctcgggcaacctc

SEQ ID NO: 168299 - DNA, 55 bp, Artificial
  Synthetic oligonucleotide
ctcagcgccttcagcaagggtcggtattccgtcaaaaccgcgccgtagtaaatcc

SEQ ID NO: 168300 - DNA, 53 bp, Artificial
  Synthetic oligonucleotide
gaaaggctctccggggtgaaaaagcacctgtatacgccccttcttataggacg

SEQ ID NO: 168301 - DNA, 55 bp, Artificial
  Synthetic oligonucleotide
ctcagtggctgggtggccagccaccaagaaatccgacacgtcaaagccaacgcgc

SEQ ID NO: 168302 - DNA, 55 bp, Artificial
  Synthetic oligonucleotide
ctccatggcggcgcaagcacctgtccagcccggagcgcgagacatggggacagat

SEQ ID NO: 168303 - DNA, 55 bp, Artificial
  Synthetic oligonucleotide
ctccattactccaaccaccatccaattggacgctcaatccactgcccaggtattg

SEQ ID NO: 168304 - DNA, 55 bp, Artificial
  Synthetic oligonucleotide
ctcccttgctgaggcgaggcttctaggacgaagaaaacgtcggtagcacgaccga

SEQ ID NO: 168305 - DNA, 55 bp, Artificial
  Synthetic oligonucleotide
ctccggtttggtgaggctagatctttcaagcgccgatcaaagagcttcctttcgc

SEQ ID NO: 168306 - DNA, 55 bp, Artificial
  Synthetic oligonucleotide
tctcggggctgaagccatgagccgattgggcgatgcgatcccgtgcctcaaaact

SEQ ID NO: 168307 - DNA, 55 bp, Artificial
  Synthetic oligonucleotide
tctccgcccttcgcacagagtgcagcccaaatggtctggacatgacctccgggct

SEQ ID NO: 168308 - DNA, 55 bp, Artificial
  Synthetic oligonucleotide
ctcgatccatcaaaactccattacagcggtttcgtaattccgttacagcatctgg

SEQ ID NO: 168309 - DNA, 55 bp, Artificial
  Synthetic oligonucleotide
tctcccatgcgccgcattacgagttgcgtctgctgatggatcagaggctgcgctc

SEQ ID NO: 168310 - DNA, 55 bp, Artificial
  Synthetic oligonucleotide
ctcgtttgataaagcggttaaaggtatagtgactgaccatgccggtaaggttcta

SEQ ID NO: 168311 - DNA, 56 bp, Artificial
  Synthetic oligonucleotide
aatcactggcatacaaaagtccttgtagttttatcgccttattggttccttcgagc

SEQ ID NO: 168312 - DNA, 57 bp, Artificial
  Synthetic oligonucleotide
aggcctttgagaacgagcaagcgtttttggcgtgcctttcctgcacttccacgggca

SEQ ID NO: 168313 - DNA, 55 bp, Artificial
  Synthetic oligonucleotide
tctccaggatacagaccgttcccagactaccgcaatatcttgagttgactcgcgg

SEQ ID NO: 168314 - DNA, 55 bp, Artificial
  Synthetic oligonucleotide
ctcttgcgctacttaaaagatagctgctcgcgcatgagggacgggcgttatctcc

SEQ ID NO: 168315 - DNA, 55 bp, Artificial
  Synthetic oligonucleotide
ctgaaggccgaaactgggaatctgccttggacgctccaaccctcaaccgctaccg

SEQ ID NO: 168316 - DNA, 54 bp, Artificial
  Synthetic oligonucleotide
ttcgtaccgccgggtgccaacaagcctggcggcccgttggtgcagttccccgga

SEQ ID NO: 168317 - DNA, 55 bp, Artificial
  Synthetic oligonucleotide
cccgtaacccaggtatttgcgggaaatcgacaccaccaggcgtaagtgagagagc

SEQ ID NO: 168318 - DNA, 55 bp, Artificial
  Synthetic oligonucleotide
ccctggaatgctccggacggagtgacgcgtgccacatagaccacggaagtgccgt

SEQ ID NO: 168319 - DNA, 55 bp, Artificial
  Synthetic oligonucleotide
ttcggttgcagcttcgagctgaattgctgcctcactcgttcgactttcgagcacc

SEQ ID NO: 168320 - DNA, 54 bp, Artificial
  Synthetic oligonucleotide
ccgagagcgaaaggaacagggaaaggcccaaccgagcggttcaacatccgactc

SEQ ID NO: 168321 - DNA, 55 bp, Artificial
  Synthetic oligonucleotide
ccgagcgactcgtaacccgtcggcgccgtattcggttccaactcgacgatcaagc

SEQ ID NO: 168322 - DNA, 55 bp, Artificial
  Synthetic oligonucleotide
ccgaggcgaatgctcagatgatcactcctgtagttgacgccgcccttcggagcgt

SEQ ID NO: 168323 - DNA, 54 bp, Artificial
  Synthetic oligonucleotide
tcgcaaacaatgtaagcgtggtaccaacggtccttacttacccaccgcacaatt

SEQ ID NO: 168324 - DNA, 55 bp, Artificial
  Synthetic oligonucleotide
ccgcaagagggattagggtatgagcaactggcggcttttgactcatgacagacct

SEQ ID NO: 168325 - DNA, 55 bp, Artificial
  Synthetic oligonucleotide
ttcggtggatggcggtagctgtcccgggagagccccacaagtcggcatgctcgac

SEQ ID NO: 168326 - DNA, 55 bp, Artificial
  Synthetic oligonucleotide
ccgcagacccgacatccagggattaatcgctctgggcgaatgaagtctcttcaag

SEQ ID NO: 168327 - DNA, 55 bp, Artificial
  Synthetic oligonucleotide
ttcgggcgtcaatccctgacgcctccgcgccttaccggcgctgcgcgctccgctt

SEQ ID NO: 168328 - DNA, 55 bp, Artificial
  Synthetic oligonucleotide
ccgccataaataattgccggcccagacggatgggtattgttgtgtcagccgagcc

SEQ ID NO: 168329 - DNA, 55 bp, Artificial
  Synthetic oligonucleotide
ccgcccaaacgcaggtgaatgctgcaagcaagcgttctcaactcgcccgtgagtc

SEQ ID NO: 168330 - DNA, 55 bp, Artificial
  Synthetic oligonucleotide
ccgcgaaccacggtgaaagctcatacccaggcaatcccgcctctgcgattgtcgg

SEQ ID NO: 168331 - DNA, 55 bp, Artificial
  Synthetic oligonucleotide
ccgcggggtccctccctcaatgggtgttaataagcagatgaccatgagtggccac

SEQ ID NO: 168332 - DNA, 55 bp, Artificial
  Synthetic oligonucleotide
ccgctctctacagttcaagccaatgaaagcgtcttgcgatgaggcgcaaacagcg

SEQ ID NO: 168333 - DNA, 55 bp, Artificial
  Synthetic oligonucleotide
ccggcaaattggctacgagccccattagtttctccacaagcgagtgagcctcggc

SEQ ID NO: 168334 - DNA, 60 bp, Artificial
  Synthetic oligonucleotide
gaaccaatctcgcacgcggtcggttagcgctggacggctacaggccgcaccaggcacacg

SEQ ID NO: 168335 - DNA, 55 bp, Artificial
  Synthetic oligonucleotide
ccggcctcgagggatccggggtcaagacactgcctcttgatcaattcggacgcaa

SEQ ID NO: 168336 - DNA, 55 bp, Artificial
  Synthetic oligonucleotide
ccggcctgcatggcctttatgtcctttgcggagcctttgatggcacttaccagcg

SEQ ID NO: 168337 - DNA, 55 bp, Artificial
  Synthetic oligonucleotide
ttcggatgcttgggcgtggtcagctcgtgggcatcctcaatcgtgaacaggcggc

SEQ ID NO: 168338 - DNA, 55 bp, Artificial
  Synthetic oligonucleotide
ccgggaaacaagcgacttcaaacgaactaggccctcttgcgcgctatcggcgtgg

SEQ ID NO: 168339 - DNA, 54 bp, Artificial
  Synthetic oligonucleotide
ccgtagggcggaccgtaattctgcttgctcacgccgtccctgacccagtaaccc

SEQ ID NO: 168340 - DNA, 55 bp, Artificial
  Synthetic oligonucleotide
ccgttcttcacctgtcggccacgcaagcgggtctgagcatgattctattgacgtc

SEQ ID NO: 168341 - DNA, 55 bp, Artificial
  Synthetic oligonucleotide
cctacactgcatgcgcagcctacgatgattgttcattcttgaggtgacaacgttg

SEQ ID NO: 168342 - DNA, 55 bp, Artificial
  Synthetic oligonucleotide
cctcacgccagcccgccgaatcctcaatccagtagctgcctggcctgttgatagc

SEQ ID NO: 168343 - DNA, 55 bp, Artificial
  Synthetic oligonucleotide
cctcactgataactgtaggctgggacagcaagaaccagtgacggaggtcgtcacc

SEQ ID NO: 168344 - DNA, 55 bp, Artificial
  Synthetic oligonucleotide
cctccaactctcacgccgaaagatgaccatgagtgctgatggctaccacatttgc

SEQ ID NO: 168345 - DNA, 53 bp, Artificial
  Synthetic oligonucleotide
gaatacacaacagctaaacaaccgtggcgatttttcaccttagcgtaaaaacg

SEQ ID NO: 168346 - DNA, 55 bp, Artificial
  Synthetic oligonucleotide
ccacccaataactcggccagtacaagcagcccggattttgcgaaatcacaaagcc

SEQ ID NO: 168347 - DNA, 55 bp, Artificial
  Synthetic oligonucleotide
ccaccgacccgctggtccatcagtttgtcaacgcacagagcgaaggtcccgtgaa

SEQ ID NO: 168348 - DNA, 55 bp, Artificial
  Synthetic oligonucleotide
ccactcgatattctgaactgtgagcttttccagtaaaacagctggagcgctcata

SEQ ID NO: 168349 - DNA, 55 bp, Artificial
  Synthetic oligonucleotide
tttggtgtctccgaaccggttcgcatccttgcgcgagaaaacgcctcgcgaaacc

SEQ ID NO: 168350 - DNA, 55 bp, Artificial
  Synthetic oligonucleotide
ccagatggcgcggcaatttctctaacccttgcgcatatgtacagctggaccctca

SEQ ID NO: 168351 - DNA, 55 bp, Artificial
  Synthetic oligonucleotide
tttccgtgcaggccgagccggacttgctgcaacctgatgaagccttccgggtgtc

SEQ ID NO: 168352 - DNA, 55 bp, Artificial
  Synthetic oligonucleotide
ccaggtaccgaaagaggtgcaagacatgagggagggcatgaagcatccctctgcc

SEQ ID NO: 168353 - DNA, 55 bp, Artificial
  Synthetic oligonucleotide
ccaggttcggaatatctccgtgacgcaatacgacgaggttcttttggacgtcgat

SEQ ID NO: 168354 - DNA, 55 bp, Artificial
  Synthetic oligonucleotide
ccagtgccacttcattggccacgccttgatcacaacgagcatttaccagcgccgg

SEQ ID NO: 168355 - DNA, 55 bp, Artificial
  Synthetic oligonucleotide
ccatccacgaagcatgcgatgcgaccggatcgatggacagaaccttgcgccaggt

SEQ ID NO: 168356 - DNA, 57 bp, Artificial
  Synthetic oligonucleotide
tcgacacttggccgctctgcaaactgcttaaaaccgggctcaaaaactgttccatac

SEQ ID NO: 168357 - DNA, 52 bp, Artificial
  Synthetic oligonucleotide
ttgtgggttcagccacccggtgcgtccacgtttccccaaggaaccgtgccgg

SEQ ID NO: 168358 - DNA, 55 bp, Artificial
  Synthetic oligonucleotide
ttgtccttggtgcctaggcgctttgtcgcatgaggcccagctgactccgagcacc

SEQ ID NO: 168359 - DNA, 55 bp, Artificial
  Synthetic oligonucleotide
ccatgctgcacatgtacgacaccggccgcctctctctcaacatcccgaaggcttg

SEQ ID NO: 168360 - DNA, 55 bp, Artificial
  Synthetic oligonucleotide
cccaaatggttgctcgtagccgtcgcttttgggcgccgctgaggtcaaaggaatg

SEQ ID NO: 168361 - DNA, 55 bp, Artificial
  Synthetic oligonucleotide
cccaagtgcctgccggaccggtcaaactactcattccgcacgtttgcccatgacc

SEQ ID NO: 168362 - DNA, 55 bp, Artificial
  Synthetic oligonucleotide
cccagatggcccctgagatgcccgtttccgctaggtttccccgcagcgttacaag

SEQ ID NO: 168363 - DNA, 55 bp, Artificial
  Synthetic oligonucleotide
cccagcgaaagcaacaaaccctcacggacatgctcgggacagcccggcgacttca

SEQ ID NO: 168364 - DNA, 55 bp, Artificial
  Synthetic oligonucleotide
ccccacctttgtcaaacagatttccaccgtggttgaatcgcgtagcgattgacca

SEQ ID NO: 168365 - DNA, 55 bp, Artificial
  Synthetic oligonucleotide
ttgtaggccttgtgcgcaaagtaccgatgcgacccgccctcccacgcgaacacac

SEQ ID NO: 168366 - DNA, 55 bp, Artificial
  Synthetic oligonucleotide
ttgctcggtatttctcccaggcctacttgaaatacgcaccgccgctataatttag

SEQ ID NO: 168367 - DNA, 60 bp, Artificial
  Synthetic oligonucleotide
gacatttgcaccaggtacagcattacgcgctcgaccttctacagggcggttcttgaacgc

SEQ ID NO: 168368 - DNA, 55 bp, Artificial
  Synthetic oligonucleotide
ttgcctgaacagtagagggctacgtcctgggtattccacgccactccaccattct

SEQ ID NO: 168369 - DNA, 55 bp, Artificial
  Synthetic oligonucleotide
cccgacctcgacaaaactttcaagctggctgttaaagcgctgcactgcattcatc

SEQ ID NO: 168370 - DNA, 55 bp, Artificial
  Synthetic oligonucleotide
cccgactgttccccagctacgatcagcatgtattcctcagtagaaacccagggcc

SEQ ID NO: 168371 - DNA, 54 bp, Artificial
  Synthetic oligonucleotide
cccgagcaccggttctaaccgaccttcgcaccatctgacgtccgtccaaaccca

SEQ ID NO: 168372 - DNA, 54 bp, Artificial
  Synthetic oligonucleotide
cccgcgtggagggctgcagggaacgtcgcaccggtcctttcttccgttgattgt

SEQ ID NO: 168373 - DNA, 55 bp, Artificial
  Synthetic oligonucleotide
cccggaacaacgaggggcatcggtggctcgcatctcatgtagcgctcccacatca

SEQ ID NO: 168374 - DNA, 54 bp, Artificial
  Synthetic oligonucleotide
cccggaagggtgtagggaacgtggcacctgtatgtgaagtgcgtgccgtttcgg

SEQ ID NO: 168375 - DNA, 55 bp, Artificial
  Synthetic oligonucleotide
cgcaaatcccactccataacggcgttgcccgtaccgatcaccgtgccatagccaa

SEQ ID NO: 168376 - DNA, 55 bp, Artificial
  Synthetic oligonucleotide
cgcaacctacaagcccgtcgcgggtctgtgccccaacatcgcgcctagatttgac

SEQ ID NO: 168377 - DNA, 55 bp, Artificial
  Synthetic oligonucleotide
cgcaagctagacaagcgctttcacatgttttgagcgtaaatctgatgaaccgccc

SEQ ID NO: 168378 - DNA, 57 bp, Artificial
  Synthetic oligonucleotide
aggacgtcggtttcatacgaagcaacactgacctaactgagtaagcaggtaacctga

SEQ ID NO: 168379 - DNA, 55 bp, Artificial
  Synthetic oligonucleotide
cgcaatgggaaacgcctctatgtacttctctgcacgcgcactgatcgcggcggca

SEQ ID NO: 168380 - DNA, 55 bp, Artificial
  Synthetic oligonucleotide
cgcacattgactgcggagctcgtgcggcggaaggtggtccgcttcactcgcaacg

SEQ ID NO: 168381 - DNA, 55 bp, Artificial
  Synthetic oligonucleotide
cgcaggtccgattggccacaagcgcgaccaagggaatttcatgagtgggtgattg

SEQ ID NO: 168382 - DNA, 55 bp, Artificial
  Synthetic oligonucleotide
cgcaggtggcgtgtacaagccgaaggcgccgtttaggatagttgcaggactcctg

SEQ ID NO: 168383 - DNA, 55 bp, Artificial
  Synthetic oligonucleotide
cgcatatcctaaggagcggggacactgcagccattgtctttcccaggcgtattcc

SEQ ID NO: 168384 - DNA, 55 bp, Artificial
  Synthetic oligonucleotide
cgcatctgagaacttctggcaacgaccacgcttgcctgtgggccgagctagccac

SEQ ID NO: 168385 - DNA, 55 bp, Artificial
  Synthetic oligonucleotide
cgccaaacttgcatcaccgcaagcagggcgaagctttgcctagtccaccaccctc

SEQ ID NO: 168386 - DNA, 55 bp, Artificial
  Synthetic oligonucleotide
ttagcgcttgctcagcgggaatccgttgtcaggacttacgtccgtcccacggcgc

SEQ ID NO: 168387 - DNA, 55 bp, Artificial
  Synthetic oligonucleotide
cgcccacctcattcggcaccgacacaatgattgatgtcttacacccgaccccgag

SEQ ID NO: 168388 - DNA, 55 bp, Artificial
  Synthetic oligonucleotide
tgttacgctggtggaagttctgttggcgttagttgttcctattacgccaacttgc

SEQ ID NO: 168389 - DNA, 58 bp, Artificial
  Synthetic oligonucleotide
tcgaaaaaggacggacgaagggcgtgattcgtctatcgtgtgccggcaggtggctcga

SEQ ID NO: 168390 - DNA, 55 bp, Artificial
  Synthetic oligonucleotide
cgccctcgacatgattatgaagaagctgcgcgaaaaggagcgtagcggcgagctg

SEQ ID NO: 168391 - DNA, 55 bp, Artificial
  Synthetic oligonucleotide
tgtgggaagctgtcgcggtccatgcaagttcagggcgtagccggctttgggcaga

SEQ ID NO: 168392 - DNA, 55 bp, Artificial
  Synthetic oligonucleotide
tgtgcatggcgagccagtatagggaaaagccgcctggctcccaagggaacgcagg

SEQ ID NO: 168393 - DNA, 55 bp, Artificial
  Synthetic oligonucleotide
cgcctcgttacatttgtagcgaccgaaccattccgtgaaaagaaggcagcgttac

SEQ ID NO: 168394 - DNA, 55 bp, Artificial
  Synthetic oligonucleotide
cgcctgaaaagcgcccatctcggaacgctcacatcatcccgtgaatcgactgcgc

SEQ ID NO: 168395 - DNA, 55 bp, Artificial
  Synthetic oligonucleotide
cgccttgaacgcgtggtccgccgcattcaacacgagcctgcgttagcagcctttc

SEQ ID NO: 168396 - DNA, 55 bp, Artificial
  Synthetic oligonucleotide
cgccttgatctgtgcctatgttgactaccaccgtgaaaggatcgagcaccttgac

SEQ ID NO: 168397 - DNA, 55 bp, Artificial
  Synthetic oligonucleotide
tgtgagcgctgtgccggctatgtcccgcacgcgtctcgtacgccttgactctgta

SEQ ID NO: 168398 - DNA, 55 bp, Artificial
  Synthetic oligonucleotide
cgcgcggccttctgtaccgtgtcgcgttggaccatattgctgatgaaatgctcat

SEQ ID NO: 168399 - DNA, 55 bp, Artificial
  Synthetic oligonucleotide
cgcgcttcgattgcgcttgacaaagcgtagtcgttcggttacaaattggtcgtgt

SEQ ID NO: 168400 - DNA, 60 bp, Artificial
  Synthetic oligonucleotide
gacgccccccagaaagcaagtgttagcagcatgaagcttcaacggagttgcagtcttata

SEQ ID NO: 168401 - DNA, 55 bp, Artificial
  Synthetic oligonucleotide
cgcggcggagcgtcagagatgtacggatcctggggaaacgtgtagcgaaacgcga

SEQ ID NO: 168402 - DNA, 55 bp, Artificial
  Synthetic oligonucleotide
cgcgttctagctggcctcagtcgccaagacgttgcttcgcagtgcatcccgtgca

SEQ ID NO: 168403 - DNA, 55 bp, Artificial
  Synthetic oligonucleotide
cgcgttgccgtggtcgatagacatgaagctgctgctaggcagttcgttttcctgg

SEQ ID NO: 168404 - DNA, 55 bp, Artificial
  Synthetic oligonucleotide
cgctaaagtctgctccctgccggccgaaagcatggctactggccccacatctcac

SEQ ID NO: 168405 - DNA, 55 bp, Artificial
  Synthetic oligonucleotide
cctccctggccttttcgtggtagcggcgcgattggccaaacaacacgacgcagtc

SEQ ID NO: 168406 - DNA, 55 bp, Artificial
  Synthetic oligonucleotide
cctcgaagcgagccacattgtcgcgtgtactcgagatatcgaagggttcgccacg

SEQ ID NO: 168407 - DNA, 55 bp, Artificial
  Synthetic oligonucleotide
cctcgagatctgcaaagttcgggaacgtgatgttattgcctgtattgttggcaag

SEQ ID NO: 168408 - DNA, 55 bp, Artificial
  Synthetic oligonucleotide
ttcgaagaccgcaaaattgatccatccgcccgaggttgatcgttctcggatgtgg

SEQ ID NO: 168409 - DNA, 55 bp, Artificial
  Synthetic oligonucleotide
cctcttgtcgtagctgatcgacatgatgtgcggtattcctctacgtcattgagcg

SEQ ID NO: 168410 - DNA, 55 bp, Artificial
  Synthetic oligonucleotide
cctggaacttctttgcgacgaattcgaccagttctctgccaagcagcgggaactc

SEQ ID NO: 168411 - DNA, 60 bp, Artificial
  Synthetic oligonucleotide
gagaagcgccccatgagggcaatggctcacaggctaaatcgaagcgtccgagacgtgaac

SEQ ID NO: 168412 - DNA, 53 bp, Artificial
  Synthetic oligonucleotide
cctgggccccgaagacaacaccaccggcaagtattttgctcaaaagaacgccc

SEQ ID NO: 168413 - DNA, 55 bp, Artificial
  Synthetic oligonucleotide
ccttcaatgcaaacatcgccagagcgaagatcaccacacaagtagctgaacacac

SEQ ID NO: 168414 - DNA, 55 bp, Artificial
  Synthetic oligonucleotide
ccttgcgcccaacgtttacgggagccggttggttattcagtgtcaccagcgttgc

SEQ ID NO: 168415 - DNA, 55 bp, Artificial
  Synthetic oligonucleotide
ttccactggcccgccgtagtcgctgcgaagcgagcggcaaagagtacacccgcta

SEQ ID NO: 168416 - DNA, 55 bp, Artificial
  Synthetic oligonucleotide
ttcaatttaccggagcaaagacatggctcaagcaaacacgcaagtgcagggcaag

SEQ ID NO: 168417 - DNA, 55 bp, Artificial
  Synthetic oligonucleotide
cgaaagcacattcctacaccaggttcataccgggcctacaagcacttgagctaag

SEQ ID NO: 168418 - DNA, 54 bp, Artificial
  Synthetic oligonucleotide
cgaaccaccattttggctcggatacgaacttttcccgcatccctgtaggacaaa

SEQ ID NO: 168419 - DNA, 55 bp, Artificial
  Synthetic oligonucleotide
cgaagcgtgagggtatatattttcaattgccgattccacatgcaaatggagaggt

SEQ ID NO: 168420 - DNA, 55 bp, Artificial
  Synthetic oligonucleotide
cgacaagccacgttttcgcgagttgtccgagctctatggctacctctccaagcag

SEQ ID NO: 168421 - DNA, 55 bp, Artificial
  Synthetic oligonucleotide
cgacacagtgaatcggtttaatccggggagcacccgaaggtgctgtgccacgcgt

SEQ ID NO: 168422 - DNA, 60 bp, Artificial
  Synthetic oligonucleotide
tcaggcaaaactggatggccgcatctgagaacttctggcaacgaccacgcttgcctgtgg

SEQ ID NO: 168423 - DNA, 58 bp, Artificial
  Synthetic oligonucleotide
gagcttttcggcaatgactgtgtacaccgggtaggttctgagctgtggtgcgggaaaa

SEQ ID NO: 168424 - DNA, 55 bp, Artificial
  Synthetic oligonucleotide
cgaccgcgtgcaactggcgagggacatctcggcaggaggactttccagtgtgcat

SEQ ID NO: 168425 - DNA, 55 bp, Artificial
  Synthetic oligonucleotide
cgacgagccgagctgcggggcgactgtatttgactgttattctccacgcgtgaat

SEQ ID NO: 168426 - DNA, 55 bp, Artificial
  Synthetic oligonucleotide
cgacgcgttgcaaaatctcccgtaccaataggctcggtcgttgaggttcctgctg

SEQ ID NO: 168427 - DNA, 55 bp, Artificial
  Synthetic oligonucleotide
cgactacgatgctatcatcgggtcttccccacaggatcttcgagaggctcgccca

SEQ ID NO: 168428 - DNA, 55 bp, Artificial
  Synthetic oligonucleotide
cgagaggcggggctaaatgacagcgaacttggtggggaggagtaacgtgaagttg

SEQ ID NO: 168429 - DNA, 55 bp, Artificial
  Synthetic oligonucleotide
cgagccaacacgttaaaagatcccattcgttaataggagcgattgtgcctaaccc

SEQ ID NO: 168430 - DNA, 55 bp, Artificial
  Synthetic oligonucleotide
cgaggagactgggtattcgattcagcgtgttagagctctgttacaagcggcgggc

SEQ ID NO: 168431 - DNA, 55 bp, Artificial
  Synthetic oligonucleotide
cgaggatagttttgtcctgtgacaggcaggtgactatggcactaatttcgctctg

SEQ ID NO: 168432 - DNA, 55 bp, Artificial
  Synthetic oligonucleotide
cgaggtcgagctgtgcatcggttggcatacagcggcctctccttcgtttcgcgtg

SEQ ID NO: 168433 - DNA, 55 bp, Artificial
  Synthetic oligonucleotide
cgattttgcttccttctcaaccgcgcgtggtgtccatagagttaaggcgttcgcg

SEQ ID NO: 168434 - DNA, 60 bp, Artificial
  Synthetic oligonucleotide
tccgccaactggtctgcatagtagggcgtcatggtaatgctgctcttgcgcgactctgct

SEQ ID NO: 168435 - DNA, 53 bp, Artificial
  Synthetic oligonucleotide
cgcaaacgggtgtccttcaagaccccgaaaagcacggcgttcggtatgtggcg

SEQ ID NO: 168436 - DNA, 55 bp, Artificial
  Synthetic oligonucleotide
gctgtcgggtcgagtaagcgggaagccggttggctcccagggcctcgcgagaggc

SEQ ID NO: 168437 - DNA, 55 bp, Artificial
  Synthetic oligonucleotide
gtggtatccggggaagcatgggtcatgacggtaactatttcagggaggcccattg

SEQ ID NO: 168438 - DNA, 55 bp, Artificial
  Synthetic oligonucleotide
gcttggaggtctgcttgggaatgtacttctggatcaatccagagttgaaagcact

SEQ ID NO: 168439 - DNA, 55 bp, Artificial
  Synthetic oligonucleotide
gtgcgctgcgtcggggctcgcatttgcggaactcgatgcagatccggaagagagt

SEQ ID NO: 168440 - DNA, 55 bp, Artificial
  Synthetic oligonucleotide
gcttttacccaaggccgacctctggattcatggacatgtgcctgacaactttgac

SEQ ID NO: 168441 - DNA, 55 bp, Artificial
  Synthetic oligonucleotide
gcttttccgtgaagcgaatccttgccgtgactgaggaaatgccttcctacgtggc

SEQ ID NO: 168442 - DNA, 55 bp, Artificial
  Synthetic oligonucleotide
ggaacaaagcagcgaataccccgaagaatcaccgaaaggtcacgtctgaactggg

SEQ ID NO: 168443 - DNA, 55 bp, Artificial
  Synthetic oligonucleotide
ggaatcaaatttccatatgtagtccgagaaattctgggtcgccaggtaagtaatc

SEQ ID NO: 168444 - DNA, 55 bp, Artificial
  Synthetic oligonucleotide
gtgcctgcaagtgttgccgttcgtcggcggtatggtgaatcgtttcgtgcagccc

SEQ ID NO: 168445 - DNA, 60 bp, Artificial
  Synthetic oligonucleotide
tccgccaacagctctttgattcggtcgttcagtttcagaaacggactgatgagaatcagg

SEQ ID NO: 168446 - DNA, 55 bp, Artificial
  Synthetic oligonucleotide
ggaatgaatgcgaagtacgtgatgtagtgtcacgaagaaacggggtccccacctc

SEQ ID NO: 168447 - DNA, 55 bp, Artificial
  Synthetic oligonucleotide
ggacatccctctgaaagagggtccagccaccatgttccggcgagactggctgcta

SEQ ID NO: 168448 - DNA, 55 bp, Artificial
  Synthetic oligonucleotide
ggaccagtcttgctcgataacggcaaaccgcgctgtcgaggtgtcgtcccatgac

SEQ ID NO: 168449 - DNA, 55 bp, Artificial
  Synthetic oligonucleotide
ggagagtggtgtttagtgatggggcgcttccgatggatcaagtaccaggcagcgg

SEQ ID NO: 168450 - DNA, 55 bp, Artificial
  Synthetic oligonucleotide
ggagcaaatagagcgaacgaacattgctcttgtcgtcagaaaagtgtaggtaact

SEQ ID NO: 168451 - DNA, 55 bp, Artificial
  Synthetic oligonucleotide
gtgcagctcctcatttcgttaagaacggtaaaagcataggatagttcgtggtcca

SEQ ID NO: 168452 - DNA, 55 bp, Artificial
  Synthetic oligonucleotide
ggagggtgcgatgtgcgtcaccagcatgaattccgtcggggcttcggaaacgacg

SEQ ID NO: 168453 - DNA, 55 bp, Artificial
  Synthetic oligonucleotide
ggagtggtcatacaccaggcgcgtgaatcgcccatcgtcataagcggctgtgggc

SEQ ID NO: 168454 - DNA, 55 bp, Artificial
  Synthetic oligonucleotide
ggagttggcaatgaacgctactcgcgcccttgtggcactgatggcctgccttgcc

SEQ ID NO: 168455 - DNA, 54 bp, Artificial
  Synthetic oligonucleotide
ggataccgttcctgtaccttgtaattttcccgttgatttggtgccaccattatc

SEQ ID NO: 168456 - DNA, 60 bp, Artificial
  Synthetic oligonucleotide
gatcttaagaggcatgcccaatgcggtcgcatgccgttccatgaggtcccgttgatgatg

SEQ ID NO: 168457 - DNA, 53 bp, Artificial
  Synthetic oligonucleotide
ggatcagtccttgccccactacaaaaccggtgccttggtgttccccgtcaagg

SEQ ID NO: 168458 - DNA, 55 bp, Artificial
  Synthetic oligonucleotide
gtgaagcgccgccatccatgtagaccctcatggacaccagttggagcaggctaag

SEQ ID NO: 168459 - DNA, 55 bp, Artificial
  Synthetic oligonucleotide
ggcactttcatccgtatccctatgacttacgattccaccgcctcctacccacgcg

SEQ ID NO: 168460 - DNA, 55 bp, Artificial
  Synthetic oligonucleotide
ggcagttggtcgaacatgctgcttcgctatccatgcaatcccacccaagatgttg

SEQ ID NO: 168461 - DNA, 55 bp, Artificial
  Synthetic oligonucleotide
ggcatcccggtaatggctcaacggggattctcggacatattcggcgccgtggaac

SEQ ID NO: 168462 - DNA, 55 bp, Artificial
  Synthetic oligonucleotide
gtcttgcaccagcaaatgcgtctcgcccatttgtcccagctgacacggaaacacc

SEQ ID NO: 168463 - DNA, 55 bp, Artificial
  Synthetic oligonucleotide
ggcattcactaagctgccacgctgataggggattgagagcccttgcctcttcacc

SEQ ID NO: 168464 - DNA, 55 bp, Artificial
  Synthetic oligonucleotide
tacactaggccgctattggacgtgttggtcgactgcaaggcgttcatgcccggga

SEQ ID NO: 168465 - DNA, 55 bp, Artificial
  Synthetic oligonucleotide
taagtctggctgtgccttggcgtactgacgcgaccgaggtgccgaaaacgacggg

SEQ ID NO: 168466 - DNA, 55 bp, Artificial
  Synthetic oligonucleotide
gcggactgcaagcggcttacccctagaatccggcgcagatgcccttgattctgct

SEQ ID NO: 168467 - DNA, 53 bp, Artificial
  Synthetic oligonucleotide
gcaagccccgtatacaaaaaccgcttggcggttttgtatacgggtaggcttgc

SEQ ID NO: 168468 - DNA, 55 bp, Artificial
  Synthetic oligonucleotide
gcggcaaattactgcttgcatttcacgtatttcacccataatgcacgagcctccc

SEQ ID NO: 168469 - DNA, 55 bp, Artificial
  Synthetic oligonucleotide
gttgtcgtccggtccgaggtagatgggcggggtgatgaatgccctggcattccag

SEQ ID NO: 168470 - DNA, 55 bp, Artificial
  Synthetic oligonucleotide
gcggccgtagtgcaggacatcttgaagctcgacaaggcagagcgtgagcgcacca

SEQ ID NO: 168471 - DNA, 55 bp, Artificial
  Synthetic oligonucleotide
gcgggttaggcatgggatcaccttggtttatgtttaggttacatgataccttgcg

SEQ ID NO: 168472 - DNA, 53 bp, Artificial
  Synthetic oligonucleotide
gcgggtttcatcaagaccggacaaaacgtcaaactccggtatcaggcgttccc

SEQ ID NO: 168473 - DNA, 55 bp, Artificial
  Synthetic oligonucleotide
gcggtcattcgatctccggccatttggattccacagtgagtgcatctcagtatac

SEQ ID NO: 168474 - DNA, 55 bp, Artificial
  Synthetic oligonucleotide
gcggtggtggctgatgttcgaatgcgtgcagaatatcaatcgtcatgactcgctc

SEQ ID NO: 168475 - DNA, 55 bp, Artificial
  Synthetic oligonucleotide
gcgtaggaggcgtcaggtcgccgaagaactcttcccaagcccgattgatttcggg

SEQ ID NO: 168476 - DNA, 55 bp, Artificial
  Synthetic oligonucleotide
gcgtcacattacgaacagcgattactggaaacaccacagacccaacgatgttcag

SEQ ID NO: 168477 - DNA, 55 bp, Artificial
  Synthetic oligonucleotide
gttggtcgctagtccgttgaaagaccggggtgacgccatctgctgcggtcccgac

SEQ ID NO: 168478 - DNA, 56 bp, Artificial
  Synthetic oligonucleotide
tccaccgttcaattgctcgactcgggttatcggtaggacggccatcggtgaccaag

SEQ ID NO: 168479 - DNA, 55 bp, Artificial
  Synthetic oligonucleotide
gcgtctgtagcggtgcggcaaggcaaaacgtgagattctagccgagtggcggact

SEQ ID NO: 168480 - DNA, 55 bp, Artificial
  Synthetic oligonucleotide
gcgtgacatcgaagccactcacaggctgcacgccttgagggaccgagactgcaca

SEQ ID NO: 168481 - DNA, 55 bp, Artificial
  Synthetic oligonucleotide
gcgtgagtggcgacaggcgcaagcttagttcattccagcggagataggtgtattt

SEQ ID NO: 168482 - DNA, 55 bp, Artificial
  Synthetic oligonucleotide
gcgttggcatggactcgcggtgtgtctctcccttgttgacaccgataaacgtctg

SEQ ID NO: 168483 - DNA, 55 bp, Artificial
  Synthetic oligonucleotide
gcgtttgtacatgtgcagcgcctcatttcgttaagaacggtaaaagcataggata

SEQ ID NO: 168484 - DNA, 55 bp, Artificial
  Synthetic oligonucleotide
gctagactggcgctaaacgaaccttaatggatagtgcaatatgccattgagagca

SEQ ID NO: 168485 - DNA, 55 bp, Artificial
  Synthetic oligonucleotide
gttgccctccccgcataaatccaggagatcaaggcaatgcaagaaatctggtcgc

SEQ ID NO: 168486 - DNA, 55 bp, Artificial
  Synthetic oligonucleotide
gctcaatacaagaccatgactaaacgcaggctatatctggcgtttgcggtctaaa

SEQ ID NO: 168487 - DNA, 55 bp, Artificial
  Synthetic oligonucleotide
gttgaagccgacgggtagccgtaaagccagcacgtatcaatacaccgaggttccg

SEQ ID NO: 168488 - DNA, 55 bp, Artificial
  Synthetic oligonucleotide
gctcagggcggggaacatcgacgtttgaacggtgtagagctaggcataagacgcg

SEQ ID NO: 168489 - DNA, 60 bp, Artificial
  Synthetic oligonucleotide
acacatccaaggatctgtggcagcaggtcaaacggaccgtcagatcggtagaacgtgacg

SEQ ID NO: 168490 - DNA, 55 bp, Artificial
  Synthetic oligonucleotide
gttcggaacaaaggtcggtagcctatcagtaaggcagcccgttcattggcgcggg

SEQ ID NO: 168491 - DNA, 55 bp, Artificial
  Synthetic oligonucleotide
gctctcacgccgcgtgacctgtttgactggcatgcaattgaacgccatgtgccgc

SEQ ID NO: 168492 - DNA, 55 bp, Artificial
  Synthetic oligonucleotide
gctctccgttgcgagccatgtgggcgtagcgcagataggtacgctcgtcgctatc

SEQ ID NO: 168493 - DNA, 55 bp, Artificial
  Synthetic oligonucleotide
gctgcgcagaagtagcacgagtgcccatggatcgctcattttcgggtccacgaga

SEQ ID NO: 168494 - DNA, 55 bp, Artificial
  Synthetic oligonucleotide
gtgttagccgctctaaattctgagctcgcaacaagcgtcgatctctacgcgtcgc

SEQ ID NO: 168495 - DNA, 55 bp, Artificial
  Synthetic oligonucleotide
gggcttgctgggatgcgttggtctggctgtgatcttgcatgtcgtggtttgaagg

SEQ ID NO: 168496 - DNA, 55 bp, Artificial
  Synthetic oligonucleotide
ggggacacaccttgcgacataactgggacaaatgcctatgtagcaacacctacgt

SEQ ID NO: 168497 - DNA, 55 bp, Artificial
  Synthetic oligonucleotide
gtccacggaacgatatccacctcgacaattttgcctcctagcgggattgagacgg

SEQ ID NO: 168498 - DNA, 55 bp, Artificial
  Synthetic oligonucleotide
ggggatgcctcagctccccatcacagggcgtttcttgttgggcgcttgaaagacg

SEQ ID NO: 168499 - DNA, 54 bp, Artificial
  Synthetic oligonucleotide
ggggccgccagaacgaatcggctggattagccgacaccttcccgtaccttctta

SEQ ID NO: 168500 - DNA, 60 bp, Artificial
  Synthetic oligonucleotide
gtgcgccggtggctttcggaagatagcgccatttcttacgccaattgggcgctgctatgc

SEQ ID NO: 168501 - DNA, 55 bp, Artificial
  Synthetic oligonucleotide
ggggcgaaggcatacaagcggtctaggcagccgctgattgaacctggttgcttcc

SEQ ID NO: 168502 - DNA, 55 bp, Artificial
  Synthetic oligonucleotide
gtcagccgaatggttgcatttcacagtccgtgccgcgctgcgtagagtcgccgca

SEQ ID NO: 168503 - DNA, 55 bp, Artificial
  Synthetic oligonucleotide
gggtattcgggttccgggtagctacggaccgcatccatgtcaggagttgcatggg

SEQ ID NO: 168504 - DNA, 55 bp, Artificial
  Synthetic oligonucleotide
gtcacgacccggctttgtcgaaccctaatcagggattgaggccgtcaggtcccga

SEQ ID NO: 168505 - DNA, 55 bp, Artificial
  Synthetic oligonucleotide
gggtcgattcatcaacgcaccctggccgataagaccatttcgggtgcaaacctgc

SEQ ID NO: 168506 - DNA, 55 bp, Artificial
  Synthetic oligonucleotide
gggtgccagccgcggagagttgggttgccgcagtgcagccctgcttgaccggtat

SEQ ID NO: 168507 - DNA, 55 bp, Artificial
  Synthetic oligonucleotide
gggttctttctccgcaatgtttcacacgcggcacacaaaggaaacgggtatggca

SEQ ID NO: 168508 - DNA, 55 bp, Artificial
  Synthetic oligonucleotide
ggtacccgtgtcgaccctgggcttgtatgcacgcgaaacctccagtccaccgaga

SEQ ID NO: 168509 - DNA, 55 bp, Artificial
  Synthetic oligonucleotide
ggtagagggttgaacggtcgacgacctgggtcgttctctcaggtccgcgagtgca

SEQ ID NO: 168510 - DNA, 55 bp, Artificial
  Synthetic oligonucleotide
ggtatgcctcgcaaagatatctatcccattcgagtctgcgtgcgtagtcctgaga

SEQ ID NO: 168511 - DNA, 57 bp, Artificial
  Synthetic oligonucleotide
gtgcgagggccgcacaggcgctagggctgggcgagaaagggggccgaaccgtgcgcc

SEQ ID NO: 168512 - DNA, 55 bp, Artificial
  Synthetic oligonucleotide
gtcaaggcgggacttatctgcattcccgtgtgattcatttcgtgctgttgggtgc

SEQ ID NO: 168513 - DNA, 55 bp, Artificial
  Synthetic oligonucleotide
ggtccctatgctggctgatccctctaccaaataccgcgcatttcccgttgtggac

SEQ ID NO: 168514 - DNA, 55 bp, Artificial
  Synthetic oligonucleotide
ggtcgaagtttataactatagacttgatgcctgatgagaagcgccccatgagggc

SEQ ID NO: 168515 - DNA, 55 bp, Artificial
  Synthetic oligonucleotide
ggtcgcactgacatacctctggtacgtgatcattacgtcgtaccggaacctgaac

SEQ ID NO: 168516 - DNA, 55 bp, Artificial
  Synthetic oligonucleotide
gtatccgccctcgctttcctggtctacaggaccctttccgcgagcgagtggtact

SEQ ID NO: 168517 - DNA, 55 bp, Artificial
  Synthetic oligonucleotide
gtatcatctggcgtcgttacgcttgaaacatgtcccaacacactactgtccagcc

SEQ ID NO: 168518 - DNA, 54 bp, Artificial
  Synthetic oligonucleotide
ggtgcggacgtattgggccaaccaatacttgtttaccacctcgtcgtattggtc

SEQ ID NO: 168519 - DNA, 55 bp, Artificial
  Synthetic oligonucleotide
ggttatgaaattttcgagaccaccggcaaaactggtggcggctcagacgtaatcc

SEQ ID NO: 168520 - DNA, 54 bp, Artificial
  Synthetic oligonucleotide
ggttgcaaggggtgaaggtatcctcggagacccgtgcaagttcggtatcttccg

SEQ ID NO: 168521 - DNA, 55 bp, Artificial
  Synthetic oligonucleotide
ggttgctgcgttggtgcgcatctatcccgaaccaagggatctgcccgatgaacga

SEQ ID NO: 168522 - DNA, 57 bp, Artificial
  Synthetic oligonucleotide
ggaatcgcattgtcactggaaccggcaagccactcgtaagaaacgccgaagtggttg

SEQ ID NO: 168523 - DNA, 55 bp, Artificial
  Synthetic oligonucleotide
gtatatggctgctgttcgacctttgggccataggtgccccatgtcaaatgctggg

SEQ ID NO: 168524 - DNA, 55 bp, Artificial
  Synthetic oligonucleotide
gtactcacctttgttggaacaagcgggtgcgaaaactcattgtcgtggttccaac

SEQ ID NO: 168525 - DNA, 55 bp, Artificial
  Synthetic oligonucleotide
gtagagttctcttcggtcagctagcggagcgctgatacgaattagcagctctggg

SEQ ID NO: 168526 - DNA, 55 bp, Artificial
  Synthetic oligonucleotide
ggccaccagcggagtaaaaccttttgccaaggattgaggctaagccgggctttgc

SEQ ID NO: 168527 - DNA, 55 bp, Artificial
  Synthetic oligonucleotide
gtcggggccgaaatgatggcgtgctgttggccctcaaacatgaggtagcgtcccc

SEQ ID NO: 168528 - DNA, 55 bp, Artificial
  Synthetic oligonucleotide
ggccagtgggcaagcgatggaagctatcaatccggagatgcgacgctccgctcag

SEQ ID NO: 168529 - DNA, 55 bp, Artificial
  Synthetic oligonucleotide
ggcccacggtcggtaatcaccttaggcgtaatgaaaacaagcatttcacgcttgc

SEQ ID NO: 168530 - DNA, 55 bp, Artificial
  Synthetic oligonucleotide
ggccctgtgtggtgaccgattgtattcaggccgtcgcacaggaatcgcacggtcg

SEQ ID NO: 168531 - DNA, 55 bp, Artificial
  Synthetic oligonucleotide
ggccgttacgaccccgcttaggcgcataggttctacggaggacattgctgcggct

SEQ ID NO: 168532 - DNA, 54 bp, Artificial
  Synthetic oligonucleotide
gtcggccaaatactagttacagacggggaaaccgccacgtatggtcttgaggcc

SEQ ID NO: 168533 - DNA, 55 bp, Artificial
  Synthetic oligonucleotide
agcccggtagagccagtccgacaacgtgacttccagctccaaagcccccttgccg

SEQ ID NO: 168534 - DNA, 57 bp, Artificial
  Synthetic oligonucleotide
acgcgtattcagaaagcaagcgaaaccccatgtgttttccgccctttcgtgcgatga

SEQ ID NO: 168535 - DNA, 55 bp, Artificial
  Synthetic oligonucleotide
ggcgccgccacatcagaccccagcggtttcccacgcgatacacattcttggcact

SEQ ID NO: 168536 - DNA, 55 bp, Artificial
  Synthetic oligonucleotide
ggcgctcacggtcactcgcggcgggttcatattgcttagaaatctgcgccgtgtg

SEQ ID NO: 168537 - DNA, 55 bp, Artificial
  Synthetic oligonucleotide
ggcggatgtcaatcgcatctggctcggcaactgaaggaaatcagatggacgatcg

SEQ ID NO: 168538 - DNA, 55 bp, Artificial
  Synthetic oligonucleotide
gtcgagggtgggcttctgtcatgaatactctaccgaacccctcgacaatcgcatc

SEQ ID NO: 168539 - DNA, 55 bp, Artificial
  Synthetic oligonucleotide
ggcgggcctcattaaagcgattgctcgtgtgtatcgcgcttttgcacgcgctcag

SEQ ID NO: 168540 - DNA, 51 bp, Artificial
  Synthetic oligonucleotide
gtcgagctaacgtaacaagttaacctaaagcactacccaatacggggtacc

SEQ ID NO: 168541 - DNA, 55 bp, Artificial
  Synthetic oligonucleotide
ggctgtggggtcgcgtgtcgcaacctacgtggccgcatttgattcgccagtcaac

SEQ ID NO: 168542 - DNA, 55 bp, Artificial
  Synthetic oligonucleotide
ggcttcggatttcttgtcgagttggttttgggtcatgggagccgtccaggaggca

SEQ ID NO: 168543 - DNA, 55 bp, Artificial
  Synthetic oligonucleotide
gtcctgtggtgggagatatgaaggacgcttgcaccaatagcacgatgccggagct

SEQ ID NO: 168544 - DNA, 55 bp, Artificial
  Synthetic oligonucleotide
gtccgggtattgattcaacaaatcgatactgacgatgacacacatcgatcatttc

SEQ ID NO: 168545 - DNA, 60 bp, Artificial
  Synthetic oligonucleotide
acgcgcgaattgacctgccaatgtcggcggtcgccgataactgacattcactactttgca

SEQ ID NO: 168546 - DNA, 51 bp, Artificial
  Synthetic oligonucleotide
gggaacgaaagcgacttccggtgagggaatcaccgggaggacgggtaagtc

SEQ ID NO: 168547 - DNA, 55 bp, Artificial
  Synthetic oligonucleotide
gggatctcctctcgttgacagacaaccaatgaaagaccactaggcagagctatgg

SEQ ID NO: 168548 - DNA, 55 bp, Artificial
  Synthetic oligonucleotide
gggcaccttaaagcgctcgcccgaaagttgacgctcggggattcatcaaatcagg

SEQ ID NO: 168549 - DNA, 55 bp, Artificial
  Synthetic oligonucleotide
gggcaggaacggtttgatgcagaggcttgacgcaaatgttgccgccacgtagggg

SEQ ID NO: 168550 - DNA, 55 bp, Artificial
  Synthetic oligonucleotide
gggcataactcggccgatggcggggtgtttgactactggggaatccccaacagcg

SEQ ID NO: 168551 - DNA, 55 bp, Artificial
  Synthetic oligonucleotide
gggcattcggctgcgtaacacatttggctggaggtcgatgacctgaatccccagg

SEQ ID NO: 168552 - DNA, 55 bp, Artificial
  Synthetic oligonucleotide
gggccgctgacgatagcggaagccaagaaggggttggctcttgcttttggcgtcg

SEQ ID NO: 168553 - DNA, 55 bp, Artificial
  Synthetic oligonucleotide
gggcgtctacgtagtgaagtgtcggcacgagctcatctggggagcgtagattcac

SEQ ID NO: 168554 - DNA, 55 bp, Artificial
  Synthetic oligonucleotide
gggctaccaatggacccactgggtttggcgaaggacatatttcgccttatcgggc

SEQ ID NO: 168555 - DNA, 55 bp, Artificial
  Synthetic oligonucleotide
gggctcgcttctttcgactgaacaattttcttgtaggagtcagtgtcgatggacc

SEQ ID NO: 168556 - DNA, 60 bp, Artificial
  Synthetic oligonucleotide
gtgacgtcagtgttcgcaagagctacgcaggatggcgtccccagctgtacggaatggggt

SEQ ID NO: 168557 - DNA, 55 bp, Artificial
  Synthetic oligonucleotide
gaggcccaattttcgcaggcgggatgcgggtcaatgctctacagtgcaaccccag

SEQ ID NO: 168558 - DNA, 55 bp, Artificial
  Synthetic oligonucleotide
gagggcgcgttactgcgaagtcacaggcttgtggtcgttgtagtttactcagcgg

SEQ ID NO: 168559 - DNA, 55 bp, Artificial
  Synthetic oligonucleotide
gaggttgcgtcctcccactatgaatgatcgcgaacgtcgcaaaatgccgacccca

SEQ ID NO: 168560 - DNA, 55 bp, Artificial
  Synthetic oligonucleotide
gagtcatctgcctacctgcaactgagtggtgttcatggaccagcatctctaccca

SEQ ID NO: 168561 - DNA, 55 bp, Artificial
  Synthetic oligonucleotide
gagtccgcatcgtgtgcagtcgtctttcggccaacctcaccagacaacgccgacc

SEQ ID NO: 168562 - DNA, 55 bp, Artificial
  Synthetic oligonucleotide
gagtctccagtcgtactacgccacgcggttctttcgcttcctcgtttccttgagg

SEQ ID NO: 168563 - DNA, 55 bp, Artificial
  Synthetic oligonucleotide
gatccggcgccaggtcctccgtgtctgaccaagttatgacgtgcagcacccgaca

SEQ ID NO: 168564 - DNA, 55 bp, Artificial
  Synthetic oligonucleotide
gatcggtgacgcgacactagtgcattgtgggcgattattggcccgctcggagaca

SEQ ID NO: 168565 - DNA, 55 bp, Artificial
  Synthetic oligonucleotide
tccccggtacgtctcacctgggtcacagatgaagtttctcgcttcgaccctaaaa

SEQ ID NO: 168566 - DNA, 55 bp, Artificial
  Synthetic oligonucleotide
gatgatgatctatgtagccagctacccagcgtgagacaaccatgtactacgatcc

SEQ ID NO: 168567 - DNA, 60 bp, Artificial
  Synthetic oligonucleotide
ggcatgcctcaggctacagagcagcgttttgcccaactcacagatttctgccgtgagtat

SEQ ID NO: 168568 - DNA, 55 bp, Artificial
  Synthetic oligonucleotide
gatgggtccgatgaaagtgcgatgacttgatacgcgattacagcacacccgcggg

SEQ ID NO: 168569 - DNA, 55 bp, Artificial
  Synthetic oligonucleotide
gattcactttgcaattggctcgtggtcgctaacgcttgcttcatcgcgtccaaaa

SEQ ID NO: 168570 - DNA, 55 bp, Artificial
  Synthetic oligonucleotide
gattgcggtttcatgccggccactgtaatctgcgccaccagtacaccaccagtac

SEQ ID NO: 168571 - DNA, 55 bp, Artificial
  Synthetic oligonucleotide
gcaacttctttgcaaacgtcggagacctctggtcgttcgtgaacaacgtgttgca

SEQ ID NO: 168572 - DNA, 55 bp, Artificial
  Synthetic oligonucleotide
tccaattcggtagagctataggaatacgatcttggaaatgaatgagccagcttct

SEQ ID NO: 168573 - DNA, 55 bp, Artificial
  Synthetic oligonucleotide
gcaatgcaattggcgacacccttcacctgaaacgccgggagcatcaggcccagcc

SEQ ID NO: 168574 - DNA, 55 bp, Artificial
  Synthetic oligonucleotide
gcacaaccgcgagagggttttcggcctgcggattccgtcctacacccctgtgttc

SEQ ID NO: 168575 - DNA, 55 bp, Artificial
  Synthetic oligonucleotide
gcacacaatgctgtgcctgttccactctaggcagtccggggaagatcggggagtc

SEQ ID NO: 168576 - DNA, 55 bp, Artificial
  Synthetic oligonucleotide
tcacgatctgcccgctgcaactgctgcaactgacggccctgtattccagcctgcc

SEQ ID NO: 168577 - DNA, 55 bp, Artificial
  Synthetic oligonucleotide
gcaccttggacattttcggtttggaaggacagcgttcttggtgttctcacatgcg

SEQ ID NO: 168578 - DNA, 60 bp, Artificial
  Synthetic oligonucleotide
ggccagcgaagcaacgaccggaatcagggcgatgatggctgtggccgcagatgggcccag

SEQ ID NO: 168579 - DNA, 55 bp, Artificial
  Synthetic oligonucleotide
gcacgcacccacacgattgaaaccgaacgacctactcgtatggtttgtggcctca

SEQ ID NO: 168580 - DNA, 55 bp, Artificial
  Synthetic oligonucleotide
gcacggccgatcgtccgattgtagggagggctttcaaacgcctccatgtgccgca

SEQ ID NO: 168581 - DNA, 55 bp, Artificial
  Synthetic oligonucleotide
gcacgtgcagcttttaccaaggaatcggccctgcaccctggattgtcggaagcgc

SEQ ID NO: 168582 - DNA, 55 bp, Artificial
  Synthetic oligonucleotide
gcactgactgatccgacacgcccaatagagatccgacttccctatcagaaagacc

SEQ ID NO: 168583 - DNA, 55 bp, Artificial
  Synthetic oligonucleotide
tcaagacgggacgccctgtcaagacacaagaggtggctcctaaccctcgcaaagt

SEQ ID NO: 168584 - DNA, 55 bp, Artificial
  Synthetic oligonucleotide
gcagactgtcgcatcgactcttaacaccgattggttttatcgaagctctgcttgc

SEQ ID NO: 168585 - DNA, 54 bp, Artificial
  Synthetic oligonucleotide
tcgatgcctgacctttcggggttttggacccttgagatcgaagtaccctggccc

SEQ ID NO: 168586 - DNA, 55 bp, Artificial
  Synthetic oligonucleotide
gaacggcgagttgacagtgacgacatcaactatgtgatgcggcgtatccgcgaga

SEQ ID NO: 168587 - DNA, 55 bp, Artificial
  Synthetic oligonucleotide
gaagggatgggtgaaagatatgcaatcacgacttgcacaaattcgggtcaggcac

SEQ ID NO: 168588 - DNA, 55 bp, Artificial
  Synthetic oligonucleotide
gaagttgacgtgcagaacgcactgcaaccactagatctgctccctgtcccgttgc

SEQ ID NO: 168589 - DNA, 58 bp, Artificial
  Synthetic oligonucleotide
ggcgccatcgcacaaagcccaaccctggggagcgaaattgaaggccaacagctcaatt

SEQ ID NO: 168590 - DNA, 55 bp, Artificial
  Synthetic oligonucleotide
tcgacagttgtgatgctacacactgacaacgatccggcctagcatggctctaccg

SEQ ID NO: 168591 - DNA, 55 bp, Artificial
  Synthetic oligonucleotide
gacatccacgcagcttaaaggttgagactcgcttcgcaacccggaggttatgccg

SEQ ID NO: 168592 - DNA, 55 bp, Artificial
  Synthetic oligonucleotide
tcgaatctgtacggcagcgatcaaattctctacaggaacgtgacttacgacggcg

SEQ ID NO: 168593 - DNA, 55 bp, Artificial
  Synthetic oligonucleotide
gacccggcatttggacccctcctagaatccgccagcttcgaaaaccgaggctgac

SEQ ID NO: 168594 - DNA, 55 bp, Artificial
  Synthetic oligonucleotide
gaccgcggcgcctataccctgcgatgcgccggtaaccacgacaaccttgtgtgaa

SEQ ID NO: 168595 - DNA, 55 bp, Artificial
  Synthetic oligonucleotide
gaccggaaaggcttggacacgatgagcatcgcactgcgagcggagtacgcccatt

SEQ ID NO: 168596 - DNA, 55 bp, Artificial
  Synthetic oligonucleotide
gaccttagtacggtacgttggtcgcgctcacgcaggtgcgtggttgaaacgatta

SEQ ID NO: 168597 - DNA, 55 bp, Artificial
  Synthetic oligonucleotide
gaccttctcgaactcttgtattcacgctttcgagcggctaaccccagtggggtaa

SEQ ID NO: 168598 - DNA, 55 bp, Artificial
  Synthetic oligonucleotide
gaccttgttctgtgtgccgcgcgaatgcttgctaagaccaccagccataaaccgc

SEQ ID NO: 168599 - DNA, 55 bp, Artificial
  Synthetic oligonucleotide
tcgaacatcgacggagcgcatagcacgcgtgtcgggtcgggctgtcaaagtggca

SEQ ID NO: 168600 - DNA, 59 bp, Artificial
  Synthetic oligonucleotide
ggcggcagtctccgaatggaatgagttggcttataccacctgggttagcccttggatca

SEQ ID NO: 168601 - DNA, 55 bp, Artificial
  Synthetic oligonucleotide
tcctgcgcaaacgctcccacgcagaggctcagagccgaaccgccgatccacacag

SEQ ID NO: 168602 - DNA, 55 bp, Artificial
  Synthetic oligonucleotide
gacgcactttgaaccccatcattgtttacgtggatgacgccacatacgcccagcc

SEQ ID NO: 168603 - DNA, 55 bp, Artificial
  Synthetic oligonucleotide
tccgtggttccgacaccctgtacctcatcgctggacacggaaacaggcagggcct

SEQ ID NO: 168604 - DNA, 55 bp, Artificial
  Synthetic oligonucleotide
gactacgacaacggggactctgttcggctcttttcgagtgtggagttaattgcgt

SEQ ID NO: 168605 - DNA, 55 bp, Artificial
  Synthetic oligonucleotide
gacttcgacttggaaaggtattttgtcgaaccgctgcctccctcagcgtacgcgc

SEQ ID NO: 168606 - DNA, 55 bp, Artificial
  Synthetic oligonucleotide
tccgtgaacccagcgcatcttatcgaacggtgagaaccttggcgctacatcgcgc

SEQ ID NO: 168607 - DNA, 55 bp, Artificial
  Synthetic oligonucleotide
gagaggcgaattgcgaatcggcgtacagcagcatgagggcctttcgggagactgc

SEQ ID NO: 168608 - DNA, 55 bp, Artificial
  Synthetic oligonucleotide
gagattgatgctgcaattcgctacggctcagctgtgtggccgggcgtagagagcg

SEQ ID NO: 168609 - DNA, 55 bp, Artificial
  Synthetic oligonucleotide
gagcaaacgtccagaacatttgagactagtgaagttgcattgaccagtttggcag

SEQ ID NO: 168610 - DNA, 55 bp, Artificial
  Synthetic oligonucleotide
gagcagccaatgcagaccattcagggtgatgtcactccacggaatatgaatcgag

SEQ ID NO: 168611 - DNA, 60 bp, Artificial
  Synthetic oligonucleotide
acagtatgcacaataggcacatgtccgaaactcctatccttgacagccgtcctgacgaat

SEQ ID NO: 168612 - DNA, 55 bp, Artificial
  Synthetic oligonucleotide
tccgtattcgcaatgacgcgttcgcccggaggcacgagggcctgtgctacatagg

SEQ ID NO: 168613 - DNA, 55 bp, Artificial
  Synthetic oligonucleotide
gagctccttcagtcaggattgttcgttacagaaacgcacgcccggtcacagtacc

SEQ ID NO: 168614 - DNA, 53 bp, Artificial
  Synthetic oligonucleotide
tccgggaccgtgcgtacaaggtccgacgccttctcaaccacccctcgcctccc

SEQ ID NO: 168615 - DNA, 55 bp, Artificial
  Synthetic oligonucleotide
gcctcatatgggcgaccgaaatatgactcgtaccacaagtgaacccgagcttggt

SEQ ID NO: 168616 - DNA, 55 bp, Artificial
  Synthetic oligonucleotide
gcctccatatcgggacgcagatggagcaccgcaaaggattcagagtcgtaaagca

SEQ ID NO: 168617 - DNA, 55 bp, Artificial
  Synthetic oligonucleotide
gcctgacccggggtttgattgcaactggataccattggcgccaattcaggctcga

SEQ ID NO: 168618 - DNA, 55 bp, Artificial
  Synthetic oligonucleotide
tagcgcgctccgccttccacggaccactgatcgttgaatttgtgttgcagctggg

SEQ ID NO: 168619 - DNA, 55 bp, Artificial
  Synthetic oligonucleotide
gcctgctacgatcggcttgttaaacctaactaacgaccgatatgacaaacaagcc

SEQ ID NO: 168620 - DNA, 55 bp, Artificial
  Synthetic oligonucleotide
gcctgcttagccaccactggacgaaatccgatagatcggcatgcatggagtcgac

SEQ ID NO: 168621 - DNA, 55 bp, Artificial
  Synthetic oligonucleotide
tagagttccgctcttcaaggacgaatatgtccgtaatcaaggggcacactaccga

SEQ ID NO: 168622 - DNA, 60 bp, Artificial
  Synthetic oligonucleotide
gtcgaaatcaccacgcgcacattctgtgcagcacacggaagctgacagccgaaggtttca

SEQ ID NO: 168623 - DNA, 55 bp, Artificial
  Synthetic oligonucleotide
gcctgcttgacttaggccgcggccggtcgatagcatgcagagatctaattctagt

SEQ ID NO: 168624 - DNA, 55 bp, Artificial
  Synthetic oligonucleotide
gccttgcgcgtcccggtctgagcttttccgaaagcccgcaattccctgggaatcg

SEQ ID NO: 168625 - DNA, 54 bp, Artificial
  Synthetic oligonucleotide
gcgaaggaatactgggagcagtttcccaccgggtcggtctatcccattccgtac

SEQ ID NO: 168626 - DNA, 54 bp, Artificial
  Synthetic oligonucleotide
gcgaaggagtggacaccccaacgggtatggggcgagttgcgcacaaaggggtac

SEQ ID NO: 168627 - DNA, 55 bp, Artificial
  Synthetic oligonucleotide
gcgagagttcgctcgggagtcattgacgccacgtcagaaagcagccctggtcgtc

SEQ ID NO: 168628 - DNA, 55 bp, Artificial
  Synthetic oligonucleotide
gcgagtgcgtttgcgtctctaacgttgtcatcccgtgttgactccctagggctcc

SEQ ID NO: 168629 - DNA, 55 bp, Artificial
  Synthetic oligonucleotide
gcgatccagtggccaaatacatttggcacaaatcgtccaacgaatacaaaatagc

SEQ ID NO: 168630 - DNA, 55 bp, Artificial
  Synthetic oligonucleotide
gcgatctgtatggcgtcttctacgattaccgacactaccgcctcaatatcgctat

SEQ ID NO: 168631 - DNA, 55 bp, Artificial
  Synthetic oligonucleotide
tactttgatcctccccgagctcagtcaggaatggaaaaccggcctctctctggcc

SEQ ID NO: 168632 - DNA, 55 bp, Artificial
  Synthetic oligonucleotide
tacggcgactcatgcatgcaggggtcacttcaggaaacggatcacagcgtacgtt

SEQ ID NO: 168633 - DNA, 60 bp, Artificial
  Synthetic oligonucleotide
accgttcattgacgtggctctcaatggcccagtcggagacggacaggtcgcgcagctttg

SEQ ID NO: 168634 - DNA, 55 bp, Artificial
  Synthetic oligonucleotide
gcgcagcgctcaaagtcggtcactcctgcaaagtgttgttcagggcctgtcaggc

SEQ ID NO: 168635 - DNA, 55 bp, Artificial
  Synthetic oligonucleotide
gcgccgtgatcttcccggctacaacgaatacgcaagccgtgtgcgtcatcgcctc

SEQ ID NO: 168636 - DNA, 54 bp, Artificial
  Synthetic oligonucleotide
tacgctgtgacggggaaagttttaaacgctacttgaccctgtacgcaatggact

SEQ ID NO: 168637 - DNA, 55 bp, Artificial
  Synthetic oligonucleotide
taccagacttgcgggcaaccggcaaggcagtagtacgagcggttctctggctggg

SEQ ID NO: 168638 - DNA, 55 bp, Artificial
  Synthetic oligonucleotide
taccaaacgcttatcatgctaaattcgccacgcagcgaaatggatatgcccgcga

SEQ ID NO: 168639 - DNA, 55 bp, Artificial
  Synthetic oligonucleotide
gcgcggacttgcgactatttagacacccgatatcacgcaatagaaacgtcgatca

SEQ ID NO: 168640 - DNA, 55 bp, Artificial
  Synthetic oligonucleotide
gcgcggcttgccactgagtagacgagcaggggaaggggaatattcccgcggatct

SEQ ID NO: 168641 - DNA, 55 bp, Artificial
  Synthetic oligonucleotide
gcgctcctcgttcaggttctctggggcaaagtagcgcctagcattccgacgcttc

SEQ ID NO: 168642 - DNA, 55 bp, Artificial
  Synthetic oligonucleotide
gcgctgtgaaggcgctgaccataaagccttgagaccaccatgatcgaacacacgc

SEQ ID NO: 168643 - DNA, 55 bp, Artificial
  Synthetic oligonucleotide
gcgcttgcaacctgagtagttgcaacgctagaagtcgggtaaatgggttgccgcg

SEQ ID NO: 168644 - DNA, 60 bp, Artificial
  Synthetic oligonucleotide
tcactattgttagtgctgatttctatcccggtcacttttagacgttctattgactgctta

SEQ ID NO: 168645 - DNA, 60 bp, Artificial
  Synthetic oligonucleotide
ggcttcttggagctaggcagccactgcctcaattccttccgcacctcgcctaagttgacc

SEQ ID NO: 168646 - DNA, 55 bp, Artificial
  Synthetic oligonucleotide
tcaacgcctgggatgattcttctttcgcccactggaacaaaccggtgtcccgctg

SEQ ID NO: 168647 - DNA, 55 bp, Artificial
  Synthetic oligonucleotide
gcagcgcgaccctcaatctaaaacttgacgtcttgggatcgaactattacggcgc

SEQ ID NO: 168648 - DNA, 55 bp, Artificial
  Synthetic oligonucleotide
gcaggagaactgaccgccatgttccacctgcaaaccctggaactcgttcactggg

SEQ ID NO: 168649 - DNA, 55 bp, Artificial
  Synthetic oligonucleotide
gcatgctgttgccgaaatatcacgcaatgacgcgagtgcgatcaatctgagccgg

SEQ ID NO: 168650 - DNA, 55 bp, Artificial
  Synthetic oligonucleotide
gcatgggaaccctgttcatggcttgagcttacctctgaacggctgggagacatgg

SEQ ID NO: 168651 - DNA, 55 bp, Artificial
  Synthetic oligonucleotide
tcaaccactgtcggcagtagcgtatcggcgtaacaccgagatgagcgattgtcgc

SEQ ID NO: 168652 - DNA, 55 bp, Artificial
  Synthetic oligonucleotide
gcatgttttagccctaaggcgtgctgtgatcaattgggaagcaccagacgcaaag

SEQ ID NO: 168653 - DNA, 55 bp, Artificial
  Synthetic oligonucleotide
gcattcttggtaatgtccaacgcgttctggcacttttcgcggccggagccacaga

SEQ ID NO: 168654 - DNA, 55 bp, Artificial
  Synthetic oligonucleotide
gcattgctggcgcgaattctagatcactgggatatgcgcactggccggaacacgg

SEQ ID NO: 168655 - DNA, 55 bp, Artificial
  Synthetic oligonucleotide
gccaaccatcgtggcgcaaagttcttgctacaagatgtgaccactctgacagggg

SEQ ID NO: 168656 - DNA, 60 bp, Artificial
  Synthetic oligonucleotide
gtccccgtgcagactttcataactgcaagttcaagatcttctgccgtaagctgacttgag

SEQ ID NO: 168657 - DNA, 55 bp, Artificial
  Synthetic oligonucleotide
gccacatcccttatatcgggcagattttcaagggtatcagtcgcattctcaagcc

SEQ ID NO: 168658 - DNA, 55 bp, Artificial
  Synthetic oligonucleotide
gccagcaagattcgcttgtacatggcagaccttcaagtgttaagagggctggcga

SEQ ID NO: 168659 - DNA, 55 bp, Artificial
  Synthetic oligonucleotide
gccaggcgactatcaaaagcgtcgctcaacgttggaatggcttttccgtgaagcg

SEQ ID NO: 168660 - DNA, 55 bp, Artificial
  Synthetic oligonucleotide
tcaacaacacctcgatggccgacgcgctgattggccgctaccaggagctgatcgc

SEQ ID NO: 168661 - DNA, 55 bp, Artificial
  Synthetic oligonucleotide
gccagtgttacggtgcagggttggcttctgcatctcggaagtaaaccggatggtc

SEQ ID NO: 168662 - DNA, 55 bp, Artificial
  Synthetic oligonucleotide
tattgatctcgctccaactgatcaagctgataaggccggcgtatactgcgaagca

SEQ ID NO: 168663 - DNA, 55 bp, Artificial
  Synthetic oligonucleotide
gccatagtggccgccccattggcttgttttgtccggaggtcgtatgagtcgtgtc

SEQ ID NO: 168664 - DNA, 55 bp, Artificial
  Synthetic oligonucleotide
tatgccgatgggtccaatgttgcattgcggcagtactgttcttgcaaactgtacc

SEQ ID NO: 168665 - DNA, 55 bp, Artificial
  Synthetic oligonucleotide
gcccaaggtttgcgtgtttgagtgcaatttgctctacgtccgtgcaggcctgagt

SEQ ID NO: 168666 - DNA, 55 bp, Artificial
  Synthetic oligonucleotide
gcccatctgattctacccaaacccgataatcggaagccggaagtgagcaaccgca

SEQ ID NO: 168667 - DNA, 60 bp, Artificial
  Synthetic oligonucleotide
ggggatcgatgatctggcaaacgcccacgatccttctgccgagatcatctcgaaccgctg

SEQ ID NO: 168668 - DNA, 55 bp, Artificial
  Synthetic oligonucleotide
tatccgcaggtcgctacccgacatgcgcggatcagccgcacactttcatgggcca

SEQ ID NO: 168669 - DNA, 55 bp, Artificial
  Synthetic oligonucleotide
tagttcgtcgtgaggtaggaattcatggacgctcccgagttgattgggtgacgga

SEQ ID NO: 168670 - DNA, 55 bp, Artificial
  Synthetic oligonucleotide
tagtagagcggcacacccgctacgtaatgttggtcaaactagtggacaaggactc

SEQ ID NO: 168671 - DNA, 55 bp, Artificial
  Synthetic oligonucleotide
gccctgagcaagccgaggaatatcttcagatagctgggcgtccgcccacggttcg

SEQ ID NO: 168672 - DNA, 55 bp, Artificial
  Synthetic oligonucleotide
gcccttcccgcgctgtaccaagcctgtgctcgaacgaccatactcgatcgcagct

SEQ ID NO: 168673 - DNA, 53 bp, Artificial
  Synthetic oligonucleotide
gccgacggggagccttgagttaagtgcctacctttagagggcaggtctaaccc

SEQ ID NO: 168674 - DNA, 55 bp, Artificial
  Synthetic oligonucleotide
gccggagcccacggactgcggcatgcgaggattatgaaaatcggcagcgcaaact

SEQ ID NO: 168675 - DNA, 55 bp, Artificial
  Synthetic oligonucleotide
gcctacatcaagctacaagccttgtccgcaccctcgttacactctcgcccacttc

SEQ ID NO: 168676 - DNA, 55 bp, Artificial
  Synthetic oligonucleotide
cacgagcacaccattcctgatcctttgcgacagtttccaaccgatttctatgcac

SEQ ID NO: 168677 - DNA, 55 bp, Artificial
  Synthetic oligonucleotide
cacgaatgcactcttccaggttgtcattcatgcccggtttcaggatgaaggtcag

SEQ ID NO: 168678 - DNA, 58 bp, Artificial
  Synthetic oligonucleotide
gtcatgacggaatctgagtaccttgtgcgagacgcaaaagggcttgtggttggccggt

SEQ ID NO: 168679 - DNA, 55 bp, Artificial
  Synthetic oligonucleotide
cacctctgtttccggccacgacaggatttccagatccactggctcgatttcgcag

SEQ ID NO: 168680 - DNA, 55 bp, Artificial
  Synthetic oligonucleotide
atggccgcatctgagaacttctggcaacgaccacgcttgcccgtgggccgagcta

SEQ ID NO: 168681 - DNA, 55 bp, Artificial
  Synthetic oligonucleotide
aagcttgatcaggttgatctggttggcaactcctttggtggtgcgctgtcccttg

SEQ ID NO: 168682 - DNA, 55 bp, Artificial
  Synthetic oligonucleotide
aaggaactggctcagtcgcgctacgggcacaagatcgtcctcaagcacctgcccg

SEQ ID NO: 168683 - DNA, 55 bp, Artificial
  Synthetic oligonucleotide
agtgtggtttgaaccgcggtcccagcacgccagtggcgagcccttgtccgcgtct

SEQ ID NO: 168684 - DNA, 55 bp, Artificial
  Synthetic oligonucleotide
accacactttcaaggcggcgctgaaggagctggagagctgcggcgggacggataa

SEQ ID NO: 168685 - DNA, 55 bp, Artificial
  Synthetic oligonucleotide
acatcgtgcccaaggatgtgccggcatcgaccatgagcaaccgggtgcagcagac

SEQ ID NO: 168686 - DNA, 55 bp, Artificial
  Synthetic oligonucleotide
aaggctgtgagctatggcggggtgtcgctcccaccactcatgcaaggtgtggagg

SEQ ID NO: 168687 - DNA, 55 bp, Artificial
  Synthetic oligonucleotide
aggggtacgggaagatgcgaaaggggtttgtctcatgctgttgtctcgtgagggg

SEQ ID NO: 168688 - DNA, 55 bp, Artificial
  Synthetic oligonucleotide
aaggtttctgccgaagcctaagcacctgcgtcacagctggaaagccgctacagtc

SEQ ID NO: 168689 - DNA, 58 bp, Artificial
  Synthetic oligonucleotide
gggtcatacggtgatcggagaagctggacttttttgccttgttcgcggatatacattg

SEQ ID NO: 168690 - DNA, 55 bp, Artificial
  Synthetic oligonucleotide
caattcggcctcaacgtttgatggataagcgtgagtagctattaaatcgatagcg

SEQ ID NO: 168691 - DNA, 55 bp, Artificial
  Synthetic oligonucleotide
ataccgaatttagttaaggtcaagtgctaacacaggctccgaacctgcaggctgg

SEQ ID NO: 168692 - DNA, 55 bp, Artificial
  Synthetic oligonucleotide
aagtcatggcgttcacacagaggcgagagcaggcccgaaatggggacacgcccct

SEQ ID NO: 168693 - DNA, 55 bp, Artificial
  Synthetic oligonucleotide
aagtgccagggccgtggatccgtaagagtagccagaggggacgcaaagactcagc

SEQ ID NO: 168694 - DNA, 55 bp, Artificial
  Synthetic oligonucleotide
caatcgctacctggatcgacaggcacgctgagctgcccggttacttggcgaccgc

SEQ ID NO: 168695 - DNA, 55 bp, Artificial
  Synthetic oligonucleotide
cagagcggacttccctcggatgggaacatgcgttatgagctcattcagcgcggat

SEQ ID NO: 168696 - DNA, 55 bp, Artificial
  Synthetic oligonucleotide
actacgaaccctgccctgcaggtacaagcgccctttcctcgggcagcaatgccgt

SEQ ID NO: 168697 - DNA, 55 bp, Artificial
  Synthetic oligonucleotide
atccagccgtgcaatccaatctcatggccggcgcctgaaagtctgcgctgctcct

SEQ ID NO: 168698 - DNA, 55 bp, Artificial
  Synthetic oligonucleotide
acgttcctgtacccgctcgaatcgctgcacccggaagccaagaccaaggccgtca

SEQ ID NO: 168699 - DNA, 55 bp, Artificial
  Synthetic oligonucleotide
cagaccgcccgaatgggtggcactcaggtgccgtaccaccagactcttgaggagc

SEQ ID NO: 168700 - DNA, 59 bp, Artificial
  Synthetic oligonucleotide
ggtcgttcgaccgagatgttgtgctgttgcgacacaggccacggtgccttcggttactg

SEQ ID NO: 168701 - DNA, 55 bp, Artificial
  Synthetic oligonucleotide
acgtctggagtcctcggcaagtcaccatgctcgttgactcactgttccgaggctg

SEQ ID NO: 168702 - DNA, 55 bp, Artificial
  Synthetic oligonucleotide
agggtgcaacgcaataggagccaacttccagtaacaatgtgcggactcgccgcgt

SEQ ID NO: 168703 - DNA, 55 bp, Artificial
  Synthetic oligonucleotide
cactgccacgtcggccatccactgcacggcagaaccctcgaactcttcccgcaga

SEQ ID NO: 168704 - DNA, 55 bp, Artificial
  Synthetic oligonucleotide
cacgtacaccggcattcgcttgtgccaggactatttgacggtgtgggaatgcctc

SEQ ID NO: 168705 - DNA, 55 bp, Artificial
  Synthetic oligonucleotide
cacgggtgagcctgcctgttgtgcgcgtcatgctccttcgcgctacagcaaatgg

SEQ ID NO: 168706 - DNA, 55 bp, Artificial
  Synthetic oligonucleotide
cacgggcaaaggtttatgttggtgcctgaggtattaagcaacatattcacaatcc

SEQ ID NO: 168707 - DNA, 55 bp, Artificial
  Synthetic oligonucleotide
acgtcgccatcgctgagctggatcattggcaaacggccttctagaaggaagtcgt

SEQ ID NO: 168708 - DNA, 55 bp, Artificial
  Synthetic oligonucleotide
cacgctatgctccttgtgggttaagaggtcatcgcctcgctgagttcgtcgccgt

SEQ ID NO: 168709 - DNA, 55 bp, Artificial
  Synthetic oligonucleotide
aagccgagacgtgacggcaggctccccgtgagtgatggcatacgtgtgacttggc

SEQ ID NO: 168710 - DNA, 55 bp, Artificial
  Synthetic oligonucleotide
cacgccgctgacttttggcaatctgcactctggcgtttatgccggcttgcgcacc

SEQ ID NO: 168711 - DNA, 53 bp, Artificial
  Synthetic oligonucleotide
ggtgcaaccccagcaagccccgtatacaaaaaccgcttggcggttttgtatac

SEQ ID NO: 168712 - DNA, 55 bp, Artificial
  Synthetic oligonucleotide
cacgcacgattgcaaaccttaggccgtctgatcgtgtcactataaggcctgcgtc

SEQ ID NO: 168713 - DNA, 55 bp, Artificial
  Synthetic oligonucleotide
cacgataggtttaaccaccaactgaaagttcacgctgttatagttatgcgtgccc

SEQ ID NO: 168714 - DNA, 55 bp, Artificial
  Synthetic oligonucleotide
caaactccgcggccggtgcaattgggagcgcaactgctgtttgcaatagcgccgt

SEQ ID NO: 168715 - DNA, 55 bp, Artificial
  Synthetic oligonucleotide
caaaccacttcaagtcaagatggacgtacagccccacgcgaagctggtccacgga

SEQ ID NO: 168716 - DNA, 55 bp, Artificial
  Synthetic oligonucleotide
acaatgcaagagcgccgccgaaaattctatggttggggtaacgaaggagacacgg

SEQ ID NO: 168717 - DNA, 55 bp, Artificial
  Synthetic oligonucleotide
atcacaagcatgcggggatttcagccagcgttgagaactcccactgcggcagtag

SEQ ID NO: 168718 - DNA, 55 bp, Artificial
  Synthetic oligonucleotide
atgtggccaccttgcgcaagtcaagggctgccaaaacccagcccgcgacgacaca

SEQ ID NO: 168719 - DNA, 55 bp, Artificial
  Synthetic oligonucleotide
aatgtcggctcggtcttgggcttcggattccccgcatggacaggtggcgtactcc

SEQ ID NO: 168720 - DNA, 55 bp, Artificial
  Synthetic oligonucleotide
atttcgcggaaatgcgtcccttgcgcgttgcgcagactctgcgttttcaggcccc

SEQ ID NO: 168721 - DNA, 54 bp, Artificial
  Synthetic oligonucleotide
attgccggttacggtcgagtcctggtacgagaaggctcccgaatacaagaccac

SEQ ID NO: 168722 - DNA, 51 bp, Artificial
  Synthetic oligonucleotide
ggttttcattggtaaacgcgtgaccgataaccggggggtttgtgaccgata

SEQ ID NO: 168723 - DNA, 55 bp, Artificial
  Synthetic oligonucleotide
aattgacgctggcaacaaagcgtcgactcgcggactttgcgacgcgcactcatcc

SEQ ID NO: 168724 - DNA, 55 bp, Artificial
  Synthetic oligonucleotide
attgagtttcccttgcgtgtcaccggcttctatcagcgcccggcttcgccgtgcg

SEQ ID NO: 168725 - DNA, 55 bp, Artificial
  Synthetic oligonucleotide
attctggggttttcgagcacagatcgctggaattgagcttgcggtctcactgcgg

SEQ ID NO: 168726 - DNA, 55 bp, Artificial
  Synthetic oligonucleotide
aggggcatgtacagactcttcgctttgcgtcctcccagtacatttacgacaaaga

SEQ ID NO: 168727 - DNA, 55 bp, Artificial
  Synthetic oligonucleotide
acaacaccggtagagaagtgcgcaacgcaccgcccaacaaggcgtgcactggcag

SEQ ID NO: 168728 - DNA, 55 bp, Artificial
  Synthetic oligonucleotide
agaggttcttcgcttggaccgagagcattggttcgatgaacgtagttttacctct

SEQ ID NO: 168729 - DNA, 55 bp, Artificial
  Synthetic oligonucleotide
atatttgcaagggtcaaggcaaactttccggatgcctacgatgtgcccatggcgg

SEQ ID NO: 168730 - DNA, 55 bp, Artificial
  Synthetic oligonucleotide
attcgcaaggacgcctaccgatggcaattcctggcgccatcaccagagagcgatg

SEQ ID NO: 168731 - DNA, 55 bp, Artificial
  Synthetic oligonucleotide
atgtatatgcgagccgctaccagcgatacggccggtattattcgtactcgagttt

SEQ ID NO: 168732 - DNA, 55 bp, Artificial
  Synthetic oligonucleotide
caatccatggggcgcttgcgacgcgcgagttaggtctcgcgtgtgatcgtcactc

SEQ ID NO: 168733 - DNA, 55 bp, Artificial
  Synthetic oligonucleotide
gtactccaaatgggggtagaacaagtcgtgtcaccagtcgctgcttcccgaacct

SEQ ID NO: 168734 - DNA, 55 bp, Artificial
  Synthetic oligonucleotide
caatatctcggtcaacgaaaccaaccgtctcgcaatcgacgggcgccgcattgcc

SEQ ID NO: 168735 - DNA, 55 bp, Artificial
  Synthetic oligonucleotide
caagtagaacgatctgtctacatgatcaatgctagcgagagtagaacgctctgtc

SEQ ID NO: 168736 - DNA, 55 bp, Artificial
  Synthetic oligonucleotide
aatacgtgcacgcagtagcctcctggggtagagtcaacataccgcgacaccccgc

SEQ ID NO: 168737 - DNA, 55 bp, Artificial
  Synthetic oligonucleotide
atagagcgattcgggaaccggcgctgtgggcacaatcgcagctgcagtcccgcaa

SEQ ID NO: 168738 - DNA, 55 bp, Artificial
  Synthetic oligonucleotide
acagcaaatgcgttgacctacacgtgcaaccagatgaagttggattgcgacgagg

SEQ ID NO: 168739 - DNA, 55 bp, Artificial
  Synthetic oligonucleotide
atagccgttcacgaacgtgcaggtaatggccgcgccagcgaccatgttggccccg

SEQ ID NO: 168740 - DNA, 55 bp, Artificial
  Synthetic oligonucleotide
aatcgcaagggctaagacgatgactactttcggtaacagcacccacgcgcggaac

SEQ ID NO: 168741 - DNA, 55 bp, Artificial
  Synthetic oligonucleotide
caactttcgcgtgcaaggctgaaagcggcttgatgcgcaggctgtaggccgttca

SEQ ID NO: 168742 - DNA, 55 bp, Artificial
  Synthetic oligonucleotide
caactccctggatatatggcgtcttgtcccgctggaaccgggtccgtcctgactg

SEQ ID NO: 168743 - DNA, 55 bp, Artificial
  Synthetic oligonucleotide
caacgtcaacgctgtgaatcagcccacaagcacgctgccccgcaagtgttggtcc

SEQ ID NO: 168744 - DNA, 60 bp, Artificial
  Synthetic oligonucleotide
gccctatgtgcgccaagcgtttgccaagtacctggaatgcggcatctttgcccacggctt

SEQ ID NO: 168745 - DNA, 55 bp, Artificial
  Synthetic oligonucleotide
acacgggtatttcaggacataaacagcctgaattcctttatagacaagcgctagc

SEQ ID NO: 168746 - DNA, 55 bp, Artificial
  Synthetic oligonucleotide
aatggagagcgcctacaaagacgtagagcgcgatgcactggcaagaacgacggcg

SEQ ID NO: 168747 - DNA, 55 bp, Artificial
  Synthetic oligonucleotide
agcggcttggcctgctggatttcgccaactcgcgcggctacgccccgctcgttgt

SEQ ID NO: 168748 - DNA, 55 bp, Artificial
  Synthetic oligonucleotide
atgtgattgagaggatttccgatccatcgttgctgatttggatcactcacctctc

SEQ ID NO: 168749 - DNA, 55 bp, Artificial
  Synthetic oligonucleotide
agcggccgttgttcacgcggtagcgaatacacaacggttggctgatgattgtgtc

SEQ ID NO: 168750 - DNA, 54 bp, Artificial
  Synthetic oligonucleotide
caacccaagtgaatcgagaaaataatcctcgagcgaccttggggtcaacgaggg

SEQ ID NO: 168751 - DNA, 55 bp, Artificial
  Synthetic oligonucleotide
catgggctagctcgaacctgcgcaaagaagaagcacgcactcagcgtcttttgag

SEQ ID NO: 168752 - DNA, 55 bp, Artificial
  Synthetic oligonucleotide
catgctcaacgtaggtcttcccgagcgtgcctggttcgtgaaacttagccgttcg

SEQ ID NO: 168753 - DNA, 55 bp, Artificial
  Synthetic oligonucleotide
atctaaggttgcccattttctgacccgatacaaacccagccaactcatgcgcgga

SEQ ID NO: 168754 - DNA, 54 bp, Artificial
  Synthetic oligonucleotide
acctccacgcgcccagaatcgaccggtttgctcgtttggagcttatccgtttcc

SEQ ID NO: 168755 - DNA, 57 bp, Artificial
  Synthetic oligonucleotide
tcacgtccaagggtgaacgtggctgagctttagggctaaagaagttgatcaacccag

SEQ ID NO: 168756 - DNA, 60 bp, Artificial
  Synthetic oligonucleotide
taggtgcggatttgcgtgtcgggcttcttggacagcgagaagatgggaaactccatcgtg

SEQ ID NO: 168757 - DNA, 55 bp, Artificial
  Synthetic oligonucleotide
catgcaccacctgcactcacagccatagccgagagggccaccgcacgtataaccc

SEQ ID NO: 168758 - DNA, 55 bp, Artificial
  Synthetic oligonucleotide
catgcacacgctacttgagcgttttgagcgacatcttcagacggaagccgatacc

SEQ ID NO: 168759 - DNA, 55 bp, Artificial
  Synthetic oligonucleotide
acctagccgctgcattcaagagtgaaatagcgagagtcgctcgcaaagagtcccg

SEQ ID NO: 168760 - DNA, 55 bp, Artificial
  Synthetic oligonucleotide
atctctatgcctggcaggaccgtggaacctccgtcatctcgagggaagacaactt

SEQ ID NO: 168761 - DNA, 55 bp, Artificial
  Synthetic oligonucleotide
catcttgagtccgctagagacacaggacggcatacagagcctcgtcgaaccctgt

SEQ ID NO: 168762 - DNA, 55 bp, Artificial
  Synthetic oligonucleotide
acgcgggtatcggaaaggaacatcggacgcaagctgcctccggccacccaaagga

SEQ ID NO: 168763 - DNA, 55 bp, Artificial
  Synthetic oligonucleotide
atgacgactatgagtgggcccgagcctgcctgacgggcgcgtcctaccccgccaa

SEQ ID NO: 168764 - DNA, 55 bp, Artificial
  Synthetic oligonucleotide
aaatctatacaacacgtctagacattggcgcaacccatcggacgcaccctgaaac

SEQ ID NO: 168765 - DNA, 55 bp, Artificial
  Synthetic oligonucleotide
aaatttcatattggactctattctgacgtgattacagtctcttccctgacgttgc

SEQ ID NO: 168766 - DNA, 52 bp, Artificial
  Synthetic oligonucleotide
aggcggccttaggcggagccgacctttcgaaccagttcgtcaggaccggtgg

SEQ ID NO: 168767 - DNA, 60 bp, Artificial
  Synthetic oligonucleotide
agaatataggtaggcattgagtccttggccgtagcctgcaactcgaatgaatacgtgcgc

SEQ ID NO: 168768 - DNA, 55 bp, Artificial
  Synthetic oligonucleotide
catccagatccagtgacaaatcgctcatatcgaattccatcggggaggtgcttac

SEQ ID NO: 168769 - DNA, 55 bp, Artificial
  Synthetic oligonucleotide
aaccgatcagctacgccggcgtcacgccccacacgctggtggtgcacaacgacct

SEQ ID NO: 168770 - DNA, 55 bp, Artificial
  Synthetic oligonucleotide
atgacgctatcgagcagaacaccgcccaagccctcggcctggccaaaggcacgtt

SEQ ID NO: 168771 - DNA, 55 bp, Artificial
  Synthetic oligonucleotide
atcgcttcgaagttgccctcattccagcaacgcaggaacgccaatccttcatccg

SEQ ID NO: 168772 - DNA, 55 bp, Artificial
  Synthetic oligonucleotide
ccacaggctcctcaatctccagatgaatggcgggtctcacgccaatcccacggcg

SEQ ID NO: 168773 - DNA, 55 bp, Artificial
  Synthetic oligonucleotide
agcagccatagcaaatgaaactggcccattccagacggcgatccatcgtgaaaat

SEQ ID NO: 168774 - DNA, 55 bp, Artificial
  Synthetic oligonucleotide
ccaacatcagggctggacgtagctgcgctggccatgccactaggtaagcttgggg

SEQ ID NO: 168775 - DNA, 55 bp, Artificial
  Synthetic oligonucleotide
cattggtgtactgatgacacagaaccggttgctgttggtccataccttcgcatgg

SEQ ID NO: 168776 - DNA, 55 bp, Artificial
  Synthetic oligonucleotide
agcagggcggcgcgaaccagcaacagatcgaccaagctctgaagaactaccgggg

SEQ ID NO: 168777 - DNA, 55 bp, Artificial
  Synthetic oligonucleotide
agaattgcgccccacgatcacccactcatggcggggttccggccagtgcgcatat

SEQ ID NO: 168778 - DNA, 60 bp, Artificial
  Synthetic oligonucleotide
aatgggcgtgcattgaggcactccggccataccttgccccctcgcaacgcacggtgggca

SEQ ID NO: 168779 - DNA, 55 bp, Artificial
  Synthetic oligonucleotide
cattgaactccgcgaagggttacccactgctcgtaacgaaggctgaacgccaccc

SEQ ID NO: 168780 - DNA, 55 bp, Artificial
  Synthetic oligonucleotide
aggcctcgcgtgtgcaggtgcgaagctaacccttgcgatcaaccgccgtccccgt

SEQ ID NO: 168781 - DNA, 55 bp, Artificial
  Synthetic oligonucleotide
aaaacaggtggtttcatatcaatgctccacgccaaggtaggcggcacgtactttc

SEQ ID NO: 168782 - DNA, 53 bp, Artificial
  Synthetic oligonucleotide
atcgcaaggtcccaggggttccagggcgtccccatggaggtgttggttcccca

SEQ ID NO: 168783 - DNA, 55 bp, Artificial
  Synthetic oligonucleotide
cattcaggcaacaacgcattaatgcgcacactagcgccacccatcaaaccccacg

SEQ ID NO: 168784 - DNA, 55 bp, Artificial
  Synthetic oligonucleotide
aaaagtgtgacgctgttagtgggtcgtggcgtcaagtatttgcccatgcacgtac

SEQ ID NO: 168785 - DNA, 55 bp, Artificial
  Synthetic oligonucleotide
agaagatcgaacggattgcgaaacgtatttctgcgacaggacactagtacgaggg

SEQ ID NO: 168786 - DNA, 55 bp, Artificial
  Synthetic oligonucleotide
acctgggcagcgcgccacagaacgcccggaagctgtcggcagcgggtgacttcat

SEQ ID NO: 168787 - DNA, 55 bp, Artificial
  Synthetic oligonucleotide
atccggactgtgagagcaagcgggtcgcttcgaccgcattttcataaacgctgaa

SEQ ID NO: 168788 - DNA, 55 bp, Artificial
  Synthetic oligonucleotide
acctgacggcgattgacaacctggtggtgagcggggtgtttggcagcaatctgac

SEQ ID NO: 168789 - DNA, 57 bp, Artificial
  Synthetic oligonucleotide
gcgatctttgcggggttgggggtcggatgaaagtagaaccggatcatggtgtatgcc

SEQ ID NO: 168790 - DNA, 55 bp, Artificial
  Synthetic oligonucleotide
catgggtaatttcgcacaactaccatagggcccgttcactcaccttcagcacagg

SEQ ID NO: 168791 - DNA, 55 bp, Artificial
  Synthetic oligonucleotide
atgccatccacgtgacacaacgccgcacacgggtagcctgatgctcggccgtctt

SEQ ID NO: 168792 - DNA, 55 bp, Artificial
  Synthetic oligonucleotide
agtctaggttgggcagcttgcccgcccagcgggcttgcaagaccgtaggttgcag

SEQ ID NO: 168793 - DNA, 55 bp, Artificial
  Synthetic oligonucleotide
caggtgttccacagatcgcccacaagttgttctcatgatgtgccgtcatattgtg

SEQ ID NO: 168794 - DNA, 55 bp, Artificial
  Synthetic oligonucleotide
caggggacgccgtatgcacgccatgtctagatcccgcggttactggccgccttat

SEQ ID NO: 168795 - DNA, 55 bp, Artificial
  Synthetic oligonucleotide
aactgcggataagggcccagtgtgcgcggcacatactgccgggccgacacagaca

SEQ ID NO: 168796 - DNA, 55 bp, Artificial
  Synthetic oligonucleotide
cagggcagaataagaagactacaacgtctttatgggacaactgttctgatcaatg

SEQ ID NO: 168797 - DNA, 55 bp, Artificial
  Synthetic oligonucleotide
agagcaacaccaccaagacactgagtccgaaccactgaaaagcatagccgtagtg

SEQ ID NO: 168798 - DNA, 55 bp, Artificial
  Synthetic oligonucleotide
cagcgactcgaaagatccttgagcataaacagaagtgttcttcacccatctctag

SEQ ID NO: 168799 - DNA, 55 bp, Artificial
  Synthetic oligonucleotide
agccgagtgggcaaagcgctgcaacaacactacaaacgcatctctgccaggaggc

SEQ ID NO: 168800 - DNA, 60 bp, Artificial
  Synthetic oligonucleotide
aatgtgcaatttctgaatgggcattcggctgcgtaacacatttggctggaggtcgatgac

SEQ ID NO: 168801 - DNA, 55 bp, Artificial
  Synthetic oligonucleotide
atgcgcccttgacgccaaagaggtgcaaccgggagtccgcaggaatctggccttc

SEQ ID NO: 168802 - DNA, 55 bp, Artificial
  Synthetic oligonucleotide
actcaaggatgaatgagcttgaattcgctgagaaacctcgtggattgcaggtatg

SEQ ID NO: 168803 - DNA, 55 bp, Artificial
  Synthetic oligonucleotide
cagccgagcacgccggacccagtgccaaacggctctccgcgtttgtgtcggccta

SEQ ID NO: 168804 - DNA, 55 bp, Artificial
  Synthetic oligonucleotide
aagaccgttggcttttggctttcagtgagtacgcagagattgatgtgcccgacgc

SEQ ID NO: 168805 - DNA, 55 bp, Artificial
  Synthetic oligonucleotide
aggacggcagatgcacggggaatgccccatcggatgttggcgggatagctggcaa

SEQ ID NO: 168806 - DNA, 55 bp, Artificial
  Synthetic oligonucleotide
cagcatccatcgaacacggcctacagcagaatgacgctcctcgtcaaaatgttac

SEQ ID NO: 168807 - DNA, 55 bp, Artificial
  Synthetic oligonucleotide
aggaatccgggagcttgagtcacggcccgcacacttgcaggcttaccgttggcat

SEQ ID NO: 168808 - DNA, 55 bp, Artificial
  Synthetic oligonucleotide
cagagtctccagcgcggccaaatccgcttgcttgggcgtatagccctgcgtcttg

SEQ ID NO: 168809 - DNA, 55 bp, Artificial
  Synthetic oligonucleotide
atccgaacctctacgcgccgcgcaccctggccgaagtgatcgaggccgccaagaa

SEQ ID NO: 168810 - DNA, 55 bp, Artificial
  Synthetic oligonucleotide
catcatccaagccgtcatccatagccggaaacgggtcaacgcgatagcccaggtc

SEQ ID NO: 168811 - DNA, 60 bp, Artificial
  Synthetic oligonucleotide
gcgcgcaaacactcttggactcgctgggcagcccgttcatcggggacagagggatttata

SEQ ID NO: 168812 - DNA, 55 bp, Artificial
  Synthetic oligonucleotide
catcacagccgccagcgattctgccctgatatacgccgagacgaacgacggtagc

SEQ ID NO: 168813 - DNA, 55 bp, Artificial
  Synthetic oligonucleotide
acggcaggcatgcgcctatgcggcttgtaaacacctgccagcgaaacgggaccag

SEQ ID NO: 168814 - DNA, 55 bp, Artificial
  Synthetic oligonucleotide
catagttcgcttgcgcgacgaatgagtgccccgtcagcgcatgagactcaccacc

SEQ ID NO: 168815 - DNA, 55 bp, Artificial
  Synthetic oligonucleotide
aacctgacagcttccaaattcaagcacccactccagtggcatcttccccaaatca

SEQ ID NO: 168816 - DNA, 55 bp, Artificial
  Synthetic oligonucleotide
agggtgtcagccggggagaggtcggtgaatggctcgtcacagggaggacgactca

SEQ ID NO: 168817 - DNA, 55 bp, Artificial
  Synthetic oligonucleotide
aacgctgtgcttcctagagtaggggtctcgccggagtgccggccccaccttcata

SEQ ID NO: 168818 - DNA, 55 bp, Artificial
  Synthetic oligonucleotide
atgccaatgaaacattggtatcaacatgacatatatcgtcagctttcgtcgccag

SEQ ID NO: 168819 - DNA, 55 bp, Artificial
  Synthetic oligonucleotide
catacgccttgagctaccaaacttgtagcaaccccatttccgcgctatattgcta

SEQ ID NO: 168820 - DNA, 55 bp, Artificial
  Synthetic oligonucleotide
catacgcgtggatacacccgacctgaaggcagagccgttttgcagtgacggcttc

SEQ ID NO: 168821 - DNA, 54 bp, Artificial
  Synthetic oligonucleotide
acaatggggacatggggttcttccgctcggagggagtcaatgggcttgcgccgt

SEQ ID NO: 168822 - DNA, 60 bp, Artificial
  Synthetic oligonucleotide
tacgcgccggacacgttcagaaatgaaggatgcaatggctataaaccatccgatcccgct

SEQ ID NO: 168823 - DNA, 54 bp, Artificial
  Synthetic oligonucleotide
gtgccctcgcatggtttgtgtcaacgcacaggccggtgcaccttgcgcggccaa

SEQ ID NO: 168824 - DNA, 52 bp, Artificial
  Synthetic oligonucleotide
atcccgacaaaataattgtcggaaaagtaaccgattcatagagagtcgggtt

SEQ ID NO: 168825 - DNA, 54 bp, Artificial
  Synthetic oligonucleotide
gatagacgtggcgacattgaatgtcatcaggcgttgggcacagcgagaacagat

SEQ ID NO: 168826 - DNA, 54 bp, Artificial
  Synthetic oligonucleotide
gtgtttggacggcatagtttgacaagcaactcctctaaacgacccgacatgccc

SEQ ID NO: 168827 - DNA, 54 bp, Artificial
  Synthetic oligonucleotide
gcttctcacgctgtgttgcgtatggctgtgcgttgacgcatctaagctcaacgc

SEQ ID NO: 168828 - DNA, 54 bp, Artificial
  Synthetic oligonucleotide
cgtacttgcgctactgcaaagtctgtgtcccggcaccgggtcaagtccggcctg

SEQ ID NO: 168829 - DNA, 54 bp, Artificial
  Synthetic oligonucleotide
cgctttcccatcaagcgctagggcctgttcacctccaaaacgggagatgcgttg

SEQ ID NO: 168830 - DNA, 54 bp, Artificial
  Synthetic oligonucleotide
atgaaaaggggttgcatggtcctgggttctccctgtgttccgatgtcgaaaatc

SEQ ID NO: 168831 - DNA, 54 bp, Artificial
  Synthetic oligonucleotide
ggttttggacctcgaataaatcaattcgatcttgcggtatgcgttgatacaagg

SEQ ID NO: 168832 - DNA, 54 bp, Artificial
  Synthetic oligonucleotide
gggttcctcaagggcaatgaccgcggagcatcctgtctggggccgcattcgggg

SEQ ID NO: 168833 - DNA, 57 bp, Artificial
  Synthetic oligonucleotide
taccccagacgtgtagcggtgaacagttttaaggctgtcgatcaattttccagtcag

SEQ ID NO: 168834 - DNA, 54 bp, Artificial
  Synthetic oligonucleotide
gtaatcatcggttcctccttatggtttgggcattgcccgttgtttggcttgtag

SEQ ID NO: 168835 - DNA, 54 bp, Artificial
  Synthetic oligonucleotide
tgagacgcccacaagcggcacttaccggcgtttacatctgaaactccggctgag

SEQ ID NO: 168836 - DNA, 54 bp, Artificial
  Synthetic oligonucleotide
agcttttgaagtgccgtacagaagtcaccgtcacggtcacacgggttggacgct

SEQ ID NO: 168837 - DNA, 54 bp, Artificial
  Synthetic oligonucleotide
aggatgctgaccacagcgctacgaccccttagtccctgcagttcaaccagaatg

SEQ ID NO: 168838 - DNA, 54 bp, Artificial
  Synthetic oligonucleotide
ccgatggcaagagatgggtttctgctagcggcaggagttcgttttcctccgcac

SEQ ID NO: 168839 - DNA, 54 bp, Artificial
  Synthetic oligonucleotide
ccgaagcaatgccaacatgccttccctcatctatcgtttgcaacgatgccttga

SEQ ID NO: 168840 - DNA, 54 bp, Artificial
  Synthetic oligonucleotide
aactgagcgcgtcacagatgaattccccgtgttgaaacctggaaacgatacccc

SEQ ID NO: 168841 - DNA, 54 bp, Artificial
  Synthetic oligonucleotide
tgcgttcccggacgttgccgcgcgggtgtgaaagctcgaaagcgggcgccctga

SEQ ID NO: 168842 - DNA, 54 bp, Artificial
  Synthetic oligonucleotide
gacagagccgccccggccgctcttggtggtcaagggtgcagggttctcggcata

SEQ ID NO: 168843 - DNA, 54 bp, Artificial
  Synthetic oligonucleotide
catacggcaagagtgagaagcgtacgacgctcgtgcaagggcgacttcgcaaga

SEQ ID NO: 168844 - DNA, 59 bp, Artificial
  Synthetic oligonucleotide
gcgcgcactacgcagagcggcaagcgaaatcactcccccaagaacaacccgccatcgtt

SEQ ID NO: 168845 - DNA, 54 bp, Artificial
  Synthetic oligonucleotide
actgctgccgtgataggcgcgtatccttgaggtagattctccgtcctccgtgtt

SEQ ID NO: 168846 - DNA, 54 bp, Artificial
  Synthetic oligonucleotide
tgtgcaccataaacgtatcagcgcgcctgcgggcctgcggcagtttgaccgaac

SEQ ID NO: 168847 - DNA, 54 bp, Artificial
  Synthetic oligonucleotide
ctccttttctctgtccacacacttcccaaggattcccatgtctgcttcctcccc

SEQ ID NO: 168848 - DNA, 54 bp, Artificial
  Synthetic oligonucleotide
gcgcccagaaatagcagagcatctcgcacaggtcagcgcatggctcgatgagaa

SEQ ID NO: 168849 - DNA, 54 bp, Artificial
  Synthetic oligonucleotide
ctcgcgccacgtgaggcacctgtcaaatcagaactcgtggttcgcaaatttgaa

SEQ ID NO: 168850 - DNA, 54 bp, Artificial
  Synthetic oligonucleotide
cccacccgtcaggtccataaaaccgtcaggtccacaaaaccgtcagacccatga

SEQ ID NO: 168851 - DNA, 54 bp, Artificial
  Synthetic oligonucleotide
aaagcagcgagcggcgatcatagtccgccaatgtcccgcagcctcgaaggggca

SEQ ID NO: 168852 - DNA, 54 bp, Artificial
  Synthetic oligonucleotide
aaacgtttcggattgaacattcagggtctacgctgccttgcgagtgacaacaat

SEQ ID NO: 168853 - DNA, 54 bp, Artificial
  Synthetic oligonucleotide
ttgggctggccctcgtagctgcctgctacatggtgggaggcattgagcgcatga

SEQ ID NO: 168854 - DNA, 54 bp, Artificial
  Synthetic oligonucleotide
ttgggtcggtcgttcgatgcggcggggaatatcctgcccagcaccttcgcacgc

SEQ ID NO: 168855 - DNA, 58 bp, Artificial
  Synthetic oligonucleotide
gcgcttgcgactccacacccgcttgaccggctcttggtcgggggcaggctttagccgc

SEQ ID NO: 168856 - DNA, 54 bp, Artificial
  Synthetic oligonucleotide
catgtcgagaatttttctagtctcgtccatgtcgtgcatgtaatcggccaccga

SEQ ID NO: 168857 - DNA, 54 bp, Artificial
  Synthetic oligonucleotide
ctctcaagcacgcaacagacacttctagcatctcggcaagcaccctctgcttgt

SEQ ID NO: 168858 - DNA, 54 bp, Artificial
  Synthetic oligonucleotide
ttttgcgagtgatctcgaaaatgtgtcggccagaccgccaggagggtagggaac

SEQ ID NO: 168859 - DNA, 54 bp, Artificial
  Synthetic oligonucleotide
gccgtatccaacgactgcttccgggtactttctggccatttccacgaccttcca

SEQ ID NO: 168860 - DNA, 54 bp, Artificial
  Synthetic oligonucleotide
tacattggcacttcccgccaaggcggggattgtgtgcgttcgcccgccaagagc

SEQ ID NO: 168861 - DNA, 54 bp, Artificial
  Synthetic oligonucleotide
attcggacagcattgaccacgccccgactccggcctgttggatcggtgcgcgat

SEQ ID NO: 168862 - DNA, 54 bp, Artificial
  Synthetic oligonucleotide
tagacttcttcatatcgcttcctcgtttggcctctggagtgcatccggtctaaa

SEQ ID NO: 168863 - DNA, 54 bp, Artificial
  Synthetic oligonucleotide
gctgtccagtgactggggcttggacgagatcggttgagaccgtgccgcatccgt

SEQ ID NO: 168864 - DNA, 54 bp, Artificial
  Synthetic oligonucleotide
gctgcgtagcctggctgaggagaagtctgcagaatgctgtgtatttacacagta

SEQ ID NO: 168865 - DNA, 54 bp, Artificial
  Synthetic oligonucleotide
acggcttttctatgtgggttttacccgagcgaagtctgaagtgcacttgattca

SEQ ID NO: 168866 - DNA, 53 bp, Artificial
  Synthetic oligonucleotide
agcccgcgtttccggccactgaacctatccgacacggtttgtcgtgtatgttt

SEQ ID NO: 168867 - DNA, 57 bp, Artificial
  Synthetic oligonucleotide
gcgcttggccatccaacccaagtgaatcgagaaaataatcctcgagcgaccttgggg

SEQ ID NO: 168868 - DNA, 54 bp, Artificial
  Synthetic oligonucleotide
caaccgcactctctatggtgggcagttaccgcgatgtaaagcgctagggttgac

SEQ ID NO: 168869 - DNA, 54 bp, Artificial
  Synthetic oligonucleotide
atagtaaaccccaaactcgccgtccttggtagcaaggtacagatgtatcccata

SEQ ID NO: 168870 - DNA, 54 bp, Artificial
  Synthetic oligonucleotide
ctaaccgcaactcgatatcagactctgtgtcgtggcaggtcaaaccccaagaac

SEQ ID NO: 168871 - DNA, 54 bp, Artificial
  Synthetic oligonucleotide
tcaggtgcaaccagacgccaaacgccatcagtgcgcacgctggccagaacagta

SEQ ID NO: 168872 - DNA, 54 bp, Artificial
  Synthetic oligonucleotide
gcgtacatcgcagcgccaggctgcatcgtccagcacttcaggagacatccatga

SEQ ID NO: 168873 - DNA, 54 bp, Artificial
  Synthetic oligonucleotide
tgactcgacaagggaatcggtccattccgtcaagtcaacccgggaccaatccac

SEQ ID NO: 168874 - DNA, 54 bp, Artificial
  Synthetic oligonucleotide
tccggcagcgaaagttcaattcgccggtatgtgggtagatagaccacttcaata

SEQ ID NO: 168875 - DNA, 54 bp, Artificial
  Synthetic oligonucleotide
tgacaatcacacttgccgtacctaataaaagcccagccgccccatatccgctac

SEQ ID NO: 168876 - DNA, 54 bp, Artificial
  Synthetic oligonucleotide
acgtatttcagcgtaggttgaatcatggaaacggtaccgtcatgcagcgctcga

SEQ ID NO: 168877 - DNA, 54 bp, Artificial
  Synthetic oligonucleotide
tcgctcagaaaatgtaccggagtaccagccgagtaacaggggatcgacccagaa

SEQ ID NO: 168878 - DNA, 60 bp, Artificial
  Synthetic oligonucleotide
taacgcagcgcccagcgtgagattgtgctgatgtgttgcggctctaacctcccccaaaag

SEQ ID NO: 168879 - DNA, 53 bp, Artificial
  Synthetic oligonucleotide
gccgtggcgtaacagggaaaaggacctacacacaggtaagtaccttcgcacat

SEQ ID NO: 168880 - DNA, 53 bp, Artificial
  Synthetic oligonucleotide
cggtggttggtttgaagtgaaatcgggctctaacgccctatgggtaagcgctg

SEQ ID NO: 168881 - DNA, 53 bp, Artificial
  Synthetic oligonucleotide
atatggtccggctgctttgaccaggaacagtacaccgcccccttttggcaacc

SEQ ID NO: 168882 - DNA, 53 bp, Artificial
  Synthetic oligonucleotide
gcccaaaacctgggccataatcgtcctcctgtggttggatttcctatccgcct

SEQ ID NO: 168883 - DNA, 53 bp, Artificial
  Synthetic oligonucleotide
ctcaaaggtaaaagggttctcaacgaaagagcaggagtcggataagcgcctca

SEQ ID NO: 168884 - DNA, 53 bp, Artificial
  Synthetic oligonucleotide
actttgttcttgcgtacaaacgggcatgacagaccgccgggctgccactaccg

SEQ ID NO: 168885 - DNA, 53 bp, Artificial
  Synthetic oligonucleotide
ctcgctgattctttgcaccaccttgctgtggaggcgaaatgcggaggcgtcgg

SEQ ID NO: 168886 - DNA, 53 bp, Artificial
  Synthetic oligonucleotide
gcgttgcgcagactctgcgttttcaggcccccagcgacctctaggcggcgtcc

SEQ ID NO: 168887 - DNA, 53 bp, Artificial
  Synthetic oligonucleotide
gctaggttgaccagggtagtggtagccaatccacggcgttaataacaggtcct

SEQ ID NO: 168888 - DNA, 53 bp, Artificial
  Synthetic oligonucleotide
gcccgggcattgcggttagcatattcggctgcttacggccggggcgagaatca

SEQ ID NO: 168889 - DNA, 57 bp, Artificial
  Synthetic oligonucleotide
gcggccgctacgtggaacagctccacaagccccgactcccgcacaaaccaaagcacg

SEQ ID NO: 168890 - DNA, 53 bp, Artificial
  Synthetic oligonucleotide
acggagcagattagcttcatgggcagaacagtttgttccgcacgatgaggcgt

SEQ ID NO: 168891 - DNA, 53 bp, Artificial
  Synthetic oligonucleotide
tatccataagcgcgctccccttccctcgatccaagacggagacactgcgagcc

SEQ ID NO: 168892 - DNA, 53 bp, Artificial
  Synthetic oligonucleotide
caacggggcaaacccgtggcttctggccctgcgagtcgcgcgcaattggctct

SEQ ID NO: 168893 - DNA, 53 bp, Artificial
  Synthetic oligonucleotide
tcaaggctccagagcaaatccgtttcgacgccgttctgaggaccgcgaaatgc

SEQ ID NO: 168894 - DNA, 53 bp, Artificial
  Synthetic oligonucleotide
cgagagcaccctccatgcgcccaccaactgttccatgatgcggctcacgcgtg

SEQ ID NO: 168895 - DNA, 53 bp, Artificial
  Synthetic oligonucleotide
tttacattgacaagccgtttggggacacttcttttgaacccatcggagcccaa

SEQ ID NO: 168896 - DNA, 53 bp, Artificial
  Synthetic oligonucleotide
tcctgaattcttctgggtagcgttgtgcgttcatatggactcctatttgaacg

SEQ ID NO: 168897 - DNA, 53 bp, Artificial
  Synthetic oligonucleotide
gactggttgaccagtacccagggattgctagagagatacagcgcggattgaag

SEQ ID NO: 168898 - DNA, 53 bp, Artificial
  Synthetic oligonucleotide
cctttcgccgcttcgtctgacgcccggttaggctgtacttcaatcggacaggc

SEQ ID NO: 168899 - DNA, 53 bp, Artificial
  Synthetic oligonucleotide
tcgctaccaaagcaatagctgccagtgcctgatggataagcgccaggcgccga

SEQ ID NO: 168900 - DNA, 60 bp, Artificial
  Synthetic oligonucleotide
acaacaaagccagtgcgatggcaagccattgtgaccaatgcacgcggcgggcaaaaaccg

SEQ ID NO: 168901 - DNA, 53 bp, Artificial
  Synthetic oligonucleotide
cctgggcccgacgacgctatttgaaacatagctgccaacgcttcatgcatggg

SEQ ID NO: 168902 - DNA, 53 bp, Artificial
  Synthetic oligonucleotide
tctgtagccgacgaattccacgtttgaccaactccctatcagtcgaatagctg

SEQ ID NO: 168903 - DNA, 53 bp, Artificial
  Synthetic oligonucleotide
cttactcgacccacgcagaacacctgcgttcggggccactacgctgcttcacc

SEQ ID NO: 168904 - DNA, 53 bp, Artificial
  Synthetic oligonucleotide
gactgcagctgcgattgtgcccacagcgccggttcccgaatcgctctattgca

SEQ ID NO: 168905 - DNA, 53 bp, Artificial
  Synthetic oligonucleotide
tgactcttttgcccggattgacggtatcgctgcgtggggctcttacatacaat

SEQ ID NO: 168906 - DNA, 53 bp, Artificial
  Synthetic oligonucleotide
tgagattgaccgcgaccccgagcatggatagccggctcacgaattgcggagtt

SEQ ID NO: 168907 - DNA, 53 bp, Artificial
  Synthetic oligonucleotide
cagactctgcgttttcaggcccccagcgacctctaggcggcgtccaacttcag

SEQ ID NO: 168908 - DNA, 53 bp, Artificial
  Synthetic oligonucleotide
aaactggcacagcacatcaggcacgaaagattgatgcaacgccagtgagcccc

SEQ ID NO: 168909 - DNA, 53 bp, Artificial
  Synthetic oligonucleotide
gacatcaggcgtctcgcctcaggtcacttcggtggctgcgtggcaccctcagg

SEQ ID NO: 168910 - DNA, 53 bp, Artificial
  Synthetic oligonucleotide
gaagcttccacgtctggttatcagggcccactcgatctgatgtaaagggatct

SEQ ID NO: 168911 - DNA, 60 bp, Artificial
  Synthetic oligonucleotide
gcgtcacccatgcgcttataactgtcgccatcaacaggtctatttgtcgtgacaagaaag

SEQ ID NO: 168912 - DNA, 53 bp, Artificial
  Synthetic oligonucleotide
ccctaatcagggattgaggccgtcaggtcccgataatcttttcttatcggggg

SEQ ID NO: 168913 - DNA, 53 bp, Artificial
  Synthetic oligonucleotide
tgtagaaggctaattgaagaattgttagcctcctgtaatgtcggcgtaatctg

SEQ ID NO: 168914 - DNA, 53 bp, Artificial
  Synthetic oligonucleotide
gaaggccctgcagtctgggccggacctattccttcagcgcaatttccttggcc

SEQ ID NO: 168915 - DNA, 53 bp, Artificial
  Synthetic oligonucleotide
ttcgtcccgtttgaggaactggcatccgttcctgccgcaaacacgttcatcaa

SEQ ID NO: 168916 - DNA, 53 bp, Artificial
  Synthetic oligonucleotide
catcccgtgatttacgttcggtgccctcactgcagcgccacgatagacctgcg

SEQ ID NO: 168917 - DNA, 53 bp, Artificial
  Synthetic oligonucleotide
atcggccaggattcgtgcccaggcacctctggaatgacgggccgacgccagct

SEQ ID NO: 168918 - DNA, 53 bp, Artificial
  Synthetic oligonucleotide
ggcccccagcgacctctaggcggcgtccaacttcagccaacgagtagtctcgc

SEQ ID NO: 168919 - DNA, 53 bp, Artificial
  Synthetic oligonucleotide
acgaaacacggcggcgcgccaaaacacctcagccacagagcatagggtgccta

SEQ ID NO: 168920 - DNA, 53 bp, Artificial
  Synthetic oligonucleotide
ttttcggaacggttgccgggttgggagtaagcctcggccctacattgtcagga

SEQ ID NO: 168921 - DNA, 53 bp, Artificial
  Synthetic oligonucleotide
ggcggcgcacacagtactcagcgatcgaactgcaggaaactctcgacgttcgc

SEQ ID NO: 168922 - DNA, 60 bp, Artificial
  Synthetic oligonucleotide
gctatggcgattcggacaagcccaagtgcctgccggaccggtcaaactactcattccgca

SEQ ID NO: 168923 - DNA, 53 bp, Artificial
  Synthetic oligonucleotide
gcactagccaaccaaggaagaccgatgctttattccatcctgatctacggttc

SEQ ID NO: 168924 - DNA, 53 bp, Artificial
  Synthetic oligonucleotide
gggccggacctattccttcagcgcaatttccttggccaacgcacggaactgca

SEQ ID NO: 168925 - DNA, 53 bp, Artificial
  Synthetic oligonucleotide
cggccgtgacaaaccacttcatgttggggctgaagcgcagttggtaagggtcg

SEQ ID NO: 168926 - DNA, 53 bp, Artificial
  Synthetic oligonucleotide
accggagactctagatctctttaatctttcaccagtcgttagaataacaccgc

SEQ ID NO: 168927 - DNA, 53 bp, Artificial
  Synthetic oligonucleotide
ttttcgcttgcgtcccaatagttttccatcgagtcattcaagggacgtgtaat

SEQ ID NO: 168928 - DNA, 53 bp, Artificial
  Synthetic oligonucleotide
gcacgcatgggatgaagtcaagcgcaggcccaggactgaaaatccacaggtcg

SEQ ID NO: 168929 - DNA, 53 bp, Artificial
  Synthetic oligonucleotide
ctggagctgctgcaattcgatctggcgcggccgctactggtaatgaaggcccc

SEQ ID NO: 168930 - DNA, 53 bp, Artificial
  Synthetic oligonucleotide
gcaatgtgactacagcttaagggcaatgccggtttgcttaccgtgctttgttg

SEQ ID NO: 168931 - DNA, 53 bp, Artificial
  Synthetic oligonucleotide
ctgtaacgaactgaaatctggagaattaccgatggctgcaattaccgctagca

SEQ ID NO: 168932 - DNA, 53 bp, Artificial
  Synthetic oligonucleotide
gtggcctatgcgttagtccagtgaagtcccgcgcttgtaacgtcgggcgttat

SEQ ID NO: 168933 - DNA, 60 bp, Artificial
  Synthetic oligonucleotide
acgggggagcgcaatagcgcgcatcacggtacgaatcgagcagttgaatcgctcagccat

SEQ ID NO: 168934 - DNA, 53 bp, Artificial
  Synthetic oligonucleotide
gtgttcgtttccattgaaacctgtcacaaacaatggccacaccgagtccgcaa

SEQ ID NO: 168935 - DNA, 53 bp, Artificial
  Synthetic oligonucleotide
atgttgaagttcgctgtcttgcaattgcgtgagggagttgcggagtgggcgat

SEQ ID NO: 168936 - DNA, 53 bp, Artificial
  Synthetic oligonucleotide
gttttgttgcagtcggcaaagctgcatggccatgacccctgggcttatctgaa

SEQ ID NO: 168937 - DNA, 53 bp, Artificial
  Synthetic oligonucleotide
aatttgccgactgctgcaaattgccccatcgggctacagacgcagggttcaac

SEQ ID NO: 168938 - DNA, 53 bp, Artificial
  Synthetic oligonucleotide
attgagtcatgaacactaaagctgctcgttttagccccgaggtacgtgaacgt

SEQ ID NO: 168939 - DNA, 53 bp, Artificial
  Synthetic oligonucleotide
tagcgtgagtagtttttcgctcttgcaatttttttctggcatccgatttttgt

SEQ ID NO: 168940 - DNA, 53 bp, Artificial
  Synthetic oligonucleotide
caaacaacatgcgcggcgatggatggacccccgtctcgacggctaccgctcac

SEQ ID NO: 168941 - DNA, 53 bp, Artificial
  Synthetic oligonucleotide
taggcatcgcagaccgccacgtcatgcgagagatagggaatctgcaggccgtt

SEQ ID NO: 168942 - DNA, 52 bp, Artificial
  Synthetic oligonucleotide
gaaccatccacgcggttgcgaacccaccctgtgatgtcctgcgcccgtgcgt

SEQ ID NO: 168943 - DNA, 52 bp, Artificial
  Synthetic oligonucleotide
gaaagtgtgggaacaaccgcacccggaatcgtggtgcgaaccggccagccct

SEQ ID NO: 168944 - DNA, 59 bp, Artificial
  Synthetic oligonucleotide
gctcaggtctttccaccactcgggcatgggggtcaaaagcgttgactcttctccagcga

SEQ ID NO: 168945 - DNA, 52 bp, Artificial
  Synthetic oligonucleotide
gaatacgctcggtctggagatagttcagcacgaaattcgtgtttcgctcccc

SEQ ID NO: 168946 - DNA, 52 bp, Artificial
  Synthetic oligonucleotide
gcccctcaacggaggcctcgtatacataaacttggccttcggggtctagcgc

SEQ ID NO: 168947 - DNA, 52 bp, Artificial
  Synthetic oligonucleotide
gagacaacggccgagtgctcgggtatgacaacagccacggcttctcgcacaa

SEQ ID NO: 168948 - DNA, 52 bp, Artificial
  Synthetic oligonucleotide
gcacctggcatcgataaaggctagcgtaacgaccaaggagcatcagtggagg

SEQ ID NO: 168949 - DNA, 52 bp, Artificial
  Synthetic oligonucleotide
agatgcgctcggaccatccagtcacgaagcgctcggtgacatcaaaaccgtt

SEQ ID NO: 168950 - DNA, 52 bp, Artificial
  Synthetic oligonucleotide
gcaggcttcggactttcagcgctactgctaggtctggttgccatcctattga

SEQ ID NO: 168951 - DNA, 52 bp, Artificial
  Synthetic oligonucleotide
gcagcccgcacgctcaactgcttctgatcaccccgcaggaggaacccaagtg

SEQ ID NO: 168952 - DNA, 52 bp, Artificial
  Synthetic oligonucleotide
acatcctcgattcggaattcggctggggcaagcgctgcgacgactaccagaa

SEQ ID NO: 168953 - DNA, 52 bp, Artificial
  Synthetic oligonucleotide
gtgtgaagcatgtcgatgggtggtacgtccgccgcgatgggaacaaagtagt

SEQ ID NO: 168954 - DNA, 52 bp, Artificial
  Synthetic oligonucleotide
acaacgtaactgctcaacagttcagtgccatcttcgaactcatatggctcgc

SEQ ID NO: 168955 - DNA, 54 bp, Artificial
  Synthetic oligonucleotide
acaagttacgcctccgtgtctaacctacccggtgctgctgtagggttacttcat

SEQ ID NO: 168956 - DNA, 52 bp, Artificial
  Synthetic oligonucleotide
taggctccaactcgcgaatccttcctcttgggcgactcgattcaaggctgcg

SEQ ID NO: 168957 - DNA, 52 bp, Artificial
  Synthetic oligonucleotide
tcattccgcacgtttgcccatgaccaactctgtgtgatgcgccacctggggt

SEQ ID NO: 168958 - DNA, 52 bp, Artificial
  Synthetic oligonucleotide
tcttagtgagccctgcctccgagcgtctgagcgactcctccgtggattcttg

SEQ ID NO: 168959 - DNA, 52 bp, Artificial
  Synthetic oligonucleotide
tgacgcatatggtgtcgggagggttggttcgcatcgaccgtgaatcgtccga

SEQ ID NO: 168960 - DNA, 52 bp, Artificial
  Synthetic oligonucleotide
tgagtgcgccccaatgtctttctcaatgcgagagccctgtaagtgcaggtga

SEQ ID NO: 168961 - DNA, 52 bp, Artificial
  Synthetic oligonucleotide
aagactagcatccggctagatgaccacatgaacgaatgccgcaaggcgcgcc

SEQ ID NO: 168962 - DNA, 52 bp, Artificial
  Synthetic oligonucleotide
tgcattgggacggcccaggtcgagaaacaggaagttggctaccgaaggcgca

SEQ ID NO: 168963 - DNA, 52 bp, Artificial
  Synthetic oligonucleotide
tgccgtccttaaacacatgcactgtcgagccgtctttaagctgaacagattt

SEQ ID NO: 168964 - DNA, 52 bp, Artificial
  Synthetic oligonucleotide
tgcctccgcatacctgccactcaccatctcgggaaagtgcttctactttgat

SEQ ID NO: 168965 - DNA, 52 bp, Artificial
  Synthetic oligonucleotide
tgcgccgatttcatcaggcgggaacgtggcattttcggcccaccaacgcgtg

SEQ ID NO: 168966 - DNA, 58 bp, Artificial
  Synthetic oligonucleotide
gttacgctgtgcgcgataaccgcgtgttaagccgccggttaagacaatatcccctgca

SEQ ID NO: 168967 - DNA, 52 bp, Artificial
  Synthetic oligonucleotide
tgctcgtggggtgaccaggggttccggggcgtgccccagtgggcgttgacgc

SEQ ID NO: 168968 - DNA, 52 bp, Artificial
  Synthetic oligonucleotide
tgtccgtgtgggccgaaatgttgtgtcgcattgctgctacctagtgaattcc

SEQ ID NO: 168969 - DNA, 52 bp, Artificial
  Synthetic oligonucleotide
aacattctccgagtacttggaagcagcgtcgctcacatctgcgtagtacccg

SEQ ID NO: 168970 - DNA, 52 bp, Artificial
  Synthetic oligonucleotide
ttctacaggcgtgcctgcaaatgtctggccaatgccattcacgatgtccgcg

SEQ ID NO: 168971 - DNA, 52 bp, Artificial
  Synthetic oligonucleotide
aaagctcatgggcaatacttctggcctgacggcacctatgggcctgataggg

SEQ ID NO: 168972 - DNA, 52 bp, Artificial
  Synthetic oligonucleotide
aaaacgcacgcctacttccactcgatttggaaggaagacatgcacgcagtcc

SEQ ID NO: 168973 - DNA, 52 bp, Artificial
  Synthetic oligonucleotide
ttttcatcgtgcatttcatggcggaggcagtatcagaaatgtaggcttaagc

SEQ ID NO: 168974 - DNA, 52 bp, Artificial
  Synthetic oligonucleotide
ttttttcccgtcagtaatgcccgcgatgtcttggccgcaggtcaccagaatc

SEQ ID NO: 168975 - DNA, 52 bp, Artificial
  Synthetic oligonucleotide
agacttgatccaggccaccagcctacccgcttgaatggtcccgagctggcga

SEQ ID NO: 168976 - DNA, 52 bp, Artificial
  Synthetic oligonucleotide
gcgctccccatacggtgcatgaccactgtcagcaacataaacgaagttttca

SEQ ID NO: 168977 - DNA, 60 bp, Artificial
  Synthetic oligonucleotide
tcacctgaggatccccttatttttaaccgtagaaagatattgtaatgtgcgatcatcaca

SEQ ID NO: 168978 - DNA, 60 bp, Artificial
  Synthetic oligonucleotide
gtggttggatatccactcgatattctgaactgtgagcttttccagtaaaacagctggagc

SEQ ID NO: 168979 - DNA, 52 bp, Artificial
  Synthetic oligonucleotide
acggcccccgtttgcgctggataggctgcgcaaagcgggcagtgagctcatt

SEQ ID NO: 168980 - DNA, 52 bp, Artificial
  Synthetic oligonucleotide
ggaacgcccgtcgagacgtcggtaatcatcaggtttatttgcccgccgagaa

SEQ ID NO: 168981 - DNA, 52 bp, Artificial
  Synthetic oligonucleotide
ggactgagatcggatgagtcaagtaaccgtgccaagctcgctacgttcaagt

SEQ ID NO: 168982 - DNA, 52 bp, Artificial
  Synthetic oligonucleotide
ggcaagatcaatggggcaactggctccaacgtgctgccgtactacagcacca

SEQ ID NO: 168983 - DNA, 52 bp, Artificial
  Synthetic oligonucleotide
ggccatcgtgcaaagacaactggcgcggccgtacctgtcgggcaaccgggcg

SEQ ID NO: 168984 - DNA, 52 bp, Artificial
  Synthetic oligonucleotide
ggccattcgctcgcaatcggctcaagtccatgcaacggcgacctgctctgat

SEQ ID NO: 168985 - DNA, 52 bp, Artificial
  Synthetic oligonucleotide
accggcgctttacagggcgaagcacatgggcggaggatgctggcgtccaatg

SEQ ID NO: 168986 - DNA, 52 bp, Artificial
  Synthetic oligonucleotide
ggggccggcacaagtacacaggacctctgccatgaaactcttctacatgccc

SEQ ID NO: 168987 - DNA, 50 bp, Artificial
  Synthetic oligonucleotide
ggggtctttacgtcacactactggctcgaaatttcgggtaaacccgtagt

SEQ ID NO: 168988 - DNA, 52 bp, Artificial
  Synthetic oligonucleotide
gggtacatgacaaccgggaggccagtcactaccagcaccgggtcgtattgcc

SEQ ID NO: 168989 - DNA, 60 bp, Artificial
  Synthetic oligonucleotide
gcttcagacacctgggcattgatacgcaccaagaccggttgatctgccattgataggttt

SEQ ID NO: 168990 - DNA, 52 bp, Artificial
  Synthetic oligonucleotide
acccggctgatgcagcctatggatgatcgcctggaggaaactgaacaacgaa

SEQ ID NO: 168991 - DNA, 52 bp, Artificial
  Synthetic oligonucleotide
ggtacagcgtaccgagttccgcataaagcccgggggcgaccttttgcttgga

SEQ ID NO: 168992 - DNA, 52 bp, Artificial
  Synthetic oligonucleotide
ggtagagcctgcctcgtccctgcgacagctctaccggcttgtgtcaatcagc

SEQ ID NO: 168993 - DNA, 52 bp, Artificial
  Synthetic oligonucleotide
ggtccttcgtacaggaaccgccgagattttggctgcttcgtgccaaccttgt

SEQ ID NO: 168994 - DNA, 52 bp, Artificial
  Synthetic oligonucleotide
gtagcagtatccatgcagcgtccaacgtcgaaattcggtcaaagagaacttc

SEQ ID NO: 168995 - DNA, 52 bp, Artificial
  Synthetic oligonucleotide
agggctgcgatgggaatcgaaattgtcccggggtgccatcactgacatccgg

SEQ ID NO: 168996 - DNA, 52 bp, Artificial
  Synthetic oligonucleotide
cccaataaggtcgaacgcaaaggtcggcgtcttctgaattgccgactggttg

SEQ ID NO: 168997 - DNA, 52 bp, Artificial
  Synthetic oligonucleotide
ccccaggaagagtcatgttctgatcgagcacatattcgggagcctgccaaat

SEQ ID NO: 168998 - DNA, 52 bp, Artificial
  Synthetic oligonucleotide
atgctttcgacctggtttttaatgctggtcgaaatgtgggcaacgtcagtca

SEQ ID NO: 168999 - DNA, 52 bp, Artificial
  Synthetic oligonucleotide
ccccgctcgtggtggcttggtacattgaaattgcctgcagccaccggaacgg

SEQ ID NO: 169000 - DNA, 56 bp, Artificial
  Synthetic oligonucleotide
cccttatcacccacaggagttcccgcatgcccgatgccgtcgtcttttcacccgga

SEQ ID NO: 169001 - DNA, 52 bp, Artificial
  Synthetic oligonucleotide
attatccgactataaccgctagaattttatccaactatcggatagatttgca

SEQ ID NO: 169002 - DNA, 52 bp, Artificial
  Synthetic oligonucleotide
ccccggatgcatccagtctaggacggcgtgcgctgcaacaaatgtaggcctg

SEQ ID NO: 169003 - DNA, 52 bp, Artificial
  Synthetic oligonucleotide
ctgcgggtaggctcccgcccggattgcacttcatgaccaccaaaaccgttta

SEQ ID NO: 169004 - DNA, 52 bp, Artificial
  Synthetic oligonucleotide
atgaagtatcccgaagcgaaaacgcacccaacaagggccagcttgaacaaaa

SEQ ID NO: 169005 - DNA, 52 bp, Artificial
  Synthetic oligonucleotide
ctgcctccctcagcgtacgcgctaatgatttcgcggaaatgcgtcccttgcg

SEQ ID NO: 169006 - DNA, 52 bp, Artificial
  Synthetic oligonucleotide
cagccagggggccaacgcgggaaagtatgaagtgcttcgagacattgtccga

SEQ ID NO: 169007 - DNA, 52 bp, Artificial
  Synthetic oligonucleotide
cagaattcgggctccaggcttcgcctctctccctacggtcgattcaccgggc

SEQ ID NO: 169008 - DNA, 52 bp, Artificial
  Synthetic oligonucleotide
ctgaaatatactgagggtgcttaaacgccggcagcttcccgtagaagccagc

SEQ ID NO: 169009 - DNA, 52 bp, Artificial
  Synthetic oligonucleotide
caaaacctttgtgatctgcgccgtggctgctgtttcgtcaccctttagtatc

SEQ ID NO: 169010 - DNA, 52 bp, Artificial
  Synthetic oligonucleotide
cggggccgggagttatcacgaatctttgaactctgcgtgaagacttcgggag

SEQ ID NO: 169011 - DNA, 56 bp, Artificial
  Synthetic oligonucleotide
ccgcactgcgctcctacccgtcttttctcacggacattattgtcccgtatacgtcc

SEQ ID NO: 169012 - DNA, 52 bp, Artificial
  Synthetic oligonucleotide
ctcaatcccggggtgctataaacgaacggcaccatgaaagtgccacatgcga

SEQ ID NO: 169013 - DNA, 52 bp, Artificial
  Synthetic oligonucleotide
ctagatgtgaatgatcagtgagccgtaaattcactttgcgcacaatcacgta

SEQ ID NO: 169014 - DNA, 52 bp, Artificial
  Synthetic oligonucleotide
cgtaaggcatgcccagagcttcgggtgactggaacacgcgagcacaactcgt

SEQ ID NO: 169015 - DNA, 52 bp, Artificial
  Synthetic oligonucleotide
cgaagaatccctgctagacccaatccagccagaattaggtagcaaatgaact

SEQ ID NO: 169016 - DNA, 52 bp, Artificial
  Synthetic oligonucleotide
caaggctgcactcatgccctgtgctgtaatcgcccctcctcaggcggccccg

SEQ ID NO: 169017 - DNA, 52 bp, Artificial
  Synthetic oligonucleotide
cgtctgctttgggtcggaggcagaccttgcaaccggcggactgcgagtcccc

SEQ ID NO: 169018 - DNA, 52 bp, Artificial
  Synthetic oligonucleotide
ccacataatgggcaggctttcgttcgggcttcggctcaatgagggcgagtgc

SEQ ID NO: 169019 - DNA, 52 bp, Artificial
  Synthetic oligonucleotide
ccacgtgaggccctttcggtcggtaggtgctcggtactggtaagaatccgcc

SEQ ID NO: 169020 - DNA, 52 bp, Artificial
  Synthetic oligonucleotide
aggctctcaccgtgagacttgatccaggccaccagcctacccgcttgaatgg

SEQ ID NO: 169021 - DNA, 51 bp, Artificial
  Synthetic oligonucleotide
cagtcgggctcgttccggtacgtcaagccgtaggtcacacatatcgcgcgg

SEQ ID NO: 169022 - DNA, 60 bp, Artificial
  Synthetic oligonucleotide
cactgatgtcggagcgtgtctcgtgagcacgtaggcattctggacagccgttgcaggcac

SEQ ID NO: 169023 - DNA, 51 bp, Artificial
  Synthetic oligonucleotide
gcagggcattagccacgtgaggccctttcggtcggtaggtgctcggtactg

SEQ ID NO: 169024 - DNA, 51 bp, Artificial
  Synthetic oligonucleotide
aaaacgacccttgcggactcatgacgagcccgggagtcgccccacgatgaa

SEQ ID NO: 169025 - DNA, 51 bp, Artificial
  Synthetic oligonucleotide
aatttggtcccgcgagaactccctgagctgtataaaccagctcgaaagagt

SEQ ID NO: 169026 - DNA, 51 bp, Artificial
  Synthetic oligonucleotide
actatgtgtacctcagtgcccgccattggccacatagggccccttgcgccg

SEQ ID NO: 169027 - DNA, 51 bp, Artificial
  Synthetic oligonucleotide
agtgcgttctctgtgaagggcgtttgtgcctcccgtggtgaagggcttggt

SEQ ID NO: 169028 - DNA, 51 bp, Artificial
  Synthetic oligonucleotide
agatgtggggccagtagccatgctttcggccggcagggagcagactttagc

SEQ ID NO: 169029 - DNA, 51 bp, Artificial
  Synthetic oligonucleotide
cccttccctacgggtggcaagccataaggctacgggacagtccagcctacg

SEQ ID NO: 169030 - DNA, 51 bp, Artificial
  Synthetic oligonucleotide
gggcaggctttcgttcgggcttcggctcaatgagggcgagtgcgtttgcgt

SEQ ID NO: 169031 - DNA, 51 bp, Artificial
  Synthetic oligonucleotide
ggatcggtgcgcggtcaatggtctcgatcggtcacacgcagcattgcactg

SEQ ID NO: 169032 - DNA, 51 bp, Artificial
  Synthetic oligonucleotide
cggcgctgaaatggtggcgggcacaaactgagtcgcgcatgaaccactgag

SEQ ID NO: 169033 - DNA, 54 bp, Artificial
  Synthetic oligonucleotide
ttcgacaagttttcgtaaactaagcgcaagtacagcgttaagttcggtaacgca

SEQ ID NO: 169034 - DNA, 51 bp, Artificial
  Synthetic oligonucleotide
ctccaggccgctcttcgtcaagtactaggccggccccacatgccctgcgat

SEQ ID NO: 169035 - DNA, 51 bp, Artificial
  Synthetic oligonucleotide
ctcatgtcgtccacgtgccagaactttccgaaatcgagtctcgacatgtcc

SEQ ID NO: 169036 - DNA, 51 bp, Artificial
  Synthetic oligonucleotide
ccttgcttgatcgtatgggagtactgccggccccgcattgtgcgcaggagg

SEQ ID NO: 169037 - DNA, 51 bp, Artificial
  Synthetic oligonucleotide
aacgcccttgccgcaccgagaccgttcccgttcgcacgctgcactaccacg

SEQ ID NO: 169038 - DNA, 51 bp, Artificial
  Synthetic oligonucleotide
gtttccgaatggcaacgtcgggcgttagcacgcctacgactttcggagcgc

SEQ ID NO: 169039 - DNA, 51 bp, Artificial
  Synthetic oligonucleotide
gcggtattccccggatgcatccagtctaggacggcgtgcgctgcaacaaat

SEQ ID NO: 169040 - DNA, 51 bp, Artificial
  Synthetic oligonucleotide
cccgcattgtgcgcaggaggcagcagctctatatgggggcgctcagaatcg

SEQ ID NO: 169041 - DNA, 51 bp, Artificial
  Synthetic oligonucleotide
tgtacatcgttttcacgcagttacaaaagggattgccatgcatcgtcgaaa

SEQ ID NO: 169042 - DNA, 51 bp, Artificial
  Synthetic oligonucleotide
ggagtcgctgggatttatgcgttttacgtacccagggcgccagagttcgtc

SEQ ID NO: 169043 - DNA, 51 bp, Artificial
  Synthetic oligonucleotide
cccgacgtacaacaccgaccaatcgatcagcctcgccgccgtgtttcagtt

SEQ ID NO: 169044 - DNA, 60 bp, Artificial
  Synthetic oligonucleotide
cctcttcgttttccttgtatcaggcattctataggtcgtttcaggcgatctatcaggaca

SEQ ID NO: 169045 - DNA, 51 bp, Artificial
  Synthetic oligonucleotide
gttcggattgcggtattccccggatgcatccagtctaggacggcgtgcgct

SEQ ID NO: 169046 - DNA, 51 bp, Artificial
  Synthetic oligonucleotide
ggaggcagcagctctatatgggggcgctcagaatcgacacaaggccgcagc

SEQ ID NO: 169047 - DNA, 51 bp, Artificial
  Synthetic oligonucleotide
aagcgaaagtcgtgggctaccgtgtcttcgcccagttgcgtgctctgcgca

SEQ ID NO: 169048 - DNA, 51 bp, Artificial
  Synthetic oligonucleotide
caccgagggccaacaatgcgccccctgacgttcaatgaagagcaagccgac

SEQ ID NO: 169049 - DNA, 51 bp, Artificial
  Synthetic oligonucleotide
cgatccggctttctgcggagaagtgcccgatgctagggtgagcacgaaggt

SEQ ID NO: 169050 - DNA, 51 bp, Artificial
  Synthetic oligonucleotide
aatggccgtggacctgttcgcttggacctatcggcgctcccacgccaaata

SEQ ID NO: 169051 - DNA, 51 bp, Artificial
  Synthetic oligonucleotide
cgggcgtcctatcgaatatgttgtcaaccctccgtttgctactctcaaggc

SEQ ID NO: 169052 - DNA, 51 bp, Artificial
  Synthetic oligonucleotide
tatcgcatataacgcgtcaaagtacggaacacgcacccgacatgcgttgca

SEQ ID NO: 169053 - DNA, 51 bp, Artificial
  Synthetic oligonucleotide
agtatagtcacacgcgctcgatttgttaatgaattcagcttcccttagcaa

SEQ ID NO: 169054 - DNA, 51 bp, Artificial
  Synthetic oligonucleotide
tgacatgggttctgggcgtcttaatccgggttgggcggtagagacttgggg

SEQ ID NO: 169055 - DNA, 60 bp, Artificial
  Synthetic oligonucleotide
ttccgtggaggctcaactcctgagaggattgagtcatgaacactaaagctgctcgtttta

SEQ ID NO: 169056 - DNA, 51 bp, Artificial
  Synthetic oligonucleotide
tgaccagcccgcgtttactgacgtatctagggctggagcgcttgcggtatg

SEQ ID NO: 169057 - DNA, 51 bp, Artificial
  Synthetic oligonucleotide
gcgcgattgacggcaagcatttgctatgaaatcatgagcttcatgcgcact

SEQ ID NO: 169058 - DNA, 51 bp, Artificial
  Synthetic oligonucleotide
aagcagcaatcggttggggttcagagcttttcgtcgcgcatgtagtaccag

SEQ ID NO: 169059 - DNA, 51 bp, Artificial
  Synthetic oligonucleotide
cgcagcgtgcctcgcaaaggtcgatcgcagttcctcgatcctggactcata

SEQ ID NO: 169060 - DNA, 51 bp, Artificial
  Synthetic oligonucleotide
ccagccgttcacctgcgtgtggaagcgccacatcgagacaatcgtgtcgtg

SEQ ID NO: 169061 - DNA, 51 bp, Artificial
  Synthetic oligonucleotide
agacgccccttgaaacacggcaagttactccggtcatctggagccgctcgt

SEQ ID NO: 169062 - DNA, 51 bp, Artificial
  Synthetic oligonucleotide
cacgggagcctgttgtgcgctttacagggcataagcatacgcgctaggcct

SEQ ID NO: 169063 - DNA, 51 bp, Artificial
  Synthetic oligonucleotide
ggcgtgagcgctacagattggcactggaattgcatgtaatcgacaacgggt

SEQ ID NO: 169064 - DNA, 51 bp, Artificial
  Synthetic oligonucleotide
tactatgggggacatggcattccgaccgcgtttgatcatcaaggattgcct

SEQ ID NO: 169065 - DNA, 51 bp, Artificial
  Synthetic oligonucleotide
ccggaaaacggaacccttccataccatggcttattcgacagaggccacccc

SEQ ID NO: 169066 - DNA, 59 bp, Artificial
  Synthetic oligonucleotide
ttcccgttagcgcagttcgccacctctgaacatcgggttcatacaggtgttcggcattc

SEQ ID NO: 169067 - DNA, 51 bp, Artificial
  Synthetic oligonucleotide
cagacgagttggtgaatccgatacaagtcggtttcaatgtccggcagtgca

SEQ ID NO: 169068 - DNA, 51 bp, Artificial
  Synthetic oligonucleotide
ggcttcgccgttaattcgaaggttggcggacaaactcatacatggcgctta

SEQ ID NO: 169069 - DNA, 51 bp, Artificial
  Synthetic oligonucleotide
ccgcccttaagtctggctgtgccttggcgtactgacgcgaccgaggtgccg

SEQ ID NO: 169070 - DNA, 51 bp, Artificial
  Synthetic oligonucleotide
tattactcggacatcgcctggaacttgagtggccgtgcgcgcagcacaaac

SEQ ID NO: 169071 - DNA, 51 bp, Artificial
  Synthetic oligonucleotide
cgctatgaatcctcagaggttcctactgcggaaatttatgcaatagacgtc

SEQ ID NO: 169072 - DNA, 51 bp, Artificial
  Synthetic oligonucleotide
acgatgtgcaaacatgtatttccgctgcacatgccactcttcggaacgatc

SEQ ID NO: 169073 - DNA, 51 bp, Artificial
  Synthetic oligonucleotide
ggcacacaccgcctgaaaagcgcccatctcggaacgctcacatcatcccgt

SEQ ID NO: 169074 - DNA, 51 bp, Artificial
  Synthetic oligonucleotide
tacccaggcggtgaccgagtaacgatagtgtccgaccgcagtgggtgtgaa

SEQ ID NO: 169075 - DNA, 51 bp, Artificial
  Synthetic oligonucleotide
atgctccttgatgaaatggcgtgacgctatcacagcctccgtgcccgcgat

SEQ ID NO: 169076 - DNA, 51 bp, Artificial
  Synthetic oligonucleotide
gatatgaactccgcccccaagctcagggactgcctggacgcagacgtgggg

SEQ ID NO: 169077 - DNA, 57 bp, Artificial
  Synthetic oligonucleotide
cgaaacgccttgacgaccgcggcgcctataccctgcgatgcgccggtaaccacgaca

SEQ ID NO: 169078 - DNA, 51 bp, Artificial
  Synthetic oligonucleotide
agcgggccggacaactttcggctcggtccaagttacgacggaatggaacca

SEQ ID NO: 169079 - DNA, 51 bp, Artificial
  Synthetic oligonucleotide
gaaagtgccaaccggtctcgattccatactcggtgccgatgatgtatccgg

SEQ ID NO: 169080 - DNA, 51 bp, Artificial
  Synthetic oligonucleotide
ggtcgacatatctctctccctgtggaacgacgcgtcaaagtacatcacatc

SEQ ID NO: 169081 - DNA, 51 bp, Artificial
  Synthetic oligonucleotide
cattcacacaacggcctgaaagaaaacccgagtcttcccgcagacggtttt

SEQ ID NO: 169082 - DNA, 51 bp, Artificial
  Synthetic oligonucleotide
aaatcaagggtttacaccatcgtgggtaaaatagacccatgtcaatttggg

SEQ ID NO: 169083 - DNA, 51 bp, Artificial
  Synthetic oligonucleotide
acgggcatagctttcctgcgccaagtcagccgcagtatcgcggtctctcac

SEQ ID NO: 169084 - DNA, 51 bp, Artificial
  Synthetic oligonucleotide
gtcgaggctgcgtaaaaaaccgctaagggacgcaaaacacatgagccatct

SEQ ID NO: 169085 - DNA, 51 bp, Artificial
  Synthetic oligonucleotide
gtgcaaaccctaggccaggtgcacgattcgtcaaacggtttgtgcacattg

SEQ ID NO: 169086 - DNA, 51 bp, Artificial
  Synthetic oligonucleotide
ggtgctggtacctcgccgaataggctgttcaaagatcccagcgggcttgcc

SEQ ID NO: 169087 - DNA, 51 bp, Artificial
  Synthetic oligonucleotide
cttaccggtcagccgtatggggattgcagcgtgagcgcaccatatttcaat

SEQ ID NO: 169088 - DNA, 55 bp, Artificial
  Synthetic oligonucleotide
ccgtgtgctactctcgcaaccgtttccggcatcgttgcctactagcgattccggt

SEQ ID NO: 169089 - DNA, 55 bp, Artificial
  Synthetic oligonucleotide
acgtatgcggtctccatgaggatcgaaagggtagagtcccgcggcctatggaggc

SEQ ID NO: 169090 - DNA, 55 bp, Artificial
  Synthetic oligonucleotide
ctggtcgtcacgactgagaactcgtgcgtcacgtctcgaggacagaggctgtcgc

SEQ ID NO: 169091 - DNA, 55 bp, Artificial
  Synthetic oligonucleotide
gccatagtaccacgacttagcccgttagctaggtagcaggggtctgagtgccgag

SEQ ID NO: 169092 - DNA, 55 bp, Artificial
  Synthetic oligonucleotide
gcgccccgctctgccgcgagactgacgacgcacgtagtcacatcgacggggctga

SEQ ID NO: 169093 - DNA, 55 bp, Artificial
  Synthetic oligonucleotide
agcgctcagtagagtccgccagcgctatggacctgctcgaatatcagggcaagca

SEQ ID NO: 169094 - DNA, 55 bp, Artificial
  Synthetic oligonucleotide
gggttgcacctgatcggaggatgtgtaactctacggtgacacttggttcccacca

SEQ ID NO: 169095 - DNA, 55 bp, Artificial
  Synthetic oligonucleotide
accgcacgatgagttccggtgcgccaccccgtcctacactcgaacgactatccga

SEQ ID NO: 169096 - DNA, 55 bp, Artificial
  Synthetic oligonucleotide
accattccgacttggaacgagatgctagggttcatctccgatgtccccacacagc

SEQ ID NO: 169097 - DNA, 54 bp, Artificial
  Synthetic oligonucleotide
ggtgcaaagtttccggccccgctcgtggcgcgttccgcttgaaaacctccagta

SEQ ID NO: 169098 - DNA, 55 bp, Artificial
  Synthetic oligonucleotide
tctctcgggatccatgcgtcatctcccgcggtcggtcggatgttcgtaacgagcc

SEQ ID NO: 169099 - DNA, 55 bp, Artificial
  Synthetic oligonucleotide
ccttggcttcagtcgtggtcacgatttagcccactcgtgatgtgtggtctcgcga

SEQ ID NO: 169100 - DNA, 55 bp, Artificial
  Synthetic oligonucleotide
tgttacaccatgccgtgtgatctacgtcacggctgcgtcacaatccggcggtcgg

SEQ ID NO: 169101 - DNA, 55 bp, Artificial
  Synthetic oligonucleotide
ttcactcatgccacgacgaggttcgaccccgaccggaagtcccctccgcgacctg

SEQ ID NO: 169102 - DNA, 55 bp, Artificial
  Synthetic oligonucleotide
attcggcgaggagtcgtacgctctagcccagtcgaggcttgccggctcaccgttc

SEQ ID NO: 169103 - DNA, 53 bp, Artificial
  Synthetic oligonucleotide
cagtcgagaagcgcgtcactgagaactctccacggctcactctaacggtgaac

SEQ ID NO: 169104 - DNA, 52 bp, Artificial
  Synthetic oligonucleotide
aattttgtcgtgcattgcagagacgcgggcggtccccactcggtacggtcgc

SEQ ID NO: 169105 - DNA, 52 bp, Artificial
  Synthetic oligonucleotide
tctcggtccagtacacgtgtcgtccgtcggtcgcaacgccattcgggttgaa

SEQ ID NO: 169106 - DNA, 52 bp, Artificial
  Synthetic oligonucleotide
tttcggttacagacagtcacacgactgtctaattgaggagagacatagtgac

SEQ ID NO: 169107 - DNA, 51 bp, Artificial
  Synthetic oligonucleotide
cgtaaactaacactggtagttcgcgatcgagggagagtccgtgtcagtcac

SEQ ID NO: 169108 - DNA, 51 bp, Artificial
  Synthetic oligonucleotide
gcgccgtgtcacggctacaagctctacagacgtttcgttgacttgataggt

SEQ ID NO: 169109 - DNA, 51 bp, Artificial
  Synthetic oligonucleotide
gtggccatcggcccaggactctagtgggttgcgtcccgcgctggttcgggg

SEQ ID NO: 169110 - DNA, 55 bp, Artificial
  Synthetic oligonucleotide
cgcccaagataccaggatgcaggcctctgcactaccattctgtcgctatctggcc

SEQ ID NO: 169111 - DNA, 50 bp, Artificial
  Synthetic oligonucleotide
ttgggttggttggcatgccacctgttggtctgaagcgagtatcgggttca

SEQ ID NO: 169112 - DNA, 50 bp, Artificial
  Synthetic oligonucleotide
atgcggtcaagcggaccacgcccctggatcagagcgcgcagcgagcacgg

SEQ ID NO: 169113 - DNA, 50 bp, Artificial
  Synthetic oligonucleotide
atgcgcgctcgttgaatcgtcacctagccctgaggccaaaccgtcacggt

SEQ ID NO: 169114 - DNA, 50 bp, Artificial
  Synthetic oligonucleotide
atgatccatggaggatcaccgtccggagatcccacgggtgccgaccgatc

SEQ ID NO: 169115 - DNA, 50 bp, Artificial
  Synthetic oligonucleotide
atcctgcctcgcctgagtcatggccgtcacgagtcgggacatcgcacgtg

SEQ ID NO: 169116 - DNA, 50 bp, Artificial
  Synthetic oligonucleotide
atatagtgcgcagcgcttgggccgggacccaccgagagagcggggacacg

SEQ ID NO: 169117 - DNA, 50 bp, Artificial
  Synthetic oligonucleotide
agttgtagctgggctgctcagggtcgtacaggacgggaccggtcgttctg

SEQ ID NO: 169118 - DNA, 50 bp, Artificial
  Synthetic oligonucleotide
agttggggctccttgaccctcgcgctgcgttgttggccactggtcggaac

SEQ ID NO: 169119 - DNA, 50 bp, Artificial
  Synthetic oligonucleotide
aacgcaacccgagcgtctgcccatacaacgcgatcagacgtgtgaggtgg

SEQ ID NO: 169120 - DNA, 50 bp, Artificial
  Synthetic oligonucleotide
aagcgagacttggacgccttggcgcaaccaaccgtggaccacgaactgag

SEQ ID NO: 169121 - DNA, 55 bp, Artificial
  Synthetic oligonucleotide
agaccaacgccctggcatctcagcgctcaacgagcggtctccgcacataacgacg

SEQ ID NO: 169122 - DNA, 50 bp, Artificial
  Synthetic oligonucleotide
aatagggacccaaacgaccgcaggtccaggtcggaacgagcggccggcgg

SEQ ID NO: 169123 - DNA, 50 bp, Artificial
  Synthetic oligonucleotide
aatcccgcaaagcccgaccgggtattgggagaacaccaccactccctcac

SEQ ID NO: 169124 - DNA, 50 bp, Artificial
  Synthetic oligonucleotide
acaacgcgatcagacgtgtgaggtggcgcacgcacggggagtcagagccg

SEQ ID NO: 169125 - DNA, 50 bp, Artificial
  Synthetic oligonucleotide
accggctgtcggatcgtatgcgcgctcgttgaatcgtcacctagccctga

SEQ ID NO: 169126 - DNA, 50 bp, Artificial
  Synthetic oligonucleotide
acgcgttcaatgacggcgcgatcctacccgcccgataaaggtccatcgcc

SEQ ID NO: 169127 - DNA, 50 bp, Artificial
  Synthetic oligonucleotide
acggggagtcagagccggttcggggtgctatcgttgcgtgcgcaatcaaa

SEQ ID NO: 169128 - DNA, 50 bp, Artificial
  Synthetic oligonucleotide
acgggtcgaccgacttggtaggtaggtccgcgccgaacgtccatgccgtc

SEQ ID NO: 169129 - DNA, 50 bp, Artificial
  Synthetic oligonucleotide
acgtgtgcagaagcgagacttggacgccttggcgcaaccaaccgtggacc

SEQ ID NO: 169130 - DNA, 50 bp, Artificial
  Synthetic oligonucleotide
actcacgcccggtgagtggctgaatcccgcagaatcgccccggatcgacg

SEQ ID NO: 169131 - DNA, 50 bp, Artificial
  Synthetic oligonucleotide
actccagaccaacgccctggcatctcagcgctcaacgagcggtctccgca

SEQ ID NO: 169132 - DNA, 55 bp, Artificial
  Synthetic oligonucleotide
agaacgactgctccggcgtcgtgtcacgtctcagccccgctttgtgccgacactg

SEQ ID NO: 169133 - DNA, 50 bp, Artificial
  Synthetic oligonucleotide
agcaggcagtcgccgtatcacaccgtcaagcacgtcctcgaagccacgac

SEQ ID NO: 169134 - DNA, 50 bp, Artificial
  Synthetic oligonucleotide
agcgaattgacgcaggagacggacctggttacgcccgtggcgctctttag

SEQ ID NO: 169135 - DNA, 50 bp, Artificial
  Synthetic oligonucleotide
agcgcgcatgaagtcaagggacggcgtgcgaaagatgagggaaacctccg

SEQ ID NO: 169136 - DNA, 50 bp, Artificial
  Synthetic oligonucleotide
agcgcttgggccgggacccaccgagagagcggggacacgaacgatgatcc

SEQ ID NO: 169137 - DNA, 50 bp, Artificial
  Synthetic oligonucleotide
agggcacattggacctggcggaggtagcgggagcgacgggggtcaaaccc

SEQ ID NO: 169138 - DNA, 50 bp, Artificial
  Synthetic oligonucleotide
aggtaggtccgcgccgaacgtccatgccgtcttcgtctcatgccccctgc

SEQ ID NO: 169139 - DNA, 50 bp, Artificial
  Synthetic oligonucleotide
aggtccggcttccgaacaactgcctataccgcggcacgctgctaggccgc

SEQ ID NO: 169140 - DNA, 50 bp, Artificial
  Synthetic oligonucleotide
aggtctggagcaatcgggggatcggggcgtcgtgtcggtacagaacgtgg

SEQ ID NO: 169141 - DNA, 50 bp, Artificial
  Synthetic oligonucleotide
aggtgacatttctgcgttccctccggccgttgcgtcattgctatcccgct

SEQ ID NO: 169142 - DNA, 50 bp, Artificial
  Synthetic oligonucleotide
aggtggcgcacgcacggggagtcagagccggttcggggtgctatcgttgc

SEQ ID NO: 169143 - DNA, 55 bp, Artificial
  Synthetic oligonucleotide
cgggagcatcactgctgccgcgataggtccgaacccctgtggcggattcactttc

SEQ ID NO: 169144 - DNA, 50 bp, Artificial
  Synthetic oligonucleotide
agtgcccgcgtccgcagttgttgcctagcaccctccgcgactcgcagcgc

SEQ ID NO: 169145 - DNA, 55 bp, Artificial
  Synthetic oligonucleotide
cccggagggatgctcatccgtccaacagacgttcccgagcaaagcgagcttcgca

SEQ ID NO: 169146 - DNA, 54 bp, Artificial
  Synthetic oligonucleotide
actacatcgcacgagaccgctacgggttcctctacacgggtggggacgttccca

SEQ ID NO: 169147 - DNA, 55 bp, Artificial
  Synthetic oligonucleotide
ctctggattagtacgaactgaatgcgccatacactcctggtctcgtgcagcccgt

SEQ ID NO: 169148 - DNA, 58 bp, Artificial
  Synthetic oligonucleotide
tggaaggcgagacggacaggagctagggggaaccgcttgtcacgcttatatggaattc

SEQ ID NO: 169149 - DNA, 55 bp, Artificial
  Synthetic oligonucleotide
cggttctctttacgcctgatgaccttgcgtgcattaagagaagtgcctcatatcg

SEQ ID NO: 169150 - DNA, 55 bp, Artificial
  Synthetic oligonucleotide
cccgaaacaagccacgattcccatagaatatcaccggattcatcgtatagacgtg

SEQ ID NO: 169151 - DNA, 55 bp, Artificial
  Synthetic oligonucleotide
caagcgggcgagccaataagtagacgggcaacagcgtatggtagccacacgtggt

SEQ ID NO: 169152 - DNA, 55 bp, Artificial
  Synthetic oligonucleotide
caacaagtcgtgtccattggattgaagttcgggctgttgtcagacccagactgcg

SEQ ID NO: 169153 - DNA, 55 bp, Artificial
  Synthetic oligonucleotide
caaagctatccctaagcgaactccttgtcctagcgtatatccacggattccagcg

SEQ ID NO: 169154 - DNA, 55 bp, Artificial
  Synthetic oligonucleotide
attttgtctcggctacgatgagagggtaggtatgctcatttcttctaagggccgc

SEQ ID NO: 169155 - DNA, 55 bp, Artificial
  Synthetic oligonucleotide
caatcgattggcgcttataagagataggcattatgagccgcgcatatgtatgcac

SEQ ID NO: 169156 - DNA, 55 bp, Artificial
  Synthetic oligonucleotide
caatcggtgaacggtaggcgcgataatcctgcatgaaacgcaccttacgattctg

SEQ ID NO: 169157 - DNA, 55 bp, Artificial
  Synthetic oligonucleotide
caccagttcatttccacgaggtaatcgccgaagacccgaaggagcatccgatttc

SEQ ID NO: 169158 - DNA, 55 bp, Artificial
  Synthetic oligonucleotide
caccgtcgaaatgcgacggcggcgcatagcctgaatcttgaagcggtatccgtcg

SEQ ID NO: 169159 - DNA, 55 bp, Artificial
  Synthetic oligonucleotide
cacctcgttaagcagactataccttccccatcgatgctacatctgatcccctgca

SEQ ID NO: 169160 - DNA, 55 bp, Artificial
  Synthetic oligonucleotide
cgtacacatagtgtttcgtctcgcgcgcaatcatgcccgaaagcaaaagaaccac

SEQ ID NO: 169161 - DNA, 55 bp, Artificial
  Synthetic oligonucleotide
atgagggcgatatcccctctcgtcataattgttatagggcatagtccctctaaaa

SEQ ID NO: 169162 - DNA, 55 bp, Artificial
  Synthetic oligonucleotide
atgaccgggcaaagctacacggcctccgcgataatggcccgtactacggagccct

SEQ ID NO: 169163 - DNA, 55 bp, Artificial
  Synthetic oligonucleotide
atgaaatatcgtgaaaggttgccgtgaggcgcaaatttcggttgtgcttatgggg

SEQ ID NO: 169164 - DNA, 55 bp, Artificial
  Synthetic oligonucleotide
cacggtggcacaggtggttgttaatctactttatgtccccattctattgagaggc

SEQ ID NO: 169165 - DNA, 55 bp, Artificial
  Synthetic oligonucleotide
cactcggaccaccttagatagctctccctcgcagtcgcaaggggtgcaccacctc

SEQ ID NO: 169166 - DNA, 55 bp, Artificial
  Synthetic oligonucleotide
cagagaaacaacgactatacccatatagattggatcgaagccgaacatatatccg

SEQ ID NO: 169167 - DNA, 55 bp, Artificial
  Synthetic oligonucleotide
atcgcccagttggaacttggagatggaccgcagcgaccgttcgtactggctcaag

SEQ ID NO: 169168 - DNA, 55 bp, Artificial
  Synthetic oligonucleotide
cagatgacggggacgggtgatggcgttgattctgccgaggaaggcgcttagcgca

SEQ ID NO: 169169 - DNA, 55 bp, Artificial
  Synthetic oligonucleotide
cagccggagaatccacatgaaccaacacacgaacgcgggcttcaggaagtgcagc

SEQ ID NO: 169170 - DNA, 55 bp, Artificial
  Synthetic oligonucleotide
caggcaacgcgtgcagtcctagcagatgaggccatcccatggacgtatgagacgc

SEQ ID NO: 169171 - DNA, 53 bp, Artificial
  Synthetic oligonucleotide
cgtactctttccgactccgtttgccccaaggacgcccataacctcgccctctc

SEQ ID NO: 169172 - DNA, 55 bp, Artificial
  Synthetic oligonucleotide
cgaactctgccccatccttgccatggcgcttctgttgtccacccgagccgaatgg

SEQ ID NO: 169173 - DNA, 55 bp, Artificial
  Synthetic oligonucleotide
cgaatcgattcgcagaacctcaacggcatcagtcatagcagccagcccgcaccct

SEQ ID NO: 169174 - DNA, 55 bp, Artificial
  Synthetic oligonucleotide
cgaccccttacacgttagatgtaacagccgagtatgaaagactgtcgtccgccca

SEQ ID NO: 169175 - DNA, 55 bp, Artificial
  Synthetic oligonucleotide
cgacggagtatacggtcggtgtacctccggtgaatgtgtcgacgttctccagcca

SEQ ID NO: 169176 - DNA, 55 bp, Artificial
  Synthetic oligonucleotide
cgagggttcccggccgtcatggcactatcttgtgagagcaaattggctagaacgg

SEQ ID NO: 169177 - DNA, 55 bp, Artificial
  Synthetic oligonucleotide
cgagtaaggagctcattctcatggcgaaggtttcggaaatctacggctcgatggt

SEQ ID NO: 169178 - DNA, 55 bp, Artificial
  Synthetic oligonucleotide
cgagtgtcaagatttatgaggtaaagcctcgctggatcttttgcaaagtatcgac

SEQ ID NO: 169179 - DNA, 55 bp, Artificial
  Synthetic oligonucleotide
cgattactgcgtcgagaacgttcccaaacgcggccaggagtaggcctgatctagc

SEQ ID NO: 169180 - DNA, 55 bp, Artificial
  Synthetic oligonucleotide
cgattctccccgcaaacactctagtatgctaaagtacccagaagaccggcggagc

SEQ ID NO: 169181 - DNA, 55 bp, Artificial
  Synthetic oligonucleotide
cgccaagattccgccacctgacacctgacggagaatccagagtgcgatgtagtag

SEQ ID NO: 169182 - DNA, 55 bp, Artificial
  Synthetic oligonucleotide
cgtcattgctatgtgtcacgcgtcactccaacccatcggctctgcatctcgcccc

SEQ ID NO: 169183 - DNA, 55 bp, Artificial
  Synthetic oligonucleotide
cgccctgtacgtcgttcttgccggcagcgcttctgcgctacactggagtttcgac

SEQ ID NO: 169184 - DNA, 55 bp, Artificial
  Synthetic oligonucleotide
cgccgcgtaacgtctcgcacgttaatgacatagcgaacgagccggaacaccaacg

SEQ ID NO: 169185 - DNA, 55 bp, Artificial
  Synthetic oligonucleotide
agcaccccgttgctggtcgctccatcagccactcccaccgcgtctccaaccgtaa

SEQ ID NO: 169186 - DNA, 55 bp, Artificial
  Synthetic oligonucleotide
cgcgattagctgatgtgcgtccctatgctttcatcggactgggatgcaacgtagc

SEQ ID NO: 169187 - DNA, 55 bp, Artificial
  Synthetic oligonucleotide
cgcgccaacgacctgctagacagatacggatacgcgtgtgggtgccaaacgtttc

SEQ ID NO: 169188 - DNA, 55 bp, Artificial
  Synthetic oligonucleotide
cgcggaaatgatcgcgtaacctctgccgacagtaagcctcaatttcaggcgcttg

SEQ ID NO: 169189 - DNA, 55 bp, Artificial
  Synthetic oligonucleotide
agattcgtaagtatttctcgcaagagaacaagtctgatgatgcagagcgcggtcg

SEQ ID NO: 169190 - DNA, 55 bp, Artificial
  Synthetic oligonucleotide
cgcgtgtttgcgtgttactttcggctatgccagcttgaggaatgcgcggtaggcc

SEQ ID NO: 169191 - DNA, 55 bp, Artificial
  Synthetic oligonucleotide
agaggtgaatataagcgagccgcctggtcagatccaaaggttgaaaacccagcac

SEQ ID NO: 169192 - DNA, 55 bp, Artificial
  Synthetic oligonucleotide
cccgaaacatgcgcataggccgcatctccttgcgggttaagggcaaagaccccga

SEQ ID NO: 169193 - DNA, 55 bp, Artificial
  Synthetic oligonucleotide
actccgcatggcaagcgcgaatacaactgagaaaatgacgacgtcaacgctctcg

SEQ ID NO: 169194 - DNA, 54 bp, Artificial
  Synthetic oligonucleotide
cccgaggttaggttccttggagagtagcgtcagaggttaacacagcccgttatc

SEQ ID NO: 169195 - DNA, 55 bp, Artificial
  Synthetic oligonucleotide
cccgattgggcccataccttcaagaatgcggcgacgatttccacgctattccagg

SEQ ID NO: 169196 - DNA, 55 bp, Artificial
  Synthetic oligonucleotide
ccctatcaccctcaaggtcctgttgaatcgacaagcgacaggcacgcgactcgcg

SEQ ID NO: 169197 - DNA, 55 bp, Artificial
  Synthetic oligonucleotide
ccctcggctaaaccgccatgactggttaacacaatactaaccactgccttacctc

SEQ ID NO: 169198 - DNA, 55 bp, Artificial
  Synthetic oligonucleotide
ccgaagacctctcgacagatggcgtatgtcggacgcaccgaagcagctgaacgcg

SEQ ID NO: 169199 - DNA, 55 bp, Artificial
  Synthetic oligonucleotide
agcttgatgactctagtgcaaacgagagtcagcctggcatcgtggttacttggtg

SEQ ID NO: 169200 - DNA, 55 bp, Artificial
  Synthetic oligonucleotide
ccgaagcagcgatgactgaacagcaagatcgtcaaactataagcgagcgctgcga

SEQ ID NO: 169201 - DNA, 55 bp, Artificial
  Synthetic oligonucleotide
ccgaagtttcgggctcgacgtttatcaacgccatcacatttcgagacaatgtcac

SEQ ID NO: 169202 - DNA, 55 bp, Artificial
  Synthetic oligonucleotide
ccgaatgtctaggattccatgaattcgcttgcgtcacagtatccggctttcaagg

SEQ ID NO: 169203 - DNA, 55 bp, Artificial
  Synthetic oligonucleotide
ccgatgaggcatgtcggaggagtgtatgctggtttggggccaaagataagccaca

SEQ ID NO: 169204 - DNA, 55 bp, Artificial
  Synthetic oligonucleotide
actcacgttcgctcagagggaatcgtctactcgtcctacacctattttcgcaagc

SEQ ID NO: 169205 - DNA, 55 bp, Artificial
  Synthetic oligonucleotide
ccgggaagctctttctcgcaagccgttccttcgtagaacgcgcatagccggttct

SEQ ID NO: 169206 - DNA, 55 bp, Artificial
  Synthetic oligonucleotide
ccgggctttcttttgggaacctttcgacctttaggacgctgcagctatgagctcc

SEQ ID NO: 169207 - DNA, 55 bp, Artificial
  Synthetic oligonucleotide
ccgggtctcagcaggtcgctgtttaccgtgttatccttcgcccttatagtcacgc

SEQ ID NO: 169208 - DNA, 55 bp, Artificial
  Synthetic oligonucleotide
ccgtggcatcagattgacatggcggacgcgcctaatacgcctcatcgagcggagc

SEQ ID NO: 169209 - DNA, 55 bp, Artificial
  Synthetic oligonucleotide
ccgtgtagccatgcctccaagcgtatatatctgcacaatgtttgcctgctcaagc

SEQ ID NO: 169210 - DNA, 52 bp, Artificial
  Synthetic oligonucleotide
cctaccgtaaagttaagagctcccgatataagcgttacgattaccgccttag

SEQ ID NO: 169211 - DNA, 55 bp, Artificial
  Synthetic oligonucleotide
cctcccatgctgccgttggacaaaacgacgactggaagtttatgggctgggagta

SEQ ID NO: 169212 - DNA, 55 bp, Artificial
  Synthetic oligonucleotide
cctccgattggaggtatggtggacgttactcccatcattgctctgcttgtattac

SEQ ID NO: 169213 - DNA, 55 bp, Artificial
  Synthetic oligonucleotide
agcgcacccacaatccgttgcagagacgtgcgccagcgaagcaggaccgggatta

SEQ ID NO: 169214 - DNA, 55 bp, Artificial
  Synthetic oligonucleotide
gtataccacaatccggaacccaacaattccctatcgtagaactacgccgcactcg

SEQ ID NO: 169215 - DNA, 55 bp, Artificial
  Synthetic oligonucleotide
cgtggtacgactctctcgcgcctgatctcacacgaagagaagcgccatttccacg

SEQ ID NO: 169216 - DNA, 55 bp, Artificial
  Synthetic oligonucleotide
gtagagctaatgcacactgttgactcctacattcccacacctgctcgtgacaccg

SEQ ID NO: 169217 - DNA, 55 bp, Artificial
  Synthetic oligonucleotide
gtaagtacgtgttcggacacggttgcgagatgcatgatgtgggacggcctctcgc

SEQ ID NO: 169218 - DNA, 55 bp, Artificial
  Synthetic oligonucleotide
ggtgggacgtaaaatccgtgctgcagaaggcctgcgctcttcgaaaggcgcttcg

SEQ ID NO: 169219 - DNA, 55 bp, Artificial
  Synthetic oligonucleotide
ggtctgcggctttcgtgatataacccctgcgggcaaacacgtgccccgtccgaga

SEQ ID NO: 169220 - DNA, 55 bp, Artificial
  Synthetic oligonucleotide
ggtcaagttcgcatatagctcatgctcagcagtttaacgttggcgagaatttagc

SEQ ID NO: 169221 - DNA, 55 bp, Artificial
  Synthetic oligonucleotide
ggtcaacaccttatgaaagtagctgccgggaaaattatcttacaccaggagtgtg

SEQ ID NO: 169222 - DNA, 55 bp, Artificial
  Synthetic oligonucleotide
ggggtgacgtctgcggaggttccgtggcatctcattctggaatcgcgaatctggt

SEQ ID NO: 169223 - DNA, 55 bp, Artificial
  Synthetic oligonucleotide
ggggacaccatccaacgtgcgttttaagtcagcgacagtaatggtaagtgctcgc

SEQ ID NO: 169224 - DNA, 55 bp, Artificial
  Synthetic oligonucleotide
aagtcatataagcgcagtgaacacaatcggcgatataaacgagcgtttcagtctg

SEQ ID NO: 169225 - DNA, 55 bp, Artificial
  Synthetic oligonucleotide
gggaaactccacgcgcaccaaaccgaacgcccactattaccaggagttctgctgc

SEQ ID NO: 169226 - DNA, 55 bp, Artificial
  Synthetic oligonucleotide
cgttaccaacaacgtgtacgcgctcattgtaagccccttgctatttgtagctgtg

SEQ ID NO: 169227 - DNA, 55 bp, Artificial
  Synthetic oligonucleotide
aatacgctactaagacagtatactttctacgggcgtttgagggagcgcagtgtgc

SEQ ID NO: 169228 - DNA, 55 bp, Artificial
  Synthetic oligonucleotide
ggctctttaccttaaatgatggtggaacgcgcctgccttctcataccgatcgtct

SEQ ID NO: 169229 - DNA, 55 bp, Artificial
  Synthetic oligonucleotide
ggctccggtgcttgccaaggctgttcctgcgaggaagcttcgacgagatatgccc

SEQ ID NO: 169230 - DNA, 55 bp, Artificial
  Synthetic oligonucleotide
ggcgttctgatacggttagacttcctcagtccgaatggcaccacgtcctttcccc

SEQ ID NO: 169231 - DNA, 55 bp, Artificial
  Synthetic oligonucleotide
ggcgtcaccgtcgttttggtcttgatggtaagccccggcgtcttcttggcctgag

SEQ ID NO: 169232 - DNA, 55 bp, Artificial
  Synthetic oligonucleotide
acaccgaacgcctccctgaacgccctcgtgaatgctgtggaagacgcgtaaccgc

SEQ ID NO: 169233 - DNA, 55 bp, Artificial
  Synthetic oligonucleotide
ggacatcacgaagctcacagacgatcaaaaggcggacatttgcaagaagctcgct

SEQ ID NO: 169234 - DNA, 54 bp, Artificial
  Synthetic oligonucleotide
ggaccccttcctttcggtgttacgtatcgacagtccaatgttaccactcagtac

SEQ ID NO: 169235 - DNA, 55 bp, Artificial
  Synthetic oligonucleotide
ggacgccctgagtacatgcacttaccccgttgcatgaagtacaacgagagccgtt

SEQ ID NO: 169236 - DNA, 55 bp, Artificial
  Synthetic oligonucleotide
ggactttaccgcctcgaagctatcatacgactcaagcgccataggaggaggctcc

SEQ ID NO: 169237 - DNA, 55 bp, Artificial
  Synthetic oligonucleotide
cgttctgggatatcctcgtaaccctctctacgtcggttttggtcgcagtgccggc

SEQ ID NO: 169238 - DNA, 52 bp, Artificial
  Synthetic oligonucleotide
ggagaccgaagttccgccgggcactcgttcaataaacgtacggtcaaaagtg

SEQ ID NO: 169239 - DNA, 55 bp, Artificial
  Synthetic oligonucleotide
ggagccgaaaagagcgacgggcttgctgtcaaactttggagcgcactcgttccac

SEQ ID NO: 169240 - DNA, 55 bp, Artificial
  Synthetic oligonucleotide
ggaggctgggacaaataatcgcttagtgcggttcgaattgtgccaaatagtgcgt

SEQ ID NO: 169241 - DNA, 55 bp, Artificial
  Synthetic oligonucleotide
ggatcacgctggtaacgatgttactgaggtggctggcgcatccgtagaagaggca

SEQ ID NO: 169242 - DNA, 55 bp, Artificial
  Synthetic oligonucleotide
ggcatctgcgtagggctggctgctatactctgccgttaagaccggcagccttcgg

SEQ ID NO: 169243 - DNA, 55 bp, Artificial
  Synthetic oligonucleotide
ggcccatgacgtctagacgctccttatttatagcaatgatcagagggtctgttgc

SEQ ID NO: 169244 - DNA, 55 bp, Artificial
  Synthetic oligonucleotide
ggcccgctttgtgcgagcctttgctttctataatggggaacagtcaactccgggc

SEQ ID NO: 169245 - DNA, 55 bp, Artificial
  Synthetic oligonucleotide
ggcccttcaagctcacgacaaagcgctctcatacgacgtttcgcagtattgcgcc

SEQ ID NO: 169246 - DNA, 55 bp, Artificial
  Synthetic oligonucleotide
ggcctaccgcataaactgacaaacgtatacctgtcgggccgtatgacggacttgt

SEQ ID NO: 169247 - DNA, 55 bp, Artificial
  Synthetic oligonucleotide
ggcctcaaaagctggacggtgaatagcctaatctagacgacgcgaatgggctggc

SEQ ID NO: 169248 - DNA, 55 bp, Artificial
  Synthetic oligonucleotide
cgttttgggcaagcggagtgatgccggccccaattacgggcatgctgtatatggg

SEQ ID NO: 169249 - DNA, 55 bp, Artificial
  Synthetic oligonucleotide
ggcgagcgaaagcgcatagtaaaggagagcatggggtctccgtacctcatgcagc

SEQ ID NO: 169250 - DNA, 55 bp, Artificial
  Synthetic oligonucleotide
ggcgagtttaataccaactagaaactacgctcggagtgatctcgcagaccgttcc

SEQ ID NO: 169251 - DNA, 55 bp, Artificial
  Synthetic oligonucleotide
tcccagtagcggtggacgtcccaacagcagcggagacctcgacagcagcgaagac

SEQ ID NO: 169252 - DNA, 55 bp, Artificial
  Synthetic oligonucleotide
tccctcatatacggccctcccgtctcttgcgcccctcccggaaactgtccacatc

SEQ ID NO: 169253 - DNA, 55 bp, Artificial
  Synthetic oligonucleotide
tcgactcctaagtccgatcctataccagcttcgccagaggacgttgctactcgct

SEQ ID NO: 169254 - DNA, 55 bp, Artificial
  Synthetic oligonucleotide
tcgggaccccgtctgtgcctcaaagttcgtgtggagtatcctcatcaggacagct

SEQ ID NO: 169255 - DNA, 55 bp, Artificial
  Synthetic oligonucleotide
tctaatcgcggcctgtcattccgagctccgattccattgccttaaatatcgccgg

SEQ ID NO: 169256 - DNA, 55 bp, Artificial
  Synthetic oligonucleotide
tctatggggtgaggcatacgcacatatccccaatcaaaacacgcggaaaaccact

SEQ ID NO: 169257 - DNA, 55 bp, Artificial
  Synthetic oligonucleotide
tctgactctcccttcaagcgcccctatgcccgcaggcgaggcgaatgcgtacttg

SEQ ID NO: 169258 - DNA, 54 bp, Artificial
  Synthetic oligonucleotide
tctggggaacgtgaacggcaaacagtaccgtttgtattacaagtcgacgtacca

SEQ ID NO: 169259 - DNA, 56 bp, Artificial
  Synthetic oligonucleotide
agcctggcaagagtttacttcggccttaggtgccccaagcgaattgaggcaacgtc

SEQ ID NO: 169260 - DNA, 55 bp, Artificial
  Synthetic oligonucleotide
ctacctattctttcgggtgtatatcttgatgctcaaaaggactcccttacgctgc

SEQ ID NO: 169261 - DNA, 55 bp, Artificial
  Synthetic oligonucleotide
tctggttgcgttactgaggacgggcaggcgtttgttattggcgccgcacagtttg

SEQ ID NO: 169262 - DNA, 55 bp, Artificial
  Synthetic oligonucleotide
tgcagctcgtcggatatcgcacttgggatgtttcggagaactcgccccaaatcag

SEQ ID NO: 169263 - DNA, 55 bp, Artificial
  Synthetic oligonucleotide
tgtacgaaagcgcatcgatcgaacatccggaatagggtcagcctacataagtgtt

SEQ ID NO: 169264 - DNA, 55 bp, Artificial
  Synthetic oligonucleotide
tgtcgaggtgcgtactaagcatccattgactagatagttgccgtaattaatccaa

SEQ ID NO: 169265 - DNA, 55 bp, Artificial
  Synthetic oligonucleotide
ttcgggtacttacaaggtcttactatccggcctctgagacacggttgttgaggtc

SEQ ID NO: 169266 - DNA, 55 bp, Artificial
  Synthetic oligonucleotide
ttgagtcgcagttaattcgatgttcgggacgacggtccaagatgtcggattacga

SEQ ID NO: 169267 - DNA, 55 bp, Artificial
  Synthetic oligonucleotide
tttacgagacgtgcgcttttattgtattagtacgtgtgtttcttaggcgctctcc

SEQ ID NO: 169268 - DNA, 53 bp, Artificial
  Synthetic oligonucleotide
tttcccttaacctggtggcctcgccgagtttcctcgtactccgtcacctccag

SEQ ID NO: 169269 - DNA, 55 bp, Artificial
  Synthetic oligonucleotide
ttttgaccaccgagaggtaactttcgcggcaggtttatgcccgctccgcgacgcc

SEQ ID NO: 169270 - DNA, 55 bp, Artificial
  Synthetic oligonucleotide
gtatagcgccgatatgcgacgaatcgcctagatgttgagcgcgtggtaggtcaca

SEQ ID NO: 169271 - DNA, 55 bp, Artificial
  Synthetic oligonucleotide
ctatcggaacgatttcataggcccttcggtggaccatacccggcaaatgtcctgc

SEQ ID NO: 169272 - DNA, 55 bp, Artificial
  Synthetic oligonucleotide
gtattagtttgcacaatgcgaatcaaatggctagcgcaacgtcccacacccactc

SEQ ID NO: 169273 - DNA, 55 bp, Artificial
  Synthetic oligonucleotide
gtcaaataccacgtctctgacctggtggtttgtggaatctattccgttacgctaa

SEQ ID NO: 169274 - DNA, 54 bp, Artificial
  Synthetic oligonucleotide
gtccttccaagggttattaccgcacccattctcgtgaactcgtccctcccgtgc

SEQ ID NO: 169275 - DNA, 55 bp, Artificial
  Synthetic oligonucleotide
gtcgtcccttgtacgaagctcagaaagggcatgtacctgcgtaaccgagagaatg

SEQ ID NO: 169276 - DNA, 55 bp, Artificial
  Synthetic oligonucleotide
gtctaggcaaacgcacatcctttgccactcagcgcggaattggggccttagcggg

SEQ ID NO: 169277 - DNA, 55 bp, Artificial
  Synthetic oligonucleotide
gtgcggacgcgttcgattccagctagacttgcaacggagcaaactttgcacaacg

SEQ ID NO: 169278 - DNA, 55 bp, Artificial
  Synthetic oligonucleotide
gtgtaacaagctccatatggtcaaaacctcgataacgatatgctttacgcgttgc

SEQ ID NO: 169279 - DNA, 55 bp, Artificial
  Synthetic oligonucleotide
gttcatgcgacgtgcgacgtcagtgttcatgtagcctcggcgcttcgtggtagag

SEQ ID NO: 169280 - DNA, 55 bp, Artificial
  Synthetic oligonucleotide
gttccgtcgaccgtagcgtatgtatcgtcgtctaccgagaacaacgcttaattca

SEQ ID NO: 169281 - DNA, 55 bp, Artificial
  Synthetic oligonucleotide
gttccgttagagtcagtaggagttgcacctttacaaattgcatcgacaacgtcca

SEQ ID NO: 169282 - DNA, 55 bp, Artificial
  Synthetic oligonucleotide
ctcacccgtctgaggtcctttaacaatcgtgagcacgggatgagaggggtggtct

SEQ ID NO: 169283 - DNA, 55 bp, Artificial
  Synthetic oligonucleotide
taaatgcgacgctagcttccttagcgttggcggatacttccatctgttgtacggg

SEQ ID NO: 169284 - DNA, 55 bp, Artificial
  Synthetic oligonucleotide
tacccgttctccgctcgagtgggctcaaggagccccatgtcctcgtaatggcgga

SEQ ID NO: 169285 - DNA, 55 bp, Artificial
  Synthetic oligonucleotide
tagatcgattcaccggtacaagcaatcggtcatggggattaaaggcgcgatgtag

SEQ ID NO: 169286 - DNA, 55 bp, Artificial
  Synthetic oligonucleotide
tagatttgttaacgttgtccttcaatttatgacgggcttactagcggagaccgac

SEQ ID NO: 169287 - DNA, 55 bp, Artificial
  Synthetic oligonucleotide
tagttgccgtctacagaaagcaagaccgctatactaaggtgtattgcatatacct

SEQ ID NO: 169288 - DNA, 55 bp, Artificial
  Synthetic oligonucleotide
tcaggtggttcgggttggtctcgcaggaaacctcctggatggagaattcgctgcg

SEQ ID NO: 169289 - DNA, 55 bp, Artificial
  Synthetic oligonucleotide
gctcgcatgccacacgcagataccgttcatggtcatgtacaccggattgtttcga

SEQ ID NO: 169290 - DNA, 55 bp, Artificial
  Synthetic oligonucleotide
gctcctgctatcacgagtttcagacgagccttcatcgcgcactccttccgagcgg

SEQ ID NO: 169291 - DNA, 55 bp, Artificial
  Synthetic oligonucleotide
gcgttgggaatgtctcgatattttaacggtgcttgtcgaatatgactcgcgtggg

SEQ ID NO: 169292 - DNA, 55 bp, Artificial
  Synthetic oligonucleotide
gcgtgcatattttgattcggacatcgctattgaggacgctctcttgaagcaagca

SEQ ID NO: 169293 - DNA, 55 bp, Artificial
  Synthetic oligonucleotide
cgcgttcgctctcggagttttggagggctgggtcttttggcgcacgggcaagctt

SEQ ID NO: 169294 - DNA, 55 bp, Artificial
  Synthetic oligonucleotide
gcggtgtcatgccatcggtcctgttctgtcccgatcatcttgacatggtgaagag

SEQ ID NO: 169295 - DNA, 49 bp, Artificial
  Synthetic oligonucleotide
gcggggtcctttctttaagggtggggctttaaacgtgagggccggtgcc

SEQ ID NO: 169296 - DNA, 55 bp, Artificial
  Synthetic oligonucleotide
gcgccttgaaagcgcatcttacaggaatttgtagtagacggtgcgaacgccccag

SEQ ID NO: 169297 - DNA, 54 bp, Artificial
  Synthetic oligonucleotide
gcgaccatctccgttcctgcgttttaaaccgggacaagtatacccgtcaacata

SEQ ID NO: 169298 - DNA, 55 bp, Artificial
  Synthetic oligonucleotide
gcgacaattgacccatcggaaagacgaggccttaggtataggggtaatctatggg

SEQ ID NO: 169299 - DNA, 55 bp, Artificial
  Synthetic oligonucleotide
gcgaagcactcgttggcatgatgtactggccaaccgcggtagttgataagctggc

SEQ ID NO: 169300 - DNA, 55 bp, Artificial
  Synthetic oligonucleotide
gccttccgatttgcaaatgtttgagcgatctaacgacggcttatgggtgcagttt

SEQ ID NO: 169301 - DNA, 55 bp, Artificial
  Synthetic oligonucleotide
acccatgttcgatactacgagtgcgtgcggacagaagtcaaatgccgcagggagc

SEQ ID NO: 169302 - DNA, 55 bp, Artificial
  Synthetic oligonucleotide
gcctcgagttcactagggaatgacatgacccacgaatgagcatgtgtgcccgaaa

SEQ ID NO: 169303 - DNA, 55 bp, Artificial
  Synthetic oligonucleotide
gcctcatagcgaggagttgctagcataacgttatagccatcgaccacaagcagcg

SEQ ID NO: 169304 - DNA, 55 bp, Artificial
  Synthetic oligonucleotide
cgctatagactcacgcaagcgcgaagtagttggacgcgtgacgtttcgtccctgc

SEQ ID NO: 169305 - DNA, 55 bp, Artificial
  Synthetic oligonucleotide
gccgttacggcagaattatacgatgaagcgcgtcggaagaaccaattcacgctcc

SEQ ID NO: 169306 - DNA, 55 bp, Artificial
  Synthetic oligonucleotide
gccgcctgcgataccgagatcgggtagatgcaaaagcgagcgcacgtgccgttct

SEQ ID NO: 169307 - DNA, 55 bp, Artificial
  Synthetic oligonucleotide
gccgacgatcccacagtatgacggggaagtacgttgctaatacaacattagcgct

SEQ ID NO: 169308 - DNA, 55 bp, Artificial
  Synthetic oligonucleotide
gccgaaggattgagcgcctcctggtatacgaaatcggatccttctgtttgccagg

SEQ ID NO: 169309 - DNA, 55 bp, Artificial
  Synthetic oligonucleotide
gccgaaggaggtgaacctcacaccgcacctcgtgcctcacgcgataaccctgatc

SEQ ID NO: 169310 - DNA, 55 bp, Artificial
  Synthetic oligonucleotide
gccagaacgcggtttcggtattcaccctgaatagcttgatcatgcgttcgaacag

SEQ ID NO: 169311 - DNA, 55 bp, Artificial
  Synthetic oligonucleotide
gccaacgagagtgcgaggtcatggagcttatcgttcaaggattcagctacaaggc

SEQ ID NO: 169312 - DNA, 55 bp, Artificial
  Synthetic oligonucleotide
gccaacagactctcggagggtcctcgcaacgcactcgtgcatgaagtggtagccc

SEQ ID NO: 169313 - DNA, 55 bp, Artificial
  Synthetic oligonucleotide
gcattaaccggccgtccctctgccagcgactgccagccttctagcaacagaccaa

SEQ ID NO: 169314 - DNA, 55 bp, Artificial
  Synthetic oligonucleotide
gcatctttgttgcacaacaaactcacagtcgcacggggaaattatgactaccccg

SEQ ID NO: 169315 - DNA, 55 bp, Artificial
  Synthetic oligonucleotide
cgctcatgaccagcatgtctttatggaatcgcaattgaatatcggccatacaggc

SEQ ID NO: 169316 - DNA, 55 bp, Artificial
  Synthetic oligonucleotide
gcatcttacacactgtttccattgggctagtcccagttatctcgtgcggtacgta

SEQ ID NO: 169317 - DNA, 55 bp, Artificial
  Synthetic oligonucleotide
gcagcggctagttcatctgagctgggtagtactggctgtaaggcgagccattcac

SEQ ID NO: 169318 - DNA, 55 bp, Artificial
  Synthetic oligonucleotide
gctgtggagcatttcgagtaggtgctctaggcgagtattccaagcgggcgagcca

SEQ ID NO: 169319 - DNA, 55 bp, Artificial
  Synthetic oligonucleotide
gctttcctcatgcagatcacgtgcactccttcggactgtatacggggaactatcc

SEQ ID NO: 169320 - DNA, 55 bp, Artificial
  Synthetic oligonucleotide
ggaagtcccaactccatagaagtgctccagcgccacaagtccctcgtgcgtcaca

SEQ ID NO: 169321 - DNA, 55 bp, Artificial
  Synthetic oligonucleotide
gctgggttgataagccttctatcgagcttactaatacccttatgcacgaagccga

SEQ ID NO: 169322 - DNA, 55 bp, Artificial
  Synthetic oligonucleotide
gctgctactcgggaggagtaatagcgaaatccgaccgtcttcgtgagtttgcgag

SEQ ID NO: 169323 - DNA, 55 bp, Artificial
  Synthetic oligonucleotide
ggaatcaaagcccggagcggggaactcaattcatggctcgccgagatgtcggata

SEQ ID NO: 169324 - DNA, 54 bp, Artificial
  Synthetic oligonucleotide
gctgacggagcgtcaacggaggaggtattattgtccgggttgttttggacgggc

SEQ ID NO: 169325 - DNA, 54 bp, Artificial
  Synthetic oligonucleotide
agagcttaagacgggcaagctggttcgcgatgcttcttacaccgattcgcgtat

SEQ ID NO: 169326 - DNA, 55 bp, Artificial
  Synthetic oligonucleotide
cgctgtgcaaattcgggtgccgtttcctctcccatcgcccagccccgacgaatct

SEQ ID NO: 169327 - DNA, 54 bp, Artificial
  Synthetic oligonucleotide
cgtagcaagatacataaacgccacgtccaaatacgacgtgtggttggctacgac

SEQ ID NO: 169328 - DNA, 54 bp, Artificial
  Synthetic oligonucleotide
agatcaagtcatccgggccgggagcctctatcctcaagtcgtgagcggccttct

SEQ ID NO: 169329 - DNA, 54 bp, Artificial
  Synthetic oligonucleotide
aaaacttcgccgaatcctgaagttttgtcgagttgtgctaccgtttctcgttga

SEQ ID NO: 169330 - DNA, 54 bp, Artificial
  Synthetic oligonucleotide
tcggaaaacaaccgtggaccaatgagcgaagagcgttgcgcgatcgaccttact

SEQ ID NO: 169331 - DNA, 54 bp, Artificial
  Synthetic oligonucleotide
tcgcttgaagaatcccaggtcgtacggctgtatcggttcatcgcgctgcctctt

SEQ ID NO: 169332 - DNA, 54 bp, Artificial
  Synthetic oligonucleotide
tcgcgccgtatcacgtgacgtctcaattactgcctaccaccctgaacgttcagc

SEQ ID NO: 169333 - DNA, 54 bp, Artificial
  Synthetic oligonucleotide
gtatgcctcgcaggacaggcgtaaacccgtttgattcacaatgccccatcctgt

SEQ ID NO: 169334 - DNA, 54 bp, Artificial
  Synthetic oligonucleotide
ccccgcagtactcgaaaccccatacgcgatgcagcaggacctctcgactgtacg

SEQ ID NO: 169335 - DNA, 54 bp, Artificial
  Synthetic oligonucleotide
ccccttcgaccagagcctcatcatgattgccgagatgttcctatcccagatttc

SEQ ID NO: 169336 - DNA, 54 bp, Artificial
  Synthetic oligonucleotide
agcatggctcgtagcatggcgcgggcgagagtaagttgggatgccacacgtact

SEQ ID NO: 169337 - DNA, 55 bp, Artificial
  Synthetic oligonucleotide
cgcttcatgtgggcgttaattcaagtgttgagcataaatgtcttgcagagattaa

SEQ ID NO: 169338 - DNA, 54 bp, Artificial
  Synthetic oligonucleotide
cgcaggggatttagaccggtgcacatggcttgttacgacatactatgatacgcc

SEQ ID NO: 169339 - DNA, 54 bp, Artificial
  Synthetic oligonucleotide
gtccaagatgaccacaccgcatgtcccgtctacgatcgcggtcgtgccccgacg

SEQ ID NO: 169340 - DNA, 54 bp, Artificial
  Synthetic oligonucleotide
cgattatctcggactctggtatgtgttcgtaagtataggtgcgctgtcggccct

SEQ ID NO: 169341 - DNA, 54 bp, Artificial
  Synthetic oligonucleotide
aaccgtgtagcgattgccgtcgttgtaaccctcggaccagtactgtacgcgatc

SEQ ID NO: 169342 - DNA, 54 bp, Artificial
  Synthetic oligonucleotide
gtcgcacctcagaagaggttattaagctttacgcaactaacggttatcatccta

SEQ ID NO: 169343 - DNA, 54 bp, Artificial
  Synthetic oligonucleotide
ctgcaggaccgttcgcgtttaggaattcgaacatgcgaaaattttgcagcggtt

SEQ ID NO: 169344 - DNA, 54 bp, Artificial
  Synthetic oligonucleotide
tcttctgactcgcgatgaaccagcgaaggtggtgtgcgaaaacatggctgagaa

SEQ ID NO: 169345 - DNA, 54 bp, Artificial
  Synthetic oligonucleotide
ggcgcacggatacgctcgttgcattcgtccacgatattctacccgcacggggaa

SEQ ID NO: 169346 - DNA, 54 bp, Artificial
  Synthetic oligonucleotide
gcacgaatatcctgtccaagcgaactcctaacatgggtattactcctatagaat

SEQ ID NO: 169347 - DNA, 54 bp, Artificial
  Synthetic oligonucleotide
cggcttggtcggaaacaatagcctcgattaaacgatgagccgccccgtagggtg

SEQ ID NO: 169348 - DNA, 55 bp, Artificial
  Synthetic oligonucleotide
cggaacttcggcataccatatcccttgcagcgaaccacctactcgttttggcagc

SEQ ID NO: 169349 - DNA, 54 bp, Artificial
  Synthetic oligonucleotide
acgcctgaagatcctgcgaaatggaccctgatttagtcctaacttcgtaagtga

SEQ ID NO: 169350 - DNA, 54 bp, Artificial
  Synthetic oligonucleotide
atcgtaagtacagtacacgcgttgtgatgagctttagtttctgcgacaaggtcg

SEQ ID NO: 169351 - DNA, 54 bp, Artificial
  Synthetic oligonucleotide
cttttgagaccgatgggtatacgtacgattctcgtgtccgctataatggagcca

SEQ ID NO: 169352 - DNA, 54 bp, Artificial
  Synthetic oligonucleotide
atgagacgcacgcctaaaagcagccgcatataagcacgtacataggcgctcatg

SEQ ID NO: 169353 - DNA, 54 bp, Artificial
  Synthetic oligonucleotide
ttgaatttgcgtaacctcttgagcgctatacaaaagcccggactttcaacggtc

SEQ ID NO: 169354 - DNA, 45 bp, Artificial
  Synthetic oligonucleotide
ccccgttaaaggtcgggacgtaacccgataacgaaccgggaacgg

SEQ ID NO: 169355 - DNA, 53 bp, Artificial
  Synthetic oligonucleotide
ttaactctgacgagggctttcgtgaatgggtcgttgctcggacgatcatcgac

SEQ ID NO: 169356 - DNA, 53 bp, Artificial
  Synthetic oligonucleotide
cttgtttgtgactacttatctcatactgcacaaatagttccctcgccgattct

SEQ ID NO: 169357 - DNA, 53 bp, Artificial
  Synthetic oligonucleotide
tacgggtcgagctccgatgtcgcatcgcacttcaaatcccttcccgtggaggt

SEQ ID NO: 169358 - DNA, 53 bp, Artificial
  Synthetic oligonucleotide
atgtcatgtggtgggctgtttggtctttacactgaggtaattgctccgccacc

SEQ ID NO: 169359 - DNA, 53 bp, Artificial
  Synthetic oligonucleotide
cggaagtataccgtggtaacgctctgtacggtttggggagggtgcttcgcaat

SEQ ID NO: 169360 - DNA, 53 bp, Artificial
  Synthetic oligonucleotide
tacccatcgataggcaattcctgcgtgtcggtccaagattgccatccgttcag

SEQ ID NO: 169361 - DNA, 53 bp, Artificial
  Synthetic oligonucleotide
cgtgaaaacgagcgataggggatagtgccccgacgtatggagcggcgcccata

SEQ ID NO: 169362 - DNA, 53 bp, Artificial
  Synthetic oligonucleotide
taaggatggcatcgtaggttccaagcgcatcttgaatggcacttaccagatct

SEQ ID NO: 169363 - DNA, 53 bp, Artificial
  Synthetic oligonucleotide
acagttgcatcaaagagcttgcaagttaccaaacctacttgcgaacgttaagg

SEQ ID NO: 169364 - DNA, 53 bp, Artificial
  Synthetic oligonucleotide
ctgcatacgtgcatcctcggcatgcggggacgactgcggcgcctgatcggtaa

SEQ ID NO: 169365 - DNA, 53 bp, Artificial
  Synthetic oligonucleotide
cgcctcccaatttacctgcacaatccttcggtgacaaagcgcgctacatgacg

SEQ ID NO: 169366 - DNA, 53 bp, Artificial
  Synthetic oligonucleotide
tgtttatcgtcgcgccattgtaggtgacatcggaacggtagaacccctccgat

SEQ ID NO: 169367 - DNA, 53 bp, Artificial
  Synthetic oligonucleotide
tccgctcgctatggttcttcatgtgcatgccgtcctccgtgcgcctagaaagc

SEQ ID NO: 169368 - DNA, 53 bp, Artificial
  Synthetic oligonucleotide
ccccagccgtccccagagcgatactgcggccttctaaagtgcatcctcgccaa

SEQ ID NO: 169369 - DNA, 53 bp, Artificial
  Synthetic oligonucleotide
agatgtaccggtcgtaaaagacctgtgggtcgaggaaggtgcgttgcgaggcg

SEQ ID NO: 169370 - DNA, 59 bp, Artificial
  Synthetic oligonucleotide
tccgcatgcctagcctggcaagagtttacttcggccttaggtgccccaagcgaattgag

SEQ ID NO: 169371 - DNA, 55 bp, Artificial
  Synthetic oligonucleotide
cggagagccatcgagtgcgcacaaccaagactcttttgaaccatctcagatcccc

SEQ ID NO: 169372 - DNA, 53 bp, Artificial
  Synthetic oligonucleotide
atcatttaggtctccatgtgcgtaaagtaccctttcgggacgtatgggatcaa

SEQ ID NO: 169373 - DNA, 52 bp, Artificial
  Synthetic oligonucleotide
cgttcgtccacatgccggtattcgaaacaaactgcgttcccgactccttatt

SEQ ID NO: 169374 - DNA, 52 bp, Artificial
  Synthetic oligonucleotide
ttcccgcatccatacgcattcctttccgaaagttacctcaggcttacattcg

SEQ ID NO: 169375 - DNA, 52 bp, Artificial
  Synthetic oligonucleotide
caaccctccgttcggataccgctatcacgcgctcgctgattcgggattcaaa

SEQ ID NO: 169376 - DNA, 52 bp, Artificial
  Synthetic oligonucleotide
tcgcaaccgaaggccacctcgctcgtggtattaagggtatagaactgcgtgc

SEQ ID NO: 169377 - DNA, 52 bp, Artificial
  Synthetic oligonucleotide
taccggaagcacactgcagacaacgattgggattggcccacggttgctcctt

SEQ ID NO: 169378 - DNA, 52 bp, Artificial
  Synthetic oligonucleotide
tgggagggcgaccgttccagcgaatggtagcggaatcccgtgccgtggatgc

SEQ ID NO: 169379 - DNA, 52 bp, Artificial
  Synthetic oligonucleotide
atcgagatcatggccatagagaagctgaccgtgttcaccttggcagagagct

SEQ ID NO: 169380 - DNA, 52 bp, Artificial
  Synthetic oligonucleotide
ctcaagcttctgacgctgacggttcttatagccttcgacgtctaccaccacg

SEQ ID NO: 169381 - DNA, 52 bp, Artificial
  Synthetic oligonucleotide
agttcgcttgtgttagaatctaaggccgtctacgttcgcgtggaggcgacat

SEQ ID NO: 169382 - DNA, 55 bp, Artificial
  Synthetic oligonucleotide
cggagcgtgcatcacgccatagctctacttcatctctgtcgggcatataggctac

SEQ ID NO: 169383 - DNA, 52 bp, Artificial
  Synthetic oligonucleotide
cggtagaacggtacaacgagctatgcgatgcacgctacgatgaggacttcca

SEQ ID NO: 169384 - DNA, 52 bp, Artificial
  Synthetic oligonucleotide
cttcgtgctcatagcggtgttccaggctacgtctccctcatgaagaccggaa

SEQ ID NO: 169385 - DNA, 52 bp, Artificial
  Synthetic oligonucleotide
acatgtgcgatgacgcggagcccgaaatgtgcgacggtacggtgacttggta

SEQ ID NO: 169386 - DNA, 52 bp, Artificial
  Synthetic oligonucleotide
gaagtagtgcacaagctcccgcataacgtccatgaactggtataacggccgc

SEQ ID NO: 169387 - DNA, 52 bp, Artificial
  Synthetic oligonucleotide
cgcgttatcgtaattattgtggcgaccgctcttctatttctgccgcatattg

SEQ ID NO: 169388 - DNA, 52 bp, Artificial
  Synthetic oligonucleotide
gacagtagcggaatcgatgaacgttgagtgttcccgaagatctcatagcgat

SEQ ID NO: 169389 - DNA, 52 bp, Artificial
  Synthetic oligonucleotide
ggatcctcctatcgatgacaacgctatagcttctacccatacgcgctgctcg

SEQ ID NO: 169390 - DNA, 51 bp, Artificial
  Synthetic oligonucleotide
tcgagacgcaggcacgtcatcccgaagcacgaaagccatgctgagcgcaag

SEQ ID NO: 169391 - DNA, 51 bp, Artificial
  Synthetic oligonucleotide
gcgccgatacttcacttacacccatatggagtcgggacacaggtcaaaacg

SEQ ID NO: 169392 - DNA, 51 bp, Artificial
  Synthetic oligonucleotide
gtaactacatcctttattcgcaggacgccctctctgactgggacggctatg

SEQ ID NO: 169393 - DNA, 55 bp, Artificial
  Synthetic oligonucleotide
cggcgcccgtattcatttaatgagatggtagcaaactcgagccgggctagcgcag

SEQ ID NO: 169394 - DNA, 51 bp, Artificial
  Synthetic oligonucleotide
gatgcccacgtccattcaagcacaccgcgtgcaagttccaaacgcgcttcg

SEQ ID NO: 169395 - DNA, 51 bp, Artificial
  Synthetic oligonucleotide
acgtgagggaaagcggaaaaggggcgagatcgggcgcattggcgcttcgca

SEQ ID NO: 169396 - DNA, 51 bp, Artificial
  Synthetic oligonucleotide
agtggtcttgccgcggctaaactgcatctcgtaaatcttgccgtcgcgagc

SEQ ID NO: 169397 - DNA, 51 bp, Artificial
  Synthetic oligonucleotide
ggtgctttatcgttttgggcaagcggagtgatgccggccccaattacgggc

SEQ ID NO: 169398 - DNA, 51 bp, Artificial
  Synthetic oligonucleotide
agttgccatgcgcgtctgtatgcgatgcccacgtccattcaagcacaccgc

SEQ ID NO: 169399 - DNA, 51 bp, Artificial
  Synthetic oligonucleotide
catccggtgcgggacgccttaaagcgcagaatagaaccgcgtcgaaccatg

SEQ ID NO: 169400 - DNA, 51 bp, Artificial
  Synthetic oligonucleotide
gcaatacggacaggcgcgcaaacccgttggaactctactgccacaacgggc

SEQ ID NO: 169401 - DNA, 51 bp, Artificial
  Synthetic oligonucleotide
agagcgctcaaagggttattacggagtaggctctcgtaccttccgcggtat

SEQ ID NO: 169402 - DNA, 51 bp, Artificial
  Synthetic oligonucleotide
tgcagcgctcaatgccgcccctttgacgaagctgcgacggttcagatttcc

SEQ ID NO: 169403 - DNA, 51 bp, Artificial
  Synthetic oligonucleotide
cagggcacaggttttcaccttcgctttgttgtgcctcggcggccttgctta

SEQ ID NO: 169404 - DNA, 53 bp, Artificial
  Synthetic oligonucleotide
agaccgatgctcgtaatggtctcggtaaaagtttcgttaacctggctttgaac

SEQ ID NO: 169405 - DNA, 51 bp, Artificial
  Synthetic oligonucleotide
tgctgtctgtcgttatgaggtaagatggtccctgtgatcgaggggtcacac

SEQ ID NO: 169406 - DNA, 51 bp, Artificial
  Synthetic oligonucleotide
gagcgtaggcactctgctgctttaatagtcaccatttctcgcggaaccgag

SEQ ID NO: 169407 - DNA, 51 bp, Artificial
  Synthetic oligonucleotide
ggggaaatggaatcggagatatggtcttcactcctcctacgtggcttgtag

SEQ ID NO: 169408 - DNA, 51 bp, Artificial
  Synthetic oligonucleotide
atcggtatgaaacggcggcacatccacggctccttcctcgcgtttccgctc

SEQ ID NO: 169409 - DNA, 51 bp, Artificial
  Synthetic oligonucleotide
aagtcggtgctggtcataccaaagtgcacccaacggctaggatgtggcgcc

SEQ ID NO: 169410 - DNA, 51 bp, Artificial
  Synthetic oligonucleotide
ggctgcgaagttgccattgcgcacaaaagtcgtcccaagcacaatgctgcc

SEQ ID NO: 169411 - DNA, 51 bp, Artificial
  Synthetic oligonucleotide
cacgccagtctttaaccgttgaaggcgattggtcgggcgcgggcttttggt

SEQ ID NO: 169412 - DNA, 51 bp, Artificial
  Synthetic oligonucleotide
agaagattgggggcggccatgttcccagtaagaaccaccgctcgcttcgat

SEQ ID NO: 169413 - DNA, 51 bp, Artificial
  Synthetic oligonucleotide
ctatgcgcgctcaccctaggcgcggttctcattcgcaccacgtctaccgtg

SEQ ID NO: 169414 - DNA, 51 bp, Artificial
  Synthetic oligonucleotide
atggaggtattgcatgtcaggaatcaaaaggtcgcggatttcccgtctcac

SEQ ID NO: 169415 - DNA, 55 bp, Artificial
  Synthetic oligonucleotide
cggctttaggatcccgctccgacgctaagcgaacgccttgaatttaggctccctc

SEQ ID NO: 169416 - DNA, 51 bp, Artificial
  Synthetic oligonucleotide
agaaagacgccgctaatacggtggacccgctgcctgcaagcgagagggaag

SEQ ID NO: 169417 - DNA, 51 bp, Artificial
  Synthetic oligonucleotide
ttgttgtcaaggaggcgacaagccgccggactagtgacggaaatgtgatat

SEQ ID NO: 169418 - DNA, 51 bp, Artificial
  Synthetic oligonucleotide
attgcctttcggttgtacacgtctgctgaggtgactcgctgcacgatgcat

SEQ ID NO: 169419 - DNA, 51 bp, Artificial
  Synthetic oligonucleotide
actattaccgagacgaggtcaacccaaagctccattatgcaagggtacgag

SEQ ID NO: 169420 - DNA, 51 bp, Artificial
  Synthetic oligonucleotide
taagcaccgaacgcgcacctgcttcgtcgatgggggtaccagcttgtctaa

SEQ ID NO: 169421 - DNA, 51 bp, Artificial
  Synthetic oligonucleotide
acgcaatggcaacgtggcatgatgtgcaacaggcgaaggtaggtccgacgt

SEQ ID NO: 169422 - DNA, 51 bp, Artificial
  Synthetic oligonucleotide
gtccttgccacgccagtctttaaccgttgaaggcgattggtcgggcgcggg

SEQ ID NO: 169423 - DNA, 51 bp, Artificial
  Synthetic oligonucleotide
tagatcagcaagcgatgttgcacctaatccgcgtttagctgggcggctccc

SEQ ID NO: 169424 - DNA, 51 bp, Artificial
  Synthetic oligonucleotide
gatccccggcctattctttatagaacgtgaagccacgtgtcacctccaaaa

SEQ ID NO: 169425 - DNA, 51 bp, Artificial
  Synthetic oligonucleotide
acgaatctctgcgggcttcattacttgtcctccccgttcttagcgcgggta

SEQ ID NO: 169426 - DNA, 55 bp, Artificial
  Synthetic oligonucleotide
agaccaaaacgcggacacaagtgtacgtgcttaaccgcgcatgctatatgttatg

SEQ ID NO: 169427 - DNA, 51 bp, Artificial
  Synthetic oligonucleotide
aacctgcgcgtcggtaatattggcgccccacaccactatggtcttcgcgtt

SEQ ID NO: 169428 - DNA, 51 bp, Artificial
  Synthetic oligonucleotide
acgaagagccgtcgacgcaaaacgagggcacagagcgccccttgctcacag

SEQ ID NO: 169429 - DNA, 51 bp, Artificial
  Synthetic oligonucleotide
gcttcccatcgcgtttgggcttcgctgcaaccaagcgacttttgcaagggg

SEQ ID NO: 169430 - DNA, 51 bp, Artificial
  Synthetic oligonucleotide
cgcccagcgggttttatcccgagcactaaagctcgccagtcgcgcaaaacg

SEQ ID NO: 169431 - DNA, 51 bp, Artificial
  Synthetic oligonucleotide
gacggaacgcgatgtcgatagagaggcccgatgatccggattgtcgcttat

SEQ ID NO: 169432 - DNA, 51 bp, Artificial
  Synthetic oligonucleotide
agtaacgcttgatatggttggcgcgtgtgcagggtgcccgatgtctgccta

SEQ ID NO: 169433 - DNA, 51 bp, Artificial
  Synthetic oligonucleotide
cctacttagaagtgcggtttcggctcatacagaattggggagtcaagccga

SEQ ID NO: 169434 - DNA, 50 bp, Artificial
  Synthetic oligonucleotide
cagaaaccgttgaccgctgggcagccgaaggttgggaatggtctcagccc

SEQ ID NO: 169435 - DNA, 50 bp, Artificial
  Synthetic oligonucleotide
gccaaagaaccaagaccctaactccatttacgttggcgtgatgggtccat

SEQ ID NO: 169436 - DNA, 50 bp, Artificial
  Synthetic oligonucleotide
gcgcaggacgcgcaacgtgaaccaagatgatgcatagcataccgcacccg

SEQ ID NO: 169437 - DNA, 55 bp, Artificial
  Synthetic oligonucleotide
cgggaacaagcatcgacttgcccgttgccctgccgtcaaagaacaaggcgcgcga

SEQ ID NO: 169438 - DNA, 50 bp, Artificial
  Synthetic oligonucleotide
gatcagcaacatcgaacgaggccgcgtggttccgagcgttcccgacatga

SEQ ID NO: 169439 - DNA, 50 bp, Artificial
  Synthetic oligonucleotide
ttaggcgaactcgacggtgcatggggctggcacgcgcgacaatggacgcg

SEQ ID NO: 169440 - DNA, 50 bp, Artificial
  Synthetic oligonucleotide
ctgcgttgtatctgtcatgcgctatttagccacatcaaccgcacgggact

SEQ ID NO: 169441 - DNA, 50 bp, Artificial
  Synthetic oligonucleotide
cgcgtcgtcacacttctcgcatgctgtatgaccaggtggctcgtgcagct

SEQ ID NO: 169442 - DNA, 50 bp, Artificial
  Synthetic oligonucleotide
ggctctacgttcgccacggtcatgtacacgatcctgcctgacgcagccgt

SEQ ID NO: 169443 - DNA, 50 bp, Artificial
  Synthetic oligonucleotide
ctcgccaggcccgatgcaacaagtgcacaagttaccgcagaaggacccgg

SEQ ID NO: 169444 - DNA, 50 bp, Artificial
  Synthetic oligonucleotide
cgatgcatcccccgctcgttatgacgcacgtacgtgaccgtggcccaaac

SEQ ID NO: 169445 - DNA, 50 bp, Artificial
  Synthetic oligonucleotide
ccggaagaatcgcaaggctgcaagagcgcacaggtgccaggatcgctcag

SEQ ID NO: 169446 - DNA, 50 bp, Artificial
  Synthetic oligonucleotide
cgcggctgaagttacgcgccgactagctgcatggatttctccacacgggg

SEQ ID NO: 169447 - DNA, 50 bp, Artificial
  Synthetic oligonucleotide
caccaggctttatccccgccacaacaccggcggcacaacgtacaaaagcg

SEQ ID NO: 169448 - DNA, 55 bp, Artificial
  Synthetic oligonucleotide
cgggaggcaacaccgatacgggacctacggccacacactccatgcaccgttctca

SEQ ID NO: 169449 - DNA, 50 bp, Artificial
  Synthetic oligonucleotide
cgttaacctgaggcttcccgctgccacttctcgtggtgcgccaatagcct

SEQ ID NO: 169450 - DNA, 50 bp, Artificial
  Synthetic oligonucleotide
ttggcgccccacaccactatggtcttcgcgttcttggcatcggtcggctc

SEQ ID NO: 169451 - DNA, 50 bp, Artificial
  Synthetic oligonucleotide
gtgcgcgtcatcagccgttctatgagtgagacctgcgcctacgagtggga

SEQ ID NO: 169452 - DNA, 50 bp, Artificial
  Synthetic oligonucleotide
cctgaacgcttgagtagccgcagcgtcaagacgcactcctcgcctgctat

SEQ ID NO: 169453 - DNA, 50 bp, Artificial
  Synthetic oligonucleotide
gctctattgactcaaagatgcgtgtctgaaggttgctggtaggacaaatc

SEQ ID NO: 169454 - DNA, 50 bp, Artificial
  Synthetic oligonucleotide
gcagattccgcttatgacaaagcacctggcctcagtacgctcgtcgaaaa

SEQ ID NO: 169455 - DNA, 50 bp, Artificial
  Synthetic oligonucleotide
ccccgtaagcgctctacgctctgccctagcccatgaaacgggccttccag

SEQ ID NO: 169456 - DNA, 50 bp, Artificial
  Synthetic oligonucleotide
catctccgtgtctacggggacgaacgcatgcccgcttttaaggcagccga

SEQ ID NO: 169457 - DNA, 50 bp, Artificial
  Synthetic oligonucleotide
gagggaaaccagtcgcacacgcttcccgtgtccgccagagctgccgacat

SEQ ID NO: 169458 - DNA, 50 bp, Artificial
  Synthetic oligonucleotide
cgcctccgtgcgatcaagacgaactacggcagagttaacgcgtggtggcg

SEQ ID NO: 169459 - DNA, 55 bp, Artificial
  Synthetic oligonucleotide
acttcaggcccttctcgccaagtgcacgaacatagccgttaaggcgcgcacaccc

SEQ ID NO: 169460 - DNA, 50 bp, Artificial
  Synthetic oligonucleotide
gtcaactcctcctgcacacagttcgttgtatcgctcaattgtggcagtga

SEQ ID NO: 169461 - DNA, 50 bp, Artificial
  Synthetic oligonucleotide
gcacctcaagcgggcacgagacatatacccgcaggttgaccccgaccgca

SEQ ID NO: 169462 - DNA, 50 bp, Artificial
  Synthetic oligonucleotide
gtgcgcttcttcggaggggccgtcgaagagacgactgaatcagaaggcga

SEQ ID NO: 169463 - DNA, 50 bp, Artificial
  Synthetic oligonucleotide
cgtccgccctcagttaagcggcaggcgtggtagcgttgtcgtttaccgat

SEQ ID NO: 169464 - DNA, 50 bp, Artificial
  Synthetic oligonucleotide
tcctcgctttcgcacgtggtgacggacgctacgtcgagggttgagatgcg

SEQ ID NO: 169465 - DNA, 50 bp, Artificial
  Synthetic oligonucleotide
cgtgatacaatcgcccatgcaaagtggaccagacaaccgcggagtgcccg

SEQ ID NO: 169466 - DNA, 50 bp, Artificial
  Synthetic oligonucleotide
tgcgcagagggcacagcgacgcatcgtcacccagagccttggaatactcg

SEQ ID NO: 169467 - DNA, 50 bp, Artificial
  Synthetic oligonucleotide
tgcgtcgaatcccgtgacgagccgcttatacgaattcacgtactgattcg

SEQ ID NO: 169468 - DNA, 50 bp, Artificial
  Synthetic oligonucleotide
gaagagttcaacgcgagcagcaaaacgacctcccggctttcgggcgccct

SEQ ID NO: 169469 - DNA, 50 bp, Artificial
  Synthetic oligonucleotide
caggatgcataagttcaaacgtatgccctttatacttaaccctactttgc

SEQ ID NO: 169470 - DNA, 55 bp, Artificial
  Synthetic oligonucleotide
acttattggtaagatgcatccgaccagcacatacgcgttttacgcttcagcggcg

SEQ ID NO: 169471 - DNA, 50 bp, Artificial
  Synthetic oligonucleotide
cagctggacggcatttgtcgcctgtgtaccggcatagggcaaagttggct

SEQ ID NO: 169472 - DNA, 50 bp, Artificial
  Synthetic oligonucleotide
gccatttgagctcgtcgagcgtaccgcagattgcctcgacaatgcggcag

SEQ ID NO: 169473 - DNA, 50 bp, Artificial
  Synthetic oligonucleotide
tcacgtacagcgcgccggaagaatcgcaaggctgcaagagcgcacaggtg

SEQ ID NO: 169474 - DNA, 50 bp, Artificial
  Synthetic oligonucleotide
ccagaacgccggcacaaatgcctcacgaagtccatggcgcaacaagtcgc

SEQ ID NO: 169475 - DNA, 50 bp, Artificial
  Synthetic oligonucleotide
ctcgcctgcgtagcgccgttgactccatggaactcatctgcggacacgat

SEQ ID NO: 169476 - DNA, 50 bp, Artificial
  Synthetic oligonucleotide
taggcaccgggcattctcggatcagcaacatcgaacgaggccgcgtggtt

SEQ ID NO: 169477 - DNA, 50 bp, Artificial
  Synthetic oligonucleotide
gggcacagcgacgcatcgtcacccagagccttggaatactcgttgcctga

SEQ ID NO: 169478 - DNA, 50 bp, Artificial
  Synthetic oligonucleotide
tgtcaatgagcacaccattgatgcagagaaacgccgagttccatcgtaat

SEQ ID NO: 169479 - DNA, 50 bp, Artificial
  Synthetic oligonucleotide
aatgtgctgtctcacgggatgccccacgctccctatccaatcgggcggaa

SEQ ID NO: 169480 - DNA, 50 bp, Artificial
  Synthetic oligonucleotide
aattgcccgagcgccgtgcgagtagacaagcgcaccgattcgtcagctat

SEQ ID NO: 169481 - DNA, 53 bp, Artificial
  Synthetic oligonucleotide
gttagttgggttatagctggggaaagattcaatgaatcccgtttaattaaaca

SEQ ID NO: 169482 - DNA, 55 bp, Artificial
  Synthetic oligonucleotide
cgggatgcccctttcgtctgcttgcttctcgatgaggcgattataacgcggactg

SEQ ID NO: 169483 - DNA, 50 bp, Artificial
  Synthetic oligonucleotide
aattggatcgtctgggcgcttacgagtggcatgtcgtttgctggcggcgt

SEQ ID NO: 169484 - DNA, 50 bp, Artificial
  Synthetic oligonucleotide
aattgggagccacgcatcgaaaggttccgaacaagcgcatctggagggga

SEQ ID NO: 169485 - DNA, 50 bp, Artificial
  Synthetic oligonucleotide
acaaatctcgctagcataggcggtcgtgaggccatgccccaagcgcggtt

SEQ ID NO: 169486 - DNA, 50 bp, Artificial
  Synthetic oligonucleotide
acaccccgcatgtgctcctctcagcggtcgctcgtgacggccaaggtgat

SEQ ID NO: 169487 - DNA, 50 bp, Artificial
  Synthetic oligonucleotide
acaccgcaactattctgcgctcacttggccccgatgcctggcgtacttgc

SEQ ID NO: 169488 - DNA, 50 bp, Artificial
  Synthetic oligonucleotide
acacgaagtaaatacccagcggagcggccacgtcgttaatgccgggcagc

SEQ ID NO: 169489 - DNA, 50 bp, Artificial
  Synthetic oligonucleotide
acacggccgcaagccatgttgcatatggttcgtcgggagccataccacgc

SEQ ID NO: 169490 - DNA, 50 bp, Artificial
  Synthetic oligonucleotide
acacggctgtcgcggtaggctcgtcggtgttcctcctctcgaaaagcgac

SEQ ID NO: 169491 - DNA, 50 bp, Artificial
  Synthetic oligonucleotide
acacggtgggcgcttacgcccgtctctggcacgaacgcagggtggactcg

SEQ ID NO: 169492 - DNA, 50 bp, Artificial
  Synthetic oligonucleotide
acacgtcgggagcactcatgattgacgcccccgcttacgtcggcttgccc

SEQ ID NO: 169493 - DNA, 55 bp, Artificial
  Synthetic oligonucleotide
cgggcaatctctgcgcgcttcagtccttgattctcgcaaccgaaggccacctcgc

SEQ ID NO: 169494 - DNA, 50 bp, Artificial
  Synthetic oligonucleotide
acagaggactgtccccgctcgtacccaaaacggcactgagacctccaccg

SEQ ID NO: 169495 - DNA, 50 bp, Artificial
  Synthetic oligonucleotide
acagccgcatggttccgtcgccccagaacacgggcattaccaagccgaat

SEQ ID NO: 169496 - DNA, 50 bp, Artificial
  Synthetic oligonucleotide
acagcgcgcttaaggaggtttgacggtgcacataaggggccctgacagcg

SEQ ID NO: 169497 - DNA, 50 bp, Artificial
  Synthetic oligonucleotide
acagcgcttcctgcggaacgtaggctatctggcggcgaaggctctgctgc

SEQ ID NO: 169498 - DNA, 50 bp, Artificial
  Synthetic oligonucleotide
acagggtgcatgtcgacggcctcaagtcatgcgactacctcgtccacccg

SEQ ID NO: 169499 - DNA, 50 bp, Artificial
  Synthetic oligonucleotide
acagggtgtcgcgaggtttcgatctggttccgtccgctccgaagcacctc

SEQ ID NO: 169500 - DNA, 50 bp, Artificial
  Synthetic oligonucleotide
acatcgagaggccaaccggtcccatcccctgcctcgtggcacatagtgcc

SEQ ID NO: 169501 - DNA, 50 bp, Artificial
  Synthetic oligonucleotide
acatggtcaggtcgcggtctcttgggtcaacggcatcggtgcggactgca

SEQ ID NO: 169502 - DNA, 50 bp, Artificial
  Synthetic oligonucleotide
accaagcgcgtgcttttacccagacggtcgacgcagcagtggtgtgcgga

SEQ ID NO: 169503 - DNA, 50 bp, Artificial
  Synthetic oligonucleotide
aaggtgctttgtgagcgtgcaccactcgtccgtcagagtaaccggcgcgg

SEQ ID NO: 169504 - DNA, 55 bp, Artificial
  Synthetic oligonucleotide
gacccaactgacgccgatattgcctctcataaattacttgtacgagcgggtatga

SEQ ID NO: 169505 - DNA, 50 bp, Artificial
  Synthetic oligonucleotide
aagtcagtgcgcacgggcgaagcaggaggcacagttagctcctcccctgc

SEQ ID NO: 169506 - DNA, 50 bp, Artificial
  Synthetic oligonucleotide
aagttccagggttgagcggggcccccaagagaagtcatcgtccacagacg

SEQ ID NO: 169507 - DNA, 50 bp, Artificial
  Synthetic oligonucleotide
aatacagggcaccaggctttatccccgccacaacaccggcggcacaacgt

SEQ ID NO: 169508 - DNA, 50 bp, Artificial
  Synthetic oligonucleotide
aatagacccccgtttacgccgctcggtcgatgtaatgaccgcctgggtga

SEQ ID NO: 169509 - DNA, 50 bp, Artificial
  Synthetic oligonucleotide
aatagcagcctgacgcagccacctttgccgtcacggtgtagtctcccgct

SEQ ID NO: 169510 - DNA, 48 bp, Artificial
  Synthetic oligonucleotide
aatcaacccttcgccccgttgttgttttggggcaaaggaccgcccccg

SEQ ID NO: 169511 - DNA, 50 bp, Artificial
  Synthetic oligonucleotide
aatcagccttgcgcagagggcacagcgacgcatcgtcacccagagccttg

SEQ ID NO: 169512 - DNA, 50 bp, Artificial
  Synthetic oligonucleotide
aatcgcctgcgaacagtcgcgattggggtcccgcctacggaatcggaacg

SEQ ID NO: 169513 - DNA, 50 bp, Artificial
  Synthetic oligonucleotide
aatcggccttggggcgagcggtcctctcccaccaggcggtttcgtatccg

SEQ ID NO: 169514 - DNA, 50 bp, Artificial
  Synthetic oligonucleotide
aatcggtccaacgcatcgcggcgcccacaagtctctacggagaagccgac

SEQ ID NO: 169515 - DNA, 55 bp, Artificial
  Synthetic oligonucleotide
gacgatatgggtgaggtccccagataggttttggtgataagcgcaatgccggcag

SEQ ID NO: 169516 - DNA, 50 bp, Artificial
  Synthetic oligonucleotide
aatctgcacgcggaggggctttggcgcaacgttctcggacggcgtgaaag

SEQ ID NO: 169517 - DNA, 50 bp, Artificial
  Synthetic oligonucleotide
aatgagcgtttgctccatgtggacgcgatggcccgtatcgtccatgccgc

SEQ ID NO: 169518 - DNA, 50 bp, Artificial
  Synthetic oligonucleotide
aatgcaccgtctcgtctcctgttgccgcccatgcgagtgcgagcgccgag

SEQ ID NO: 169519 - DNA, 50 bp, Artificial
  Synthetic oligonucleotide
aatgccccgtaatagcgcgggatgcactgaggcgcaaccacgccgcatgc

SEQ ID NO: 169520 - DNA, 50 bp, Artificial
  Synthetic oligonucleotide
aatgccggacgaaacaagcgccgtaacacaagcagagggcccggggataa

SEQ ID NO: 169521 - DNA, 50 bp, Artificial
  Synthetic oligonucleotide
aatgctctcgttggctaacagtctcacggcagctcccttcgccgacgctt

SEQ ID NO: 169522 - DNA, 50 bp, Artificial
  Synthetic oligonucleotide
aatggcgcatgaccccctcgagtttgtagcgcgcctctccctccggaagc

SEQ ID NO: 169523 - DNA, 50 bp, Artificial
  Synthetic oligonucleotide
aatgggatcgcgagaggcaggtcaacgcgacgagggtggcactgccgagg

SEQ ID NO: 169524 - DNA, 50 bp, Artificial
  Synthetic oligonucleotide
aatggggagacgctcacgaggcgcagtactcgaagcttgcggtccaggca

SEQ ID NO: 169525 - DNA, 50 bp, Artificial
  Synthetic oligonucleotide
aatggtcatatcgtatcgcaagctcagccccggaaggagagcccgtgggg

SEQ ID NO: 169526 - DNA, 55 bp, Artificial
  Synthetic oligonucleotide
gacggtagcaaagcgtattctacgtggataaagactgataagggttatcgttatg

SEQ ID NO: 169527 - DNA, 50 bp, Artificial
  Synthetic oligonucleotide
accgcgaacgacgcagtacaggttgcgctcggtgggcaggggaataggtc

SEQ ID NO: 169528 - DNA, 50 bp, Artificial
  Synthetic oligonucleotide
accgcgcaccgagactttacaaaaggccacgcacgcaccgcctatactgg

SEQ ID NO: 169529 - DNA, 50 bp, Artificial
  Synthetic oligonucleotide
accgcttcctccgaaaacgctacctccaagccttcgctctgcgacctcga

SEQ ID NO: 169530 - DNA, 50 bp, Artificial
  Synthetic oligonucleotide
accggattgggagtctgccgtagcgccgaacgaacccttgaccgtaccga

SEQ ID NO: 169531 - DNA, 50 bp, Artificial
  Synthetic oligonucleotide
accggccaagacgtcccgttgcacccgctatccaaaccacgcgtttcggt

SEQ ID NO: 169532 - DNA, 49 bp, Artificial
  Synthetic oligonucleotide
accgggcgggaccctacccaatactcccgagtacaccccgcgtccaaag

SEQ ID NO: 169533 - DNA, 50 bp, Artificial
  Synthetic oligonucleotide
accggggtcggcgtcaacaaggggtcggccctcgagctcctgtgctggaa

SEQ ID NO: 169534 - DNA, 50 bp, Artificial
  Synthetic oligonucleotide
accgtcgtcgaccgaaactgcctcaacgattcgtgctaccgcggagcgta

SEQ ID NO: 169535 - DNA, 50 bp, Artificial
  Synthetic oligonucleotide
accgtgcgcaacctgacatcgtgattcacttggctgcacagccgctcgta

SEQ ID NO: 169536 - DNA, 50 bp, Artificial
  Synthetic oligonucleotide
acctcgagtccggccgctatcccgagaagccgcatgagatcatcgttccg

SEQ ID NO: 169537 - DNA, 55 bp, Artificial
  Synthetic oligonucleotide
gagagtgatcattaccttcgttcgttaaaaggacgggtacatatactctatgggg

SEQ ID NO: 169538 - DNA, 50 bp, Artificial
  Synthetic oligonucleotide
acctcgccgttgtacgcgtcccaagggtcgccgctgataatgtccgtgaa

SEQ ID NO: 169539 - DNA, 50 bp, Artificial
  Synthetic oligonucleotide
acctcggttacgtaggcgcgaacttctgggttgcgggtgtcgagggcata

SEQ ID NO: 169540 - DNA, 50 bp, Artificial
  Synthetic oligonucleotide
acctgtgggtgggcacgacctatgcgaggggcaggtgcgaacagagcgtg

SEQ ID NO: 169541 - DNA, 50 bp, Artificial
  Synthetic oligonucleotide
acctgttttgcgcgctctacggcgcatccacccttgaggttccggacaag

SEQ ID NO: 169542 - DNA, 50 bp, Artificial
  Synthetic oligonucleotide
accttacaggcagcatacttgctggcccactcgcacgcttccctgagggg

SEQ ID NO: 169543 - DNA, 50 bp, Artificial
  Synthetic oligonucleotide
acgaatggcacacaatgtggcaccctgctcaggcgagcatagcacgccga

SEQ ID NO: 169544 - DNA, 50 bp, Artificial
  Synthetic oligonucleotide
acgacaggctgtaaccgcagccacgcggaatagcttcgccatgcccgaca

SEQ ID NO: 169545 - DNA, 50 bp, Artificial
  Synthetic oligonucleotide
acgaccgggcctcatgccatcaaggacctgcaacgacgggacgtgcccca

SEQ ID NO: 169546 - DNA, 50 bp, Artificial
  Synthetic oligonucleotide
acgacgaatgggccacgggactcggcgtaaaggattgcccctggacgcaa

SEQ ID NO: 169547 - DNA, 50 bp, Artificial
  Synthetic oligonucleotide
acgacgatttcgggggtgcgctgcgtcatgggtctccttaacggggtcaa

SEQ ID NO: 169548 - DNA, 55 bp, Artificial
  Synthetic oligonucleotide
gagatcttcgatctcggagactcggttgctcgagaagtcatggttccgcgcgtgg

SEQ ID NO: 169549 - DNA, 50 bp, Artificial
  Synthetic oligonucleotide
accacgggctcgcacgcacgtctcgtcgggaatctcacaacgagatgaga

SEQ ID NO: 169550 - DNA, 50 bp, Artificial
  Synthetic oligonucleotide
accatcttggggtgttgcttgggggccggatttggtaagagtctccgcgc

SEQ ID NO: 169551 - DNA, 50 bp, Artificial
  Synthetic oligonucleotide
accatggccgcttacgaactttgcgggacattcgccgtctacacgcccac

SEQ ID NO: 169552 - DNA, 50 bp, Artificial
  Synthetic oligonucleotide
acccaagacaagcgaagtgtaccacacgccccgtcagtgtcccgtctggg

SEQ ID NO: 169553 - DNA, 50 bp, Artificial
  Synthetic oligonucleotide
acccagtcacaccgcgtcatggagaagtgcggcctttcgcctgtccgcac

SEQ ID NO: 169554 - DNA, 50 bp, Artificial
  Synthetic oligonucleotide
acccagtggatgtcctcggcatgaaatgtccgcaccggttgaccgggaga

SEQ ID NO: 169555 - DNA, 50 bp, Artificial
  Synthetic oligonucleotide
accccctttaatcacggacgtcgacgcagcaaacgcggaggcgcgttccc

SEQ ID NO: 169556 - DNA, 50 bp, Artificial
  Synthetic oligonucleotide
accccgcagatgagcgagggaggtaccatcgatggataaggcaagcgccg

SEQ ID NO: 169557 - DNA, 50 bp, Artificial
  Synthetic oligonucleotide
accccgtacgtcccgtcttgggtgccgcaaggtttgacatcagccctttt

SEQ ID NO: 169558 - DNA, 50 bp, Artificial
  Synthetic oligonucleotide
accccgtggggtcaccatagctgccaaagtcacggtgcccgagctcggtc

SEQ ID NO: 169559 - DNA, 53 bp, Artificial
  Synthetic oligonucleotide
gagccacggcccacccgaacctacgacctacctttacataccgagattacgcc

SEQ ID NO: 169560 - DNA, 50 bp, Artificial
  Synthetic oligonucleotide
acccgacggggactgtgttttcatctctggtgcccgcattgtagcacgcg

SEQ ID NO: 169561 - DNA, 50 bp, Artificial
  Synthetic oligonucleotide
acccgctcggctttacgagccaccccatcttggcgttcattcgtcgctcg

SEQ ID NO: 169562 - DNA, 50 bp, Artificial
  Synthetic oligonucleotide
accctcgcacgcctctttcagcggagtggcctgctcaaaattggcaggac

SEQ ID NO: 169563 - DNA, 50 bp, Artificial
  Synthetic oligonucleotide
accgaacgtccatccggactgcattacctcgcccacccgtcttcgcctcg

SEQ ID NO: 169564 - DNA, 50 bp, Artificial
  Synthetic oligonucleotide
accgagcgaaacaacgcaacatgggagaacggcgacaggcagatgctgga

SEQ ID NO: 169565 - DNA, 50 bp, Artificial
  Synthetic oligonucleotide
accgagctgcttgctctcacagccgagtgacatgccaagacgccctgtcc

SEQ ID NO: 169566 - DNA, 50 bp, Artificial
  Synthetic oligonucleotide
accgaggaacgttggctcctggacctccatggcagcgagtatcgtgcgta

SEQ ID NO: 169567 - DNA, 50 bp, Artificial
  Synthetic oligonucleotide
accgattcgaaccgaactccgaatgcccgagggtctagagcgcggcagtc

SEQ ID NO: 169568 - DNA, 50 bp, Artificial
  Synthetic oligonucleotide
accgcccgcgctccgttgtcctcgtagccgtaaatcctctgaccgcatgc

SEQ ID NO: 169569 - DNA, 50 bp, Artificial
  Synthetic oligonucleotide
accgcctatactggatacactgtcggcgcgcaccctatagtcgcaccggg

SEQ ID NO: 169570 - DNA, 55 bp, Artificial
  Synthetic oligonucleotide
gaggacgtgatctggcatgctcaaaaggtttacaggaaatcatatagcccctcct

SEQ ID NO: 169571 - DNA, 50 bp, Artificial
  Synthetic oligonucleotide
aacaagtgcaaggcggcctcccataggagcctcccacacggactgggtag

SEQ ID NO: 169572 - DNA, 50 bp, Artificial
  Synthetic oligonucleotide
aacaccttgtgcgtaccggattgggagtctgccgtagcgccgaacgaacc

SEQ ID NO: 169573 - DNA, 50 bp, Artificial
  Synthetic oligonucleotide
aacacggagaagtgtcggctagagcgccaatcccccacggcggcgccaga

SEQ ID NO: 169574 - DNA, 50 bp, Artificial
  Synthetic oligonucleotide
aacagtagcaatcccacgtggtaggccgcacatcccaaaagaagcgccga

SEQ ID NO: 169575 - DNA, 50 bp, Artificial
  Synthetic oligonucleotide
aacagtctcacggcagctcccttcgccgacgcttctcaatgagcgccatt

SEQ ID NO: 169576 - DNA, 50 bp, Artificial
  Synthetic oligonucleotide
aacatatccaacgttcgccctagcaagggtaaggtcgccctccccggacc

SEQ ID NO: 169577 - DNA, 50 bp, Artificial
  Synthetic oligonucleotide
aacatctagcgaaacaaaatagccaccacgcggatgagaccacgtagcaa

SEQ ID NO: 169578 - DNA, 50 bp, Artificial
  Synthetic oligonucleotide
aacatgttgcggtcatgatgggccaggacacatgcaatctgccggcaccc

SEQ ID NO: 169579 - DNA, 50 bp, Artificial
  Synthetic oligonucleotide
aacccacgctctggttgagtgccggtatgctccatggcgtccattagcga

SEQ ID NO: 169580 - DNA, 50 bp, Artificial
  Synthetic oligonucleotide
aaccctcgcacagcttcgggccgtaagaccccgtcgcactcggataccga

SEQ ID NO: 169581 - DNA, 55 bp, Artificial
  Synthetic oligonucleotide
gaggtatgctatatcacctgtactcgagcactcggaaagctgcctcgtcctaacg

SEQ ID NO: 169582 - DNA, 50 bp, Artificial
  Synthetic oligonucleotide
aaccctcttgcgcggacgggtatatgcggcatgcggctccttgtatgggg

SEQ ID NO: 169583 - DNA, 50 bp, Artificial
  Synthetic oligonucleotide
aaccctgctgccgggcgtaaaccccaagtcgatttgtggcaaggtgccgc

SEQ ID NO: 169584 - DNA, 50 bp, Artificial
  Synthetic oligonucleotide
aaccgaaagcgtaagcgtttccgggcgcccatctgtgcaacaagcaaggg

SEQ ID NO: 169585 - DNA, 50 bp, Artificial
  Synthetic oligonucleotide
aaccgccgcaggcgtgtttagatatgtgccaccaacaacccccgagggtt

SEQ ID NO: 169586 - DNA, 50 bp, Artificial
  Synthetic oligonucleotide
aaccgcgatggtcggcctatgcgtggattcgcttcccgaaggaacggacg

SEQ ID NO: 169587 - DNA, 50 bp, Artificial
  Synthetic oligonucleotide
aaccgcgcaggggagcggaacccatatgcacgcgtatgacgtcaatggag

SEQ ID NO: 169588 - DNA, 50 bp, Artificial
  Synthetic oligonucleotide
aaccgcgttagacgcgacctgcgcagaggccgatgcaagcgaactcatgc

SEQ ID NO: 169589 - DNA, 50 bp, Artificial
  Synthetic oligonucleotide
aaccgtacgcacgggatgcgtcacctcagcgcgggcataggaattccctc

SEQ ID NO: 169590 - DNA, 50 bp, Artificial
  Synthetic oligonucleotide
aaccgttgggtcaagaagagttttaccccaatgcggcgctccgtgcgtgg

SEQ ID NO: 169591 - DNA, 50 bp, Artificial
  Synthetic oligonucleotide
aacgaaaggccgcgaacctctacgatcgccatgccagacgctcccttgca

SEQ ID NO: 169592 - DNA, 55 bp, Artificial
  Synthetic oligonucleotide
cgggcagcccaagggttaagtgttatgatttgaacctccttctgtatgctcagat

SEQ ID NO: 169593 - DNA, 55 bp, Artificial
  Synthetic oligonucleotide
gaggtcgactccatggaagagcttctgatcttatgaggatcgtcttttccggact

SEQ ID NO: 169594 - DNA, 50 bp, Artificial
  Synthetic oligonucleotide
aaaacgcgtagaccaaggccccgacgaaacaggcccaaggtccgtgcccc

SEQ ID NO: 169595 - DNA, 50 bp, Artificial
  Synthetic oligonucleotide
aaaacgggtgcggaacaccttcgcaaggcgaggctggctcgcagggtcta

SEQ ID NO: 169596 - DNA, 50 bp, Artificial
  Synthetic oligonucleotide
aaaatcgggtcagtcgcgtctgcagcacacgtctaccgagaaccggccca

SEQ ID NO: 169597 - DNA, 50 bp, Artificial
  Synthetic oligonucleotide
aaacacacggtgacccatacagctcccgagggcaccacggattccggcac

SEQ ID NO: 169598 - DNA, 50 bp, Artificial
  Synthetic oligonucleotide
aaacccaatcgttgcgccgtaacccctggatacgaaggctgctccgcctt

SEQ ID NO: 169599 - DNA, 50 bp, Artificial
  Synthetic oligonucleotide
aaacccggcccaccggccaagacggtaatagaagggcctccgctcgacat

SEQ ID NO: 169600 - DNA, 50 bp, Artificial
  Synthetic oligonucleotide
aaaccgcgtaactacagatccccgcctgcgcccaaaagcttgcgcatgac

SEQ ID NO: 169601 - DNA, 50 bp, Artificial
  Synthetic oligonucleotide
aaacgaacttacgctggccgaagccgctaccttggccggtcttccccaag

SEQ ID NO: 169602 - DNA, 50 bp, Artificial
  Synthetic oligonucleotide
aaacgcatctggtgaggtcgatttttcagccttgacccgcgtggcggcac

SEQ ID NO: 169603 - DNA, 50 bp, Artificial
  Synthetic oligonucleotide
aaacgcccgccaactttacacgctgccgtggcaacttacgcccttcgtgt

SEQ ID NO: 169604 - DNA, 55 bp, Artificial
  Synthetic oligonucleotide
gatcctgagagacgttcttctcgcgatctcttacagattcaagtcgccaccaaag

SEQ ID NO: 169605 - DNA, 50 bp, Artificial
  Synthetic oligonucleotide
aaagacgcggcgatagttgcaggcgcaagacccatctcacgcgcggtaac

SEQ ID NO: 169606 - DNA, 50 bp, Artificial
  Synthetic oligonucleotide
aaagcccgaacgtccgtgcagagacggtttcgagcgagatggctcccatg

SEQ ID NO: 169607 - DNA, 50 bp, Artificial
  Synthetic oligonucleotide
aaaggggcaaaccgttttcgctcaactgctttatgcccctcggctggcgg

SEQ ID NO: 169608 - DNA, 50 bp, Artificial
  Synthetic oligonucleotide
aaaggttccgaacaagcgcatctggaggggattccgactccccgggggat

SEQ ID NO: 169609 - DNA, 50 bp, Artificial
  Synthetic oligonucleotide
aaagtaggcactccgcgtagacaccccgaataggcgtcccgcgacccttg

SEQ ID NO: 169610 - DNA, 50 bp, Artificial
  Synthetic oligonucleotide
aaatcgcgcctaagcccacggtctgaggtgccaggcctatgtaacccctt

SEQ ID NO: 169611 - DNA, 50 bp, Artificial
  Synthetic oligonucleotide
aaatcgggattctcagcagccgacaaccctgaaaggctccccgcgcgctc

SEQ ID NO: 169612 - DNA, 50 bp, Artificial
  Synthetic oligonucleotide
aaatgcacgttgcgtgaaacgccaatcctgtcgataacctcccgcgcccg

SEQ ID NO: 169613 - DNA, 50 bp, Artificial
  Synthetic oligonucleotide
aaatgcatgcctcgaggaacggagagcgtgcagcgaagcgacgcagacaa

SEQ ID NO: 169614 - DNA, 50 bp, Artificial
  Synthetic oligonucleotide
aaattcgtcaatcgcccggcagacaaccgccccatgccgtgcatctgccc

SEQ ID NO: 169615 - DNA, 55 bp, Artificial
  Synthetic oligonucleotide
gatcgagccatggtatggggtgctttcggaattcatggcgatggtccctgccgcg

SEQ ID NO: 169616 - DNA, 50 bp, Artificial
  Synthetic oligonucleotide
aacaagcatgcaaacgaacttacgctggccgaagccgctaccttggccgg

SEQ ID NO: 169617 - DNA, 50 bp, Artificial
  Synthetic oligonucleotide
aagcccttcagtccgcacgtcacccttgcacgacacgcctgtctgtccga

SEQ ID NO: 169618 - DNA, 50 bp, Artificial
  Synthetic oligonucleotide
aagccggctgatataccttcctcacgtgccttcaaaacggcactgcgcgc

SEQ ID NO: 169619 - DNA, 50 bp, Artificial
  Synthetic oligonucleotide
aagccggtcgctttcaagtgcgcaaatctcgcccgccttgttacggggcg

SEQ ID NO: 169620 - DNA, 50 bp, Artificial
  Synthetic oligonucleotide
aagcgcacgggagggtgcccgcacaaggagcggatatggctgcacgatgc

SEQ ID NO: 169621 - DNA, 50 bp, Artificial
  Synthetic oligonucleotide
aagcgcctcacagggcagagcccgagcgaatggaaagcgtcgaagcgaga

SEQ ID NO: 169622 - DNA, 50 bp, Artificial
  Synthetic oligonucleotide
aagcgctggtggccgctctttatgctgcccacgtgcctggcgtttatgat

SEQ ID NO: 169623 - DNA, 50 bp, Artificial
  Synthetic oligonucleotide
aagcggaccgaggtcgcgcctccaaatgggagtgagtgtctggggcatga

SEQ ID NO: 169624 - DNA, 50 bp, Artificial
  Synthetic oligonucleotide
aagcgggcgaagtgcctgagacttccgaaatggaggtggggctagttggc

SEQ ID NO: 169625 - DNA, 50 bp, Artificial
  Synthetic oligonucleotide
aagctcgcaacccgctcgaacgagaccgtccagaatcgaacgcttgaccc

SEQ ID NO: 169626 - DNA, 55 bp, Artificial
  Synthetic oligonucleotide
gatgcaccgcaactgctcgcaagtgacttgtcatttaagacagaacgttggcagg

SEQ ID NO: 169627 - DNA, 50 bp, Artificial
  Synthetic oligonucleotide
aaggaacggcaggggcgccgggcaacgtgcctcagacgcagcgactcaca

SEQ ID NO: 169628 - DNA, 50 bp, Artificial
  Synthetic oligonucleotide
aaggaatcagcggaacggagccatccagaggtcggatgcgcacgtgctag

SEQ ID NO: 169629 - DNA, 50 bp, Artificial
  Synthetic oligonucleotide
aaggacggtgcgagacaccggcaaggccccatagcgttgagcgcgcatgt

SEQ ID NO: 169630 - DNA, 50 bp, Artificial
  Synthetic oligonucleotide
aaggagcgctcagatcgcggcgaggtcttggtctatgagtctcgcgacct

SEQ ID NO: 169631 - DNA, 50 bp, Artificial
  Synthetic oligonucleotide
aaggccagactcggattcacacggcagcgacgtgccagattaagtggcga

SEQ ID NO: 169632 - DNA, 50 bp, Artificial
  Synthetic oligonucleotide
aagggaggccgtcccaaaagcaggccacaggtttccgaagcggtggaaca

SEQ ID NO: 169633 - DNA, 50 bp, Artificial
  Synthetic oligonucleotide
aagggccaaggacacggcgctagagctctgaagggaacgagcgagctgtg

SEQ ID NO: 169634 - DNA, 50 bp, Artificial
  Synthetic oligonucleotide
aagggctgctcgtgaccggggctgtcagttgggcatcgatcctgtttggc

SEQ ID NO: 169635 - DNA, 50 bp, Artificial
  Synthetic oligonucleotide
aagggggacgtcgatgctgtggtcctcgacgtaaaggccggggacgtggt

SEQ ID NO: 169636 - DNA, 50 bp, Artificial
  Synthetic oligonucleotide
aaggggtgccttagcgtgtgcgaagcggcctgttcccgttgcgatacacg

SEQ ID NO: 169637 - DNA, 55 bp, Artificial
  Synthetic oligonucleotide
acctgcaccgtaggagtgcgtacctgcgcaccggaagtgagcacccggctaccag

SEQ ID NO: 169638 - DNA, 50 bp, Artificial
  Synthetic oligonucleotide
aaggtccgccttgtgccccttgaatgccttcggggacatgacatcgcaga

SEQ ID NO: 169639 - DNA, 50 bp, Artificial
  Synthetic oligonucleotide
aaggtcgcaacgaagacgggttcagcccaaacggcatgtgcggcgtagta

SEQ ID NO: 169640 - DNA, 50 bp, Artificial
  Synthetic oligonucleotide
aacgccctctttcccacaattgggccgaggagcaacgctcttccgtggtc

SEQ ID NO: 169641 - DNA, 50 bp, Artificial
  Synthetic oligonucleotide
aacgcgcccacacgattcctcgtagccggaatgggagacgcgctgggaac

SEQ ID NO: 169642 - DNA, 50 bp, Artificial
  Synthetic oligonucleotide
aacgcgccgggcacttgggaccgctccccacccaatacgcgctgcacaaa

SEQ ID NO: 169643 - DNA, 50 bp, Artificial
  Synthetic oligonucleotide
aacgctctgccgtggatcgggcgaatgtgtccgtctctgccccactggag

SEQ ID NO: 169644 - DNA, 50 bp, Artificial
  Synthetic oligonucleotide
aacggaccattcgatgcattcggatcgtcgatgggccctgggcgcgcatt

SEQ ID NO: 169645 - DNA, 50 bp, Artificial
  Synthetic oligonucleotide
aacgggcgttgtggtggctacgcgcgccgtcccaaactttgaaagggggc

SEQ ID NO: 169646 - DNA, 50 bp, Artificial
  Synthetic oligonucleotide
aacggtcggtccggcatgagaatcgcatcatagtcctgctgcgtggccat

SEQ ID NO: 169647 - DNA, 50 bp, Artificial
  Synthetic oligonucleotide
aacggtctccccctccagagcgccggggacagacacggacgctttaagcg

SEQ ID NO: 169648 - DNA, 55 bp, Artificial
  Synthetic oligonucleotide
gatgctgacgaggatagacgagcgttgcgcttagaacagcctgaccagaaagccg

SEQ ID NO: 169649 - DNA, 50 bp, Artificial
  Synthetic oligonucleotide
aacgtggcgtgggattctttcgctgcactcgaagaaggcgtgagccctcc

SEQ ID NO: 169650 - DNA, 50 bp, Artificial
  Synthetic oligonucleotide
aactacgggtaatgcgggagtctcaggagccgcaaagaccgcgggaaccg

SEQ ID NO: 169651 - DNA, 50 bp, Artificial
  Synthetic oligonucleotide
aactcatccggaacacatccggaatggcagccaagggcgtcggctaacgc

SEQ ID NO: 169652 - DNA, 50 bp, Artificial
  Synthetic oligonucleotide
aactcgcttccaacaccgcagccgtgaacatggtcggcccactggccatc

SEQ ID NO: 169653 - DNA, 50 bp, Artificial
  Synthetic oligonucleotide
aacttgcgtccgtgcgagcattcgtcccgcgctggcattactccacatca

SEQ ID NO: 169654 - DNA, 50 bp, Artificial
  Synthetic oligonucleotide
aagaagtcggaatcggccttggggcgagcggtcctctcccaccaggcggt

SEQ ID NO: 169655 - DNA, 50 bp, Artificial
  Synthetic oligonucleotide
aagacaccgtctgaggggcctttcggttgcacatgccttgtcgtcacgca

SEQ ID NO: 169656 - DNA, 50 bp, Artificial
  Synthetic oligonucleotide
aagaccccgctcgcttctatgaaccccgtgccaagctgaggcaaggcccg

SEQ ID NO: 169657 - DNA, 50 bp, Artificial
  Synthetic oligonucleotide
aagacgtggctgccccagcgcgataacaagcaccagctgtgggcatggat

SEQ ID NO: 169658 - DNA, 50 bp, Artificial
  Synthetic oligonucleotide
aagacgtgtccgtgaagtagaacggctcgacggaggtctcgtgggccacc

SEQ ID NO: 169659 - DNA, 55 bp, Artificial
  Synthetic oligonucleotide
gcaaagggtttgcgttcatgttgtgataaaactcgctttgtgcattgattacctc

SEQ ID NO: 169660 - DNA, 50 bp, Artificial
  Synthetic oligonucleotide
aagcaagcgcccgtcgcggatatgcacaacgcgatcagcccatgtggcaa

SEQ ID NO: 169661 - DNA, 50 bp, Artificial
  Synthetic oligonucleotide
aagcatcgatgcgtttacggacaaaggggccgagcgaaccaccgccggtt

SEQ ID NO: 169662 - DNA, 50 bp, Artificial
  Synthetic oligonucleotide
aagcccgctgtccgcggttctttcggccatcatctataacgcgctcgtta

SEQ ID NO: 169663 - DNA, 50 bp, Artificial
  Synthetic oligonucleotide
agcgcaacgcaatgagcgcgtccccaccgcatgccatgcctgttttggcg

SEQ ID NO: 169664 - DNA, 50 bp, Artificial
  Synthetic oligonucleotide
agcgcacgttgccccgtcgtccccgctcgttatgtgttcatttgcgatgc

SEQ ID NO: 169665 - DNA, 50 bp, Artificial
  Synthetic oligonucleotide
agcgccatgccgctcctgggctgaacaaagcccgcatagccctcaggcaa

SEQ ID NO: 169666 - DNA, 50 bp, Artificial
  Synthetic oligonucleotide
agcgccctcaacgcttggaaggtaaccgaaggctccacttgcaccctccc

SEQ ID NO: 169667 - DNA, 50 bp, Artificial
  Synthetic oligonucleotide
agcgctgagcgtttttacccacgcgggagagcactgggatgtgtctgagg

SEQ ID NO: 169668 - DNA, 50 bp, Artificial
  Synthetic oligonucleotide
agcggaaccgccgggatgcgacgagagcgccttgaggtgcgaacggtgtc

SEQ ID NO: 169669 - DNA, 50 bp, Artificial
  Synthetic oligonucleotide
agcgggtccgacggagcttgtcgcggaattcgggtattccggtcccacgt

SEQ ID NO: 169670 - DNA, 55 bp, Artificial
  Synthetic oligonucleotide
gcacgactgccctactgcgacttagggtgcttcttcttattgagtgccgacggag

SEQ ID NO: 169671 - DNA, 50 bp, Artificial
  Synthetic oligonucleotide
agcgtggctcgagaaaagcgctcaccgtcgtctgtcagtcttgcacggac

SEQ ID NO: 169672 - DNA, 50 bp, Artificial
  Synthetic oligonucleotide
agctcacgtcgcttctcggtcgtgcggtctgaaagcgaaccgaatccgtg

SEQ ID NO: 169673 - DNA, 50 bp, Artificial
  Synthetic oligonucleotide
agctcggctggcaagacccttctcggcacccaattctgcaaggacctgat

SEQ ID NO: 169674 - DNA, 50 bp, Artificial
  Synthetic oligonucleotide
agctcggtctgcgattcatcggaaagcccgaacgtccgtgcagagacggt

SEQ ID NO: 169675 - DNA, 50 bp, Artificial
  Synthetic oligonucleotide
agctggtacgtccacttgctccccgcatggcccttgccatcacgttgggt

SEQ ID NO: 169676 - DNA, 50 bp, Artificial
  Synthetic oligonucleotide
agctgtcgctcgggatgaagaccgtgcccgatgttccgaggctgatgttg

SEQ ID NO: 169677 - DNA, 50 bp, Artificial
  Synthetic oligonucleotide
agcttcgggccgtaagaccccgtcgcactcggataccgaaacgcgcaatc

SEQ ID NO: 169678 - DNA, 50 bp, Artificial
  Synthetic oligonucleotide
aggaatggcggactatccgcgctgcacaaatctcacgcggggcacacgtc

SEQ ID NO: 169679 - DNA, 50 bp, Artificial
  Synthetic oligonucleotide
aggacaccgaaggtgctgcgagcagccggacgaatcctgggctatttcgc

SEQ ID NO: 169680 - DNA, 50 bp, Artificial
  Synthetic oligonucleotide
aggacctcaacgcagaaaccgttgaccgctgggcagccgaaggttgggaa

SEQ ID NO: 169681 - DNA, 55 bp, Artificial
  Synthetic oligonucleotide
gcacgcgattatggcgtgtagatcagtagagtggtaaatcggcagttataggatc

SEQ ID NO: 169682 - DNA, 50 bp, Artificial
  Synthetic oligonucleotide
aggagagcgccgctatcgatctgagttcaccgcgcgatccgccctatcgg

SEQ ID NO: 169683 - DNA, 50 bp, Artificial
  Synthetic oligonucleotide
aggccagcagtcgcccattctgacagtcgcggggaccgctatcacgcatg

SEQ ID NO: 169684 - DNA, 50 bp, Artificial
  Synthetic oligonucleotide
agattctcccgatgcctgcgtacgtgtgcggcagcctcctgcggcgttcg

SEQ ID NO: 169685 - DNA, 50 bp, Artificial
  Synthetic oligonucleotide
agcaattcatatgcgggcctcctttcgcatcccggttccgtggtcggctt

SEQ ID NO: 169686 - DNA, 50 bp, Artificial
  Synthetic oligonucleotide
agcacatgatagagcccgtggtaggcgcccgtacgctcgattgcggaaac

SEQ ID NO: 169687 - DNA, 50 bp, Artificial
  Synthetic oligonucleotide
agcaccgctgacgcttgatactccgggtgtactgcaagcacgcccgagcc

SEQ ID NO: 169688 - DNA, 50 bp, Artificial
  Synthetic oligonucleotide
agcacctgctggcgactgtcaaccgagacaaacgtctccatgcgcccact

SEQ ID NO: 169689 - DNA, 50 bp, Artificial
  Synthetic oligonucleotide
agcacgcgtgatctatccgcaacatcgcccctccctttaggacggcgctc

SEQ ID NO: 169690 - DNA, 50 bp, Artificial
  Synthetic oligonucleotide
agcaggctccgggtgcggtaaggtgacgtgaaacaagcgggcgctgacct

SEQ ID NO: 169691 - DNA, 50 bp, Artificial
  Synthetic oligonucleotide
agcatgcgcgacggattccgccgcccgccatttatcatcgagtttcctca

SEQ ID NO: 169692 - DNA, 55 bp, Artificial
  Synthetic oligonucleotide
gcactgcacctagcaacctgtaatcgcaacgcatcaattcggtcatccatcttga

SEQ ID NO: 169693 - DNA, 50 bp, Artificial
  Synthetic oligonucleotide
agccaaaggcgctcacgtgcgggtgaaaagattcccccagcacttacacg

SEQ ID NO: 169694 - DNA, 50 bp, Artificial
  Synthetic oligonucleotide
agccaccccatcttggcgttcattcgtcgctcgcgtacccaagtacgctt

SEQ ID NO: 169695 - DNA, 50 bp, Artificial
  Synthetic oligonucleotide
agcccccttgccgcggaaaccgatatggatgacggagcttgcacctgagc

SEQ ID NO: 169696 - DNA, 50 bp, Artificial
  Synthetic oligonucleotide
agcccggtctcgtctgctccaaccgactccgatagcgttgctaacgtcga

SEQ ID NO: 169697 - DNA, 50 bp, Artificial
  Synthetic oligonucleotide
agcccgtgtgctcgcaccccatatttccgtcgtcaacctcggttgtcgtg

SEQ ID NO: 169698 - DNA, 50 bp, Artificial
  Synthetic oligonucleotide
agccgatccgttgaaagccccgtgcgaaggaaaggcgcattctcctttcc

SEQ ID NO: 169699 - DNA, 50 bp, Artificial
  Synthetic oligonucleotide
agccgcgaagtaggcgctcgtgatcatatggtgcagctgccgggacatcc

SEQ ID NO: 169700 - DNA, 50 bp, Artificial
  Synthetic oligonucleotide
agccgtcgctgtctaggatgggggttagtcgacaggaagggagcaccggg

SEQ ID NO: 169701 - DNA, 50 bp, Artificial
  Synthetic oligonucleotide
agcctgcaataggggagccagctcaaatcgatcttacgcgcgaccgacgc

SEQ ID NO: 169702 - DNA, 50 bp, Artificial
  Synthetic oligonucleotide
agcgacgcatcgtctgtcaacggcaagcagtccacgcggtttcgtaggaa

SEQ ID NO: 169703 - DNA, 55 bp, Artificial
  Synthetic oligonucleotide
cgggtccgcgagttatacgagaaagctctactccggtctcacgtgagagatcgtt

SEQ ID NO: 169704 - DNA, 55 bp, Artificial
  Synthetic oligonucleotide
accggacggtcttccttgcgtttatgaggaccggcaattctgacacatgcgatcg

SEQ ID NO: 169705 - DNA, 50 bp, Artificial
  Synthetic oligonucleotide
agcgacgcccgggaggtaagcgagctgctgagcgatataggcaccaaggt

SEQ ID NO: 169706 - DNA, 50 bp, Artificial
  Synthetic oligonucleotide
agcgagcgactgctcgtagcgttcccacatccgtgcgtaggtgccgcctg

SEQ ID NO: 169707 - DNA, 50 bp, Artificial
  Synthetic oligonucleotide
agcgattttcgcatgtccgccagtatcgagccccgggcgtacttcaacct

SEQ ID NO: 169708 - DNA, 50 bp, Artificial
  Synthetic oligonucleotide
ataacagtccctccccgcacgacgggccttccgtgtgccttgcgacggag

SEQ ID NO: 169709 - DNA, 50 bp, Artificial
  Synthetic oligonucleotide
ataccctatgcctgccatgccgagtccagcgatgaagactccgagcgcca

SEQ ID NO: 169710 - DNA, 50 bp, Artificial
  Synthetic oligonucleotide
atatgtgcgcacaactatggtgcctgcagcgcttgaacgtaacccgcggg

SEQ ID NO: 169711 - DNA, 50 bp, Artificial
  Synthetic oligonucleotide
atcatggggagcccgctctgacgtgggcctcgtacgcgagcacaacgaag

SEQ ID NO: 169712 - DNA, 50 bp, Artificial
  Synthetic oligonucleotide
atcccccagcccgtgttcgcaaggcccggatctatcccgagaatcacgcg

SEQ ID NO: 169713 - DNA, 50 bp, Artificial
  Synthetic oligonucleotide
atccgccgttaacagcgcacgaaccaagggcaacaaccgcattagccgac

SEQ ID NO: 169714 - DNA, 50 bp, Artificial
  Synthetic oligonucleotide
atcctcgatctccccgaaccgaaacgccacgcctggactcgtgggcatga

SEQ ID NO: 169715 - DNA, 55 bp, Artificial
  Synthetic oligonucleotide
gcactggagcccgtgtattcaaccgaaacacgcacgttaggatatgtttccataa

SEQ ID NO: 169716 - DNA, 50 bp, Artificial
  Synthetic oligonucleotide
atcgcaaggctgcaagagcgcacaggtgccaggatcgctcagcatgttct

SEQ ID NO: 169717 - DNA, 50 bp, Artificial
  Synthetic oligonucleotide
atctcccgggcactcgccgaagtaagcgggcacccgtcctttgacctgcg

SEQ ID NO: 169718 - DNA, 50 bp, Artificial
  Synthetic oligonucleotide
atctcttcggttgagcggctaggcgagcgtttctcgggccccggtgaact

SEQ ID NO: 169719 - DNA, 50 bp, Artificial
  Synthetic oligonucleotide
atctgcagtgtgcaacacgggtttcttttagaggagggcggcgggacggg

SEQ ID NO: 169720 - DNA, 50 bp, Artificial
  Synthetic oligonucleotide
atctgccgtgcttctgacggtaggggtacgcctcggtgagacgggaccga

SEQ ID NO: 169721 - DNA, 50 bp, Artificial
  Synthetic oligonucleotide
atgaggcgtcacgtacagcgcgccggaagaatcgcaaggctgcaagagcg

SEQ ID NO: 169722 - DNA, 50 bp, Artificial
  Synthetic oligonucleotide
atgcagcaagcgttgattatcagcgcgcggtaggggccgtttctcagggt

SEQ ID NO: 169723 - DNA, 50 bp, Artificial
  Synthetic oligonucleotide
atgcgcttgccaccaagcaccccaatactcgcggggctttcctgcacgtt

SEQ ID NO: 169724 - DNA, 50 bp, Artificial
  Synthetic oligonucleotide
atgcggcgccttatcaagctggtacgtccacttgctccccgcatggccct

SEQ ID NO: 169725 - DNA, 50 bp, Artificial
  Synthetic oligonucleotide
atgggcagtgcttttgatttcgcccgtgcagtgagggcaacgtgtggctc

SEQ ID NO: 169726 - DNA, 55 bp, Artificial
  Synthetic oligonucleotide
ctcgaccgattagtacttctcggctaagtgcgttaccacacgtacacctgaagcc

SEQ ID NO: 169727 - DNA, 50 bp, Artificial
  Synthetic oligonucleotide
atgtgttgccgacgtcgctagccttccaccaatccgcggcgcaagtccct

SEQ ID NO: 169728 - DNA, 50 bp, Artificial
  Synthetic oligonucleotide
attccatgccgcggaagcagccaccggatacccacgcgtcagtaaccatg

SEQ ID NO: 169729 - DNA, 50 bp, Artificial
  Synthetic oligonucleotide
caacggagctgcggagccgttttgaggagtatgcattgcgggtgagtcgc

SEQ ID NO: 169730 - DNA, 50 bp, Artificial
  Synthetic oligonucleotide
caagcagcgcgcaacctctatgcaacggtgtatacgccagctccacgtgg

SEQ ID NO: 169731 - DNA, 50 bp, Artificial
  Synthetic oligonucleotide
aggcgcagacgagcgtcacttgaaagcgtggacacctcgagccgatttgc

SEQ ID NO: 169732 - DNA, 50 bp, Artificial
  Synthetic oligonucleotide
aggcgtcggttgtatcggatgcttgccagtgcacgcacgtacgtctcgct

SEQ ID NO: 169733 - DNA, 50 bp, Artificial
  Synthetic oligonucleotide
aggctctgaccagaggtagcgcggcaaccgtaacaatggtggcgccagcg

SEQ ID NO: 169734 - DNA, 50 bp, Artificial
  Synthetic oligonucleotide
agggaccgctgacgagcgcccgtgcctattcggggttctttgcgtcataa

SEQ ID NO: 169735 - DNA, 50 bp, Artificial
  Synthetic oligonucleotide
agggcaaagttggctcaaccatgttgggacccacgtgcaaaccctgacgc

SEQ ID NO: 169736 - DNA, 50 bp, Artificial
  Synthetic oligonucleotide
aggggcttcttgagacgcctgacagagtggctcgggcttgtgcggagctc

SEQ ID NO: 169737 - DNA, 55 bp, Artificial
  Synthetic oligonucleotide
ctcggcgtttcgcctggtgatggttggatcctgcggcactatcttcaagtcggcg

SEQ ID NO: 169738 - DNA, 50 bp, Artificial
  Synthetic oligonucleotide
agggttgggcgcgtttgcgtgtggacactgtagcttcccagagcgtactt

SEQ ID NO: 169739 - DNA, 50 bp, Artificial
  Synthetic oligonucleotide
aggtaagcgagctgctgagcgatataggcaccaaggtccactcagcccgc

SEQ ID NO: 169740 - DNA, 50 bp, Artificial
  Synthetic oligonucleotide
aggtgctactaggtgccatctatgaccgctggggtatgcgcaccggcaca

SEQ ID NO: 169741 - DNA, 50 bp, Artificial
  Synthetic oligonucleotide
agtagttgcccgaagcgaagggggcgatgcatccttcctcgagggaaagc

SEQ ID NO: 169742 - DNA, 50 bp, Artificial
  Synthetic oligonucleotide
agtatccgtgctcctgcacataccctatgcctgccatgccgagtccagcg

SEQ ID NO: 169743 - DNA, 50 bp, Artificial
  Synthetic oligonucleotide
agtctttggatggcagtcgctcgattcgccgtccgacccaccgtcgagcc

SEQ ID NO: 169744 - DNA, 50 bp, Artificial
  Synthetic oligonucleotide
agtgacgcgtgaagcagatgtgagtgcccgccttgaaacggcacgtcata

SEQ ID NO: 169745 - DNA, 50 bp, Artificial
  Synthetic oligonucleotide
agtgagcgcatgctcgcaaccaaacgagggcgcgaatacgcacggcaaat

SEQ ID NO: 169746 - DNA, 50 bp, Artificial
  Synthetic oligonucleotide
agtgatttatcggcggcaggccgtgttgggccacttgcactcgtgcatgt

SEQ ID NO: 169747 - DNA, 50 bp, Artificial
  Synthetic oligonucleotide
agtgccgagcaacctacctgtcacctgcgagtgcatacggtacaggcccc

SEQ ID NO: 169748 - DNA, 55 bp, Artificial
  Synthetic oligonucleotide
ctctaatgcggttgtaggactaacggcctcaacagtcccaacagcccaaacagcc

SEQ ID NO: 169749 - DNA, 50 bp, Artificial
  Synthetic oligonucleotide
agtgcggcaacaactctgcgacaagacagccagcatgcacgtgcgctcca

SEQ ID NO: 169750 - DNA, 50 bp, Artificial
  Synthetic oligonucleotide
agtggatggggacgcgtgggtcggcttttgaattccggatgtccctgact

SEQ ID NO: 169751 - DNA, 50 bp, Artificial
  Synthetic oligonucleotide
agtgtggatatctcccgggcactcgccgaagtaagcgggcacccgtcctt

SEQ ID NO: 169752 - DNA, 50 bp, Artificial
  Synthetic oligonucleotide
agttgaagtcgcatggtccgttgcggtggcaccctcctcgcaggtacaag

SEQ ID NO: 169753 - DNA, 50 bp, Artificial
  Synthetic oligonucleotide
agttggggtcctcaagcgtggggtccttcttcggcgtctttaggacaggc

SEQ ID NO: 169754 - DNA, 50 bp, Artificial
  Synthetic oligonucleotide
acgcggttgtaggggagcacacatagctggctggcggggaacaggacgga

SEQ ID NO: 169755 - DNA, 50 bp, Artificial
  Synthetic oligonucleotide
acgcgtgcgggaagcttgctaagatcccatggagtaagcagtgcgcctcc

SEQ ID NO: 169756 - DNA, 50 bp, Artificial
  Synthetic oligonucleotide
acgctaacgcacaggacgggggcctaacgcctcgcgcaaacccgcgattg

SEQ ID NO: 169757 - DNA, 50 bp, Artificial
  Synthetic oligonucleotide
acgctaccgcgtctgtacgaggcgcttcaagagtacgtcgaggcaaccgg

SEQ ID NO: 169758 - DNA, 50 bp, Artificial
  Synthetic oligonucleotide
acgctctttcgccacccggcagttggggacgctccttatctgcccccgat

SEQ ID NO: 169759 - DNA, 55 bp, Artificial
  Synthetic oligonucleotide
ctctccgacctggcttcctatcccgtcgccaatcctttgtggtatagctcctgcg

SEQ ID NO: 169760 - DNA, 50 bp, Artificial
  Synthetic oligonucleotide
acgctggccgaagccgctaccttggccggtcttccccaagctccttcatc

SEQ ID NO: 169761 - DNA, 50 bp, Artificial
  Synthetic oligonucleotide
acgctttcgcaacggcttcttgcactcacacaaggaccccggtttccggg

SEQ ID NO: 169762 - DNA, 50 bp, Artificial
  Synthetic oligonucleotide
acggaacccagcaccaacttggcgggcacccccgtgatacgcgagcacgt

SEQ ID NO: 169763 - DNA, 50 bp, Artificial
  Synthetic oligonucleotide
acggacacgaatcctgaccgccctaaaaccgactggcttccctcggccga

SEQ ID NO: 169764 - DNA, 50 bp, Artificial
  Synthetic oligonucleotide
acggagccccttgtccgttcgttgacgcgcagaaatgggaaaggagcggg

SEQ ID NO: 169765 - DNA, 50 bp, Artificial
  Synthetic oligonucleotide
acggaggtcacatacggagggcaagtggacgtctcggccgacggaggggg

SEQ ID NO: 169766 - DNA, 50 bp, Artificial
  Synthetic oligonucleotide
acggagttctttctgggtctgccgttccgctggcggctgagtcacacctc

SEQ ID NO: 169767 - DNA, 50 bp, Artificial
  Synthetic oligonucleotide
acggccttgggaggtgacatggcgacacggtacgcatgcaggcacgggtg

SEQ ID NO: 169768 - DNA, 50 bp, Artificial
  Synthetic oligonucleotide
acggcgattggagcgcggcacgtttaggcggaatgcttgactgtggccca

SEQ ID NO: 169769 - DNA, 50 bp, Artificial
  Synthetic oligonucleotide
acggcgccggaacctttcgccccggcttatcgatagcttgcccccaagta

SEQ ID NO: 169770 - DNA, 55 bp, Artificial
  Synthetic oligonucleotide
ctgagtgcttgatgtctagtaaaaccatatcggtgtggtcaagcaaatccgacac

SEQ ID NO: 169771 - DNA, 50 bp, Artificial
  Synthetic oligonucleotide
acggctccgtcttgataaccgcgcaggggagcggaacccatatgcacgcg

SEQ ID NO: 169772 - DNA, 50 bp, Artificial
  Synthetic oligonucleotide
acgggagctgctatgactccaatgacttctgcgagaggggcgcatggcgc

SEQ ID NO: 169773 - DNA, 50 bp, Artificial
  Synthetic oligonucleotide
acgggaggcccctgtggctgcgatttgcgaacgtttcgacacgctggggt

SEQ ID NO: 169774 - DNA, 50 bp, Artificial
  Synthetic oligonucleotide
acgggcctcaagctctgcgggaagcgctgtgggacagatgaagtccgatc

SEQ ID NO: 169775 - DNA, 50 bp, Artificial
  Synthetic oligonucleotide
acggggacgaacgcatgcccgcttttaaggcagccgagaaaccctgcgat

SEQ ID NO: 169776 - DNA, 50 bp, Artificial
  Synthetic oligonucleotide
acggggatttgatattgcacttaccagcaccgttcccggaggcggcggac

SEQ ID NO: 169777 - DNA, 50 bp, Artificial
  Synthetic oligonucleotide
acgacggacgcgtcgcaccgctttatacgcatcggggcccgctcacacgg

SEQ ID NO: 169778 - DNA, 50 bp, Artificial
  Synthetic oligonucleotide
acgacggtgggacgtcgggggataccggacggactgtctgcgcgagatcg

SEQ ID NO: 169779 - DNA, 50 bp, Artificial
  Synthetic oligonucleotide
acgaggcgcagtactcgaagcttgcggtccaggcaaggatgtcccaggac

SEQ ID NO: 169780 - DNA, 50 bp, Artificial
  Synthetic oligonucleotide
acgagggagcggcaccagggggccttccggtatcatgggtgagatttcgc

SEQ ID NO: 169781 - DNA, 55 bp, Artificial
  Synthetic oligonucleotide
ctgcgttaggaattgatgctcgtacctgcaacgatatgtcatacggtcaaggttt

SEQ ID NO: 169782 - DNA, 50 bp, Artificial
  Synthetic oligonucleotide
acgatgcctacaacctgcagcagtcgcttatcgccgttggctcgggtggc

SEQ ID NO: 169783 - DNA, 50 bp, Artificial
  Synthetic oligonucleotide
acgcacacgccaagggtaaccaccaaggcgacggggttcacgagcagtcg

SEQ ID NO: 169784 - DNA, 50 bp, Artificial
  Synthetic oligonucleotide
acgcactgccttttcgtcatcgtctaggcggcgggtagccgtcctgtcca

SEQ ID NO: 169785 - DNA, 50 bp, Artificial
  Synthetic oligonucleotide
acgcactgtaacgacgtttcgtgccaaatcacgccgcacgttgccacaat

SEQ ID NO: 169786 - DNA, 50 bp, Artificial
  Synthetic oligonucleotide
acgcagacgaaggagggcgccgccgattcccagtgcacggtctacggagg

SEQ ID NO: 169787 - DNA, 50 bp, Artificial
  Synthetic oligonucleotide
acgcagacgtcgcttgcctgggacgggttgcagcccaatacggagtatcg

SEQ ID NO: 169788 - DNA, 50 bp, Artificial
  Synthetic oligonucleotide
acgcagagctgacgcttcctggggagacgcaaccacaccgtgtgcctgcg

SEQ ID NO: 169789 - DNA, 50 bp, Artificial
  Synthetic oligonucleotide
acgcaggtatgaaacggggaagccccttcgacagcttgggtccgctcaca

SEQ ID NO: 169790 - DNA, 50 bp, Artificial
  Synthetic oligonucleotide
acgcatgcggatcccaactcgactccgaccgtatgacagccgccaccaaa

SEQ ID NO: 169791 - DNA, 50 bp, Artificial
  Synthetic oligonucleotide
acgcatgctccgagatgcgggggcctgtgaagtgcatgtgcgaagcgcct

SEQ ID NO: 169792 - DNA, 55 bp, Artificial
  Synthetic oligonucleotide
acggacgattctgagttcgcgagcggtacggacacgcagtatcagtacaccttcg

SEQ ID NO: 169793 - DNA, 50 bp, Artificial
  Synthetic oligonucleotide
acgcccacgggacaaccgcgttagacgcgacctgcgcagaggccgatgca

SEQ ID NO: 169794 - DNA, 50 bp, Artificial
  Synthetic oligonucleotide
acgcccatcccaccgatgccggcttggatctgcgctccaacgaggactgc

SEQ ID NO: 169795 - DNA, 50 bp, Artificial
  Synthetic oligonucleotide
acgcccggccgagctgtgccttcgctacatcccactgcggctactcccca

SEQ ID NO: 169796 - DNA, 50 bp, Artificial
  Synthetic oligonucleotide
acgccgcctagtcgaagcgctccgaacagattggagcccatcggccgaaa

SEQ ID NO: 169797 - DNA, 50 bp, Artificial
  Synthetic oligonucleotide
acgccggagaagaattggacgtgcagggctgagccgacaagccgcatatc

SEQ ID NO: 169798 - DNA, 50 bp, Artificial
  Synthetic oligonucleotide
acgcgaagccacgcgacgggatttgacggcaagacacctaaagctgacga

SEQ ID NO: 169799 - DNA, 50 bp, Artificial
  Synthetic oligonucleotide
acgcgctttcgccgaccccgctaacgtactttcaccaactgcgctaacgg

SEQ ID NO: 169800 - DNA, 50 bp, Artificial
  Synthetic oligonucleotide
actgcagctcgcacacaccgtacttggggcagcccgtgcagtcggcggga

SEQ ID NO: 169801 - DNA, 50 bp, Artificial
  Synthetic oligonucleotide
actgcccgcggaatggggagacgctcacgaggcgcagtactcgaagcttg

SEQ ID NO: 169802 - DNA, 50 bp, Artificial
  Synthetic oligonucleotide
actgcgcttagggaagacatcctgctgacgtaccgcggacgggccatacg

SEQ ID NO: 169803 - DNA, 55 bp, Artificial
  Synthetic oligonucleotide
ctgcttgggcatctgggcgtacagttcctgtttggacgtaccactggcaacgcta

SEQ ID NO: 169804 - DNA, 50 bp, Artificial
  Synthetic oligonucleotide
agaatgcatgtaaccgcgtctgcaggcctcacttcaacgcaccagcgcca

SEQ ID NO: 169805 - DNA, 50 bp, Artificial
  Synthetic oligonucleotide
agacatgcggctcggacatacggcaggcattcgactcgggcatgtagctt

SEQ ID NO: 169806 - DNA, 50 bp, Artificial
  Synthetic oligonucleotide
agacccaccgcaagctccatgcaccgcacccatttgttgggtcgaagacg

SEQ ID NO: 169807 - DNA, 50 bp, Artificial
  Synthetic oligonucleotide
agacccggcatcgcctcgagattatcgactggcctggcgacgattcccat

SEQ ID NO: 169808 - DNA, 50 bp, Artificial
  Synthetic oligonucleotide
agaccgtgagttgtgtcgccccttggtgcgtcaccctatgagccgcatat

SEQ ID NO: 169809 - DNA, 50 bp, Artificial
  Synthetic oligonucleotide
agaccgttcagcacaggccacgaatcgagaggcaccatcttgagctccga

SEQ ID NO: 169810 - DNA, 50 bp, Artificial
  Synthetic oligonucleotide
agacgcagcgtcgcgctgtgctacctcgctgaagacaactggcgcatcgg

SEQ ID NO: 169811 - DNA, 50 bp, Artificial
  Synthetic oligonucleotide
agacggcgacccgacctcgcttgccgaatcgacgccaggctcggaggcaa

SEQ ID NO: 169812 - DNA, 50 bp, Artificial
  Synthetic oligonucleotide
agacggttcgcgatgctctcaccggcataccacccgtgagaagcggcttc

SEQ ID NO: 169813 - DNA, 50 bp, Artificial
  Synthetic oligonucleotide
agacgttcgctccgcatttacccactctggcggcaaccttggtaccgctg

SEQ ID NO: 169814 - DNA, 55 bp, Artificial
  Synthetic oligonucleotide
actgagagtagtatagctgctcccgtccctgcggtctttgtggcgcttcgcgggc

SEQ ID NO: 169815 - DNA, 55 bp, Artificial
  Synthetic oligonucleotide
ctgggatgtgtagaccttagaacacatacgtgttgaggctgtatggcgcgcatgg

SEQ ID NO: 169816 - DNA, 50 bp, Artificial
  Synthetic oligonucleotide
agagacccgtgcctccgcaaactacaggtaccgagccgtctgcaagcagt

SEQ ID NO: 169817 - DNA, 50 bp, Artificial
  Synthetic oligonucleotide
agagatgcctgttgggaggcgcgtacgcaaagacacgcggggcgttaggc

SEQ ID NO: 169818 - DNA, 50 bp, Artificial
  Synthetic oligonucleotide
agagctcctgcgccctgtacgatccggcgctcgctacctacgagaacgac

SEQ ID NO: 169819 - DNA, 50 bp, Artificial
  Synthetic oligonucleotide
agatcgcggtagaggcgcgacccttcacaacgtacgagcgcacgaaagga

SEQ ID NO: 169820 - DNA, 50 bp, Artificial
  Synthetic oligonucleotide
agatctccggtgtcacctgagagcgccgtttcaggcatggcctctttggg

SEQ ID NO: 169821 - DNA, 50 bp, Artificial
  Synthetic oligonucleotide
agatctgtcgtttggtggaggatgcccgtgggctctttgcgcggttcgag

SEQ ID NO: 169822 - DNA, 50 bp, Artificial
  Synthetic oligonucleotide
agatggtgctctcgtggtgtatgggcgcagccgcgatatctccgtggaac

SEQ ID NO: 169823 - DNA, 50 bp, Artificial
  Synthetic oligonucleotide
acgggggccggcatgagaagcttgaagggggagtaatgcccaagttcacc

SEQ ID NO: 169824 - DNA, 50 bp, Artificial
  Synthetic oligonucleotide
acggttgcagggtccgcgcagtcctttgaaaggggaccggtggagatctt

SEQ ID NO: 169825 - DNA, 50 bp, Artificial
  Synthetic oligonucleotide
acgtccgcgacattgggggcattaacgactacactggcccacgcacgtga

SEQ ID NO: 169826 - DNA, 55 bp, Artificial
  Synthetic oligonucleotide
ctgtgccgcttatgctttcaaagatggtcgcaaccgataaaattagcatgtcacg

SEQ ID NO: 169827 - DNA, 50 bp, Artificial
  Synthetic oligonucleotide
acgtctgcggctgcggaggttcaacggacttcacaaaaccccgtgcagca

SEQ ID NO: 169828 - DNA, 50 bp, Artificial
  Synthetic oligonucleotide
acgtgcagattgcctcggcttgttgcgcgtgttttggtatcgcgcggcta

SEQ ID NO: 169829 - DNA, 50 bp, Artificial
  Synthetic oligonucleotide
acgtgccagattaagtggcgattcgcaagtgccgcagcgggtgcaatgga

SEQ ID NO: 169830 - DNA, 50 bp, Artificial
  Synthetic oligonucleotide
acgtgctcgttgctgagtcgggccgctattgaaatgccacctggcatccc

SEQ ID NO: 169831 - DNA, 50 bp, Artificial
  Synthetic oligonucleotide
acgtgggtcgtatgggagggccgagagcccatagggaggagttcgcatga

SEQ ID NO: 169832 - DNA, 50 bp, Artificial
  Synthetic oligonucleotide
acgtggtttcaaagtgggggcgggtgtgcccctagcaggtggtgctctcg

SEQ ID NO: 169833 - DNA, 50 bp, Artificial
  Synthetic oligonucleotide
acgttcacgagttgacagaggggcgtgtgaacatcggggcgggcacactc

SEQ ID NO: 169834 - DNA, 50 bp, Artificial
  Synthetic oligonucleotide
actcatgcggacctcccgccgataaggaaaggggctcccgtgtgtacgga

SEQ ID NO: 169835 - DNA, 50 bp, Artificial
  Synthetic oligonucleotide
actccactgacatgaggtcgtctcggcccatccagcgggtgtccctgtgc

SEQ ID NO: 169836 - DNA, 50 bp, Artificial
  Synthetic oligonucleotide
actcgagcgctgactcgtgcgagagaactatcatgcccgcctccgtgtga

SEQ ID NO: 169837 - DNA, 55 bp, Artificial
  Synthetic oligonucleotide
cttaaagacggacgtcccgtatcgatggcatgtgatgtttgccaacaattcccgc

SEQ ID NO: 169838 - DNA, 50 bp, Artificial
  Synthetic oligonucleotide
actcgcggacaggcaacccagggagccaacttccccacacagtcccctcg

SEQ ID NO: 169839 - DNA, 50 bp, Artificial
  Synthetic oligonucleotide
actcgcggggtgtaccctcgccggtcgacgcatgccgtacctgtgggtgg

SEQ ID NO: 169840 - DNA, 50 bp, Artificial
  Synthetic oligonucleotide
actcgctttgataggcaccctgcctgcccgtagcgttcgcatcagccaaa

SEQ ID NO: 169841 - DNA, 50 bp, Artificial
  Synthetic oligonucleotide
actcggtgcccgacaacgcggttggcatggctccctacgatgcgtcgtct

SEQ ID NO: 169842 - DNA, 50 bp, Artificial
  Synthetic oligonucleotide
actcgtcataccccgttgtgcccgaaacaagagcggctcccgtacgcgtt

SEQ ID NO: 169843 - DNA, 50 bp, Artificial
  Synthetic oligonucleotide
actcgtccgccgtgaacccgaggtttcctgggcaaggctaatcctcccag

SEQ ID NO: 169844 - DNA, 50 bp, Artificial
  Synthetic oligonucleotide
actgatgggtgtgctggccccctgggatattgcggtgactctcgacggag

SEQ ID NO: 169845 - DNA, 50 bp, Artificial
  Synthetic oligonucleotide
actgcacgcagttgtgtgccgccggcttattccaatcccaccagccttcg

SEQ ID NO: 169846 - DNA, 55 bp, Artificial
  Synthetic oligonucleotide
cttcacaacagtggatcgatcttgcgtgtcgtatcaatgctcgtgcgagcgaccc

SEQ ID NO: 169847 - DNA, 55 bp, Artificial
  Synthetic oligonucleotide
cttcagctgcgcgtaattcccgtcagatgaccaatcaacctttgtggagacgcct

SEQ ID NO: 169848 - DNA, 55 bp, Artificial
  Synthetic oligonucleotide
cttgttaacgtccgtcgtgtccacccaggtgacaaggttgttctgtgctcctctg

SEQ ID NO: 169849 - DNA, 55 bp, Artificial
  Synthetic oligonucleotide
gaacgactcaagcaatgaggctcgcctcgcaatagttcgtcaagagtgccccttc

SEQ ID NO: 169850 - DNA, 55 bp, Artificial
  Synthetic oligonucleotide
gaacgcacgaccacgcgttttctctggttcgaaagtaacgttcgtacacatcatt

SEQ ID NO: 169851 - DNA, 55 bp, Artificial
  Synthetic oligonucleotide
gaatccgagacgtccatgtaacgctccttgtatccaagccgtggcggcctctggg

SEQ ID NO: 169852 - DNA, 55 bp, Artificial
  Synthetic oligonucleotide
gacactttgagcaacggcgtagcactcattgatgcttgcggtaatgtatttctca

SEQ ID NO: 169853 - DNA, 55 bp, Artificial
  Synthetic oligonucleotide
cggtcagcaggatataaggacggtccaaaactgccgtgagctgggatttgtcggt

SEQ ID NO: 169854 - DNA, 55 bp, Artificial
  Synthetic oligonucleotide
gacaggaatagcctgagagggctttggcggaaagcaatgtcaccttacctgttga

SEQ ID NO: 169855 - DNA, 55 bp, Artificial
  Synthetic oligonucleotide
gaccagtctcaaatggggacaggtacaatttgaggcgcttctgccttaatcgggg

SEQ ID NO: 169856 - DNA, 55 bp, Artificial
  Synthetic oligonucleotide
atcatgcaacgcggtggaatttatgcgcttgattcgcaatttgccataccctcgg

SEQ ID NO: 169857 - DNA, 55 bp, Artificial
  Synthetic oligonucleotide
atcatccaacagttgcggtcgcaatggcgcacgtgggagcggaccctctccgctg

SEQ ID NO: 169858 - DNA, 55 bp, Artificial
  Synthetic oligonucleotide
atacggcgatgtgaatccgcatcaggtagatgcgtatttcagcaggctgcacccc

SEQ ID NO: 169859 - DNA, 55 bp, Artificial
  Synthetic oligonucleotide
caggttgccagcagaaggaggccttcaaatctgttgaacggcatggaacggcaca

SEQ ID NO: 169860 - DNA, 55 bp, Artificial
  Synthetic oligonucleotide
atacaagccacgccctatcgcaccccatactcggcgtcctcttaatcaacgcgag

SEQ ID NO: 169861 - DNA, 55 bp, Artificial
  Synthetic oligonucleotide
cagttctcttacaacctgggcgccgagtatgctaacgcagaggtcaccgtctatg

SEQ ID NO: 169862 - DNA, 55 bp, Artificial
  Synthetic oligonucleotide
catgtcggaccagctctcaacacgaaaaccctgcagatctcgaattgcaggagca

SEQ ID NO: 169863 - DNA, 55 bp, Artificial
  Synthetic oligonucleotide
catttctgggatattctttgcggcagtcttaaagccgtttgagaactcgtctacc

SEQ ID NO: 169864 - DNA, 55 bp, Artificial
  Synthetic oligonucleotide
cggttcgcagttggtacgagtagaaccggttgtgtatcgatgccagatccgcttc

SEQ ID NO: 169865 - DNA, 55 bp, Artificial
  Synthetic oligonucleotide
ccaatcggggagcgcctttgcattaggagaggtaggcccatcgatagcttgaccc

SEQ ID NO: 169866 - DNA, 55 bp, Artificial
  Synthetic oligonucleotide
ccacgctatgcggtgcaaaccggcccgtacgataggcctgagacacaggtactcg

SEQ ID NO: 169867 - DNA, 55 bp, Artificial
  Synthetic oligonucleotide
ccagcatgggcaaatagggcctggtcatattgcgtacaatcttgatgcgccggac

SEQ ID NO: 169868 - DNA, 55 bp, Artificial
  Synthetic oligonucleotide
ccagccctacttggccggtattgagccctacgatcccaactttacgcccacgcgc

SEQ ID NO: 169869 - DNA, 55 bp, Artificial
  Synthetic oligonucleotide
ccagtacgggttcgtgacgactgctcaagcggaagaagcaggggtaagtgcgcct

SEQ ID NO: 169870 - DNA, 55 bp, Artificial
  Synthetic oligonucleotide
ccatctggaccctccgaatctcccaagacgcatgagacgcccggccacggatagc

SEQ ID NO: 169871 - DNA, 55 bp, Artificial
  Synthetic oligonucleotide
cccaagctcgagggccgaaacatgctcatggtccttgctcccatcaagggcgcgt

SEQ ID NO: 169872 - DNA, 55 bp, Artificial
  Synthetic oligonucleotide
cccatcaacttcgcagtgcacttattgagagactttccgaggagtttccgcgtgc

SEQ ID NO: 169873 - DNA, 55 bp, Artificial
  Synthetic oligonucleotide
ccccatacgggccgatcataatggtaaggagggaatgcgtagctaacatcctgtg

SEQ ID NO: 169874 - DNA, 55 bp, Artificial
  Synthetic oligonucleotide
ccccgaactcattcatgaaggatgtctctcagctcctgtaccgctccgtagaggt

SEQ ID NO: 169875 - DNA, 53 bp, Artificial
  Synthetic oligonucleotide
ggcgtaccccgaccgattcgcggactacttgtaaaccaagccccccgcacaca

SEQ ID NO: 169876 - DNA, 60 bp, Artificial
  Synthetic oligonucleotide
agttcaatgacggaaaagggcacggaatctagtcagcttgcaagctggcaagctggtatc

SEQ ID NO: 169877 - DNA, 55 bp, Artificial
  Synthetic oligonucleotide
taccaaaaccccccgtgcgagttaccagctcatatgcacggggggcacaacaccc

SEQ ID NO: 169878 - DNA, 55 bp, Artificial
  Synthetic oligonucleotide
ccactggtgcgggaatctcaagtacgaagattgatccgaggctgatagtcgaatc

SEQ ID NO: 169879 - DNA, 55 bp, Artificial
  Synthetic oligonucleotide
ccagccgatagaccaacacaacacggcaaagaaagcacgcacgcattttgcggcg

SEQ ID NO: 169880 - DNA, 55 bp, Artificial
  Synthetic oligonucleotide
ccaggcgtagtaagaggaccgattgattttcaggacctggcataaccgcttgacc

SEQ ID NO: 169881 - DNA, 55 bp, Artificial
  Synthetic oligonucleotide
ccagggtgtgttgctgggtgataagcgaaggtcattcggttgccgccgagtggcc

SEQ ID NO: 169882 - DNA, 53 bp, Artificial
  Synthetic oligonucleotide
tggggcataaaccccgtggttacgccactggtccgcggcggcaattcgaaaac

SEQ ID NO: 169883 - DNA, 55 bp, Artificial
  Synthetic oligonucleotide
ccagtttgtctatgaccaccgaaccgaatactcggttaagcggatgtgccacgtg

SEQ ID NO: 169884 - DNA, 55 bp, Artificial
  Synthetic oligonucleotide
ccatcatgattacgtagctggcctctcatttggaacgtgggtacacttgctcccc

SEQ ID NO: 169885 - DNA, 55 bp, Artificial
  Synthetic oligonucleotide
gcgacaatcgaacgctggacatctgcccctcgcgaagattatctagcgcaggcca

SEQ ID NO: 169886 - DNA, 55 bp, Artificial
  Synthetic oligonucleotide
ccatgacgacaggttacgcgagagtcacctcgtgttcacccctcagtgacggtgc

SEQ ID NO: 169887 - DNA, 55 bp, Artificial
  Synthetic oligonucleotide
ccatggcgtccgccggatccctataatgggcgctcactgttcacccgactcgaac

SEQ ID NO: 169888 - DNA, 59 bp, Artificial
  Synthetic oligonucleotide
accggaaacctgaaaaatatccgcgagcagctcctacgcatcgcaggttctttcatcac

SEQ ID NO: 169889 - DNA, 55 bp, Artificial
  Synthetic oligonucleotide
cccacaatggccgttattaacccctttgcaattgaagccgagctagaccgcattg

SEQ ID NO: 169890 - DNA, 55 bp, Artificial
  Synthetic oligonucleotide
gcgaacgtcagtaagactgcatgaggtgttccgttgactgcgtcgcgcagctccc

SEQ ID NO: 169891 - DNA, 55 bp, Artificial
  Synthetic oligonucleotide
cccactagttctctttgcccaccgtgacccggtaaatgacgtgacgttcgagtgc

SEQ ID NO: 169892 - DNA, 55 bp, Artificial
  Synthetic oligonucleotide
tggcacgatatgcacgataatgcgagcgtattgctattaacgcttactctcccac

SEQ ID NO: 169893 - DNA, 55 bp, Artificial
  Synthetic oligonucleotide
catgaacgggcgcccctgatcttgatagcgaccaatagactgggccacagctagg

SEQ ID NO: 169894 - DNA, 55 bp, Artificial
  Synthetic oligonucleotide
gcgcggggctgtgctactagatgctcattctgcgcgtcgattagagcctgaccat

SEQ ID NO: 169895 - DNA, 55 bp, Artificial
  Synthetic oligonucleotide
gcgcgatactgcccttgtgtgaaactcgtcgtaatcgctaagggtatcccggccg

SEQ ID NO: 169896 - DNA, 55 bp, Artificial
  Synthetic oligonucleotide
catgcgcttacgtttgtgtaacggagttgcaacgtcgggcattgtccctagtcgg

SEQ ID NO: 169897 - DNA, 55 bp, Artificial
  Synthetic oligonucleotide
catgctcccgccttcgcctaacggctcagttgggggctgccgcgcgaatcaaaga

SEQ ID NO: 169898 - DNA, 55 bp, Artificial
  Synthetic oligonucleotide
catggacaggggaggcaaggcagtggtctacaagcgctacatcgacgacccgaac

SEQ ID NO: 169899 - DNA, 60 bp, Artificial
  Synthetic oligonucleotide
tacagcgtgcaacagggggacgtgtcaccgcgagaaggatcgctaactacttcgatgaca

SEQ ID NO: 169900 - DNA, 55 bp, Artificial
  Synthetic oligonucleotide
catggtagtgtcaccggtccaaaggtatccatgcgaaatatcgcacatatgcacg

SEQ ID NO: 169901 - DNA, 55 bp, Artificial
  Synthetic oligonucleotide
catgtggacagacggcccagccgtctacgaagccacattcaccacaatccaagcc

SEQ ID NO: 169902 - DNA, 55 bp, Artificial
  Synthetic oligonucleotide
cattaatgatgaggtcattggcgaaactctgcagcggtgtaaagagcatgaccgc

SEQ ID NO: 169903 - DNA, 55 bp, Artificial
  Synthetic oligonucleotide
gcgcgagagactcctacctctgcccctatttcagcccacgtgggaactgtccctg

SEQ ID NO: 169904 - DNA, 55 bp, Artificial
  Synthetic oligonucleotide
cattgatgctcgtatgcccgttaagacgcctcggtagtaagctatgctcatatcc

SEQ ID NO: 169905 - DNA, 55 bp, Artificial
  Synthetic oligonucleotide
gcgcccgcgcgtgttgccacaccgtaccccaattagcgagctttaaaactagtac

SEQ ID NO: 169906 - DNA, 52 bp, Artificial
  Synthetic oligonucleotide
ccaaatcggtttacggttggttgagggtaagaggtgtcgaacctccaggcag

SEQ ID NO: 169907 - DNA, 55 bp, Artificial
  Synthetic oligonucleotide
ccaaccaaagtcctcggcaattaccggaagtaacgtgccaaatagcgtgtagtca

SEQ ID NO: 169908 - DNA, 55 bp, Artificial
  Synthetic oligonucleotide
gcgagctagcagtgattggagccgatagcgagctagcagtgattggagccgatgt

SEQ ID NO: 169909 - DNA, 55 bp, Artificial
  Synthetic oligonucleotide
ccaagtccgcaatcgtggtgaaactgactgggtttacgtccgtggcctgacccag

SEQ ID NO: 169910 - DNA, 54 bp, Artificial
  Synthetic oligonucleotide
taatagtggctggtatccccgggagcggtaaaaccgttgctctacgccgcctag

SEQ ID NO: 169911 - DNA, 55 bp, Artificial
  Synthetic oligonucleotide
ccaccgaaaacacctaggagagagcacacaatgtcagacaggatcgcccacccag

SEQ ID NO: 169912 - DNA, 55 bp, Artificial
  Synthetic oligonucleotide
ccaccgagtatgaacaccgtcactccacaggccacctcgaaatagaccgtgtcaa

SEQ ID NO: 169913 - DNA, 55 bp, Artificial
  Synthetic oligonucleotide
ccaccgcgtatcggtggcacgtccagcaccataggatcgaccggctatcccatct

SEQ ID NO: 169914 - DNA, 55 bp, Artificial
  Synthetic oligonucleotide
ccaccgtgtcgaactctgctaaaagttgcaccacttcaccccaattatgcccata

SEQ ID NO: 169915 - DNA, 55 bp, Artificial
  Synthetic oligonucleotide
ccacctctccactagaacttggtgcctccatcatgcaggcctacagtcacacccg

SEQ ID NO: 169916 - DNA, 55 bp, Artificial
  Synthetic oligonucleotide
aagtcagctggaacaaatacgcgagcacgaattctggctacggtttcggacacgt

SEQ ID NO: 169917 - DNA, 55 bp, Artificial
  Synthetic oligonucleotide
aaggtggacgccacaccatgagcgaccgaaacaagcgtgacgactcgactcccgg

SEQ ID NO: 169918 - DNA, 55 bp, Artificial
  Synthetic oligonucleotide
atgtgcgaatactctaaagatgtcaccaaatgttaggtcactaaacggagcggag

SEQ ID NO: 169919 - DNA, 55 bp, Artificial
  Synthetic oligonucleotide
tgagcttcaaggcactaaggcgtggttcaatgttcgcgcttccaacacagaacca

SEQ ID NO: 169920 - DNA, 55 bp, Artificial
  Synthetic oligonucleotide
tgagttaacaacaggtcggtgctccgccactcacggcgaacattcgaccccggcc

SEQ ID NO: 169921 - DNA, 59 bp, Artificial
  Synthetic oligonucleotide
taataacgaaagctaggcaacacagcatcgctttagtaggtccagtggctcaaaaagtc

SEQ ID NO: 169922 - DNA, 55 bp, Artificial
  Synthetic oligonucleotide
attgtgcagccgcaattcagggatgaactgtgctgtcacgttttaggctaatgtg

SEQ ID NO: 169923 - DNA, 55 bp, Artificial
  Synthetic oligonucleotide
attgttcgaaccgcctgccctaggcctgcagagacagctaccaggagggcctcca

SEQ ID NO: 169924 - DNA, 55 bp, Artificial
  Synthetic oligonucleotide
atttatccccgaattgtgcgctgggccctgtcggtagcgccgtgtagcgcctagg

SEQ ID NO: 169925 - DNA, 55 bp, Artificial
  Synthetic oligonucleotide
tgatgggcggtaccttatcttccgagttagttctaggcctggccaacggccgttg

SEQ ID NO: 169926 - DNA, 55 bp, Artificial
  Synthetic oligonucleotide
gctgagtacattcacctgactaatccgacctatgcagctgtgatcgtcattgaca

SEQ ID NO: 169927 - DNA, 55 bp, Artificial
  Synthetic oligonucleotide
tgcaatccgcacgcgggaagaaaggctggcaacgaagcgctgaggtgcgtcgtga

SEQ ID NO: 169928 - DNA, 55 bp, Artificial
  Synthetic oligonucleotide
caacggggtgtgaatccccggccgttcatcacacctgtctgtcagaaacggtgac

SEQ ID NO: 169929 - DNA, 55 bp, Artificial
  Synthetic oligonucleotide
caactatagagccggaaattcaaatctccccgttgatttacatcgtgggccttgc

SEQ ID NO: 169930 - DNA, 55 bp, Artificial
  Synthetic oligonucleotide
caagcctgcgagaacaacaatccaatactgtcgccagatacatgttcgacccgtc

SEQ ID NO: 169931 - DNA, 55 bp, Artificial
  Synthetic oligonucleotide
caagcgctgcttggtggaatcgaactgatgcatgcggggagcgacatggtgtgtg

SEQ ID NO: 169932 - DNA, 55 bp, Artificial
  Synthetic oligonucleotide
acttcgctacggataccccgtgtaaggcagtcctgtacccgtaaatgtgcaagac

SEQ ID NO: 169933 - DNA, 55 bp, Artificial
  Synthetic oligonucleotide
caaggcgctgccggaaccgtggcggctcggtcgttctggagatcggggagcaaaa

SEQ ID NO: 169934 - DNA, 55 bp, Artificial
  Synthetic oligonucleotide
gctgaagttcgaacgctagtcgctaccggtctgactgtgtaagaattcgacaccg

SEQ ID NO: 169935 - DNA, 55 bp, Artificial
  Synthetic oligonucleotide
caatccgtcaggccttagcactgcgaaagctcaacacgataggccctcttcgcac

SEQ ID NO: 169936 - DNA, 55 bp, Artificial
  Synthetic oligonucleotide
gctctgacagtgcggcgggttcatagccctcggagcgtgctgcatcttcgaagct

SEQ ID NO: 169937 - DNA, 55 bp, Artificial
  Synthetic oligonucleotide
cacaccgatagccatatatgcggatttctttactacccgtccaccgtcacgtacg

SEQ ID NO: 169938 - DNA, 55 bp, Artificial
  Synthetic oligonucleotide
ggcactcgcatgagtatgtacggcatacctcccgagttatactcagaggcctgaa

SEQ ID NO: 169939 - DNA, 55 bp, Artificial
  Synthetic oligonucleotide
ggcacctagaatctggcgcacacctaacaatggccgtgaaagtggctagacctac

SEQ ID NO: 169940 - DNA, 55 bp, Artificial
  Synthetic oligonucleotide
ggcaccgagatgtactgctttccacccacgaggaggattggctaaggccctggtg

SEQ ID NO: 169941 - DNA, 55 bp, Artificial
  Synthetic oligonucleotide
ggcacactgcatcgttggcagttttggtgatagccatcaaggtttcccttccatg

SEQ ID NO: 169942 - DNA, 55 bp, Artificial
  Synthetic oligonucleotide
tgaacactcgagtcctataagagtaacccgttagagagtaacgttctcccagtaa

SEQ ID NO: 169943 - DNA, 55 bp, Artificial
  Synthetic oligonucleotide
acttggttaaatgtcgtattatgaacacgccgaggaatgaaaaccgaccgtgcac

SEQ ID NO: 169944 - DNA, 55 bp, Artificial
  Synthetic oligonucleotide
atcctctgccagtagccccgcctcagcgagttcattagctatgcggtaatgcgcg

SEQ ID NO: 169945 - DNA, 55 bp, Artificial
  Synthetic oligonucleotide
ggataactcgcactgctaccggcattagtgactccttttgcggatgtagtccacg

SEQ ID NO: 169946 - DNA, 55 bp, Artificial
  Synthetic oligonucleotide
ggagttcctttcggcatcgttgatctttcgctcgctcccactgctgaagtgggcg

SEQ ID NO: 169947 - DNA, 55 bp, Artificial
  Synthetic oligonucleotide
atcggtaggctgacggttgactgcagttcttcttgtccactttaacccacctgcg

SEQ ID NO: 169948 - DNA, 55 bp, Artificial
  Synthetic oligonucleotide
tgacaacccgagatgaagaggatgtccggcgtatcttccgaggagaaatcaccgg

SEQ ID NO: 169949 - DNA, 55 bp, Artificial
  Synthetic oligonucleotide
ggagctcggcagggagattcggattataagacacgaacttgggccttcctcgggg

SEQ ID NO: 169950 - DNA, 55 bp, Artificial
  Synthetic oligonucleotide
ggagcgtaggtacgtgccgtaacccgacttctccagtaaagcggcctgctccaag

SEQ ID NO: 169951 - DNA, 55 bp, Artificial
  Synthetic oligonucleotide
atgaacacgccgaggaatgaaaaccgaccgtgcacgctcgtgtgagaaagtcagc

SEQ ID NO: 169952 - DNA, 55 bp, Artificial
  Synthetic oligonucleotide
ggagcaagttgtgtccgacaatcacacagaccactatgtgcgagaccccgaacca

SEQ ID NO: 169953 - DNA, 54 bp, Artificial
  Synthetic oligonucleotide
ggactagtcaagggcggaccaaacgatgaggtcacaactattactcccttaggg

SEQ ID NO: 169954 - DNA, 56 bp, Artificial
  Synthetic oligonucleotide
agaaatcactccggtggtttgtgacccccgcacaatgagttggtagctcgtgcggg

SEQ ID NO: 169955 - DNA, 55 bp, Artificial
  Synthetic oligonucleotide
atgagccagccacggcactctgttttcgaatccaccgttccctcccatgttcgtg

SEQ ID NO: 169956 - DNA, 55 bp, Artificial
  Synthetic oligonucleotide
tgaccgggattgagcccacagtgatagcaagaaagacccaccaatactcgctccg

SEQ ID NO: 169957 - DNA, 55 bp, Artificial
  Synthetic oligonucleotide
ggacaatggtcagctccgttggctccgacgggccctaacaaaccgcaacgtgcga

SEQ ID NO: 169958 - DNA, 55 bp, Artificial
  Synthetic oligonucleotide
tgagattactaagtaggtaaccccatggcccttgaagttggtaccctcaacgctc

SEQ ID NO: 169959 - DNA, 55 bp, Artificial
  Synthetic oligonucleotide
gctttgtctagcccgtccggcctaatgctagccggtggtaatatcttggaattac

SEQ ID NO: 169960 - DNA, 55 bp, Artificial
  Synthetic oligonucleotide
gctacgcgcagatcactcacgcattgggatgttcacgacgggaagtatcccgagc

SEQ ID NO: 169961 - DNA, 54 bp, Artificial
  Synthetic oligonucleotide
gctagtagtttcggtattttcggccgcaacctccgcgcacaggcctttaactgg

SEQ ID NO: 169962 - DNA, 55 bp, Artificial
  Synthetic oligonucleotide
cacccctgataagttacggcttgatgttactaccggtgcggggactatgaccacc

SEQ ID NO: 169963 - DNA, 55 bp, Artificial
  Synthetic oligonucleotide
gctagtgatgtgcatgcactaaaggaaagacgtttaaatgccacaccataaggga

SEQ ID NO: 169964 - DNA, 55 bp, Artificial
  Synthetic oligonucleotide
gctatcacggtcgttaacatcaaaagagccgacgatcactcgcggggcagaggct

SEQ ID NO: 169965 - DNA, 59 bp, Artificial
  Synthetic oligonucleotide
gtcctgcacctttctcccctgcatatgggcgcttcggcgtatccccgtagccactgatt

SEQ ID NO: 169966 - DNA, 55 bp, Artificial
  Synthetic oligonucleotide
caccccttcccgagtggtgcttacctcacgtctacaaggtgccagacacgaaacc

SEQ ID NO: 169967 - DNA, 55 bp, Artificial
  Synthetic oligonucleotide
caccgagggctaagaggctatcctgtcacgtgtgactgataacgcttcgaagaat

SEQ ID NO: 169968 - DNA, 55 bp, Artificial
  Synthetic oligonucleotide
caccgatggatcatcaccaaatcacgcatgtggacagacggcccagccgtctacg

SEQ ID NO: 169969 - DNA, 55 bp, Artificial
  Synthetic oligonucleotide
tgccttcggaaggtgcgggcttgtgtgcgatacggggcgagattaggactcgtgt

SEQ ID NO: 169970 - DNA, 55 bp, Artificial
  Synthetic oligonucleotide
gctacaatcaccgagtcacctaagaggctggctcagccaatctaacggcggcaac

SEQ ID NO: 169971 - DNA, 55 bp, Artificial
  Synthetic oligonucleotide
cacccaaagaatcatcaatctgatcatctgacagttcgttaattccaagaacatc

SEQ ID NO: 169972 - DNA, 55 bp, Artificial
  Synthetic oligonucleotide
cacgaaatccatcgtagagcatagacttgtaccctatgactgatgcgctcgcaca

SEQ ID NO: 169973 - DNA, 55 bp, Artificial
  Synthetic oligonucleotide
gctcgtcattaggtacgcggtagacatactcccctagatccttcgcacctttact

SEQ ID NO: 169974 - DNA, 55 bp, Artificial
  Synthetic oligonucleotide
aagcttcgctacgtgtggttcgacccgtacgcaatgtccgtgagtgtctagccct

SEQ ID NO: 169975 - DNA, 55 bp, Artificial
  Synthetic oligonucleotide
cacctcgtatccatcggtcagaaatagcttgatctctgcctcggaaggcgcacta

SEQ ID NO: 169976 - DNA, 59 bp, Artificial
  Synthetic oligonucleotide
agaagctctcagacgcacgaggcggggtttaaatgcccgtcagggcatggaaggcgcga

SEQ ID NO: 169977 - DNA, 54 bp, Artificial
  Synthetic oligonucleotide
gctaacgacgttcatacgtggggataaccgaggttcctggaggggagaacatcg

SEQ ID NO: 169978 - DNA, 55 bp, Artificial
  Synthetic oligonucleotide
aaggaattcgcatatgcacgccaagagtctgtagtagctgtatgcttcgggcgct

SEQ ID NO: 169979 - DNA, 54 bp, Artificial
  Synthetic oligonucleotide
atgcgtcatccagagatgcgcggcttgggtaagacccacatgcggtccgcattc

SEQ ID NO: 169980 - DNA, 54 bp, Artificial
  Synthetic oligonucleotide
ctactatcatctgccgatccgtaataaacgggtgaggcaacgaggtacccacca

SEQ ID NO: 169981 - DNA, 54 bp, Artificial
  Synthetic oligonucleotide
ccctgcctgaggggcgataggcagggcttgagctatacatagtggccgttcggg

SEQ ID NO: 169982 - DNA, 54 bp, Artificial
  Synthetic oligonucleotide
aagtccagctagtaggtcgcagtcaacgcgccctcccgagtgagatcaggcccc

SEQ ID NO: 169983 - DNA, 54 bp, Artificial
  Synthetic oligonucleotide
aaaggagtagagacggtgagatcccgagaaacagtatgacatgcagcgacaggg

SEQ ID NO: 169984 - DNA, 54 bp, Artificial
  Synthetic oligonucleotide
cgtgggcggacataccgaattccggccctacgaagaggagagcaccagacatca

SEQ ID NO: 169985 - DNA, 54 bp, Artificial
  Synthetic oligonucleotide
ggccttcctctagtgcacgaagcttgagccggtaatgcagatcagagtccatac

SEQ ID NO: 169986 - DNA, 54 bp, Artificial
  Synthetic oligonucleotide
tctgatctagttcggattggcggggcttcactgtatctgggggtggcatcgtga

SEQ ID NO: 169987 - DNA, 60 bp, Artificial
  Synthetic oligonucleotide
atacatagtccgtaggttgtagccaaagacactgttaattctggcgtgctggatcatcat

SEQ ID NO: 169988 - DNA, 57 bp, Artificial
  Synthetic oligonucleotide
agactttaccacttccccacaggaagtgcgcaaagcacaacacggtcggtgtcgata

SEQ ID NO: 169989 - DNA, 54 bp, Artificial
  Synthetic oligonucleotide
agcaatcatgcggtctattctacccgctaaagctagtggtctagggtaggggat

SEQ ID NO: 169990 - DNA, 54 bp, Artificial
  Synthetic oligonucleotide
atgacagactacgcaacattgaataggattaagtgcatggcaaccaaagcggag

SEQ ID NO: 169991 - DNA, 54 bp, Artificial
  Synthetic oligonucleotide
cgatgtggggacggctcgtctggtcttaatctcaccgcatgcactctcaacaga

SEQ ID NO: 169992 - DNA, 54 bp, Artificial
  Synthetic oligonucleotide
gaggaggacccgttagaagttgactttcagcctggcgttgtagcattagccggc

SEQ ID NO: 169993 - DNA, 54 bp, Artificial
  Synthetic oligonucleotide
ccaccttcacggactttcatcgtcagcgcgtcgcaggatacgtacaggtatggt

SEQ ID NO: 169994 - DNA, 54 bp, Artificial
  Synthetic oligonucleotide
aaattatggccctgaaaccccgtatgtttaagctttatctagcgcataaaccgc

SEQ ID NO: 169995 - DNA, 54 bp, Artificial
  Synthetic oligonucleotide
cgcaggcgaaaaagtaaggtcaaaacccgagacagattggcgcacattgtcttt

SEQ ID NO: 169996 - DNA, 54 bp, Artificial
  Synthetic oligonucleotide
atacggaggcaattaggtgttctacgccacgagcgccactacatatagcacccc

SEQ ID NO: 169997 - DNA, 54 bp, Artificial
  Synthetic oligonucleotide
ccccgaatcacccctcctttacgggcgaaatctgggacgctgccgtgtggacat

SEQ ID NO: 169998 - DNA, 54 bp, Artificial
  Synthetic oligonucleotide
cgcggcacacggcaggaaaagttcctccaactcgacgagattaagcgattacac

SEQ ID NO: 169999 - DNA, 60 bp, Artificial
  Synthetic oligonucleotide
agaggagaccaccaatgactgaaccacaacgcatcaaggcctgggaaggcaagggcatga

SEQ ID NO: 170000 - DNA, 54 bp, Artificial
  Synthetic oligonucleotide
tagcaataacgcgcaaaaccgatattcgtgcaccccttattctcgttgccgtga

SEQ ID NO: 170001 - DNA, 54 bp, Artificial
  Synthetic oligonucleotide
tagtcattgtcgttgacctttcctaatactcgttacttgtcatccgcggtctgt

SEQ ID NO: 170002 - DNA, 54 bp, Artificial
  Synthetic oligonucleotide
atccccaggtagacaaagagttaactacttaatccaagaaagcgttccaccgca

SEQ ID NO: 170003 - DNA, 54 bp, Artificial
  Synthetic oligonucleotide
gatcttttgggcgaagccgaaaaccgaaagtctgattatcagcaataggtgtgt

SEQ ID NO: 170004 - DNA, 54 bp, Artificial
  Synthetic oligonucleotide
actagcgctgctcactgcaggtgctcgcctcatttctttgtgagattacttacg

SEQ ID NO: 170005 - DNA, 54 bp, Artificial
  Synthetic oligonucleotide
gtctcttgtcgaaatgtagtgcacggatactacactagcctcgacagctgacgc

SEQ ID NO: 170006 - DNA, 54 bp, Artificial
  Synthetic oligonucleotide
catcctccatcaattgcgatcacagggcttgtcaacgctttagcctagtccctt

SEQ ID NO: 170007 - DNA, 54 bp, Artificial
  Synthetic oligonucleotide
ctgatccgttggactctcaccggcaaccctactacgctcaactccaaccgttac

SEQ ID NO: 170008 - DNA, 54 bp, Artificial
  Synthetic oligonucleotide
aagattcactcaagcgaggagccctcatacgcatggacgcacaagctgtctcat

SEQ ID NO: 170009 - DNA, 54 bp, Artificial
  Synthetic oligonucleotide
ttaattgacgcaatagttcttgttggcacggaaatcaaagaccggccacaaaca

SEQ ID NO: 170010 - DNA, 58 bp, Artificial
  Synthetic oligonucleotide
agaggtgacccccagcgagagtgagagttttgcagaccctcaaactgcgaagcaccgt

SEQ ID NO: 170011 - DNA, 54 bp, Artificial
  Synthetic oligonucleotide
gcccggaacaagcccaggtaatacggttcacataccgatgaaggcccgaagata

SEQ ID NO: 170012 - DNA, 54 bp, Artificial
  Synthetic oligonucleotide
tttagcaaacgagatctgctgaggtaattcatgtgtcacagtcacgttagcaat

SEQ ID NO: 170013 - DNA, 54 bp, Artificial
  Synthetic oligonucleotide
gtgaaatcctgttggtgcctcatgccaaccgccagcaaaacctggaggcgacgt

SEQ ID NO: 170014 - DNA, 54 bp, Artificial
  Synthetic oligonucleotide
gtccgttacctggaggacggactagaggccgaccgagaggtagaacgcggctaa

SEQ ID NO: 170015 - DNA, 54 bp, Artificial
  Synthetic oligonucleotide
actgagcgggcttagctatccccctggcgcatgactacgggtacatgccaggtt

SEQ ID NO: 170016 - DNA, 54 bp, Artificial
  Synthetic oligonucleotide
gctggcagcgtcctagctgggaacacggtattgatttagtgcaatccaccggcc

SEQ ID NO: 170017 - DNA, 54 bp, Artificial
  Synthetic oligonucleotide
catcggaatgttgaccaataaaacgcaacacactacgcgcacctggaaccatcg

SEQ ID NO: 170018 - DNA, 54 bp, Artificial
  Synthetic oligonucleotide
tgcagctgaaacgcggttacgtatagcttgccatatgtctagccatacgtaacc

SEQ ID NO: 170019 - DNA, 54 bp, Artificial
  Synthetic oligonucleotide
tcccccgatagaaaaccatcgcatcaacttcccgagttactgccccacggtggg

SEQ ID NO: 170020 - DNA, 54 bp, Artificial
  Synthetic oligonucleotide
cttcaaatttggtcggcaccgtaccaaaggccgatctaatgccttccctgatgg

SEQ ID NO: 170021 - DNA, 60 bp, Artificial
  Synthetic oligonucleotide
gtcccaagcaatctttcaccgcaatcaactgcgctggtaacccaagcacctacagcaacc

SEQ ID NO: 170022 - DNA, 54 bp, Artificial
  Synthetic oligonucleotide
tgatgagcccgtaaactgtatggagcgattgccggacaaagaacgcaccaagtt

SEQ ID NO: 170023 - DNA, 54 bp, Artificial
  Synthetic oligonucleotide
gcgggaacccaagatgccagaggggtgggtgccgaactccgctcgccgatccca

SEQ ID NO: 170024 - DNA, 54 bp, Artificial
  Synthetic oligonucleotide
ggggtcgggtgtcgacatgggctccctttcgtgttcggtgatccctcttgaaaa

SEQ ID NO: 170025 - DNA, 54 bp, Artificial
  Synthetic oligonucleotide
caggcgtttgagtggagtacaccaggcgggattcttgggtgttcacagagtctg

SEQ ID NO: 170026 - DNA, 54 bp, Artificial
  Synthetic oligonucleotide
agatccataccgttgtcgttgtgagacgagtgctcccatccactggtgtggtca

SEQ ID NO: 170027 - DNA, 54 bp, Artificial
  Synthetic oligonucleotide
ccgagaggtgggtttctccaggagagacgcagcgttcttctgatgcgtagaagt

SEQ ID NO: 170028 - DNA, 54 bp, Artificial
  Synthetic oligonucleotide
agatgaccgggaccatgttcggagcccggaccacagacgcgggcctgagagcca

SEQ ID NO: 170029 - DNA, 54 bp, Artificial
  Synthetic oligonucleotide
tccttgagggcttaggaatcctggtcgcagagggtgcagacggtgaagtccgca

SEQ ID NO: 170030 - DNA, 54 bp, Artificial
  Synthetic oligonucleotide
acgctgcacgtctgattgccgtcactctcggcgggcgtagtaccgtcctcggtt

SEQ ID NO: 170031 - DNA, 54 bp, Artificial
  Synthetic oligonucleotide
cgagtccgtgactccgaacaatacgagcaatggttaaccaagggcttactgggc

SEQ ID NO: 170032 - DNA, 57 bp, Artificial
  Synthetic oligonucleotide
agatactccggtacgtacccccgctgctggaactaagctacatcgtaagactgtcca

SEQ ID NO: 170033 - DNA, 53 bp, Artificial
  Synthetic oligonucleotide
gctcacgccgtagacagataacggttcccaccccgtaggggtagcgcttggtc

SEQ ID NO: 170034 - DNA, 53 bp, Artificial
  Synthetic oligonucleotide
tttacctggtgcgttagagccgctgtaggtctcgctcttggattgggcgacat

SEQ ID NO: 170035 - DNA, 52 bp, Artificial
  Synthetic oligonucleotide
gggtacggggcgctttgtcgttgtgaaagtgtttccttcgtttcgatcgccg

SEQ ID NO: 170036 - DNA, 53 bp, Artificial
  Synthetic oligonucleotide
tggggtggcgctcgttcgatcagcaatggacattcgatgaccctcgattagct

SEQ ID NO: 170037 - DNA, 53 bp, Artificial
  Synthetic oligonucleotide
ttttctagcgcctcacataatccctgtgagtgtaagtcagacctatccttcat

SEQ ID NO: 170038 - DNA, 53 bp, Artificial
  Synthetic oligonucleotide
ggggtctggggttctccccagacggtttccggttgcgctcaaggcgctgccgg

SEQ ID NO: 170039 - DNA, 53 bp, Artificial
  Synthetic oligonucleotide
ttttgtacgacgacaggggcgatctcagacagcttcttgtacgtgtcttcatc

SEQ ID NO: 170040 - DNA, 53 bp, Artificial
  Synthetic oligonucleotide
tgaaatgtcctacgtctcgtcgatgctggaccgcatctttgggcgcatgaccg

SEQ ID NO: 170041 - DNA, 53 bp, Artificial
  Synthetic oligonucleotide
tcgtcgcttcgacccagaagtagtgacatggcaagtgagcgcacttcgatttc

SEQ ID NO: 170042 - DNA, 53 bp, Artificial
  Synthetic oligonucleotide
tgtcaatatccggttgggcgttgttaggaatacgggaggcgtcgataagcttt

SEQ ID NO: 170043 - DNA, 59 bp, Artificial
  Synthetic oligonucleotide
agatcggggagcaaaaacacgcaagggattttgaggcggcaaaagagcaatgcaggata

SEQ ID NO: 170044 - DNA, 52 bp, Artificial
  Synthetic oligonucleotide
gcgttaaagcgctataacgttaataggggtgcggtaacccaatccgtccaag

SEQ ID NO: 170045 - DNA, 53 bp, Artificial
  Synthetic oligonucleotide
tgatatgtagctagctgtgcgtgtccttctacttctttaccggagggcgctgt

SEQ ID NO: 170046 - DNA, 53 bp, Artificial
  Synthetic oligonucleotide
tctattaaggcagcacaccatatgaaagtcttccaagacgcagggatggagct

SEQ ID NO: 170047 - DNA, 53 bp, Artificial
  Synthetic oligonucleotide
ggaaccgcaacgagaaaggtacacggtcactcatatgactatgactgatccta

SEQ ID NO: 170048 - DNA, 53 bp, Artificial
  Synthetic oligonucleotide
gcgactacccgtagcgatagcgaaacgggcaagcacccagacggggcgctgag

SEQ ID NO: 170049 - DNA, 53 bp, Artificial
  Synthetic oligonucleotide
gaggggcgataggcagggcttgagctatacatagtggccgttcgggggagcga

SEQ ID NO: 170050 - DNA, 53 bp, Artificial
  Synthetic oligonucleotide
ttccccttatagttccccaccggggtaccactcacactactgtgttgcaacaa

SEQ ID NO: 170051 - DNA, 53 bp, Artificial
  Synthetic oligonucleotide
ttccatcgttgtccgttggcccgctccactcgatcccaacgctgtacccgttg

SEQ ID NO: 170052 - DNA, 53 bp, Artificial
  Synthetic oligonucleotide
ttgctgcgcttatgctgcctccaagcgcggcgtaatacatacggtcttctggc

SEQ ID NO: 170053 - DNA, 53 bp, Artificial
  Synthetic oligonucleotide
gtcttaatccgcatcgatatcgtctaactgcccctccggccacactacatttt

SEQ ID NO: 170054 - DNA, 60 bp, Artificial
  Synthetic oligonucleotide
agattgtagaaacaggaagcattaatgatgaggtcattggcgaaactctgcagcggtgta

SEQ ID NO: 170055 - DNA, 53 bp, Artificial
  Synthetic oligonucleotide
tcggatgcaatcgagtcgtatcgtgatgcggtcatagaacaagagactgtttc

SEQ ID NO: 170056 - DNA, 53 bp, Artificial
  Synthetic oligonucleotide
taagactgttgatggaaggtagcttgccagggtgcctcggaagcctcccatgc

SEQ ID NO: 170057 - DNA, 53 bp, Artificial
  Synthetic oligonucleotide
tgtatcgtgcgaaccttcgacgtacgacttctgcaatagacccaacatcgttg

SEQ ID NO: 170058 - DNA, 53 bp, Artificial
  Synthetic oligonucleotide
gcctagccattgtctgacgatctcgcatcggtggcatctcagatttacgccca

SEQ ID NO: 170059 - DNA, 53 bp, Artificial
  Synthetic oligonucleotide
tcggaagtcgcctacccctgtgccgccacggcttcagcagtcatcgtcgaagg

SEQ ID NO: 170060 - DNA, 53 bp, Artificial
  Synthetic oligonucleotide
tcttcccagtatccgtgctggattgggtacagaccttcatcctcggtgcgagc

SEQ ID NO: 170061 - DNA, 53 bp, Artificial
  Synthetic oligonucleotide
ttcacggtgtaggagacccggacgaaatcaccactgtcaccctaacgatcttc

SEQ ID NO: 170062 - DNA, 53 bp, Artificial
  Synthetic oligonucleotide
tgttagcccttgggtacgtttcatgcccgtgttttctctgctcagcgatgtaa

SEQ ID NO: 170063 - DNA, 53 bp, Artificial
  Synthetic oligonucleotide
actcccgcccagcaagcaatcgaaaacacgcacctgcactacgtatttatcat

SEQ ID NO: 170064 - DNA, 53 bp, Artificial
  Synthetic oligonucleotide
aaaatttcgtctgggcttgccaccagtaacgagttttgggtgctttcttgagt

SEQ ID NO: 170065 - DNA, 56 bp, Artificial
  Synthetic oligonucleotide
gtcagacattgcccagagtccggttctgaaaaagcgtctagaagcggttaagtctt

SEQ ID NO: 170066 - DNA, 53 bp, Artificial
  Synthetic oligonucleotide
ctagactaataaccgtggacagaaatatgcccacaataaccgggcttacacca

SEQ ID NO: 170067 - DNA, 53 bp, Artificial
  Synthetic oligonucleotide
cggatgcactacctcagacccgagatttcttgaaaatgccaggtcacaccgcg

SEQ ID NO: 170068 - DNA, 53 bp, Artificial
  Synthetic oligonucleotide
agaccgcgcgcaactctataagcaatcccagccgaagatgacccgatcaaagt

SEQ ID NO: 170069 - DNA, 53 bp, Artificial
  Synthetic oligonucleotide
agattcgcatgcggaccagaataaccggtgccgtcattaggatcagacaggtg

SEQ ID NO: 170070 - DNA, 53 bp, Artificial
  Synthetic oligonucleotide
aatggttcaaggaccccacccctccgggcgcgtggtatctgtacgcatgccag

SEQ ID NO: 170071 - DNA, 53 bp, Artificial
  Synthetic oligonucleotide
agcgtacgttgtattccgggacatcataggatgggatgaggggctagactggt

SEQ ID NO: 170072 - DNA, 53 bp, Artificial
  Synthetic oligonucleotide
agctacggaagattatgtagtcgccgatattcccgctaaggcgtgggcagaat

SEQ ID NO: 170073 - DNA, 53 bp, Artificial
  Synthetic oligonucleotide
agcttcggtaagctgcagttcggtacgcaactgatctaccactccgatggtac

SEQ ID NO: 170074 - DNA, 53 bp, Artificial
  Synthetic oligonucleotide
agcttgcagaccaattccgagagtgggagccaacggcccttatttgctactgg

SEQ ID NO: 170075 - DNA, 53 bp, Artificial
  Synthetic oligonucleotide
ccgcactttagcgactgcagttatgcgtaaacatcgcttagctgagcgccttc

SEQ ID NO: 170076 - DNA, 60 bp, Artificial
  Synthetic oligonucleotide
gtaggtgttttagtgtgcgcattctgcgcatgagtctgtaaactcatgaccgtgctttct

SEQ ID NO: 170077 - DNA, 53 bp, Artificial
  Synthetic oligonucleotide
aggcgaagggtacggcagttcagctacggcggggcgtgcaacgagtgctgagc

SEQ ID NO: 170078 - DNA, 53 bp, Artificial
  Synthetic oligonucleotide
ccgaatgcttcttcttactcacggggtacctcctactagacttgatagtgtcc

SEQ ID NO: 170079 - DNA, 53 bp, Artificial
  Synthetic oligonucleotide
agtaggttacgttcgggtaagttacgtgtttatgctgcacgttcgccaaattg

SEQ ID NO: 170080 - DNA, 53 bp, Artificial
  Synthetic oligonucleotide
agtgggcaacacgatggctcgaggaaagaagctgattactggtgtatatacct

SEQ ID NO: 170081 - DNA, 53 bp, Artificial
  Synthetic oligonucleotide
ccccagtgtttgagagtagcgcggctgtgtatgcccttgtgtctgaggcaatt

SEQ ID NO: 170082 - DNA, 53 bp, Artificial
  Synthetic oligonucleotide
ccccactgataagccctatacagcaccactagacctagaccagcaagcggtgc

SEQ ID NO: 170083 - DNA, 53 bp, Artificial
  Synthetic oligonucleotide
ccccacatacccgtgcgagttctctcgtgacagtcaaggctaagcccatgaac

SEQ ID NO: 170084 - DNA, 53 bp, Artificial
  Synthetic oligonucleotide
atcctgtagccgccctgattccacatttgtccaataggcttcatagaatgcaa

SEQ ID NO: 170085 - DNA, 53 bp, Artificial
  Synthetic oligonucleotide
atggcagcttcgcgagtgcgaacgatgaaataaccatcgaagagcgttcccaa

SEQ ID NO: 170086 - DNA, 53 bp, Artificial
  Synthetic oligonucleotide
aacggcgctcgtaaccgtcatcgtcgccatagcgcggggcgctagcaccaccg

SEQ ID NO: 170087 - DNA, 58 bp, Artificial
  Synthetic oligonucleotide
ggtttatgcacgttatccacgcaacggaaaaacagcccgcgagctggcagaacgtgcc

SEQ ID NO: 170088 - DNA, 53 bp, Artificial
  Synthetic oligonucleotide
cagacccgagcgagctttcaccgccgagtactgctgagggtcgccaactaaga

SEQ ID NO: 170089 - DNA, 53 bp, Artificial
  Synthetic oligonucleotide
acagatagcacgacccgcctatgccaggaagcgcacctcatcctgttcgacgc

SEQ ID NO: 170090 - DNA, 53 bp, Artificial
  Synthetic oligonucleotide
aaaactgacctattttgtcacaacgtaacccgacgcacatgatgtgcaaacgg

SEQ ID NO: 170091 - DNA, 53 bp, Artificial
  Synthetic oligonucleotide
aaaacacacgcatgtaatttaagctggtctaaacgaaaaaatgagcgtcgaac

SEQ ID NO: 170092 - DNA, 53 bp, Artificial
  Synthetic oligonucleotide
acacgttagaagatcccagtacgcacatccgtccgggactattcggtgacgcg

SEQ ID NO: 170093 - DNA, 52 bp, Artificial
  Synthetic oligonucleotide
gggacattctaactggccagtccgactactcataatgcctcagccgcatcta

SEQ ID NO: 170094 - DNA, 52 bp, Artificial
  Synthetic oligonucleotide
tgagagacgcgttcgggtactccatcaactaggtcgccgagccaccaataac

SEQ ID NO: 170095 - DNA, 52 bp, Artificial
  Synthetic oligonucleotide
aaaagagcctgcgcataagttgacacacgcctgcgcataagttgacacacgc

SEQ ID NO: 170096 - DNA, 52 bp, Artificial
  Synthetic oligonucleotide
aatagctgaccgttagtgttctgtggcagcgcgtagagagtcccgttgtaag

SEQ ID NO: 170097 - DNA, 52 bp, Artificial
  Synthetic oligonucleotide
ggggagaaggtagcagagttcaccggtgctcaggatcgggatacgctacggt

SEQ ID NO: 170098 - DNA, 60 bp, Artificial
  Synthetic oligonucleotide
atacgacggacgcgccagcatcacgagactgggccagtgccgcgagcgacctagaaactc

SEQ ID NO: 170099 - DNA, 57 bp, Artificial
  Synthetic oligonucleotide
ggtgttcacttctatttcagtgttactcagtgttacctagacccgatgttgtgcggg

SEQ ID NO: 170100 - DNA, 52 bp, Artificial
  Synthetic oligonucleotide
ggggatcgtcgtccacagttgtgcacagttatccacagcgttcggtggataa

SEQ ID NO: 170101 - DNA, 52 bp, Artificial
  Synthetic oligonucleotide
ccgatgccataggacagcacccatgtggtgactaggtaaaacagtgtgtagc

SEQ ID NO: 170102 - DNA, 52 bp, Artificial
  Synthetic oligonucleotide
accacccatgccaggagtacggatctgaaagatgcaacggaggtcttagcgc

SEQ ID NO: 170103 - DNA, 52 bp, Artificial
  Synthetic oligonucleotide
gaggtgcgaagattgcacgcgtggggattgagggtgtgaatcccactgtcgt

SEQ ID NO: 170104 - DNA, 52 bp, Artificial
  Synthetic oligonucleotide
ggggtagctcgcccttatggctatacggccgcactaagcattatcgacgccc

SEQ ID NO: 170105 - DNA, 52 bp, Artificial
  Synthetic oligonucleotide
ggggtatgaaaccggctagcgcaccaacttaacgccctgatcctccaaaacg

SEQ ID NO: 170106 - DNA, 52 bp, Artificial
  Synthetic oligonucleotide
aggcatgaaggctaagcggggtcgaccgaataaaagcgaaacgccataagca

SEQ ID NO: 170107 - DNA, 52 bp, Artificial
  Synthetic oligonucleotide
aatctgccgattcgcggcgccacaacttcatagccacctagcctaatgcccg

SEQ ID NO: 170108 - DNA, 52 bp, Artificial
  Synthetic oligonucleotide
gggttgactcgggagccacgacttaatccttaagagactaaaactagagatg

SEQ ID NO: 170109 - DNA, 52 bp, Artificial
  Synthetic oligonucleotide
gaaccagccgagcggtagcgttgctaatttatcgcccacagtcgtgtgcgcg

SEQ ID NO: 170110 - DNA, 55 bp, Artificial
  Synthetic oligonucleotide
agcgggcgttatctgcccaacgacgggaacaaagcacggtaaagaactggcacga

SEQ ID NO: 170111 - DNA, 51 bp, Artificial
  Synthetic oligonucleotide
ggtagcgttacccccatttcggtctacttctttcgcggagttaccacctcc

SEQ ID NO: 170112 - DNA, 52 bp, Artificial
  Synthetic oligonucleotide
tagttatgccggtaggcggcgagtcttccttctactcggactgggagcaggc

SEQ ID NO: 170113 - DNA, 52 bp, Artificial
  Synthetic oligonucleotide
acaggtcggcctttagaggaaacgccaatctcactacgaccgtgatcctcag

SEQ ID NO: 170114 - DNA, 52 bp, Artificial
  Synthetic oligonucleotide
tcgtctgcgacttggccccaattggattgggattaatcctcagtcgggtaaa

SEQ ID NO: 170115 - DNA, 52 bp, Artificial
  Synthetic oligonucleotide
gagcgatcgggcgctctgactcgattaccaggttcgcggcttcacgccgata

SEQ ID NO: 170116 - DNA, 52 bp, Artificial
  Synthetic oligonucleotide
caccggccagggtctcacgattggtggtaaagctggcccacttgagggtcgc

SEQ ID NO: 170117 - DNA, 52 bp, Artificial
  Synthetic oligonucleotide
attgcttggcggaactgtacgttcaaggtagcgatgtggacctaaaggcctt

SEQ ID NO: 170118 - DNA, 52 bp, Artificial
  Synthetic oligonucleotide
gcggacattgtctgggataccggcattgaattcggcacactctccgcggaac

SEQ ID NO: 170119 - DNA, 52 bp, Artificial
  Synthetic oligonucleotide
attgatcgtgccaacgttgatctctgcgcaacgccactcaatggtgctttca

SEQ ID NO: 170120 - DNA, 52 bp, Artificial
  Synthetic oligonucleotide
tggttccctcagctgagatcaaccgatcaccgaaggaccatcggcggatcca

SEQ ID NO: 170121 - DNA, 60 bp, Artificial
  Synthetic oligonucleotide
ggtggcacgtccagcaccataggatcgaccggctagcccatctacgcgacgaggtgagga

SEQ ID NO: 170122 - DNA, 52 bp, Artificial
  Synthetic oligonucleotide
gctgtcggcgccacagatggctcgcgaagctcaactcggcagtttagccaag

SEQ ID NO: 170123 - DNA, 52 bp, Artificial
  Synthetic oligonucleotide
gacaggcattcggtgaacatacgtactcacaactagtcgccacaacgttgct

SEQ ID NO: 170124 - DNA, 52 bp, Artificial
  Synthetic oligonucleotide
gacacctttctcgcgtagagcaacgagaagtgggcgcgggtcatcggtagcc

SEQ ID NO: 170125 - DNA, 52 bp, Artificial
  Synthetic oligonucleotide
gcgcaaaccgagcgacaacaatcagttagttaaataggtcaagcgtctctgt

SEQ ID NO: 170126 - DNA, 52 bp, Artificial
  Synthetic oligonucleotide
catttgcaggcgaatacactgaccgtgaggtcaccttgattcacaagcttgt

SEQ ID NO: 170127 - DNA, 52 bp, Artificial
  Synthetic oligonucleotide
ccaacgtgggcggaagcgcaactgttggcgattaggcaggagcggggcagga

SEQ ID NO: 170128 - DNA, 52 bp, Artificial
  Synthetic oligonucleotide
gaatcgaatctaacacacctcgccgctgtgacttttccagcgagcattcgtt

SEQ ID NO: 170129 - DNA, 52 bp, Artificial
  Synthetic oligonucleotide
agttaaagtgtagccatgtctgacttgcgtaagccctccgtcgcacgttcgc

SEQ ID NO: 170130 - DNA, 52 bp, Artificial
  Synthetic oligonucleotide
cagcgggagcgaggtcatccggagaagtagtcacgcgtgcaactttagttta

SEQ ID NO: 170131 - DNA, 52 bp, Artificial
  Synthetic oligonucleotide
gcctaggactctcggcctacccccaaatgcctatacccattggcctactgtg

SEQ ID NO: 170132 - DNA, 53 bp, Artificial
  Synthetic oligonucleotide
gtggaaccgcgcccgggaggatactggggaaaagttgagggacgacttagcta

SEQ ID NO: 170133 - DNA, 52 bp, Artificial
  Synthetic oligonucleotide
aaggctggggaagccccaacgtgggcggaagcgcaactgttggcgattaggc

SEQ ID NO: 170134 - DNA, 52 bp, Artificial
  Synthetic oligonucleotide
tgagctgctttaggatggccgcatggataccgaacctctccgcattgcagtc

SEQ ID NO: 170135 - DNA, 52 bp, Artificial
  Synthetic oligonucleotide
agcacccacaataggagtacgttcggttacagactccggggcggtaatcttg

SEQ ID NO: 170136 - DNA, 52 bp, Artificial
  Synthetic oligonucleotide
agatacctatgcggatttccccgatatcaaggcggttgttatctccgcggag

SEQ ID NO: 170137 - DNA, 52 bp, Artificial
  Synthetic oligonucleotide
ctgcccacaggatttggactaacatttgtggtttgaactgggaacgcagcac

SEQ ID NO: 170138 - DNA, 52 bp, Artificial
  Synthetic oligonucleotide
gcactgatccgcccatttgttcactaccggcagggcgcaccattcgcacaaa

SEQ ID NO: 170139 - DNA, 52 bp, Artificial
  Synthetic oligonucleotide
gatactctcggcggacacagcacgcttctcggctcgtttggagccagcgaca

SEQ ID NO: 170140 - DNA, 52 bp, Artificial
  Synthetic oligonucleotide
agaacagtcgcccgagaaagtagtggccactatgccggtggagggtaatact

SEQ ID NO: 170141 - DNA, 52 bp, Artificial
  Synthetic oligonucleotide
tttatcgcccacagtcgtgtgcgcggttcggatgaaatccaaggccgtgtgg

SEQ ID NO: 170142 - DNA, 52 bp, Artificial
  Synthetic oligonucleotide
gcacagagtccgcgttagagcttgccggatacgtggctaaaggagagtcccc

SEQ ID NO: 170143 - DNA, 60 bp, Artificial
  Synthetic oligonucleotide
acggtaaaggatcacctccatcctctgcgcgttcagaccattccagtgccgagccctgcc

SEQ ID NO: 170144 - DNA, 52 bp, Artificial
  Synthetic oligonucleotide
gtcgccccaacctgtgcatacttcgtacccgaataatgcctcatcgagtgaa

SEQ ID NO: 170145 - DNA, 52 bp, Artificial
  Synthetic oligonucleotide
actctaaggctctgggtaaatgcgagtacgttcaactgaccaacaagcagta

SEQ ID NO: 170146 - DNA, 52 bp, Artificial
  Synthetic oligonucleotide
ctacgcagagcatcgagttgcggtggagctacgagatacaagcgctgcttct

SEQ ID NO: 170147 - DNA, 52 bp, Artificial
  Synthetic oligonucleotide
ctgagttaggagccctgccgttgtgagcatagcgacggttaccgatccctgt

SEQ ID NO: 170148 - DNA, 52 bp, Artificial
  Synthetic oligonucleotide
acgtatccgagagaacagtacgaaacgcagtcaaagatgctggtatcgagtt

SEQ ID NO: 170149 - DNA, 52 bp, Artificial
  Synthetic oligonucleotide
actcgcgggtctaagatgtgggccacgacgaaccctgacacaccgggtcatt

SEQ ID NO: 170150 - DNA, 52 bp, Artificial
  Synthetic oligonucleotide
gtctctggcgaggaccacgcctactactcagactttgggtcggtggaagcgc

SEQ ID NO: 170151 - DNA, 52 bp, Artificial
  Synthetic oligonucleotide
ctctagcggattcacgagacattgacacaccggcctggaaattttccgctga

SEQ ID NO: 170152 - DNA, 52 bp, Artificial
  Synthetic oligonucleotide
aaaatatgccttttacctgcggttacgtatggctagacatatggcaagctat

SEQ ID NO: 170153 - DNA, 52 bp, Artificial
  Synthetic oligonucleotide
gtctttttcgaagtgaaccatcccagagtccagggcgtcagacatggttggc

SEQ ID NO: 170154 - DNA, 60 bp, Artificial
  Synthetic oligonucleotide
acggtgtgcaatctattcacgatgccacccccagatacagtgaagccccgccaatccgaa

SEQ ID NO: 170155 - DNA, 52 bp, Artificial
  Synthetic oligonucleotide
agcggaggggcactggccacacgcacaacctgatacgcggattaagggcggt

SEQ ID NO: 170156 - DNA, 52 bp, Artificial
  Synthetic oligonucleotide
aaaagcgtgcgcagatttacccatacggtggcgaattatccagagcaatagg

SEQ ID NO: 170157 - DNA, 52 bp, Artificial
  Synthetic oligonucleotide
tcatcaccgtccaatccttgagccgtaaagattccgatccgaaaattttgga

SEQ ID NO: 170158 - DNA, 52 bp, Artificial
  Synthetic oligonucleotide
cctttccagtacagatacgtgttgtgacgcaccgtggtgcgtgtgcttccta

SEQ ID NO: 170159 - DNA, 52 bp, Artificial
  Synthetic oligonucleotide
cgcacaaaattggcctaagtcaggttagaagggaatcagcacaccgtctcgt

SEQ ID NO: 170160 - DNA, 52 bp, Artificial
  Synthetic oligonucleotide
tttacacccagtcccaacctgggagaaagcttgagcatgactatacccgatc

SEQ ID NO: 170161 - DNA, 52 bp, Artificial
  Synthetic oligonucleotide
ttggtacggactatttagcgttgttgttggtctcgcgggtagttcatcaggg

SEQ ID NO: 170162 - DNA, 51 bp, Artificial
  Synthetic oligonucleotide
cagcatgacacacgcccctatcaaggaccttcgggagttctggagagacct

SEQ ID NO: 170163 - DNA, 51 bp, Artificial
  Synthetic oligonucleotide
atccgctccgtcacaacgtcgcgtgtgtctcaaatactcaacgggctcggt

SEQ ID NO: 170164 - DNA, 51 bp, Artificial
  Synthetic oligonucleotide
atgaacgtgttgaatagttctgataaacggcttattttgctcgtccctcat

SEQ ID NO: 170165 - DNA, 59 bp, Artificial
  Synthetic oligonucleotide
gtgaggcttctatccagttgcgtagtggggataaggattctattaagcgtgcggcccac

SEQ ID NO: 170166 - DNA, 51 bp, Artificial
  Synthetic oligonucleotide
ggaacgtatgacggatgcgaagatcattgacgcgtacgaacgtgcctacaa

SEQ ID NO: 170167 - DNA, 51 bp, Artificial
  Synthetic oligonucleotide
atggagtttctctggcctaaagcgactcggtgagttcgtaaatctataagt

SEQ ID NO: 170168 - DNA, 51 bp, Artificial
  Synthetic oligonucleotide
gtgcagccacgattgctggtgcgtcgtccaaccctgtgcccgtgagaaaac

SEQ ID NO: 170169 - DNA, 51 bp, Artificial
  Synthetic oligonucleotide
agcgtgtgagtaaacgcgcagaggggcgctactttggtctgattagttacc

SEQ ID NO: 170170 - DNA, 51 bp, Artificial
  Synthetic oligonucleotide
tcgggagttgttgggcatgcaggtcgcaacgagtgaatcagtggcatcgtg

SEQ ID NO: 170171 - DNA, 51 bp, Artificial
  Synthetic oligonucleotide
agcttccccaaacgacatttgccgagaaccgaggaaactccaccacgttcg

SEQ ID NO: 170172 - DNA, 51 bp, Artificial
  Synthetic oligonucleotide
tgtgatggcagtcagtttgccgtagctaaattcggggtaggcgctgtcagc

SEQ ID NO: 170173 - DNA, 51 bp, Artificial
  Synthetic oligonucleotide
tcaggcccagggggatgatcatgaggattgacccgaggagcaacagtggtt

SEQ ID NO: 170174 - DNA, 51 bp, Artificial
  Synthetic oligonucleotide
gtcgtgttcctacgtaatcgtgtcccggtaggagtccgaagatgagtagga

SEQ ID NO: 170175 - DNA, 51 bp, Artificial
  Synthetic oligonucleotide
taccccgccgggctacatctgcaaaacgggaggcaccaccggttacacctg

SEQ ID NO: 170176 - DNA, 60 bp, Artificial
  Synthetic oligonucleotide
acgtacatcagcgtctatgtaatcaatgcccaaagcacgcttagccccacgtgaccagga

SEQ ID NO: 170177 - DNA, 51 bp, Artificial
  Synthetic oligonucleotide
cacagggagagctcagcgagctagggccccaggcgtggatcttgttagact

SEQ ID NO: 170178 - DNA, 51 bp, Artificial
  Synthetic oligonucleotide
acgactcattgcaggagaagcaccaaacttcctcattctgtcgtacctccc

SEQ ID NO: 170179 - DNA, 51 bp, Artificial
  Synthetic oligonucleotide
agcaccataagcgcgagcactcccacgatgccggcaataggagcgatacca

SEQ ID NO: 170180 - DNA, 51 bp, Artificial
  Synthetic oligonucleotide
gtcagcggtagggaagggtccaattgcgccaagtatttcctggcaaacccg

SEQ ID NO: 170181 - DNA, 51 bp, Artificial
  Synthetic oligonucleotide
gtcaatcatcgtcagcctcttgtgggaaaatcccgtcgaattctgcgttaa

SEQ ID NO: 170182 - DNA, 51 bp, Artificial
  Synthetic oligonucleotide
gtcaacgctgggtcgttgattccatcgggaaagacggttccattacggccc

SEQ ID NO: 170183 - DNA, 51 bp, Artificial
  Synthetic oligonucleotide
agagtgggagtatgacggggaagatcccatcgtaggtacgccgttgcccgc

SEQ ID NO: 170184 - DNA, 51 bp, Artificial
  Synthetic oligonucleotide
tcctctgagatgggaaaatgcgttgagcgcagtacgctgaccccggcttct

SEQ ID NO: 170185 - DNA, 51 bp, Artificial
  Synthetic oligonucleotide
ggcggacggacttcaacccgaattcgatatttccccgtgcggtgaaccaag

SEQ ID NO: 170186 - DNA, 51 bp, Artificial
  Synthetic oligonucleotide
taagaaacgaacggcctcttttcctgagagacgtttaagcgcaaggactgc

SEQ ID NO: 170187 - DNA, 60 bp, Artificial
  Synthetic oligonucleotide
acgtcaccatgatgaattagtcgtggcctcgattgatcgtctggccaggtcattagtgga

SEQ ID NO: 170188 - DNA, 51 bp, Artificial
  Synthetic oligonucleotide
agaatgctacttcctggccaaaccatccccggtgtgtcagatgttacgcga

SEQ ID NO: 170189 - DNA, 51 bp, Artificial
  Synthetic oligonucleotide
tcgcggtatatacctcgccgtaagtcaacggggttgccgagccacccatga

SEQ ID NO: 170190 - DNA, 51 bp, Artificial
  Synthetic oligonucleotide
taccttgtccgcaatggggtgtatacgtcgcctgggtatggcacgattcac

SEQ ID NO: 170191 - DNA, 51 bp, Artificial
  Synthetic oligonucleotide
agttggggcgagaagatgcacgttggtgggtgtttcacgccagttcgttgc

SEQ ID NO: 170192 - DNA, 51 bp, Artificial
  Synthetic oligonucleotide
ataacgcggtgaatctctacgctcacgccaccaatattgcgagtgaccaca

SEQ ID NO: 170193 - DNA, 51 bp, Artificial
  Synthetic oligonucleotide
atcaaacccaacaacctacctgctccttctgatcgcgggatttgttgttgt

SEQ ID NO: 170194 - DNA, 51 bp, Artificial
  Synthetic oligonucleotide
aagccggctgaccctcatgcgcgatgagcgtagtgacaacgcggcctttcg

SEQ ID NO: 170195 - DNA, 51 bp, Artificial
  Synthetic oligonucleotide
aagagagcccccgactacgaccgtttcggaaagttcagggttgtagtcgga

SEQ ID NO: 170196 - DNA, 51 bp, Artificial
  Synthetic oligonucleotide
tggagtgttattgacatctgtaagatttggcacccgccaattcgaggaaac

SEQ ID NO: 170197 - DNA, 51 bp, Artificial
  Synthetic oligonucleotide
tccgtagctacggcataagccgcggtaagatgcatcccacatcttttggcg

SEQ ID NO: 170198 - DNA, 57 bp, Artificial
  Synthetic oligonucleotide
acgtcccgtagaggtctacaaacccatcgacgcagagcaggtcacccagtggctaag

SEQ ID NO: 170199 - DNA, 51 bp, Artificial
  Synthetic oligonucleotide
tcggccgttaagcccatcgcattccgtatgacgagttaagggaacaagatg

SEQ ID NO: 170200 - DNA, 51 bp, Artificial
  Synthetic oligonucleotide
gaaccgttccaatattccaactctctcacgcatcgcatacctacgcgcgtc

SEQ ID NO: 170201 - DNA, 51 bp, Artificial
  Synthetic oligonucleotide
ttagatggcttccgcgaatttgcgatgccagcaggggcacgtgtggaagta

SEQ ID NO: 170202 - DNA, 51 bp, Artificial
  Synthetic oligonucleotide
cattgtggtcgggtcttggatggatgtctaatctgcgctatggcgcgtcga

SEQ ID NO: 170203 - DNA, 51 bp, Artificial
  Synthetic oligonucleotide
ctttatggaaagtgttgctctcaagcacattcgttgcgcctggaaatttga

SEQ ID NO: 170204 - DNA, 51 bp, Artificial
  Synthetic oligonucleotide
cttcgctcggaaggattgcttccggactaggggggggtcatctcgtaagca

SEQ ID NO: 170205 - DNA, 51 bp, Artificial
  Synthetic oligonucleotide
cccacccgatcgtctgctcacactccgttttcctctggcgatacgcttgct

SEQ ID NO: 170206 - DNA, 51 bp, Artificial
  Synthetic oligonucleotide
gatactgcgatgtctcacacagaaacggctcgagtatcgatgtcttgcgac

SEQ ID NO: 170207 - DNA, 51 bp, Artificial
  Synthetic oligonucleotide
ctcttgagcttgacttctttcgggagggtttccactacctttccgttgctg

SEQ ID NO: 170208 - DNA, 51 bp, Artificial
  Synthetic oligonucleotide
aaaatacggataagtgcgaccaagttgtacgtctttaagctccgcaccatc

SEQ ID NO: 170209 - DNA, 52 bp, Artificial
  Synthetic oligonucleotide
atagcaggggtaaaacgcccccactatcgcactgaaaaagcccgcccaacgt

SEQ ID NO: 170210 - DNA, 60 bp, Artificial
  Synthetic oligonucleotide
acgttataacgtcgcgacgctatagcgctataacgtgataacgttgtatgcagctagacg

SEQ ID NO: 170211 - DNA, 51 bp, Artificial
  Synthetic oligonucleotide
ctcaaactggacgacgttgaacataaaacctggtcaaaacgggaactacca

SEQ ID NO: 170212 - DNA, 51 bp, Artificial
  Synthetic oligonucleotide
ctatatcggctctaattctaagcgtgctaaaccactcgacccgctgatttc

SEQ ID NO: 170213 - DNA, 51 bp, Artificial
  Synthetic oligonucleotide
gcctagatgtgcgcgccgtgttcttctacgtgcgcacgggagaggatttcg

SEQ ID NO: 170214 - DNA, 51 bp, Artificial
  Synthetic oligonucleotide
gattcactagtaagaggatctgtagggtctagtgctacggcattggagtga

SEQ ID NO: 170215 - DNA, 51 bp, Artificial
  Synthetic oligonucleotide
aaaattgggccgcagctactcgctagagggtgtgaccgaacgcgttaacga

SEQ ID NO: 170216 - DNA, 51 bp, Artificial
  Synthetic oligonucleotide
ctagtggtgtgatcgctgcggaaacggaattagcgtctatccctgagtctg

SEQ ID NO: 170217 - DNA, 51 bp, Artificial
  Synthetic oligonucleotide
ccctaatctcgcactgatccgcccatttgttcactaccggcagggcgcacc

SEQ ID NO: 170218 - DNA, 51 bp, Artificial
  Synthetic oligonucleotide
ccctattcacgatctcatccttcgcctgcgccctagcgggcagcattgaag

SEQ ID NO: 170219 - DNA, 51 bp, Artificial
  Synthetic oligonucleotide
cgtgagtttcgaatgctacgagaccagcacaaatgccctcgacaagcctct

SEQ ID NO: 170220 - DNA, 51 bp, Artificial
  Synthetic oligonucleotide
cggtaggtgcattgaccattatcacgggtaagcctggcgacggtaagagca

SEQ ID NO: 170221 - DNA, 54 bp, Artificial
  Synthetic oligonucleotide
acgtttgtctacgttgactaagaccacggccaccggaacgtctgtacccatgaa

SEQ ID NO: 170222 - DNA, 51 bp, Artificial
  Synthetic oligonucleotide
ttcgcagctcgtcgtggttagtcccctggtgacggcgaaatgtaggaggag

SEQ ID NO: 170223 - DNA, 51 bp, Artificial
  Synthetic oligonucleotide
cgccccggctctagcccaaagttttggctatgaccgggctaaagtagctca

SEQ ID NO: 170224 - DNA, 51 bp, Artificial
  Synthetic oligonucleotide
gcagggcttgagctatacatagtggccgttcgggggagcgacctaggctcc

SEQ ID NO: 170225 - DNA, 51 bp, Artificial
  Synthetic oligonucleotide
gcccgtgacaggcacataacactccgcacgttacacgcggtccggaccacg

SEQ ID NO: 170226 - DNA, 51 bp, Artificial
  Synthetic oligonucleotide
cgcaggactcggctaaacttgaccgcattatgacttatcccgcccctacac

SEQ ID NO: 170227 - DNA, 51 bp, Artificial
  Synthetic oligonucleotide
gcccgcaacgtacccggtcagtacacctaataaagcgacgtcagtacgttc

SEQ ID NO: 170228 - DNA, 51 bp, Artificial
  Synthetic oligonucleotide
ccgcgataaatgacggacccaagcccgaagcgactgaatcaagtcccgact

SEQ ID NO: 170229 - DNA, 51 bp, Artificial
  Synthetic oligonucleotide
aacaacccagccggtgtgaagctcgttgcggatgcaaaggcaggcgtggac

SEQ ID NO: 170230 - DNA, 51 bp, Artificial
  Synthetic oligonucleotide
cgaccaacaacttaatgattgatcagaggggtggggttcgtaccgtgtggt

SEQ ID NO: 170231 - DNA, 51 bp, Artificial
  Synthetic oligonucleotide
ttgtgagggcgggaggttagctaattccggtgagagagtggcgtttttgcc

SEQ ID NO: 170232 - DNA, 53 bp, Artificial
  Synthetic oligonucleotide
actacgccaaactaacgtcataacgctataacgctagcgttacaacgttaaaa

SEQ ID NO: 170233 - DNA, 51 bp, Artificial
  Synthetic oligonucleotide
ttacccgcaccgaatacgccaaacgcaagcctttggcctatgccgcggctg

SEQ ID NO: 170234 - DNA, 51 bp, Artificial
  Synthetic oligonucleotide
gaacttggtgcctccatcatgcaggcctacagtcacacccgattcaactac

SEQ ID NO: 170235 - DNA, 51 bp, Artificial
  Synthetic oligonucleotide
ttacttagaaacgcatgcttcttatacgcggcgacgtgatgagaataagac

SEQ ID NO: 170236 - DNA, 51 bp, Artificial
  Synthetic oligonucleotide
gcgctgagcacggatgaggggtagggataaagcactacagtaactgaggga

SEQ ID NO: 170237 - DNA, 51 bp, Artificial
  Synthetic oligonucleotide
catgagggcccagatcacataccgtggagcctcccagtgaaaggccgctaa

SEQ ID NO: 170238 - DNA, 51 bp, Artificial
  Synthetic oligonucleotide
gaattcgaccgaaactggcaggtcgggccgagcaacgacgacttctatggg

SEQ ID NO: 170239 - DNA, 51 bp, Artificial
  Synthetic oligonucleotide
gaagcactgcgttcatctgtatacctagcaagaagcaacttgactgtttcg

SEQ ID NO: 170240 - DNA, 51 bp, Artificial
  Synthetic oligonucleotide
ttaaggccttgaagcttacccgtcgttcggtgatccagggctcttttcccc

SEQ ID NO: 170241 - DNA, 51 bp, Artificial
  Synthetic oligonucleotide
cataagcaccacttcgtacagcctaaccactacatatgggcaccggacccc

SEQ ID NO: 170242 - DNA, 51 bp, Artificial
  Synthetic oligonucleotide
gactggtcctataaaaggtaatgcaaagctaatgatcatccataaagtagc

SEQ ID NO: 170243 - DNA, 58 bp, Artificial
  Synthetic oligonucleotide
gtctggatgattgaaatgacgttagccatgaccttaaccctaccttacgtccatatag

SEQ ID NO: 170244 - DNA, 50 bp, Artificial
  Synthetic oligonucleotide
acacatgggatgctgcggactgcaggacaagcacgcgagtgctaggcaac

SEQ ID NO: 170245 - DNA, 50 bp, Artificial
  Synthetic oligonucleotide
acaacgcggttgtccccacgtgcagagcccacacccatgagtgcggaacc

SEQ ID NO: 170246 - DNA, 50 bp, Artificial
  Synthetic oligonucleotide
accgaaaccggggccgagatagatgaagtgcccacccgaatagcggccac

SEQ ID NO: 170247 - DNA, 50 bp, Artificial
  Synthetic oligonucleotide
aaactcccgtatcccaaaccggaaccgggatcgtggactctccgcgtggc

SEQ ID NO: 170248 - DNA, 50 bp, Artificial
  Synthetic oligonucleotide
aaacgttcgtccggccgagaacctcgctcatcgggtagcgacgatgcgag

SEQ ID NO: 170249 - DNA, 50 bp, Artificial
  Synthetic oligonucleotide
acaagcgtgtccaacggtcgtggaagcgactcttgcgtgtcgtggaccca

SEQ ID NO: 170250 - DNA, 50 bp, Artificial
  Synthetic oligonucleotide
acaaggtagttgtgctggcaggtgtcggctccgccccgatcggtaattgc

SEQ ID NO: 170251 - DNA, 50 bp, Artificial
  Synthetic oligonucleotide
aaacgtcccagggcttaagaagttcgccgacccaagctggaccttcggcc

SEQ ID NO: 170252 - DNA, 50 bp, Artificial
  Synthetic oligonucleotide
aaacggggctgtgggactccgttcatgatgagaacttcgcccaaggcgca

SEQ ID NO: 170253 - DNA, 50 bp, Artificial
  Synthetic oligonucleotide
acacatacggataacaggcgctgtgtagcctgtggggcgtgtgcgagggg

SEQ ID NO: 170254 - DNA, 56 bp, Artificial
  Synthetic oligonucleotide
actatttaactcctttggaagcttttactgctcctatggagatcaccggccctgta

SEQ ID NO: 170255 - DNA, 50 bp, Artificial
  Synthetic oligonucleotide
acccctccaccttggctaggcgttctgaatcgaatcccgtggtccccacg

SEQ ID NO: 170256 - DNA, 50 bp, Artificial
  Synthetic oligonucleotide
acaaggtgcgtagacccgctgctttgttccatgcgtcgcctggcattcga

SEQ ID NO: 170257 - DNA, 50 bp, Artificial
  Synthetic oligonucleotide
accctggtcctacaaacccgagacctacacacccgtgccccgcaggcctc

SEQ ID NO: 170258 - DNA, 50 bp, Artificial
  Synthetic oligonucleotide
acaatgcaaccccggaacgtggggagtgggtgacgcaagctaagtgtcga

SEQ ID NO: 170259 - DNA, 50 bp, Artificial
  Synthetic oligonucleotide
aaacgcgtctacctcgggacccaacggagccacccaaccagagtggagtg

SEQ ID NO: 170260 - DNA, 50 bp, Artificial
  Synthetic oligonucleotide
aaacgccttcctggcggcaagcgagtgcatctcaccgatgtgcggggaaa

SEQ ID NO: 170261 - DNA, 50 bp, Artificial
  Synthetic oligonucleotide
acccgtacgttgctcggtgccgctccatcattgctccacccctcgggtgt

SEQ ID NO: 170262 - DNA, 50 bp, Artificial
  Synthetic oligonucleotide
acaagtccctacggcacggtccggatgggtacggataaactgcgcaccct

SEQ ID NO: 170263 - DNA, 50 bp, Artificial
  Synthetic oligonucleotide
acaatagcgtgacaggctgggcacaaaaccgggggcagtgagcacgaggt

SEQ ID NO: 170264 - DNA, 50 bp, Artificial
  Synthetic oligonucleotide
aaaccgcgtgcgctctgtactaatccaccgcatgttccccgcatgtcccc

SEQ ID NO: 170265 - DNA, 60 bp, Artificial
  Synthetic oligonucleotide
actcccgtcgtaacgcacgacccatggtaaatctgcgcagatttaccctcactgcatcgc

SEQ ID NO: 170266 - DNA, 50 bp, Artificial
  Synthetic oligonucleotide
aaacgatccgagagccaaccagtggcaggaatacctaccgctgcggccac

SEQ ID NO: 170267 - DNA, 50 bp, Artificial
  Synthetic oligonucleotide
aatggcgagatcacgggagacatggtgcaatatggcaacgctggggcgct

SEQ ID NO: 170268 - DNA, 50 bp, Artificial
  Synthetic oligonucleotide
aaagccactggggtgatgcgaccaaattgggtgaccacgtggagcatgcg

SEQ ID NO: 170269 - DNA, 50 bp, Artificial
  Synthetic oligonucleotide
aatggggcccgatatcgctgagctcaactccggcctccaatccctgctca

SEQ ID NO: 170270 - DNA, 50 bp, Artificial
  Synthetic oligonucleotide
accgcctccgcgactccaaaattgcgggtcgcccgagtctttacttcgca

SEQ ID NO: 170271 - DNA, 50 bp, Artificial
  Synthetic oligonucleotide
aatgggtggcatccgcactcgccaccaggttaagcgggcttagctgcgca

SEQ ID NO: 170272 - DNA, 50 bp, Artificial
  Synthetic oligonucleotide
aaagagtagctgaccttgcctcacaggcaaccggtgggccatccctagcg

SEQ ID NO: 170273 - DNA, 50 bp, Artificial
  Synthetic oligonucleotide
aatggtggacgacgagaagagtaggcatgccccgagggtaacgaagcggc

SEQ ID NO: 170274 - DNA, 50 bp, Artificial
  Synthetic oligonucleotide
aatggtggcaccgggagccgaagcgattgcgtacgaggcggaaaacgtcg

SEQ ID NO: 170275 - DNA, 50 bp, Artificial
  Synthetic oligonucleotide
aaagacagaagtgcgatcagacaccagccgtcccctagcccaccttgggg

SEQ ID NO: 170276 - DNA, 60 bp, Artificial
  Synthetic oligonucleotide
gtctcgtgtgactgaaccgtggagtacatcgcggcctagatgatcgcgtaaaaggtcgcg

SEQ ID NO: 170277 - DNA, 50 bp, Artificial
  Synthetic oligonucleotide
aatgtcgctggccagtgaacctagcatcaccacgaccgtagtggcagccg

SEQ ID NO: 170278 - DNA, 50 bp, Artificial
  Synthetic oligonucleotide
aatgttccggcaattctccgccgtgtcccccaagatgggttccacgagcg

SEQ ID NO: 170279 - DNA, 50 bp, Artificial
  Synthetic oligonucleotide
accgcccgtttcgttacggcgcgcaaagtgtaagcgcctactccgcagga

SEQ ID NO: 170280 - DNA, 50 bp, Artificial
  Synthetic oligonucleotide
aaagaacgcatccaccgtgcacacgaggttccacagtgccacgcgatcca

SEQ ID NO: 170281 - DNA, 50 bp, Artificial
  Synthetic oligonucleotide
aatgttggccagctgcggggatcaacaggtgccaccgaccagcgctcacg

SEQ ID NO: 170282 - DNA, 50 bp, Artificial
  Synthetic oligonucleotide
aaactcggcaccccagcgttgacagatcgggcgaatctgctccgcaacac

SEQ ID NO: 170283 - DNA, 50 bp, Artificial
  Synthetic oligonucleotide
aattcccataatgcggcgggcatagaccggacctgtggcgagttccccca

SEQ ID NO: 170284 - DNA, 50 bp, Artificial
  Synthetic oligonucleotide
aattgtcgacggtcgagtggtcgtagtggaaacgtgggcgcgccgtcagc

SEQ ID NO: 170285 - DNA, 50 bp, Artificial
  Synthetic oligonucleotide
aattgtgtgacatgcagtgacgcagcgcacacagggggtgcccccgctag

SEQ ID NO: 170286 - DNA, 50 bp, Artificial
  Synthetic oligonucleotide
acaaagtgccgataggtagcctagccgcctcagcggagctagccaccacc

SEQ ID NO: 170287 - DNA, 48 bp, Artificial
  Synthetic oligonucleotide
actgaaaaaccactaggggaataaaaactacccccgttaacgtcaaca

SEQ ID NO: 170288 - DNA, 50 bp, Artificial
  Synthetic oligonucleotide
acaaatagcctggtcaaagggtgcaaaggacgctctaggcgtgagtgctg

SEQ ID NO: 170289 - DNA, 50 bp, Artificial
  Synthetic oligonucleotide
acaaccgccccctatatacccccacagttttccggcacgcgggcacgaac

SEQ ID NO: 170290 - DNA, 50 bp, Artificial
  Synthetic oligonucleotide
accgcagtctggttaccctggccacgcaactccgaggtcaggacgcaaaa

SEQ ID NO: 170291 - DNA, 50 bp, Artificial
  Synthetic oligonucleotide
accgacttggctggacccgtcaccttcaggcttacggtcatggctgggta

SEQ ID NO: 170292 - DNA, 50 bp, Artificial
  Synthetic oligonucleotide
accgaacgttgtggcgtaggcgatagtcggcatggcgctgagtgcaagca

SEQ ID NO: 170293 - DNA, 50 bp, Artificial
  Synthetic oligonucleotide
aaaagcgcacctatgaagtagcgctgtccaaagctggcttgggcccggtg

SEQ ID NO: 170294 - DNA, 50 bp, Artificial
  Synthetic oligonucleotide
acagcccctcaccacaactaacgcgcagggcacgataatcgggtgatgcc

SEQ ID NO: 170295 - DNA, 50 bp, Artificial
  Synthetic oligonucleotide
acagcgacccaagctaccgcgatttgtcgtacccacggcacatggtcggg

SEQ ID NO: 170296 - DNA, 50 bp, Artificial
  Synthetic oligonucleotide
acagctgcggcccccgcgggcaccaggagagaccattcggaaggaagatg

SEQ ID NO: 170297 - DNA, 50 bp, Artificial
  Synthetic oligonucleotide
acagctgtgtccggtcgtttgaccctgggtgtccggtcgttcgacccgtg

SEQ ID NO: 170298 - DNA, 60 bp, Artificial
  Synthetic oligonucleotide
actgcgttgaatgcggtatgcaactgttctacgcaggggtggggcgcaagccgcgctact

SEQ ID NO: 170299 - DNA, 50 bp, Artificial
  Synthetic oligonucleotide
acaggccatgccggtgtacgctcccccgaatagtgctcccgtccacgcgg

SEQ ID NO: 170300 - DNA, 50 bp, Artificial
  Synthetic oligonucleotide
acaggccctacagtgccagaaaccggggcagtctgccgtaggacgctatc

SEQ ID NO: 170301 - DNA, 50 bp, Artificial
  Synthetic oligonucleotide
tattgctacccgcacgcgttccaggcgtgtgacataggccgctagtcgaa

SEQ ID NO: 170302 - DNA, 50 bp, Artificial
  Synthetic oligonucleotide
acaggttcaaacggtccggcgccgctatagcgctcatctcagcccactgc

SEQ ID NO: 170303 - DNA, 50 bp, Artificial
  Synthetic oligonucleotide
acagtagtcggtcggtgtcggcacaacaacgccacccctgcgtcctgtgg

SEQ ID NO: 170304 - DNA, 50 bp, Artificial
  Synthetic oligonucleotide
acagtcaagtaatccgagcccgctaggtgctgttggaccgcccacgcact

SEQ ID NO: 170305 - DNA, 50 bp, Artificial
  Synthetic oligonucleotide
acagtgctcggtgcgaacccgggtaggaagggggtgtcccatgcggacct

SEQ ID NO: 170306 - DNA, 50 bp, Artificial
  Synthetic oligonucleotide
acatctctgcctccgaaccgtgagcacaactctcactacccgcggccgct

SEQ ID NO: 170307 - DNA, 50 bp, Artificial
  Synthetic oligonucleotide
acatgcccgtaaacaaccgcgtgccacgacccatgaccccggatgccaat

SEQ ID NO: 170308 - DNA, 50 bp, Artificial
  Synthetic oligonucleotide
acatggcgccgatttcccacggtcgtatccacatggcgtggattgcctgc

SEQ ID NO: 170309 - DNA, 53 bp, Artificial
  Synthetic oligonucleotide
actgggctttgccgttagttgggttaatacccacccaggctggcccgacgcta

SEQ ID NO: 170310 - DNA, 50 bp, Artificial
  Synthetic oligonucleotide
acattgcgggtggactccaacgcacctaggcacccaaagagcgcatcggt

SEQ ID NO: 170311 - DNA, 50 bp, Artificial
  Synthetic oligonucleotide
acattgtgtaaaccgcctaggcctgcctagccgcgacgtcccctgcgtgg

SEQ ID NO: 170312 - DNA, 50 bp, Artificial
  Synthetic oligonucleotide
accaacccgacccatagtacggcgctatgccaatgctgactacccgcgca

SEQ ID NO: 170313 - DNA, 50 bp, Artificial
  Synthetic oligonucleotide
accaacgagacaacgccgcaggtatgggactctgcgtacggcattgctgc

SEQ ID NO: 170314 - DNA, 50 bp, Artificial
  Synthetic oligonucleotide
accagagtgtctctgttgcccgtgtgcgcccggctgaacactaaggccta

SEQ ID NO: 170315 - DNA, 50 bp, Artificial
  Synthetic oligonucleotide
accaccgtgtacaggcgctttcgggtgcgggtcgtgatcttgtttccgcg

SEQ ID NO: 170316 - DNA, 50 bp, Artificial
  Synthetic oligonucleotide
accaccccgggtaagtcgcgcctgttggcctgtgaagacgcggacattaa

SEQ ID NO: 170317 - DNA, 50 bp, Artificial
  Synthetic oligonucleotide
acccctcaggtgagccaagtatgcgtctgcacgctcgcgccacgattcca

SEQ ID NO: 170318 - DNA, 50 bp, Artificial
  Synthetic oligonucleotide
accccggaacgactgttggtcttcggactaccggcggtgctcatcacggc

SEQ ID NO: 170319 - DNA, 50 bp, Artificial
  Synthetic oligonucleotide
acaccccggcacagcaatgcgcttggaagcagccactacttccctgttgc

SEQ ID NO: 170320 - DNA, 58 bp, Artificial
  Synthetic oligonucleotide
ataggcacgccaccaaggtttcatgtgtactaatgtttgcatacttccggaagtggaa

SEQ ID NO: 170321 - DNA, 51 bp, Artificial
  Synthetic oligonucleotide
actgggtaattaacggagactaaagggggaataccgtgtcaacacgcggcc

SEQ ID NO: 170322 - DNA, 50 bp, Artificial
  Synthetic oligonucleotide
aaacagtcgcagcaagatcctttccacgtgccgcttccgaaacccgcagc

SEQ ID NO: 170323 - DNA, 50 bp, Artificial
  Synthetic oligonucleotide
acaccccgtcctctccgaatccgagttccgcccggtcggagaagttgaac

SEQ ID NO: 170324 - DNA, 50 bp, Artificial
  Synthetic oligonucleotide
accccgcggcgtgtatcgacccggagggattcctgcctgaacttattgcg

SEQ ID NO: 170325 - DNA, 50 bp, Artificial
  Synthetic oligonucleotide
accccaccctcacgtcgcttgctcaagccgccagcgcggatgctctcgcc

SEQ ID NO: 170326 - DNA, 50 bp, Artificial
  Synthetic oligonucleotide
acacccctgtagtgtcgtcgaaggcttaagactggggcgtagccggtggg

SEQ ID NO: 170327 - DNA, 50 bp, Artificial
  Synthetic oligonucleotide
accattgggcggtcatcattgtcgctcccccgatgcttgctcggcgactg

SEQ ID NO: 170328 - DNA, 50 bp, Artificial
  Synthetic oligonucleotide
acacccggataagtttcgcccgcgccttgggtacgagaagcgctcgcaca

SEQ ID NO: 170329 - DNA, 50 bp, Artificial
  Synthetic oligonucleotide
accatgccgcacctgcctacaccggccccgtctccgcaacaaaagccatc

SEQ ID NO: 170330 - DNA, 50 bp, Artificial
  Synthetic oligonucleotide
acaccggctcacacgcgtcactccaagtaccgcgacaacgatccacggaa

SEQ ID NO: 170331 - DNA, 50 bp, Artificial
  Synthetic oligonucleotide
acaccttcctccgcccacgcagccaactctcccaacgtcgcacggcgagt

SEQ ID NO: 170332 - DNA, 56 bp, Artificial
  Synthetic oligonucleotide
cgtggggtggggttgaactggtcgtgtcctgccatatcccttacctgctttatcaa

SEQ ID NO: 170333 - DNA, 50 bp, Artificial
  Synthetic oligonucleotide
acacgctgcagccacctgcgtactccatcgatccctccagcggttcggat

SEQ ID NO: 170334 - DNA, 50 bp, Artificial
  Synthetic oligonucleotide
acacggacttcttcgtaatgtgcgcctcacctggtgcgagggcaacgccc

SEQ ID NO: 170335 - DNA, 50 bp, Artificial
  Synthetic oligonucleotide
acacgtcatctccgttgcggcagacgagatgctcactggcacccagtcgg

SEQ ID NO: 170336 - DNA, 50 bp, Artificial
  Synthetic oligonucleotide
accagtgtttgccgtagttccactcactccggcgcagtccccggatccac

SEQ ID NO: 170337 - DNA, 50 bp, Artificial
  Synthetic oligonucleotide
accagtccgccctagggccaggaacaacatctaggcgcgcagtctcgctc

SEQ ID NO: 170338 - DNA, 50 bp, Artificial
  Synthetic oligonucleotide
accagtagtactaaaagggctcttccggttttagagtgcattgattagtt

SEQ ID NO: 170339 - DNA, 50 bp, Artificial
  Synthetic oligonucleotide
acacgttgccgcagtaaggcacgaatcggcgagcccgtttgactccgcac

SEQ ID NO: 170340 - DNA, 50 bp, Artificial
  Synthetic oligonucleotide
acactatcgcgcatgacgaccaagcagaggcccaggcgctcgctaatgcg

SEQ ID NO: 170341 - DNA, 50 bp, Artificial
  Synthetic oligonucleotide
acactgcggccccttcaggctcggatttctcaacccgggtgctctggggg

SEQ ID NO: 170342 - DNA, 50 bp, Artificial
  Synthetic oligonucleotide
aaaagtgcttcgctcatgcagcccagcgtagacctccccgcctgccggtg

SEQ ID NO: 170343 - DNA, 60 bp, Artificial
  Synthetic oligonucleotide
gcacaacgggcgtacaatgaagcgctcaggatggcacccattaaggccgtccaatcactg

SEQ ID NO: 170344 - DNA, 50 bp, Artificial
  Synthetic oligonucleotide
accaggccactcaaatggtggcaccgggagccgaagcgattgcgtacgag

SEQ ID NO: 170345 - DNA, 50 bp, Artificial
  Synthetic oligonucleotide
acagcacgagagttccgtcaaggactcatccttcttggccgtcgcgccct

SEQ ID NO: 170346 - DNA, 50 bp, Artificial
  Synthetic oligonucleotide
acagccaaccagccgtgaccatcctcgaaaaaccgcgcacgggtaccact

SEQ ID NO: 170347 - DNA, 50 bp, Artificial
  Synthetic oligonucleotide
aactcggctctccctcgccttttcacaaacggatccggtctcccccacga

SEQ ID NO: 170348 - DNA, 50 bp, Artificial
  Synthetic oligonucleotide
aactctatggtggcgcactccggatgacgcgtaacccagcagacgctgag

SEQ ID NO: 170349 - DNA, 50 bp, Artificial
  Synthetic oligonucleotide
aactgccctaccccacttctcgactgagccgcgcgaccctaatttggacc

SEQ ID NO: 170350 - DNA, 50 bp, Artificial
  Synthetic oligonucleotide
aactgtgctcacaggacccgcatgtctggtggttgacgtgtcccggggga

SEQ ID NO: 170351 - DNA, 50 bp, Artificial
  Synthetic oligonucleotide
aaccgagcttgcccctgcctatctaccatgccccgagggtaccccgttcg

SEQ ID NO: 170352 - DNA, 50 bp, Artificial
  Synthetic oligonucleotide
aacttgaacgtgatggccatttgtccgctgttggagtcgtacccaccagt

SEQ ID NO: 170353 - DNA, 50 bp, Artificial
  Synthetic oligonucleotide
aagaaagtggggcggtttagcatcgcgcggattgggggcccggaggatcg

SEQ ID NO: 170354 - DNA, 60 bp, Artificial
  Synthetic oligonucleotide
cgttataggcatgctcgtaggcatcaataatggctgcgtctgtgagtcgttgtcctgctt

SEQ ID NO: 170355 - DNA, 50 bp, Artificial
  Synthetic oligonucleotide
aagaaggtaccgggggcagtgagttcggggaaggtagtctctggtgcggg

SEQ ID NO: 170356 - DNA, 50 bp, Artificial
  Synthetic oligonucleotide
aagaatgactctcccgagccgtgggttgagcgccttaccgctcatgcgtg

SEQ ID NO: 170357 - DNA, 50 bp, Artificial
  Synthetic oligonucleotide
tggccatacgagcccacggacgcgtaacgccatcctttacaacatgtgtt

SEQ ID NO: 170358 - DNA, 50 bp, Artificial
  Synthetic oligonucleotide
aagacacccgcgccgatacggtcactgcggaagagccgctagagattcgg

SEQ ID NO: 170359 - DNA, 50 bp, Artificial
  Synthetic oligonucleotide
aaccgaaggcacgagtgaacgctaagcgcgcatctccgcaccaagacgct

SEQ ID NO: 170360 - DNA, 50 bp, Artificial
  Synthetic oligonucleotide
aaccctccttgctcgtggctccagagaaagtgccagtcccacggcgggcg

SEQ ID NO: 170361 - DNA, 50 bp, Artificial
  Synthetic oligonucleotide
aacccgaggtcccgcgctttcgtctctttcgatccagcattcgccccgac

SEQ ID NO: 170362 - DNA, 50 bp, Artificial
  Synthetic oligonucleotide
aagcacgcgccacgtctgagccgtagcaactcccgaataggccatgagtt

SEQ ID NO: 170363 - DNA, 50 bp, Artificial
  Synthetic oligonucleotide
aagcccgcatttccgcaggacgcccctccgggaaacgtcgttaaggtgca

SEQ ID NO: 170364 - DNA, 50 bp, Artificial
  Synthetic oligonucleotide
aagccctataggatgcctcgaagctgcgggttagctcccccgtcgactta

SEQ ID NO: 170365 - DNA, 57 bp, Artificial
  Synthetic oligonucleotide
cgttcaacagcgtcgcattagccaaacgggccgtacaggcacgtaattaggagcgaa

SEQ ID NO: 170366 - DNA, 50 bp, Artificial
  Synthetic oligonucleotide
aaccagacgcgccccgccacatcacgcgacgcacgatacctcctgcttgg

SEQ ID NO: 170367 - DNA, 50 bp, Artificial
  Synthetic oligonucleotide
aagccttccactggggcccacagttcggccttgaaagggttgtcggtgct

SEQ ID NO: 170368 - DNA, 50 bp, Artificial
  Synthetic oligonucleotide
aagcgacgctcatccgacgacaactagggcggggcgctaacggctccttt

SEQ ID NO: 170369 - DNA, 50 bp, Artificial
  Synthetic oligonucleotide
aagcgagaggagggttgctttccttcgatgacgctactgcaacgccggct

SEQ ID NO: 170370 - DNA, 50 bp, Artificial
  Synthetic oligonucleotide
aagcgccccgcaccataatccattccccagcaagcaaggacacccacgct

SEQ ID NO: 170371 - DNA, 50 bp, Artificial
  Synthetic oligonucleotide
aagcgcgagcggtctgaccccattccgtggagtcctgaagtgctacggcg

SEQ ID NO: 170372 - DNA, 50 bp, Artificial
  Synthetic oligonucleotide
aaccacctcgtccgactccacaacgccgggcacagctgcacagacatcgg

SEQ ID NO: 170373 - DNA, 50 bp, Artificial
  Synthetic oligonucleotide
aagcggatcccccatcttgcagaaacgcttatcgacagagcggacgggcg

SEQ ID NO: 170374 - DNA, 50 bp, Artificial
  Synthetic oligonucleotide
aagcgggttcttctgtgtccgtgtgtggacgtgtcgtgcctgtgggctag

SEQ ID NO: 170375 - DNA, 50 bp, Artificial
  Synthetic oligonucleotide
aagctaaaaacgcagacctcccgccgcgacattcctctacccgcagccac

SEQ ID NO: 170376 - DNA, 55 bp, Artificial
  Synthetic oligonucleotide
cgttcgagtaccatatacctacaaatccactagggggatggactattagaaatgt

SEQ ID NO: 170377 - DNA, 50 bp, Artificial
  Synthetic oligonucleotide
aagctactcctgctggcactacccggctacgttatggcgcttgggcacat

SEQ ID NO: 170378 - DNA, 50 bp, Artificial
  Synthetic oligonucleotide
aaccacaggcgtcccatttcccaacacggagacccctggtctggggcaag

SEQ ID NO: 170379 - DNA, 50 bp, Artificial
  Synthetic oligonucleotide
ttaaggccgtagttgaggctctagtcctgcacccgaacgtgaatgcgtct

SEQ ID NO: 170380 - DNA, 50 bp, Artificial
  Synthetic oligonucleotide
aaccgtggtggcatcgttaccgttaagaccgcagtgaagggcggtgcaca

SEQ ID NO: 170381 - DNA, 50 bp, Artificial
  Synthetic oligonucleotide
aaccggtccaagctgtctcagcgtagcggttacccgaaccaggtccgtct

SEQ ID NO: 170382 - DNA, 50 bp, Artificial
  Synthetic oligonucleotide
aaccgggatcgggagccccggctaagactgtttggaccagacggatggcg

SEQ ID NO: 170383 - DNA, 50 bp, Artificial
  Synthetic oligonucleotide
aacctgcgacacccggataagtttcgcccgcgccttgggtacgagaagcg

SEQ ID NO: 170384 - DNA, 50 bp, Artificial
  Synthetic oligonucleotide
aacctgggacggatccacctaccggccctttgtgacgtggcagcatctga

SEQ ID NO: 170385 - DNA, 50 bp, Artificial
  Synthetic oligonucleotide
aacctttagcctgaatggtttcacgggccctcgtggggaagcgcagggat

SEQ ID NO: 170386 - DNA, 50 bp, Artificial
  Synthetic oligonucleotide
aacgaatgggtcggcgcagctattcccgctgccctcatgagcccagaatt

SEQ ID NO: 170387 - DNA, 50 bp, Artificial
  Synthetic oligonucleotide
cgttttttgccgtccgttcaccgttaacccccgcagaaatcgggacagga

SEQ ID NO: 170388 - DNA, 50 bp, Artificial
  Synthetic oligonucleotide
aacgagcggcgcttagcgcggaccggagtgtccaggtcagttcgagcaaa

SEQ ID NO: 170389 - DNA, 50 bp, Artificial
  Synthetic oligonucleotide
tgtgcctagtgcgattggttggtggggtaaagatcttacacttgacaagg

SEQ ID NO: 170390 - DNA, 50 bp, Artificial
  Synthetic oligonucleotide
aaccggctagacccgacgcgttaaccagccactcgtatgctgcgccctcc

SEQ ID NO: 170391 - DNA, 50 bp, Artificial
  Synthetic oligonucleotide
aacgcagacctcccgccgcgacattcctctacccgcagccacactgcaac

SEQ ID NO: 170392 - DNA, 50 bp, Artificial
  Synthetic oligonucleotide
aacgccgactcacgcgcccgcattctagtgcattttacggggagccccca

SEQ ID NO: 170393 - DNA, 50 bp, Artificial
  Synthetic oligonucleotide
aacgcgctgtgcaccagtccagaatgggtgggactcagcggtcacgtcaa

SEQ ID NO: 170394 - DNA, 50 bp, Artificial
  Synthetic oligonucleotide
aacgcggcggaatgtcataagcgcagatcggcaagtctgtagcctgcgcg

SEQ ID NO: 170395 - DNA, 50 bp, Artificial
  Synthetic oligonucleotide
aacgcggggagttgtaggctcagctaccatccgctgggcgcgaaaagatc

SEQ ID NO: 170396 - DNA, 50 bp, Artificial
  Synthetic oligonucleotide
aacgcggggcgacgtctgtggtttagtcgttttgagaacgctggccgccc

SEQ ID NO: 170397 - DNA, 50 bp, Artificial
  Synthetic oligonucleotide
aaccgccccagatgccaaatcagcgtgtgttggccgcctggatgggccac

SEQ ID NO: 170398 - DNA, 60 bp, Artificial
  Synthetic oligonucleotide
ctaagcgccctgatacgcgccagcggctactagagaccatgctggagcaactcgacgact

SEQ ID NO: 170399 - DNA, 50 bp, Artificial
  Synthetic oligonucleotide
aacggtgcgccggttcctacagagcagcactcgcaaaccaatggcctaca

SEQ ID NO: 170400 - DNA, 50 bp, Artificial
  Synthetic oligonucleotide
aacgtccaagcttccaccccatcgtgacccctgactacccgccacattcc

SEQ ID NO: 170401 - DNA, 50 bp, Artificial
  Synthetic oligonucleotide
aacgtcgagttctgaggccccggtgtgggtcatcgcgcaagatggttcta

SEQ ID NO: 170402 - DNA, 50 bp, Artificial
  Synthetic oligonucleotide
aaccgcatagtagctgcacggccattgtttttccggagccgggtgggcca

SEQ ID NO: 170403 - DNA, 50 bp, Artificial
  Synthetic oligonucleotide
aactatccagggcacgcggtgttcccaggcggaggagtcgacccacgtga

SEQ ID NO: 170404 - DNA, 50 bp, Artificial
  Synthetic oligonucleotide
aactcacctggggcgacattattttcccggcgctcccagtctcctcaccg

SEQ ID NO: 170405 - DNA, 50 bp, Artificial
  Synthetic oligonucleotide
aactccacccccgaaacggctgcagctctaccctgcgcacctgatgttgc

SEQ ID NO: 170406 - DNA, 50 bp, Artificial
  Synthetic oligonucleotide
aactccatccaagcagcagcccgtcccctcattagcccgtccactcgcga

SEQ ID NO: 170407 - DNA, 50 bp, Artificial
  Synthetic oligonucleotide
aaccgcaggtacccagtcgatctccaacttcgcgtgccccaaaccggtat

SEQ ID NO: 170408 - DNA, 50 bp, Artificial
  Synthetic oligonucleotide
aactccctgcgtgctcactcagacgcataacgcgcttaacgacgcccacc

SEQ ID NO: 170409 - DNA, 60 bp, Artificial
  Synthetic oligonucleotide
ctaatccattgcggaatgcctcaagatgttcgtctgtccactccaagagtttcagcaccg

SEQ ID NO: 170410 - DNA, 50 bp, Artificial
  Synthetic oligonucleotide
aactcgcgggatttagcgctgagactgccgagcattcgcctgcgtaacgc

SEQ ID NO: 170411 - DNA, 50 bp, Artificial
  Synthetic oligonucleotide
aaccgcagctggctatgagtcgcagctgtatcacgcacgttccctggtga

SEQ ID NO: 170412 - DNA, 50 bp, Artificial
  Synthetic oligonucleotide
aatcagtcaccggcacccgataggcactgggatctaacgcatggtggccc

SEQ ID NO: 170413 - DNA, 50 bp, Artificial
  Synthetic oligonucleotide
aacaatccacggctgcccgaggtcttgcaccgtccgctcgcacaaagaca

SEQ ID NO: 170414 - DNA, 50 bp, Artificial
  Synthetic oligonucleotide
aacaagcggtcggcgcacttactgagacggcgcagtagcctcactcggag

SEQ ID NO: 170415 - DNA, 50 bp, Artificial
  Synthetic oligonucleotide
aacaacgtggtcgcccttcgcggcatggacggtgaatccttggccattta

SEQ ID NO: 170416 - DNA, 50 bp, Artificial
  Synthetic oligonucleotide
aatccccggacgaagtatttgacagaccttccgacggaacgtagattagt

SEQ ID NO: 170417 - DNA, 50 bp, Artificial
  Synthetic oligonucleotide
aatcgatccgggtccccctacatggagcacagaccgcgctttcggcccac

SEQ ID NO: 170418 - DNA, 50 bp, Artificial
  Synthetic oligonucleotide
ttgattgggcagacatactctcggcttctgccgccaagacgtatatcttc

SEQ ID NO: 170419 - DNA, 50 bp, Artificial
  Synthetic oligonucleotide
aatcgcctgtcgggtagccccactacgcaagccgccgtgactccagggac

SEQ ID NO: 170420 - DNA, 54 bp, Artificial
  Synthetic oligonucleotide
gcaacgcaacgcccctttgggggtgtcggggcgaagccctgacccagtcacgta

SEQ ID NO: 170421 - DNA, 50 bp, Artificial
  Synthetic oligonucleotide
aatcggtctgcccttggaaggtaggtgcccgcgcgataacgcggtgattg

SEQ ID NO: 170422 - DNA, 50 bp, Artificial
  Synthetic oligonucleotide
aatcgtcttggccaacggagcggagccgcagaacccgctaatcccggcaa

SEQ ID NO: 170423 - DNA, 50 bp, Artificial
  Synthetic oligonucleotide
aatcgtgcgatgtgacatcaccgattagggtggaccccggcgctaccgta

SEQ ID NO: 170424 - DNA, 50 bp, Artificial
  Synthetic oligonucleotide
aatctcaccacggctccagagcagacggatgcaaacgccacctctgccga

SEQ ID NO: 170425 - DNA, 50 bp, Artificial
  Synthetic oligonucleotide
aatctgccacaggccctacagtgccagaaaccggggcagtctgccgtagg

SEQ ID NO: 170426 - DNA, 50 bp, Artificial
  Synthetic oligonucleotide
aacaaccgcttgagcacggatgaatcctccgagcgtgttccaggaccgct

SEQ ID NO: 170427 - DNA, 50 bp, Artificial
  Synthetic oligonucleotide
aatctttcgggacgcaaccatgccgcacctgcctacaccggccccgtctc

SEQ ID NO: 170428 - DNA, 50 bp, Artificial
  Synthetic oligonucleotide
aatgaaagcgaacatgccccatgcccggtacgcaaagtagccccacacgg

SEQ ID NO: 170429 - DNA, 50 bp, Artificial
  Synthetic oligonucleotide
aatgaggtaaccagatggcgaagtgcgctcgacatgtccggggttgcgga

SEQ ID NO: 170430 - DNA, 50 bp, Artificial
  Synthetic oligonucleotide
aaatgccccgcaccccagccaaaactccacggtgcagtccactatggatc

SEQ ID NO: 170431 - DNA, 60 bp, Artificial
  Synthetic oligonucleotide
atataagtatgcggtataccctggtccaggagtagtagaccgcagatactacgagagtgc

SEQ ID NO: 170432 - DNA, 60 bp, Artificial
  Synthetic oligonucleotide
ctacggcattgagctgaattggtggcctgccaagattgctgagactgccatgttcctagt

SEQ ID NO: 170433 - DNA, 50 bp, Artificial
  Synthetic oligonucleotide
aaatcggagggcgcccactcatcggccacgcattacacgctgcagctggt

SEQ ID NO: 170434 - DNA, 50 bp, Artificial
  Synthetic oligonucleotide
aaatcacgccagtacgtgctcgcttgccgacggccagaattcgtgcccaa

SEQ ID NO: 170435 - DNA, 50 bp, Artificial
  Synthetic oligonucleotide
aatgcaaggttagccactggcgcaaaagccgcactacgggttcccacgac

SEQ ID NO: 170436 - DNA, 50 bp, Artificial
  Synthetic oligonucleotide
aatgccatagcgcgggaccgccttgtcgtacacagcaaacccgccggccc

SEQ ID NO: 170437 - DNA, 50 bp, Artificial
  Synthetic oligonucleotide
aatgccgcgctttagacgtgtggggacgtagccggccaagtccggtagag

SEQ ID NO: 170438 - DNA, 50 bp, Artificial
  Synthetic oligonucleotide
aatgccgggccgtcgttccgctgtcaggtctcgtacacgccacgatcgga

SEQ ID NO: 170439 - DNA, 50 bp, Artificial
  Synthetic oligonucleotide
aatgccgtcggcactgttagcgaggtcgatcgcttggggtatgcctgtgg

SEQ ID NO: 170440 - DNA, 50 bp, Artificial
  Synthetic oligonucleotide
aaagtagccccacacggggatcgaaacgaggacggctagccaaccgaaga

SEQ ID NO: 170441 - DNA, 50 bp, Artificial
  Synthetic oligonucleotide
aaagctgggaatgggtcgaacggtgctgccatgtggggtcgctgccttcc

SEQ ID NO: 170442 - DNA, 50 bp, Artificial
  Synthetic oligonucleotide
aaagctaatcgcgcagtcgtagctggcaccctcaccgcagcgtcaatggg

SEQ ID NO: 170443 - DNA, 56 bp, Artificial
  Synthetic oligonucleotide
ctagaaccactatccggagtggttccgaggcgatttatctacgacgtacatcttgg

SEQ ID NO: 170444 - DNA, 50 bp, Artificial
  Synthetic oligonucleotide
aatgcgccgcacgtagcgctttgctgaagagacaatctcggaggcacggt

SEQ ID NO: 170445 - DNA, 50 bp, Artificial
  Synthetic oligonucleotide
aaagcctaccggctccgccgtaagcaggggacaccgaacggtcaggccat

SEQ ID NO: 170446 - DNA, 50 bp, Artificial
  Synthetic oligonucleotide
aagctccttcgaagcaagagatcgggtgtgtgcgggcacctatcggggga

SEQ ID NO: 170447 - DNA, 50 bp, Artificial
  Synthetic oligonucleotide
aaccaacgagcccactcgaccgtggtggtaaaacttgccccgtaccccac

SEQ ID NO: 170448 - DNA, 50 bp, Artificial
  Synthetic oligonucleotide
ttcccctaccgcaaaaccgagggaaacaaccgcaccgtcgaaaccccaca

SEQ ID NO: 170449 - DNA, 50 bp, Artificial
  Synthetic oligonucleotide
aaggaagactccggcgttgagtacgcctcgactgccactcaggtctccga

SEQ ID NO: 170450 - DNA, 50 bp, Artificial
  Synthetic oligonucleotide
aaccaacccgagagggcgaccgatcactcactacgctcccctaccaccgt

SEQ ID NO: 170451 - DNA, 50 bp, Artificial
  Synthetic oligonucleotide
aaggacgtcgcttcgcacgcctacaagtgaccacaaaccaacccagcggg

SEQ ID NO: 170452 - DNA, 50 bp, Artificial
  Synthetic oligonucleotide
aaggcatccgcagagttgtccaccgtagtcacctcgctcatccctcgcct

SEQ ID NO: 170453 - DNA, 50 bp, Artificial
  Synthetic oligonucleotide
aaggccctcgctgactagcagcaaaggccgtagaggttccagggtgggag

SEQ ID NO: 170454 - DNA, 52 bp, Artificial
  Synthetic oligonucleotide
gatttttagcgttaaagcgctataacgttaaaactatttaacgttacatatc

SEQ ID NO: 170455 - DNA, 50 bp, Artificial
  Synthetic oligonucleotide
aaggccgcccgattgcgaagattgaccggaagtaccgtggcctcaaaggc

SEQ ID NO: 170456 - DNA, 50 bp, Artificial
  Synthetic oligonucleotide
aaggcgaccaggtagctgtcaagggcaagctgactacccgcacgtgggag

SEQ ID NO: 170457 - DNA, 50 bp, Artificial
  Synthetic oligonucleotide
aaggctgcgaacaagcctccaggaatagcgacggacctgtgcggggagtg

SEQ ID NO: 170458 - DNA, 50 bp, Artificial
  Synthetic oligonucleotide
aacagcccagttaaaggcctgtgcgcggaggttgcggccgaaaataccga

SEQ ID NO: 170459 - DNA, 50 bp, Artificial
  Synthetic oligonucleotide
aaggggcgttgaccgctgcagtccacaggcccggattgactcccacgatc

SEQ ID NO: 170460 - DNA, 50 bp, Artificial
  Synthetic oligonucleotide
aacacgagcagtgcatccccgccgctaaggcctccgcttatcccgtgagc

SEQ ID NO: 170461 - DNA, 50 bp, Artificial
  Synthetic oligonucleotide
aaggtgaaaaggacgctagcgggacgtgtagctgcgcggacgtcgatgga

SEQ ID NO: 170462 - DNA, 50 bp, Artificial
  Synthetic oligonucleotide
aagtcctgcgcagaagcgtcgtcgcgctatagggcactccctggcgtata

SEQ ID NO: 170463 - DNA, 50 bp, Artificial
  Synthetic oligonucleotide
aacaccgaccactgccctcggcactggagttttctctctgtccggtgcag

SEQ ID NO: 170464 - DNA, 50 bp, Artificial
  Synthetic oligonucleotide
aagtcgatccaagccacgggccgcttgagcacaaccaaacccggcatgac

SEQ ID NO: 170465 - DNA, 60 bp, Artificial
  Synthetic oligonucleotide
gattggagccgatagcgagctagcagtgattggagccgatagcgagctagcagtgattgg

SEQ ID NO: 170466 - DNA, 50 bp, Artificial
  Synthetic oligonucleotide
aagtcgccggtagctgacctgcggaatgtcacgaactctcgctttggcgg

SEQ ID NO: 170467 - DNA, 50 bp, Artificial
  Synthetic oligonucleotide
aagtcgcgtctcaggattccgagtgggcagctcattcgcccattccgggt

SEQ ID NO: 170468 - DNA, 50 bp, Artificial
  Synthetic oligonucleotide
aagtgcgaatggctttgcctcacgccgagctcgaacaagcgcgaatggat

SEQ ID NO: 170469 - DNA, 50 bp, Artificial
  Synthetic oligonucleotide
aagtgcttgctcggtaagcgacactacgcccccgtctggccccacatcga

SEQ ID NO: 170470 - DNA, 50 bp, Artificial
  Synthetic oligonucleotide
aagtgtggccgtagcggtcacctgcaacactgcggcgcgaatgccaccca

SEQ ID NO: 170471 - DNA, 50 bp, Artificial
  Synthetic oligonucleotide
aagttagttctggcgaaaacccacgcgatacgggctcccccgctagcgcc

SEQ ID NO: 170472 - DNA, 50 bp, Artificial
  Synthetic oligonucleotide
aagttccccgatggtgcgtttggctagggacgcagtggtggcgtcgataa

SEQ ID NO: 170473 - DNA, 50 bp, Artificial
  Synthetic oligonucleotide
aagttccgactggtgggcaaagtacggcgacgctgtgcaagacgcagggc

SEQ ID NO: 170474 - DNA, 50 bp, Artificial
  Synthetic oligonucleotide
aagttgcgcagtattgcgtgcaccagcggttggatctcccgctccccaga

SEQ ID NO: 170475 - DNA, 50 bp, Artificial
  Synthetic oligonucleotide
aataacgcgtgacgaggcagacgtccgctggaccattccgtcgagcccac

SEQ ID NO: 170476 - DNA, 53 bp, Artificial
  Synthetic oligonucleotide
gatgcgacaaaacgtcttttaaatgtgcgccttcccattcccggtcggttacc

SEQ ID NO: 170477 - DNA, 50 bp, Artificial
  Synthetic oligonucleotide
aacaccccgccgcggctttaaaaccccacccacactggctcaggttccaa

SEQ ID NO: 170478 - DNA, 50 bp, Artificial
  Synthetic oligonucleotide
aatcaccgatgttgttgcagaggcaacgcgaataagccccagccgtgcga

SEQ ID NO: 170479 - DNA, 50 bp, Artificial
  Synthetic oligonucleotide
aatcacgttctgcccacgtccgggtctgctcgctacagctctggcttgtc

SEQ ID NO: 170480 - DNA, 50 bp, Artificial
  Synthetic oligonucleotide
atgaagcacaacggtgcccccgcctgcacgcttaccactccgaatggttt

SEQ ID NO: 170481 - DNA, 50 bp, Artificial
  Synthetic oligonucleotide
atgagcgcctgccaagccgacacgcgatctagtcctgcgccagggtacgt

SEQ ID NO: 170482 - DNA, 50 bp, Artificial
  Synthetic oligonucleotide
atgccgggacaccgacggatcccccaccctgcctgagtggcgcagtacct

SEQ ID NO: 170483 - DNA, 50 bp, Artificial
  Synthetic oligonucleotide
atgccgtctggcgccgatgcatacactatgttgcggccacgattaagcga

SEQ ID NO: 170484 - DNA, 50 bp, Artificial
  Synthetic oligonucleotide
atgcctccgatatcacggtgactaaccgcacggcctcccgcggtgaagaa

SEQ ID NO: 170485 - DNA, 50 bp, Artificial
  Synthetic oligonucleotide
atgcgcgtgatacacccgcgcagtaggcagcacccgatcgagtagcgtat

SEQ ID NO: 170486 - DNA, 50 bp, Artificial
  Synthetic oligonucleotide
attcctcaaaagctgggaatgggtcgaacggtgctgccatgtggggtcgc

SEQ ID NO: 170487 - DNA, 60 bp, Artificial
  Synthetic oligonucleotide
gatgaatctagggcattgctagctgtagaccctgggagcacctggctgtaaagagcttgc

SEQ ID NO: 170488 - DNA, 50 bp, Artificial
  Synthetic oligonucleotide
attcgacgggtgccatgcctcgggtgcggagacaactgacgattgcccag

SEQ ID NO: 170489 - DNA, 50 bp, Artificial
  Synthetic oligonucleotide
attcggcacatgccgatccgggggtggacactccgctcaggaagagtgaa

SEQ ID NO: 170490 - DNA, 50 bp, Artificial
  Synthetic oligonucleotide
attctcggaagagcgaaacaaccgcgcccgtaccaagacctgcggtaccg

SEQ ID NO: 170491 - DNA, 50 bp, Artificial
  Synthetic oligonucleotide
attgaacggcgccggggttactcacgggtcgtagggctcctccacgagac

SEQ ID NO: 170492 - DNA, 50 bp, Artificial
  Synthetic oligonucleotide
caaccgtccacgtaggcgtccgtgggcctccgtctgttgagctcggtgtg

SEQ ID NO: 170493 - DNA, 50 bp, Artificial
  Synthetic oligonucleotide
caacctgacacaccctacacgcgtgcagcgcagtgccctaattcacgcct

SEQ ID NO: 170494 - DNA, 50 bp, Artificial
  Synthetic oligonucleotide
caacggcagggtagacggaggcgcagccatccatcttcgtggtagcgccg

SEQ ID NO: 170495 - DNA, 50 bp, Artificial
  Synthetic oligonucleotide
caagtgccagcgaattgtatgggctccggcgttagtgccgcgttctgtga

SEQ ID NO: 170496 - DNA, 50 bp, Artificial
  Synthetic oligonucleotide
gctcttctcagacacgtgtgttgcgctcatgttggatcagtttaatcccc

SEQ ID NO: 170497 - DNA, 50 bp, Artificial
  Synthetic oligonucleotide
cagcttgtccggagcttggcgcaaaagcgtcaggcagggagtacaaaccg

SEQ ID NO: 170498 - DNA, 60 bp, Artificial
  Synthetic oligonucleotide
ctcaagactgctcaggagtcttctcctagtgtgaacgattcacctagagaagacgagtcg

SEQ ID NO: 170499 - DNA, 50 bp, Artificial
  Synthetic oligonucleotide
cagctaacgctcgggggccacgggacgctatacggggctgatttccgtga

SEQ ID NO: 170500 - DNA, 50 bp, Artificial
  Synthetic oligonucleotide
cagcgttgggtcgacagtgcctggtgccccatcaatggtgccccatgctt

SEQ ID NO: 170501 - DNA, 50 bp, Artificial
  Synthetic oligonucleotide
cagcctgcgaaaattcctgggtattaacatcgccataattcgcatacgcg

SEQ ID NO: 170502 - DNA, 50 bp, Artificial
  Synthetic oligonucleotide
cagagtccgcagcaagcgctgcttccaactcatctgccgggagcacctgt

SEQ ID NO: 170503 - DNA, 50 bp, Artificial
  Synthetic oligonucleotide
cactcatggctgtcaagtacaccactccggtcggcggatgacggcaccag

SEQ ID NO: 170504 - DNA, 50 bp, Artificial
  Synthetic oligonucleotide
cacctatacagcggcgcttggtgagcaatccccgcttttgcatgcggctc

SEQ ID NO: 170505 - DNA, 50 bp, Artificial
  Synthetic oligonucleotide
caccgctttacgacgcgaacccccacggtttgtcagcgcctatcacaccc

SEQ ID NO: 170506 - DNA, 50 bp, Artificial
  Synthetic oligonucleotide
cacccaggagttgcagggttccgatccatgcggtgcggtgcacttctgtt

SEQ ID NO: 170507 - DNA, 50 bp, Artificial
  Synthetic oligonucleotide
cacccaccggaacgcagtgaggacgtgcagcgcacatgacagcaatcatc

SEQ ID NO: 170508 - DNA, 50 bp, Artificial
  Synthetic oligonucleotide
caccacaagccacaccagtcggcggcacaggacacgctcacgatcgaccc

SEQ ID NO: 170509 - DNA, 58 bp, Artificial
  Synthetic oligonucleotide
cgcgggcctagtggccgataagaagggttttgacaccactgttgccactggcacagag

SEQ ID NO: 170510 - DNA, 50 bp, Artificial
  Synthetic oligonucleotide
cacatgcgggcaaattggctatcgctcatgtgtgcccccgttggcagggt

SEQ ID NO: 170511 - DNA, 50 bp, Artificial
  Synthetic oligonucleotide
cacatcagcgcaggtgacggggtgtggcgtcctcacaagaacagggagga

SEQ ID NO: 170512 - DNA, 50 bp, Artificial
  Synthetic oligonucleotide
cacaggtggcggtctcatagcgcaccgtgtgccgtctcggccatccgggg

SEQ ID NO: 170513 - DNA, 50 bp, Artificial
  Synthetic oligonucleotide
cacagatggccatggtacttgtagcgcctgcatggacaatgccgcagcgg

SEQ ID NO: 170514 - DNA, 50 bp, Artificial
  Synthetic oligonucleotide
cacacggacaaccagtcgagagcctcaggagtggctacgacacacgccct

SEQ ID NO: 170515 - DNA, 50 bp, Artificial
  Synthetic oligonucleotide
caatgccgcagcgggtagtagaatccccggcgaactgtcaccccgttacc

SEQ ID NO: 170516 - DNA, 50 bp, Artificial
  Synthetic oligonucleotide
agtcgggcacggtgatcagagacctccacggcatcaacggtggcacgatc

SEQ ID NO: 170517 - DNA, 50 bp, Artificial
  Synthetic oligonucleotide
agtctccgctcccccggacagcctgactgtcacaggcgtctaccacagaa

SEQ ID NO: 170518 - DNA, 50 bp, Artificial
  Synthetic oligonucleotide
agtctggtgaggaagctgcgtacgacacccgggatgacgtgttcgggccc

SEQ ID NO: 170519 - DNA, 50 bp, Artificial
  Synthetic oligonucleotide
agtctttggttgtagagttcccgcccacgcagtcggggacgacggagcag

SEQ ID NO: 170520 - DNA, 60 bp, Artificial
  Synthetic oligonucleotide
gcagagacggtacatcgtggcccgcttgtctgccgggtgaaccggtcatagccatcagga

SEQ ID NO: 170521 - DNA, 50 bp, Artificial
  Synthetic oligonucleotide
agtgcaggctaagaagatcacggggtaggcacgcggtgcgctagtctggg

SEQ ID NO: 170522 - DNA, 50 bp, Artificial
  Synthetic oligonucleotide
agtgccgggacaaaagccccgatcgcagcatcagggcggttctcacgaac

SEQ ID NO: 170523 - DNA, 50 bp, Artificial
  Synthetic oligonucleotide
agtgctgtttcgtccccgatccccagtgcatcgaggttccggccccagac

SEQ ID NO: 170524 - DNA, 50 bp, Artificial
  Synthetic oligonucleotide
agtggaccagggcacacgtcatctccgttgcggcagacgagatgctcact

SEQ ID NO: 170525 - DNA, 50 bp, Artificial
  Synthetic oligonucleotide
agtggactcgccggcacaggtgagaccgagaccgtactctggtcctacga

SEQ ID NO: 170526 - DNA, 50 bp, Artificial
  Synthetic oligonucleotide
agtggagtagtcaccgcgcgctgataactgtgatgactgacatgaagtta

SEQ ID NO: 170527 - DNA, 50 bp, Artificial
  Synthetic oligonucleotide
agtgtgcgagccatactttgccgtatggtgcggtttcaggctccccgccg

SEQ ID NO: 170528 - DNA, 50 bp, Artificial
  Synthetic oligonucleotide
agtgttgggtgtccagcgaaggggagctcaccggttggggtgaaaatgcg

SEQ ID NO: 170529 - DNA, 50 bp, Artificial
  Synthetic oligonucleotide
agttaccgccgtcacgtagggtgcggggttggggtctaagttccgctgcc

SEQ ID NO: 170530 - DNA, 50 bp, Artificial
  Synthetic oligonucleotide
agttagctctgcccgtgcgatggcacaggtcaggccagttaccgatggtc

SEQ ID NO: 170531 - DNA, 60 bp, Artificial
  Synthetic oligonucleotide
cgctacccgtggcagaagttgaccaaatagccaggtcaatccaccgatggatcatcacca

SEQ ID NO: 170532 - DNA, 50 bp, Artificial
  Synthetic oligonucleotide
agttgcagcggtcgctttctatcctcgggtgcacggggcattttctcggc

SEQ ID NO: 170533 - DNA, 50 bp, Artificial
  Synthetic oligonucleotide
agttgcgcgggtgttgggaatgccatgcgctctagactaggtcacccggg

SEQ ID NO: 170534 - DNA, 50 bp, Artificial
  Synthetic oligonucleotide
atgaaccccgagagtccggctcctcgttctgcgacccccggagttcccgc

SEQ ID NO: 170535 - DNA, 50 bp, Artificial
  Synthetic oligonucleotide
atgaaacgtggcggggcactgcgagttgcgaaggttgggggtgtcacctg

SEQ ID NO: 170536 - DNA, 50 bp, Artificial
  Synthetic oligonucleotide
atctggtgcgggggcggctaggaggacgccacctaagggtatcgggtgtt

SEQ ID NO: 170537 - DNA, 50 bp, Artificial
  Synthetic oligonucleotide
atctcggctccgatgcgacggcaggggcgctcacatgactgccactgtcc

SEQ ID NO: 170538 - DNA, 50 bp, Artificial
  Synthetic oligonucleotide
atctaaacccgcatagaccgttcccagggcactgatcgtgggatggggcg

SEQ ID NO: 170539 - DNA, 50 bp, Artificial
  Synthetic oligonucleotide
atcgggtgcatgtgacggaggagtgcctcaatggtcggcgaaccgcgttc

SEQ ID NO: 170540 - DNA, 50 bp, Artificial
  Synthetic oligonucleotide
atccgccaccaaccgtaacgtgagagcgattcccccgccaggagctttat

SEQ ID NO: 170541 - DNA, 50 bp, Artificial
  Synthetic oligonucleotide
atcccgtgcccatcacactgtagttcgccgaggtatcccccggtcccgaa

SEQ ID NO: 170542 - DNA, 60 bp, Artificial
  Synthetic oligonucleotide
atcacgcttagtagcgtccccatgagtaggcagaaccgcgtccaagtccacatcatccat

SEQ ID NO: 170543 - DNA, 58 bp, Artificial
  Synthetic oligonucleotide
cgctgatttaccgatacgcagaaaaagcgtgcgcagatttacccatacggtggcgaat

SEQ ID NO: 170544 - DNA, 50 bp, Artificial
  Synthetic oligonucleotide
atcccgaccgagctgctagcttttagcaacactgagtagcctcgcgcccc

SEQ ID NO: 170545 - DNA, 50 bp, Artificial
  Synthetic oligonucleotide
atccagcgctgaggtgcgcagatccacagagagccggcgggtagttgagg

SEQ ID NO: 170546 - DNA, 50 bp, Artificial
  Synthetic oligonucleotide
atccaccggggaagtgttcgcctaaagcctgctggccatcacgtgcttca

SEQ ID NO: 170547 - DNA, 50 bp, Artificial
  Synthetic oligonucleotide
atccaaggtacctctcagacaaagaatgcacgcgttactagaagtggaat

SEQ ID NO: 170548 - DNA, 50 bp, Artificial
  Synthetic oligonucleotide
atagccgcgcaggtgtgctccgggaggtacttcacgaaggaacgcatggt

SEQ ID NO: 170549 - DNA, 50 bp, Artificial
  Synthetic oligonucleotide
atacgagatccgccttgtgggaatcgcggagcgacgcgacatgggagtcc

SEQ ID NO: 170550 - DNA, 50 bp, Artificial
  Synthetic oligonucleotide
atacctaggcgcctataagcgtgtagctggccccaccgtggtcacagccg

SEQ ID NO: 170551 - DNA, 50 bp, Artificial
  Synthetic oligonucleotide
ataattcggcgcctaaggaaaacactgtttccgcgcagtcgcgtccggat

SEQ ID NO: 170552 - DNA, 50 bp, Artificial
  Synthetic oligonucleotide
agttttcgaccgctacactgcagccagggacgctacaggtggtgcgtaga

SEQ ID NO: 170553 - DNA, 50 bp, Artificial
  Synthetic oligonucleotide
ccgtatgagcgcaagttatcaacagccccggtgtgacgccgcacgcatac

SEQ ID NO: 170554 - DNA, 56 bp, Artificial
  Synthetic oligonucleotide
cggaaaaatcaagtgcgatacaaaatttttagcacccctgagctgcgcaaagtccc

SEQ ID NO: 170555 - DNA, 50 bp, Artificial
  Synthetic oligonucleotide
gccagctacccaggcgcacagtactccgaactgttgaccattccgcgtga

SEQ ID NO: 170556 - DNA, 50 bp, Artificial
  Synthetic oligonucleotide
ccgtattctcaacagtgcaggccagcccctacgcgaaggagcacctcgct

SEQ ID NO: 170557 - DNA, 50 bp, Artificial
  Synthetic oligonucleotide
cctcgaactttgactccttccgagcagggccgcttttcgatggcaccggg

SEQ ID NO: 170558 - DNA, 50 bp, Artificial
  Synthetic oligonucleotide
ccttgtgcaggcggatagccatccacaggaataccgcgccggaggcaagt

SEQ ID NO: 170559 - DNA, 50 bp, Artificial
  Synthetic oligonucleotide
cgaacaatctgccctgcactcctgctccggtgcgaatttacggcacaccg

SEQ ID NO: 170560 - DNA, 50 bp, Artificial
  Synthetic oligonucleotide
cgagctgaagtacaacaaccgcgagcgttccctgtctggtctgcgtcgcg

SEQ ID NO: 170561 - DNA, 50 bp, Artificial
  Synthetic oligonucleotide
cgaggcattcgtgggaggaaatcgatctaccattctgtctacttcggtgc

SEQ ID NO: 170562 - DNA, 50 bp, Artificial
  Synthetic oligonucleotide
cgaggtatccgtgagtttcaccccggtgcttgtacccatgccccgtggga

SEQ ID NO: 170563 - DNA, 50 bp, Artificial
  Synthetic oligonucleotide
cgcacgcacataggtggactcccgcacattcgccaacgtttgatccccga

SEQ ID NO: 170564 - DNA, 50 bp, Artificial
  Synthetic oligonucleotide
cgcagagttgtccaccgtagtcacctcgctcatccctcgcctggtggcgt

SEQ ID NO: 170565 - DNA, 52 bp, Artificial
  Synthetic oligonucleotide
cggcctaacgccgtggttgaaaacccttaaacgggcacgcacacgccgtgtg

SEQ ID NO: 170566 - DNA, 50 bp, Artificial
  Synthetic oligonucleotide
cgccttggagcaggcaacttaccgcgccgaagacaagtttggcgtatccc

SEQ ID NO: 170567 - DNA, 50 bp, Artificial
  Synthetic oligonucleotide
cgccttgtgggaatcgcggagcgacgcgacatgggagtcctcggagaccc

SEQ ID NO: 170568 - DNA, 50 bp, Artificial
  Synthetic oligonucleotide
cgcgaagtcaccgtcaaccaccgctgacccgcctgtacccggggccgtgc

SEQ ID NO: 170569 - DNA, 50 bp, Artificial
  Synthetic oligonucleotide
cgcggcgggaggaatgaagttcgcggaagttgttgtcacgatgcgaacga

SEQ ID NO: 170570 - DNA, 50 bp, Artificial
  Synthetic oligonucleotide
gagagcgattttatattgccggactgaacgacgaaattcttcagtaaggc

SEQ ID NO: 170571 - DNA, 50 bp, Artificial
  Synthetic oligonucleotide
gaagtcgcagaggacgtgaccattgagcacgcacgcggcacggatacgta

SEQ ID NO: 170572 - DNA, 50 bp, Artificial
  Synthetic oligonucleotide
gaagatgggtgcacattccgtggcctattatcagtccacggttgatgaga

SEQ ID NO: 170573 - DNA, 50 bp, Artificial
  Synthetic oligonucleotide
gaaaaacgacgcgagcgggtgtggcccattatcccagccccctgatgagt

SEQ ID NO: 170574 - DNA, 50 bp, Artificial
  Synthetic oligonucleotide
cttgtgccctgttgggcgtgatcgaaattgggcccaagttagaactaagt

SEQ ID NO: 170575 - DNA, 50 bp, Artificial
  Synthetic oligonucleotide
cttgcgaccgcagtgcgaagcgccctcgaagtcccggtaaggaccatagc

SEQ ID NO: 170576 - DNA, 60 bp, Artificial
  Synthetic oligonucleotide
cggcggaccggctctagttgatctcagcaacaaagaagctgtgtgggcggtactcgatga

SEQ ID NO: 170577 - DNA, 50 bp, Artificial
  Synthetic oligonucleotide
cttcagcgtgatctgtcttccaggttagttccgaccctgtaccgcgatct

SEQ ID NO: 170578 - DNA, 50 bp, Artificial
  Synthetic oligonucleotide
ctcgaaccaccggccgagtaggaggaaggtaacgaccatgcccacggact

SEQ ID NO: 170579 - DNA, 50 bp, Artificial
  Synthetic oligonucleotide
ctagttccgtaaccagattcgctcttctgggacacaccacgatgtcaaat

SEQ ID NO: 170580 - DNA, 50 bp, Artificial
  Synthetic oligonucleotide
ctagtgctgcagaggcctcgtcgcgctctgccgaagaaggctcgtcgggt

SEQ ID NO: 170581 - DNA, 50 bp, Artificial
  Synthetic oligonucleotide
ctacagacgggtccactcgtggttttataggcccccgcgaggtgccacgc

SEQ ID NO: 170582 - DNA, 50 bp, Artificial
  Synthetic oligonucleotide
cgtagcactgcctatgaccttctgggctcaccgcggaatgacccgcttgg

SEQ ID NO: 170583 - DNA, 50 bp, Artificial
  Synthetic oligonucleotide
cgcgtggacggggcaggcccgtaacggcggttggggtggtcataacttac

SEQ ID NO: 170584 - DNA, 50 bp, Artificial
  Synthetic oligonucleotide
cgcgtctggtcctgctcagcgcacgatagctgaagacatcggggccgggg

SEQ ID NO: 170585 - DNA, 50 bp, Artificial
  Synthetic oligonucleotide
cgcgtcgtaccgggcattatcaacttgcgattcgcgcaggtcagaagcga

SEQ ID NO: 170586 - DNA, 50 bp, Artificial
  Synthetic oligonucleotide
cgcgggcaatctggaggtagccgacaacttacccacccctcatgcccata

SEQ ID NO: 170587 - DNA, 57 bp, Artificial
  Synthetic oligonucleotide
cgggctagtggtgttcatcgtgcggttcagaattaggcgcgaaaaacggcacgagtc

SEQ ID NO: 170588 - DNA, 50 bp, Artificial
  Synthetic oligonucleotide
caggccaacccatacgtaggaaatctccaagcacaccgccaggaggggcg

SEQ ID NO: 170589 - DNA, 50 bp, Artificial
  Synthetic oligonucleotide
cagtgcgaagcgccctcgaagtcccggtaaggaccatagcctttccgcgc

SEQ ID NO: 170590 - DNA, 50 bp, Artificial
  Synthetic oligonucleotide
cataagcccaggcggagagccgcataccgagtatccggccctaccctgaa

SEQ ID NO: 170591 - DNA, 50 bp, Artificial
  Synthetic oligonucleotide
catcaccacgattgaagaatgcctaacctcaaagcctaagtaaccttgcc

SEQ ID NO: 170592 - DNA, 50 bp, Artificial
  Synthetic oligonucleotide
catctcacacaaccccatcacggcccctcgggagggtgtcaccatgtctc

SEQ ID NO: 170593 - DNA, 50 bp, Artificial
  Synthetic oligonucleotide
catgcatgacgctgacctgtccgtattcggttcggctcggcgtgtgaccg

SEQ ID NO: 170594 - DNA, 50 bp, Artificial
  Synthetic oligonucleotide
catgtactgcgccttccgtgggcgaggtttcccggaacgacgacaacctg

SEQ ID NO: 170595 - DNA, 50 bp, Artificial
  Synthetic oligonucleotide
cattcggctctgccttagcggcctgctgcgactgagcgtgtttttctggg

SEQ ID NO: 170596 - DNA, 50 bp, Artificial
  Synthetic oligonucleotide
cattggatcgcccacggccgtaaccgacaggtcctcttggtcccctccga

SEQ ID NO: 170597 - DNA, 50 bp, Artificial
  Synthetic oligonucleotide
cattggatgcctgagcccccaccgatgctcacaggtggtcgccaactccg

SEQ ID NO: 170598 - DNA, 54 bp, Artificial
  Synthetic oligonucleotide
cggtatgtgccaccccaaacagctttaaaacgtccctagcggcctttctagcgc

SEQ ID NO: 170599 - DNA, 50 bp, Artificial
  Synthetic oligonucleotide
ccacagttccttccacgccacccggaaccactgcgaagtcggtagccggc

SEQ ID NO: 170600 - DNA, 50 bp, Artificial
  Synthetic oligonucleotide
ccacgggacgctatacggggctgatttccgtgagccgcagcaccatttgg

SEQ ID NO: 170601 - DNA, 50 bp, Artificial
  Synthetic oligonucleotide
ccatccacaggaataccgcgccggaggcaagtgctgcggccaagtagatc

SEQ ID NO: 170602 - DNA, 50 bp, Artificial
  Synthetic oligonucleotide
cccactgccgcatcgcgaacccggtctgtgcgacgtgcccgttgctcggg

SEQ ID NO: 170603 - DNA, 50 bp, Artificial
  Synthetic oligonucleotide
ccccagtgcctagtcccacgggaacagtggtgtgagcggagtcggggatg

SEQ ID NO: 170604 - DNA, 50 bp, Artificial
  Synthetic oligonucleotide
ccggctggggacacgatgaccgcgcctaccggtggattagggctcgtggt

SEQ ID NO: 170605 - DNA, 50 bp, Artificial
  Synthetic oligonucleotide
ccgctccgtgcgtgtccgccggatctgctgtgacatcgtgcccctccttc

SEQ ID NO: 170606 - DNA, 50 bp, Artificial
  Synthetic oligonucleotide
ccgcgggctattcgccgagtcgcatccggtttctaccatcccggccgtta

SEQ ID NO: 170607 - DNA, 50 bp, Artificial
  Synthetic oligonucleotide
ccgcggcgcagcctacgcgttcttaggcccactgatttcggcactagttc

SEQ ID NO: 170608 - DNA, 50 bp, Artificial
  Synthetic oligonucleotide
ccgcgaattgcgcgtatccttcatcgacgttgcagccccggctgaagcac

SEQ ID NO: 170609 - DNA, 58 bp, Artificial
  Synthetic oligonucleotide
cggtttctcgttgatcttcaagcccctgtctagctacgctaacctgttggtagatgcc

SEQ ID NO: 170610 - DNA, 50 bp, Artificial
  Synthetic oligonucleotide
ccgcctctgggcggaggggaaatcgcgggagtaaaagccggctaagagtc

SEQ ID NO: 170611 - DNA, 50 bp, Artificial
  Synthetic oligonucleotide
ccgattactcacttgaattcgaccccacacaagacgcgctggatagggta

SEQ ID NO: 170612 - DNA, 50 bp, Artificial
  Synthetic oligonucleotide
ccgatcatgcgtgtggcctgcgctcatcctgcgagtgtcactcaccccgc

SEQ ID NO: 170613 - DNA, 50 bp, Artificial
  Synthetic oligonucleotide
ccgacgttagcaagcggggcggacatgaaacgtggcggggcactgcgagt

SEQ ID NO: 170614 - DNA, 50 bp, Artificial
  Synthetic oligonucleotide
ccctgcgcaccaaggtatttgctgagccaatcagttgggcccggtcactt

SEQ ID NO: 170615 - DNA, 50 bp, Artificial
  Synthetic oligonucleotide
ccctgcactcctgctccggtgcgaatttacggcacaccgactcgtgacgt

SEQ ID NO: 170616 - DNA, 50 bp, Artificial
  Synthetic oligonucleotide
cccgcagcccgggacacccaccggaacgcagtgaggacgtgcagcgcaca

SEQ ID NO: 170617 - DNA, 50 bp, Artificial
  Synthetic oligonucleotide
cccgcaatgggttgccattgccggttgatacgcgcatccattattggggc

SEQ ID NO: 170618 - DNA, 50 bp, Artificial
  Synthetic oligonucleotide
cccgatctttggcgtcgtcacactcctcatcttagttgccctcgccggct

SEQ ID NO: 170619 - DNA, 50 bp, Artificial
  Synthetic oligonucleotide
cccctccagtgaatcggcgacagctccgaaagcgacttcgaaagcgggga

SEQ ID NO: 170620 - DNA, 60 bp, Artificial
  Synthetic oligonucleotide
cgtagcgatagcggagtgtatactggcttactcctctgcaagcctcgccagccgtgattt

SEQ ID NO: 170621 - DNA, 50 bp, Artificial
  Synthetic oligonucleotide
ccccgcacgcgttccaggcgtgtgacataggccgctagtcgaatcctcca

SEQ ID NO: 170622 - DNA, 50 bp, Artificial
  Synthetic oligonucleotide
acgcctctcccctcgttatggcagccgtgggtaccggattcgctggagca

SEQ ID NO: 170623 - DNA, 50 bp, Artificial
  Synthetic oligonucleotide
acgcgaggaccgttcctagtccgtatcgactcacgcctaccgccacaggc

SEQ ID NO: 170624 - DNA, 50 bp, Artificial
  Synthetic oligonucleotide
acgcgccatttccgagcaacaaatcggcctcacagcccccgacattcccg

SEQ ID NO: 170625 - DNA, 50 bp, Artificial
  Synthetic oligonucleotide
acgcggtgggttgcccagaggtagacggcttcggcccagaggcgtggggg

SEQ ID NO: 170626 - DNA, 50 bp, Artificial
  Synthetic oligonucleotide
acgcgtattcccgcaccattcagcctcgtaagtggcgtacccctcgtgca

SEQ ID NO: 170627 - DNA, 50 bp, Artificial
  Synthetic oligonucleotide
acgctagccccgacggtcctggtccccttgttccacaagcattcgatcgg

SEQ ID NO: 170628 - DNA, 50 bp, Artificial
  Synthetic oligonucleotide
acgctcagtcgcagttccgcaaactgggaacgcacctggcactgccccac

SEQ ID NO: 170629 - DNA, 50 bp, Artificial
  Synthetic oligonucleotide
acgctccgggtccgtgatgtctgcgccacgcaaataagccgatgccacgg

SEQ ID NO: 170630 - DNA, 50 bp, Artificial
  Synthetic oligonucleotide
acgctgaacaggtctgcgtatcccgcgaccgcattgttgccgtgcctgat

SEQ ID NO: 170631 - DNA, 60 bp, Artificial
  Synthetic oligonucleotide
cgtatgcagtagacatgctcccgccttcgcctaacggctcagttgggggctgccgcgcga

SEQ ID NO: 170632 - DNA, 50 bp, Artificial
  Synthetic oligonucleotide
acgctggccctgctagttcctcccggttacctcagtcggcagccgaaaac

SEQ ID NO: 170633 - DNA, 50 bp, Artificial
  Synthetic oligonucleotide
acgctgtggcgatcagaatcgatttggcaggggtcgctgtggggtgttgc

SEQ ID NO: 170634 - DNA, 50 bp, Artificial
  Synthetic oligonucleotide
acgcttcgcggcttaacgacgcgcccatcggacatggtgacactgcgaat

SEQ ID NO: 170635 - DNA, 50 bp, Artificial
  Synthetic oligonucleotide
acgctttggaactaacgcagatggagcgcgatagcgtcggaccggtcggc

SEQ ID NO: 170636 - DNA, 50 bp, Artificial
  Synthetic oligonucleotide
acggacgtgccggagccagaggagttggccaatagccagattgcggtgat

SEQ ID NO: 170637 - DNA, 50 bp, Artificial
  Synthetic oligonucleotide
acggcacagtcgatcccgcatttagcccctcgtgctgtacacctgcagcg

SEQ ID NO: 170638 - DNA, 50 bp, Artificial
  Synthetic oligonucleotide
acggcccggttgttctagatggcactcacactccaaccgcgtcggtgtcg

SEQ ID NO: 170639 - DNA, 50 bp, Artificial
  Synthetic oligonucleotide
actggcacttccccggcggtatttccggcccgaggctgggttatccctcc

SEQ ID NO: 170640 - DNA, 50 bp, Artificial
  Synthetic oligonucleotide
actggaatgcctcgggtgcgaccttggttgcaagtgagttgccgacaggg

SEQ ID NO: 170641 - DNA, 50 bp, Artificial
  Synthetic oligonucleotide
actgcattttctggggtgagtgcgcgacgttttgcggccgaccattggta

SEQ ID NO: 170642 - DNA, 57 bp, Artificial
  Synthetic oligonucleotide
cgtcactacctctagatattcctgaacattctgaggttatttccgggcagaaagtcg

SEQ ID NO: 170643 - DNA, 50 bp, Artificial
  Synthetic oligonucleotide
actcgggcgctccaggacacgacatcaacgggatgtgggcgtggaaggtt

SEQ ID NO: 170644 - DNA, 50 bp, Artificial
  Synthetic oligonucleotide
actcgcccctccctgtcggtctcatcccgcgtggtatcaagctgtccaag

SEQ ID NO: 170645 - DNA, 50 bp, Artificial
  Synthetic oligonucleotide
actccgcaccacgctcccggttcaggcgcaagaattcattccacgccttg

SEQ ID NO: 170646 - DNA, 50 bp, Artificial
  Synthetic oligonucleotide
actaggggagtacatcacccgcgctttatcgcagcacatgggtcgcccct

SEQ ID NO: 170647 - DNA, 50 bp, Artificial
  Synthetic oligonucleotide
acgtgggctaggcgccagcattctttgtggcgtgaatcgttgggccgtgg

SEQ ID NO: 170648 - DNA, 50 bp, Artificial
  Synthetic oligonucleotide
acgtgcagcaagcagtagctccccgcggaaccaatggtcggatagcccac

SEQ ID NO: 170649 - DNA, 50 bp, Artificial
  Synthetic oligonucleotide
acgtgaaggagtgactggacctgacccccgtttggtagacacctaacatc

SEQ ID NO: 170650 - DNA, 50 bp, Artificial
  Synthetic oligonucleotide
acgtccgttggctatgccggtggcaccaccccgaaccctacgtactacga

SEQ ID NO: 170651 - DNA, 50 bp, Artificial
  Synthetic oligonucleotide
acgtaagtccggttttccctgttcccaggcgtgccgtgagaggcacaccc

SEQ ID NO: 170652 - DNA, 50 bp, Artificial
  Synthetic oligonucleotide
acggttgcgtccgacccagactcaacaagtgcccagcagctaactcccca

SEQ ID NO: 170653 - DNA, 60 bp, Artificial
  Synthetic oligonucleotide
atcatcaccaaatcacgcatgtggacagacggcccagccgtctacgaagccacattcacc

SEQ ID NO: 170654 - DNA, 60 bp, Artificial
  Synthetic oligonucleotide
cgtccagcaccataggatcgaccggctatcccatctacgcgacgaggtgaggacattgac

SEQ ID NO: 170655 - DNA, 50 bp, Artificial
  Synthetic oligonucleotide
acggtctcgcacttgctgccgaagacgcacactgccatggcctcggttga

SEQ ID NO: 170656 - DNA, 50 bp, Artificial
  Synthetic oligonucleotide
acgggcccttatccgcacgcacataggtggactcccgcacattcgccaac

SEQ ID NO: 170657 - DNA, 50 bp, Artificial
  Synthetic oligonucleotide
acggcttcttcgtgtggggtcgctgcgtctggcaggatgcttagtgcgcc

SEQ ID NO: 170658 - DNA, 50 bp, Artificial
  Synthetic oligonucleotide
accgcctgagtagacgccgtttttgtcgtagggggcatccgggtagaggg

SEQ ID NO: 170659 - DNA, 50 bp, Artificial
  Synthetic oligonucleotide
accgcgaccttcgatcccagctactcccgtgtcgctggcatccgcacacg

SEQ ID NO: 170660 - DNA, 50 bp, Artificial
  Synthetic oligonucleotide
accgcgtaaatccagcggtttagtccccctcggcgtgttcataataggtc

SEQ ID NO: 170661 - DNA, 50 bp, Artificial
  Synthetic oligonucleotide
accgctctgtgccgtggcccgtaaccgagcaatccacttcgcaggctcta

SEQ ID NO: 170662 - DNA, 50 bp, Artificial
  Synthetic oligonucleotide
tacattcccctcatctgacatccttcaggttactgacgataccctggcgt

SEQ ID NO: 170663 - DNA, 50 bp, Artificial
  Synthetic oligonucleotide
accggacttctcattgcccatgactgggtcgcaggcatacagcgcgttgg

SEQ ID NO: 170664 - DNA, 50 bp, Artificial
  Synthetic oligonucleotide
accggcatctcgtaaccgctcccgagccggagttgagcccagagttcgct

SEQ ID NO: 170665 - DNA, 60 bp, Artificial
  Synthetic oligonucleotide
cgtgctggcttagaaggcgcagactgtgacctgacagtcattggccaacaagagcttgac

SEQ ID NO: 170666 - DNA, 50 bp, Artificial
  Synthetic oligonucleotide
accggctttggtcgccgtgtgactgtggaccgtgcaaaagcctacacgcg

SEQ ID NO: 170667 - DNA, 50 bp, Artificial
  Synthetic oligonucleotide
accgtggacctgggtggctgggagtctgctacgtgattgcgtgagggagt

SEQ ID NO: 170668 - DNA, 50 bp, Artificial
  Synthetic oligonucleotide
accgttaccggctccgtgccagagggtgaggaacccctcgatcggattga

SEQ ID NO: 170669 - DNA, 50 bp, Artificial
  Synthetic oligonucleotide
acctaccggcctctagaagcgctgcttacaacaagccctagcgcgcacga

SEQ ID NO: 170670 - DNA, 50 bp, Artificial
  Synthetic oligonucleotide
acctcacaaccacgcaccaacgccggacaagacatctaccgcctggcacg

SEQ ID NO: 170671 - DNA, 50 bp, Artificial
  Synthetic oligonucleotide
acctccacgatttcagtgtggccggtgcgcccagaacacacctcgcgata

SEQ ID NO: 170672 - DNA, 50 bp, Artificial
  Synthetic oligonucleotide
acctcccccatatatccagcgcatcaccaggcccaccttttgcgttcgcc

SEQ ID NO: 170673 - DNA, 50 bp, Artificial
  Synthetic oligonucleotide
acctcgtactagcagctcgcgataacggactccgtgcgttaggccctgcc

SEQ ID NO: 170674 - DNA, 50 bp, Artificial
  Synthetic oligonucleotide
acctctccggctctctcggtcactcatgctccgaccgggacgatccgtga

SEQ ID NO: 170675 - DNA, 50 bp, Artificial
  Synthetic oligonucleotide
acgccgcctggcacgtttgcttcccgaggacgtacgagtccatgcttgta

SEQ ID NO: 170676 - DNA, 58 bp, Artificial
  Synthetic oligonucleotide
cgtgctttctcccagggtgtgttgctgggtgataagcgaaggtcattcggttgccgcc

SEQ ID NO: 170677 - DNA, 50 bp, Artificial
  Synthetic oligonucleotide
acgccgagtcctcattattgcctcgcaccagcccccgatcggaagccgct

SEQ ID NO: 170678 - DNA, 50 bp, Artificial
  Synthetic oligonucleotide
acgccgaaccgtagcaggtcagaggcgctttccgggtgacccgacttgac

SEQ ID NO: 170679 - DNA, 50 bp, Artificial
  Synthetic oligonucleotide
acgccctcaagtgccgggtcaacgcctatgaggctaaccgggccaagctt

SEQ ID NO: 170680 - DNA, 50 bp, Artificial
  Synthetic oligonucleotide
acgcccctgggttcaggcttagcattcgcagagcctctttcatcgctggc

SEQ ID NO: 170681 - DNA, 50 bp, Artificial
  Synthetic oligonucleotide
acgcccaaccgtctaagggctcgctttacgacgggcactgaagctagcgg

SEQ ID NO: 170682 - DNA, 50 bp, Artificial
  Synthetic oligonucleotide
acgcaggccgctggacgcagaccgctgctagcttatcgatggctagtggc

SEQ ID NO: 170683 - DNA, 50 bp, Artificial
  Synthetic oligonucleotide
acgcaaaactcgtctcatggcgcacagaccgcaccagggacgaaccaccc

SEQ ID NO: 170684 - DNA, 50 bp, Artificial
  Synthetic oligonucleotide
acgatccccggaggcattcgcagcggactcaaacgggcaagtgcaagaga

SEQ ID NO: 170685 - DNA, 50 bp, Artificial
  Synthetic oligonucleotide
acgagctcgctggcctatggagcctagcgtcgaccgcaccttggctgtcc

SEQ ID NO: 170686 - DNA, 50 bp, Artificial
  Synthetic oligonucleotide
acgagcctgactggttctgacctcgggctgccgctacacaccactggtgc

SEQ ID NO: 170687 - DNA, 60 bp, Artificial
  Synthetic oligonucleotide
cgtgggctgtacgcccgggcgcctgcgcactctcatgcgctctggtctgctcaccccgtg

SEQ ID NO: 170688 - DNA, 50 bp, Artificial
  Synthetic oligonucleotide
acgagcacaaaagcacccgcctgcatgccaaagcgtggctatttcggcgc

SEQ ID NO: 170689 - DNA, 50 bp, Artificial
  Synthetic oligonucleotide
acgacgcgtactttatgccacgcgaccgtctccccgctacccgaacgttg

SEQ ID NO: 170690 - DNA, 50 bp, Artificial
  Synthetic oligonucleotide
acctgacttgtcgggtgcgccgactcgtgagttcgggttgaaggggttcc

SEQ ID NO: 170691 - DNA, 50 bp, Artificial
  Synthetic oligonucleotide
agcttccagcgggctacgctgacgagctcccaacatgggatgcagatgag

SEQ ID NO: 170692 - DNA, 50 bp, Artificial
  Synthetic oligonucleotide
agctttgcgtcactccgcgtagtcgccagcagctacgagaccacctcgga

SEQ ID NO: 170693 - DNA, 50 bp, Artificial
  Synthetic oligonucleotide
agctttggatcgtcgggcgtggagtactgagtctcaaaaccccgcgtggg

SEQ ID NO: 170694 - DNA, 50 bp, Artificial
  Synthetic oligonucleotide
aggaacatcaccgtagcaaatagacccacgctggcggacacccacggcgc

SEQ ID NO: 170695 - DNA, 50 bp, Artificial
  Synthetic oligonucleotide
aggaacgcatagaaaacgcccccggtccctttcgtcaggccaaagcgcca

SEQ ID NO: 170696 - DNA, 50 bp, Artificial
  Synthetic oligonucleotide
aggaaggtcgcctgcatgtgggtggtagccatcaccgtgtggctggttct

SEQ ID NO: 170697 - DNA, 50 bp, Artificial
  Synthetic oligonucleotide
aggagagtcaaccacgtccacgtctgtgggattatcccgatgtaaagggc

SEQ ID NO: 170698 - DNA, 50 bp, Artificial
  Synthetic oligonucleotide
gaaaaggcacccgcccgcaccaaaaaaccagccttaacccccggtgttca

SEQ ID NO: 170699 - DNA, 50 bp, Artificial
  Synthetic oligonucleotide
aggaggcgttagcacccgtggaggacgaaatccacgcaatgggcgctttt

SEQ ID NO: 170700 - DNA, 50 bp, Artificial
  Synthetic oligonucleotide
aggagtccgtgttgccggcataagagcgaggcaggtggggcttcgccgcg

SEQ ID NO: 170701 - DNA, 50 bp, Artificial
  Synthetic oligonucleotide
aggagtgcttgatggggctaccaaggaccgccgcacgtggcatggtgttc

SEQ ID NO: 170702 - DNA, 50 bp, Artificial
  Synthetic oligonucleotide
aggatacgggtgcggtcttgtcccgctacgtggaggccattgtctggcgc

SEQ ID NO: 170703 - DNA, 50 bp, Artificial
  Synthetic oligonucleotide
aggcagctagcacactggcacttccccggcggtatttccggcccgaggct

SEQ ID NO: 170704 - DNA, 50 bp, Artificial
  Synthetic oligonucleotide
aggcccaatgtggtccctcggcggcaactactctgaaggttgggagtccc

SEQ ID NO: 170705 - DNA, 50 bp, Artificial
  Synthetic oligonucleotide
aggccggccaccgcctagcctctaatcccgcctagaaggccagtagtttc

SEQ ID NO: 170706 - DNA, 50 bp, Artificial
  Synthetic oligonucleotide
aggcgcccccggtgtgagggggtaagttttgagtacgtgccaccttcggt

SEQ ID NO: 170707 - DNA, 50 bp, Artificial
  Synthetic oligonucleotide
agggaaactgcggatcgcccggtgtaactggagcggtgtcggagcacttt

SEQ ID NO: 170708 - DNA, 50 bp, Artificial
  Synthetic oligonucleotide
agtcgccgtgaaacaacgggccaagtgtagcgtcctcacctgcggttgtc

SEQ ID NO: 170709 - DNA, 51 bp, Artificial
  Synthetic oligonucleotide
gaaaccaacgtttcaacgtcaaagcgttaaggcgctaaaacgccttaacgc

SEQ ID NO: 170710 - DNA, 50 bp, Artificial
  Synthetic oligonucleotide
agtcacaccacgcatcccacccacgagctaaccgggcctcggaccacgcg

SEQ ID NO: 170711 - DNA, 50 bp, Artificial
  Synthetic oligonucleotide
agtatgggtgcgcatccgcctagtccttccttggtgggaacatcgcagcg

SEQ ID NO: 170712 - DNA, 50 bp, Artificial
  Synthetic oligonucleotide
agtatccataaccagaatagtgccggaagtccattctgtagcggacatta

SEQ ID NO: 170713 - DNA, 50 bp, Artificial
  Synthetic oligonucleotide
agtacgacgattgccgcgtcatgtttgccgcccagtccgtcgacaaggtc

SEQ ID NO: 170714 - DNA, 50 bp, Artificial
  Synthetic oligonucleotide
aggttggtcccctcacagcaacatcgctggtgagtcagacacttggcggg

SEQ ID NO: 170715 - DNA, 50 bp, Artificial
  Synthetic oligonucleotide
aggtcgactaaggcttcgtttcctttggcggatcccttggctcgtgcgcg

SEQ ID NO: 170716 - DNA, 50 bp, Artificial
  Synthetic oligonucleotide
aggtcctgcgacccaggcgggtcaaccgttactaactcaatatcgcgccg

SEQ ID NO: 170717 - DNA, 50 bp, Artificial
  Synthetic oligonucleotide
aggtcaccgcaaacgggggtggtatccggtggcgttaagggggaattgcg

SEQ ID NO: 170718 - DNA, 50 bp, Artificial
  Synthetic oligonucleotide
aggtagtgcggaaaaacgacgcgagcgggtgtggcccattatcccagccc

SEQ ID NO: 170719 - DNA, 50 bp, Artificial
  Synthetic oligonucleotide
agggttacggaggtcgttctccgcattccgcctggcaacgtctccaccta

SEQ ID NO: 170720 - DNA, 60 bp, Artificial
  Synthetic oligonucleotide
gaaagcattaacgagttctagccctgcctgaggggcgataggcagggcttgagctataca

SEQ ID NO: 170721 - DNA, 50 bp, Artificial
  Synthetic oligonucleotide
agggtgcgatcttgggcgtctaggtcagcaaggccctcgaattggtagcc

SEQ ID NO: 170722 - DNA, 50 bp, Artificial
  Synthetic oligonucleotide
agggtacgcaggatatttcccatgggttcagcctgtcacacgcgggtcga

SEQ ID NO: 170723 - DNA, 50 bp, Artificial
  Synthetic oligonucleotide
agggcggtctgtcgcctacaccatcacgtttcgtgcattgaccggtgact

SEQ ID NO: 170724 - DNA, 50 bp, Artificial
  Synthetic oligonucleotide
agggcacaggcgcgcgttacctcccagataacgatgaacggcttggtctc

SEQ ID NO: 170725 - DNA, 50 bp, Artificial
  Synthetic oligonucleotide
agggaccggagaccctctaccggggtgtggtccgtatcaccgaggggacg

SEQ ID NO: 170726 - DNA, 50 bp, Artificial
  Synthetic oligonucleotide
agccgcagaactgcaagtcatcgagccacgtccatccaaccaccgtggac

SEQ ID NO: 170727 - DNA, 50 bp, Artificial
  Synthetic oligonucleotide
agccgatgcggtgacgattgaatcgctatcccgacacctgtacacccggg

SEQ ID NO: 170728 - DNA, 50 bp, Artificial
  Synthetic oligonucleotide
agccccgtccaaccgaagtcctcgtaaacgaagccgagtgacgaccccag

SEQ ID NO: 170729 - DNA, 50 bp, Artificial
  Synthetic oligonucleotide
agcccccaccgatgctcacaggtggtcgccaactccgcagctaataccaa

SEQ ID NO: 170730 - DNA, 50 bp, Artificial
  Synthetic oligonucleotide
agccccaactcagatccaatcccccgggcgatctgtgcgacttctaggga

SEQ ID NO: 170731 - DNA, 56 bp, Artificial
  Synthetic oligonucleotide
gaacacctgaaagcagaaaataccaactagccatcggagacgatacgccccatttt

SEQ ID NO: 170732 - DNA, 50 bp, Artificial
  Synthetic oligonucleotide
agccacggtggaaaacgagtactcccgtgtggtgaagccggaggggaacc

SEQ ID NO: 170733 - DNA, 50 bp, Artificial
  Synthetic oligonucleotide
agcatcactagcgggtcaccagcgtggaaccccgtggcgatattagcgct

SEQ ID NO: 170734 - DNA, 50 bp, Artificial
  Synthetic oligonucleotide
agcacggcatttgcccccgccactacatctagcgggtcaccctccatacc

SEQ ID NO: 170735 - DNA, 50 bp, Artificial
  Synthetic oligonucleotide
agcacggaagcaatccggcgcagttgaatgcgggccaactctcaagccgg

SEQ ID NO: 170736 - DNA, 50 bp, Artificial
  Synthetic oligonucleotide
agcaaaaaacgtggttctctctagggaataatcgtccggattatcggtca

SEQ ID NO: 170737 - DNA, 50 bp, Artificial
  Synthetic oligonucleotide
agattcgttccatcccgtcgggtgcggctcatctggatgcgggtatgccg

SEQ ID NO: 170738 - DNA, 50 bp, Artificial
  Synthetic oligonucleotide
agagtgtggtttcgcgtaacgccctgagtctacccgccgcgctgacaaac

SEQ ID NO: 170739 - DNA, 50 bp, Artificial
  Synthetic oligonucleotide
agagcgggcctccaagaggcaactgggacgaaccaatcagcgacatcgaa

SEQ ID NO: 170740 - DNA, 50 bp, Artificial
  Synthetic oligonucleotide
agagagctaacgcagccgtgggtgtgtacttctgccccaccgtcacacca

SEQ ID NO: 170741 - DNA, 50 bp, Artificial
  Synthetic oligonucleotide
agacggtcgcggaatctctttggttcctgcgttctccgctgcagagcgcg

SEQ ID NO: 170742 - DNA, 60 bp, Artificial
  Synthetic oligonucleotide
gaactgtgctcatcgggaaggtgtccaagcagggtgtaacggctggtgcgctctactagg

SEQ ID NO: 170743 - DNA, 50 bp, Artificial
  Synthetic oligonucleotide
actgttgggccggctgcttccgttgttgatgggaacgaactcgcggccgt

SEQ ID NO: 170744 - DNA, 50 bp, Artificial
  Synthetic oligonucleotide
actggccaccagtggactcgccggcacaggtgagaccgagaccgtactct

SEQ ID NO: 170745 - DNA, 50 bp, Artificial
  Synthetic oligonucleotide
agcttcattcgggcgcgtgttgtcaggagcgaacgacagaagcgaggtgc

SEQ ID NO: 170746 - DNA, 50 bp, Artificial
  Synthetic oligonucleotide
agctggctgttgacgcattccgccacacggcttcatatgacgttgcggtt

SEQ ID NO: 170747 - DNA, 50 bp, Artificial
  Synthetic oligonucleotide
agctggctggggacggtcaaccacaggcgtcccatttcccaacacggaga

SEQ ID NO: 170748 - DNA, 50 bp, Artificial
  Synthetic oligonucleotide
agctcggtggatggattccgccagggtgctcagcgttccgacgttggaat

SEQ ID NO: 170749 - DNA, 50 bp, Artificial
  Synthetic oligonucleotide
agcgtcgaaaagctaggaagcgtggaaccgatggatatcggacccgcccc

SEQ ID NO: 170750 - DNA, 50 bp, Artificial
  Synthetic oligonucleotide
ggtgcaccaatgatcgacacaatgactaccgagcaagcagcgggagaact

SEQ ID NO: 170751 - DNA, 50 bp, Artificial
  Synthetic oligonucleotide
agcgtccacactagctgggctgcaaagagggtgcgatcttgggcgtctag

SEQ ID NO: 170752 - DNA, 50 bp, Artificial
  Synthetic oligonucleotide
agcgtcacgtggcccaacggggaaaagagaacccagaccgttcagtggca

SEQ ID NO: 170753 - DNA, 59 bp, Artificial
  Synthetic oligonucleotide
gaagctccgggcgtgattgcagtagtcgggttgttgcgtcgatttcgctgacaacggtg

SEQ ID NO: 170754 - DNA, 50 bp, Artificial
  Synthetic oligonucleotide
agcggggcggacatgaaacgtggcggggcactgcgagttgcgaaggttgg

SEQ ID NO: 170755 - DNA, 50 bp, Artificial
  Synthetic oligonucleotide
agcggcaacaacctccgaagtcgcagaggacgtgaccattgagcacgcac

SEQ ID NO: 170756 - DNA, 50 bp, Artificial
  Synthetic oligonucleotide
agcgacctcctggttcctagacgtggcgcttcgcaatacggaccacacgg

SEQ ID NO: 170757 - DNA, 50 bp, Artificial
  Synthetic oligonucleotide
agcgaattgtatgggctccggcgttagtgccgcgttctgtgaggtcctgg

SEQ ID NO: 170758 - DNA, 50 bp, Artificial
  Synthetic oligonucleotide
agcctcaacggaactcacgtgatcggtaaaccacgcagccgcccggccaa

SEQ ID NO: 170759 - DNA, 50 bp, Artificial
  Synthetic oligonucleotide
agccgtggtgctggacttttcctgcgaaggtcagaaagggcaagtgccca

SEQ ID NO: 170760 - DNA, 50 bp, Artificial
  Synthetic oligonucleotide
agccggttgggagaatagtcccctcccgtaggccctcaagctccatgaga

SEQ ID NO: 170761 - DNA, 50 bp, Artificial
  Synthetic oligonucleotide
agccggacctagtgaagtcctggtaagcgccctcaatcgcggaggcgtag

SEQ ID NO: 170762 - DNA, 57 bp, Artificial
  Synthetic oligonucleotide
ggtctagttagctatccggagggggaaattagcactgatatttgaaaggcttagtgc

SEQ ID NO: 170763 - DNA, 57 bp, Artificial
  Synthetic oligonucleotide
gaattcttctttgcttcttcgagatcctcggtgtttttctttgcctcatctgaaagt

SEQ ID NO: 170764 - DNA, 60 bp, Artificial
  Synthetic oligonucleotide
gagctatacatagtggccgttcgggggagcgacctaggctccattctgcggagcttcgac

SEQ ID NO: 170765 - DNA, 60 bp, Artificial
  Synthetic oligonucleotide
gacaggatgcactgtctcaccggacggaacagtagaatctatggctgtgagcagcacacg

SEQ ID NO: 170766 - DNA, 57 bp, Artificial
  Synthetic oligonucleotide
gaccgccaaacgatggctaggcgtgttcgtgggtatgtcaccacgtctaaaggcgaa

SEQ ID NO: 170767 - DNA, 52 bp, Artificial
  Synthetic oligonucleotide
gaccgtcggtgttacagcgatgggggtctggggttctccccagacggtttcc

SEQ ID NO: 170768 - DNA, 60 bp, Artificial
  Synthetic oligonucleotide
gacctcgattctatttggcactcgcatgagtatgcaaggcatacctcccgagttatactc

SEQ ID NO: 170769 - DNA, 60 bp, Artificial
  Synthetic oligonucleotide
gacggatgaggcgcgtgattttgtgaagatggattcccgccgtatggatgattccgcaaa

SEQ ID NO: 170770 - DNA, 60 bp, Artificial
  Synthetic oligonucleotide
gacgtctagatgtctgatatctagacgtctaggccagtgtcccttgctgtagtgacgatc

SEQ ID NO: 170771 - DNA, 58 bp, Artificial
  Synthetic oligonucleotide
gagacgaggcttcaccaaagcttgggctaccgcacgccagctgaagtggaaaccgaat

SEQ ID NO: 170772 - DNA, 53 bp, Artificial
  Synthetic oligonucleotide
gagacgtttcggcaccagtcataccccaattataacgtacgtacgttataaaa

SEQ ID NO: 170773 - DNA, 53 bp, Artificial
  Synthetic oligonucleotide
agctggccttaataacgttctatcccccctggtggaaagcattaaacgccgta

SEQ ID NO: 170774 - DNA, 53 bp, Artificial
  Synthetic oligonucleotide
gagccctgccggtctaggtcggttacggtcacggtctttcctcggtgggcgaa

SEQ ID NO: 170775 - DNA, 59 bp, Artificial
  Synthetic oligonucleotide
gagcactgaaaaaagcagccaccaacctagccgaagcagccgtgcgcaaccttgaaccc

SEQ ID NO: 170776 - DNA, 56 bp, Artificial
  Synthetic oligonucleotide
ctcactaggatttttgaccgtcctagcaacccagaagccagacgccaccaccctcc

SEQ ID NO: 170777 - DNA, 60 bp, Artificial
  Synthetic oligonucleotide
gatcgaggattaagtcaactgagcgggcttagctatccccctggcgcatgactacgggta

SEQ ID NO: 170778 - DNA, 60 bp, Artificial
  Synthetic oligonucleotide
ctctggcaccggcatgaagactttttgagccactggacctactaaagcgatgctgtgttg

SEQ ID NO: 170779 - DNA, 60 bp, Artificial
  Synthetic oligonucleotide
gatcagctaaacgttcaaccgtgtcataaatctcctcagcggtgactgctccaacgggga

SEQ ID NO: 170780 - DNA, 59 bp, Artificial
  Synthetic oligonucleotide
ctctttgaaagcgcacgtacgtgggcatatcgggaggtcagaaagcattttggagacgc

SEQ ID NO: 170781 - DNA, 60 bp, Artificial
  Synthetic oligonucleotide
ctgaggtgcgtcgtgaggctggacatactctttggaggaacattggctaaggtttatgca

SEQ ID NO: 170782 - DNA, 60 bp, Artificial
  Synthetic oligonucleotide
gatcacctgtaaatgaagggacctcagcgtgtctggttgtgccagccgcatagtcattgg

SEQ ID NO: 170783 - DNA, 58 bp, Artificial
  Synthetic oligonucleotide
gatactaaccaccgagattaagtgagagcttgccgagaggtttggcctagccctctcc

SEQ ID NO: 170784 - DNA, 60 bp, Artificial
  Synthetic oligonucleotide
gggaaaaatcaccgcatacaagatcggcaagtccgtccgattcaaagcatcagacgtaga

SEQ ID NO: 170785 - DNA, 58 bp, Artificial
  Synthetic oligonucleotide
agctggtatttaactaagctagtcgcgagaaaagcgcaggctcacgagtcttttctaa

SEQ ID NO: 170786 - DNA, 59 bp, Artificial
  Synthetic oligonucleotide
ctgctagttccgattctggcccaaagcttatgaaagtctggatagagtacagggatccc

SEQ ID NO: 170787 - DNA, 59 bp, Artificial
  Synthetic oligonucleotide
ctgctggagttagcttcgtggcttttttcattgaggttcgcgggccttgctgcgccctg

SEQ ID NO: 170788 - DNA, 52 bp, Artificial
  Synthetic oligonucleotide
ctggcttaggcgggggctttatgtgtcctgtaggcggggtttattggtgggg

SEQ ID NO: 170789 - DNA, 59 bp, Artificial
  Synthetic oligonucleotide
ctgtcacggggtcaagtggagagcgtcccgcgaggcgtgacgaggtgcgtccggcgcga

SEQ ID NO: 170790 - DNA, 60 bp, Artificial
  Synthetic oligonucleotide
ctgtctgcgcagatttaccatcacgggacttttcccagttcaggctgcgcatatttacgc

SEQ ID NO: 170791 - DNA, 59 bp, Artificial
  Synthetic oligonucleotide
cttacacaaacaagcagtactacccagacacagacctagaactaagccagtccttcaca

SEQ ID NO: 170792 - DNA, 60 bp, Artificial
  Synthetic oligonucleotide
gataagcgcaatagaagtgcacaatcttagggcgctctcgcggctgcttgtattgcgctg

SEQ ID NO: 170793 - DNA, 60 bp, Artificial
  Synthetic oligonucleotide
gagtgtctagccgtgctctcattgtgggatacgacacggagtattgagcggagagcgatt

SEQ ID NO: 170794 - DNA, 58 bp, Artificial
  Synthetic oligonucleotide
cttgaaccccgcgtccacaaccgcaaatggcacgccaccatgaccaacgcagcaaaac

SEQ ID NO: 170795 - DNA, 59 bp, Artificial
  Synthetic oligonucleotide
ctttcgccgtgctgttacccacgggagcgctgatacttcaggtcatgtcaacgacggct

SEQ ID NO: 170796 - DNA, 58 bp, Artificial
  Synthetic oligonucleotide
ggtcgcttataactatatccctgtagatctatatccccagccgatcaaccaacaaaac

SEQ ID NO: 170797 - DNA, 60 bp, Artificial
  Synthetic oligonucleotide
gcgatcgcaggtatttggattcctgcgtcatgggttgcgagagcactatcaacactaggc

SEQ ID NO: 170798 - DNA, 53 bp, Artificial
  Synthetic oligonucleotide
ccaaaaactttaacgaacgttcgttataatggtgtcatgaccttcacgacgaa

SEQ ID NO: 170799 - DNA, 58 bp, Artificial
  Synthetic oligonucleotide
ccaatccgaactagatcagatcaacggggcaacccattgtccccagctttgattagga

SEQ ID NO: 170800 - DNA, 57 bp, Artificial
  Synthetic oligonucleotide
ccacccgcagcagtagctacatgcgaggtacgaaagtaagaacgacgcctagttacc

SEQ ID NO: 170801 - DNA, 60 bp, Artificial
  Synthetic oligonucleotide
ccactacctgtggccgaagttgactgtattgccaggtcaatccataaatggatcatcacc

SEQ ID NO: 170802 - DNA, 59 bp, Artificial
  Synthetic oligonucleotide
ccagactcagtgaatccctcagcgatctgggaatttaagtgttactactacacgactac

SEQ ID NO: 170803 - DNA, 60 bp, Artificial
  Synthetic oligonucleotide
ccaggtagacacctgatcaagtttgaccccgtgctcacgcagtggcgcgtccataccggc

SEQ ID NO: 170804 - DNA, 60 bp, Artificial
  Synthetic oligonucleotide
ccaggtcaatccaccgatggatcatcaccaaatcacgcatgtggacagacggcccagccg

SEQ ID NO: 170805 - DNA, 60 bp, Artificial
  Synthetic oligonucleotide
cccacaccagtactcggcagtgaaagctcgctctgggatgttggcgaccttagcctatga

SEQ ID NO: 170806 - DNA, 58 bp, Artificial
  Synthetic oligonucleotide
gcctgggcagtatccaaacgctaggtgcatatcttcgcgtagcgggatttcggtttta

SEQ ID NO: 170807 - DNA, 52 bp, Artificial
  Synthetic oligonucleotide
ggtaggggctttgcctgtgtagaacgggttgcggctaaagcggtgggaaaag

SEQ ID NO: 170808 - DNA, 54 bp, Artificial
  Synthetic oligonucleotide
gcctgattcctatagcggaaaaagaacgactcgagtccgccttacgggagacgt

SEQ ID NO: 170809 - DNA, 60 bp, Artificial
  Synthetic oligonucleotide
gcctatcaactgcgacaatcgaacgctggacatctgcccctcgcgaagattatctagcgc

SEQ ID NO: 170810 - DNA, 60 bp, Artificial
  Synthetic oligonucleotide
gcctagcgaggttcgtcgtgcggttcagaatcaggcgcgaaaagcggcacgagtccaatc

SEQ ID NO: 170811 - DNA, 52 bp, Artificial
  Synthetic oligonucleotide
ccccttaagttggggtgagtcaatcccacaggtgttgttttgaggggaggtc

SEQ ID NO: 170812 - DNA, 54 bp, Artificial
  Synthetic oligonucleotide
ccccttccgaaagctattgtagggtctgtaaagaatcctccttggtggagacca

SEQ ID NO: 170813 - DNA, 58 bp, Artificial
  Synthetic oligonucleotide
cccgaggtctacgcgattttggagcgctgggcacgcctggaaaaagcgccagcttgga

SEQ ID NO: 170814 - DNA, 60 bp, Artificial
  Synthetic oligonucleotide
gcctagaagcccaagagaccacctctccactagaacttggtgcctccatcatgcaggcct

SEQ ID NO: 170815 - DNA, 54 bp, Artificial
  Synthetic oligonucleotide
ccctagaacgcccgtaggagccaccaggaggcttgagccaacctcagggagggg

SEQ ID NO: 170816 - DNA, 60 bp, Artificial
  Synthetic oligonucleotide
cacgatgccacccccagatacagtgaagccccgccaatccgaactagatcagatcaacgg

SEQ ID NO: 170817 - DNA, 60 bp, Artificial
  Synthetic oligonucleotide
cactcgttggggccctttttattgtgcagccgcaattcagggatgaactgtgctgtcact

SEQ ID NO: 170818 - DNA, 57 bp, Artificial
  Synthetic oligonucleotide
ggtaatccccataaaccaataagaattaaatgcccactacggtgtgcacactgccca

SEQ ID NO: 170819 - DNA, 60 bp, Artificial
  Synthetic oligonucleotide
cactgtatgaacaagcgatgaccttgattagtgacctgacagtgcgagtcgatgaactcg

SEQ ID NO: 170820 - DNA, 60 bp, Artificial
  Synthetic oligonucleotide
cagacattccgttgtctgctagggcctgcgctgttggagcgccgatgctacccgcaatga

SEQ ID NO: 170821 - DNA, 59 bp, Artificial
  Synthetic oligonucleotide
cagcccacgtgggaactgtccctgtctggaaatactgatcgttcaccatttggctaata

SEQ ID NO: 170822 - DNA, 59 bp, Artificial
  Synthetic oligonucleotide
gcggtaatgatcatggcttctcctaggtgtataaatcattgcccctaccactttacagg

SEQ ID NO: 170823 - DNA, 60 bp, Artificial
  Synthetic oligonucleotide
gcggctgatgcgtctagccggtgtatcaggcaaaggcaaaggccgctcgcctatgaccac

SEQ ID NO: 170824 - DNA, 54 bp, Artificial
  Synthetic oligonucleotide
caggccacataccgggatttgctagacctacgcaacctaggcaccccggaaacc

SEQ ID NO: 170825 - DNA, 55 bp, Artificial
  Synthetic oligonucleotide
cagtaaatgtgccatctcgtaggcagaaaacggttcccccgtagggtctctctct

SEQ ID NO: 170826 - DNA, 57 bp, Artificial
  Synthetic oligonucleotide
cagtaacccgtagtgaacggttttgttggttgatcagctggggatatagatctacag

SEQ ID NO: 170827 - DNA, 60 bp, Artificial
  Synthetic oligonucleotide
cagtccagagaaccaagcccagtaagtgagcaggccacccacaagtgagagccagaggta

SEQ ID NO: 170828 - DNA, 60 bp, Artificial
  Synthetic oligonucleotide
catacaataacgggcgctatatcatgggtggtttcagcccaaccgtgactgactgctcag

SEQ ID NO: 170829 - DNA, 60 bp, Artificial
  Synthetic oligonucleotide
gggtagacgctgacatatggcaacagctggaagatactccggtacgtacccccgctgctg

SEQ ID NO: 170830 - DNA, 53 bp, Artificial
  Synthetic oligonucleotide
cataccgggatttgctagacctacgcaacctaggcaccccggaaacctaccta

SEQ ID NO: 170831 - DNA, 60 bp, Artificial
  Synthetic oligonucleotide
catcatccataacgatcatgcacggggtggaatccacacccagacttgccagcacctcat

SEQ ID NO: 170832 - DNA, 60 bp, Artificial
  Synthetic oligonucleotide
catctgtgcaacaccttgttgcgtgttgtcgcatccaggatgcgacaacgttgtgtcacc

SEQ ID NO: 170833 - DNA, 60 bp, Artificial
  Synthetic oligonucleotide
gcgcgagtgtcatcacgacaccctaccgacctatgtgcctgtcacactcggtgatcacgc

SEQ ID NO: 170834 - DNA, 60 bp, Artificial
  Synthetic oligonucleotide
catgtctgagctccttgacagaacgaagggtcgaccatcgtgtgtggccgacccttcgag

SEQ ID NO: 170835 - DNA, 53 bp, Artificial
  Synthetic oligonucleotide
gcgccaactccatagtgtgcgggggccaaaatcccggaaaggggactaacgct

SEQ ID NO: 170836 - DNA, 60 bp, Artificial
  Synthetic oligonucleotide
ccttgtatccccggcggctggtagcgcattcaatgaacatatatgtatcgtagcgcaaca

SEQ ID NO: 170837 - DNA, 60 bp, Artificial
  Synthetic oligonucleotide
gcattgtcctacatcttgttcgatgcaccaaaaatcccagtgaactcgaaaactggtcgc

SEQ ID NO: 170838 - DNA, 55 bp, Artificial
  Synthetic oligonucleotide
cctttcgaggataggtattagttgattcgaaaggtacccatgatggtcgccctat

SEQ ID NO: 170839 - DNA, 55 bp, Artificial
  Synthetic oligonucleotide
cgaagcacccccgcacggagcgccaactccatagtgtgcgggggccaaaatcccg

SEQ ID NO: 170840 - DNA, 51 bp, Artificial
  Synthetic oligonucleotide
aggcacggttcgctcgcaccggaagggttcttcaggggaaccccctgaaac

SEQ ID NO: 170841 - DNA, 59 bp, Artificial
  Synthetic oligonucleotide
cgaagcagtgggacactacccgcgctttgtacctcacttgcacgttgtgggatgaaagc

SEQ ID NO: 170842 - DNA, 57 bp, Artificial
  Synthetic oligonucleotide
cgactacctgggattgcacaccatagtgggcgcgggaagattataccgccgtgattt

SEQ ID NO: 170843 - DNA, 60 bp, Artificial
  Synthetic oligonucleotide
cgactctaagggttcaccgctcgattctggataggtggttgaagatcagcgcctattgca

SEQ ID NO: 170844 - DNA, 60 bp, Artificial
  Synthetic oligonucleotide
gcatacggctgcgcatatttacgcatacggctgcgcatatttacgcatacggctgcgcat

SEQ ID NO: 170845 - DNA, 58 bp, Artificial
  Synthetic oligonucleotide
cgagttaagcaacctacgttggcagagttgcaggaggccaaaaaccgcaagcagtcgc

SEQ ID NO: 170846 - DNA, 54 bp, Artificial
  Synthetic oligonucleotide
cgagttgagaaggtgttaaattcttgccacggagggcgggggtccgtgcaggat

SEQ ID NO: 170847 - DNA, 57 bp, Artificial
  Synthetic oligonucleotide
cgatcttgaagcgtggttttcatccgaacgtatgaaaacctacagcttccactcgga

SEQ ID NO: 170848 - DNA, 60 bp, Artificial
  Synthetic oligonucleotide
gcagtcgttgtaaaccgctgtgcgccctcgcgttgagtgttatcaaccgctggatcctta

SEQ ID NO: 170849 - DNA, 60 bp, Artificial
  Synthetic oligonucleotide
gcagtcgcggttagctaccgctaccgccatggtgacagagaagcagcatgccgtggactg

SEQ ID NO: 170850 - DNA, 58 bp, Artificial
  Synthetic oligonucleotide
cgcacttcggcgagaactcgaacgatctaatagccgtgaacgccccaatggtcgcaaa

SEQ ID NO: 170851 - DNA, 56 bp, Artificial
  Synthetic oligonucleotide
gggggtagagccctgagagccttagagggctacctgagggcgccggccaaaggcac

SEQ ID NO: 170852 - DNA, 56 bp, Artificial
  Synthetic oligonucleotide
gcaggggtgcaaggccgtgtaaaaacctgtggaactgtgcctatcgtgtcgggtcg

SEQ ID NO: 170853 - DNA, 58 bp, Artificial
  Synthetic oligonucleotide
cgcagatttaccgttacggtcagcgtagacagggtcaataagccatatgaactgggct

SEQ ID NO: 170854 - DNA, 60 bp, Artificial
  Synthetic oligonucleotide
cgcatatttaccctcatagcaacgtaggcagcgatacagcccgccctagttcgctacgcc

SEQ ID NO: 170855 - DNA, 54 bp, Artificial
  Synthetic oligonucleotide
cgcccattccatgactaaagtaaccaggccttatcttaacccgtccagcgccgt

SEQ ID NO: 170856 - DNA, 56 bp, Artificial
  Synthetic oligonucleotide
gccgtgatttttgccagatttcgtggttttcacgttcaacagctcctgcacgtttt

SEQ ID NO: 170857 - DNA, 55 bp, Artificial
  Synthetic oligonucleotide
ccctccccaccgttattagggacaactgcggtttgcgtgcatgtggggcgtttgc

SEQ ID NO: 170858 - DNA, 52 bp, Artificial
  Synthetic oligonucleotide
gccgtaacggtatgtgccaccccaaacagctttaaaacgtccctagcggcct

SEQ ID NO: 170859 - DNA, 54 bp, Artificial
  Synthetic oligonucleotide
gccggtactagaggacactcctacaccgactccaaaaaccaccgacttgggtca

SEQ ID NO: 170860 - DNA, 60 bp, Artificial
  Synthetic oligonucleotide
ccgagacttgtggggcactaaggacatttcacgcttggactacgtcaccggctggcatgc

SEQ ID NO: 170861 - DNA, 60 bp, Artificial
  Synthetic oligonucleotide
ccgcctgccgctggctcaatttgaaaacatggccatgattcggcgctgaatatcaccgtc

SEQ ID NO: 170862 - DNA, 58 bp, Artificial
  Synthetic oligonucleotide
gggggctcacaccataggcagataacgttccccaccggctcgcctcgtaagcgcacaa

SEQ ID NO: 170863 - DNA, 54 bp, Artificial
  Synthetic oligonucleotide
ccgctggacattcaggcttaatagtggctggtatccccgggagcggtaaaaccg

SEQ ID NO: 170864 - DNA, 54 bp, Artificial
  Synthetic oligonucleotide
ccggctgtcacggtcgccgttctacaacggggatgaccccaccgcgtatcggtg

SEQ ID NO: 170865 - DNA, 56 bp, Artificial
  Synthetic oligonucleotide
ccggggaaacatctgacttggttaaatgtcgtattatgaacacgccgaggaatgaa

SEQ ID NO: 170866 - DNA, 60 bp, Artificial
  Synthetic oligonucleotide
ccggtaaatctgcgcacgcttcaaggcgttgcagtaagaggaatagctgcactgtgtgtt

SEQ ID NO: 170867 - DNA, 58 bp, Artificial
  Synthetic oligonucleotide
ccgtaccgtgcacgttctttcttccactgagatgttttcaccatcgaagagtacgcag

SEQ ID NO: 170868 - DNA, 54 bp, Artificial
  Synthetic oligonucleotide
gccacaccaccgggaaaccatggtagtgggtacttatacgtccacccgtggcac

SEQ ID NO: 170869 - DNA, 58 bp, Artificial
  Synthetic oligonucleotide
cctagattcctgacgtcttgacatctaggtatcagacgtctaggtattaagacttctt

SEQ ID NO: 170870 - DNA, 60 bp, Artificial
  Synthetic oligonucleotide
cctccgggcgcgtggtatctgtacgcatgccagaggacatcatcgagcgcctagacacac

SEQ ID NO: 170871 - DNA, 53 bp, Artificial
  Synthetic oligonucleotide
cctgtaagggagaaaaaagaccaggacggcgtgcaaaagcgctcccaggcgtt

SEQ ID NO: 170872 - DNA, 57 bp, Artificial
  Synthetic oligonucleotide
cctgttttgtgaaggactggcttagttctaggtctgtgtctgggtagtactgcttgt

SEQ ID NO: 170873 - DNA, 57 bp, Artificial
  Synthetic oligonucleotide
ggggacaatgggttgccccgttgatctgatctagttcggattggcggggcttcactg

SEQ ID NO: 170874 - DNA, 53 bp, Artificial
  Synthetic oligonucleotide
tccatataacgtcccttcaccggtcgaatcaccggacaggtcttacgggacgg

SEQ ID NO: 170875 - DNA, 60 bp, Artificial
  Synthetic oligonucleotide
tgcatgatcgttatggatgatgtggacttggacgcggttctgcctactcatggggacgct

SEQ ID NO: 170876 - DNA, 58 bp, Artificial
  Synthetic oligonucleotide
tttatagctcgaatccggtgtcctcatagctaaagtaatccccggccatatcgtctac

SEQ ID NO: 170877 - DNA, 60 bp, Artificial
  Synthetic oligonucleotide
tggcgtactcgcaccgtcctaaagcatcagtctcgaagcgatacatacgcggcgagttcg

SEQ ID NO: 170878 - DNA, 60 bp, Artificial
  Synthetic oligonucleotide
tctcttggcctcctttctaggtcgggctgattgctcttgaagctctctaggggggctcac

SEQ ID NO: 170879 - DNA, 57 bp, Artificial
  Synthetic oligonucleotide
aacataggtgcgattgtcctagtaggtcacctccactactaggcagtcaacccgaac

SEQ ID NO: 170880 - DNA, 54 bp, Artificial
  Synthetic oligonucleotide
aacatatccaacatctgaaacggcgtgtacgaccccttagacgcggttttagta

SEQ ID NO: 170881 - DNA, 55 bp, Artificial
  Synthetic oligonucleotide
aaattctgatgtcccgaagcctacaactggtacccctagagattccaagacctcc

SEQ ID NO: 170882 - DNA, 60 bp, Artificial
  Synthetic oligonucleotide
tctgcgcacgcttcaaggcgttgcagtaagaggaatagctgcactgtgtgttggtgttga

SEQ ID NO: 170883 - DNA, 58 bp, Artificial
  Synthetic oligonucleotide
tccagtcaataagacccaatcccgggagctgctagacgcgggctagtcctcctgggcg

SEQ ID NO: 170884 - DNA, 57 bp, Artificial
  Synthetic oligonucleotide
gggctcacgtcgtaagcaatagaacggtgacctgggggctacactcctagggcacca

SEQ ID NO: 170885 - DNA, 58 bp, Artificial
  Synthetic oligonucleotide
aaaccgaccgtgcacgctcgtgtgagaaagtcagctacatgagaccaactacccgccc

SEQ ID NO: 170886 - DNA, 60 bp, Artificial
  Synthetic oligonucleotide
tccacagcgcaagaaagcaacctgcatgactcccacacctggagccgtttcctagactcg

SEQ ID NO: 170887 - DNA, 59 bp, Artificial
  Synthetic oligonucleotide
aagaagcacaccaacatgcctaaccgccaccgcatcgcagacgtaaaagcccagcttaa

SEQ ID NO: 170888 - DNA, 55 bp, Artificial
  Synthetic oligonucleotide
aaacccgttcaactacatctagactagacagaggcagttgaacgggttaaatgac

SEQ ID NO: 170889 - DNA, 55 bp, Artificial
  Synthetic oligonucleotide
aaaccccttaaacgggcacgcacacgctgtctgggcgctcgcggagccatttacc

SEQ ID NO: 170890 - DNA, 56 bp, Artificial
  Synthetic oligonucleotide
tcctggtgggctagatcctttttcccacgcctaagccgctcgtctgcccacttatt

SEQ ID NO: 170891 - DNA, 56 bp, Artificial
  Synthetic oligonucleotide
tttccagttctcttccgcttcctcgcccactcgctcactaacgttcggtcgctggg

SEQ ID NO: 170892 - DNA, 60 bp, Artificial
  Synthetic oligonucleotide
tcggcgatcactggcaacttcattgaccttgtcccgttgctcctgcgacggtcgccagta

SEQ ID NO: 170893 - DNA, 56 bp, Artificial
  Synthetic oligonucleotide
tccaatcccaagacgtcggctacacctccaaactcttcgtccaagcactcttcccc

SEQ ID NO: 170894 - DNA, 55 bp, Artificial
  Synthetic oligonucleotide
tggctaatacgggacttcgtagatcgtccttgagcctttttcttacggtgcgtct

SEQ ID NO: 170895 - DNA, 60 bp, Artificial
  Synthetic oligonucleotide
ggctttctgcctagtcgaaccaatcttgtgggcgacctgcacaggcgtaacctcacgatc

SEQ ID NO: 170896 - DNA, 57 bp, Artificial
  Synthetic oligonucleotide
gggattgtccacgacagcgacggttgtgaacatactcggaggggctgaactaggtcg

SEQ ID NO: 170897 - DNA, 55 bp, Artificial
  Synthetic oligonucleotide
acagagcttgatcagtacgacccggaacttatcgacggggtacgagttttatgga

SEQ ID NO: 170898 - DNA, 60 bp, Artificial
  Synthetic oligonucleotide
tggctagacatatggcaagctatacgtaaccgcgtttcagctgcacagggctgtctgcgc

SEQ ID NO: 170899 - DNA, 60 bp, Artificial
  Synthetic oligonucleotide
tccaacagtctgtgctgcttgactgatcgacatacctgcacgcaccaacccaacagcctc

SEQ ID NO: 170900 - DNA, 55 bp, Artificial
  Synthetic oligonucleotide
aaagcccatttgcacggtacaggcagtcactcggttggtaggtggtcgtagaccg

SEQ ID NO: 170901 - DNA, 57 bp, Artificial
  Synthetic oligonucleotide
tgtatgactcgagtaatttccgtaattcagtcaaagggtgggacaggaaagaccaca

SEQ ID NO: 170902 - DNA, 60 bp, Artificial
  Synthetic oligonucleotide
aacatgggacgctgctcgtcttatcaccgatactctcggcggacacagcacgcttctcgg

SEQ ID NO: 170903 - DNA, 57 bp, Artificial
  Synthetic oligonucleotide
aacttcccgcgtggtgtttgtgtcaggagtggagcggtacgttcgctggcattgtgg

SEQ ID NO: 170904 - DNA, 59 bp, Artificial
  Synthetic oligonucleotide
aacgtccggatagtcaccgctcttctttagctccgcgacatgcctagcaaccgtggcgc

SEQ ID NO: 170905 - DNA, 58 bp, Artificial
  Synthetic oligonucleotide
tcagggcttcgccccgacaccccgtatcagtgcgtacgtgctcaatgtggtttccagt

SEQ ID NO: 170906 - DNA, 59 bp, Artificial
  Synthetic oligonucleotide
aagcttgccacaccccgagacgcagcctagaagccattctaagcgactatctagccccg

SEQ ID NO: 170907 - DNA, 58 bp, Artificial
  Synthetic oligonucleotide
agtaattgagccaacgaataattgtgcttctgctaactccaagtttttcagctaggaa

SEQ ID NO: 170908 - DNA, 60 bp, Artificial
  Synthetic oligonucleotide
tgctcttgacccgtcatagtgcgtatctccttaagaagatcagctaaccggcgcacgtgt

SEQ ID NO: 170909 - DNA, 58 bp, Artificial
  Synthetic oligonucleotide
tgtcgccccatgcgcagtagcaatccggtcttaaattctctgacgggttcccgccaac

SEQ ID NO: 170910 - DNA, 53 bp, Artificial
  Synthetic oligonucleotide
tttaaagtggaattatttcaagttcccccgcttaatctttcccgagatccatg

SEQ ID NO: 170911 - DNA, 60 bp, Artificial
  Synthetic oligonucleotide
tggagtccatgcacgacctgcccgtgtcgagcatcttcgggggcacaccccactgtatga

SEQ ID NO: 170912 - DNA, 60 bp, Artificial
  Synthetic oligonucleotide
tctaaaaatcccatgcactaacgttggttcaaatctaagccatcatgacacatctgtgca

SEQ ID NO: 170913 - DNA, 54 bp, Artificial
  Synthetic oligonucleotide
ttgtgtcaccctggatgcgacaggtaaacaaaaaacacactaaaaaaacaacaa

SEQ ID NO: 170914 - DNA, 55 bp, Artificial
  Synthetic oligonucleotide
tctaaaggtcgtaagactactgggccgatttcccggcgtagattttctactcgca

SEQ ID NO: 170915 - DNA, 52 bp, Artificial
  Synthetic oligonucleotide
tttacgacaggcaagggaaggacttacgtcaatggttcaaggaccccacccc

SEQ ID NO: 170916 - DNA, 60 bp, Artificial
  Synthetic oligonucleotide
tgcggtcagaaccgcgttgtgcaaccagatggcaaatatcagttccaagaaatttcgagc

SEQ ID NO: 170917 - DNA, 60 bp, Artificial
  Synthetic oligonucleotide
tttacgcatacaacgaaagcggttgcgcagatttaccacacactctgcgctgatttaccg

SEQ ID NO: 170918 - DNA, 51 bp, Artificial
  Synthetic oligonucleotide
gggactcgtgtattccccacggcctagcacccttttcccggccaaccccac

SEQ ID NO: 170919 - DNA, 55 bp, Artificial
  Synthetic oligonucleotide
acaccacatctccgtggtcttataccgcagatatttttaaaacaccaccacacgt

SEQ ID NO: 170920 - DNA, 52 bp, Artificial
  Synthetic oligonucleotide
tgttagcccttccgcattggcggtaggcgtaggggttaccgtagccacccgt

SEQ ID NO: 170921 - DNA, 56 bp, Artificial
  Synthetic oligonucleotide
tccgatagaaataccggcgtccgttgcccacccagaaataccaactgtagatataa

SEQ ID NO: 170922 - DNA, 59 bp, Artificial
  Synthetic oligonucleotide
tctacaacggggatgaccccaccgcgtatcggtggcacgtccagcaccataggatcgac

SEQ ID NO: 170923 - DNA, 58 bp, Artificial
  Synthetic oligonucleotide
tttactagccatgacacgcgaaaaatatgccttttacctgcggttacgtatggctaga

SEQ ID NO: 170924 - DNA, 60 bp, Artificial
  Synthetic oligonucleotide
ttctcttaggtggcatgagccaggccgcgcgtcctgggccagtctttgcacgtcctctag

SEQ ID NO: 170925 - DNA, 60 bp, Artificial
  Synthetic oligonucleotide
aagaggggacaaggatcattgctgcgcttatgctgcctccaagtgcggcgtaatacatac

SEQ ID NO: 170926 - DNA, 60 bp, Artificial
  Synthetic oligonucleotide
ttcgtagtgttgtatcccttccagacttcatgtggatcgagggcatacgcacaaacctta

SEQ ID NO: 170927 - DNA, 60 bp, Artificial
  Synthetic oligonucleotide
ttcctttggcactacgtgaggacatgaagcgcgcaggcatgcagaacggtgaaaacctcc

SEQ ID NO: 170928 - DNA, 60 bp, Artificial
  Synthetic oligonucleotide
tccgagacaatccccaatccagacgagcctgacgatgtacctcatgcgggctttgatcac

SEQ ID NO: 170929 - DNA, 58 bp, Artificial
  Synthetic oligonucleotide
agtagcggggcgtgattgtgaaccagaaataacgttagcaggctgcgttgagtggaac

SEQ ID NO: 170930 - DNA, 60 bp, Artificial
  Synthetic oligonucleotide
ttcctggagggcgctgttcatggcattacgtgttagcacttcaaaataggacagctgtga

SEQ ID NO: 170931 - DNA, 59 bp, Artificial
  Synthetic oligonucleotide
ttgatgacctcattagtcggggagtgtccgtgcggtttctgcgggagtcgcagacctac

SEQ ID NO: 170932 - DNA, 60 bp, Artificial
  Synthetic oligonucleotide
tgcggtaagatttccgtccttgccgcacgcggtctacaaacttgcgatgctcaagccttg

SEQ ID NO: 170933 - DNA, 56 bp, Artificial
  Synthetic oligonucleotide
tccccgggagcggtaaaaccgttgctctacgccgcctagtgcagtcttttgcactg

SEQ ID NO: 170934 - DNA, 56 bp, Artificial
  Synthetic oligonucleotide
tgcgccttcccattcccggtcggttaccttctggaactgtttgtactcctcaagca

SEQ ID NO: 170935 - DNA, 60 bp, Artificial
  Synthetic oligonucleotide
aatgcgtatccgattgatatcactgcggacgttgccagggcatctttcgcgacctcgatt

SEQ ID NO: 170936 - DNA, 57 bp, Artificial
  Synthetic oligonucleotide
tcccaaagctctaccgggtagaaaccgaggcaatgcgccgatgccagtacgttgttc

SEQ ID NO: 170937 - DNA, 60 bp, Artificial
  Synthetic oligonucleotide
tctcgcgccacggttgctaggcatgtcgcggagctaaagaagagcggtgactatccggac

SEQ ID NO: 170938 - DNA, 60 bp, Artificial
  Synthetic oligonucleotide
tgggcggtctacatgcggatgcatgttccgcacaaagcagaagtctccgtggggctgtca

SEQ ID NO: 170939 - DNA, 59 bp, Artificial
  Synthetic oligonucleotide
aaaagggccgctactatccttagagcgttgcaggtgcattaccagcaggaggacaagcc

SEQ ID NO: 170940 - DNA, 59 bp, Artificial
  Synthetic oligonucleotide
agtaggcacgtcctcgctccaggaccgtatttatgcctacaacgtcattgcgtcttcga

SEQ ID NO: 170941 - DNA, 58 bp, Artificial
  Synthetic oligonucleotide
tcgctacgggagttccaattggcaccgaacctatttcacgtgaggaggcgtctatgct

SEQ ID NO: 170942 - DNA, 54 bp, Artificial
  Synthetic oligonucleotide
tttcttcgtttttcattgtctttccctgactctaaatgacaccggtgttattta

SEQ ID NO: 170943 - DNA, 58 bp, Artificial
  Synthetic oligonucleotide
tggacactaagggctacggggcgtctgaaatggcgctaccgagaccgtcaagtagcaa

SEQ ID NO: 170944 - DNA, 60 bp, Artificial
  Synthetic oligonucleotide
aaccccgaccgcgcacagtcatatgagaaagtcagctgcatgagaccatccacccgccct

SEQ ID NO: 170945 - DNA, 60 bp, Artificial
  Synthetic oligonucleotide
tgtctgctcaccttgtgggcaattcccgcgctcacgggcagtcgcgcgagacgggtggac

SEQ ID NO: 170946 - DNA, 56 bp, Artificial
  Synthetic oligonucleotide
tttgcccccgcgacattgaccataaattcatcgcacaaaatatcgaacggggttta

SEQ ID NO: 170947 - DNA, 60 bp, Artificial
  Synthetic oligonucleotide
aaggcgcagactgtgacctgacagtcattggccaacaagagcttgacctagtgacgggta

SEQ ID NO: 170948 - DNA, 57 bp, Artificial
  Synthetic oligonucleotide
ttatgcaccacgcccgcggctactgcgtagggtgcaggccggtgtaccgggagaagg

SEQ ID NO: 170949 - DNA, 60 bp, Artificial
  Synthetic oligonucleotide
tgacccgcgagcaagcacgggaattagagtcgccaattatcgacggacaagcattgccac

SEQ ID NO: 170950 - DNA, 50 bp, Artificial
  Synthetic oligonucleotide
ttatagcgttacaacgctataacgctaacgttaaaacgttttaacgttag

SEQ ID NO: 170951 - DNA, 60 bp, Artificial
  Synthetic oligonucleotide
agtccaaacctgggagaaagcgctcaaaaatgactctagcggattcacgagacattgaca

SEQ ID NO: 170952 - DNA, 59 bp, Artificial
  Synthetic oligonucleotide
tatcaccgtctttgttgaccagtgttttagtgacaaatgctgcatggtttttcgtagtg

SEQ ID NO: 170953 - DNA, 60 bp, Artificial
  Synthetic oligonucleotide
tggaacaaacacggtaactgggacttccatgtcatagtcagcatcggagcgcgtcacatt

SEQ ID NO: 170954 - DNA, 56 bp, Artificial
  Synthetic oligonucleotide
acattgatgtgccgagccaccaggccggcgggaaaatcgagcacgtaaaccccgag

SEQ ID NO: 170955 - DNA, 60 bp, Artificial
  Synthetic oligonucleotide
tggtcaaaggctattactcgggtagacgctgacatatggcaacagctggaagatactccg

SEQ ID NO: 170956 - DNA, 58 bp, Artificial
  Synthetic oligonucleotide
tagtgtttcatggtgttttcacctaagctagggaattgcgcgagaagtctcgcaaaaa

SEQ ID NO: 170957 - DNA, 55 bp, Artificial
  Synthetic oligonucleotide
ttgcgctctttgtgggacagggaggactggagacctaacgcggtggttgaaaacc

SEQ ID NO: 170958 - DNA, 59 bp, Artificial
  Synthetic oligonucleotide
aatgtattaaggatggcatcgtacggtaggggaatgctgtctttagacgctgggactgc

SEQ ID NO: 170959 - DNA, 55 bp, Artificial
  Synthetic oligonucleotide
aaggcgcgaaaaacgcttacagagcgtttcaggaggtcaggcgcgccgatacccc

SEQ ID NO: 170960 - DNA, 58 bp, Artificial
  Synthetic oligonucleotide
tagtgggcatgagtaatacctacgcgcgcctgggctagggcttaacgcgcttttgccg

SEQ ID NO: 170961 - DNA, 59 bp, Artificial
  Synthetic oligonucleotide
accaaccacaatgaagagaattgccggggctaaataccatatcgacaagctattagagc

SEQ ID NO: 170962 - DNA, 60 bp, Artificial
  Synthetic oligonucleotide
gcttccgacgcaatttcaagagtgccatatcggacatcctaaaggcttggccagaagcgg

SEQ ID NO: 170963 - DNA, 60 bp, Artificial
  Synthetic oligonucleotide
tgagactgtgggacgacatgacacgctacggcaccctccttggactacatggccagccta

SEQ ID NO: 170964 - DNA, 60 bp, Artificial
  Synthetic oligonucleotide
ttactttcaccaatgcagccgcccccactgataagccctatacagcaccactagacctag

SEQ ID NO: 170965 - DNA, 60 bp, Artificial
  Synthetic oligonucleotide
ttagcgctccaatgagaagtccgatggcaggaaaccatacaacggccgtggccttcacac

SEQ ID NO: 170966 - DNA, 60 bp, Artificial
  Synthetic oligonucleotide
aaatcattcgggctagccatagacttatgtgctgcactgctccaagatcttggccgacta

SEQ ID NO: 170967 - DNA, 60 bp, Artificial
  Synthetic oligonucleotide
aagtatgagcgctatattgctgcgttgccagggcaagaaacggcactcaatctagctaaa

SEQ ID NO: 170968 - DNA, 58 bp, Artificial
  Synthetic oligonucleotide
tttttagatgcctaggggacttcacgtcctgagaaggagctaatccgctgccagtttc

SEQ ID NO: 170969 - DNA, 56 bp, Artificial
  Synthetic oligonucleotide
tagtgaacggttttgttggttgatcacccctgggtatagagatacagggatatagt

SEQ ID NO: 170970 - DNA, 60 bp, Artificial
  Synthetic oligonucleotide
aagcttggttatgagtctacccaatgactatgcagctggcacaaccagacacgctgaggt

SEQ ID NO: 170971 - DNA, 57 bp, Artificial
  Synthetic oligonucleotide
aaagccgggtgggctggcattatcggcacaactagctggaagaaagaccgcgaggcc

SEQ ID NO: 170972 - DNA, 60 bp, Artificial
  Synthetic oligonucleotide
ttcatcgtcagacagtggacgatccaagaacaacagcatgttgcggtgcaagtgccaacc

SEQ ID NO: 170973 - DNA, 60 bp, Artificial
  Synthetic oligonucleotide
gctgttgttctttcggggatgagtcgtcagatagcccttcaaacgcgctcagaagctctc

SEQ ID NO: 170974 - DNA, 60 bp, Artificial
  Synthetic oligonucleotide
aacctacctagccgacctcatagccaaggcgagctatcacgagcaaaaagcagcaccata

SEQ ID NO: 170975 - DNA, 57 bp, Artificial
  Synthetic oligonucleotide
tggacgtattcttcgaggtaggtgctaacaatctcgcggatggtcacgcctttttgg

SEQ ID NO: 170976 - DNA, 60 bp, Artificial
  Synthetic oligonucleotide
tgcaggatagacaatcatggtcagaacgttaacacgtagcccctgattgtccgcctgccg

SEQ ID NO: 170977 - DNA, 54 bp, Artificial
  Synthetic oligonucleotide
acaaaccttaccagcaacggggattctaactaatgcattttttgattctaagta

SEQ ID NO: 170978 - DNA, 55 bp, Artificial
  Synthetic oligonucleotide
aatttgctctcgatttcaccggaaaaccgatacttcgtggctcggtttctgacgc

SEQ ID NO: 170979 - DNA, 60 bp, Artificial
  Synthetic oligonucleotide
tcaccccgtgggacgaacatattcactatgagttagcgcggatgtctatcgatctgcaat

SEQ ID NO: 170980 - DNA, 60 bp, Artificial
  Synthetic oligonucleotide
ttgggatagcgacatttaacaaccttagctcaatagtttgctgagctcccgctgcatcct

SEQ ID NO: 170981 - DNA, 57 bp, Artificial
  Synthetic oligonucleotide
aacgtgccggtatgtcggtgagaacagctcaacgatggacttccgaaccgcgtgaag

SEQ ID NO: 170982 - DNA, 57 bp, Artificial
  Synthetic oligonucleotide
ttggcggggggattgtccacgacagcgacggttgtgaacatactcggaggggctgaa

SEQ ID NO: 170983 - DNA, 56 bp, Artificial
  Synthetic oligonucleotide
tcgcctcaacgacgatggttttcccccgatagaaaaccatcgcatcaacttcccga

SEQ ID NO: 170984 - DNA, 57 bp, Artificial
  Synthetic oligonucleotide
attgagcaggcaccacccgggcaaggttgcgcatatttaccatcggtcggtttctac

SEQ ID NO: 170985 - DNA, 53 bp, Artificial
  Synthetic oligonucleotide
tgaaacaaacctcatggtcaaccggcgctaaaaaagccctatccgtaaacgtc

SEQ ID NO: 170986 - DNA, 58 bp, Artificial
  Synthetic oligonucleotide
tatgagaccccttaaacgtccggatagtcaccgctcttctttagctccgcgacatgcc

SEQ ID NO: 170987 - DNA, 59 bp, Artificial
  Synthetic oligonucleotide
tcaaggtgatcaagttccacggctatttgggcctatcttcaaagcagggtggcgtattc

SEQ ID NO: 170988 - DNA, 60 bp, Artificial
  Synthetic oligonucleotide
aacgtgttcatcttgctgagtacattcacctgactaatccgacctatgcagctgtgatcg

SEQ ID NO: 170989 - DNA, 60 bp, Artificial
  Synthetic oligonucleotide
tcgcgggtcgcttcgtggcggaatctcgttgccacaccacgcgcatttctgagacgtttc

SEQ ID NO: 170990 - DNA, 60 bp, Artificial
  Synthetic oligonucleotide
tattgatccattgctagcagtgtggagccgctggacagtagtagctgctgacgcggggct

SEQ ID NO: 170991 - DNA, 55 bp, Artificial
  Synthetic oligonucleotide
tgaaagttgtttcagtcgtttttctgaatcaataaacatgattttttccctctaa

SEQ ID NO: 170992 - DNA, 55 bp, Artificial
  Synthetic oligonucleotide
aaagtaatatctactcccgttggagtgcagccgcccagcggcgtgggtttaaagc

SEQ ID NO: 170993 - DNA, 56 bp, Artificial
  Synthetic oligonucleotide
tgtgagagctaccttccctacccaacacaaaactcccactatccctaggaggaaga

SEQ ID NO: 170994 - DNA, 59 bp, Artificial
  Synthetic oligonucleotide
ggtttctacctcaagatggcagtaacagcgatgctgccccaattggagggataccactg

SEQ ID NO: 170995 - DNA, 60 bp, Artificial
  Synthetic oligonucleotide
gctggggctgcggcgagcggtgccacctctcgcatgttgtcggtgattccgctgttgttc

SEQ ID NO: 170996 - DNA, 59 bp, Artificial
  Synthetic oligonucleotide
agcactgcgtaggcgatgattttctgttaccgcaataggccatgctccccacagcgctg

SEQ ID NO: 170997 - DNA, 59 bp, Artificial
  Synthetic oligonucleotide
cagtggactgataataggcaacggaatgcgcgttcattctcgcgatagttaacacgccg

SEQ ID NO: 170998 - DNA, 59 bp, Artificial
  Synthetic oligonucleotide
gccatctatcccagagcaattaagtcacactgacgattatgcaatgtaggtaaactctg

SEQ ID NO: 170999 - DNA, 59 bp, Artificial
  Synthetic oligonucleotide
agcgcatttatggtcgtgcgatgagcatccactctgaggttgatcccagcctcctcggt

SEQ ID NO: 171000 - DNA, 53 bp, Artificial
  Synthetic oligonucleotide
aacgatcgcgtgggacatcaacagttaccggccccgtagttagagtccacggt

SEQ ID NO: 171001 - DNA, 57 bp, Artificial
  Synthetic oligonucleotide
ttgcgaaaatagttactagattccctcccctgctcaggggatatgtgaatagtcttt

SEQ ID NO: 171002 - DNA, 57 bp, Artificial
  Synthetic oligonucleotide
aaagcgcctagccgtgctcatggcgtgaaactggagaaagctaggaaagataaaaac

SEQ ID NO: 171003 - DNA, 59 bp, Artificial
  Synthetic oligonucleotide
ttgcaagagcgctcggagaggtgccacgaaattgggcttatgcgcgtgccacatacggc

SEQ ID NO: 171004 - DNA, 55 bp, Artificial
  Synthetic oligonucleotide
ggtggacggttgtttctcgcgctgtgtttaaccgcaagaaacaaatggactctgg

SEQ ID NO: 171005 - DNA, 59 bp, Artificial
  Synthetic oligonucleotide
gcagagcggctaattttgcttgcttgagtagctctcggtcttttacatacaggcgcagt

SEQ ID NO: 171006 - DNA, 58 bp, Artificial
  Synthetic oligonucleotide
ggcttagacactggcttagacactggcttaggcgggggctttatgtgtcctgtaggcg

SEQ ID NO: 171007 - DNA, 58 bp, Artificial
  Synthetic oligonucleotide
gctggaaagacccaaacagtgagtacgcccgagcacagcgagaaaaactagctaagtc

SEQ ID NO: 171008 - DNA, 59 bp, Artificial
  Synthetic oligonucleotide
atctgtcggaggctcgtgagctatcgacgggtcagtggttgcatgccggggatgtgttg

SEQ ID NO: 171009 - DNA, 56 bp, Artificial
  Synthetic oligonucleotide
ttacctcgggtcagaaacaagcaaccctgtttgatatcggcgaggtcctagccttc

SEQ ID NO: 171010 - DNA, 58 bp, Artificial
  Synthetic oligonucleotide
gctggttacgccattgcaggggtgcaaggccgtgtaaaaacctgtggaactgtgccta

SEQ ID NO: 171011 - DNA, 57 bp, Artificial
  Synthetic oligonucleotide
gttaagttgggccgttcaacacttatccaaggccagacttattgaagctgtgtctag

SEQ ID NO: 171012 - DNA, 59 bp, Artificial
  Synthetic oligonucleotide
tgcagctattcctcttactgcaacgccttgaagcgtgcgcagatttaccggaggtcgtg

SEQ ID NO: 171013 - DNA, 58 bp, Artificial
  Synthetic oligonucleotide
tgttattgccaccatgttcaacggtaacgaacgtattggtatccatacagggctaagc

SEQ ID NO: 171014 - DNA, 59 bp, Artificial
  Synthetic oligonucleotide
tctagttacatgggtgatcccagtttcagtctgttcgacctcacaggggagctgtagct

SEQ ID NO: 171015 - DNA, 58 bp, Artificial
  Synthetic oligonucleotide
taatagccgtgaacgccccaatggtcgcaaacgccccaatagtgcagaagctcccgta

SEQ ID NO: 171016 - DNA, 59 bp, Artificial
  Synthetic oligonucleotide
tacctgttgcagaacaacgccccgccgccaaggtcgcgccaatgcctatgtctagcggg

SEQ ID NO: 171017 - DNA, 54 bp, Artificial
  Synthetic oligonucleotide
accactcaaccactttccacgagtcaatagagtccaaatagaaaacacaaaccc

SEQ ID NO: 171018 - DNA, 55 bp, Artificial
  Synthetic oligonucleotide
gctgacaacggtggccaaaatttcgtctgggcttgccaccagtaacgagttttgg

SEQ ID NO: 171019 - DNA, 57 bp, Artificial
  Synthetic oligonucleotide
aagggccagcgtggagacttgaagggggcgatctttcattcggatcacgggagcgtg

SEQ ID NO: 171020 - DNA, 59 bp, Artificial
  Synthetic oligonucleotide
tgaatgaatcgagagtcgcttgtgtgcgcttcatatcgagtggagagacaccagtcggc

SEQ ID NO: 171021 - DNA, 57 bp, Artificial
  Synthetic oligonucleotide
caacgttggggaggcgcggtggcaagaaagcctcagagcgttggaaagatcccaata

SEQ ID NO: 171022 - DNA, 59 bp, Artificial
  Synthetic oligonucleotide
ggaataacgtggctccacaagctcagccaggagattatgtgtccctggtcagtccaatg

SEQ ID NO: 171023 - DNA, 57 bp, Artificial
  Synthetic oligonucleotide
ctacgggtagtcgcccttcaaattcacccacaccgtttgcacatcatgtgcgtcggg

SEQ ID NO: 171024 - DNA, 53 bp, Artificial
  Synthetic oligonucleotide
tcgcctagggaggaagcgatggtttggtagaaagttcgggacggagttacctg

SEQ ID NO: 171025 - DNA, 58 bp, Artificial
  Synthetic oligonucleotide
tcttgcacatcatgtgcgtcgggttacgttgtgacgaaataggttactgtggatgcat

SEQ ID NO: 171026 - DNA, 58 bp, Artificial
  Synthetic oligonucleotide
ttgcctcatacatggagaatgacccgtcaggcttgggcactcccttatcgcagaaaat

SEQ ID NO: 171027 - DNA, 58 bp, Artificial
  Synthetic oligonucleotide
gcaaacacattagcggaattgatgggcaaccagcctggcgttgactacgccgggctac

SEQ ID NO: 171028 - DNA, 58 bp, Artificial
  Synthetic oligonucleotide
gcagatttaccctcactgcatcgcgcgcagtaacgcaccccactccaccgtgcgagcc

SEQ ID NO: 171029 - DNA, 60 bp, Artificial
  Synthetic oligonucleotide
caattcaacgcaaatctgatcgcccaggaacaagagaaatacgagtaccacaagcagttc

SEQ ID NO: 171030 - DNA, 53 bp, Artificial
  Synthetic oligonucleotide
ttaccccactcggagcaacggcgttatcgaaccaatcatgaaccgttttaccg

SEQ ID NO: 171031 - DNA, 58 bp, Artificial
  Synthetic oligonucleotide
ctattccactgctatcgcaggcttacggtcgcaggtgtacaacactgttaagggatac

SEQ ID NO: 171032 - DNA, 58 bp, Artificial
  Synthetic oligonucleotide
ttgaccattccgcgtgaacaagtgcgcttcactgccggacagtacagcatcacagttt

SEQ ID NO: 171033 - DNA, 53 bp, Artificial
  Synthetic oligonucleotide
cctattggggtatacgtcagttaacgacgtttttcactagggcgtagcagaaa

SEQ ID NO: 171034 - DNA, 55 bp, Artificial
  Synthetic oligonucleotide
ctaaatcccggtgggctgacaacgcacgcccttcaacttaaataagctactacat

SEQ ID NO: 171035 - DNA, 58 bp, Artificial
  Synthetic oligonucleotide
gtgagcacgtgaaacctgacctttctttatccgttgacaccgccctgctagagcactg

SEQ ID NO: 171036 - DNA, 58 bp, Artificial
  Synthetic oligonucleotide
tttagcgtgtcacgtcagaccgtgaatagagcacttaaggtctgcgggcattgaactt

SEQ ID NO: 171037 - DNA, 58 bp, Artificial
  Synthetic oligonucleotide
aaaaccgaaagtctgattatcagcaataggtgtgtaccaattggcgtgatgtcggtcg

SEQ ID NO: 171038 - DNA, 58 bp, Artificial
  Synthetic oligonucleotide
ttgcctatggtcacccgaatacggatgcagtgattgttagccgggtattcgagacggc

SEQ ID NO: 171039 - DNA, 58 bp, Artificial
  Synthetic oligonucleotide
tctgaaatggcgctaccgagaccgtcaagtagcaatcaatgctagtgatgtgcatgca

SEQ ID NO: 171040 - DNA, 59 bp, Artificial
  Synthetic oligonucleotide
cacaccgttggcacatcatgtgcgtcgggttacgttgtgacgaaataggttactgtgga

SEQ ID NO: 171041 - DNA, 58 bp, Artificial
  Synthetic oligonucleotide
attctttgaattcgactccgattgcgaagctcatgctcgggttgcttggttcggtggc

SEQ ID NO: 171042 - DNA, 58 bp, Artificial
  Synthetic oligonucleotide
cggattggcggggcttcactgtatctgggggtggcatcgtgaatagattgcacaccgt

SEQ ID NO: 171043 - DNA, 55 bp, Artificial
  Synthetic oligonucleotide
aacgatggctaggcgtgttcgtgggtatgtcaccacgtctaaaggcgaagggtac

SEQ ID NO: 171044 - DNA, 56 bp, Artificial
  Synthetic oligonucleotide
caccaggactaggtaatcggtggggcacagaggaggtagccttcgaagaaggtggc

SEQ ID NO: 171045 - DNA, 58 bp, Artificial
  Synthetic oligonucleotide
gactatggcatggaactgtttgccttgtggcagtcaggctgtaagaaagttgacctta

SEQ ID NO: 171046 - DNA, 58 bp, Artificial
  Synthetic oligonucleotide
cacatgcacgcgctttcttgtcagatatgcataaacctgtcaggtacaagaaatactc

SEQ ID NO: 171047 - DNA, 50 bp, Artificial
  Synthetic oligonucleotide
ggttcttaaaggccaagtagggctatcggtaaccaccggaaacggtgttc

SEQ ID NO: 171048 - DNA, 57 bp, Artificial
  Synthetic oligonucleotide
tgaagtaacctgacatgtgttatgccaagctttgcgtcgatttttgatgtgtaagcg

SEQ ID NO: 171049 - DNA, 57 bp, Artificial
  Synthetic oligonucleotide
cgcgtaccccgaaacggactctcaccagtgggcacattgcgcgacatccgagacaat

SEQ ID NO: 171050 - DNA, 57 bp, Artificial
  Synthetic oligonucleotide
ggccgtgtaaaaacctgtggaactgtgcctatcgtgtcgggtcgtgtcgcacttggc

SEQ ID NO: 171051 - DNA, 56 bp, Artificial
  Synthetic oligonucleotide
gctatgaggtcggctaggtaggtttccggggtgcctaggttgcgtaggtctagcaa

SEQ ID NO: 171052 - DNA, 56 bp, Artificial
  Synthetic oligonucleotide
agctcacttcgagtaacagtttcgggccggtaactggtcttcacgaagtgagatcc

SEQ ID NO: 171053 - DNA, 53 bp, Artificial
  Synthetic oligonucleotide
cggtagtttcccagttcaggtccgtcgatcaagttggctgggggggcaacgta

SEQ ID NO: 171054 - DNA, 57 bp, Artificial
  Synthetic oligonucleotide
gggatgaccccaccgcgtatcggtggcacgtccagcaccataggatcgaccggctat

SEQ ID NO: 171055 - DNA, 55 bp, Artificial
  Synthetic oligonucleotide
gggtatgtcaccacgtctaaaggcgaagggtacggcagttcagctacggcggggc

SEQ ID NO: 171056 - DNA, 57 bp, Artificial
  Synthetic oligonucleotide
aggcatgtggcagcacatcagacaccgctgcttgaatgcctaagtgagcgtcacttg

SEQ ID NO: 171057 - DNA, 57 bp, Artificial
  Synthetic oligonucleotide
aggacgacatgacacgctacggcaccctccttggactacatggcaagcctaaagatc

SEQ ID NO: 171058 - DNA, 57 bp, Artificial
  Synthetic oligonucleotide
tcgtcttatcaccgatactctcggcggacacagcacgcttctcggctcgtttggagc

SEQ ID NO: 171059 - DNA, 57 bp, Artificial
  Synthetic oligonucleotide
tcgtgcgccgcggatgtatcgggtggactcagacgctttaggaaaatgcgagtatgt

SEQ ID NO: 171060 - DNA, 57 bp, Artificial
  Synthetic oligonucleotide
ccgatcagggggttcagtgcaccgtaggcggtattcgatgcggggatatatagcctg

SEQ ID NO: 171061 - DNA, 54 bp, Artificial
  Synthetic oligonucleotide
tccctacccctccgggtgttacctgaacttggccggcaagcttagacgccacga

SEQ ID NO: 171062 - DNA, 57 bp, Artificial
  Synthetic oligonucleotide
cacagtgcacggacaacctcacgccatttctggaaacccccgcggcaacgctaatcg

SEQ ID NO: 171063 - DNA, 57 bp, Artificial
  Synthetic oligonucleotide
tcctgccggaacgaggtactcctcgaaatctttgaattggcgtgatccctgtaccca

SEQ ID NO: 171064 - DNA, 57 bp, Artificial
  Synthetic oligonucleotide
gcggatgcatgttccgcacaaagcagaagtctccgtggggctgtcacgagacgggaa

SEQ ID NO: 171065 - DNA, 57 bp, Artificial
  Synthetic oligonucleotide
acaacgtatatgacccagacgagaggttcctacacagcgataacggctctatgtgcc

SEQ ID NO: 171066 - DNA, 55 bp, Artificial
  Synthetic oligonucleotide
tgtcagtacagcatcaaccgtccctacccctccgggtgttacctgaacttggccg

SEQ ID NO: 171067 - DNA, 57 bp, Artificial
  Synthetic oligonucleotide
tcccacactgagcccgtagccctccttttctctactgcgggcgggaatctgcgtatt

SEQ ID NO: 171068 - DNA, 57 bp, Artificial
  Synthetic oligonucleotide
ctccgcgaacatattgtcggtcagatagttcgaaagtgcagtcggaagggacgaacg

SEQ ID NO: 171069 - DNA, 56 bp, Artificial
  Synthetic oligonucleotide
ctattcgggggatatggttccccacgctccgaagcgccgctgcgtaacgccctcac

SEQ ID NO: 171070 - DNA, 57 bp, Artificial
  Synthetic oligonucleotide
acctgcccgtgtcgagcatcttcgggggcacaccccactgtatgaacaagcgatgac

SEQ ID NO: 171071 - DNA, 57 bp, Artificial
  Synthetic oligonucleotide
taacttggactatttcgtggtgagatccttctaaagcaatggcaccgtagatgacag

SEQ ID NO: 171072 - DNA, 56 bp, Artificial
  Synthetic oligonucleotide
acctcacgccatttctggaaacccccgcggcaacgctaatcgtggccgagctagag

SEQ ID NO: 171073 - DNA, 60 bp, Artificial
  Synthetic oligonucleotide
cacattgtctaaggaacttctccacaagtcggcaactgaagtggcggctctgatccagag

SEQ ID NO: 171074 - DNA, 57 bp, Artificial
  Synthetic oligonucleotide
agccggacttctcccgaccacttccccactatttccaggcatgcgccagctgcgctc

SEQ ID NO: 171075 - DNA, 53 bp, Artificial
  Synthetic oligonucleotide
agcatcaaccgtccctacccctccgggtgttacctgaacttggccggcaagct

SEQ ID NO: 171076 - DNA, 55 bp, Artificial
  Synthetic oligonucleotide
accacgtctaaaggcgaagggtacggcagttcagctacggcggggcgtgcaacga

SEQ ID NO: 171077 - DNA, 57 bp, Artificial
  Synthetic oligonucleotide
taggtaagcgcctaacactcctccaggaaacacaccgcaaggaatgacaccggtgta

SEQ ID NO: 171078 - DNA, 54 bp, Artificial
  Synthetic oligonucleotide
tgtgtgcgggggcttggtttacaagtagtccgcgaatcggtcggggtaagccac

SEQ ID NO: 171079 - DNA, 56 bp, Artificial
  Synthetic oligonucleotide
aggcgcgaaaaacggcacgagtccaatcagggtgccagttgtgtcaacgacggaat

SEQ ID NO: 171080 - DNA, 56 bp, Artificial
  Synthetic oligonucleotide
tcccgttggagtgcagccgcccagcggcgtgggtttaaagcgcctagccgtgctca

SEQ ID NO: 171081 - DNA, 56 bp, Artificial
  Synthetic oligonucleotide
gctgtagagctttagcgttctagcgttttaacgttgtgatcgtgacgtgcggttat

SEQ ID NO: 171082 - DNA, 56 bp, Artificial
  Synthetic oligonucleotide
tacgtcgactcgatgcccagcgaccctgacctcctggtagagctgggtcgggtcgt

SEQ ID NO: 171083 - DNA, 56 bp, Artificial
  Synthetic oligonucleotide
cttaaacgccttgtttcagtggtggccgagttgttggacattgacgtgcgagctac

SEQ ID NO: 171084 - DNA, 60 bp, Artificial
  Synthetic oligonucleotide
gctaggccactgtgactgttatgtaggtgacagttggaaagttctaggtctagatgggac

SEQ ID NO: 171085 - DNA, 56 bp, Artificial
  Synthetic oligonucleotide
acggtccttcgcagtttgagggtctgcaaaactctcactctcgctgggggtcacct

SEQ ID NO: 171086 - DNA, 56 bp, Artificial
  Synthetic oligonucleotide
ttactccgactttctcgtgctcagccaacctagcgattacccgttcctatgctcgg

SEQ ID NO: 171087 - DNA, 56 bp, Artificial
  Synthetic oligonucleotide
tgcctggatatagaagtcagcggcacgactctcctgagcgcagacgcttcgaggct

SEQ ID NO: 171088 - DNA, 56 bp, Artificial
  Synthetic oligonucleotide
aaaccgctgtgcgccctcgcgttgagtgttatcaaccgctggatccttatccggag

SEQ ID NO: 171089 - DNA, 52 bp, Artificial
  Synthetic oligonucleotide
cccttcaccggtcgaatcaccggacaggtcttacgggacggtggcgggacta

SEQ ID NO: 171090 - DNA, 56 bp, Artificial
  Synthetic oligonucleotide
ggcgatccgtgaacagccgctttagtggcatacataaaacgatcgagagcagccat

SEQ ID NO: 171091 - DNA, 56 bp, Artificial
  Synthetic oligonucleotide
gaggagcacctatagaggactcattgaaagtttttcagtgacagattcgcgatctt

SEQ ID NO: 171092 - DNA, 56 bp, Artificial
  Synthetic oligonucleotide
gtagcagggataattcctataactcaggagcagatagcgccctatataaggtggct

SEQ ID NO: 171093 - DNA, 56 bp, Artificial
  Synthetic oligonucleotide
ggtctaatgagacagttccgcccggttgatcgggtatactcatgtctaggctttct

SEQ ID NO: 171094 - DNA, 56 bp, Artificial
  Synthetic oligonucleotide
ttggtggggtatgcccgtgtcagcacaccggatcagaatctggaccgtcaggtagc

SEQ ID NO: 171095 - DNA, 60 bp, Artificial
  Synthetic oligonucleotide
gctaggaattgctgatccgcaacgacagcgccacacgtaggatcgatatgctccgctaaa

SEQ ID NO: 171096 - DNA, 56 bp, Artificial
  Synthetic oligonucleotide
gatctgcaattggtagtggcttccgagcgggcgcaatcaccacaagtggcactatt

SEQ ID NO: 171097 - DNA, 55 bp, Artificial
  Synthetic oligonucleotide
ccgctgaggcagccgtcacgtcaacccaatgccacgtttgtgcgcacgtaatcag

SEQ ID NO: 171098 - DNA, 55 bp, Artificial
  Synthetic oligonucleotide
tgtatacggtcacgcctgcacataggatcggtgcgacttctaccgggtcgctacc

SEQ ID NO: 171099 - DNA, 55 bp, Artificial
  Synthetic oligonucleotide
aaccgcgcctacgtagacctgcttaacttcggtactgcccgcatatacgccggtg

SEQ ID NO: 171100 - DNA, 55 bp, Artificial
  Synthetic oligonucleotide
cgacgtgtcttccgagcccgcgtagtcaacccacgatggatgcaggccatgcgta

SEQ ID NO: 171101 - DNA, 55 bp, Artificial
  Synthetic oligonucleotide
cgactgacggtctatcaggaggttgaaccgtggtgacgttgcgtgaggagcatgc

SEQ ID NO: 171102 - DNA, 55 bp, Artificial
  Synthetic oligonucleotide
cgaccttgcgaccgactatctctctacgaagtagaaaccaacgtttcaacgtcaa

SEQ ID NO: 171103 - DNA, 55 bp, Artificial
  Synthetic oligonucleotide
cgaccgcgacgtcactgctcactggaagcatgagcatccctattcttttgggccc

SEQ ID NO: 171104 - DNA, 55 bp, Artificial
  Synthetic oligonucleotide
cgactgttcagaagactgaaatggtagcggtgtggtgagtatctggtagcgcctg

SEQ ID NO: 171105 - DNA, 55 bp, Artificial
  Synthetic oligonucleotide
gcccaagaagtcacaacagatgacctcattgtcccggcctccagaacgggtatcc

SEQ ID NO: 171106 - DNA, 60 bp, Artificial
  Synthetic oligonucleotide
cacccgccctgagggacgctttgagcagctctggctaccgctatggccactagcaagcga

SEQ ID NO: 171107 - DNA, 55 bp, Artificial
  Synthetic oligonucleotide
cgaccactatggcgcgagtacttggggttttctgtatgttccacgagaatggagg

SEQ ID NO: 171108 - DNA, 54 bp, Artificial
  Synthetic oligonucleotide
gcatactgggccttactgcgccttaccgcggattaccgactcttaagtcccgtt

SEQ ID NO: 171109 - DNA, 55 bp, Artificial
  Synthetic oligonucleotide
gcatatgggcgcttcggcgtatccccgtagccactgatttagggacgcgggtagc

SEQ ID NO: 171110 - DNA, 55 bp, Artificial
  Synthetic oligonucleotide
ccgctatctatgtgtcgaacgctaccggtttgatgtcgcagaatgagacgttcaa

SEQ ID NO: 171111 - DNA, 55 bp, Artificial
  Synthetic oligonucleotide
cccgacgcacatgatgtgcaaacggtgtgggtgaatttgaagggcgactgcctgt

SEQ ID NO: 171112 - DNA, 55 bp, Artificial
  Synthetic oligonucleotide
cccgaggaattcgcatgagagcaccctcatgaacgggcggcgtggggaaaatcgg

SEQ ID NO: 171113 - DNA, 55 bp, Artificial
  Synthetic oligonucleotide
ccgctagaattggctagatgctgaagctttatcaaatcgaacgaccgaagcacac

SEQ ID NO: 171114 - DNA, 55 bp, Artificial
  Synthetic oligonucleotide
gccgttcgaccgcgcataacccgcgaagacaacaggtttccatcctatgctctag

SEQ ID NO: 171115 - DNA, 55 bp, Artificial
  Synthetic oligonucleotide
ccgcgttgtgcaaccagatggcaaatatcagttccaagaaatttcgagccgtgaa

SEQ ID NO: 171116 - DNA, 55 bp, Artificial
  Synthetic oligonucleotide
cccgcttgtctgccgggtgaaccggtcatagccatcaggatgcgaaatgagcccc

SEQ ID NO: 171117 - DNA, 60 bp, Artificial
  Synthetic oligonucleotide
ggctagtcctatccccgccgtagctatcggcaagcgtcgtgtgcaggaagcaaccaccgc

SEQ ID NO: 171118 - DNA, 60 bp, Artificial
  Synthetic oligonucleotide
caccgctacgcattagcgtgtacattcgattgtgcacatggaataggcacgccaccaagg

SEQ ID NO: 171119 - DNA, 55 bp, Artificial
  Synthetic oligonucleotide
cgaaccttggaccgatttatatcgtgagcttgtaatcttgcgaccatgaggctcc

SEQ ID NO: 171120 - DNA, 55 bp, Artificial
  Synthetic oligonucleotide
gcatcaataatggctgcgtctgtgagtcgttgtcctgctttgcgtagtcggtgac

SEQ ID NO: 171121 - DNA, 55 bp, Artificial
  Synthetic oligonucleotide
cgaaagcggttgcgcagatttaccacacactctgcgctgatttaccgatacgcag

SEQ ID NO: 171122 - DNA, 55 bp, Artificial
  Synthetic oligonucleotide
gcatctgacacctgaaacgcatatttgacgttaactcagaggtgagggcctaaaa

SEQ ID NO: 171123 - DNA, 55 bp, Artificial
  Synthetic oligonucleotide
cccggaatgttcggagtcatatacctatgaacagggtgcgcttctcgtgtgtccg

SEQ ID NO: 171124 - DNA, 54 bp, Artificial
  Synthetic oligonucleotide
ttaaccggctcttccggttttagagtgcattgattagttcgctggggttcgggc

SEQ ID NO: 171125 - DNA, 55 bp, Artificial
  Synthetic oligonucleotide
cccgtatcgttggagaacctcttgcctagcgatggttagatctggtttggtttcg

SEQ ID NO: 171126 - DNA, 55 bp, Artificial
  Synthetic oligonucleotide
cccgtcccatacgtgccacaccttccccagataaaccagcgtgtctagcccgtcg

SEQ ID NO: 171127 - DNA, 55 bp, Artificial
  Synthetic oligonucleotide
cccgtgagcgcataggggtgcgactcagagggatctgcgctgatcaacattccat

SEQ ID NO: 171128 - DNA, 55 bp, Artificial
  Synthetic oligonucleotide
tgggtcgtcaggcagctgcgttttcgagtgcaggtaccactcgagcatcttgcgt

SEQ ID NO: 171129 - DNA, 58 bp, Artificial
  Synthetic oligonucleotide
gctaccgagcttgcagtaagccgcgtaatcgcccggccgggaatggacgaagctagtg

SEQ ID NO: 171130 - DNA, 54 bp, Artificial
  Synthetic oligonucleotide
ccggaaaaccgatacttcgtggctcggtttctgacgcgaattccgcacaactag

SEQ ID NO: 171131 - DNA, 54 bp, Artificial
  Synthetic oligonucleotide
cgagtcacgaaaatcttttccccgataattttgaagaggattaccagttatgtc

SEQ ID NO: 171132 - DNA, 55 bp, Artificial
  Synthetic oligonucleotide
gcagtgtggggttacacgctgttggattcttatctggcgactgtgccgggcgggg

SEQ ID NO: 171133 - DNA, 54 bp, Artificial
  Synthetic oligonucleotide
cccagcgggtgtgtcccgtgtcatgaaaacaacccgaggtgtccccagttgaac

SEQ ID NO: 171134 - DNA, 55 bp, Artificial
  Synthetic oligonucleotide
cccagggcttaagaagttcgccgacccaagctggaccttcggccactggatctcc

SEQ ID NO: 171135 - DNA, 55 bp, Artificial
  Synthetic oligonucleotide
cccagtctgcaacaaagatctaccgcaccccacagggaccggctgttcagcagac

SEQ ID NO: 171136 - DNA, 55 bp, Artificial
  Synthetic oligonucleotide
gcatacggggtgcacatacctccagacaaaacttaacagtctgcagctgcaagtg

SEQ ID NO: 171137 - DNA, 53 bp, Artificial
  Synthetic oligonucleotide
ccggacatagcgtcggaccaaacgagaatgcccacgaatccctaaaggggagt

SEQ ID NO: 171138 - DNA, 55 bp, Artificial
  Synthetic oligonucleotide
cccatggcctttagcaaacgagatctgttgaggtagttcatgtgtcacagtcacg

SEQ ID NO: 171139 - DNA, 55 bp, Artificial
  Synthetic oligonucleotide
gcccaaaacacgccatgggttagcgccgcagtaatacgcccaacagccagcatcg

SEQ ID NO: 171140 - DNA, 55 bp, Artificial
  Synthetic oligonucleotide
caccgttgaaggctataaaatcccgcccgccgtctatacagccgccgtccaacgc

SEQ ID NO: 171141 - DNA, 55 bp, Artificial
  Synthetic oligonucleotide
cccattgtgcccctcaacgcatctgttttccaactaggtactagcgtgggttgca

SEQ ID NO: 171142 - DNA, 55 bp, Artificial
  Synthetic oligonucleotide
ccccactatcgcactgaaaaagcccgcccaacgttcgaccactgcgtcgaatgta

SEQ ID NO: 171143 - DNA, 55 bp, Artificial
  Synthetic oligonucleotide
tgtctccctcaacgttgatgacgtgtcttccgcgcaggaggtaatacgcttgcgg

SEQ ID NO: 171144 - DNA, 55 bp, Artificial
  Synthetic oligonucleotide
gcctcctgtgcaacctccacgcagtgatcccgaccgcagtttctggtagcagggt

SEQ ID NO: 171145 - DNA, 55 bp, Artificial
  Synthetic oligonucleotide
gcctccgagtattcaaatgaccaggctccgccttatatccacgctgtgttggatg

SEQ ID NO: 171146 - DNA, 55 bp, Artificial
  Synthetic oligonucleotide
gcctcccagtcgaataagcagaagtctcaggacaaccgcaggggtaagggtcgta

SEQ ID NO: 171147 - DNA, 55 bp, Artificial
  Synthetic oligonucleotide
tggtcatctatcccattctagtggaatgtccgtgcatcccatgccaccattcgaa

SEQ ID NO: 171148 - DNA, 55 bp, Artificial
  Synthetic oligonucleotide
cgagctcgaggaaccagcagactggcacaacttgaggcagtacgttgtcgacggg

SEQ ID NO: 171149 - DNA, 53 bp, Artificial
  Synthetic oligonucleotide
ccccgctgggaggcagtccaccacgaagggtcaatcaccgttcccaagccttt

SEQ ID NO: 171150 - DNA, 53 bp, Artificial
  Synthetic oligonucleotide
ccccgctttcgatacatcgaatccctaccgcacccctaactacccctcagaaa

SEQ ID NO: 171151 - DNA, 59 bp, Artificial
  Synthetic oligonucleotide
cacgagtgtgattgctctgtgcctgcgacacgaaaagtttttaacctgccccgatacag

SEQ ID NO: 171152 - DNA, 55 bp, Artificial
  Synthetic oligonucleotide
tgtcgcgtgccagtggggataccgttgggccggataagcctggggttactgcagt

SEQ ID NO: 171153 - DNA, 55 bp, Artificial
  Synthetic oligonucleotide
tggtcgtgcgatgagcatccactctgaggttgatcccagcctcctcggtggactg

SEQ ID NO: 171154 - DNA, 53 bp, Artificial
  Synthetic oligonucleotide
cgagcgtgtaccgccgtaaatttcaccacacgggtaaacgaatcccctgcgct

SEQ ID NO: 171155 - DNA, 55 bp, Artificial
  Synthetic oligonucleotide
cgagcggtagcgttgctaatttatcgcccacagtcgtgtgcgcggttcggatgaa

SEQ ID NO: 171156 - DNA, 55 bp, Artificial
  Synthetic oligonucleotide
cgagcaccaacaggaagcagcggccctagtgtgcctcaccacgtgccctttccta

SEQ ID NO: 171157 - DNA, 55 bp, Artificial
  Synthetic oligonucleotide
cgacttttacgcgacaactactaacgtcgcgcgggtgcatctcttagcgtgttgg

SEQ ID NO: 171158 - DNA, 55 bp, Artificial
  Synthetic oligonucleotide
cccctctgtactttccgtgctgttatccgtgcgggactcgtaagttggggcattc

SEQ ID NO: 171159 - DNA, 55 bp, Artificial
  Synthetic oligonucleotide
cgacttcacatctccgacttcttaacagcgacttctcgtggctgacttcgctacc

SEQ ID NO: 171160 - DNA, 55 bp, Artificial
  Synthetic oligonucleotide
gcatttcgcttatcgacgggaatttgctgtttctgggctgttagccggtgaagcg

SEQ ID NO: 171161 - DNA, 55 bp, Artificial
  Synthetic oligonucleotide
tgtggggcgtagccccgccggtgcaaccgctacccaccgcccacagtggcgggag

SEQ ID NO: 171162 - DNA, 60 bp, Artificial
  Synthetic oligonucleotide
ggcaccagtgaaaggttgtatgagctctctagcttttagagtcacgagcagactctcaaa

SEQ ID NO: 171163 - DNA, 55 bp, Artificial
  Synthetic oligonucleotide
aacctgggagagagggttgatcgacggcgcacactcatcagccaagccgaccgtc

SEQ ID NO: 171164 - DNA, 55 bp, Artificial
  Synthetic oligonucleotide
cctcactggaatccgcgagctgaactatgtgagagcgaagcaaatcttctagatc

SEQ ID NO: 171165 - DNA, 55 bp, Artificial
  Synthetic oligonucleotide
ccgcgccttggatgagttggacaaggcagttgagtcctaccagaagtccgagggc

SEQ ID NO: 171166 - DNA, 55 bp, Artificial
  Synthetic oligonucleotide
cctcaagatgttcgtctgtccactccaagagtttcagcaccgtggatagccgtcg

SEQ ID NO: 171167 - DNA, 55 bp, Artificial
  Synthetic oligonucleotide
cctcaacatgcagactcgctactttgatcatgccgcaacaactccaatccgtgag

SEQ ID NO: 171168 - DNA, 55 bp, Artificial
  Synthetic oligonucleotide
ccgacgagatcggaatcaagccctttgtgcgacggcactcagcctaggaagcgcc

SEQ ID NO: 171169 - DNA, 55 bp, Artificial
  Synthetic oligonucleotide
gccgagtctcttagctgctgggcccttaattgctcacaagatccttgagggatag

SEQ ID NO: 171170 - DNA, 55 bp, Artificial
  Synthetic oligonucleotide
tgtcgagtccttctcggtcgggtactccttgttctgatggtcgctgacttgcagt

SEQ ID NO: 171171 - DNA, 55 bp, Artificial
  Synthetic oligonucleotide
cctagtattcgtgctcagtattcgtccagctctggtcgagttgaggctcgggcag

SEQ ID NO: 171172 - DNA, 55 bp, Artificial
  Synthetic oligonucleotide
ccgagcgaaattttggccatggtcgtcacagagctggaagcggcagcgagaatta

SEQ ID NO: 171173 - DNA, 60 bp, Artificial
  Synthetic oligonucleotide
atccggtgtatgccgcagcaggcatgagcagcccgaatatgcgcctgctggctgcaacga

SEQ ID NO: 171174 - DNA, 55 bp, Artificial
  Synthetic oligonucleotide
ccgtcaccctcccgtgacctgcggatttgcgttaattcctcggtgtgctattgtt

SEQ ID NO: 171175 - DNA, 55 bp, Artificial
  Synthetic oligonucleotide
gccgaggattggaaggccgttggatagtgcgttttggacctcgtcggagtattcg

SEQ ID NO: 171176 - DNA, 55 bp, Artificial
  Synthetic oligonucleotide
gccgaagttttcccctcaccgtgtgtcaatggagatgagctgagcgtgacaaggg

SEQ ID NO: 171177 - DNA, 55 bp, Artificial
  Synthetic oligonucleotide
gcccttacaggtgtagccaccaatgcttttagcgtcatcagacgatgcggcaaca

SEQ ID NO: 171178 - DNA, 55 bp, Artificial
  Synthetic oligonucleotide
ccgcgacccttctgaactggcactactgcaccagttgtgcgctttccacgattac

SEQ ID NO: 171179 - DNA, 55 bp, Artificial
  Synthetic oligonucleotide
gccaatagaattatctacgtaaccctggcaaacctcaggattggcggtaatcccg

SEQ ID NO: 171180 - DNA, 55 bp, Artificial
  Synthetic oligonucleotide
gccctatcttcccgaaaggaaacaggaccaatgaccactgctcataccgacaccc

SEQ ID NO: 171181 - DNA, 55 bp, Artificial
  Synthetic oligonucleotide
ccgcatagctttcatggtcaccactgcgataagcgtttattgccgcgagcagcca

SEQ ID NO: 171182 - DNA, 52 bp, Artificial
  Synthetic oligonucleotide
ccgcgacccttccggagtgagaagggaccgcgggttttaccgtgtctcgcta

SEQ ID NO: 171183 - DNA, 55 bp, Artificial
  Synthetic oligonucleotide
ccgccatatggcaggactctcggacgcacagaggagggcgaacgactacgcagat

SEQ ID NO: 171184 - DNA, 58 bp, Artificial
  Synthetic oligonucleotide
atccgtaggtgtcgaggttgcatacagccctctattctctagaccccacgactgaccg

SEQ ID NO: 171185 - DNA, 55 bp, Artificial
  Synthetic oligonucleotide
ccgtgtcataaatctcctcagcggtgactgctccaacggggaggagttctgtggc

SEQ ID NO: 171186 - DNA, 55 bp, Artificial
  Synthetic oligonucleotide
ccgtgtagcgagtccacgcgttgttcttgccgtcgtcggacaagtcgtgatccgc

SEQ ID NO: 171187 - DNA, 55 bp, Artificial
  Synthetic oligonucleotide
ccgtggggagcatgctaagcgcgtgatcctagattgggagtgataaatcatggag

SEQ ID NO: 171188 - DNA, 54 bp, Artificial
  Synthetic oligonucleotide
ccgtggcttaccccgaccgattcgcggactacttgtaaaccaagcctccgcaca

SEQ ID NO: 171189 - DNA, 55 bp, Artificial
  Synthetic oligonucleotide
ccgtggcggtcgctcaagacatcggaattaatgtcctctatctaccagggctggc

SEQ ID NO: 171190 - DNA, 55 bp, Artificial
  Synthetic oligonucleotide
gccgtgcgagatgcattgaactatggcgtcagagtcaccggttccactgttcact

SEQ ID NO: 171191 - DNA, 55 bp, Artificial
  Synthetic oligonucleotide
ccctacctagagcatcctctgaatcattaatttcgcaagacacacccgaccgaaa

SEQ ID NO: 171192 - DNA, 55 bp, Artificial
  Synthetic oligonucleotide
ccctatccatcaatccacggggtgtaggacactgcgcaacccgcgtatgaatctc

SEQ ID NO: 171193 - DNA, 55 bp, Artificial
  Synthetic oligonucleotide
ccctcacgcaaaatacggctgcgctgatttacccatacggaaacccacatgagac

SEQ ID NO: 171194 - DNA, 55 bp, Artificial
  Synthetic oligonucleotide
ccttcctaggcatcgcccttagtgctgtagccgtagcaggactatccggaggggc

SEQ ID NO: 171195 - DNA, 58 bp, Artificial
  Synthetic oligonucleotide
ggaggtcggagtttattgggatcaagtgatgtctcttcattccttagaacacgtcgga

SEQ ID NO: 171196 - DNA, 55 bp, Artificial
  Synthetic oligonucleotide
ccttcacttcccctggggacgaatacaccgcggtcaatgtccgcattggggctgt

SEQ ID NO: 171197 - DNA, 55 bp, Artificial
  Synthetic oligonucleotide
aacgtaggcagcgatacagcccgccctagttcgctacgccacgcgcacgtatcga

SEQ ID NO: 171198 - DNA, 55 bp, Artificial
  Synthetic oligonucleotide
ccgcgtgcgagactatggactgttctttagggtcaagatgctcatagttgagcag

SEQ ID NO: 171199 - DNA, 55 bp, Artificial
  Synthetic oligonucleotide
gccgtagtgctaggtattacgctgcagctctccccagacgggctttctgcgccac

SEQ ID NO: 171200 - DNA, 55 bp, Artificial
  Synthetic oligonucleotide
ccttaagacacttcgacaaagttttatgcaccgcctgaatcgtccgagacgacac

SEQ ID NO: 171201 - DNA, 55 bp, Artificial
  Synthetic oligonucleotide
gccgtacctgctggcgccactcttatggagggagatatccgagacaaagccggtg

SEQ ID NO: 171202 - DNA, 54 bp, Artificial
  Synthetic oligonucleotide
ccctgtgagggcgcaggttgagccacttttacgtcccggagatccctttagggc

SEQ ID NO: 171203 - DNA, 55 bp, Artificial
  Synthetic oligonucleotide
cccttacgtaaatcctgcgacaggcagtgaccgtgcaggccctattcttcggggc

SEQ ID NO: 171204 - DNA, 55 bp, Artificial
  Synthetic oligonucleotide
cctggtccaggagtagtagaccgcagatactacgagagtgccgaaccacactccg

SEQ ID NO: 171205 - DNA, 55 bp, Artificial
  Synthetic oligonucleotide
ccggtgtcctcatagctaaagtaatccccggccatatcgtctacctcacttgagg

SEQ ID NO: 171206 - DNA, 56 bp, Artificial
  Synthetic oligonucleotide
atctcaggcacagaaaaacctaaaaaacgctatgagcaggagttttctagcggacg

SEQ ID NO: 171207 - DNA, 55 bp, Artificial
  Synthetic oligonucleotide
ccgcggtcggtgatatacataacgcccagcacattcttatcggggctgaccatcc

SEQ ID NO: 171208 - DNA, 54 bp, Artificial
  Synthetic oligonucleotide
ccgaacaagaccaagaacattaatgaacacactcttaaaccgtctcaatagggt

SEQ ID NO: 171209 - DNA, 55 bp, Artificial
  Synthetic oligonucleotide
cctgctcaacgttattcgtatccccggaaacccattgatcagtccagtgcggttg

SEQ ID NO: 171210 - DNA, 55 bp, Artificial
  Synthetic oligonucleotide
ccgtacttaaatcctatgacgcaggaagcttagaaatccttgtacgcggggtaga

SEQ ID NO: 171211 - DNA, 55 bp, Artificial
  Synthetic oligonucleotide
cctgaggcagcggaagtcggttacgcagcttgtgtgctttacgcaccgagctagt

SEQ ID NO: 171212 - DNA, 55 bp, Artificial
  Synthetic oligonucleotide
cctgaccactacctcacccgcatgatgcactccgctggcgttgacctggcagatc

SEQ ID NO: 171213 - DNA, 55 bp, Artificial
  Synthetic oligonucleotide
ccgaaccgaatactcggttaagcggatgtgccacgtgttgaagctcaatcgctcc

SEQ ID NO: 171214 - DNA, 55 bp, Artificial
  Synthetic oligonucleotide
cctgaacattctgaggttatttccgggcagaaagtcggctatgcgcgggttagct

SEQ ID NO: 171215 - DNA, 55 bp, Artificial
  Synthetic oligonucleotide
ccgcgggcttccaattcttcgattagcgccgtgcgagttggggagggttcatgcg

SEQ ID NO: 171216 - DNA, 55 bp, Artificial
  Synthetic oligonucleotide
cctctacttgtttggctagttcggctcggctgagtccgtgttctgcccgcagcac

SEQ ID NO: 171217 - DNA, 55 bp, Artificial
  Synthetic oligonucleotide
ggaggaaaacgcggcggttctcgccagttggtctaggtcgtaattgcgcactctt

SEQ ID NO: 171218 - DNA, 55 bp, Artificial
  Synthetic oligonucleotide
gcccagcggcttcccttaggatttcggcatgaagaacccaacttctggaggcgcg

SEQ ID NO: 171219 - DNA, 55 bp, Artificial
  Synthetic oligonucleotide
gcccataggcaatgggattggtcacgtagcgacgctggtagtaaccgttctcgtc

SEQ ID NO: 171220 - DNA, 55 bp, Artificial
  Synthetic oligonucleotide
cctctacgactcagatgcgagacttcagacgacgcacaaaggaagcaatcgaaga

SEQ ID NO: 171221 - DNA, 55 bp, Artificial
  Synthetic oligonucleotide
cctcgggatggagctgtgaccatagacggccactctaccccggaagcagaaacgg

SEQ ID NO: 171222 - DNA, 55 bp, Artificial
  Synthetic oligonucleotide
ctgagcatgacttacaccatagttgcgaaaattgcctcgagttcacctcacacgc

SEQ ID NO: 171223 - DNA, 55 bp, Artificial
  Synthetic oligonucleotide
ctgagcggtctaggccgatgactgaggcgagctctttcggagtggagggtccaca

SEQ ID NO: 171224 - DNA, 55 bp, Artificial
  Synthetic oligonucleotide
ttgttagggcccgtcggagccaacggagctgaccattgtcctcgtggcacctcag

SEQ ID NO: 171225 - DNA, 55 bp, Artificial
  Synthetic oligonucleotide
ctgatcatcggagcgtacgttgtattccgggacatcataggatgggatgaggggc

SEQ ID NO: 171226 - DNA, 55 bp, Artificial
  Synthetic oligonucleotide
ctgcaaaacgcatatgagagcgggcaaaacgcggctgagggaaagcgcatcacgg

SEQ ID NO: 171227 - DNA, 55 bp, Artificial
  Synthetic oligonucleotide
ctgcagaaaggatgaggtcggtggtaattgcgccgcggacgagagtgttttcgtc

SEQ ID NO: 171228 - DNA, 60 bp, Artificial
  Synthetic oligonucleotide
ggcgtatcagacagcgcaagataaacacgtggacgcagtacaggaactgagctccgtaaa

SEQ ID NO: 171229 - DNA, 60 bp, Artificial
  Synthetic oligonucleotide
ggagcatctctcgcatcaaatcgggggatgcttgagcgagcaattcgtcgagataggtag

SEQ ID NO: 171230 - DNA, 55 bp, Artificial
  Synthetic oligonucleotide
ctgccggtatagaaggggaggactgcacggcttgatcaacgaggctgcaggagct

SEQ ID NO: 171231 - DNA, 55 bp, Artificial
  Synthetic oligonucleotide
ctgctgaggcacccgaggcagacttagttacctgtccacgatttgcgggaaggcc

SEQ ID NO: 171232 - DNA, 55 bp, Artificial
  Synthetic oligonucleotide
ctggacgctctcatgaatccagatggagacctacttactgactggagagcttata

SEQ ID NO: 171233 - DNA, 55 bp, Artificial
  Synthetic oligonucleotide
ctggcaggtgtcggctccgccccgatcggtaattgcataaaccggctcttcgcga

SEQ ID NO: 171234 - DNA, 55 bp, Artificial
  Synthetic oligonucleotide
ctgggccctgtcatcactgaggtgttgtctcgtagattagggagacaatatagcc

SEQ ID NO: 171235 - DNA, 55 bp, Artificial
  Synthetic oligonucleotide
ctggtcattaaaggagcgcacacgtgcacgacaagaaagacttcgccgttcccgc

SEQ ID NO: 171236 - DNA, 55 bp, Artificial
  Synthetic oligonucleotide
ctggtgcacgcgcactgcattacctggtgggttggtgatataacgcaggccgtgg

SEQ ID NO: 171237 - DNA, 55 bp, Artificial
  Synthetic oligonucleotide
ctgtctcagtgactcgtcgaaatgccggttcagtcggtcgacacgttcctctgtg

SEQ ID NO: 171238 - DNA, 55 bp, Artificial
  Synthetic oligonucleotide
aaacgatttgtgatgcgggcgcgttacgtcggttgcatggtgttggttcgcagat

SEQ ID NO: 171239 - DNA, 55 bp, Artificial
  Synthetic oligonucleotide
tttaggcgctcggctgtagagacgtagccgttgtatggggctccaactaaaggcg

SEQ ID NO: 171240 - DNA, 57 bp, Artificial
  Synthetic oligonucleotide
ggacgagtttggcgacgatcttacagttccatccgtgtggtcagaagtaggggcgaa

SEQ ID NO: 171241 - DNA, 55 bp, Artificial
  Synthetic oligonucleotide
cttctggctccatcaagttcgatttgcgggcctctgaagccgtgtaccctcagcc

SEQ ID NO: 171242 - DNA, 55 bp, Artificial
  Synthetic oligonucleotide
cttgcccgcgttaagtaggtccgtcatgcccattaccttaagcggattagctgtt

SEQ ID NO: 171243 - DNA, 55 bp, Artificial
  Synthetic oligonucleotide
gagtgctcctgagtggtgtacgttttcttggtcgaatccgtatctaccaggcctc

SEQ ID NO: 171244 - DNA, 55 bp, Artificial
  Synthetic oligonucleotide
cttgcttatccaactccgcgtagctctggcgcttaccaaagaagtacgtggcagg

SEQ ID NO: 171245 - DNA, 55 bp, Artificial
  Synthetic oligonucleotide
cttgtagcagcactgggcgtttccgatgcccgtatggaccaaggttccatgcgcg

SEQ ID NO: 171246 - DNA, 55 bp, Artificial
  Synthetic oligonucleotide
gagtacgccagattcgaaagctgcggtgaaaccaccttgagcttcaatctcagtg

SEQ ID NO: 171247 - DNA, 55 bp, Artificial
  Synthetic oligonucleotide
ctaaagatgcacgctgagcgcgctactccttatgcggagtggtggaaggtacgcg

SEQ ID NO: 171248 - DNA, 55 bp, Artificial
  Synthetic oligonucleotide
ctaacttctccgtgtactaatcggtctagaatggaaagactaccatggctatagg

SEQ ID NO: 171249 - DNA, 55 bp, Artificial
  Synthetic oligonucleotide
aaatcactcaaactcgaggacagaaatcacttttgctggaaactagctgtcgctt

SEQ ID NO: 171250 - DNA, 55 bp, Artificial
  Synthetic oligonucleotide
gcaacgctaatcgtggccgagctagaggcccgccaccttatcgacgccaccatga

SEQ ID NO: 171251 - DNA, 60 bp, Artificial
  Synthetic oligonucleotide
atgcgagtacgttcaactgaccaacaagcagtatgcctctgtcctggtggtcgatattga

SEQ ID NO: 171252 - DNA, 55 bp, Artificial
  Synthetic oligonucleotide
ctacattgccatccgcgtgataagcggtagtggtggcgaatcagacggtaacgac

SEQ ID NO: 171253 - DNA, 55 bp, Artificial
  Synthetic oligonucleotide
ctaccggtgtgtacttgcttccgggagctcttatcggggcatcagtggcatctgg

SEQ ID NO: 171254 - DNA, 55 bp, Artificial
  Synthetic oligonucleotide
ctactcgattgcgacctacctattcgtatccctcgtgatctacgtcctgggcgtt

SEQ ID NO: 171255 - DNA, 54 bp, Artificial
  Synthetic oligonucleotide
aaaggagaatctgcgcttttacaaacgatgcgttttaccctggtacaggcccac

SEQ ID NO: 171256 - DNA, 55 bp, Artificial
  Synthetic oligonucleotide
gcaacacatgcgccaagtcatgaattaccgcaacgagggtcttgctacccgccag

SEQ ID NO: 171257 - DNA, 55 bp, Artificial
  Synthetic oligonucleotide
ctattctaaggggaggcaacctctcacctacgtgctggcgtatccactacttcga

SEQ ID NO: 171258 - DNA, 55 bp, Artificial
  Synthetic oligonucleotide
ctcagtgcgatagctctagtcgctctatagcgatttatctggccagttggtgcgg

SEQ ID NO: 171259 - DNA, 55 bp, Artificial
  Synthetic oligonucleotide
ctccggccaatgccaattcggtcgcggcaaccgtgcgctaaagcccggaatattc

SEQ ID NO: 171260 - DNA, 55 bp, Artificial
  Synthetic oligonucleotide
ctccgggatggataagcggatgatcacacggtgcgaaagcacggggcgtcgacgt

SEQ ID NO: 171261 - DNA, 55 bp, Artificial
  Synthetic oligonucleotide
ctcctcggaagatacgccggacatcctcttcatctcgggttgtcatggtgtatcc

SEQ ID NO: 171262 - DNA, 60 bp, Artificial
  Synthetic oligonucleotide
atgctggctatgaaagcagttccacttgtagttaggagcttctctacgttagacgccaag

SEQ ID NO: 171263 - DNA, 55 bp, Artificial
  Synthetic oligonucleotide
ctcggactccagctgtcggtcgatcgccttatctctggcccgcacgtcaggggaa

SEQ ID NO: 171264 - DNA, 55 bp, Artificial
  Synthetic oligonucleotide
aaagacctagggctcacctgcgatcgcaccactgatgttgacctctcacggctag

SEQ ID NO: 171265 - DNA, 55 bp, Artificial
  Synthetic oligonucleotide
ctgaatctccctctggcataagcgcctatcctactcgtacgtactgctaacgcct

SEQ ID NO: 171266 - DNA, 55 bp, Artificial
  Synthetic oligonucleotide
ctgaatgaatctaccagcaccccttactccctttggcgagccctgacaaccgtgc

SEQ ID NO: 171267 - DNA, 55 bp, Artificial
  Synthetic oligonucleotide
ctgagagcggtcactcggtggagtcatggctaatcgcctcgtaccttatcggtca

SEQ ID NO: 171268 - DNA, 55 bp, Artificial
  Synthetic oligonucleotide
gagcgtgtacgccagaatgggagtgggtcatcgcgtggtgtgtccttccgtgagc

SEQ ID NO: 171269 - DNA, 55 bp, Artificial
  Synthetic oligonucleotide
gacatcctgcgcattgacagtggtcagtgagcccacgagaaagctatccacgtgg

SEQ ID NO: 171270 - DNA, 55 bp, Artificial
  Synthetic oligonucleotide
gacatcgcgaaactgattgatgacctaggcacgtccacaacggatgccaacgacc

SEQ ID NO: 171271 - DNA, 55 bp, Artificial
  Synthetic oligonucleotide
gaccaagactcgcaacaaaactaacgtcccgctcctgttgcggaaccacgtcgcg

SEQ ID NO: 171272 - DNA, 55 bp, Artificial
  Synthetic oligonucleotide
gaccaggacggcgtgcaaaagcgctcccaggcgtttgataaccgcttggggtgga

SEQ ID NO: 171273 - DNA, 57 bp, Artificial
  Synthetic oligonucleotide
gcttgcagagagggaatcgcctagggaggaagcgatggtttggtagaaagttcggga

SEQ ID NO: 171274 - DNA, 55 bp, Artificial
  Synthetic oligonucleotide
gacccgtaacctccgcaatcacgacatgcgtgccatctattgccacactgtcggt

SEQ ID NO: 171275 - DNA, 55 bp, Artificial
  Synthetic oligonucleotide
tttctgcattgacgatctgataagtggcatcagtcagcggcaggatgagcactaa

SEQ ID NO: 171276 - DNA, 55 bp, Artificial
  Synthetic oligonucleotide
gacctgtgctctgacgttcatatcgagcctttacctggaacatctagagtaggcg

SEQ ID NO: 171277 - DNA, 55 bp, Artificial
  Synthetic oligonucleotide
gacgaatgctggttatgggaagctctctcaagatgttgctcctcgttcaggctgg

SEQ ID NO: 171278 - DNA, 55 bp, Artificial
  Synthetic oligonucleotide
gacgccagatctcaagtgtcagtttcattacttgtagttccttgtcatcagcggg

SEQ ID NO: 171279 - DNA, 55 bp, Artificial
  Synthetic oligonucleotide
gacggcagcaaagcattaatcgtcggtaggctgaagtgaagtactttccgaaaga

SEQ ID NO: 171280 - DNA, 55 bp, Artificial
  Synthetic oligonucleotide
gacgggatgcggtgtcgcgcatagagtctttgtccttctagtagttatggttggc

SEQ ID NO: 171281 - DNA, 55 bp, Artificial
  Synthetic oligonucleotide
gacgggcagcaatgaccgcccttcccactctcacttaggaaccccacaacctcgc

SEQ ID NO: 171282 - DNA, 55 bp, Artificial
  Synthetic oligonucleotide
gagcgtcagtgcgcggctctctggccaaaatagaggcgatcacacggcgcgacgt

SEQ ID NO: 171283 - DNA, 55 bp, Artificial
  Synthetic oligonucleotide
gactggtgggcaaagtacggcgacgctgtgcaagacgcagggctgaccatttccg

SEQ ID NO: 171284 - DNA, 60 bp, Artificial
  Synthetic oligonucleotide
atggtagtgggtacttatacgtccacccgtggcacgcatagcgtcgctctcagagcgggc

SEQ ID NO: 171285 - DNA, 55 bp, Artificial
  Synthetic oligonucleotide
gagaataagtccgtctttgtccgtagaccacacagttgcgtcctggtgtaagaac

SEQ ID NO: 171286 - DNA, 55 bp, Artificial
  Synthetic oligonucleotide
gagacgggatcgtcgacctttcgaaaccctgccttgagctctatggccaaaggtt

SEQ ID NO: 171287 - DNA, 55 bp, Artificial
  Synthetic oligonucleotide
aaaacagccgttaatccctactagcgcagtggtcatcgttcccctactgaccaca

SEQ ID NO: 171288 - DNA, 55 bp, Artificial
  Synthetic oligonucleotide
gagatctgataattgtcgatcgcgcgtagagtatgcacttccctcagggaaagtt

SEQ ID NO: 171289 - DNA, 55 bp, Artificial
  Synthetic oligonucleotide
gagatcttccgcccaaccacaaatagcagtggtcacactatgagagtcgagtccc

SEQ ID NO: 171290 - DNA, 55 bp, Artificial
  Synthetic oligonucleotide
gagcaatccctacaggaggtttgggacaccttggcttatgcatggcgtggggtag

SEQ ID NO: 171291 - DNA, 54 bp, Artificial
  Synthetic oligonucleotide
gagccaccaggccggcgggaaaatcgagcacgtaaaccccgaggtctacgcgat

SEQ ID NO: 171292 - DNA, 55 bp, Artificial
  Synthetic oligonucleotide
gagtaccgcccacacagcttctttgttgctgagatcaactagagccggtccgccg

SEQ ID NO: 171293 - DNA, 55 bp, Artificial
  Synthetic oligonucleotide
gagtaagtcactacggctgttgtacagttggccgcatgtcacagtcaagagcgga

SEQ ID NO: 171294 - DNA, 55 bp, Artificial
  Synthetic oligonucleotide
gaaagcactaaatgaactcatccgcgataacatcgccgaaaagactgaacccgga

SEQ ID NO: 171295 - DNA, 58 bp, Artificial
  Synthetic oligonucleotide
atgtcggtgagaacagctcaacgatggacttccgaaccgcgtgaagtgttcattaaac

SEQ ID NO: 171296 - DNA, 55 bp, Artificial
  Synthetic oligonucleotide
gaaaggcatcgacctagagcaggctcagccgagtgctttaccacccgcaatcccg

SEQ ID NO: 171297 - DNA, 55 bp, Artificial
  Synthetic oligonucleotide
aaacacgacgtacatcagcctcactataaagcctgaacccaccagggctacgccc

SEQ ID NO: 171298 - DNA, 55 bp, Artificial
  Synthetic oligonucleotide
gaacacgtttgctccttcgcggtcgataggcggggtaggtaggattgtggcacga

SEQ ID NO: 171299 - DNA, 55 bp, Artificial
  Synthetic oligonucleotide
gaacactaggtaactgttgttgcccgttcgtcaatcgaatgtttcccgcgtgtta

SEQ ID NO: 171300 - DNA, 55 bp, Artificial
  Synthetic oligonucleotide
gaggtgcgggaatataagggtggcgctgcgatcctcattagtggcaagaaccgcg

SEQ ID NO: 171301 - DNA, 55 bp, Artificial
  Synthetic oligonucleotide
gaaccggggtgtggcttaagacaatgcgatggccgaaagtgtgtgggccacgttg

SEQ ID NO: 171302 - DNA, 55 bp, Artificial
  Synthetic oligonucleotide
gaggggtaggcaagtaggtttcctcgctcctcgatgttgtttcgttcatgcgtgg

SEQ ID NO: 171303 - DNA, 55 bp, Artificial
  Synthetic oligonucleotide
gaactaagtcactttgcaaacgcgaacgattggatcgaccccgtattaacccata

SEQ ID NO: 171304 - DNA, 55 bp, Artificial
  Synthetic oligonucleotide
gaactctcccggaatctgagggccatctagccaactgtgcttttcttccatgggg

SEQ ID NO: 171305 - DNA, 53 bp, Artificial
  Synthetic oligonucleotide
aaacaatctcggttacgaagggctcttcccaacagacgagacgaaggtttcgc

SEQ ID NO: 171306 - DNA, 60 bp, Artificial
  Synthetic oligonucleotide
atgtctaggtgtcagacgtctagacgtcttgacattagacacctagacgtctagacatat

SEQ ID NO: 171307 - DNA, 55 bp, Artificial
  Synthetic oligonucleotide
gagggatacttcacgggatacaaggggctacggcgattcaattctccgcgaaagg

SEQ ID NO: 171308 - DNA, 55 bp, Artificial
  Synthetic oligonucleotide
gaggcacggatcaatcacgttggagcctctttaagaagcctgacctacaaggggc

SEQ ID NO: 171309 - DNA, 55 bp, Artificial
  Synthetic oligonucleotide
tttcccacgcctaagccgctcgtctgcccacttatttaacgctatggctatggct

SEQ ID NO: 171310 - DNA, 55 bp, Artificial
  Synthetic oligonucleotide
gaagggacctcagcgtgtctggttgtgccagccgcatagtcattgggtagactca

SEQ ID NO: 171311 - DNA, 55 bp, Artificial
  Synthetic oligonucleotide
gaagtactaaaattggcccgaatcatcagctatggatctctctgatgtcgcgctg

SEQ ID NO: 171312 - DNA, 55 bp, Artificial
  Synthetic oligonucleotide
gaagtcaggctcgaagtcatctgagcgttcaggctctgggctactgcttggctgg

SEQ ID NO: 171313 - DNA, 54 bp, Artificial
  Synthetic oligonucleotide
gaggaaacatttccggtgttgtagcggtgaacttcgaagcctgcgagggtttcc

SEQ ID NO: 171314 - DNA, 55 bp, Artificial
  Synthetic oligonucleotide
tttcccaggaggattcttgtacgaaggcagttacgagtgcgtctggtacgttccg

SEQ ID NO: 171315 - DNA, 55 bp, Artificial
  Synthetic oligonucleotide
tttccctcccgtgtctgggtgctcagcatcgcgcccgtcctatgcctgccgttac

SEQ ID NO: 171316 - DNA, 55 bp, Artificial
  Synthetic oligonucleotide
tttccgcgccagcttataaagatgaggctccctcccatccggttgagcctttgca

SEQ ID NO: 171317 - DNA, 57 bp, Artificial
  Synthetic oligonucleotide
atgttgcttaccaacgtgctggttacgccattgcaggggtgcaaggccgtgtaaaaa

SEQ ID NO: 171318 - DNA, 55 bp, Artificial
  Synthetic oligonucleotide
gcagccattcccatcgcagaacgacacccaacaatacggaaccgctactccaggt

SEQ ID NO: 171319 - DNA, 55 bp, Artificial
  Synthetic oligonucleotide
gcagccatctgctcgtacggcgccaattcctcccagtcctcagcgctttctgggt

SEQ ID NO: 171320 - DNA, 55 bp, Artificial
  Synthetic oligonucleotide
gcagcaggcatgagcagcccgaatatgcgcctgctggctgcaacgaccgaggaaa

SEQ ID NO: 171321 - DNA, 55 bp, Artificial
  Synthetic oligonucleotide
cgcgatcggagttctcaacaccacggcaactctaaatctcagtgtgcctcaagac

SEQ ID NO: 171322 - DNA, 54 bp, Artificial
  Synthetic oligonucleotide
cgcgcaagcccctgacctgcacatttaggttaaagaaaaccggtagcaataacg

SEQ ID NO: 171323 - DNA, 55 bp, Artificial
  Synthetic oligonucleotide
cgcgggatcttggttcctaaaactacgtcaccaaaatgcccacgcacttcatcca

SEQ ID NO: 171324 - DNA, 55 bp, Artificial
  Synthetic oligonucleotide
gcagaggtaataagaacgccgtgaggcgtgttagtaagcgatggcagggtctcac

SEQ ID NO: 171325 - DNA, 55 bp, Artificial
  Synthetic oligonucleotide
ttcaatgcccctgctgttactgggactatgggaagctcttggtcgtcactggggc

SEQ ID NO: 171326 - DNA, 55 bp, Artificial
  Synthetic oligonucleotide
cgcgtcacaattccaaactgtcgacacctactgatttcggttcacttacccaacg

SEQ ID NO: 171327 - DNA, 55 bp, Artificial
  Synthetic oligonucleotide
cgcgtctgctgaggaaacaacaggtctcattcatcattcggatcacggctcgcag

SEQ ID NO: 171328 - DNA, 60 bp, Artificial
  Synthetic oligonucleotide
attcaccgcaatgcaatccgcacgcgggaagaaaggctggcaacgaagcgctgaggtgcg

SEQ ID NO: 171329 - DNA, 55 bp, Artificial
  Synthetic oligonucleotide
gcagaatgtgtgtccgttcggcgtgttgcggggcgggtacacggttagttacttc

SEQ ID NO: 171330 - DNA, 52 bp, Artificial
  Synthetic oligonucleotide
cgcgtggggttcgttccgtagcccttagtacgggttggcgacaccgatgtac

SEQ ID NO: 171331 - DNA, 55 bp, Artificial
  Synthetic oligonucleotide
cgcgtgtcacatcagagcagcgttgtggtacagcagaggtgacggaatacgtgtc

SEQ ID NO: 171332 - DNA, 55 bp, Artificial
  Synthetic oligonucleotide
cgcgttccgtagcggaaactatgggccactctcctcttcattgcaccaaccattc

SEQ ID NO: 171333 - DNA, 55 bp, Artificial
  Synthetic oligonucleotide
cgcgttgagccgttggtcgaaccaccgcgtattctggttgacgtttccaggtatc

SEQ ID NO: 171334 - DNA, 55 bp, Artificial
  Synthetic oligonucleotide
cgctaaccggtgtgactcgacgtttccaatctcagtttgttccggccttctccgc

SEQ ID NO: 171335 - DNA, 55 bp, Artificial
  Synthetic oligonucleotide
cgctcacggcagctcttcccgcgggcagaaaactaacaaggcccacaagtccagt

SEQ ID NO: 171336 - DNA, 55 bp, Artificial
  Synthetic oligonucleotide
cggaaacccaagggatgtttgacgcggagctattggctgaatccaagccggggca

SEQ ID NO: 171337 - DNA, 55 bp, Artificial
  Synthetic oligonucleotide
cggacaaaaccgcttggacagttgccttagctacgtcctcgcgattcaccgtgag

SEQ ID NO: 171338 - DNA, 55 bp, Artificial
  Synthetic oligonucleotide
cggatcagaacagcatcgactgttcaggttgctcggaattggagttggcctgcgg

SEQ ID NO: 171339 - DNA, 55 bp, Artificial
  Synthetic oligonucleotide
ggcggcaaccttctagttgaggtcgacgaatacgacgaggttatgagtgaccccg

SEQ ID NO: 171340 - DNA, 56 bp, Artificial
  Synthetic oligonucleotide
gcttcgtggctcggtttctgacgcgaattccgcacaactagttgggtttatttcgc

SEQ ID NO: 171341 - DNA, 55 bp, Artificial
  Synthetic oligonucleotide
gcagaacgctaagggtcaaaacctcactaccaccgacgctaccgcagcaatccgc

SEQ ID NO: 171342 - DNA, 55 bp, Artificial
  Synthetic oligonucleotide
cggcaatcacgctttggtatataccggcccacaacgccataatgacgccgagtgc

SEQ ID NO: 171343 - DNA, 55 bp, Artificial
  Synthetic oligonucleotide
ttagaggttagcttccctttgccgagctgcgctgtattcagaggcgtatagcctc

SEQ ID NO: 171344 - DNA, 55 bp, Artificial
  Synthetic oligonucleotide
ttagcccacgcctgaatcgctgcatcaacctcattagcacgacgtgaacagatca

SEQ ID NO: 171345 - DNA, 55 bp, Artificial
  Synthetic oligonucleotide
cgatccgtctcacgtatccctatgggctagaacatacgcctaacaaccgtgatag

SEQ ID NO: 171346 - DNA, 55 bp, Artificial
  Synthetic oligonucleotide
cgatctggtggcaacgctagggatttccaacatgtcgaaatcgcacgtctcgcgg

SEQ ID NO: 171347 - DNA, 55 bp, Artificial
  Synthetic oligonucleotide
cgattcgctcgttggatacacattcgcaccccgtttcctgcttaaccgcgcacgg

SEQ ID NO: 171348 - DNA, 55 bp, Artificial
  Synthetic oligonucleotide
cgattgagctttaacacgtggcacatccgtgtgagccgagtattcggttcggtgg

SEQ ID NO: 171349 - DNA, 55 bp, Artificial
  Synthetic oligonucleotide
cgatttaaagagacacgccctagggtgcagcccatgaccctgccgatcagccccg

SEQ ID NO: 171350 - DNA, 55 bp, Artificial
  Synthetic oligonucleotide
cgcaacctattcgggacgccagatactgaagccaaccaccctaactctcacagag

SEQ ID NO: 171351 - DNA, 58 bp, Artificial
  Synthetic oligonucleotide
taaggtcttgcgttccacaacgctaagcgatacatcttggtccgactccctctcgaat

SEQ ID NO: 171352 - DNA, 55 bp, Artificial
  Synthetic oligonucleotide
cgcaacttggaacatgcttcgcgagggactgagcccgaactacttcatggcgtgg

SEQ ID NO: 171353 - DNA, 55 bp, Artificial
  Synthetic oligonucleotide
ttagtccgtacttccgtgcgtaggcacttgcacggtcacatgctagacatgtgcg

SEQ ID NO: 171354 - DNA, 55 bp, Artificial
  Synthetic oligonucleotide
cgcagagcgaactattcgccatcgacgtttgggtgggatggtaagtcaacgcaga

SEQ ID NO: 171355 - DNA, 53 bp, Artificial
  Synthetic oligonucleotide
aaccccgacgcggaccccaaccatccgctgtttgggcatgttattaccctcac

SEQ ID NO: 171356 - DNA, 55 bp, Artificial
  Synthetic oligonucleotide
aacccatcgacgcagagcaggtcacccagtggctaagtggacacccacgacggct

SEQ ID NO: 171357 - DNA, 55 bp, Artificial
  Synthetic oligonucleotide
cgcatccaatccttccggtgagagacccggtgtgtcgcgaatgaggcacccgttg

SEQ ID NO: 171358 - DNA, 55 bp, Artificial
  Synthetic oligonucleotide
cgccagtcaatgggttgtagtagttgtcaccaccttgaaaagtctgtcgctgagt

SEQ ID NO: 171359 - DNA, 55 bp, Artificial
  Synthetic oligonucleotide
ttcaaggaaagatcgcatggacggggtggagtagctagcccggtgccctgcggca

SEQ ID NO: 171360 - DNA, 55 bp, Artificial
  Synthetic oligonucleotide
gcagccgttatgcctgagctaattattcgccgcgtgctaagcaataatgctgtgc

SEQ ID NO: 171361 - DNA, 55 bp, Artificial
  Synthetic oligonucleotide
cgccccgtggtacaccgtggaatcagaagataagaaacgctcccgcattaacgtc

SEQ ID NO: 171362 - DNA, 59 bp, Artificial
  Synthetic oligonucleotide
taagcaatgccgatgtcagtacagcatcaaccgtccctacccctccgggtgttacctga

SEQ ID NO: 171363 - DNA, 55 bp, Artificial
  Synthetic oligonucleotide
cgcccgaattggggatccgaatgttccgaactatctcaagcctggcaactctccg

SEQ ID NO: 171364 - DNA, 55 bp, Artificial
  Synthetic oligonucleotide
cgccgaagccaacagtgcggcgaataaggtaccactcgagatacgctctggttcc

SEQ ID NO: 171365 - DNA, 54 bp, Artificial
  Synthetic oligonucleotide
cgccgctacgtcaatcgaaaacggcaccgagttgaaccccgacttcccacgcga

SEQ ID NO: 171366 - DNA, 55 bp, Artificial
  Synthetic oligonucleotide
cgccttggaccgtgacctcattgtcgtgatgtacacgcttacggcttcacacgtc

SEQ ID NO: 171367 - DNA, 55 bp, Artificial
  Synthetic oligonucleotide
cgtcctgattgggagtctatcgaggacgagaatgtagaccttcgacttatccaag

SEQ ID NO: 171368 - DNA, 55 bp, Artificial
  Synthetic oligonucleotide
cgtcggtccggcttgacgccagatctcaagtgtcagtttcattacttgtagttcc

SEQ ID NO: 171369 - DNA, 55 bp, Artificial
  Synthetic oligonucleotide
cgtcgtgcggttcagaatcaggcgcgaaaagcggcacgagtccaatcagggtgcc

SEQ ID NO: 171370 - DNA, 55 bp, Artificial
  Synthetic oligonucleotide
cgtgaccaggttgcgtgatcgttgcttggacccatatttggatcgaggcgcacga

SEQ ID NO: 171371 - DNA, 55 bp, Artificial
  Synthetic oligonucleotide
cgtgaccattcccagactccatcccgagctttgtacctgcacagggaaacgtgga

SEQ ID NO: 171372 - DNA, 55 bp, Artificial
  Synthetic oligonucleotide
cgtgagtgtccaccccatatgcaatgatgtgtgcatagcattcgaacacaactgc

SEQ ID NO: 171373 - DNA, 59 bp, Artificial
  Synthetic oligonucleotide
taagaggccgaaccagccgatagaccaacacaacacggcaaagaaagcacgcacgcatt

SEQ ID NO: 171374 - DNA, 55 bp, Artificial
  Synthetic oligonucleotide
gcaccgcacgagctactcgaaccaaacggtggggataccacgaaatggcatcaca

SEQ ID NO: 171375 - DNA, 55 bp, Artificial
  Synthetic oligonucleotide
cgtgatatttgtggccggttggataaggtctatcgcgcgagatgtttcacggctg

SEQ ID NO: 171376 - DNA, 55 bp, Artificial
  Synthetic oligonucleotide
cgtgccggggtttgccgcgtcagtgtcaaccgccgcacctgtcgcgggatcttct

SEQ ID NO: 171377 - DNA, 55 bp, Artificial
  Synthetic oligonucleotide
cgtggacttagacaactggtattggatcaagaacgacttctgtacctcggaagcg

SEQ ID NO: 171378 - DNA, 55 bp, Artificial
  Synthetic oligonucleotide
cgtgtactcatggtctggcctaccattggataatggcgaggtaccacgtgtggtg

SEQ ID NO: 171379 - DNA, 55 bp, Artificial
  Synthetic oligonucleotide
gcacaatcttagggcgctctcgcggctgcttgtattgcgctgcgatgggaagatg

SEQ ID NO: 171380 - DNA, 54 bp, Artificial
  Synthetic oligonucleotide
cgttagcgacgtttcctgcgtataaccagtcgaccttccggtctatgtacgacg

SEQ ID NO: 171381 - DNA, 55 bp, Artificial
  Synthetic oligonucleotide
gcaatggcctactccggtgatctgaccaacccaagtgagaagctctacacactgg

SEQ ID NO: 171382 - DNA, 54 bp, Artificial
  Synthetic oligonucleotide
cgttcgggatggtaccacacacaaaaccgcctagaggcgtggctaggttcggtg

SEQ ID NO: 171383 - DNA, 55 bp, Artificial
  Synthetic oligonucleotide
cgttcgttataatggtgtcatgaccttcacgacgaagtactaaaattggcccgaa

SEQ ID NO: 171384 - DNA, 51 bp, Artificial
  Synthetic oligonucleotide
taacggacggtaaagtctgtaaaaaactgacctattttgtcacaacgtaac

SEQ ID NO: 171385 - DNA, 55 bp, Artificial
  Synthetic oligonucleotide
cgttgagcgtgggctctctccccgagtgggcaacgtttgatcagacaactggcca

SEQ ID NO: 171386 - DNA, 55 bp, Artificial
  Synthetic oligonucleotide
cgttgtatgtggtctctgggctaaagacctggataagcgggatgaggacgtcggc

SEQ ID NO: 171387 - DNA, 55 bp, Artificial
  Synthetic oligonucleotide
cgtttacaattgcgtttcaggcatgatgggccaactaagagcccatatcacgcac

SEQ ID NO: 171388 - DNA, 55 bp, Artificial
  Synthetic oligonucleotide
cgtttgaaaggtaggctcatggcgtctacaaagcagacatctgagttcattttgg

SEQ ID NO: 171389 - DNA, 55 bp, Artificial
  Synthetic oligonucleotide
cgtttgtcgtgacagatagtacgttgcttttggatgctccaattattgcggtgcg

SEQ ID NO: 171390 - DNA, 55 bp, Artificial
  Synthetic oligonucleotide
cggcagcaatgaacaatagaaaccggcgagtataagtgttgtccacgtcggctcc

SEQ ID NO: 171391 - DNA, 55 bp, Artificial
  Synthetic oligonucleotide
cggcgccacgaataatcggaacgggacgaatctccacgggaatgtctagatcggc

SEQ ID NO: 171392 - DNA, 55 bp, Artificial
  Synthetic oligonucleotide
cggctcgtgtcccgtctcgcgtggatactccccagcgcaacatcatggacatcac

SEQ ID NO: 171393 - DNA, 55 bp, Artificial
  Synthetic oligonucleotide
gcactatgactcaatcttggcgcagtgctacagcagttcgtatcctgcttgtcgg

SEQ ID NO: 171394 - DNA, 55 bp, Artificial
  Synthetic oligonucleotide
cgggtgagcaatccgcactgaagtatcactatagtgccaccggggccatgaatgc

SEQ ID NO: 171395 - DNA, 57 bp, Artificial
  Synthetic oligonucleotide
taaagtctgaactcgctagtcacccgttatatgcctaaacgactcgtaagcttttca

SEQ ID NO: 171396 - DNA, 55 bp, Artificial
  Synthetic oligonucleotide
gcacgtattttatcccagatgtggattctccacgcaccactatccccgtggggaa

SEQ ID NO: 171397 - DNA, 55 bp, Artificial
  Synthetic oligonucleotide
cggtatgcaactgttctacgcaggggtggggcgcaagccgcgctactgtagccaa

SEQ ID NO: 171398 - DNA, 55 bp, Artificial
  Synthetic oligonucleotide
aacactctcaccgcgcagaaccctagcggcttttccctaggaataaggcacccaa

SEQ ID NO: 171399 - DNA, 55 bp, Artificial
  Synthetic oligonucleotide
cggtccaaggtgtctctcgaggaagaccccgggtacgcaggcaccgcgattatga

SEQ ID NO: 171400 - DNA, 55 bp, Artificial
  Synthetic oligonucleotide
cggtcgcaccctactcacgtcgtaacgcacgacctccggtaaatctgcgcacgct

SEQ ID NO: 171401 - DNA, 55 bp, Artificial
  Synthetic oligonucleotide
cggtcgtgtagttggcaccaactgtcggcggtggtgtacccttgctacgttggaa

SEQ ID NO: 171402 - DNA, 55 bp, Artificial
  Synthetic oligonucleotide
cggtgcgcgcgttcactgacggatctgtacgccattgttgacgagctagtcagca

SEQ ID NO: 171403 - DNA, 55 bp, Artificial
  Synthetic oligonucleotide
cggtggatgatctggactttatctatggggcgaccgcattcgtcgagcagtgttc

SEQ ID NO: 171404 - DNA, 55 bp, Artificial
  Synthetic oligonucleotide
cggttctgtttcattactcataaacccaccctagcgaacagcgagttaaacacga

SEQ ID NO: 171405 - DNA, 55 bp, Artificial
  Synthetic oligonucleotide
cggttgagattgtcactgagaacggaggtcactagggtcgaacgcatgactccga

SEQ ID NO: 171406 - DNA, 60 bp, Artificial
  Synthetic oligonucleotide
acgaaaaactcatctcacaccagccctagaaggcttgatatgtcttgccatatggcggga

SEQ ID NO: 171407 - DNA, 55 bp, Artificial
  Synthetic oligonucleotide
cgtaatacgagagcatcattaagaggtgcggtgaggaccgagtttcccgtcggtg

SEQ ID NO: 171408 - DNA, 55 bp, Artificial
  Synthetic oligonucleotide
gcacgcggttgaactccgcgacagtttcagctgccttttcggtaggggcctggtt

SEQ ID NO: 171409 - DNA, 55 bp, Artificial
  Synthetic oligonucleotide
cgtcaatcatcgaatgcatagtctgaagatcgcgattaatcacccgggcatatgg

SEQ ID NO: 171410 - DNA, 55 bp, Artificial
  Synthetic oligonucleotide
cgtcacccggagtagattatgcgtctattagtgggcgtcttcgtgagctgacctc

SEQ ID NO: 171411 - DNA, 55 bp, Artificial
  Synthetic oligonucleotide
cgtcatgtaacacgacctttgccgatatttcgtaccgcctggctcccggtgagct

SEQ ID NO: 171412 - DNA, 55 bp, Artificial
  Synthetic oligonucleotide
cgtcatttgtgagctcggaaaggtcggtcactattcggtgacctgcaacacgttc

SEQ ID NO: 171413 - DNA, 55 bp, Artificial
  Synthetic oligonucleotide
cgtccaccctaggtcttttccatgacgttgtgtgcggggtggcctgtactggtcg

SEQ ID NO: 171414 - DNA, 55 bp, Artificial
  Synthetic oligonucleotide
tcgctcacggagagaaataatcggttctgtgtcctgaggcacacccgttgtgggg

SEQ ID NO: 171415 - DNA, 55 bp, Artificial
  Synthetic oligonucleotide
ggtgccgctcaaaatatcgttataggaggattcaataccgttcgaaccatacacg

SEQ ID NO: 171416 - DNA, 52 bp, Artificial
  Synthetic oligonucleotide
ggtgacttgcgtagctttccgaagcgttaagttcgatttcacggtttcggtt

SEQ ID NO: 171417 - DNA, 58 bp, Artificial
  Synthetic oligonucleotide
taaagctctcgcaacgttggggaggcgcggtggcaagaaagcctcagagcgttggaaa

SEQ ID NO: 171418 - DNA, 55 bp, Artificial
  Synthetic oligonucleotide
ggtgacagtgatatgtgattcgctcgtggtacgagtcaccgttccaactctaggg

SEQ ID NO: 171419 - DNA, 55 bp, Artificial
  Synthetic oligonucleotide
ggtctgcagtcgacacaactctttggccgtaccagtcggtcgtggggcgtgcatc

SEQ ID NO: 171420 - DNA, 55 bp, Artificial
  Synthetic oligonucleotide
ggtcataagcgctataagaacccctatgacgataagtgttaacgccaaccagccc

SEQ ID NO: 171421 - DNA, 55 bp, Artificial
  Synthetic oligonucleotide
ggtatagctcatactccgtactcttattggtcaacaatccccgatgtatgagccc

SEQ ID NO: 171422 - DNA, 55 bp, Artificial
  Synthetic oligonucleotide
ggtactgactgttgacgcggattgagtgatagtctctcatgtcccctttgaggcg

SEQ ID NO: 171423 - DNA, 55 bp, Artificial
  Synthetic oligonucleotide
gggtttgtggggattagttcacgctcaaccgcacacatcaatgcgaacctgaggc

SEQ ID NO: 171424 - DNA, 54 bp, Artificial
  Synthetic oligonucleotide
gggtggttaggacctgcggtaaactgaccggccgagtcgagactaagctcaccc

SEQ ID NO: 171425 - DNA, 55 bp, Artificial
  Synthetic oligonucleotide
gggtgagtttgctagctaccagaatcttttgagtgttaagtttgtgagccccaag

SEQ ID NO: 171426 - DNA, 55 bp, Artificial
  Synthetic oligonucleotide
aggaccccacccctccgggcgcgtggtatctgtacgcatgccagaggacatcatc

SEQ ID NO: 171427 - DNA, 55 bp, Artificial
  Synthetic oligonucleotide
ggggtttgatagccacaccaactgtggcgcctggatgtgttgtagcgggcgcacc

SEQ ID NO: 171428 - DNA, 53 bp, Artificial
  Synthetic oligonucleotide
acgcaccctgacggaactagccggacttctcccgaccacttccccactatttc

SEQ ID NO: 171429 - DNA, 55 bp, Artificial
  Synthetic oligonucleotide
ggggtgttttaggcctgcagaaataccattatcgccttatagtgttgccatgcgt

SEQ ID NO: 171430 - DNA, 55 bp, Artificial
  Synthetic oligonucleotide
ggggtcattcacagtggacaggctatacggtctaccctggagtagtgcgattagg

SEQ ID NO: 171431 - DNA, 55 bp, Artificial
  Synthetic oligonucleotide
tcgtgtgcgtggtaatcacggaggctccagtacgcgaatactccgggaacgtagc

SEQ ID NO: 171432 - DNA, 55 bp, Artificial
  Synthetic oligonucleotide
ggggcatccatgctcgcaacaatcctcgatccgatgtcggggtttgccactagta

SEQ ID NO: 171433 - DNA, 55 bp, Artificial
  Synthetic oligonucleotide
ggggaccgctcatggggcttatgcgagtgctcgacacggttcaatcgggctatgc

SEQ ID NO: 171434 - DNA, 51 bp, Artificial
  Synthetic oligonucleotide
agggaaggacttacgtcaatggttcaaggaccccacccctccgggcgcgtg

SEQ ID NO: 171435 - DNA, 55 bp, Artificial
  Synthetic oligonucleotide
gggcttcaacggtagctgtctatcccatggaagaccggaactccttccaccggtc

SEQ ID NO: 171436 - DNA, 55 bp, Artificial
  Synthetic oligonucleotide
gggcgccccatccgagaagtctggagcatggcagattctattcggggattcgtcg

SEQ ID NO: 171437 - DNA, 55 bp, Artificial
  Synthetic oligonucleotide
agggtctgtaaagaatcctccttggtggagaccacgccattccgtcgcaagatgg

SEQ ID NO: 171438 - DNA, 55 bp, Artificial
  Synthetic oligonucleotide
gggcgattcacacctaaccacggtagacctactacgctattagtgtgcgattagg

SEQ ID NO: 171439 - DNA, 59 bp, Artificial
  Synthetic oligonucleotide
acgcacgtgaggaactagaacagcaacgcaacctaaagcccgtcgtggtgactgtgaga

SEQ ID NO: 171440 - DNA, 55 bp, Artificial
  Synthetic oligonucleotide
tcgccggcacaggtgagaccgagaccgtactctggtcctacgacggtgcagagat

SEQ ID NO: 171441 - DNA, 55 bp, Artificial
  Synthetic oligonucleotide
gtccaggaaggactgaacgtcttcgggtgagaagatgtagttaggggtctgtcgg

SEQ ID NO: 171442 - DNA, 55 bp, Artificial
  Synthetic oligonucleotide
gtccacctcaaggggtgcgtaaatgccccgaaaagtgcggtcaatgagattggcc

SEQ ID NO: 171443 - DNA, 55 bp, Artificial
  Synthetic oligonucleotide
gtcataaccggatctacggtgctaattctggtaaatgccagttcagggcatgggc

SEQ ID NO: 171444 - DNA, 55 bp, Artificial
  Synthetic oligonucleotide
tcgcgattcccgcactcgcagtcgccccaccgcagaagggtcaaaagtccccacg

SEQ ID NO: 171445 - DNA, 55 bp, Artificial
  Synthetic oligonucleotide
gtcaggtggcctgttagcagccatatgaaggggtggcagggttcgttgccccgct

SEQ ID NO: 171446 - DNA, 55 bp, Artificial
  Synthetic oligonucleotide
gtcagagataccgcgtatagcggtgtggcggccccaggacccaaccattaaccgg

SEQ ID NO: 171447 - DNA, 55 bp, Artificial
  Synthetic oligonucleotide
gtcacagagttgaacacccgccgactctcgcgaatcaagtgcaaatagcccctcg

SEQ ID NO: 171448 - DNA, 55 bp, Artificial
  Synthetic oligonucleotide
gtatttccttcactacagcgcggacttatgcagccgtgcgggctaggcagtccgc

SEQ ID NO: 171449 - DNA, 54 bp, Artificial
  Synthetic oligonucleotide
gtagtgcgaggggattgcgttgaaaaagtttcacggggttctccttgtgttgcg

SEQ ID NO: 171450 - DNA, 60 bp, Artificial
  Synthetic oligonucleotide
ggcggacaatcaaacggcgctatcacccgatagattggcctccgtggttgctgctaagaa

SEQ ID NO: 171451 - DNA, 55 bp, Artificial
  Synthetic oligonucleotide
gttgtgtgagaacttgcttctggaattggggctatccaattcaaccctttcgggt

SEQ ID NO: 171452 - DNA, 55 bp, Artificial
  Synthetic oligonucleotide
tcgctacgccacgcgcacgtatcgacaacgatgcatccacctggctacttgcccg

SEQ ID NO: 171453 - DNA, 55 bp, Artificial
  Synthetic oligonucleotide
gtacattggccttaagcctatccagccaactaaggagttatttattagcagaccg

SEQ ID NO: 171454 - DNA, 55 bp, Artificial
  Synthetic oligonucleotide
gtaacggcatactcgcttactttcgggtaacactgaagatctgtaaacgggagag

SEQ ID NO: 171455 - DNA, 52 bp, Artificial
  Synthetic oligonucleotide
agcccggcacgctttaagagctgtttcacgaaacctaccggcttcgggtatt

SEQ ID NO: 171456 - DNA, 55 bp, Artificial
  Synthetic oligonucleotide
agcccggtaccaatgggcaatgccatagcgacttttatcgcctgcagtgcgagca

SEQ ID NO: 171457 - DNA, 55 bp, Artificial
  Synthetic oligonucleotide
gtaaaagatctattctaggcaagggtgttgcgcgcaacgcaacgcccctttgggg

SEQ ID NO: 171458 - DNA, 53 bp, Artificial
  Synthetic oligonucleotide
ggtttgatttaacgttttgtgcgccgaagagtgtgtcgttggtgtggggtttc

SEQ ID NO: 171459 - DNA, 55 bp, Artificial
  Synthetic oligonucleotide
ggttgctccggagcgtttccaggtttatgccccggcgatggatgagtcagatttt

SEQ ID NO: 171460 - DNA, 54 bp, Artificial
  Synthetic oligonucleotide
ggttgccactaaaacaccccacaacaaccacagtcctataaccctccacgtagc

SEQ ID NO: 171461 - DNA, 55 bp, Artificial
  Synthetic oligonucleotide
agccttatccacgcaatctagaacgtactgcctaaccgcgaaatcagactgaatc

SEQ ID NO: 171462 - DNA, 57 bp, Artificial
  Synthetic oligonucleotide
gttagggactgcttggagttatgcctaagcgtcaacgtcatcaagctaataccccgt

SEQ ID NO: 171463 - DNA, 55 bp, Artificial
  Synthetic oligonucleotide
ggttaagccatccgctatctaagcaaccaccgggcagtaagcgaggaaaccgcac

SEQ ID NO: 171464 - DNA, 55 bp, Artificial
  Synthetic oligonucleotide
ggtgtgagcgggaatgttatggggtgagctagatgcccagtaccggtattccaat

SEQ ID NO: 171465 - DNA, 50 bp, Artificial
  Synthetic oligonucleotide
ggtgtcaaaagtacccactttgcggaactttcgttcccctttcggatact

SEQ ID NO: 171466 - DNA, 55 bp, Artificial
  Synthetic oligonucleotide
ggcgagtcagcattgtcgcgcctcgataccacgcatcgaaacgattgaggtcgtc

SEQ ID NO: 171467 - DNA, 55 bp, Artificial
  Synthetic oligonucleotide
ggcgagctcattgcatatcttcgacgtcgcactagtgccgatatcgtttctaggt

SEQ ID NO: 171468 - DNA, 55 bp, Artificial
  Synthetic oligonucleotide
ggccttcattgaagtaatccacgtaggttagctcctacgcaatggtcgatctccc

SEQ ID NO: 171469 - DNA, 55 bp, Artificial
  Synthetic oligonucleotide
tctgtctggcatccggcctcttgtcgttgctgtggacgcagcgaacggcatgggt

SEQ ID NO: 171470 - DNA, 55 bp, Artificial
  Synthetic oligonucleotide
ggcctgacagggcattgcctagccggtcagacagagattcaaacacgaaacgcac

SEQ ID NO: 171471 - DNA, 55 bp, Artificial
  Synthetic oligonucleotide
ggccgtacctcgtggcaggagtgcccctacctggatacccggtgggtcgcggaca

SEQ ID NO: 171472 - DNA, 55 bp, Artificial
  Synthetic oligonucleotide
agtttgaccccgtgctcacgcagtggcgcgtccataccggccttaaccacaccag

SEQ ID NO: 171473 - DNA, 54 bp, Artificial
  Synthetic oligonucleotide
acgccgcagagttttttagcgaccaagactcgcaacaaaactaacgtcccgctc

SEQ ID NO: 171474 - DNA, 55 bp, Artificial
  Synthetic oligonucleotide
ggccgccggtaaaactatggtctctcgtcgatcggtgctgaaaactctcagtgcg

SEQ ID NO: 171475 - DNA, 55 bp, Artificial
  Synthetic oligonucleotide
ataaatctaggatcgtgtaactggcacgtaaagaaagcgtcattagcgctttgtc

SEQ ID NO: 171476 - DNA, 55 bp, Artificial
  Synthetic oligonucleotide
ggccgatgtgtgattaagcagatatcgagcaatgtcatccggctgcgtagtatcc

SEQ ID NO: 171477 - DNA, 52 bp, Artificial
  Synthetic oligonucleotide
ggcccgaattagtatgcggtcataaataacaggcccctagtccaaccccggt

SEQ ID NO: 171478 - DNA, 55 bp, Artificial
  Synthetic oligonucleotide
ggccatgcttagggtcgcggtctgcttcgagccgaggtattcctccgagagttcc

SEQ ID NO: 171479 - DNA, 55 bp, Artificial
  Synthetic oligonucleotide
aatcaagccgcaacgtgtgccagccaagcggcaggtcccgtggggtggagaaagt

SEQ ID NO: 171480 - DNA, 55 bp, Artificial
  Synthetic oligonucleotide
ggccaaagaggccggggaaatcactattcacctggaaatggcacaccccgaaggc

SEQ ID NO: 171481 - DNA, 53 bp, Artificial
  Synthetic oligonucleotide
atactccacgttcccgctaggtccgggaagcggagaggcaacgacggccttcg

SEQ ID NO: 171482 - DNA, 55 bp, Artificial
  Synthetic oligonucleotide
atagactgcgcagtcgtccgacactacggcagatggaggatcaaactagacggca

SEQ ID NO: 171483 - DNA, 55 bp, Artificial
  Synthetic oligonucleotide
ggcatcataatgcgagcacttgagggagtgagtatccacgacgcggttggtccct

SEQ ID NO: 171484 - DNA, 58 bp, Artificial
  Synthetic oligonucleotide
acgcctagattattgatatcgcgggggctatcaccgataactccacgccaacgatagg

SEQ ID NO: 171485 - DNA, 55 bp, Artificial
  Synthetic oligonucleotide
tcttgggctgaaaggaccggcggagcgttatctgtggcaggggtcaagattattc

SEQ ID NO: 171486 - DNA, 53 bp, Artificial
  Synthetic oligonucleotide
atatcccaggccccgtaggtatgtaacaaagccggcgaggttaaacgtccata

SEQ ID NO: 171487 - DNA, 55 bp, Artificial
  Synthetic oligonucleotide
ggcaggtctgctaacgagtggtgctccgagcggaggaaaggtgtagtactcattg

SEQ ID NO: 171488 - DNA, 55 bp, Artificial
  Synthetic oligonucleotide
atcaagtgatgtctcttcattccttagaacacgtcggaccagagattgccatgcg

SEQ ID NO: 171489 - DNA, 55 bp, Artificial
  Synthetic oligonucleotide
ggcagggagtactttacgatcggtaaccatgagatgcttggcacggacggatcgg

SEQ ID NO: 171490 - DNA, 55 bp, Artificial
  Synthetic oligonucleotide
ggcagcggtacaaacttattggagatagcacgaagaaggaacgtcagcatctggg

SEQ ID NO: 171491 - DNA, 55 bp, Artificial
  Synthetic oligonucleotide
gggcataagatgtatcgccgcgcgttctaacagggcgtgcttatattcctccgaa

SEQ ID NO: 171492 - DNA, 55 bp, Artificial
  Synthetic oligonucleotide
gggatttggaaactacggccgcaaaggataaagtttcatatcgcaacacagcacg

SEQ ID NO: 171493 - DNA, 55 bp, Artificial
  Synthetic oligonucleotide
aggtatccatcaaacgtaatcgcttctgacctagtattccatgctcaagatccag

SEQ ID NO: 171494 - DNA, 51 bp, Artificial
  Synthetic oligonucleotide
tctaccggggtgtggtccgtatcaccgaggggacgggtatggacggttccc

SEQ ID NO: 171495 - DNA, 58 bp, Artificial
  Synthetic oligonucleotide
acgctataacacgcagacataacaacgttatagtgctttgacgctaaactgtatcggg

SEQ ID NO: 171496 - DNA, 55 bp, Artificial
  Synthetic oligonucleotide
gggattaaccccgctagtgagcatcactcaccccgtgccacaccaccgggaaacc

SEQ ID NO: 171497 - DNA, 55 bp, Artificial
  Synthetic oligonucleotide
aggtcagacccaacacgagcaagccggagactgtgaatccaccaacgccttggat

SEQ ID NO: 171498 - DNA, 54 bp, Artificial
  Synthetic oligonucleotide
gggagcgtcgaattaggaacggatcttcatagggcgaaaccgtacttcaaacca

SEQ ID NO: 171499 - DNA, 55 bp, Artificial
  Synthetic oligonucleotide
gggagcggcgttggtaactgcgttttaacagctgcactgacagcggcaattgttt

SEQ ID NO: 171500 - DNA, 55 bp, Artificial
  Synthetic oligonucleotide
agtaatacctacgcgcggctgggctagggcttaacgcgcttttgccgtgctgcgg

SEQ ID NO: 171501 - DNA, 55 bp, Artificial
  Synthetic oligonucleotide
agtaccctatttagcatcgtagcttggacctggcccattagcactgaagcgcccc

SEQ ID NO: 171502 - DNA, 55 bp, Artificial
  Synthetic oligonucleotide
gggacgtgtcaccgcgagaaggatcgctaactacttcgatgacaccatgcttcag

SEQ ID NO: 171503 - DNA, 55 bp, Artificial
  Synthetic oligonucleotide
gggacctaagcgtgtaagatggaaacgtctgtatcggataagtagcgaggagtgt

SEQ ID NO: 171504 - DNA, 55 bp, Artificial
  Synthetic oligonucleotide
gggacaactgcggtttgcgtgcatgtggggcgtttgcgcacctcagagggtgaaa

SEQ ID NO: 171505 - DNA, 55 bp, Artificial
  Synthetic oligonucleotide
agtcaatggctggttccgttaagggatagtaaagctcgttgtctgtacaacaagt

SEQ ID NO: 171506 - DNA, 54 bp, Artificial
  Synthetic oligonucleotide
gtgtactgttttcccaggtcaccgagtatctgaaaaggtgtccggttatctccc

SEQ ID NO: 171507 - DNA, 55 bp, Artificial
  Synthetic oligonucleotide
tctcgcgaagcgataagtctcccctgtccggccagcctccgagtagctcccaatc

SEQ ID NO: 171508 - DNA, 55 bp, Artificial
  Synthetic oligonucleotide
tctctacaaaagttcgtatttctgcagatataagccaacctggacgaatagccgt

SEQ ID NO: 171509 - DNA, 55 bp, Artificial
  Synthetic oligonucleotide
ggcttcattaagcactcctagctgctgatctcgtgcatcgtcacgctcacgaaga

SEQ ID NO: 171510 - DNA, 55 bp, Artificial
  Synthetic oligonucleotide
ggctgttgagcacattgaatccgccctcaatcatgccgtcgactctagggaacgt

SEQ ID NO: 171511 - DNA, 55 bp, Artificial
  Synthetic oligonucleotide
ggcgtgttcgtgggtatgtcaccacgtctaaaggcgaagggtacggcagttcagc

SEQ ID NO: 171512 - DNA, 55 bp, Artificial
  Synthetic oligonucleotide
aatcccgcccgccgtctatacagccgccgtccaacgcgatagccaactaaccgag

SEQ ID NO: 171513 - DNA, 55 bp, Artificial
  Synthetic oligonucleotide
aatcatccgcgtgcatatcctcacgctgacggacctggttcgggtaaccgctacg

SEQ ID NO: 171514 - DNA, 55 bp, Artificial
  Synthetic oligonucleotide
agtgtgtcgcaactacgccgcctagcaggacaaggccggatacagcgctacaccc

SEQ ID NO: 171515 - DNA, 55 bp, Artificial
  Synthetic oligonucleotide
accgtcacccgcgacgatattccgtttgccatctggtcagggcttcgccccgaca

SEQ ID NO: 171516 - DNA, 55 bp, Artificial
  Synthetic oligonucleotide
tcaaaatgtcgcctgccggaatcttgcaagccataacggtgattgtcgctgcagt

SEQ ID NO: 171517 - DNA, 58 bp, Artificial
  Synthetic oligonucleotide
gtggaggtcgcttgttggcagcggtacaaacttattggagatagcacgaagaaggaac

SEQ ID NO: 171518 - DNA, 55 bp, Artificial
  Synthetic oligonucleotide
tcaatgttaaagatttgcatcgacatgggagggttacgtgtccgatacctagggg

SEQ ID NO: 171519 - DNA, 55 bp, Artificial
  Synthetic oligonucleotide
tcacatcgagggagaacacagtgcagcaacgacgaaggctgataagccgcacgcc

SEQ ID NO: 171520 - DNA, 55 bp, Artificial
  Synthetic oligonucleotide
taaatcggtgactgtccaccccggaaggcaaccattcgaaggtaggctcaccaaa

SEQ ID NO: 171521 - DNA, 55 bp, Artificial
  Synthetic oligonucleotide
acagcgcgacaagcaccgtcccgagcttcaagaggccctggaggccgtagaacaa

SEQ ID NO: 171522 - DNA, 51 bp, Artificial
  Synthetic oligonucleotide
acgacccggaacttatcgacggggtacgagttttatggattagccaggggc

SEQ ID NO: 171523 - DNA, 55 bp, Artificial
  Synthetic oligonucleotide
tcacgggacttttcccagttcaggctgcgcatatttacgcatacaacgaaagcgg

SEQ ID NO: 171524 - DNA, 55 bp, Artificial
  Synthetic oligonucleotide
taaacggtttccacctcattatgacttgcaagatcggaatagcttagtgacggcg

SEQ ID NO: 171525 - DNA, 55 bp, Artificial
  Synthetic oligonucleotide
taaaacgtaaccgcgacagactcgtagctttagatcccttggtcagacaagatgc

SEQ ID NO: 171526 - DNA, 55 bp, Artificial
  Synthetic oligonucleotide
gttttgttactccaaccatggggagaactattggctcctgtcgtccgcccgcaag

SEQ ID NO: 171527 - DNA, 55 bp, Artificial
  Synthetic oligonucleotide
gtttgataatcatctccgggtctcttccaatcggttcttctcgggtcagccgcgc

SEQ ID NO: 171528 - DNA, 57 bp, Artificial
  Synthetic oligonucleotide
acggcttttcgccacgctttgactgtgggataccagttaaaagcggctggtgagcgc

SEQ ID NO: 171529 - DNA, 55 bp, Artificial
  Synthetic oligonucleotide
acgatagaacgggtgtggtcgacgcagtcagagactccgatagtctgagattcgg

SEQ ID NO: 171530 - DNA, 55 bp, Artificial
  Synthetic oligonucleotide
gtttcccgcgataacctcgcactgttccctaggagcaagaatgtttatcagtagt

SEQ ID NO: 171531 - DNA, 55 bp, Artificial
  Synthetic oligonucleotide
gttgttatcgcgagccatatcgaagaccaggcgggaagtggcgtaaatctgcgcg

SEQ ID NO: 171532 - DNA, 55 bp, Artificial
  Synthetic oligonucleotide
gttgtgtgggtggctggtgtggcctgattaggtgcagatgttgcatgttcggcct

SEQ ID NO: 171533 - DNA, 55 bp, Artificial
  Synthetic oligonucleotide
tcatcacaagagaggaacgtccaagcttccaccccatcgtgacccctgactaccc

SEQ ID NO: 171534 - DNA, 55 bp, Artificial
  Synthetic oligonucleotide
gttgattcgaaaggtacccatgatggtcgccctatttgtcatcggggcccatcac

SEQ ID NO: 171535 - DNA, 55 bp, Artificial
  Synthetic oligonucleotide
gttcgccctttccggggtagtcgagagctaatgaacggcttagatcggtggtgtc

SEQ ID NO: 171536 - DNA, 55 bp, Artificial
  Synthetic oligonucleotide
gttagccatgaccttaaccctaccttacgtccatataggcatatgcgcatatagc

SEQ ID NO: 171537 - DNA, 55 bp, Artificial
  Synthetic oligonucleotide
gttacttggaagtgactgctgctcacgtagttcttgtttgcggcgagattgcttt

SEQ ID NO: 171538 - DNA, 55 bp, Artificial
  Synthetic oligonucleotide
tagtcgttaatacccaaggggcatagggctaccactgggaatactggtagcgccc

SEQ ID NO: 171539 - DNA, 57 bp, Artificial
  Synthetic oligonucleotide
accaccggcgatttccgcgtctacgtcctgggcgagtgctttgaatgcttgggcttc

SEQ ID NO: 171540 - DNA, 55 bp, Artificial
  Synthetic oligonucleotide
tagtgcagaagctcccgtacctgttgcagaacaatgccccgccgccaaggtcgcg

SEQ ID NO: 171541 - DNA, 55 bp, Artificial
  Synthetic oligonucleotide
tagtgcatacgctacagcccgctaccaccgtaaaagcgagaacatatcatgactg

SEQ ID NO: 171542 - DNA, 55 bp, Artificial
  Synthetic oligonucleotide
tagtagactggccaaccgtctgtgtcccgcagcccgggacacccaccggaacgca

SEQ ID NO: 171543 - DNA, 55 bp, Artificial
  Synthetic oligonucleotide
taggtcgcaacttgcgggaacttcggctctagtagatcgactacctcacgggctt

SEQ ID NO: 171544 - DNA, 55 bp, Artificial
  Synthetic oligonucleotide
taggcagataacgttccccaccggctcgcctcgtaagcgcacaaggactgctccc

SEQ ID NO: 171545 - DNA, 55 bp, Artificial
  Synthetic oligonucleotide
accccgccggctcagctgaaaacaggtcccgataaacggcgtctgacgtgcaccg

SEQ ID NO: 171546 - DNA, 55 bp, Artificial
  Synthetic oligonucleotide
tagcggcctcaaaatacacttccgtggtatcagcagaaatctccgacgacacgcc

SEQ ID NO: 171547 - DNA, 54 bp, Artificial
  Synthetic oligonucleotide
tagttttccgctgccggttggggatttatgaaagtgcgtgcggtttggaaatcg

SEQ ID NO: 171548 - DNA, 55 bp, Artificial
  Synthetic oligonucleotide
accctggcactcgatgagggctacctcgatcgcgtaaagaacctgaagtcccacg

SEQ ID NO: 171549 - DNA, 55 bp, Artificial
  Synthetic oligonucleotide
tactcgtgccagggagcaccttgtgtgctcgtgggcaaaagctcgtcaggagggc

SEQ ID NO: 171550 - DNA, 60 bp, Artificial
  Synthetic oligonucleotide
tagtcgatgctgaataactgccccgacatcctcagcaccttctaagccatcggtggcaaa

SEQ ID NO: 171551 - DNA, 55 bp, Artificial
  Synthetic oligonucleotide
tactacgagatgaccgggaccatgttcggagcccggaccacagacgcgggcctga

SEQ ID NO: 171552 - DNA, 55 bp, Artificial
  Synthetic oligonucleotide
tatccgcgactaggtgccccggtgctcactgtctgtaccggcggggcaagcccca

SEQ ID NO: 171553 - DNA, 54 bp, Artificial
  Synthetic oligonucleotide
accgatgggacttttccactcaccctgtagcctttcgcctgtgaaggagtcccc

SEQ ID NO: 171554 - DNA, 55 bp, Artificial
  Synthetic oligonucleotide
acatctaggtatcagacgtctaggtattaagacttctttccgtctaggtatccac

SEQ ID NO: 171555 - DNA, 55 bp, Artificial
  Synthetic oligonucleotide
taccttcgccagaggtcaggacgaccacacgcaggggtgttgtcgggctcaggtt

SEQ ID NO: 171556 - DNA, 55 bp, Artificial
  Synthetic oligonucleotide
taccccaggcgatggcctgcctagctctactgacggcccacgcttttccaccaca

SEQ ID NO: 171557 - DNA, 55 bp, Artificial
  Synthetic oligonucleotide
tacccagccgcgctagcgttttagggttatagtttccccatgcggacagcctaca

SEQ ID NO: 171558 - DNA, 55 bp, Artificial
  Synthetic oligonucleotide
tacccagacacagacctagaactaagccagtccttcacaaaacaggactgggaag

SEQ ID NO: 171559 - DNA, 55 bp, Artificial
  Synthetic oligonucleotide
tatgtaagttttggcaaacatgccttttcgatggtgacaggagtgactggacggc

SEQ ID NO: 171560 - DNA, 55 bp, Artificial
  Synthetic oligonucleotide
tacaaacaagttgtctacgggtgtccaatgtttgtcctgtgtccggacaggcagc

SEQ ID NO: 171561 - DNA, 60 bp, Artificial
  Synthetic oligonucleotide
ggcggaatctcgttgtcgcaccacgcgcatttctgagacgtttcggcaccagtcataccc

SEQ ID NO: 171562 - DNA, 56 bp, Artificial
  Synthetic oligonucleotide
tagtagccctacctgcggagtcgactgctcccggagggttttggtgattaattcaa

SEQ ID NO: 171563 - DNA, 55 bp, Artificial
  Synthetic oligonucleotide
tattaggacttccgccgtaactggtgcaagtttgcaccttatcgagccgctgggg

SEQ ID NO: 171564 - DNA, 55 bp, Artificial
  Synthetic oligonucleotide
actcatggctgtcagcgtagtgcaggcaccggacagtggggagggcgcgtcccca

SEQ ID NO: 171565 - DNA, 55 bp, Artificial
  Synthetic oligonucleotide
tccgtgtggacccgatcatgcgtgtggcctgcgctcatcctgcgagtgtcactca

SEQ ID NO: 171566 - DNA, 55 bp, Artificial
  Synthetic oligonucleotide
gtctaccgaacctcccgcgggtagcaagaactccccggattaggcatccggcaca

SEQ ID NO: 171567 - DNA, 55 bp, Artificial
  Synthetic oligonucleotide
gtcgggaatgcacacctgttttcgtctcagattagcgcgagccaagggccgatag

SEQ ID NO: 171568 - DNA, 55 bp, Artificial
  Synthetic oligonucleotide
actcgtgcgcaaagaacccaaacctggccaacgtttctgggatccactcaaccca

SEQ ID NO: 171569 - DNA, 55 bp, Artificial
  Synthetic oligonucleotide
gtcggaaacgccatccgtgtggaacgagacgtggaatgagatcaccaatgaactc

SEQ ID NO: 171570 - DNA, 53 bp, Artificial
  Synthetic oligonucleotide
tcctaggtgtaaaacggtaccttttgtctgtcgtgctaatccccgagacaaaa

SEQ ID NO: 171571 - DNA, 55 bp, Artificial
  Synthetic oligonucleotide
gtcgcggtcgtcaccgctagcgcccgtaagacgtcctcatcttgagtaagtcccg

SEQ ID NO: 171572 - DNA, 55 bp, Artificial
  Synthetic oligonucleotide
tcctctgcgcgttcagaccattccagtgccgagccctgccggtctaggtcggtta

SEQ ID NO: 171573 - DNA, 57 bp, Artificial
  Synthetic oligonucleotide
taggaatcgctgaatacggcagacgagataatgtcggaagggtaaactacccggtca

SEQ ID NO: 171574 - DNA, 55 bp, Artificial
  Synthetic oligonucleotide
gtcgccaatcagtcggacccttgagaatcagcctgccccgaggccgtcaacagtg

SEQ ID NO: 171575 - DNA, 55 bp, Artificial
  Synthetic oligonucleotide
gtcgatgccaggttctaggtcaggaacgaaacctaggctgacagacacgcgtcgc

SEQ ID NO: 171576 - DNA, 55 bp, Artificial
  Synthetic oligonucleotide
gtcgaggaacgaccgtgccagccgatccatgctcgtgacgatcagctgatctccc

SEQ ID NO: 171577 - DNA, 55 bp, Artificial
  Synthetic oligonucleotide
tcctggcacgtgtaggtgtccgtagatcaccgctttcgcgctgtacctactcccc

SEQ ID NO: 171578 - DNA, 55 bp, Artificial
  Synthetic oligonucleotide
gtcctttcgaggatatgtaggagttgagtcgaaaggtacctgcggtggtcgcctc

SEQ ID NO: 171579 - DNA, 54 bp, Artificial
  Synthetic oligonucleotide
acaacccagggaaaagacgaacgctctcaccgcacgttgacccaggggcctgac

SEQ ID NO: 171580 - DNA, 55 bp, Artificial
  Synthetic oligonucleotide
gtcctagtaggtcacctccactactaggcagtcaacccgaaccactacacacccg

SEQ ID NO: 171581 - DNA, 55 bp, Artificial
  Synthetic oligonucleotide
agaccacggccaccggaacgtctgtacccatgaatgaatcgagagtcgcttgtgt

SEQ ID NO: 171582 - DNA, 55 bp, Artificial
  Synthetic oligonucleotide
agacggacggtggggcttgcccaagacgtggtcacgagactgctctagcttcgct

SEQ ID NO: 171583 - DNA, 55 bp, Artificial
  Synthetic oligonucleotide
gtccgctatcttgcgacacaagctcgccaacctgtagttcattacgaacacaccg

SEQ ID NO: 171584 - DNA, 60 bp, Artificial
  Synthetic oligonucleotide
tagctagcgcgtcaatctgtgattgtgcctccgcgagttggcgttctaggtcggctttag

SEQ ID NO: 171585 - DNA, 55 bp, Artificial
  Synthetic oligonucleotide
tcgaagagggttaagccgtctgtcgattcctccgaggtcgttaaagcaagcgacg

SEQ ID NO: 171586 - DNA, 55 bp, Artificial
  Synthetic oligonucleotide
gtccgctaactcaagttttgcgctttgaagctgctctgcgcgggcgctgttcgct

SEQ ID NO: 171587 - DNA, 55 bp, Artificial
  Synthetic oligonucleotide
gtcccagggtaagaacagccttggacctctcatgcagtccagggagttcacactg

SEQ ID NO: 171588 - DNA, 53 bp, Artificial
  Synthetic oligonucleotide
gttaaaccggctcgacggactaggaacggccgacccactgatcccttcgccag

SEQ ID NO: 171589 - DNA, 55 bp, Artificial
  Synthetic oligonucleotide
gtgtttcacgattctgcgctggtgcgtcaaggaaaagaatcggctcgtgtgtcgg

SEQ ID NO: 171590 - DNA, 55 bp, Artificial
  Synthetic oligonucleotide
gtgttgttgctcgcgtgttttctcacgcgtattcatacatttcccggtggccgag

SEQ ID NO: 171591 - DNA, 55 bp, Artificial
  Synthetic oligonucleotide
gtgttcaagcatgactagtaggatataccgcggcctgcccacgatcacattcaag

SEQ ID NO: 171592 - DNA, 55 bp, Artificial
  Synthetic oligonucleotide
gtgtctacggcctcgcctgggaaggagttcttcgcagtctcgcgaggattgtccg

SEQ ID NO: 171593 - DNA, 55 bp, Artificial
  Synthetic oligonucleotide
gtgtactccgtgctcggatgagcaactactctcgccgctagacaccggaacaacg

SEQ ID NO: 171594 - DNA, 55 bp, Artificial
  Synthetic oligonucleotide
gtgggcatatcgggaggtcagaaagcattttggagacgctgacggcctaggccgc

SEQ ID NO: 171595 - DNA, 55 bp, Artificial
  Synthetic oligonucleotide
acccctagccaggggctttcaggtcgccaggaaccgcgccagccccctgcaaagc

SEQ ID NO: 171596 - DNA, 55 bp, Artificial
  Synthetic oligonucleotide
gtggcttatttccagctcggaagccacatatgggcatcccactcagaaccggaca

SEQ ID NO: 171597 - DNA, 55 bp, Artificial
  Synthetic oligonucleotide
gtggcggatctttctgatgcttgtgaggtatttccagtgcagcctatgtggttgg

SEQ ID NO: 171598 - DNA, 55 bp, Artificial
  Synthetic oligonucleotide
gtggattcttgaagtcaacggacaccagcgcgagatgtacaactgggcttacacc

SEQ ID NO: 171599 - DNA, 55 bp, Artificial
  Synthetic oligonucleotide
acggaggaaatattgccgtcgacaagtccaatggcctctgctaagcgtccgaggc

SEQ ID NO: 171600 - DNA, 55 bp, Artificial
  Synthetic oligonucleotide
gtggatgcatcgttgtcgatacgtgcgcgtggcgtagcgaactagggcgggctgt

SEQ ID NO: 171601 - DNA, 55 bp, Artificial
  Synthetic oligonucleotide
gtggagaatctgccacgtccctggactcgaacctcactgctgaacgagatctgcg

SEQ ID NO: 171602 - DNA, 55 bp, Artificial
  Synthetic oligonucleotide
acgggaagggacaccaccgatgttcgtcggactcagggacatccgctcagccagg

SEQ ID NO: 171603 - DNA, 55 bp, Artificial
  Synthetic oligonucleotide
gtgatcttgtacatgacgttttgcctacgccacgccctagcgcgagtgaccttag

SEQ ID NO: 171604 - DNA, 54 bp, Artificial
  Synthetic oligonucleotide
gtgagtatccgcccttattggactggagaaatagccgggtggttccctgtgggt

SEQ ID NO: 171605 - DNA, 53 bp, Artificial
  Synthetic oligonucleotide
acgtcgtctacgcgagaacttggggtgattccggcgctaaagtcgaggtttcg

SEQ ID NO: 171606 - DNA, 55 bp, Artificial
  Synthetic oligonucleotide
tagacactggcttaggcgggggctttatgtgtcctgtaggcggggtttattggtg

SEQ ID NO: 171607 - DNA, 55 bp, Artificial
  Synthetic oligonucleotide
gtcttcttagaggtaacagtctgagccttatcctcaggattcttgtgctccgcaa

SEQ ID NO: 171608 - DNA, 55 bp, Artificial
  Synthetic oligonucleotide
gtctggctaaaccacgagagtggtgctttcgcaatagcggtaataattcggtgcc

SEQ ID NO: 171609 - DNA, 55 bp, Artificial
  Synthetic oligonucleotide
gtctggcaacacctacacttttgagggtcaagtccgcgggagtggtgtatctgcc

SEQ ID NO: 171610 - DNA, 55 bp, Artificial
  Synthetic oligonucleotide
acaccacctacgcataaggagaaaccacatgaatgcacctatcgctttgaccgag

SEQ ID NO: 171611 - DNA, 55 bp, Artificial
  Synthetic oligonucleotide
tccggagacaacctgatggcatccgcgctcaagttgaccacagagttcagcagtg

SEQ ID NO: 171612 - DNA, 55 bp, Artificial
  Synthetic oligonucleotide
tccgtagatgccgaaaatcgacaagacgacgccaatagagtccgaaaatcggcac

SEQ ID NO: 171613 - DNA, 55 bp, Artificial
  Synthetic oligonucleotide
cagcctaggtttcgttcctgacctagaacctggcatcgactaaggaacttgccgt

SEQ ID NO: 171614 - DNA, 55 bp, Artificial
  Synthetic oligonucleotide
gcgtaatcatgaatgctgattttacccgtcaatcattcttcgcaacatgcggggc

SEQ ID NO: 171615 - DNA, 55 bp, Artificial
  Synthetic oligonucleotide
gcggttaactcacgcgaaatcttgaacacatcggacaaggaagtagcaaaccccg

SEQ ID NO: 171616 - DNA, 55 bp, Artificial
  Synthetic oligonucleotide
cagcggggactcgtcgcgagtaaagttcaagcgatcataatccataccagggcgc

SEQ ID NO: 171617 - DNA, 60 bp, Artificial
  Synthetic oligonucleotide
tacttgtctgtagcatccacatacctagttagactgcgctgaagcactaaaggtttcacc

SEQ ID NO: 171618 - DNA, 55 bp, Artificial
  Synthetic oligonucleotide
gcggtgttaagtgcggagaatttgttatcgccagaagggataacggtgccgaagt

SEQ ID NO: 171619 - DNA, 55 bp, Artificial
  Synthetic oligonucleotide
tgcttggcggcactgttgcgcctagtgcgagagcgtccgatagtttgtgtgcggg

SEQ ID NO: 171620 - DNA, 55 bp, Artificial
  Synthetic oligonucleotide
cagctcaaggcgacgattaaggagcttcaggccgctggatacgaactcccggatt

SEQ ID NO: 171621 - DNA, 55 bp, Artificial
  Synthetic oligonucleotide
caggccgcgcgtcctgggccagtctttgcacgtcctctagcgtgtgggcgtcccc

SEQ ID NO: 171622 - DNA, 51 bp, Artificial
  Synthetic oligonucleotide
cagggatggtggcaaaccccttaggtccgtagttcgccaaccctggtttaa

SEQ ID NO: 171623 - DNA, 55 bp, Artificial
  Synthetic oligonucleotide
caggggctagccccaatggatattgtgcgtgcctcgtcggttggctcaagtgtgg

SEQ ID NO: 171624 - DNA, 55 bp, Artificial
  Synthetic oligonucleotide
tggagaacgtggagggagagatctcggtcattcgactgtccctcacgggagcccg

SEQ ID NO: 171625 - DNA, 55 bp, Artificial
  Synthetic oligonucleotide
cagtcacctgcagtcacggcggaggcttagaattgttgccgtaagtatcggtgcg

SEQ ID NO: 171626 - DNA, 55 bp, Artificial
  Synthetic oligonucleotide
cagtcatcactgcctcctatttccgcttgttgaagttggccacagacgtgttggt

SEQ ID NO: 171627 - DNA, 55 bp, Artificial
  Synthetic oligonucleotide
gcggcgtgattcgttagggcgtgttcgtcttgaaagcactgcgcacctccccgtg

SEQ ID NO: 171628 - DNA, 56 bp, Artificial
  Synthetic oligonucleotide
accctactacctagacaccgctggacattcaggcttaatagtggctggtatccccg

SEQ ID NO: 171629 - DNA, 55 bp, Artificial
  Synthetic oligonucleotide
gcggagatgtgtggctcgagagcgtcgtatgcgtagtcgagttctgggagttcgt

SEQ ID NO: 171630 - DNA, 55 bp, Artificial
  Synthetic oligonucleotide
aagacgcactacgttcaccccacaccagcggggctttccgtgtcgtccgagcagg

SEQ ID NO: 171631 - DNA, 55 bp, Artificial
  Synthetic oligonucleotide
catccacatacctagttagactgcgctgaagcactaaaggtttcacctggtaggg

SEQ ID NO: 171632 - DNA, 55 bp, Artificial
  Synthetic oligonucleotide
catccgtgcccgaccagcgaatagcggtagcaacgccacggtcacaggatgcgta

SEQ ID NO: 171633 - DNA, 55 bp, Artificial
  Synthetic oligonucleotide
catcgcggtaaacaatattttccaggctcggagcaaatgcgtagagaaatcccga

SEQ ID NO: 171634 - DNA, 55 bp, Artificial
  Synthetic oligonucleotide
catcgctttatattcgctgacctggtcaagcggaacttcactgcgccagctgcca

SEQ ID NO: 171635 - DNA, 52 bp, Artificial
  Synthetic oligonucleotide
catcggacaaggaagtagcaaaccccgtagcattaaaggttccgaaagtccc

SEQ ID NO: 171636 - DNA, 55 bp, Artificial
  Synthetic oligonucleotide
gcggaatctagtgcgtacttgtagtctccagtatccccgtgcgccccaataaaca

SEQ ID NO: 171637 - DNA, 55 bp, Artificial
  Synthetic oligonucleotide
tgcgctccatggaaagatactagcgcttgggctctttgggctgtagttcgctcgg

SEQ ID NO: 171638 - DNA, 55 bp, Artificial
  Synthetic oligonucleotide
cacgcacaacgcagtctcgccccaccgaaactcgctctgcagagtcgtaccacga

SEQ ID NO: 171639 - DNA, 58 bp, Artificial
  Synthetic oligonucleotide
tacggacagtgagcaaagcacaacacggtcggtgtcgataatccgaaaggagactaag

SEQ ID NO: 171640 - DNA, 55 bp, Artificial
  Synthetic oligonucleotide
cacgcctctgtggggccattcggtagtcgttgttcaatgtgacaatccgattctt

SEQ ID NO: 171641 - DNA, 55 bp, Artificial
  Synthetic oligonucleotide
cacgcgcgaaccacacactgcgaacctgtgggtttagcaccgttgagcaagtcgc

SEQ ID NO: 171642 - DNA, 55 bp, Artificial
  Synthetic oligonucleotide
cacgtccccgattttggcgccgctttagatgactactttgaggagtactcagacc

SEQ ID NO: 171643 - DNA, 55 bp, Artificial
  Synthetic oligonucleotide
cacgtgacttcccgccccgcatgtgggactcaggcgatctgtggacaggccgctc

SEQ ID NO: 171644 - DNA, 55 bp, Artificial
  Synthetic oligonucleotide
gcgttgagaatcaagaggaggcacgtcgcagagatgccctaatgcaagcgctcgt

SEQ ID NO: 171645 - DNA, 55 bp, Artificial
  Synthetic oligonucleotide
cactcgccagatcattgggagtacacgacagggtagttttcgctgggaagcaacc

SEQ ID NO: 171646 - DNA, 55 bp, Artificial
  Synthetic oligonucleotide
cactgcggacgttgccagggcatctttcgcgacctcgattctatttggcactcgc

SEQ ID NO: 171647 - DNA, 55 bp, Artificial
  Synthetic oligonucleotide
tgctcggagacctctatctggtccgggagggacacgaccacgggtttggttggtg

SEQ ID NO: 171648 - DNA, 55 bp, Artificial
  Synthetic oligonucleotide
cactgtcaggtcactaatcaaggtcatcgcttgttcatacagtggggtgtgcccc

SEQ ID NO: 171649 - DNA, 54 bp, Artificial
  Synthetic oligonucleotide
cacttcgttttaaagttttgaccgctatgttgtaagcttatccgcggacgtgac

SEQ ID NO: 171650 - DNA, 58 bp, Artificial
  Synthetic oligonucleotide
tacgcagcaatcgcagttcctctaaacggatcttttacggcacccgtcaacaagcgat

SEQ ID NO: 171651 - DNA, 55 bp, Artificial
  Synthetic oligonucleotide
cacttgagatggaggacggtagtcagccaaagctagtcagccagttcccggcgcg

SEQ ID NO: 171652 - DNA, 55 bp, Artificial
  Synthetic oligonucleotide
cacttgcgattgacgtatatggtacgcccgttgcagtgacagacaacgaatagag

SEQ ID NO: 171653 - DNA, 55 bp, Artificial
  Synthetic oligonucleotide
cagaaaagcgtggacggatgggtacacactcatcgtatataacgcatcatacgat

SEQ ID NO: 171654 - DNA, 55 bp, Artificial
  Synthetic oligonucleotide
gcgtgtgcttgcaggtctttagggctgcgcatagtcggggtcctggtaggtggag

SEQ ID NO: 171655 - DNA, 55 bp, Artificial
  Synthetic oligonucleotide
cagacgtagcgctgtgtggtagtggcagatgtggagcgtatgatgtcgatcgtcc

SEQ ID NO: 171656 - DNA, 55 bp, Artificial
  Synthetic oligonucleotide
gcgtccgttgcccacccagaaataccaactgtagatataagtatgcggtataccc

SEQ ID NO: 171657 - DNA, 55 bp, Artificial
  Synthetic oligonucleotide
gcgtcatccataagttcttccctggctttaatctcggtggcgagtatctgccggc

SEQ ID NO: 171658 - DNA, 55 bp, Artificial
  Synthetic oligonucleotide
cagcacgccattttataaacgcgctgagtaacaggtagctaccaccggtaggtac

SEQ ID NO: 171659 - DNA, 55 bp, Artificial
  Synthetic oligonucleotide
gcgtcaagcccaaagttcttggaacgatggcgggctaatgcgtcgacctcgacaa

SEQ ID NO: 171660 - DNA, 55 bp, Artificial
  Synthetic oligonucleotide
cagccctcacgagggccagggttctaattcatcaggcgagtggtgggatcagccg

SEQ ID NO: 171661 - DNA, 54 bp, Artificial
  Synthetic oligonucleotide
accgcgtaaatccagcggtttagtcaccctcggcgtgttcaaagtccatcgtaa

SEQ ID NO: 171662 - DNA, 55 bp, Artificial
  Synthetic oligonucleotide
cagccggcaagggttttatcctctgtgactttccacatcgtgcgctgtaagtccc

SEQ ID NO: 171663 - DNA, 53 bp, Artificial
  Synthetic oligonucleotide
ccacctgcggtttgcttccctcacccggtgtgcaaacgtgggtagtaggtccc

SEQ ID NO: 171664 - DNA, 55 bp, Artificial
  Synthetic oligonucleotide
ccacgcagcacacacgaccgttacgatccttgacctcttgacgagtgctgaagga

SEQ ID NO: 171665 - DNA, 55 bp, Artificial
  Synthetic oligonucleotide
ccacgcaggctagctctcctaacgaatcttcccgtgaccttagagtaaaccgtcg

SEQ ID NO: 171666 - DNA, 55 bp, Artificial
  Synthetic oligonucleotide
ccacgccacgcacacgaggacattttcggaggtggcgttgttcggggagacagtc

SEQ ID NO: 171667 - DNA, 55 bp, Artificial
  Synthetic oligonucleotide
gcgaccagcatcacggaacgaactagcaggtcgactccagaaatactgatgtggg

SEQ ID NO: 171668 - DNA, 55 bp, Artificial
  Synthetic oligonucleotide
gcgacaatgtgaagcgctgactgaaagtggttgcactcttgaggttcggccaccg

SEQ ID NO: 171669 - DNA, 55 bp, Artificial
  Synthetic oligonucleotide
ccacgtacagaattcgggacggtaccccgcgctgtgtgtggcaaagagaccgatc

SEQ ID NO: 171670 - DNA, 55 bp, Artificial
  Synthetic oligonucleotide
ccactagggcaagaatccctaactctcacctggctttatcagcaaaggtctctca

SEQ ID NO: 171671 - DNA, 55 bp, Artificial
  Synthetic oligonucleotide
ccactgacaaaacaagcacgtttcgcccaatttcgccttgattttgggcagaacg

SEQ ID NO: 171672 - DNA, 60 bp, Artificial
  Synthetic oligonucleotide
cccgcaagtgctcgtgggcaagcgctttagcagtctgatcgtttaagtcccattgatcga

SEQ ID NO: 171673 - DNA, 59 bp, Artificial
  Synthetic oligonucleotide
attggcacaacgatgttataccgacatgtcgctcaaacggatcgatttgaagcgacccg

SEQ ID NO: 171674 - DNA, 52 bp, Artificial
  Synthetic oligonucleotide
actcggggacagacgcatacaaagacaacccgcgctccttgacccaaacgcg

SEQ ID NO: 171675 - DNA, 52 bp, Artificial
  Synthetic oligonucleotide
ccgcgactaaaccaacgaacgccaagctgacaccctgaacattaagaaagcg

SEQ ID NO: 171676 - DNA, 52 bp, Artificial
  Synthetic oligonucleotide
gtgggcaatggtcactcccttacccaccctcattggtatgccgggatccgta

SEQ ID NO: 171677 - DNA, 52 bp, Artificial
  Synthetic oligonucleotide
atgctcagtatggagccggatggatcgcagcaaccgaactaccgttgccccc

SEQ ID NO: 171678 - DNA, 52 bp, Artificial
  Synthetic oligonucleotide
atgtacacgaccatgagtacccgatagaatcactatatcgcgttttgtgatg

SEQ ID NO: 171679 - DNA, 52 bp, Artificial
  Synthetic oligonucleotide
gaaaaactgtccttcgccgtgcaatggccaatgagcaacactccccctgcga

SEQ ID NO: 171680 - DNA, 52 bp, Artificial
  Synthetic oligonucleotide
cgctagatcactgatccgcgccagtcacccatctgggtttaggatgttgcct

SEQ ID NO: 171681 - DNA, 52 bp, Artificial
  Synthetic oligonucleotide
aattgtcatccccgcaggcgggaaattcaggcggattgctcacccgcagtga

SEQ ID NO: 171682 - DNA, 52 bp, Artificial
  Synthetic oligonucleotide
gaagagccctcccctcacgtagaattacccacatcgcgacgcgaaccgacgg

SEQ ID NO: 171683 - DNA, 52 bp, Artificial
  Synthetic oligonucleotide
ccccatggaagttggtgatttcttttgtacggacacgtcgtgaacccatcac

SEQ ID NO: 171684 - DNA, 54 bp, Artificial
  Synthetic oligonucleotide
gtctatctaggtgggaccctcttaggggaggaccaccacactttcaaagtttga

SEQ ID NO: 171685 - DNA, 52 bp, Artificial
  Synthetic oligonucleotide
tgcgttcctaagcctcggtatgcgacatttgttaaatttcgtgattcagggt

SEQ ID NO: 171686 - DNA, 52 bp, Artificial
  Synthetic oligonucleotide
cggctgcccgttattaggctggtggtccgacacggttaacctacgcggggtg

SEQ ID NO: 171687 - DNA, 51 bp, Artificial
  Synthetic oligonucleotide
acggggtggccccataacatcaactaataacacctgtacgctaaatggacg

SEQ ID NO: 171688 - DNA, 51 bp, Artificial
  Synthetic oligonucleotide
tcccacgcttccctccatccacgtcataaaccgttgttccgcctgtcgcat

SEQ ID NO: 171689 - DNA, 51 bp, Artificial
  Synthetic oligonucleotide
tcagcgttgcaaaatggcgtacgaaccctccactagcggatcaaccccgcg

SEQ ID NO: 171690 - DNA, 51 bp, Artificial
  Synthetic oligonucleotide
acaaaagttatagcgaagaaaagattggaaaccctttggctaatctattgg

SEQ ID NO: 171691 - DNA, 51 bp, Artificial
  Synthetic oligonucleotide
aatagccgagggccaatacaattgcacccaacaagatagtgcgcttcgttc

SEQ ID NO: 171692 - DNA, 51 bp, Artificial
  Synthetic oligonucleotide
taagcgtctctattcccggctccgtgccccgtgttgtcctactagcaccgc

SEQ ID NO: 171693 - DNA, 51 bp, Artificial
  Synthetic oligonucleotide
taacaagagctccgacgaacaagcacggcgtaacccagcacgccctcatcc

SEQ ID NO: 171694 - DNA, 51 bp, Artificial
  Synthetic oligonucleotide
cgattgcaacgggcgttctcgccaatcgttaattgcctaagaagcgaatgg

SEQ ID NO: 171695 - DNA, 59 bp, Artificial
  Synthetic oligonucleotide
gtgcaattcgctaagacaccgaaagaaaccaagcccgcgccctatgctgacgaggtcca

SEQ ID NO: 171696 - DNA, 51 bp, Artificial
  Synthetic oligonucleotide
agttcaataccgccgagcgtacacggaggaacctcctcgggaccacttcgc

SEQ ID NO: 171697 - DNA, 51 bp, Artificial
  Synthetic oligonucleotide
ctgtcacgactcaaatcgtgttcataaagacgtcgggctaaactaaatttt

SEQ ID NO: 171698 - DNA, 51 bp, Artificial
  Synthetic oligonucleotide
aagggttcactgatcgcgccgaaaatagcatcgcccgtattaattaaagcc

SEQ ID NO: 171699 - DNA, 51 bp, Artificial
  Synthetic oligonucleotide
ggcggttatggccgccaaatcgttacacgcccattgacgccccacacgcca

SEQ ID NO: 171700 - DNA, 51 bp, Artificial
  Synthetic oligonucleotide
ggaaaattagctatttactccgctttgaacgaaagaaagaccggccccgag

SEQ ID NO: 171701 - DNA, 51 bp, Artificial
  Synthetic oligonucleotide
gcttccgggcttatgttgcgttgctgtgctgcgagcatgatgggtgtccca

SEQ ID NO: 171702 - DNA, 51 bp, Artificial
  Synthetic oligonucleotide
ccgccgagcgtacacggaggaacctcctcgggaccacttcgctattccgcc

SEQ ID NO: 171703 - DNA, 50 bp, Artificial
  Synthetic oligonucleotide
ttgaggttagttgtgtcagaggtcggtggtacttcttgcgttggagcggg

SEQ ID NO: 171704 - DNA, 50 bp, Artificial
  Synthetic oligonucleotide
tgacctggatagccgtatttcagggatatgatacgatacctacgccacag

SEQ ID NO: 171705 - DNA, 50 bp, Artificial
  Synthetic oligonucleotide
tctcgcctccggtatccgattagcaaccgctatggctcctttagccgcga

SEQ ID NO: 171706 - DNA, 57 bp, Artificial
  Synthetic oligonucleotide
atcgccgttctgatagaaagagtcctcagttgacaggcaggccgttttctttaagtc

SEQ ID NO: 171707 - DNA, 50 bp, Artificial
  Synthetic oligonucleotide
agcgataggcatcggctgcccgttattaggctggtggtccgacacggtta

SEQ ID NO: 171708 - DNA, 50 bp, Artificial
  Synthetic oligonucleotide
ccggatggatcgcagcaaccgaactaccgttgcccccgtagcgaaaggaa

SEQ ID NO: 171709 - DNA, 50 bp, Artificial
  Synthetic oligonucleotide
atacgggaattttcgttatgttcccgtatttcgctgggctgcatacgggc

SEQ ID NO: 171710 - DNA, 50 bp, Artificial
  Synthetic oligonucleotide
gggcgcagcggcccagttgttccacggggtggccccataacatcaactaa

SEQ ID NO: 171711 - DNA, 50 bp, Artificial
  Synthetic oligonucleotide
cagtagtaatagtgttgccttctttgtagttcgattagcgaacttttcga

SEQ ID NO: 171712 - DNA, 54 bp, Artificial
  Synthetic oligonucleotide
gaccaccacactttcaaagtttgagtagggttaccgtggcccccgaatcgatgc

SEQ ID NO: 171713 - DNA, 60 bp, Artificial
  Synthetic oligonucleotide
taaattagactatgcacctttattgacctttgtgaaagagcgatagcccgagtagcgatg

SEQ ID NO: 171714 - DNA, 60 bp, Artificial
  Synthetic oligonucleotide
aaatcttcgcatcgctactcgggctatcgctctttcacaaaggtcaataaaggtgcatag

SEQ ID NO: 171715 - DNA, 53 bp, Artificial
  Synthetic oligonucleotide
aagtcttacgctccccaatcgacggcgtccctgataaccgggatttcggtcaa

SEQ ID NO: 171716 - DNA, 60 bp, Artificial
  Synthetic oligonucleotide
ttgcatacggatcccggcataccaatgagggtgggtaagggagtgaccattgcccacaga

SEQ ID NO: 171717 - DNA, 56 bp, Artificial
  Synthetic oligonucleotide
ctactttcagatggtcttgacggtaagaagttatacgctccctacgatcctttcga

SEQ ID NO: 171718 - DNA, 56 bp, Artificial
  Synthetic oligonucleotide
gcgaatacacgataacgtttttgacgagtcgagacatcaaagaaactcaaccgccg

SEQ ID NO: 171719 - DNA, 58 bp, Artificial
  Synthetic oligonucleotide
aagtgctcactctttcctgatagggctgtaatagtgtgttccgctttattaacgtgag

SEQ ID NO: 171720 - DNA, 52 bp, Artificial
  Synthetic oligonucleotide
cgggtaaggcgcgtggttaacgatacgtctttgggcaagacttcggagtagt

SEQ ID NO: 171721 - DNA, 57 bp, Artificial
  Synthetic oligonucleotide
tgttggcgtgtggggcgtcaatgggcgtgtaacgatttggcggccataaccgcctta

SEQ ID NO: 171722 - DNA, 60 bp, Artificial
  Synthetic oligonucleotide
tgtgaattatagcgccgcgagggatctgtatgatcgggcaactaaattgagaagcgctaa

SEQ ID NO: 171723 - DNA, 60 bp, Artificial
  Synthetic oligonucleotide
aagcttctggataattgattgacccatccctggacctcgtcagcatagggcgcgggcttg

SEQ ID NO: 171724 - DNA, 59 bp, Artificial
  Synthetic oligonucleotide
agccgcagttgttcactgtgtgcgtttgcaatgggatcgggggatggcaagtcgttagg

SEQ ID NO: 171725 - DNA, 57 bp, Artificial
  Synthetic oligonucleotide
gcgcaggcaaattaggattccctggcccaaaagcgcgagtagcgcctttacggtgaa

SEQ ID NO: 171726 - DNA, 55 bp, Artificial
  Synthetic oligonucleotide
ccgccaggcgtaacccgccgtgccacctaaggtgaattgcggttcaaattcatta

SEQ ID NO: 171727 - DNA, 55 bp, Artificial
  Synthetic oligonucleotide
ccattcggctaggtaggcgcggacgttttatcggttgcacggcttatcccgattg

SEQ ID NO: 171728 - DNA, 58 bp, Artificial
  Synthetic oligonucleotide
gaactagtcgtacgcgctcgttttcgtgatctatcggttttgggattatatgctctag

SEQ ID NO: 171729 - DNA, 60 bp, Artificial
  Synthetic oligonucleotide
catgacgcgcgatattgttcgtgcgtatccggaatcaaatatcaccgtttatgtaggcag

SEQ ID NO: 171730 - DNA, 58 bp, Artificial
  Synthetic oligonucleotide
agcccgcgccctatgctgacgaggtccagggatgggtcaatcaattatccagaagctt

SEQ ID NO: 171731 - DNA, 57 bp, Artificial
  Synthetic oligonucleotide
tctaccatcactcggatcacgggttctgtgccggaggggcgcaataagatacggccg

SEQ ID NO: 171732 - DNA, 57 bp, Artificial
  Synthetic oligonucleotide
ccaaggtatcgttgaccttcagccgacttaatcggggcgcaggccaactcacgatcc

SEQ ID NO: 171733 - DNA, 56 bp, Artificial
  Synthetic oligonucleotide
taggattccctggcccaaaagcgcgagtagcgcctttacggtgaatataaagccgc

SEQ ID NO: 171734 - DNA, 55 bp, Artificial
  Synthetic oligonucleotide
cgtaagctcattggaagtcaattcgccgtcgctcactaaccgaggctgaaggtcg

SEQ ID NO: 171735 - DNA, 55 bp, Artificial
  Synthetic oligonucleotide
gccgcgtgcaacacggggagtacataacgcacgtatctagaccctggagtattag

SEQ ID NO: 171736 - DNA, 55 bp, Artificial
  Synthetic oligonucleotide
gccacttccaaggtaaggccaccgcctgaattaacagcggtttgcccggagtgtc

SEQ ID NO: 171737 - DNA, 55 bp, Artificial
  Synthetic oligonucleotide
gccaccatacaagtgtctgcaaaccttacggatgaaagtgtcatgctagtctaca

SEQ ID NO: 171738 - DNA, 53 bp, Artificial
  Synthetic oligonucleotide
gcaaaggaacgtgggccggttaccccgtttcttcggctgctaatggatttggc

SEQ ID NO: 171739 - DNA, 55 bp, Artificial
  Synthetic oligonucleotide
gagggttcgattgaaagtgtaggttttcaacaagtagcccgtatgccgcgaagtg

SEQ ID NO: 171740 - DNA, 60 bp, Artificial
  Synthetic oligonucleotide
catgaaagcctgcgagtcactcacgttaataaagcggaacacactattacagccctatca

SEQ ID NO: 171741 - DNA, 55 bp, Artificial
  Synthetic oligonucleotide
cgtgccgctcttaaatcgctatattcgcaacgctatcattacggcgacggctctc

SEQ ID NO: 171742 - DNA, 55 bp, Artificial
  Synthetic oligonucleotide
cgttcccgacgacttagtgccgtcgtaggaagggtccaactcatggatagccttc

SEQ ID NO: 171743 - DNA, 55 bp, Artificial
  Synthetic oligonucleotide
gaggagttttaatgcacttccgttgcaatatcggttgtagtaatatccatcgtgg

SEQ ID NO: 171744 - DNA, 51 bp, Artificial
  Synthetic oligonucleotide
gaccttctaactttccgctaaaaccaacacggggcatttcgggaaggggca

SEQ ID NO: 171745 - DNA, 55 bp, Artificial
  Synthetic oligonucleotide
gacaccgaaagaaaccaagcccgcgccctatgctgacgaggtccagggatgggtc

SEQ ID NO: 171746 - DNA, 52 bp, Artificial
  Synthetic oligonucleotide
ctcttaggggaggaccaccacactttcaaagtttgagtagggttaccgtggc

SEQ ID NO: 171747 - DNA, 55 bp, Artificial
  Synthetic oligonucleotide
ctgcctcaacagattagtgacctccagcaacgattggctcaagtacgcggtcagt

SEQ ID NO: 171748 - DNA, 52 bp, Artificial
  Synthetic oligonucleotide
tttaaggggtgggtccatttcattgggctacggctaagggacattttcgctt

SEQ ID NO: 171749 - DNA, 55 bp, Artificial
  Synthetic oligonucleotide
ttggcgctgcattgcctctacgctagaagggcccaaaggttggacgcccaattta

SEQ ID NO: 171750 - DNA, 55 bp, Artificial
  Synthetic oligonucleotide
ttcagttgtcgtatacgttgcaacttcgtgtgggtaggatcacctggaataagca

SEQ ID NO: 171751 - DNA, 52 bp, Artificial
  Synthetic oligonucleotide
cagaaaacgattagaagggaaaaggggttatgtctttacacataggttagtc

SEQ ID NO: 171752 - DNA, 55 bp, Artificial
  Synthetic oligonucleotide
tggtccgccatcggcgctcgcacgaccgaaagccaaacccaccgagagctagctt

SEQ ID NO: 171753 - DNA, 55 bp, Artificial
  Synthetic oligonucleotide
tccggttgtgccaatgggtaaagcgcgcatccgcgttcaaatgtcagcggttcat

SEQ ID NO: 171754 - DNA, 55 bp, Artificial
  Synthetic oligonucleotide
tcaacggaatatcacatcgcgaccatacttattcccttaccggcttccgccaccc

SEQ ID NO: 171755 - DNA, 55 bp, Artificial
  Synthetic oligonucleotide
tattcaggcacctaacgtgcaaggctgcaaacgttcagttttgagccgaggtggg

SEQ ID NO: 171756 - DNA, 55 bp, Artificial
  Synthetic oligonucleotide
tacctcaatcgccgtttaccatgcgtttattggatacgatgaccttagaagtgga

SEQ ID NO: 171757 - DNA, 55 bp, Artificial
  Synthetic oligonucleotide
gttggtggtaaatgcgtaaacgttcgcgtattattgcttcggtatcatcgtgacg

SEQ ID NO: 171758 - DNA, 53 bp, Artificial
  Synthetic oligonucleotide
gttggggccagttaaacagatcacgtaaagatttcaattcagggagtttcggt

SEQ ID NO: 171759 - DNA, 55 bp, Artificial
  Synthetic oligonucleotide
gtgtattagcggagcgtgcgttaagtcgggaattgggaggcggttgtcaagtgcc

SEQ ID NO: 171760 - DNA, 55 bp, Artificial
  Synthetic oligonucleotide
gtgcatacacagcgatttcggataaatcccgacacaacagtgtaaacgggtgggc

SEQ ID NO: 171761 - DNA, 55 bp, Artificial
  Synthetic oligonucleotide
gtcccgagcaaagcgagagtacatatacgttctgggcagttctgtgagcgtttac

SEQ ID NO: 171762 - DNA, 58 bp, Artificial
  Synthetic oligonucleotide
ggcgaaaagtgattgggtttatgcagcgttttttgccagcccattacgcgcaggcatt

SEQ ID NO: 171763 - DNA, 55 bp, Artificial
  Synthetic oligonucleotide
gtacgataagacggtgaaagcatcgcgtttcggtgtcagactttccatggcccct

SEQ ID NO: 171764 - DNA, 55 bp, Artificial
  Synthetic oligonucleotide
ggctactcacttgttttgcacgaagtgcccaagattaaactagaatccccatcgg

SEQ ID NO: 171765 - DNA, 55 bp, Artificial
  Synthetic oligonucleotide
ggatggcacgttattttcggtggaccttaggggacgatacacggccactcacgca

SEQ ID NO: 171766 - DNA, 55 bp, Artificial
  Synthetic oligonucleotide
gctcctggatacaacgggctcctatcattacccacccgtggcgaagcgtgaaatt

SEQ ID NO: 171767 - DNA, 55 bp, Artificial
  Synthetic oligonucleotide
gcgtttgggcataggcataaagttcttgacgtgtaaaattgagcaaaggtcgcat

SEQ ID NO: 171768 - DNA, 55 bp, Artificial
  Synthetic oligonucleotide
gcgtcgattgacaaaagaacggtgtgattttctagcgcaaattccgctgcgtggg

SEQ ID NO: 171769 - DNA, 55 bp, Artificial
  Synthetic oligonucleotide
gcgcgcgtaggagagacaacaatccgtagcccaatgaaatggacccaccccttaa

SEQ ID NO: 171770 - DNA, 54 bp, Artificial
  Synthetic oligonucleotide
gcgcacaaaggttcgagtacttaagcccaaccgattaaggtctaacaataagta

SEQ ID NO: 171771 - DNA, 55 bp, Artificial
  Synthetic oligonucleotide
ccgattgcacagtccgccgttcgggtacactgagagagtgtcgcgttgtatccgt

SEQ ID NO: 171772 - DNA, 55 bp, Artificial
  Synthetic oligonucleotide
ccctttattaatacaggcagcacgcgatcttaccgcttatttggaacaatcaggt

SEQ ID NO: 171773 - DNA, 60 bp, Artificial
  Synthetic oligonucleotide
atttgacccgattctttagacttgccacgccgctgcaacaagtagaatctcacattcaat

SEQ ID NO: 171774 - DNA, 55 bp, Artificial
  Synthetic oligonucleotide
cccgtcctgaaatatcgtttgaatggtgatcacgcatagagtccagcaccgatag

SEQ ID NO: 171775 - DNA, 55 bp, Artificial
  Synthetic oligonucleotide
cactatgccgtttaatggcttcactgcgagcaaaatgtatagccgctgctaaacg

SEQ ID NO: 171776 - DNA, 55 bp, Artificial
  Synthetic oligonucleotide
cacacggtcgttgactatgcctttcggcaaccacagacgccactctgtcgagcgt

SEQ ID NO: 171777 - DNA, 55 bp, Artificial
  Synthetic oligonucleotide
cacaacaacaaacgctatggccgagctcagctagacaaacggcacttaccaaccc

SEQ ID NO: 171778 - DNA, 55 bp, Artificial
  Synthetic oligonucleotide
caatttgggagtgggaaggcgaatactaagatgttctccaggttggatagtgtgt

SEQ ID NO: 171779 - DNA, 55 bp, Artificial
  Synthetic oligonucleotide
caattacatttatccaatggaaatcgtcttcgttagccccacaactaaaatccac

SEQ ID NO: 171780 - DNA, 55 bp, Artificial
  Synthetic oligonucleotide
caacgcgttagcgtttggttataggctgtcgcaatcacgtggtcgttccatacta

SEQ ID NO: 171781 - DNA, 55 bp, Artificial
  Synthetic oligonucleotide
atttaattgaagacggatgtcgagcagtgaatgtgaatccagaagatggacgctt

SEQ ID NO: 171782 - DNA, 55 bp, Artificial
  Synthetic oligonucleotide
aggataatgtagacgtatcgggagacaacgaatcttgaattgaggggcgcggcgg

SEQ ID NO: 171783 - DNA, 55 bp, Artificial
  Synthetic oligonucleotide
agctattcgcttattgtcagggctgctagccggacaaccttttaatacggtattg

SEQ ID NO: 171784 - DNA, 54 bp, Artificial
  Synthetic oligonucleotide
gtccagcggggcgcatcgattcgggggccacggtaaccctactcaaactttgaa

SEQ ID NO: 171785 - DNA, 55 bp, Artificial
  Synthetic oligonucleotide
agagccgctcgttcataggtgcgattgaaagtgtaggtttcctaagccgcctcgg

SEQ ID NO: 171786 - DNA, 55 bp, Artificial
  Synthetic oligonucleotide
acgaccgcgttctcaaacgcgcaagcaatatccgctcgggtttgttcctcaccac

SEQ ID NO: 171787 - DNA, 55 bp, Artificial
  Synthetic oligonucleotide
aagtattgccgcaagcgatagccggcacaaacatccacgccgatatcattacggg

SEQ ID NO: 171788 - DNA, 55 bp, Artificial
  Synthetic oligonucleotide
aagcgacagctagttcacgaccgtttagcgttccatcacctaagccgtatattcc

SEQ ID NO: 171789 - DNA, 55 bp, Artificial
  Synthetic oligonucleotide
cggtggacatgctacgtcaaaagaacgtcttcgaaattctcgatcacgtaatacg

SEQ ID NO: 171790 - DNA, 55 bp, Artificial
  Synthetic oligonucleotide
cgggaacgttgggcgacgcaggtttggcgctcgcattaatgaatacgccatcgtg

SEQ ID NO: 171791 - DNA, 53 bp, Artificial
  Synthetic oligonucleotide
cggattgacttacggggcttatagccaattggcgccgttaaaatacggcggtc

SEQ ID NO: 171792 - DNA, 55 bp, Artificial
  Synthetic oligonucleotide
cgctctatacgtattctaccgtctcgcaactagccaatttcatcgttcagcaagc

SEQ ID NO: 171793 - DNA, 51 bp, Artificial
  Synthetic oligonucleotide
cgcggggttcggcaaggatatttacgttattggaaacggcttctaagccgg

SEQ ID NO: 171794 - DNA, 53 bp, Artificial
  Synthetic oligonucleotide
cgcccttgttttgtaccctgacggagagcggcgttatattatccgccccaaaa

SEQ ID NO: 171795 - DNA, 58 bp, Artificial
  Synthetic oligonucleotide
cctgaaaattaatatgcaccgccggcggttgagtttctttgatgtctcgactcgtcaa

SEQ ID NO: 171796 - DNA, 55 bp, Artificial
  Synthetic oligonucleotide
cgcccctatttacacgggtctgtgcccattccctatcttcgcgctcagagttctt

SEQ ID NO: 171797 - DNA, 54 bp, Artificial
  Synthetic oligonucleotide
ccaccgtaatccttaaagcgccagcaatcacaagagcgctgagcgggtcgcccc

SEQ ID NO: 171798 - DNA, 54 bp, Artificial
  Synthetic oligonucleotide
tacgccaaacggcttttctcacattgcgtttgcttgccactacacctaatcgcg

SEQ ID NO: 171799 - DNA, 53 bp, Artificial
  Synthetic oligonucleotide
acggggaaatcttatagttctcccgtattccacttcggtcaataatcgctacg

SEQ ID NO: 171800 - DNA, 54 bp, Artificial
  Synthetic oligonucleotide
ggttgcgtgcaatcgcgtcgctgccaccttaacacctgtcccaccggagtgacc

SEQ ID NO: 171801 - DNA, 54 bp, Artificial
  Synthetic oligonucleotide
atcgaacgattaggtctgatctgcgcttacggtgttttagtcccttagattaac

SEQ ID NO: 171802 - DNA, 53 bp, Artificial
  Synthetic oligonucleotide
acgcatgcttcacttctggtgctccctgatattgttgtataatctcattcgca

SEQ ID NO: 171803 - DNA, 52 bp, Artificial
  Synthetic oligonucleotide
tatgaaaaccatacagcgtgtgggcatcttcgcgaacgatcaaatgagtata

SEQ ID NO: 171804 - DNA, 52 bp, Artificial
  Synthetic oligonucleotide
agccattggcgcagggggattagaagttgccatggccattgcgggatatcct

SEQ ID NO: 171805 - DNA, 52 bp, Artificial
  Synthetic oligonucleotide
cggcgcctagccgttgtggcattgaaaaatcgacttgcagggttccgcactg

SEQ ID NO: 171806 - DNA, 56 bp, Artificial
  Synthetic oligonucleotide
ctgcggaagtaaacggtgcagcagggtataccttcaacccgatgggtggttctgga

SEQ ID NO: 171807 - DNA, 56 bp, Artificial
  Synthetic oligonucleotide
tacgcgtaaccatggttcctgtcgtctgccgccagttatgagcaacttccaacgga

SEQ ID NO: 171808 - DNA, 55 bp, Artificial
  Synthetic oligonucleotide
gaaggatcagtaaagttagctgccacacctatggagttgctcactggtccaaatc

SEQ ID NO: 171809 - DNA, 50 bp, Artificial
  Synthetic oligonucleotide
cttgccggtataccttaatgcccttacggggaaaggggttcacttggtaa

SEQ ID NO: 171810 - DNA, 55 bp, Artificial
  Synthetic oligonucleotide
gacacctattctaccgatttgttcactggtcctaatcgctctttcacatttgacg

SEQ ID NO: 171811 - DNA, 55 bp, Artificial
  Synthetic oligonucleotide
gacttcagattgggtttcagggtacaaccgaaactagatatgatgtttcgacaag

SEQ ID NO: 171812 - DNA, 55 bp, Artificial
  Synthetic oligonucleotide
ctgctgtttcgcattgcgttgaggtaggttaaatctggaagtacaggatttgcgt

SEQ ID NO: 171813 - DNA, 55 bp, Artificial
  Synthetic oligonucleotide
gatgattcgaactctcagcaatgatgacggatactatcgcatcgaaaatttaccc

SEQ ID NO: 171814 - DNA, 55 bp, Artificial
  Synthetic oligonucleotide
gcacacttacgttaaatgcgcaaaatcctggtagtacctatttgtggaacgatgg

SEQ ID NO: 171815 - DNA, 55 bp, Artificial
  Synthetic oligonucleotide
ctgcggttgaataacactgacgcaacgggtattacacttgcacaagcattgaatg

SEQ ID NO: 171816 - DNA, 55 bp, Artificial
  Synthetic oligonucleotide
gcagtggtatatggagttcacaagttgccacgctaaacttacaagtgattccacc

SEQ ID NO: 171817 - DNA, 59 bp, Artificial
  Synthetic oligonucleotide
gcacttcctggtcggacgtaggcggcagtgttactggtactagtgcaaatgggattcgc

SEQ ID NO: 171818 - DNA, 55 bp, Artificial
  Synthetic oligonucleotide
gcccagttgtctagattcacttttatttcgcgtgcatacagcaatcctgtgtggt

SEQ ID NO: 171819 - DNA, 55 bp, Artificial
  Synthetic oligonucleotide
gcggctaacaattttgctgcgcatactggtaaggtatccttcgccactttcgggg

SEQ ID NO: 171820 - DNA, 55 bp, Artificial
  Synthetic oligonucleotide
ggaacttcgataaagagacgattcgttcatatcacgaaaatcgagatttcccggc

SEQ ID NO: 171821 - DNA, 55 bp, Artificial
  Synthetic oligonucleotide
gggatgcgtaaagcaaagttcctttgcgtctattaatgcaatcgataactgtagg

SEQ ID NO: 171822 - DNA, 55 bp, Artificial
  Synthetic oligonucleotide
gtctacaatgtctcaaggtagcgagcgtgagccacttactacaaagggcttacgt

SEQ ID NO: 171823 - DNA, 55 bp, Artificial
  Synthetic oligonucleotide
gtgattgctcgtgtaatcaacaatgcgtaccgtaaagaacctcaattgtttatcg

SEQ ID NO: 171824 - DNA, 55 bp, Artificial
  Synthetic oligonucleotide
gttctaaagagagctagggccattgcagagggtactgaggtgaaaatttcagagc

SEQ ID NO: 171825 - DNA, 55 bp, Artificial
  Synthetic oligonucleotide
gttcttaacttggtaggtcaggctgtatactctgagcaagtaagcatcaacggtg

SEQ ID NO: 171826 - DNA, 55 bp, Artificial
  Synthetic oligonucleotide
tacatggtggccactatcaacaatggcggtgggttttatagcgtagaaacttacg

SEQ ID NO: 171827 - DNA, 55 bp, Artificial
  Synthetic oligonucleotide
tctcagctagtagttcccgatgcacaatttgtccaactttggcacccgaaagatc

SEQ ID NO: 171828 - DNA, 60 bp, Artificial
  Synthetic oligonucleotide
gggtgtcaccgctgtttgtgtatgctcgcctgctaaatcagtcaggcttcgggcttgtca

SEQ ID NO: 171829 - DNA, 55 bp, Artificial
  Synthetic oligonucleotide
tcttatgcgcaattggcaaactggacacctgttcccggcggaacgaatttcccga

SEQ ID NO: 171830 - DNA, 55 bp, Artificial
  Synthetic oligonucleotide
ttgaatgttaagggtaattcggaaggtaatgcaggccattgttcttgagcgagtg

SEQ ID NO: 171831 - DNA, 55 bp, Artificial
  Synthetic oligonucleotide
ttgccaatcactattacaattggtgcgcgcaagcgtttagagttgttgcgtacac

SEQ ID NO: 171832 - DNA, 55 bp, Artificial
  Synthetic oligonucleotide
aaagtctcgcgttcttcggcactccattcgcccaagacataatctacttgttgcc

SEQ ID NO: 171833 - DNA, 55 bp, Artificial
  Synthetic oligonucleotide
cgtgttccgacatgtagtgtccagatttcatagagtttgcaccaacgtagatgat

SEQ ID NO: 171834 - DNA, 54 bp, Artificial
  Synthetic oligonucleotide
cgggagccacagttttcgttcgtttagaagtccagcccatagggtttgtctgcc

SEQ ID NO: 171835 - DNA, 55 bp, Artificial
  Synthetic oligonucleotide
aaatggactaattgtagcctttcacgttttaggtaagctcacagtgtcgaggtta

SEQ ID NO: 171836 - DNA, 55 bp, Artificial
  Synthetic oligonucleotide
atccaagcgcaagtagactgaagtataccgatcaaatgcgaaatattcgggatac

SEQ ID NO: 171837 - DNA, 55 bp, Artificial
  Synthetic oligonucleotide
attgcaattggtcgaattctttaattcggtgtcgatagctgatgtactttcgctc

SEQ ID NO: 171838 - DNA, 55 bp, Artificial
  Synthetic oligonucleotide
caagtagattttacgcagtttagtagagtcttctggtattggctggctcaatgcg

SEQ ID NO: 171839 - DNA, 59 bp, Artificial
  Synthetic oligonucleotide
cgcgcaaagtcatgtgcgtagcacctctcgggaaagcaacatcgttcaacggaaccagg

SEQ ID NO: 171840 - DNA, 55 bp, Artificial
  Synthetic oligonucleotide
caagtgccgtgcgaacccaacaaacccgatccattatctgtcaacacctctcgga

SEQ ID NO: 171841 - DNA, 55 bp, Artificial
  Synthetic oligonucleotide
catccgttgaaccgctaaaattgggtgtattggaactgggatcatacgaatagtc

SEQ ID NO: 171842 - DNA, 55 bp, Artificial
  Synthetic oligonucleotide
cattggaagtacatacggaaatgacgcattcatacgcaacgctgaagacaaacgc

SEQ ID NO: 171843 - DNA, 54 bp, Artificial
  Synthetic oligonucleotide
ttattcgatacctactttcttcagtatatgcggtggcagaccaatattgtgcat

SEQ ID NO: 171844 - DNA, 54 bp, Artificial
  Synthetic oligonucleotide
gtccaagtgcctaagccctttaggagctaacaggtaatacaagtatttcccgta

SEQ ID NO: 171845 - DNA, 53 bp, Artificial
  Synthetic oligonucleotide
cgttagtttcggattcgtatattgctcaaaacggactccattgtatcgataca

SEQ ID NO: 171846 - DNA, 53 bp, Artificial
  Synthetic oligonucleotide
tccggaattacgtgaccaattgagagctgcgtcctacgatcagtcgccagtta

SEQ ID NO: 171847 - DNA, 53 bp, Artificial
  Synthetic oligonucleotide
gcaatggcagtaggcacgcatcccgtgtaagccttaccacaagggccacttcc

SEQ ID NO: 171848 - DNA, 52 bp, Artificial
  Synthetic oligonucleotide
gctcgcgcccgcattattgtgttccagtggttacttcgatttatacttcgaa

SEQ ID NO: 171849 - DNA, 52 bp, Artificial
  Synthetic oligonucleotide
ctgcacatttacacgcaagcttccgtcacctggccaaagcgtggggtttatg

SEQ ID NO: 171850 - DNA, 58 bp, Artificial
  Synthetic oligonucleotide
tcggacgtaggcggcagtgttactggtactagtgcaaatgggattcgcgacctcgtac

SEQ ID NO: 171851 - DNA, 52 bp, Artificial
  Synthetic oligonucleotide
cgcgaccgtcttgaaattcatagtccagggttgttaccattaggcgttacac

SEQ ID NO: 171852 - DNA, 51 bp, Artificial
  Synthetic oligonucleotide
ctttcaggcgcccctcccgagggagacataactttgtgctccgcttacgga

SEQ ID NO: 171853 - DNA, 51 bp, Artificial
  Synthetic oligonucleotide
cgctgctggggccgtggtgttggaaggcacacacattgaatcgggaagcat

SEQ ID NO: 171854 - DNA, 51 bp, Artificial
  Synthetic oligonucleotide
aaccgggaccccaattatggctacagccgatggtgaggtgattgctgcggc

SEQ ID NO: 171855 - DNA, 51 bp, Artificial
  Synthetic oligonucleotide
aaccttaactctacgccacctttcaggccgtgggtgctttggctggcggtt

SEQ ID NO: 171856 - DNA, 51 bp, Artificial
  Synthetic oligonucleotide
aactcataggctcctcttgcacagcctacagcctgccaggctaccccggct

SEQ ID NO: 171857 - DNA, 51 bp, Artificial
  Synthetic oligonucleotide
agcctggtagctgtgacagggttgcctacggcccggctacttttgctgcca

SEQ ID NO: 171858 - DNA, 51 bp, Artificial
  Synthetic oligonucleotide
agctgtgacagggttgcctacggcccggctacttttgctgccagctactct

SEQ ID NO: 171859 - DNA, 51 bp, Artificial
  Synthetic oligonucleotide
taaaaggttcgccaggtacgggggatgtagcatgtggttcgtgccccaccc

SEQ ID NO: 171860 - DNA, 51 bp, Artificial
  Synthetic oligonucleotide
cctgggaaggtggatttcgtgtgccatgtgctatccgttggcctggggtga

SEQ ID NO: 171861 - DNA, 60 bp, Artificial
  Synthetic oligonucleotide
cggacaagctaagctgagattcgcgactccgattgtgggagctccgtgctacaaccctga

SEQ ID NO: 171862 - DNA, 51 bp, Artificial
  Synthetic oligonucleotide
caaaaggataggctgtggagcccggtgtttgccatgccaagtggtgcggca

SEQ ID NO: 171863 - DNA, 51 bp, Artificial
  Synthetic oligonucleotide
gtggccggagatgctgccctactgtgtgaccccagcgacacacaggctatc

SEQ ID NO: 171864 - DNA, 51 bp, Artificial
  Synthetic oligonucleotide
caacgtgcgggcaccccacactagcacaccccttccggtaaatgcccggat

SEQ ID NO: 171865 - DNA, 51 bp, Artificial
  Synthetic oligonucleotide
gcagagccgatggctaccccggccctggaattatcactgctgcaccgagaa

SEQ ID NO: 171866 - DNA, 51 bp, Artificial
  Synthetic oligonucleotide
ggggtggagttggtcacgacctgtcacacattcggccgaaaggctcgcctg

SEQ ID NO: 171867 - DNA, 51 bp, Artificial
  Synthetic oligonucleotide
cccaaccctaccgaacctccagctccccagcccgaagtaacggaggagtta

SEQ ID NO: 171868 - DNA, 51 bp, Artificial
  Synthetic oligonucleotide
ccatggatgatttgcataccagtgcgtccggccttaatgccgcggccactc

SEQ ID NO: 171869 - DNA, 51 bp, Artificial
  Synthetic oligonucleotide
ccacttgggtcattcagctggcaaataccccacggcccaccgaaatgcgta

SEQ ID NO: 171870 - DNA, 50 bp, Artificial
  Synthetic oligonucleotide
cgccttccctacggccaatttctgccaaagccaccacttcgcttcgctct

SEQ ID NO: 171871 - DNA, 50 bp, Artificial
  Synthetic oligonucleotide
gtggcgacacttgctattgcgagcgcattcctggtatcgggcctgagcgc

SEQ ID NO: 171872 - DNA, 59 bp, Artificial
  Synthetic oligonucleotide
gttgttccttgcacttatgttgcgccagttgaaatcaggcggacgctgcgcggtcattg

SEQ ID NO: 171873 - DNA, 50 bp, Artificial
  Synthetic oligonucleotide
cctcagaggcaagccctacttccagctgattggaaacgggctccacggcc

SEQ ID NO: 171874 - DNA, 50 bp, Artificial
  Synthetic oligonucleotide
ccccacacaccataggcgttgattacttccttctcagtatcggccaaaag

SEQ ID NO: 171875 - DNA, 50 bp, Artificial
  Synthetic oligonucleotide
tgctaatttcactggttatatcactggctgctgtttcgctagttgtatac

SEQ ID NO: 171876 - DNA, 50 bp, Artificial
  Synthetic oligonucleotide
ttgccggcccacctatattcacaccctgcccataagcggttggtaccgcc

SEQ ID NO: 171877 - DNA, 50 bp, Artificial
  Synthetic oligonucleotide
tttccatccaacgtgcgggcaccccacactagcacaccccttccggtaaa

SEQ ID NO: 171878 - DNA, 58 bp, Artificial
  Synthetic oligonucleotide
aacggtgcagcagggtataccttcaacccgatgggtggttctggagcaagtgcacaag

SEQ ID NO: 171879 - DNA, 57 bp, Artificial
  Synthetic oligonucleotide
agcgcgtgggcacaaaaactgtgacaaataccgtagcctgagcgatttagcaggcga

SEQ ID NO: 171880 - DNA, 55 bp, Artificial
  Synthetic oligonucleotide
cagaccgagtagacctgttaaggaaaatgggctttgaggtatattatggggatgt

SEQ ID NO: 171881 - DNA, 55 bp, Artificial
  Synthetic oligonucleotide
gcctataattagttgggccagaactattgttgacaaatcaagtagaggtggtgct

SEQ ID NO: 171882 - DNA, 55 bp, Artificial
  Synthetic oligonucleotide
ggggccactatattaccacgttgtcagtggtggagaaatgagcacttcctatggt

SEQ ID NO: 171883 - DNA, 55 bp, Artificial
  Synthetic oligonucleotide
ggtccactggtcgaatgacttcagttgcaaccccattcgcacgcatgataccctc

SEQ ID NO: 171884 - DNA, 55 bp, Artificial
  Synthetic oligonucleotide
ggttggccatgaaagctagtaacgagattatttgggagcttgaccaccaaacctg

SEQ ID NO: 171885 - DNA, 55 bp, Artificial
  Synthetic oligonucleotide
tacttgaaacttctcgcggatatgtgcctgacttttcattgggaataagccggct

SEQ ID NO: 171886 - DNA, 55 bp, Artificial
  Synthetic oligonucleotide
tagtcgccgaaactccaatagatcctgaacccacacctgaaaccacttgggaccc

SEQ ID NO: 171887 - DNA, 55 bp, Artificial
  Synthetic oligonucleotide
tcggaaaagcccatagtagatggccaactaaatgaatccgcatggcaagccgcag

SEQ ID NO: 171888 - DNA, 55 bp, Artificial
  Synthetic oligonucleotide
tcgttatacctgatatgtctttcgtcaggcctagggtgtacagttattccttgcg

SEQ ID NO: 171889 - DNA, 54 bp, Artificial
  Synthetic oligonucleotide
aacactttcgcaggtagataaataattggtattgactcctgtacgggaaaggtc

SEQ ID NO: 171890 - DNA, 55 bp, Artificial
  Synthetic oligonucleotide
agcaacgtaagtctgatttattgcaggacttctaatgtcgataaccggatcgtta

SEQ ID NO: 171891 - DNA, 51 bp, Artificial
  Synthetic oligonucleotide
cccaaacagtttcccggaggaagaaaggtggacgatcctatagggtttata

SEQ ID NO: 171892 - DNA, 54 bp, Artificial
  Synthetic oligonucleotide
cacacctgaactgtactgtaggttaccatcatcggccaaactattaatccctcc

SEQ ID NO: 171893 - DNA, 53 bp, Artificial
  Synthetic oligonucleotide
ttggttacggcctttactatagggcactccttgacattggcacttgcgacact

SEQ ID NO: 171894 - DNA, 53 bp, Artificial
  Synthetic oligonucleotide
atttgactgggcaccgggaactcctaagtcagacatggcatgttcattactga

SEQ ID NO: 171895 - DNA, 53 bp, Artificial
  Synthetic oligonucleotide
caggcttgtgctcaattcagatgatgtgcagtatggagggtttggccgaatag

SEQ ID NO: 171896 - DNA, 53 bp, Artificial
  Synthetic oligonucleotide
cttcagtgttggcaggaacgtttatggaataatctccgtcaagcttggttacg

SEQ ID NO: 171897 - DNA, 52 bp, Artificial
  Synthetic oligonucleotide
tgccggtgcatggaaggtaatcggggaagctagagagggaggtactgtagga

SEQ ID NO: 171898 - DNA, 52 bp, Artificial
  Synthetic oligonucleotide
tctaattctcgtataggttccacatcggcatatattaccattcatggcctgg

SEQ ID NO: 171899 - DNA, 48 bp, Artificial
  Synthetic oligonucleotide
aagggtacttccgaaccggggcagcgtacttccaaacctacccaccgg

SEQ ID NO: 171900 - DNA, 51 bp, Artificial
  Synthetic oligonucleotide
aatagcgttcattgtgcgtgcccggccaattgggctccgacaggctttcag

SEQ ID NO: 171901 - DNA, 51 bp, Artificial
  Synthetic oligonucleotide
accgccgtcaaaccaataggcatcccctaaatgtcctgccggcaaagcggc

SEQ ID NO: 171902 - DNA, 55 bp, Artificial
  Synthetic oligonucleotide
cctgtttcttaaaacatactcaggattaccctcactcaatgcctgccccggtgcc

SEQ ID NO: 171903 - DNA, 51 bp, Artificial
  Synthetic oligonucleotide
acctctgttacagttcccccggcccatagcgcaagcgtgtccgcaggtgtg

SEQ ID NO: 171904 - DNA, 51 bp, Artificial
  Synthetic oligonucleotide
acgggcctggagtgggtgggacgatgctgtgagtaatggctgcacctcctc

SEQ ID NO: 171905 - DNA, 51 bp, Artificial
  Synthetic oligonucleotide
acggggctagcaacaatgccaatagcacgtaccctccggtccagcccatta

SEQ ID NO: 171906 - DNA, 51 bp, Artificial
  Synthetic oligonucleotide
agacggaatgcctatttcaagtggtggtcgtaccatagatcttaacccgaa

SEQ ID NO: 171907 - DNA, 51 bp, Artificial
  Synthetic oligonucleotide
gacggggttacccattacttttgcccgaccagtgaccatgtccggggagcc

SEQ ID NO: 171908 - DNA, 51 bp, Artificial
  Synthetic oligonucleotide
gaccatgggcggaaccgtgattcgggaaaacaccatcagtgagctgggcca

SEQ ID NO: 171909 - DNA, 51 bp, Artificial
  Synthetic oligonucleotide
ccacctgcattggaggccccacatgcacctgcatgcctaaatagccttcgg

SEQ ID NO: 171910 - DNA, 51 bp, Artificial
  Synthetic oligonucleotide
ccacgcccgggttttgaatggtgatcacggggtcaagttcccgctcagcat

SEQ ID NO: 171911 - DNA, 51 bp, Artificial
  Synthetic oligonucleotide
atgcgttgggagtccaaatggagtgtgggcttcccgggttggcacctggag

SEQ ID NO: 171912 - DNA, 51 bp, Artificial
  Synthetic oligonucleotide
cggagccgggtgggtagggctagatccaagtctgggcctgatggccgataa

SEQ ID NO: 171913 - DNA, 55 bp, Artificial
  Synthetic oligonucleotide
ctgacttgctgcgcatcaggacggggcactacaaaggttgaactctgctggagtg

SEQ ID NO: 171914 - DNA, 51 bp, Artificial
  Synthetic oligonucleotide
cgcgtcacgggttcatgcttacgctcccgatcgattgcctccgtttgggaa

SEQ ID NO: 171915 - DNA, 50 bp, Artificial
  Synthetic oligonucleotide
tttgcccgggccttctgtctgcctgccatgttcgatctcctttcgcacta

SEQ ID NO: 171916 - DNA, 50 bp, Artificial
  Synthetic oligonucleotide
cactccaatgcccccgtttgttcacccacacgggctgcacttatgaccgg

SEQ ID NO: 171917 - DNA, 50 bp, Artificial
  Synthetic oligonucleotide
ttccacacgtccggttcatccaccacctctgttacagttcccccggccca

SEQ ID NO: 171918 - DNA, 50 bp, Artificial
  Synthetic oligonucleotide
attccgggcagccgggaggaacgctaacagttcaagtgaggggagtaggc

SEQ ID NO: 171919 - DNA, 50 bp, Artificial
  Synthetic oligonucleotide
tcgcctgccgccgtatgcctgtcatcgagcgaaattccataccgctcaca

SEQ ID NO: 171920 - DNA, 50 bp, Artificial
  Synthetic oligonucleotide
tcccgactagggctaatgacggcatcctccaaagcacgctaccgaacgct

SEQ ID NO: 171921 - DNA, 50 bp, Artificial
  Synthetic oligonucleotide
aatagccccggtctacgaacagggccttccaattcgactcttgtctggat

SEQ ID NO: 171922 - DNA, 50 bp, Artificial
  Synthetic oligonucleotide
taggtgcgaggcatggggcctgaaatggccaattgatcagcggtaaccgg

SEQ ID NO: 171923 - DNA, 50 bp, Artificial
  Synthetic oligonucleotide
cgataggtggatcagtatcgggaggaaggtttctttgggccctagacact

SEQ ID NO: 171924 - DNA, 55 bp, Artificial
  Synthetic oligonucleotide
ctgggtccttatctgctccgtttatctctatggtgtaacctcgcatagtgaagtt

SEQ ID NO: 171925 - DNA, 50 bp, Artificial
  Synthetic oligonucleotide
gttgggtgcctattgttggaccgctcgtaggggctgctttagccggagga

SEQ ID NO: 171926 - DNA, 50 bp, Artificial
  Synthetic oligonucleotide
acagcagcggggtttcccctgagttgcttcgcttcagggcaggttcgtta

SEQ ID NO: 171927 - DNA, 50 bp, Artificial
  Synthetic oligonucleotide
ggcgtagacataggcaggttcaccggggtctgcaggataccagttgcgga

SEQ ID NO: 171928 - DNA, 50 bp, Artificial
  Synthetic oligonucleotide
ggcaaggcatactttccgtcccgggatagccatcactgctcccaccggac

SEQ ID NO: 171929 - DNA, 50 bp, Artificial
  Synthetic oligonucleotide
atcacctgataccacattaaatgcgcgaatatacccgggtgcagcatctg

SEQ ID NO: 171930 - DNA, 49 bp, Artificial
  Synthetic oligonucleotide
aggggccaaacaagggtacttccgaaccggggcagcgtacttccaaacc

SEQ ID NO: 171931 - DNA, 50 bp, Artificial
  Synthetic oligonucleotide
gccctcccatctcagcggttcggcaacgcatcagtgcatagagggtacgg

SEQ ID NO: 171932 - DNA, 50 bp, Artificial
  Synthetic oligonucleotide
gccccaatgcatttgggatggttttgcatcgggccggctttgtgggggat

SEQ ID NO: 171933 - DNA, 50 bp, Artificial
  Synthetic oligonucleotide
agccggtggtagacatgtcgttggccatcaggtgaaccgagagccaagcc

SEQ ID NO: 171934 - DNA, 54 bp, Artificial
  Synthetic oligonucleotide
gacccggttgtacctgaaataaaccagaccttgatttatcctaaccctgctcag

SEQ ID NO: 171935 - DNA, 55 bp, Artificial
  Synthetic oligonucleotide
gcaattcacgatggcataccccattttcaaattagcgccactctctgcaagtcgt

SEQ ID NO: 171936 - DNA, 55 bp, Artificial
  Synthetic oligonucleotide
gccctgatggcgccttgtatattaccgacatgtaccgtggcctgatccaacatgc

SEQ ID NO: 171937 - DNA, 55 bp, Artificial
  Synthetic oligonucleotide
gcccttttatgagtcaatacggtaagggaggcacaagtttgagttggatcattcg

SEQ ID NO: 171938 - DNA, 55 bp, Artificial
  Synthetic oligonucleotide
catgacagacatcaacaacgtgtcaaggacggcgttcgtgttggcttaacaacac

SEQ ID NO: 171939 - DNA, 55 bp, Artificial
  Synthetic oligonucleotide
aaggcagggccaccccatgctccccatccgtcagtatttccgcggtgtcattgcg

SEQ ID NO: 171940 - DNA, 52 bp, Artificial
  Synthetic oligonucleotide
caccgttccgaacgggttctcgttttcccgtcgacgcgaagcgccttgtctg

SEQ ID NO: 171941 - DNA, 55 bp, Artificial
  Synthetic oligonucleotide
cgcgtctttcgggtgaggcagtcccacgaaaggcggtgcactggtgagtcaacga

SEQ ID NO: 171942 - DNA, 55 bp, Artificial
  Synthetic oligonucleotide
cggtcctttccgcgtgccgtagtctttcatgggataaatgtatcacgagagcctc

SEQ ID NO: 171943 - DNA, 55 bp, Artificial
  Synthetic oligonucleotide
attcgaacaccccgagtggcgagggctccccattcacccaatcgcttcgcagctc

SEQ ID NO: 171944 - DNA, 55 bp, Artificial
  Synthetic oligonucleotide
ctctacccaggcccctggaatcgttgaatcaatccagcgttcgggcgtccgcgct

SEQ ID NO: 171945 - DNA, 52 bp, Artificial
  Synthetic oligonucleotide
accgggtaattggccgccactcgtacgtagtgaccggaatgggcccaatcgg

SEQ ID NO: 171946 - DNA, 55 bp, Artificial
  Synthetic oligonucleotide
tgctacgcccgagccaccgatacgcacagtggataactctacggggaagagggtt

SEQ ID NO: 171947 - DNA, 55 bp, Artificial
  Synthetic oligonucleotide
tgattcgcaccagcaaccattcccgagaggtcacttcgtattgtcaccagaggcg

SEQ ID NO: 171948 - DNA, 55 bp, Artificial
  Synthetic oligonucleotide
tcaatgtgaagagatgtgcaaggcgagtctcaaaggccgcaattggtctcatgca

SEQ ID NO: 171949 - DNA, 55 bp, Artificial
  Synthetic oligonucleotide
catgatgggttgggtccgtggaatacaacgccctaggttgggttcacagaatgcg

SEQ ID NO: 171950 - DNA, 55 bp, Artificial
  Synthetic oligonucleotide
aggtacacgtgcccagcagccttccggtgccatggacgcacgcttgaggacctca

SEQ ID NO: 171951 - DNA, 55 bp, Artificial
  Synthetic oligonucleotide
gttggtcaaccaccccaacttccgccacctcgacttctctcatttgttgatcgcc

SEQ ID NO: 171952 - DNA, 55 bp, Artificial
  Synthetic oligonucleotide
gtgacgctgtgcgtctaggtgaaactgtgcatgcgttcagtgttctgcgagaggg

SEQ ID NO: 171953 - DNA, 55 bp, Artificial
  Synthetic oligonucleotide
ggggcacctgtggccatatcgcgcacttacacgtataagagcccagggaaagtag

SEQ ID NO: 171954 - DNA, 54 bp, Artificial
  Synthetic oligonucleotide
gggaccccttccgagatccaccattccgaacggaaggcgggagacattggtcac

SEQ ID NO: 171955 - DNA, 55 bp, Artificial
  Synthetic oligonucleotide
ggatgagattgagaccctttcgatcagtcccgatggagggtacatcgccgcaggg

SEQ ID NO: 171956 - DNA, 55 bp, Artificial
  Synthetic oligonucleotide
gcatgcaaggtaatctccagccgatagatttgcaggcgtttaacagcagtgaatc

SEQ ID NO: 171957 - DNA, 55 bp, Artificial
  Synthetic oligonucleotide
cttcgcggagcttcccagaggcacctggccggaggctcctcactcggcctgggta

SEQ ID NO: 171958 - DNA, 54 bp, Artificial
  Synthetic oligonucleotide
caggcccactgggaaccgtcaaaccaccgctggggccatcgtggttcaccgcgc

SEQ ID NO: 171959 - DNA, 53 bp, Artificial
  Synthetic oligonucleotide
aagcgaggcccatagaatgaggccgcccttccacgcacctgtttccgcacccc

SEQ ID NO: 171960 - DNA, 55 bp, Artificial
  Synthetic oligonucleotide
catttccgtgaagtgtaagccctccctctgacgttccctgccggggagtgcgcgt

SEQ ID NO: 171961 - DNA, 53 bp, Artificial
  Synthetic oligonucleotide
gggctattcgtcgtccgggttctttagccaggccaacgcttcgtcgcgtgtct

SEQ ID NO: 171962 - DNA, 53 bp, Artificial
  Synthetic oligonucleotide
actggcaagtgcacccgcccaccacttctgtatccgcatgagggcctgcctct

SEQ ID NO: 171963 - DNA, 52 bp, Artificial
  Synthetic oligonucleotide
ggggcctgacgagaagtggctttacgtggaacgggtggccacgagagacacc

SEQ ID NO: 171964 - DNA, 51 bp, Artificial
  Synthetic oligonucleotide
aatgctcaagtatctcgttcgtgcactttctctacttgctcctagctccca

SEQ ID NO: 171965 - DNA, 51 bp, Artificial
  Synthetic oligonucleotide
ccttcccaagaacggaatgagcgcagtcatgcaaagtggcaacgcgagaga

SEQ ID NO: 171966 - DNA, 51 bp, Artificial
  Synthetic oligonucleotide
tcttgcccggtacgctcctctgtgcagccgcgtgtgcaaatcccgaacgtt

SEQ ID NO: 171967 - DNA, 51 bp, Artificial
  Synthetic oligonucleotide
ttttgtggcagtgcggtgcacacttcctgatccctctcgtggacagagcct

SEQ ID NO: 171968 - DNA, 50 bp, Artificial
  Synthetic oligonucleotide
ccgctgacttccgaggagtggtgcgatgggtctcaagatgtcggaaatcc

SEQ ID NO: 171969 - DNA, 50 bp, Artificial
  Synthetic oligonucleotide
ctcgaagttacaaatgagtgtctcgttggagaacagccacacacttccga

SEQ ID NO: 171970 - DNA, 50 bp, Artificial
  Synthetic oligonucleotide
taaaggtgaaggatcacgattaaccgagcaagtttagaggcaggtgcaca

SEQ ID NO: 171971 - DNA, 55 bp, Artificial
  Synthetic oligonucleotide
cccactgaacggaggcatcctcggtggcgtagagagggtggactcactccatgag

SEQ ID NO: 171972 - DNA, 50 bp, Artificial
  Synthetic oligonucleotide
aagcacctcgcccgcgaagctccggacatcccccagcaagaggttctcaa

SEQ ID NO: 171973 - DNA, 50 bp, Artificial
  Synthetic oligonucleotide
aagagtcagcgcgagagcgtagaccggagtgccacgaacagcgagccagg

SEQ ID NO: 171974 - DNA, 50 bp, Artificial
  Synthetic oligonucleotide
aagagggccatcaggggatacggatcaacgggtgcaaccagcggtcctac

SEQ ID NO: 171975 - DNA, 50 bp, Artificial
  Synthetic oligonucleotide
aagacactccacggtccttgaacgggaggggtgtgtcttgccgtggcctt

SEQ ID NO: 171976 - DNA, 50 bp, Artificial
  Synthetic oligonucleotide
aactcggcaaaactgcgtgcggagggtaaccaaggggctgctgactcgcc

SEQ ID NO: 171977 - DNA, 50 bp, Artificial
  Synthetic oligonucleotide
aacgtacccgtgcctcgacctccgtgaagccatcctcgggtgtgacgttg

SEQ ID NO: 171978 - DNA, 50 bp, Artificial
  Synthetic oligonucleotide
aacggttttcccggggcgaccgagcatgtgaagttggactcacgtggcgc

SEQ ID NO: 171979 - DNA, 50 bp, Artificial
  Synthetic oligonucleotide
aacgccttggagcgcatccacggtccgtatccggagcaactcttccggag

SEQ ID NO: 171980 - DNA, 50 bp, Artificial
  Synthetic oligonucleotide
aaccgaaggcgctctggaggcacccatggctcagcgaccgaactatgaga

SEQ ID NO: 171981 - DNA, 50 bp, Artificial
  Synthetic oligonucleotide
aacccggatcggtcacacgaaggctcgcgccgggcagagaagcaccaaat

SEQ ID NO: 171982 - DNA, 55 bp, Artificial
  Synthetic oligonucleotide
cccatcccttcacgaatagcgcattgccttgtcaggcgggtctaccattgccagg

SEQ ID NO: 171983 - DNA, 50 bp, Artificial
  Synthetic oligonucleotide
aaccacgggttgaggctcccgcatccaacctaacagggagggaatgtgcc

SEQ ID NO: 171984 - DNA, 50 bp, Artificial
  Synthetic oligonucleotide
aacattgaccgcccgcgtcaaggtttgcccagcccgtgtggacgcgttga

SEQ ID NO: 171985 - DNA, 50 bp, Artificial
  Synthetic oligonucleotide
aaagggagtcgtgctcatggggacgggcgatagtgaactggggccgtgcc

SEQ ID NO: 171986 - DNA, 50 bp, Artificial
  Synthetic oligonucleotide
aaacgtgcgcttctcgcctggggtagcaatctgagccttcatgcaccccg

SEQ ID NO: 171987 - DNA, 50 bp, Artificial
  Synthetic oligonucleotide
aaaccggttggcgtctccccagatgacgagcgttggagcgcggatgccag

SEQ ID NO: 171988 - DNA, 50 bp, Artificial
  Synthetic oligonucleotide
aaaactgcgtgcggagggtaaccaaggggctgctgactcgccgcgaaaaa

SEQ ID NO: 171989 - DNA, 50 bp, Artificial
  Synthetic oligonucleotide
aaaactgcgattcacctgggaccatcaggggcacgcgacagtgctcgcgg

SEQ ID NO: 171990 - DNA, 50 bp, Artificial
  Synthetic oligonucleotide
accattcacgagagtacgcgctcgatgctcgttcgggccacgcggctcaa

SEQ ID NO: 171991 - DNA, 50 bp, Artificial
  Synthetic oligonucleotide
accagggggcgtatggccaagccgaacctctgctccagcgtgcactcact

SEQ ID NO: 171992 - DNA, 50 bp, Artificial
  Synthetic oligonucleotide
accaggaatcgtgtgacaagggtgccgtgcaagtcgcagcctcgcggaac

SEQ ID NO: 171993 - DNA, 55 bp, Artificial
  Synthetic oligonucleotide
cacgcgaatcttctccgtgttgggccccgtcacgccgtcaatgggaccggtgtaa

SEQ ID NO: 171994 - DNA, 50 bp, Artificial
  Synthetic oligonucleotide
acatacgggggcggaaactttcgggagtgcggctgaatttccccggggtg

SEQ ID NO: 171995 - DNA, 50 bp, Artificial
  Synthetic oligonucleotide
acaggaggccatgcccgaaacgagcggattggagggcggctgactgcccg

SEQ ID NO: 171996 - DNA, 50 bp, Artificial
  Synthetic oligonucleotide
acagctccatcgccacacgggtgttggccagggtcaagaggcgccccaac

SEQ ID NO: 171997 - DNA, 50 bp, Artificial
  Synthetic oligonucleotide
acagcctcgctgttctctacacagaccagggggcgtatggccaagccgaa

SEQ ID NO: 171998 - DNA, 50 bp, Artificial
  Synthetic oligonucleotide
acaccgctcaagagacgctccacccgccatgacgccccatcgtacaggct

SEQ ID NO: 171999 - DNA, 50 bp, Artificial
  Synthetic oligonucleotide
aattcggggtccgattgagactccgcaaacttcggtgcggctactcccgc

SEQ ID NO: 172000 - DNA, 50 bp, Artificial
  Synthetic oligonucleotide
aatgtctcctgcgtgcagtcgcagtgattcccaagcgtcctccaccccct

SEQ ID NO: 172001 - DNA, 50 bp, Artificial
  Synthetic oligonucleotide
aatgagctggagcgccaaggtttcgagcccagactccgagacgaacgcgc

SEQ ID NO: 172002 - DNA, 50 bp, Artificial
  Synthetic oligonucleotide
aatgacgtgcgttgtttccagcccccgcgccaagttccagcaaagtctct

SEQ ID NO: 172003 - DNA, 50 bp, Artificial
  Synthetic oligonucleotide
aatctccggacggacgccgttacctccgccgcagtcacctccactggtac

SEQ ID NO: 172004 - DNA, 55 bp, Artificial
  Synthetic oligonucleotide
ccgttagcagaggcgcaactctacgcagtattcggctactcaagcgacgtcgaag

SEQ ID NO: 172005 - DNA, 50 bp, Artificial
  Synthetic oligonucleotide
aatcggtgacacacgaaagccgtcaatcggcgggagccgggggttttcta

SEQ ID NO: 172006 - DNA, 50 bp, Artificial
  Synthetic oligonucleotide
aatacagccctggcgtgagcggtcgtaacatgcggccgaccaacccctca

SEQ ID NO: 172007 - DNA, 50 bp, Artificial
  Synthetic oligonucleotide
aagggcgcgcggtggaaaagagtgctgacccttatcttcgtgggatgggc

SEQ ID NO: 172008 - DNA, 50 bp, Artificial
  Synthetic oligonucleotide
aagccgggaccggatgccctggactagcaggacagtacagaaacgcgcat

SEQ ID NO: 172009 - DNA, 50 bp, Artificial
  Synthetic oligonucleotide
aagcccgggggattgttgtgggggcggactttcctcggcaaacagagggt

SEQ ID NO: 172010 - DNA, 55 bp, Artificial
  Synthetic oligonucleotide
cctcgaagtacgccagcaactcactgaggtctcggcaacagccaacggtcctccc

SEQ ID NO: 172011 - DNA, 55 bp, Artificial
  Synthetic oligonucleotide
cctcgcttcctcagccttgcacgctccatcttgttgaccctccgccgttccatcc

SEQ ID NO: 172012 - DNA, 53 bp, Artificial
  Synthetic oligonucleotide
cagtccccgtatgaacttaagactgaccgggaattaacgctgcttggggttgg

SEQ ID NO: 172013 - DNA, 56 bp, Artificial
  Synthetic oligonucleotide
ccgctaaccgagggcttccaattcttaggtcatcgagttagtatgcgttgggacta

SEQ ID NO: 172014 - DNA, 54 bp, Artificial
  Synthetic oligonucleotide
gcccctgccatttggatacgtcaggggcctgccattccggatagggtttacgtt

SEQ ID NO: 172015 - DNA, 55 bp, Artificial
  Synthetic oligonucleotide
gcaggttggacgattgttgactccgtagttaccggaaaaccctttgcatccctga

SEQ ID NO: 172016 - DNA, 57 bp, Artificial
  Synthetic oligonucleotide
gcaggtaataacgcgggcgacggtcgttgcttggaggcgcaaccgcctcattataat

SEQ ID NO: 172017 - DNA, 60 bp, Artificial
  Synthetic oligonucleotide
gcagaagtgcttctcgaaaacgacttgccgttgtcaaatcagcattgattcgaatcacca

SEQ ID NO: 172018 - DNA, 60 bp, Artificial
  Synthetic oligonucleotide
gcactccgtgcgtgcttctagaggggaatttatcggcagaggcgattggaaactcataag

SEQ ID NO: 172019 - DNA, 53 bp, Artificial
  Synthetic oligonucleotide
gcaaaagccgcaacgggcacaaaacctacggaagcgaccggggaacggtcatc

SEQ ID NO: 172020 - DNA, 60 bp, Artificial
  Synthetic oligonucleotide
gatgagggactagcaggacaagatcgtaagcggttaaggccgagtagccctcacaatgat

SEQ ID NO: 172021 - DNA, 60 bp, Artificial
  Synthetic oligonucleotide
gatcgctcgccaactagctcatcggttactaactcggtggccactacagaatggtatgac

SEQ ID NO: 172022 - DNA, 60 bp, Artificial
  Synthetic oligonucleotide
gagtagctcataaatccgtttggcataggtagaattaagggatatagctgccactaattg

SEQ ID NO: 172023 - DNA, 56 bp, Artificial
  Synthetic oligonucleotide
gaatagcttgacgttttcgtgcgttttaagggcttctaaggcctgatctagtagtg

SEQ ID NO: 172024 - DNA, 58 bp, Artificial
  Synthetic oligonucleotide
ccgtccccacttaacagctcggccttggttaactgctgctcattggccagcgggtcaa

SEQ ID NO: 172025 - DNA, 60 bp, Artificial
  Synthetic oligonucleotide
gaagtagatagaagcgactccggacaggttcgaactgccgccctattgatgcctgatgag

SEQ ID NO: 172026 - DNA, 59 bp, Artificial
  Synthetic oligonucleotide
gaagcaccactgattggagctttgggtaaattgggcacataggaaaccgccacaccaca

SEQ ID NO: 172027 - DNA, 55 bp, Artificial
  Synthetic oligonucleotide
gaaaccgaattgacaaggtatccaagggaaggggctcgaagacggacaattgctc

SEQ ID NO: 172028 - DNA, 59 bp, Artificial
  Synthetic oligonucleotide
cttgcctgtctgtaactcgtaggcaaacttattgacctcctgaaccagatccgctgagt

SEQ ID NO: 172029 - DNA, 58 bp, Artificial
  Synthetic oligonucleotide
cttccctactcgattagtgtcgtagttgactgtattatccgcctggccaatggtcaat

SEQ ID NO: 172030 - DNA, 50 bp, Artificial
  Synthetic oligonucleotide
cttaccgtataaattcgcccgttaggaagaaatacccctaatagaaaagc

SEQ ID NO: 172031 - DNA, 58 bp, Artificial
  Synthetic oligonucleotide
ctgtaccgactcctgataagcctgtcggacgtactcggcattagaagccgtcgtcaaa

SEQ ID NO: 172032 - DNA, 60 bp, Artificial
  Synthetic oligonucleotide
gtttgccgttcctacctgcccgtcagagcgatgatagcccataaatgtacgcccctgcca

SEQ ID NO: 172033 - DNA, 60 bp, Artificial
  Synthetic oligonucleotide
gttgtctgcgcctgaatctgatgactcaacgtctaatcggcgcagtttatggcaccggtt

SEQ ID NO: 172034 - DNA, 57 bp, Artificial
  Synthetic oligonucleotide
gtgtaagttacagtcatggagaccttattcctatccttacgtgcgtcccgattttga

SEQ ID NO: 172035 - DNA, 53 bp, Artificial
  Synthetic oligonucleotide
cctatacgttggtcaagttccgagggtttccaaggaatatctaaatggtgtaa

SEQ ID NO: 172036 - DNA, 56 bp, Artificial
  Synthetic oligonucleotide
gtgactactaccgggagcaagctcaggaaacggttatctacaaacaagcccaggaa

SEQ ID NO: 172037 - DNA, 58 bp, Artificial
  Synthetic oligonucleotide
gtcagatagtggatcaatgccctgcccttactggagtcaacactaagggggcgtacgg

SEQ ID NO: 172038 - DNA, 54 bp, Artificial
  Synthetic oligonucleotide
gtagcgttaactcccgatcggtcttgagttcatacgggccctgtccgaaggaaa

SEQ ID NO: 172039 - DNA, 57 bp, Artificial
  Synthetic oligonucleotide
gtactgtaaacggtatcaccccgtgtgatgacttcggcagaacattgtaccgaggcg

SEQ ID NO: 172040 - DNA, 60 bp, Artificial
  Synthetic oligonucleotide
ggttggatgtccgaccttggagcaatggctcagctaatggagtctacgtacagttacgag

SEQ ID NO: 172041 - DNA, 51 bp, Artificial
  Synthetic oligonucleotide
ggggataaaaacggcggctactgcttagcaaaacgacccctatttactaac

SEQ ID NO: 172042 - DNA, 57 bp, Artificial
  Synthetic oligonucleotide
gggatcaatgggttgggccggcacgtacaggcaaggcccgatagcggccgcaccgtc

SEQ ID NO: 172043 - DNA, 56 bp, Artificial
  Synthetic oligonucleotide
ggcttcgtccaactaaagcgcttagttgagttaatcgtctgtataacaataagtta

SEQ ID NO: 172044 - DNA, 55 bp, Artificial
  Synthetic oligonucleotide
ggcgagggttgtcattaagatggggcgtagccttgtttttcccgattccatcaac

SEQ ID NO: 172045 - DNA, 54 bp, Artificial
  Synthetic oligonucleotide
ggccagggctatgctttcctaacttcctgggttaacccatccaatccccaacag

SEQ ID NO: 172046 - DNA, 56 bp, Artificial
  Synthetic oligonucleotide
cctctggactcccgtagtatgaccgacaaaaagagtgttaccctgcgctttcgagc

SEQ ID NO: 172047 - DNA, 52 bp, Artificial
  Synthetic oligonucleotide
ggagcagagggggcggcaactataaatttagttaacctcgctttttactaac

SEQ ID NO: 172048 - DNA, 54 bp, Artificial
  Synthetic oligonucleotide
ggagaggctaatttgttaactatggaaaagtgcaacggtttaaagtagttgctg

SEQ ID NO: 172049 - DNA, 58 bp, Artificial
  Synthetic oligonucleotide
gcgggcgacggtcgttgcttggaggcgcaaccgcctcattataattgtctactcctac

SEQ ID NO: 172050 - DNA, 51 bp, Artificial
  Synthetic oligonucleotide
aaaagagaaacgggtttctgaaattcggatttaagaatacgaatgaaactg

SEQ ID NO: 172051 - DNA, 54 bp, Artificial
  Synthetic oligonucleotide
aatgatagggcctttcagggacatagacttaaaacgggttgagtagttagtata

SEQ ID NO: 172052 - DNA, 50 bp, Artificial
  Synthetic oligonucleotide
aaaccggacaccgcccactggaaaaaattaaggctccgtctggaaatacg

SEQ ID NO: 172053 - DNA, 53 bp, Artificial
  Synthetic oligonucleotide
aacagctagttataagcaccaacgacctagtaagaccggcgaaaacaaaggaa

SEQ ID NO: 172054 - DNA, 51 bp, Artificial
  Synthetic oligonucleotide
aaccggttcggacggattcatagcgaacaaagtgagcgggttttgtacccc

SEQ ID NO: 172055 - DNA, 53 bp, Artificial
  Synthetic oligonucleotide
acaggcctaaaaacgggatttggtagatcagaacgttggatcactccgtttcc

SEQ ID NO: 172056 - DNA, 60 bp, Artificial
  Synthetic oligonucleotide
aactgatacttgatacatcttcgttggtggatcgtctttgcgtacactggccactaccat

SEQ ID NO: 172057 - DNA, 57 bp, Artificial
  Synthetic oligonucleotide
cctgatccacgagtataagcaaagccctgacctaacctatcaaagctggtttttgta

SEQ ID NO: 172058 - DNA, 59 bp, Artificial
  Synthetic oligonucleotide
tgattgttgctattgccgagattaattaaatcgcttgagccgcctacattggcaaatac

SEQ ID NO: 172059 - DNA, 59 bp, Artificial
  Synthetic oligonucleotide
tgcatacgcccgtagattctccgttcggctgacgatcacatgaatgtgggtttgatcgc

SEQ ID NO: 172060 - DNA, 59 bp, Artificial
  Synthetic oligonucleotide
tgtggggcaaacgaaccgaacttaccagatgagtattccgcatcaaatactgtctaatc

SEQ ID NO: 172061 - DNA, 51 bp, Artificial
  Synthetic oligonucleotide
ggtacgagtcgagttactttaccgttctgaaaaatcccgaggccgttttca

SEQ ID NO: 172062 - DNA, 55 bp, Artificial
  Synthetic oligonucleotide
ataaggggcattattgtaaatggccggctcagtgaattcccaagaattttcggga

SEQ ID NO: 172063 - DNA, 59 bp, Artificial
  Synthetic oligonucleotide
agcggaaacattgccatccgctaaagccatcgttgcaagcgcccccagataagctcctc

SEQ ID NO: 172064 - DNA, 55 bp, Artificial
  Synthetic oligonucleotide
aaactgtaggcatagcactgataaaccgggaaggtcctcaccgtaagaaagagga

SEQ ID NO: 172065 - DNA, 54 bp, Artificial
  Synthetic oligonucleotide
tacgcataaaataccccgaaaatctccgtcaattacgcataaaataccgtcaat

SEQ ID NO: 172066 - DNA, 55 bp, Artificial
  Synthetic oligonucleotide
atgacttcggcagaacattgtaccgaggcggtatctaccaaggccggtacgggga

SEQ ID NO: 172067 - DNA, 56 bp, Artificial
  Synthetic oligonucleotide
gtcccccacaactaccggcactccccccacctatcttagtcatcatcgcttaccag

SEQ ID NO: 172068 - DNA, 60 bp, Artificial
  Synthetic oligonucleotide
cctggagaagactacgcagcggattccccgtcatgtacaggtcacgggcgacatctatgg

SEQ ID NO: 172069 - DNA, 57 bp, Artificial
  Synthetic oligonucleotide
aaactccgatggttggcgtgggtctgtgatggtctcgggtttgcccttgcgctggta

SEQ ID NO: 172070 - DNA, 58 bp, Artificial
  Synthetic oligonucleotide
tggtgtaacatgggcgggggatgatatagggagagtaacgtggggagcagctacggcc

SEQ ID NO: 172071 - DNA, 58 bp, Artificial
  Synthetic oligonucleotide
tatcagaatcgggggcccaggctgggcggtcggggtatgagctgacgccagtagaacg

SEQ ID NO: 172072 - DNA, 55 bp, Artificial
  Synthetic oligonucleotide
gaccgacaaatgtgaaggggctcgcaccaccaccttacggtcccgctctacggta

SEQ ID NO: 172073 - DNA, 58 bp, Artificial
  Synthetic oligonucleotide
tccaatcataagataagcttaaacgctccaagttgattagacgttcttctcctatcag

SEQ ID NO: 172074 - DNA, 56 bp, Artificial
  Synthetic oligonucleotide
gggcccagcgtggagctcgagtggcgaacaaacgggtctacactctaaaaacgtgc

SEQ ID NO: 172075 - DNA, 55 bp, Artificial
  Synthetic oligonucleotide
aaaacctgtccggtgatatctcgcaaaactactttcgaagctgattcttccgtaa

SEQ ID NO: 172076 - DNA, 58 bp, Artificial
  Synthetic oligonucleotide
ctcatgtcattgccgcaggtatatcccacgattttcccgtttgaagtggcaaaaagcg

SEQ ID NO: 172077 - DNA, 57 bp, Artificial
  Synthetic oligonucleotide
tgtatcattacataatacaatcgtgttatgatacagtctattcgtcacaaagccctg

SEQ ID NO: 172078 - DNA, 57 bp, Artificial
  Synthetic oligonucleotide
cacggcagtacccgcgttacggatcatagccaatggggccgctcccagcgccgagat

SEQ ID NO: 172079 - DNA, 60 bp, Artificial
  Synthetic oligonucleotide
ctggagaaccagcaattgcgggaagcagtggctgaacgagatcgaatgattcagcaacta

SEQ ID NO: 172080 - DNA, 57 bp, Artificial
  Synthetic oligonucleotide
ccgcgcttcgatgattgccaagaccactaccgggaagagctttggccccgctctaga

SEQ ID NO: 172081 - DNA, 57 bp, Artificial
  Synthetic oligonucleotide
tcggtattctttcgcatgatttacctattattcagtggcaatcggaggccaaaacgg

SEQ ID NO: 172082 - DNA, 52 bp, Artificial
  Synthetic oligonucleotide
gaagagggaatacaattaacactcgaccatcttaccccctattccaaagggg

SEQ ID NO: 172083 - DNA, 57 bp, Artificial
  Synthetic oligonucleotide
taggtgaattgtcggtagcggtgttggctcgacctgcctttcccataacgtggctta

SEQ ID NO: 172084 - DNA, 52 bp, Artificial
  Synthetic oligonucleotide
tttacttcggtacttgaaccggctattttggtcaggcgtcgtccgtacaccc

SEQ ID NO: 172085 - DNA, 56 bp, Artificial
  Synthetic oligonucleotide
gtgtcggtgtaagccgtcaactgctttggttggagtatcgtaaagaacaaccagac

SEQ ID NO: 172086 - DNA, 57 bp, Artificial
  Synthetic oligonucleotide
gtctaccatggcatacgtagtgtgtcggtccatttttccgtcattatccgaatcaac

SEQ ID NO: 172087 - DNA, 57 bp, Artificial
  Synthetic oligonucleotide
ctacgggctggcttggtgcatgtttgttcttactgattgccaataccgtattacggg

SEQ ID NO: 172088 - DNA, 54 bp, Artificial
  Synthetic oligonucleotide
ttagtgaacgaatcacttaacctaaaaacgattatacaacacaatcgaccttac

SEQ ID NO: 172089 - DNA, 55 bp, Artificial
  Synthetic oligonucleotide
atctggagggatacctgcaagttgcttaagctctaacccggttttgtactgtact

SEQ ID NO: 172090 - DNA, 57 bp, Artificial
  Synthetic oligonucleotide
ctggacgagtcccccacaactaccggcactccccccacctatcttagtcatcatcgc

SEQ ID NO: 172091 - DNA, 54 bp, Artificial
  Synthetic oligonucleotide
cgctatcgaaggaaggctgaaattcgagaaaacgaactattataaatacctact

SEQ ID NO: 172092 - DNA, 54 bp, Artificial
  Synthetic oligonucleotide
tgcctaccacaaacaatgaataggcggtggaaagtacggggttaattcctaaca

SEQ ID NO: 172093 - DNA, 56 bp, Artificial
  Synthetic oligonucleotide
cgtcctaaaatctcgtactaattagttttactctacattactgtctcgacacttgc

SEQ ID NO: 172094 - DNA, 54 bp, Artificial
  Synthetic oligonucleotide
accgaacgctaagttcatagtcaacgcctaaacactcgtcggcaacggacttaa

SEQ ID NO: 172095 - DNA, 56 bp, Artificial
  Synthetic oligonucleotide
gctaaccgccacgggcacacacctcacgcgggggagcattccgacgctgaccgatt

SEQ ID NO: 172096 - DNA, 56 bp, Artificial
  Synthetic oligonucleotide
ccgtagttaccggaaaaccctttgcatccctgatgccgcccgtctatgcgtcggca

SEQ ID NO: 172097 - DNA, 56 bp, Artificial
  Synthetic oligonucleotide
tagcgcatatggaacatctcgtgacaaaaagcgtggaggaaggagctaccgtggct

SEQ ID NO: 172098 - DNA, 56 bp, Artificial
  Synthetic oligonucleotide
ctggggtacgagagtcttaacggcaataagaccaaatatggctcctttacgctgca

SEQ ID NO: 172099 - DNA, 54 bp, Artificial
  Synthetic oligonucleotide
tacatagaccgttgtgttagaggggtggtcaaaagtaatggcgtaagcgggtaa

SEQ ID NO: 172100 - DNA, 56 bp, Artificial
  Synthetic oligonucleotide
cacagtggcgtttccatgctgataaaggccatatgtaccccttagacgaacttaaa

SEQ ID NO: 172101 - DNA, 53 bp, Artificial
  Synthetic oligonucleotide
ctgaccgggaattaacgctgcttggggttggtgcattaacgggaattacctcc

SEQ ID NO: 172102 - DNA, 54 bp, Artificial
  Synthetic oligonucleotide
cgcgtttaaagtttgccattcagaggtttgggttaagtgatactcgcaaaagta

SEQ ID NO: 172103 - DNA, 55 bp, Artificial
  Synthetic oligonucleotide
gtttccttaccatgctgagtcgttacgttcgctctctgctattcgctcgcacatt

SEQ ID NO: 172104 - DNA, 55 bp, Artificial
  Synthetic oligonucleotide
cgctaccgtgctgtctactcgaacattaaaactgcagccgagcggagtaacgcac

SEQ ID NO: 172105 - DNA, 55 bp, Artificial
  Synthetic oligonucleotide
cgttgcttatatccgggtgcagaattcggcccgaacgatggggttggtggccgct

SEQ ID NO: 172106 - DNA, 55 bp, Artificial
  Synthetic oligonucleotide
ctaaatcggaatgggacaaagaggccccttatttatacgactcacccaaggcaca

SEQ ID NO: 172107 - DNA, 55 bp, Artificial
  Synthetic oligonucleotide
gttcggaatgcccttcatgctaaaccgttggtctcgaaagtgcttgttagccaag

SEQ ID NO: 172108 - DNA, 55 bp, Artificial
  Synthetic oligonucleotide
cgtctctcaaaaccctcttacttgagacgacaagtattcgcctgtttgtaatccg

SEQ ID NO: 172109 - DNA, 55 bp, Artificial
  Synthetic oligonucleotide
cgctggtggagatggacgtaaccacgccctatcaggattccaagctgtcgcggat

SEQ ID NO: 172110 - DNA, 55 bp, Artificial
  Synthetic oligonucleotide
cgcttacttaaatagggcttaggacttgtcgcgaatgctcaatgacgtgaaaatg

SEQ ID NO: 172111 - DNA, 55 bp, Artificial
  Synthetic oligonucleotide
cgtctcgcggggttaggcataaagcatcgtggaaccgatacggttggttagctgc

SEQ ID NO: 172112 - DNA, 56 bp, Artificial
  Synthetic oligonucleotide
ctcttggtctggtatgtatcacgactttggtattgagttaccgaagtacgaacgag

SEQ ID NO: 172113 - DNA, 54 bp, Artificial
  Synthetic oligonucleotide
cggaattacattaaccggttgcgcgaattggggttatcgaacacagagccgttg

SEQ ID NO: 172114 - DNA, 55 bp, Artificial
  Synthetic oligonucleotide
cggtgtaccagtctataatactgcttacatcgctgcgggtctgtttaaagtagcg

SEQ ID NO: 172115 - DNA, 55 bp, Artificial
  Synthetic oligonucleotide
cggtgccttttcctatcgtgtctggtactggtagttcgctacctcttgatgaccc

SEQ ID NO: 172116 - DNA, 55 bp, Artificial
  Synthetic oligonucleotide
aacggtacgtgtgagtcctgtaagcaattatagaccttatcccgtacctcgatga

SEQ ID NO: 172117 - DNA, 55 bp, Artificial
  Synthetic oligonucleotide
cggtaacattgcggatttgtccctgcacgaggaacctgcatttctgtaccgcaaa

SEQ ID NO: 172118 - DNA, 55 bp, Artificial
  Synthetic oligonucleotide
cggtaaatactgcagcccgcgaggtgtacaattggacacatacccaaggttggac

SEQ ID NO: 172119 - DNA, 55 bp, Artificial
  Synthetic oligonucleotide
cgggttcgacactgggaatgatgctctcttgtaatcacgtatataaccaagcgtt

SEQ ID NO: 172120 - DNA, 55 bp, Artificial
  Synthetic oligonucleotide
gtttacggtagtagacgggatacccaatacagtgcaactatcgcatacggctact

SEQ ID NO: 172121 - DNA, 55 bp, Artificial
  Synthetic oligonucleotide
cggagggcgtcaggcgctctaacagcgtcggctttccattacggcgagggttggg

SEQ ID NO: 172122 - DNA, 55 bp, Artificial
  Synthetic oligonucleotide
cggcacttacaaacacttcgttgatggtactacggatcaactccgttgcccgagc

SEQ ID NO: 172123 - DNA, 58 bp, Artificial
  Synthetic oligonucleotide
catcacctgacggttaattactccgcctgcgctgagtgtccaatttaatcctacccaa

SEQ ID NO: 172124 - DNA, 55 bp, Artificial
  Synthetic oligonucleotide
ctcttcgctgaggcccggtgttttggagccgttgacggacgcagttacgtttaca

SEQ ID NO: 172125 - DNA, 55 bp, Artificial
  Synthetic oligonucleotide
cgggtaatgccagtgctgctcgatatgcccaggttacaagtgtcggtgccagggc

SEQ ID NO: 172126 - DNA, 54 bp, Artificial
  Synthetic oligonucleotide
cgggagcaagctcaggaaacggttatctacaaacaagcccaggaagtaattcgg

SEQ ID NO: 172127 - DNA, 55 bp, Artificial
  Synthetic oligonucleotide
cggggtaagcgtcacacctacgtccgcttctttattggtagggcagtccattgac

SEQ ID NO: 172128 - DNA, 51 bp, Artificial
  Synthetic oligonucleotide
cgggcacaaaacctacggaagcgaccggggaacggtcatctacggaagtac

SEQ ID NO: 172129 - DNA, 55 bp, Artificial
  Synthetic oligonucleotide
cgggcattgtctggctacaaaccggtctggcattggtcctttacttcagccttac

SEQ ID NO: 172130 - DNA, 55 bp, Artificial
  Synthetic oligonucleotide
ccgtcagtggacggagagcccttgcccaagtactgggaagtagtcaatgaaccgg

SEQ ID NO: 172131 - DNA, 55 bp, Artificial
  Synthetic oligonucleotide
ccggtgggactacaaactaacgcccaattctgttgcggcttctatttatgtagcc

SEQ ID NO: 172132 - DNA, 55 bp, Artificial
  Synthetic oligonucleotide
ccgggctgcggattgatgaggcccgctttcatggaattttcgagggtgatcgtgt

SEQ ID NO: 172133 - DNA, 55 bp, Artificial
  Synthetic oligonucleotide
ccgggagccgccttattcatccgatatgacctgagtgagatgttccgcagcactc

SEQ ID NO: 172134 - DNA, 55 bp, Artificial
  Synthetic oligonucleotide
ccggatgtaatcatagaggccgtaggttcacctgtaacctacagaaacgccatag

SEQ ID NO: 172135 - DNA, 56 bp, Artificial
  Synthetic oligonucleotide
ctcgtcactttagcatccgttccccaagtctgcacccgttgcgaattgagccggtt

SEQ ID NO: 172136 - DNA, 55 bp, Artificial
  Synthetic oligonucleotide
ccggagtaccgacagcagactgacgaactgattcgccaacaggataaccccaccc

SEQ ID NO: 172137 - DNA, 55 bp, Artificial
  Synthetic oligonucleotide
ccgctgaaccattagaccagttaaatgttcctccgctaaaacccaaactgcttgc

SEQ ID NO: 172138 - DNA, 55 bp, Artificial
  Synthetic oligonucleotide
ccctcaataccagatcgttgaacgtagcagcggtataatccgccaatttgaaatc

SEQ ID NO: 172139 - DNA, 55 bp, Artificial
  Synthetic oligonucleotide
tagacctggtcaagtatagcagagcctccggcttttcggcaggaaatatcattta

SEQ ID NO: 172140 - DNA, 55 bp, Artificial
  Synthetic oligonucleotide
cccgttggggcaatcgacaatcggtttgtgcagacgggtagcgattcaatagcaa

SEQ ID NO: 172141 - DNA, 52 bp, Artificial
  Synthetic oligonucleotide
cccgttcgtctataataagggtgcctaccgattcgttgccaataaacgtgtt

SEQ ID NO: 172142 - DNA, 55 bp, Artificial
  Synthetic oligonucleotide
cccgttcagtagctgaccaggtggctatctaccaaaacgccgaatttataattgg

SEQ ID NO: 172143 - DNA, 55 bp, Artificial
  Synthetic oligonucleotide
cccgctacgttgccggtctttaacgtagccctgatccatcgcgtattcgactaag

SEQ ID NO: 172144 - DNA, 55 bp, Artificial
  Synthetic oligonucleotide
cccgctaatagtcagaaccagtcaaccgacaagggattagatgacgataatacag

SEQ ID NO: 172145 - DNA, 55 bp, Artificial
  Synthetic oligonucleotide
cccgcgctcaccttattccgcctcaaaagctagttctgaccacttcgtaagggct

SEQ ID NO: 172146 - DNA, 60 bp, Artificial
  Synthetic oligonucleotide
ctcgattatctggtacgactaagtaaaacgtttcgtcgccatcagctatgctatacgaca

SEQ ID NO: 172147 - DNA, 55 bp, Artificial
  Synthetic oligonucleotide
cccgactcggctacgcacaaacgtacctgcctgatacgatacgagtaaaccgcct

SEQ ID NO: 172148 - DNA, 55 bp, Artificial
  Synthetic oligonucleotide
cccctactacctcaatggccacttttgtcaattctgagagtagggtactgcccgc

SEQ ID NO: 172149 - DNA, 55 bp, Artificial
  Synthetic oligonucleotide
taggaatggttcgataggaaccgtactcagctttggcttacgatcggccaacgca

SEQ ID NO: 172150 - DNA, 55 bp, Artificial
  Synthetic oligonucleotide
cccaccaaatcggaaatctcatctgcggcagagcgcatgacgccttcgcgggacg

SEQ ID NO: 172151 - DNA, 53 bp, Artificial
  Synthetic oligonucleotide
ccattaccatacccgacgttggaaatcgtaccggttaaatgcccaccacgtgc

SEQ ID NO: 172152 - DNA, 55 bp, Artificial
  Synthetic oligonucleotide
taggagtaagacgaagttaacataatgagtcgagggcgatggactaacaaaggtt

SEQ ID NO: 172153 - DNA, 53 bp, Artificial
  Synthetic oligonucleotide
cgcgttgtcgtttaaataatacgccgtaagtgcttcgacaacttgtatgggtt

SEQ ID NO: 172154 - DNA, 55 bp, Artificial
  Synthetic oligonucleotide
cgcgtggaaggtaattacgatgcactctcctataccgtgacggaacaaagtccgc

SEQ ID NO: 172155 - DNA, 55 bp, Artificial
  Synthetic oligonucleotide
cgcgtgactctctgggtcaatatagggaatacagaaatcgctctgtccatgcgtc

SEQ ID NO: 172156 - DNA, 55 bp, Artificial
  Synthetic oligonucleotide
cgcgcaaatcaacatcaatgcgtcatctaacccaactctgggcaccaacaacggg

SEQ ID NO: 172157 - DNA, 60 bp, Artificial
  Synthetic oligonucleotide
cggtgccagagtctctattactggctgctgaggggacaatgatccttgaattgaccatgg

SEQ ID NO: 172158 - DNA, 55 bp, Artificial
  Synthetic oligonucleotide
gtttgccaaatcttgcggagtacctcgtttgatagccatactcaatgcgagtttg

SEQ ID NO: 172159 - DNA, 55 bp, Artificial
  Synthetic oligonucleotide
cgcccagcaacgagcgtagcaacaacaattatcaatcattgctcacaaaacgggt

SEQ ID NO: 172160 - DNA, 55 bp, Artificial
  Synthetic oligonucleotide
cgccataacggcaatcaaatctttatgcgataggccaaatttagtgcctaaccgc

SEQ ID NO: 172161 - DNA, 55 bp, Artificial
  Synthetic oligonucleotide
cgcacagttgctatttaccaacctggctcgttttcggaatacaggcatctggcgt

SEQ ID NO: 172162 - DNA, 55 bp, Artificial
  Synthetic oligonucleotide
cgcaataagtccggctaagctgatgagggtacccagatataagggatgccgaacg

SEQ ID NO: 172163 - DNA, 55 bp, Artificial
  Synthetic oligonucleotide
cgattagattcgatcaagcagcataacgcggctaagaagttaggctggtaaagcg

SEQ ID NO: 172164 - DNA, 55 bp, Artificial
  Synthetic oligonucleotide
cgagtccagtttgtatagctgtcccttcctgtcttcgggtcaataatccaaagca

SEQ ID NO: 172165 - DNA, 55 bp, Artificial
  Synthetic oligonucleotide
cgaggcatagtcattgataccgtcggcgttgcctgtggtaccgtagctgagccgg

SEQ ID NO: 172166 - DNA, 55 bp, Artificial
  Synthetic oligonucleotide
cgagcgaaatgagtttagtgtaacccgccagttgcgctattcgaccactaacccc

SEQ ID NO: 172167 - DNA, 55 bp, Artificial
  Synthetic oligonucleotide
cgaccccaccgggagatcaggttgctacggagaaaagacttcgatgcaggattga

SEQ ID NO: 172168 - DNA, 56 bp, Artificial
  Synthetic oligonucleotide
cgggtcgaagtcggaattgtttaactaaccgctcgtgcagactggacagttgagcc

SEQ ID NO: 172169 - DNA, 55 bp, Artificial
  Synthetic oligonucleotide
cgaagcgttaatgcccttgctgacagttattccgttgcagttattatcgtaccac

SEQ ID NO: 172170 - DNA, 55 bp, Artificial
  Synthetic oligonucleotide
tacacgcccacgatcagtaagctaaaccccaagaagaccaccgttgcggcttgcc

SEQ ID NO: 172171 - DNA, 55 bp, Artificial
  Synthetic oligonucleotide
aaatgatggccgtagcggacagcagccggtgccaacgtccggtctggcacacctc

SEQ ID NO: 172172 - DNA, 55 bp, Artificial
  Synthetic oligonucleotide
cgaaagggtggtatcctgggccgtcaaatgacggaacgtcagttgtttgtggaca

SEQ ID NO: 172173 - DNA, 55 bp, Artificial
  Synthetic oligonucleotide
ccttcggccactgtatttgatgtatcggagtttaccgtcgggcctgataatgcgg

SEQ ID NO: 172174 - DNA, 55 bp, Artificial
  Synthetic oligonucleotide
ccttccaggtgttgtttatccaatgccggacttatagccagatgtacgggaggca

SEQ ID NO: 172175 - DNA, 55 bp, Artificial
  Synthetic oligonucleotide
aagagtcgggagattcagggcttaacaacggcggctggtatctggataacagcgg

SEQ ID NO: 172176 - DNA, 53 bp, Artificial
  Synthetic oligonucleotide
gctgggtatgttccgacgtttcgctaaaggtgtttcccgtagtaacgacaagc

SEQ ID NO: 172177 - DNA, 55 bp, Artificial
  Synthetic oligonucleotide
gcggttggagggtcgtgttcacccaatccacaccgcgacaattcaaagatcggcg

SEQ ID NO: 172178 - DNA, 55 bp, Artificial
  Synthetic oligonucleotide
gcgggcgttcccaaccgcgtcggaatatcgagctttacggttgaaggacatcctg

SEQ ID NO: 172179 - DNA, 57 bp, Artificial
  Synthetic oligonucleotide
cggacttcttacgatggtgttccaagactgttcggaagcattatggctcgttgggag

SEQ ID NO: 172180 - DNA, 55 bp, Artificial
  Synthetic oligonucleotide
gcgcttaatcatttaggcataccatatcagtacgtttcacgcaataagtcggcac

SEQ ID NO: 172181 - DNA, 55 bp, Artificial
  Synthetic oligonucleotide
gtatgcgggctcaggacaaccggaatttgaggccggtcttaatctaaatggagca

SEQ ID NO: 172182 - DNA, 55 bp, Artificial
  Synthetic oligonucleotide
gcctagcacacctcaccgggtgtacaggcagggccgtctgcctgcacgtcggtaa

SEQ ID NO: 172183 - DNA, 55 bp, Artificial
  Synthetic oligonucleotide
gcctaccggaatgggcgaaagcctacctgtcaacggttgcgtagatggcgttatc

SEQ ID NO: 172184 - DNA, 54 bp, Artificial
  Synthetic oligonucleotide
gccgtgaacagtccggatggggaaatagtcccggcgtagggtttggatacgctc

SEQ ID NO: 172185 - DNA, 55 bp, Artificial
  Synthetic oligonucleotide
gccggtaccactgctctttatctacagcaaggggctaatttcatagtctctcctg

SEQ ID NO: 172186 - DNA, 55 bp, Artificial
  Synthetic oligonucleotide
gccgacaggtaagcgggagttcgttaaattcagacgaattgtagctaccaagccc

SEQ ID NO: 172187 - DNA, 55 bp, Artificial
  Synthetic oligonucleotide
gccgacacctttgccaacttgatcggcttcacgagttggaaagccgctttgctga

SEQ ID NO: 172188 - DNA, 55 bp, Artificial
  Synthetic oligonucleotide
gcccggtattacgtagcggaatcctaccgtcaaaccaacgatgtggctaatgccc

SEQ ID NO: 172189 - DNA, 55 bp, Artificial
  Synthetic oligonucleotide
gtcagaatgtagtgctgggctaatgtagtaccgaccgtcccgctcgggtgtgaag

SEQ ID NO: 172190 - DNA, 55 bp, Artificial
  Synthetic oligonucleotide
cgctaccgccgtatttactggtgaggtgtttcaacagtattttccgtattcacgc

SEQ ID NO: 172191 - DNA, 55 bp, Artificial
  Synthetic oligonucleotide
gccattctgaaaccagtcgcctgagcatgctaataacggctcttagggagcaggg

SEQ ID NO: 172192 - DNA, 55 bp, Artificial
  Synthetic oligonucleotide
gccaccatattctcaaaagggatgagcaaggtagagaacgttgtacggcttgtgg

SEQ ID NO: 172193 - DNA, 53 bp, Artificial
  Synthetic oligonucleotide
gccaactaaccgttcctgcacgttaaccccaacgcccattcgctcggacgtac

SEQ ID NO: 172194 - DNA, 55 bp, Artificial
  Synthetic oligonucleotide
gcatcacaccggggtcaatggcgtcgttttcttcatagccatccgatgttgccac

SEQ ID NO: 172195 - DNA, 55 bp, Artificial
  Synthetic oligonucleotide
gcatagcgatgaatgagcctaagccaccacctccctggcttacagttcctcccgc

SEQ ID NO: 172196 - DNA, 55 bp, Artificial
  Synthetic oligonucleotide
gcagtgcagctccaatagcgcaatggattaagcggcctggtggcgagtgaactgg

SEQ ID NO: 172197 - DNA, 55 bp, Artificial
  Synthetic oligonucleotide
gtcagtggagagcaatccgttattatttgtaggccagtacatctcttccttacga

SEQ ID NO: 172198 - DNA, 55 bp, Artificial
  Synthetic oligonucleotide
gggtcgatcaggaagttgcgtggtgttttgccttcagtcggttggtcgcccactt

SEQ ID NO: 172199 - DNA, 55 bp, Artificial
  Synthetic oligonucleotide
gggtagtataagttacctcgcccgaagcaccctccgcttgtgtgcccgaagtggc

SEQ ID NO: 172200 - DNA, 54 bp, Artificial
  Synthetic oligonucleotide
ggggtttagtgtgactttcgcatccgagtctgacgaggggtttagtgtggactt

SEQ ID NO: 172201 - DNA, 57 bp, Artificial
  Synthetic oligonucleotide
cgcctacgaggggatatcctatacactcattaaaagtattctcgaccgagagttgga

SEQ ID NO: 172202 - DNA, 55 bp, Artificial
  Synthetic oligonucleotide
ggggtagcagccatttcatgccataggacgccagaagggccgctacggcgatcac

SEQ ID NO: 172203 - DNA, 55 bp, Artificial
  Synthetic oligonucleotide
ggggtagagtagtggtgccgtctaatacctggaaggtgatcattatattgcctaa

SEQ ID NO: 172204 - DNA, 55 bp, Artificial
  Synthetic oligonucleotide
gggatgcatttacacagctggttcagaatctttcgggtgcgtcgggtagtcagcc

SEQ ID NO: 172205 - DNA, 55 bp, Artificial
  Synthetic oligonucleotide
ggtccaccgctgctcgtcttatcgatgataacacatttatactgaaccgtcgatt

SEQ ID NO: 172206 - DNA, 55 bp, Artificial
  Synthetic oligonucleotide
ggcttcaacaaatgcatacgggaacgtgcatccggcaaatttaaagaaggcatct

SEQ ID NO: 172207 - DNA, 55 bp, Artificial
  Synthetic oligonucleotide
ggtcgcgtcaacatcgatggtatcggggtagagaacctggcgaatgtcgaggccg

SEQ ID NO: 172208 - DNA, 55 bp, Artificial
  Synthetic oligonucleotide
ggcctgtcgttgcatctcccctttggcctgttcatcaccgtacttcatgcagtgc

SEQ ID NO: 172209 - DNA, 55 bp, Artificial
  Synthetic oligonucleotide
ggcccatggtatgatacaacaagccgatatttgcaagtactttgctgtagcctgc

SEQ ID NO: 172210 - DNA, 55 bp, Artificial
  Synthetic oligonucleotide
ggccaatcgctgggcttctaccagtaattcctgctcgtgggtccgatcaaaagcc

SEQ ID NO: 172211 - DNA, 55 bp, Artificial
  Synthetic oligonucleotide
ggcattgatgtctaaggtggtctctaacggtaacggttacgtgaagtttcccatc

SEQ ID NO: 172212 - DNA, 52 bp, Artificial
  Synthetic oligonucleotide
cgcccggggaattgaccaacgccccgtagaagccgaccgcatacgaaaatcc

SEQ ID NO: 172213 - DNA, 55 bp, Artificial
  Synthetic oligonucleotide
ggcaggctttcctttaatgaccaggatgtcaccgttgtaatggcccttctgccca

SEQ ID NO: 172214 - DNA, 55 bp, Artificial
  Synthetic oligonucleotide
ggcagactcaataccttcgctgacactctgatcgatcaactcatacgttcggtcg

SEQ ID NO: 172215 - DNA, 55 bp, Artificial
  Synthetic oligonucleotide
ggcactcgacgtggcaatatgggcgacgagccagtaggtcgtgcgtcgtttcagg

SEQ ID NO: 172216 - DNA, 55 bp, Artificial
  Synthetic oligonucleotide
ggtgttccaagactgttcggaagcattatggctcgttgggagtagttacgcagga

SEQ ID NO: 172217 - DNA, 55 bp, Artificial
  Synthetic oligonucleotide
ggttccgcaaatcgaccgagttacaggcgggtatccgtgccatggtctggatcgg

SEQ ID NO: 172218 - DNA, 55 bp, Artificial
  Synthetic oligonucleotide
ggactttatacgctcaagccgggctacctgtgcttcgcgaacggccctgttgtca

SEQ ID NO: 172219 - DNA, 55 bp, Artificial
  Synthetic oligonucleotide
gtactgttccacttaaggtggcagaattcattgtaatgtttgctgcagcgtcagt

SEQ ID NO: 172220 - DNA, 55 bp, Artificial
  Synthetic oligonucleotide
gcttaggtcaaagactttcgagccagacaaatgcgttgagtagaggctatgtgcg

SEQ ID NO: 172221 - DNA, 55 bp, Artificial
  Synthetic oligonucleotide
gctgtttagcaatcgtatagagccagttgggaataaccccttcggtttccattac

SEQ ID NO: 172222 - DNA, 55 bp, Artificial
  Synthetic oligonucleotide
ctttaatccgtgagtgatttcataaccgtgctcgtcccctatatggtgcatgatc

SEQ ID NO: 172223 - DNA, 60 bp, Artificial
  Synthetic oligonucleotide
cgactgccaatcaaattagcgatatgacgctgttgggtacggctgctgttacagggttgc

SEQ ID NO: 172224 - DNA, 51 bp, Artificial
  Synthetic oligonucleotide
gtggaggtagtaaaacgtaccgacagtttatcgcccgttttccattttcgc

SEQ ID NO: 172225 - DNA, 52 bp, Artificial
  Synthetic oligonucleotide
cttcgtaagtttaattgcggtaccgggcggatttaccccactatcgctcaag

SEQ ID NO: 172226 - DNA, 55 bp, Artificial
  Synthetic oligonucleotide
cttcggctaatcaaggccgattcaatcaattgcagggccgttctatttgacgtac

SEQ ID NO: 172227 - DNA, 55 bp, Artificial
  Synthetic oligonucleotide
cttatcgctacttagtgagaactgttgtatggatacctaccgccaacattgtact

SEQ ID NO: 172228 - DNA, 55 bp, Artificial
  Synthetic oligonucleotide
gtggccgtagtcgaaattgaggcgggagtagcctctgttacgctcgaagtgcccg

SEQ ID NO: 172229 - DNA, 55 bp, Artificial
  Synthetic oligonucleotide
ctggcttcgacggcaacaatgatcccatttggggaccggccgtaccttatactgt

SEQ ID NO: 172230 - DNA, 55 bp, Artificial
  Synthetic oligonucleotide
gtggccttcgccaatacggcagagggcttattgaccggtgaacttaaggcaccgc

SEQ ID NO: 172231 - DNA, 55 bp, Artificial
  Synthetic oligonucleotide
gtggcgcctgtccgccggatattgcactcatgcgtttccagaaatcaactgcaac

SEQ ID NO: 172232 - DNA, 55 bp, Artificial
  Synthetic oligonucleotide
ctggaagccctcaaacgctgccgtgccctaattgtaccttctctttggtatgagg

SEQ ID NO: 172233 - DNA, 55 bp, Artificial
  Synthetic oligonucleotide
ctgatgccatcggtgagaaagcttgtgactttatagaccgccacaaagagcaacc

SEQ ID NO: 172234 - DNA, 52 bp, Artificial
  Synthetic oligonucleotide
ccaaacgctactttattaagcaggtttcaccgaccaaacgctactttattaa

SEQ ID NO: 172235 - DNA, 55 bp, Artificial
  Synthetic oligonucleotide
cgactaatccccctgagctggtttgaatcggtaagtttggtacagctcgcgggta

SEQ ID NO: 172236 - DNA, 55 bp, Artificial
  Synthetic oligonucleotide
ctgatgactcaacgtctaatcggcgcagtttatggcaccggttgttcggtcgctg

SEQ ID NO: 172237 - DNA, 55 bp, Artificial
  Synthetic oligonucleotide
ctgatcgggtatagtttcggcaaagatttaagagggttctttcacactagcctcg

SEQ ID NO: 172238 - DNA, 55 bp, Artificial
  Synthetic oligonucleotide
ctgataacagcggagtccaggtagcattggtaaggcatcgtattctcccatcagg

SEQ ID NO: 172239 - DNA, 55 bp, Artificial
  Synthetic oligonucleotide
gtggtgaaacataaggtcagttctcaagattcaaagtggactccggtattgggac

SEQ ID NO: 172240 - DNA, 55 bp, Artificial
  Synthetic oligonucleotide
gttccccaaaagctcatcgtcacgcatccggctacggcaacgaaaggcacgaccc

SEQ ID NO: 172241 - DNA, 55 bp, Artificial
  Synthetic oligonucleotide
ctcgacgggtatcgagtactggtataatgaccagtttgctgctcgggtgggttat

SEQ ID NO: 172242 - DNA, 55 bp, Artificial
  Synthetic oligonucleotide
ctccgtcaatgatcaatgagtagtaatgaaaccctcgactgatgacgtcagtggt

SEQ ID NO: 172243 - DNA, 55 bp, Artificial
  Synthetic oligonucleotide
ctccgcctgcgctgagtgtccaatttaatcctacccaaccggctacctcctctac

SEQ ID NO: 172244 - DNA, 55 bp, Artificial
  Synthetic oligonucleotide
ctccacctggcatcgtcttatttctgttcggatatacatccgacgtaaggttgtc

SEQ ID NO: 172245 - DNA, 55 bp, Artificial
  Synthetic oligonucleotide
ctcaaaatatgctcggttattccccacttacgacgacaaaggattctgggatcag

SEQ ID NO: 172246 - DNA, 60 bp, Artificial
  Synthetic oligonucleotide
cgaacggatgttaggcgcgacgacttcatacagcgacgccacgatatttgaatcatacca

SEQ ID NO: 172247 - DNA, 55 bp, Artificial
  Synthetic oligonucleotide
ctatatccacgaatcccaacagggtattctgatcatcgtaaagaccgctaaccgt

SEQ ID NO: 172248 - DNA, 55 bp, Artificial
  Synthetic oligonucleotide
gtccaaaacgactaagcgaacgcatttctacgatgcgtggaacggttttcatcgt

SEQ ID NO: 172249 - DNA, 55 bp, Artificial
  Synthetic oligonucleotide
gcacgtacaggcaaggcccgatagcggccgcaccgtcgtagcttttggcttgggg

SEQ ID NO: 172250 - DNA, 55 bp, Artificial
  Synthetic oligonucleotide
gtcgtagttgactgtattatccgcctggccaatggtcaatttgcgaacccggtag

SEQ ID NO: 172251 - DNA, 55 bp, Artificial
  Synthetic oligonucleotide
gtctataggcgacatatcggggtaataagtaactgcatatacccagggcgagtcg

SEQ ID NO: 172252 - DNA, 54 bp, Artificial
  Synthetic oligonucleotide
gtctccccagttaaggcggaagccgaaacaaggacgaaaatcgcaaccaactgc

SEQ ID NO: 172253 - DNA, 55 bp, Artificial
  Synthetic oligonucleotide
gatctgcatcgtatccgacagttcccggaagaaactaccggccagtccactcatc

SEQ ID NO: 172254 - DNA, 55 bp, Artificial
  Synthetic oligonucleotide
gtgaagggcacagacgtattctgtaaacgaaccggcaaggtaggtcatcagtggc

SEQ ID NO: 172255 - DNA, 55 bp, Artificial
  Synthetic oligonucleotide
gatccggaactgtttcgcactgcggtacggcaagtattctccggttatctctggt

SEQ ID NO: 172256 - DNA, 54 bp, Artificial
  Synthetic oligonucleotide
gatagagtaacggataggcttttctttccccgttgttatgggactgactttgta

SEQ ID NO: 172257 - DNA, 53 bp, Artificial
  Synthetic oligonucleotide
ccttaagtccgtttaggaatggttcgataggaaccgtactcagctttggctta

SEQ ID NO: 172258 - DNA, 55 bp, Artificial
  Synthetic oligonucleotide
gagtgctataggaggtacgtggctgtatggctacttccgggagaaactgccgcag

SEQ ID NO: 172259 - DNA, 55 bp, Artificial
  Synthetic oligonucleotide
gagtctcagcgcagtacttagttgctcgcttttggcgagttggttggctacgccc

SEQ ID NO: 172260 - DNA, 55 bp, Artificial
  Synthetic oligonucleotide
gagtcacatcgaagcaaaattaaggtagtatcgcaggtaggggtgggtaccacgt

SEQ ID NO: 172261 - DNA, 55 bp, Artificial
  Synthetic oligonucleotide
gaggtaatgaaccgaatgatatttgatggcgaacgcttgaccgacttgttggctc

SEQ ID NO: 172262 - DNA, 55 bp, Artificial
  Synthetic oligonucleotide
gagcgatacccttcaatggaaccgttgtgggctaaacgcaggcggcctcggtagg

SEQ ID NO: 172263 - DNA, 55 bp, Artificial
  Synthetic oligonucleotide
gagagcgttccgcttttcgcaattcaatttgtaatacgtctgtcgtcataactgc

SEQ ID NO: 172264 - DNA, 55 bp, Artificial
  Synthetic oligonucleotide
gacaccattacaccggagcacttagaggagcagctaaccggtgtggtcggagcga

SEQ ID NO: 172265 - DNA, 55 bp, Artificial
  Synthetic oligonucleotide
gtgccgcccggataatcgtactgaacctcccggctaaacagggatactgagggtg

SEQ ID NO: 172266 - DNA, 55 bp, Artificial
  Synthetic oligonucleotide
aacgattgtggcccgttcaccaaagtgtgccagacagccttcaatcaatccgtgt

SEQ ID NO: 172267 - DNA, 55 bp, Artificial
  Synthetic oligonucleotide
gtgcggtcaggtattcgacataatacgaacctccccacggatcgacggccttgca

SEQ ID NO: 172268 - DNA, 58 bp, Artificial
  Synthetic oligonucleotide
agcggttcagaacctggagaagactacgcagcggattccccgtcatgtacaggtcacg

SEQ ID NO: 172269 - DNA, 55 bp, Artificial
  Synthetic oligonucleotide
gaagaagtagaaagtatattcaccgactcgaattttcgcccgactcctgatcggg

SEQ ID NO: 172270 - DNA, 55 bp, Artificial
  Synthetic oligonucleotide
gtgcttgtaagcttcgagtaagtcatgtatgaaatagtggattagcgcgcgtatg

SEQ ID NO: 172271 - DNA, 55 bp, Artificial
  Synthetic oligonucleotide
caaagccttcgctaccaaagtgaatgggacctggtactatacctacccgactatg

SEQ ID NO: 172272 - DNA, 55 bp, Artificial
  Synthetic oligonucleotide
tggtagatcagaacgttggatcactccgtttcctggctacataaccccaagggca

SEQ ID NO: 172273 - DNA, 50 bp, Artificial
  Synthetic oligonucleotide
acgtttggtgtgtgaaaagaaacgtttggtgtgtgaaaagaaacgtttgg

SEQ ID NO: 172274 - DNA, 55 bp, Artificial
  Synthetic oligonucleotide
aatctttctgaaatacgtaagcctctcaaaaaattcagcattgatagtcttgccg

SEQ ID NO: 172275 - DNA, 55 bp, Artificial
  Synthetic oligonucleotide
acaaagcggtacaggaagccctacacgcccctgctcagttaccgggtcaggaagc

SEQ ID NO: 172276 - DNA, 55 bp, Artificial
  Synthetic oligonucleotide
tcaccagattctgaataagttttactgtacacagtgcaatacgctacgtattccc

SEQ ID NO: 172277 - DNA, 55 bp, Artificial
  Synthetic oligonucleotide
tcaagtgcgaaatatagtcttgttcggtggcagtgtagcctacctcagaaaacgg

SEQ ID NO: 172278 - DNA, 55 bp, Artificial
  Synthetic oligonucleotide
actcaataccccgactgatcgactgaattaccccggtctgatcgtctttgtcgtc

SEQ ID NO: 172279 - DNA, 55 bp, Artificial
  Synthetic oligonucleotide
agcagtgccctttgtttcctgtgacaggtaacccgaagacgtataggtagtaatg

SEQ ID NO: 172280 - DNA, 55 bp, Artificial
  Synthetic oligonucleotide
actgattgtagtgaaataacgcagcgttgccctctcctgtgtagcctcgctgctc

SEQ ID NO: 172281 - DNA, 55 bp, Artificial
  Synthetic oligonucleotide
caaggcatagaattcggtggagcttcctaccaggcggacaccatcccaacggccc

SEQ ID NO: 172282 - DNA, 55 bp, Artificial
  Synthetic oligonucleotide
tatgaactgcctattctgctacgccaacaggattcggaactaatggagttcagag

SEQ ID NO: 172283 - DNA, 55 bp, Artificial
  Synthetic oligonucleotide
caaggtatccaagggaaggggctcgaagacggacaattgctcgcccttgggctgt

SEQ ID NO: 172284 - DNA, 53 bp, Artificial
  Synthetic oligonucleotide
tgatattggatagtaacccttcgtaacggtcggccttttcgttgagctttacc

SEQ ID NO: 172285 - DNA, 55 bp, Artificial
  Synthetic oligonucleotide
tatcatagtacgtgtttgtccgggtggtatcaggcagcctgtcatgcaacgttgc

SEQ ID NO: 172286 - DNA, 55 bp, Artificial
  Synthetic oligonucleotide
caatgcattgcttcgcacgcgcagagcttttcgacgcgagttgttcgcgctccgt

SEQ ID NO: 172287 - DNA, 55 bp, Artificial
  Synthetic oligonucleotide
cacaacgtgcgctataaacacctacacctacttggatttgagatcctctcatacc

SEQ ID NO: 172288 - DNA, 55 bp, Artificial
  Synthetic oligonucleotide
cacccgttgaggccaaaggccgggctatcgtctatgtaaatgttgactcgctgct

SEQ ID NO: 172289 - DNA, 55 bp, Artificial
  Synthetic oligonucleotide
acgacgtgcagccttccgacagccagagcatgtgcgtgtaattctcgttctcata

SEQ ID NO: 172290 - DNA, 59 bp, Artificial
  Synthetic oligonucleotide
actttgggcactgcgaatgggtctaaccgtgaaagtgtcggtagattgagcatattgaa

SEQ ID NO: 172291 - DNA, 55 bp, Artificial
  Synthetic oligonucleotide
cacgataggcccggcatggattccaaacccggcaaagccgagtccgctatgggtc

SEQ ID NO: 172292 - DNA, 55 bp, Artificial
  Synthetic oligonucleotide
cacggtccatttccacaaggaatcttcaatacccgctatgctgtaaagccccggt

SEQ ID NO: 172293 - DNA, 54 bp, Artificial
  Synthetic oligonucleotide
ttgttagacgacgttcaacgcaacgatgtgtggggcaaaactacccgttataaa

SEQ ID NO: 172294 - DNA, 55 bp, Artificial
  Synthetic oligonucleotide
tcgtcccaccaaagacggttcaaggcgataaatataacttccgcgctattgacgg

SEQ ID NO: 172295 - DNA, 55 bp, Artificial
  Synthetic oligonucleotide
ttcgccactatctaaagctgccaacacagcacacttaatctcgttggtatggcta

SEQ ID NO: 172296 - DNA, 55 bp, Artificial
  Synthetic oligonucleotide
ttcgcatcgactttccccgtctgcactttcgtggccctgtactgttcgcggcttc

SEQ ID NO: 172297 - DNA, 55 bp, Artificial
  Synthetic oligonucleotide
aaggtcttggctaagtattttacgataaagcgtaatggggcggtcaatcatcggc

SEQ ID NO: 172298 - DNA, 55 bp, Artificial
  Synthetic oligonucleotide
acggctgggtcattcgatataccagcatgcctgtttcctgtgtagccgtagcatc

SEQ ID NO: 172299 - DNA, 55 bp, Artificial
  Synthetic oligonucleotide
atccactagcgatactaacgggtaaggttctggcgtttcagccggaccaacatgc

SEQ ID NO: 172300 - DNA, 55 bp, Artificial
  Synthetic oligonucleotide
atccgcgggatggtttgtaacacattctcacagatctactcgcgtgacaccgctg

SEQ ID NO: 172301 - DNA, 60 bp, Artificial
  Synthetic oligonucleotide
actgcacagggtgtataaccgtttggcatacttactacccagccgtagagctgcatacaa

SEQ ID NO: 172302 - DNA, 55 bp, Artificial
  Synthetic oligonucleotide
atacgcacattgttcgggcctaaccaccggacgctgattatcgggtcggcaattg

SEQ ID NO: 172303 - DNA, 55 bp, Artificial
  Synthetic oligonucleotide
acgcgtgctgcaaagtaattttaccataaccgcccggctttgaatcacgcatgat

SEQ ID NO: 172304 - DNA, 55 bp, Artificial
  Synthetic oligonucleotide
ttcgggcatcaaaattttcggctagtggtcggttcagcaacgagcggagtgtggg

SEQ ID NO: 172305 - DNA, 55 bp, Artificial
  Synthetic oligonucleotide
atgcctaaataactcgctaattggtgttgcggaacacgctgaataaggtctggtc

SEQ ID NO: 172306 - DNA, 55 bp, Artificial
  Synthetic oligonucleotide
ttccagtagcccggatagagtggacacctggcatacaaggaggcgacaaacctta

SEQ ID NO: 172307 - DNA, 54 bp, Artificial
  Synthetic oligonucleotide
agttgaaccctgtcttcgggagagagtacttccgccaccgcaattaccttggta

SEQ ID NO: 172308 - DNA, 55 bp, Artificial
  Synthetic oligonucleotide
ttacctcacccgatgcttcctgagtaaacactacatctttggccaatagccaggc

SEQ ID NO: 172309 - DNA, 51 bp, Artificial
  Synthetic oligonucleotide
atgtttttcgtaccgctaaaccctcctatcgtcgggttagcgttcctcaaa

SEQ ID NO: 172310 - DNA, 52 bp, Artificial
  Synthetic oligonucleotide
tccctaccgggtccacagctatgcccttggggttccggtttcgggaagcctg

SEQ ID NO: 172311 - DNA, 55 bp, Artificial
  Synthetic oligonucleotide
attgctccgctaaatggttatcagaaggctgcatcatcctccgtataacagtgtc

SEQ ID NO: 172312 - DNA, 57 bp, Artificial
  Synthetic oligonucleotide
actcaggcaggtaataacgcgggcgacggtcgttgcttggaggcgcaaccgcctcat

SEQ ID NO: 172313 - DNA, 53 bp, Artificial
  Synthetic oligonucleotide
tcccggttcacgataccgaaaccggacgaacagtgtgggtcaatacgtcgtcc

SEQ ID NO: 172314 - DNA, 55 bp, Artificial
  Synthetic oligonucleotide
aagggttccagtatccttttcgaactgcttccaacattcgagccgacatagactc

SEQ ID NO: 172315 - DNA, 55 bp, Artificial
  Synthetic oligonucleotide
aaacaactttgccaatactcaatgatgagtctgacttgctgctgaagctgggcgt

SEQ ID NO: 172316 - DNA, 55 bp, Artificial
  Synthetic oligonucleotide
tgtccgaaagctcccgcgaattggtcaaacgtggcaatccgtgcttcatctaggc

SEQ ID NO: 172317 - DNA, 55 bp, Artificial
  Synthetic oligonucleotide
caaacagacgcagcaaaatcagatagatgcgttggttgaaagtccttccgaccga

SEQ ID NO: 172318 - DNA, 55 bp, Artificial
  Synthetic oligonucleotide
acttagtccggacgatacgcaggagattgatatcatagaatgctacggcggagct

SEQ ID NO: 172319 - DNA, 49 bp, Artificial
  Synthetic oligonucleotide
accgaattgtcgttacttcccgtaccgttcttggcgtttcggtattgtt

SEQ ID NO: 172320 - DNA, 55 bp, Artificial
  Synthetic oligonucleotide
agcaccaacgacctagtaagaccggcgaaaacaaaggaagctggatcggattgac

SEQ ID NO: 172321 - DNA, 55 bp, Artificial
  Synthetic oligonucleotide
catccgcatacggatgggttgagcgaggctgctcaggtagccttagaaacccacg

SEQ ID NO: 172322 - DNA, 55 bp, Artificial
  Synthetic oligonucleotide
catctccaagatattgcaagttggttctaagagctctgaattgttcagccacagc

SEQ ID NO: 172323 - DNA, 54 bp, Artificial
  Synthetic oligonucleotide
actatggaaaagtgcaacggtttaaagtagttgctggtgagtgaaacgtataac

SEQ ID NO: 172324 - DNA, 53 bp, Artificial
  Synthetic oligonucleotide
accccgcccaaaccaccgacccagagcttaccgtcgtggttgtatgccaagcc

SEQ ID NO: 172325 - DNA, 55 bp, Artificial
  Synthetic oligonucleotide
cattatgcttcctaccagtactcatgcgcaattttgcgtaacctgtaccagtttc

SEQ ID NO: 172326 - DNA, 55 bp, Artificial
  Synthetic oligonucleotide
cattccgtatacaacgaccaacttacacgccctgcaagtctatttcggggcccga

SEQ ID NO: 172327 - DNA, 55 bp, Artificial
  Synthetic oligonucleotide
tttgcaatctcggcacaggcgtttgtaacgctcatgcctttgtctatgtcggttg

SEQ ID NO: 172328 - DNA, 55 bp, Artificial
  Synthetic oligonucleotide
ccaacccgctgtggtttgggagcgatatcaacggcggactgaaaaccatcgaaac

SEQ ID NO: 172329 - DNA, 55 bp, Artificial
  Synthetic oligonucleotide
acttccatcatgcctgctagtgcttctctaaatctataatgctgaacggaatctc

SEQ ID NO: 172330 - DNA, 55 bp, Artificial
  Synthetic oligonucleotide
ccaacgcaacgataaccgaaatagctcggcaaaccggctatcggaacgaagccca

SEQ ID NO: 172331 - DNA, 55 bp, Artificial
  Synthetic oligonucleotide
ccaagtactagcacaccgcgttgcggattgatgacgtttatgtagccctcattcc

SEQ ID NO: 172332 - DNA, 54 bp, Artificial
  Synthetic oligonucleotide
acccatcagggccactttatcggtagggttgatcacgaacgaaacgtcgctaaa

SEQ ID NO: 172333 - DNA, 55 bp, Artificial
  Synthetic oligonucleotide
ccacataagtgttgccaaagccagggtacttatcccactgaatatcgtggggacc

SEQ ID NO: 172334 - DNA, 60 bp, Artificial
  Synthetic oligonucleotide
actactgcctgagccttgcccgatctgggttcgcatggcctttacttcagacaggatagg

SEQ ID NO: 172335 - DNA, 54 bp, Artificial
  Synthetic oligonucleotide
ccaggcccggattctagcggagtacggggccaaggttaaagacagtagcgttga

SEQ ID NO: 172336 - DNA, 55 bp, Artificial
  Synthetic oligonucleotide
ccaggtagccatacctccaatacctacccctacttagtcagatggatgttattcc

SEQ ID NO: 172337 - DNA, 55 bp, Artificial
  Synthetic oligonucleotide
ccagtggcgcatatttcaagagttcattaacggtattccccttcgtgataacgct

SEQ ID NO: 172338 - DNA, 55 bp, Artificial
  Synthetic oligonucleotide
tttagggtacagtttgatgcttcgcgactagtgccaggcgtatacttttatcgca

SEQ ID NO: 172339 - DNA, 55 bp, Artificial
  Synthetic oligonucleotide
tgatcatcttttgcgagctcggtaggaccctcaccgctaataacccaaggtctgg

SEQ ID NO: 172340 - DNA, 55 bp, Artificial
  Synthetic oligonucleotide
tgatttgagagggtacaaacgaataggcgatgttcgtgagcaactaggagatggg

SEQ ID NO: 172341 - DNA, 55 bp, Artificial
  Synthetic oligonucleotide
tgcaagcaatccctgatctgaccaactgtgaaaaggagcctatccaatggcctgg

SEQ ID NO: 172342 - DNA, 55 bp, Artificial
  Synthetic oligonucleotide
actgccctcaatagtgtaggtatagtctgctcgaaatggttctttgtttcggccg

SEQ ID NO: 172343 - DNA, 55 bp, Artificial
  Synthetic oligonucleotide
tatataagcatcacaaataatgcgcttacagagtttccggccgtttcagtcgctg

SEQ ID NO: 172344 - DNA, 55 bp, Artificial
  Synthetic oligonucleotide
caggaccgcgccaactacattctgcgtctgggagctgcgattacggaggcgggta

SEQ ID NO: 172345 - DNA, 60 bp, Artificial
  Synthetic oligonucleotide
ccacaaataccctactgcgtcgaaaatctgatacacatctgccgattgctgttgtactcg

SEQ ID NO: 172346 - DNA, 60 bp, Artificial
  Synthetic oligonucleotide
actaaagcctatcctgtccgaagtgcgcgccatgcggacccagatcgggcaagactcagg

SEQ ID NO: 172347 - DNA, 55 bp, Artificial
  Synthetic oligonucleotide
tgcgtcatgggagcctatttagccacaccctttctaaccaatacgtttatcgggg

SEQ ID NO: 172348 - DNA, 55 bp, Artificial
  Synthetic oligonucleotide
tgcgggaattgattacggctccaaaacctcgggcaataccgttatatgccaccac

SEQ ID NO: 172349 - DNA, 55 bp, Artificial
  Synthetic oligonucleotide
tataggcatgaatcccctgcgtatgcccggtagttaacacaaaccataacaccca

SEQ ID NO: 172350 - DNA, 53 bp, Artificial
  Synthetic oligonucleotide
cagtccctcatgggtagtataaacctgaaccctaccggtccggggatccagtc

SEQ ID NO: 172351 - DNA, 53 bp, Artificial
  Synthetic oligonucleotide
catagatgttgcgtttaaattccacccaccgtcgggtaccagtcgggtcggta

SEQ ID NO: 172352 - DNA, 54 bp, Artificial
  Synthetic oligonucleotide
ttttgctgggcggtaaggtctttaccgactggattgctttcggtatatcggcta

SEQ ID NO: 172353 - DNA, 54 bp, Artificial
  Synthetic oligonucleotide
acttggctctccaggcagattacgcctgggtactcagcgtgcaacgaaaactgt

SEQ ID NO: 172354 - DNA, 53 bp, Artificial
  Synthetic oligonucleotide
cgttgccgcttattatcccgccgatagcctttccgcggtggttctttccaacg

SEQ ID NO: 172355 - DNA, 54 bp, Artificial
  Synthetic oligonucleotide
ttcccagaccaaagtgcaaacggggtgacatactcgactgatacccacgtgtag

SEQ ID NO: 172356 - DNA, 54 bp, Artificial
  Synthetic oligonucleotide
cgtcgaagtatcgaccgaagagtatctggcctattcaactgagcaaaccgaaaa

SEQ ID NO: 172357 - DNA, 55 bp, Artificial
  Synthetic oligonucleotide
acggttcagactgtgccactttcacggttctaaccgtgccacaaataaggcctaa

SEQ ID NO: 172358 - DNA, 54 bp, Artificial
  Synthetic oligonucleotide
aaaggcgcaagcacatgctacaacgatcattactcagcaagtaactcagcaggt

SEQ ID NO: 172359 - DNA, 54 bp, Artificial
  Synthetic oligonucleotide
cctaacgaactgtctatgtcaccaggctacaagtggcgtctatgcaacgctagg

SEQ ID NO: 172360 - DNA, 54 bp, Artificial
  Synthetic oligonucleotide
tggacctcaattactgtattaattggctcccacttaacctcaatcgcacttgtg

SEQ ID NO: 172361 - DNA, 54 bp, Artificial
  Synthetic oligonucleotide
tcggtagcagaaaaggcaaacgcgtctaataagaagaaatcccgtacatggtct

SEQ ID NO: 172362 - DNA, 54 bp, Artificial
  Synthetic oligonucleotide
gttgaaattggtggcgatggaaacgtaaagagtcgcggttgtggctcctttgac

SEQ ID NO: 172363 - DNA, 53 bp, Artificial
  Synthetic oligonucleotide
aataccaacgatcagtttccacctatcagcccaaacggaaccggacctaccca

SEQ ID NO: 172364 - DNA, 54 bp, Artificial
  Synthetic oligonucleotide
aggccaatcatcggtcccgctacgtaccagggccaaggcttacgaatgaggtca

SEQ ID NO: 172365 - DNA, 54 bp, Artificial
  Synthetic oligonucleotide
cgctagcaatagtccctcccagtatctgtcataagattgactgtagttagctgt

SEQ ID NO: 172366 - DNA, 54 bp, Artificial
  Synthetic oligonucleotide
cagacatacggcaggctcagaatgacattgactcgttttgtaatcccaatcacg

SEQ ID NO: 172367 - DNA, 53 bp, Artificial
  Synthetic oligonucleotide
ccggctccactattttggtgtattccgcctgaatgggtttgcgtacccgttcg

SEQ ID NO: 172368 - DNA, 53 bp, Artificial
  Synthetic oligonucleotide
acgctggttggccataggttcggagggtcaatttgttccgaaactacggtgat

SEQ ID NO: 172369 - DNA, 54 bp, Artificial
  Synthetic oligonucleotide
gggatctaccaccgaattcatccgaaagctctggcactagttcccattccaatt

SEQ ID NO: 172370 - DNA, 53 bp, Artificial
  Synthetic oligonucleotide
ggaacctttattgaagcagtataagcctggtggtacttccgtttaccacccca

SEQ ID NO: 172371 - DNA, 54 bp, Artificial
  Synthetic oligonucleotide
ccgaaacgctgctaaccgcttgccagtatgctagcaaactagcctgaatcttag

SEQ ID NO: 172372 - DNA, 53 bp, Artificial
  Synthetic oligonucleotide
actttatgacaaatcgttggctatatctgtactacggcgaccctacaccccga

SEQ ID NO: 172373 - DNA, 53 bp, Artificial
  Synthetic oligonucleotide
aggcttcaccagaatcgctaaactgtcattggacgaaagtgcttcggtagcac

SEQ ID NO: 172374 - DNA, 53 bp, Artificial
  Synthetic oligonucleotide
tgctcggactgtcgtactattcgacccaatccaccaggtttatcggctcctgc

SEQ ID NO: 172375 - DNA, 53 bp, Artificial
  Synthetic oligonucleotide
gagaggtgtccccgtgcggttagctatgggtgcacgtgaccttgaaaacggta

SEQ ID NO: 172376 - DNA, 53 bp, Artificial
  Synthetic oligonucleotide
aataatgggtggtcttagggacaaatcgtcggggccggatggcttggagaact

SEQ ID NO: 172377 - DNA, 53 bp, Artificial
  Synthetic oligonucleotide
gacatcaaagggtcgagcgtgtatacgcctttcagcggtttactataccgggc

SEQ ID NO: 172378 - DNA, 53 bp, Artificial
  Synthetic oligonucleotide
gcaggctatctacgaaacagcaacatgggaagaagcgctaacaatccgttact

SEQ ID NO: 172379 - DNA, 56 bp, Artificial
  Synthetic oligonucleotide
acgcctattccactcaatcggaaggggtagtcgcgcttatcataaagggaatccta

SEQ ID NO: 172380 - DNA, 53 bp, Artificial
  Synthetic oligonucleotide
aacggcgtagtgataatgacatgggccaccccagcggctaacgccttactacg

SEQ ID NO: 172381 - DNA, 53 bp, Artificial
  Synthetic oligonucleotide
aaacgcctgtttcgagaatatttgacaaggtatgccgctcagcagagtccggc

SEQ ID NO: 172382 - DNA, 53 bp, Artificial
  Synthetic oligonucleotide
tcattgcatgttatgtgtttaaagggaaacgatcttcaacgaaaaatgtcgcc

SEQ ID NO: 172383 - DNA, 53 bp, Artificial
  Synthetic oligonucleotide
ggagaagtcgataggtcaggccacgaccggttgaaagcctacgtaaaagcgca

SEQ ID NO: 172384 - DNA, 53 bp, Artificial
  Synthetic oligonucleotide
caactggttaaagctcaaggaacagtaaagcaatatgggtcgtctgatcagtt

SEQ ID NO: 172385 - DNA, 53 bp, Artificial
  Synthetic oligonucleotide
cgactccggacaggttcgaactgccgccctattgatgcctgatgagaatcaat

SEQ ID NO: 172386 - DNA, 53 bp, Artificial
  Synthetic oligonucleotide
cgccaggtttgccactcgtgcgacgttcccggcgactcatagtacacgtgctt

SEQ ID NO: 172387 - DNA, 53 bp, Artificial
  Synthetic oligonucleotide
ttcggtgattgggagttatccactgggagtaagtgatcaaaagacggtccacg

SEQ ID NO: 172388 - DNA, 53 bp, Artificial
  Synthetic oligonucleotide
acacttacacctgctactaggggtaggtgccatttgcgctgcgttgggtttaa

SEQ ID NO: 172389 - DNA, 53 bp, Artificial
  Synthetic oligonucleotide
gctaccttcagtctattgtttacagctcgcggcaagagggaggtggcatgcac

SEQ ID NO: 172390 - DNA, 52 bp, Artificial
  Synthetic oligonucleotide
acgcatccctctaaagtacaacgcccggctccctttcattaagggccgggcg

SEQ ID NO: 172391 - DNA, 53 bp, Artificial
  Synthetic oligonucleotide
cactggacgcttatccgacgtatcacccgatggtcgtccacgtacctatcagt

SEQ ID NO: 172392 - DNA, 53 bp, Artificial
  Synthetic oligonucleotide
atgcctcaaacacgggaagctatcaaccacgctcaaaatgccaatgttccgat

SEQ ID NO: 172393 - DNA, 53 bp, Artificial
  Synthetic oligonucleotide
aaaggcacataagtacgtttgagccgccccgtagcatcgtaggtttgagcccc

SEQ ID NO: 172394 - DNA, 53 bp, Artificial
  Synthetic oligonucleotide
ggtattaaggctccgcttcaggagttgcgcgtttagggctacaatcacggtac

SEQ ID NO: 172395 - DNA, 53 bp, Artificial
  Synthetic oligonucleotide
aaaaccggcgtgccataggttgcaaaccataccgtgcctttagaatctacatc

SEQ ID NO: 172396 - DNA, 53 bp, Artificial
  Synthetic oligonucleotide
atccgacccgccatcaggtagccatctaccaacatcacgaccggccccacacc

SEQ ID NO: 172397 - DNA, 53 bp, Artificial
  Synthetic oligonucleotide
atcagagacacgcgacagattccttttgaggtggatcctccggagcatacgga

SEQ ID NO: 172398 - DNA, 52 bp, Artificial
  Synthetic oligonucleotide
ttttggcgactaatcaggcggtaactctttcgggctctggttcatttaccgg

SEQ ID NO: 172399 - DNA, 52 bp, Artificial
  Synthetic oligonucleotide
ggcaaaccaacactcagtcaggtcgtttccctgggcggttcggaagagcagc

SEQ ID NO: 172400 - DNA, 52 bp, Artificial
  Synthetic oligonucleotide
tgcgattcagagccgtccgactgctgaatggtcaactggccatccgtaatgc

SEQ ID NO: 172401 - DNA, 59 bp, Artificial
  Synthetic oligonucleotide
acgataggctataagtatcgtttattctcatgcaaacccgcccatttgacacaagatcc

SEQ ID NO: 172402 - DNA, 52 bp, Artificial
  Synthetic oligonucleotide
actcaacacccggatcgaccgtttggaggggcggccccaagcagccacccaa

SEQ ID NO: 172403 - DNA, 52 bp, Artificial
  Synthetic oligonucleotide
aattaacccgccccttaatgatgcggtcagcatagtacggaatctctacaag

SEQ ID NO: 172404 - DNA, 52 bp, Artificial
  Synthetic oligonucleotide
actctttggtgttgagacttcaaacatacggctacccatctcctcagtagcc

SEQ ID NO: 172405 - DNA, 52 bp, Artificial
  Synthetic oligonucleotide
tgccgcctcttacccctgcatccggattgttaccggggtatttcgtaaacaa

SEQ ID NO: 172406 - DNA, 52 bp, Artificial
  Synthetic oligonucleotide
tgctggtacatttctagccgttgactctgttcgtggctctgagcgcgttttt

SEQ ID NO: 172407 - DNA, 52 bp, Artificial
  Synthetic oligonucleotide
tatgtatctgaaggagttgagtactttatccgtaattacggctatcctgacc

SEQ ID NO: 172408 - DNA, 52 bp, Artificial
  Synthetic oligonucleotide
cccctcccaaatgcgcatccagtttccagcggcggaacttgttatacccgaa

SEQ ID NO: 172409 - DNA, 51 bp, Artificial
  Synthetic oligonucleotide
ccgtttgctttcgcgttttaaatggggcttaacggccgaccttcagcaacc

SEQ ID NO: 172410 - DNA, 52 bp, Artificial
  Synthetic oligonucleotide
tagccgtgctaaggtcggctaaaatgcctgcgtacacgctttcctgggtgtc

SEQ ID NO: 172411 - DNA, 52 bp, Artificial
  Synthetic oligonucleotide
accaattgagctgaattcccggacataccaccaaataatcgtacgtataaac

SEQ ID NO: 172412 - DNA, 60 bp, Artificial
  Synthetic oligonucleotide
acgagccattaagtcttgtgcgtagctttgcaaggcaggaatctgacgcataacagaggc

SEQ ID NO: 172413 - DNA, 52 bp, Artificial
  Synthetic oligonucleotide
ccggcccaaaactgaaccgttccaaatcgacacgacctaccgcccggcacag

SEQ ID NO: 172414 - DNA, 52 bp, Artificial
  Synthetic oligonucleotide
tgccatgtgctcagatgcaatggggcgattaggggcgctgtgtgtacagggg

SEQ ID NO: 172415 - DNA, 52 bp, Artificial
  Synthetic oligonucleotide
aaagcagaataatagggtcgctgacacagttggagcatgtttggcctttacc

SEQ ID NO: 172416 - DNA, 52 bp, Artificial
  Synthetic oligonucleotide
gctatttccgcataagcactcgctcctgaagtccacttctcgggatactgct

SEQ ID NO: 172417 - DNA, 52 bp, Artificial
  Synthetic oligonucleotide
gcgtttaccccctgattcccgctaagaagagcctcgttttcagaggctcaac

SEQ ID NO: 172418 - DNA, 52 bp, Artificial
  Synthetic oligonucleotide
agtgttcattacgtgtcctgatttgtctacaacaaaggtaccgcccctatac

SEQ ID NO: 172419 - DNA, 52 bp, Artificial
  Synthetic oligonucleotide
gccacaatggattgcttccgcacatcggcagacaatgaaggactggccgctc

SEQ ID NO: 172420 - DNA, 52 bp, Artificial
  Synthetic oligonucleotide
gcggataggcctgttcgtaattgttgagcttggtataaattactgcaagtag

SEQ ID NO: 172421 - DNA, 52 bp, Artificial
  Synthetic oligonucleotide
ttcgccgttataggggactaaaccgcccatgattttgcgtccacgagccaaa

SEQ ID NO: 172422 - DNA, 52 bp, Artificial
  Synthetic oligonucleotide
aacggtcaaatatgaacacgtatatttacatgcctactccgacgggttgaca

SEQ ID NO: 172423 - DNA, 56 bp, Artificial
  Synthetic oligonucleotide
acgagaaaggggcgtagagagtcagtttaagcatgacagtaaagggatattggtcg

SEQ ID NO: 172424 - DNA, 52 bp, Artificial
  Synthetic oligonucleotide
cgtagctaagggcttgatcccatttgatactgtgtaaaaacaccatcgggtc

SEQ ID NO: 172425 - DNA, 51 bp, Artificial
  Synthetic oligonucleotide
gcgccgtaccctggcatctgatccgaacggctgtcctgtagatcgacccaa

SEQ ID NO: 172426 - DNA, 51 bp, Artificial
  Synthetic oligonucleotide
gtatgtgaactcaactcgattttcagcgttgggttgtcttttagaattgtc

SEQ ID NO: 172427 - DNA, 51 bp, Artificial
  Synthetic oligonucleotide
ggctggggtcttactccaaacgcctgagagggggattgttctatctggggt

SEQ ID NO: 172428 - DNA, 51 bp, Artificial
  Synthetic oligonucleotide
ggctgccgacacaatcccgcgcccccagtacgcctgcccaagccagtacca

SEQ ID NO: 172429 - DNA, 51 bp, Artificial
  Synthetic oligonucleotide
gatagccgctcaagcattggggatagccgccggagcttatgagttggccct

SEQ ID NO: 172430 - DNA, 51 bp, Artificial
  Synthetic oligonucleotide
gcgttgaccgttccgctcgacaatccccggcctctcaggtacgtgtcgtcg

SEQ ID NO: 172431 - DNA, 51 bp, Artificial
  Synthetic oligonucleotide
gccggtgccttggcccgccgcatttgttggtacgtggacaaaggaacggtc

SEQ ID NO: 172432 - DNA, 51 bp, Artificial
  Synthetic oligonucleotide
acggaatggccgtaggagcctggaatgccggtagagggaatgccagtgctg

SEQ ID NO: 172433 - DNA, 51 bp, Artificial
  Synthetic oligonucleotide
ggcgaaacgcatcgggtagtcttggcactgcgccaaagcgtcgctaccaaa

SEQ ID NO: 172434 - DNA, 60 bp, Artificial
  Synthetic oligonucleotide
accgccagcagacggagatagccggatggaagtcattcggcttatgggtcagcgagaagt

SEQ ID NO: 172435 - DNA, 51 bp, Artificial
  Synthetic oligonucleotide
aacctcgtatggtccacccgtgcaccccaattccggataggccgctaatgc

SEQ ID NO: 172436 - DNA, 51 bp, Artificial
  Synthetic oligonucleotide
tttatcgtgaccgatcaacaaggctattggaatcccatgaaccgcgtcaac

SEQ ID NO: 172437 - DNA, 51 bp, Artificial
  Synthetic oligonucleotide
ggtggactcgaaccccctgctacacctttcgtgttcccagttcctgccggt

SEQ ID NO: 172438 - DNA, 51 bp, Artificial
  Synthetic oligonucleotide
acgacttcgctcaccagaatgaccggagtaacgtccgtgtagttcttaaaa

SEQ ID NO: 172439 - DNA, 51 bp, Artificial
  Synthetic oligonucleotide
gctgtccacaaaccgacaaaattggaatccgggggtacataccccttcttt

SEQ ID NO: 172440 - DNA, 51 bp, Artificial
  Synthetic oligonucleotide
ttcgtgatcacattggaaataaacggataggccgttgccaatacccgataa

SEQ ID NO: 172441 - DNA, 51 bp, Artificial
  Synthetic oligonucleotide
ggcaccccgtctaagtcgcgcggcaactgccccactgcagagttcacttta

SEQ ID NO: 172442 - DNA, 51 bp, Artificial
  Synthetic oligonucleotide
ggaaacagtgtggagttgaccatacaggcagaagactttgccactacgggg

SEQ ID NO: 172443 - DNA, 51 bp, Artificial
  Synthetic oligonucleotide
gcaggaatgtcctccggagatctcacgcaacgatatgatcaagtaagtagg

SEQ ID NO: 172444 - DNA, 51 bp, Artificial
  Synthetic oligonucleotide
gcatccaacactagagcagggcgggtttggaggtgggccaatcgctgggct

SEQ ID NO: 172445 - DNA, 58 bp, Artificial
  Synthetic oligonucleotide
accgaccgaaggtcatcaaatctatccgtatctgttacgaggagtgcccattgaagcc

SEQ ID NO: 172446 - DNA, 51 bp, Artificial
  Synthetic oligonucleotide
aaccagcgaactgccggttgctccgtttgaccaggtatacgtaccgccggt

SEQ ID NO: 172447 - DNA, 51 bp, Artificial
  Synthetic oligonucleotide
acgatccatgcacaaccaacagctgccgctacgctggcgggtagcagtagc

SEQ ID NO: 172448 - DNA, 51 bp, Artificial
  Synthetic oligonucleotide
ttgaattagtacgcggaacaggatcattgcaatatggagcgcagtttgggg

SEQ ID NO: 172449 - DNA, 51 bp, Artificial
  Synthetic oligonucleotide
tggtaaagagagcgggtagttgtcggttcctatttgaagggtctactacgt

SEQ ID NO: 172450 - DNA, 51 bp, Artificial
  Synthetic oligonucleotide
ccgaagcgtgtcagcggtaggaggggtactcattgtactcatggtctgcgc

SEQ ID NO: 172451 - DNA, 51 bp, Artificial
  Synthetic oligonucleotide
agtgcatcgacgttggcaattaagcgccagttcaatttacgaatcccggga

SEQ ID NO: 172452 - DNA, 51 bp, Artificial
  Synthetic oligonucleotide
tgaataagcgttagatgacaaacttggccggttctcgttagtcagacgagg

SEQ ID NO: 172453 - DNA, 51 bp, Artificial
  Synthetic oligonucleotide
aatctgcagtaaggatgaatcgatcaccccaatcagagtagtcgagtcagc

SEQ ID NO: 172454 - DNA, 51 bp, Artificial
  Synthetic oligonucleotide
tactcatcagcatctcttaccgactcgtgctcagaatgggttttcccatca

SEQ ID NO: 172455 - DNA, 51 bp, Artificial
  Synthetic oligonucleotide
atacggtgccgttcttgactgtaatgcgcccaactgtggcggttatacact

SEQ ID NO: 172456 - DNA, 58 bp, Artificial
  Synthetic oligonucleotide
ccactaattgcatcttagtaaatcgggtattcagatctacataaaagggcctcaccat

SEQ ID NO: 172457 - DNA, 57 bp, Artificial
  Synthetic oligonucleotide
cagaaacaaaggtcatgaacaatagcaatttcaggcagttagtaagaaactaattta

SEQ ID NO: 172458 - DNA, 51 bp, Artificial
  Synthetic oligonucleotide
catcagtggctccgctctctgctggtagccagccatgatgcagctacgcgc

SEQ ID NO: 172459 - DNA, 51 bp, Artificial
  Synthetic oligonucleotide
cgtagtggttggtacagcgttgcaggctacggtatggccacgacagtgggc

SEQ ID NO: 172460 - DNA, 51 bp, Artificial
  Synthetic oligonucleotide
atataacgtaaatcctgtcattagcgtcattgtcgtgaatctgacccatta

SEQ ID NO: 172461 - DNA, 51 bp, Artificial
  Synthetic oligonucleotide
cggtacatccgttcgcgtctgtgacggttacggcataggttcctgcggcta

SEQ ID NO: 172462 - DNA, 51 bp, Artificial
  Synthetic oligonucleotide
cgggccttaacacaaaattcttggttgagtgatgctgccaaggccacgtac

SEQ ID NO: 172463 - DNA, 51 bp, Artificial
  Synthetic oligonucleotide
cagggcgggtttggaggtgggccaatcgctgggcttctaccagtaattcct

SEQ ID NO: 172464 - DNA, 51 bp, Artificial
  Synthetic oligonucleotide
tacctgaaaattcagcccgcctacgtaccatgacagccatttattattgcg

SEQ ID NO: 172465 - DNA, 51 bp, Artificial
  Synthetic oligonucleotide
atcgtccggctcggtatcaaaattctcgcttgtgggcttaccgcctttatt

SEQ ID NO: 172466 - DNA, 51 bp, Artificial
  Synthetic oligonucleotide
cctctgcacatgagcacacctacatggatgcgagggccgggcgactgtaca

SEQ ID NO: 172467 - DNA, 51 bp, Artificial
  Synthetic oligonucleotide
atggtccacccgtgcaccccaattccggataggccgctaatgccgccttag

SEQ ID NO: 172468 - DNA, 52 bp, Artificial
  Synthetic oligonucleotide
cacccttctttttaaccggttcggacggattcatagcgaacaaagtgagcgg

SEQ ID NO: 172469 - DNA, 51 bp, Artificial
  Synthetic oligonucleotide
cgctagtggttagattcggcatcctccagtaaaggcatcattcgcctgagc

SEQ ID NO: 172470 - DNA, 51 bp, Artificial
  Synthetic oligonucleotide
atttagacagattgccggtgccttggcccgccgcatttgttggtacgtgga

SEQ ID NO: 172471 - DNA, 51 bp, Artificial
  Synthetic oligonucleotide
cgcctggttgccctattgggactaacttcctccggaacgaaccgtacaacc

SEQ ID NO: 172472 - DNA, 51 bp, Artificial
  Synthetic oligonucleotide
aactccggtgcgttgaccgttccgctcgacaatccccggcctctcaggtac

SEQ ID NO: 172473 - DNA, 51 bp, Artificial
  Synthetic oligonucleotide
atttcccgatcgaaattaggggcgtcagctttgcgtttgcctgtatttgtc

SEQ ID NO: 172474 - DNA, 51 bp, Artificial
  Synthetic oligonucleotide
tccaatagcgtataaagccccaagttgtggcggcctcaaacccttacgatc

SEQ ID NO: 172475 - DNA, 51 bp, Artificial
  Synthetic oligonucleotide
aagcaagctatcagtactacgcgcacggcccgcttgccagaaccaagaccg

SEQ ID NO: 172476 - DNA, 51 bp, Artificial
  Synthetic oligonucleotide
aaggcgaccggtatacaggtctgctgcgcccacaaattctgtaccgccaga

SEQ ID NO: 172477 - DNA, 51 bp, Artificial
  Synthetic oligonucleotide
ccccaacggcaggccaaactgccatcaatcgtacagcatgcagcctagcct

SEQ ID NO: 172478 - DNA, 51 bp, Artificial
  Synthetic oligonucleotide
agcctgtgctggtaaagcttgtattggttgccccgcttactgcggtggcta

SEQ ID NO: 172479 - DNA, 57 bp, Artificial
  Synthetic oligonucleotide
caatacagtatgtaccaatcgttgcgtttcaaaatgtgtggcccttcaatccaaacc

SEQ ID NO: 172480 - DNA, 51 bp, Artificial
  Synthetic oligonucleotide
agcggccgtttaacagaccggacgttccggtaggaagtgctgtttacaact

SEQ ID NO: 172481 - DNA, 51 bp, Artificial
  Synthetic oligonucleotide
agctgcagccgactcttgagcccgtatttctgctgtgccgcgtgtccctaa

SEQ ID NO: 172482 - DNA, 51 bp, Artificial
  Synthetic oligonucleotide
agcccggagagccttgtagcctcggccctaccacatcggtaagttggaacg

SEQ ID NO: 172483 - DNA, 51 bp, Artificial
  Synthetic oligonucleotide
aggagaggttccggatcttttcctgttttccgggatacaagccattaagga

SEQ ID NO: 172484 - DNA, 51 bp, Artificial
  Synthetic oligonucleotide
agcccatctaatcaggcacttagatgccgagcgaggcttgccacccgccca

SEQ ID NO: 172485 - DNA, 51 bp, Artificial
  Synthetic oligonucleotide
aacgcggcttccgcgcaaacgggtagtaacggggcttgtaagattcggcga

SEQ ID NO: 172486 - DNA, 51 bp, Artificial
  Synthetic oligonucleotide
aggagtgggatgcgaccaacttccgcaacggggaagtattgcccgacggta

SEQ ID NO: 172487 - DNA, 51 bp, Artificial
  Synthetic oligonucleotide
ctgtggaagtaatcgttgggcataattgagtcgttccatcactcgtgttct

SEQ ID NO: 172488 - DNA, 51 bp, Artificial
  Synthetic oligonucleotide
aacgcgttgttcagatttgatggatcggtgacaattcggtagtctagcccc

SEQ ID NO: 172489 - DNA, 51 bp, Artificial
  Synthetic oligonucleotide
agcaactaagctgttgtgcccctgggaggtctgtgcgtttataggttgggg

SEQ ID NO: 172490 - DNA, 58 bp, Artificial
  Synthetic oligonucleotide
caaggcttacgaatgaggtcaatgaattgttccatacgagtttaaattagtctgagta

SEQ ID NO: 172491 - DNA, 51 bp, Artificial
  Synthetic oligonucleotide
aggcagcagtgcctccattctgttcagcggccttaaacgcgtacgtccgtt

SEQ ID NO: 172492 - DNA, 51 bp, Artificial
  Synthetic oligonucleotide
tgactgcggctcccaaaatggtagccgtgattaaaaacggccatacagccg

SEQ ID NO: 172493 - DNA, 51 bp, Artificial
  Synthetic oligonucleotide
gtgagcagtaaatatcgcgttgtcatagcatatgttcagataatccctccg

SEQ ID NO: 172494 - DNA, 51 bp, Artificial
  Synthetic oligonucleotide
aggtcattattacgactgcttatgccagctacgccctgagaggttatgaac

SEQ ID NO: 172495 - DNA, 51 bp, Artificial
  Synthetic oligonucleotide
aggttgcctgcgacgagtgcagcggtaccggagctaaaaatggtgccgtac

SEQ ID NO: 172496 - DNA, 51 bp, Artificial
  Synthetic oligonucleotide
aatgcgtcggaagcgtatatttcactggaaagccttgacagctccgttcat

SEQ ID NO: 172497 - DNA, 51 bp, Artificial
  Synthetic oligonucleotide
cattttgttatcccgattacgactgaatggtatttaagagactaccataca

SEQ ID NO: 172498 - DNA, 51 bp, Artificial
  Synthetic oligonucleotide
agtactacgcgcacggcccgcttgccagaaccaagaccggagagctgaacg

SEQ ID NO: 172499 - DNA, 51 bp, Artificial
  Synthetic oligonucleotide
cccgttggggcacgtagattattcggtcgaatgcgtagggttcattaccgt

SEQ ID NO: 172500 - DNA, 51 bp, Artificial
  Synthetic oligonucleotide
tagcccatattggctcggattctcaaaagttacaggccttcacccgagccg

SEQ ID NO: 172501 - DNA, 55 bp, Artificial
  Synthetic oligonucleotide
caagcgggcgttacaactcaggttaccgtcattggattgaaggttgtttaaggca

SEQ ID NO: 172502 - DNA, 50 bp, Artificial
  Synthetic oligonucleotide
aaatctccgctacctggctggctgaataacggcctaatcgggcgcgggca

SEQ ID NO: 172503 - DNA, 50 bp, Artificial
  Synthetic oligonucleotide
aacaaactcagactgggggcgacggtacacgacccggaaagtggccgact

SEQ ID NO: 172504 - DNA, 50 bp, Artificial
  Synthetic oligonucleotide
aaatccaatcctcgcgatgacataccggccagcacgagtccgggcatcga

SEQ ID NO: 172505 - DNA, 50 bp, Artificial
  Synthetic oligonucleotide
aaaaccacacgttcgacccgctttacggcacgccgcacaagttttgggga

SEQ ID NO: 172506 - DNA, 50 bp, Artificial
  Synthetic oligonucleotide
ggtggactgtatctcgcctagcatctcagtaagtttcgatagcgtccaaa

SEQ ID NO: 172507 - DNA, 50 bp, Artificial
  Synthetic oligonucleotide
aaagttcagggggccaaactccgtccattcgggccgcgaccaggcaccgt

SEQ ID NO: 172508 - DNA, 50 bp, Artificial
  Synthetic oligonucleotide
taccggcaacgattttgataggagtctaaccgtgccgggctgggggcgag

SEQ ID NO: 172509 - DNA, 50 bp, Artificial
  Synthetic oligonucleotide
tacctatcccccgatggcagcaagttgggcgttggggtacccggcatgga

SEQ ID NO: 172510 - DNA, 50 bp, Artificial
  Synthetic oligonucleotide
aaatcaccggcccgtgcacacctgtcagtttggataccgcgaaaacgcgg

SEQ ID NO: 172511 - DNA, 50 bp, Artificial
  Synthetic oligonucleotide
tagtggcagaactgcgtatactgatagccgttgggatgttcggctttgta

SEQ ID NO: 172512 - DNA, 60 bp, Artificial
  Synthetic oligonucleotide
attgtagttctgaatactcataacgggcagtagtaatagcattatgctggcgaattgaaa

SEQ ID NO: 172513 - DNA, 50 bp, Artificial
  Synthetic oligonucleotide
aaagtgtggtggctgggaacggcctatacggtgtacccaacgcttcgccg

SEQ ID NO: 172514 - DNA, 50 bp, Artificial
  Synthetic oligonucleotide
aaaggtgttcacagccggtggcgtacccaccagtaagctaggcgtacccc

SEQ ID NO: 172515 - DNA, 50 bp, Artificial
  Synthetic oligonucleotide
tttgatcccaccggcatacccacatgcttacgggaaggccacaccagcga

SEQ ID NO: 172516 - DNA, 50 bp, Artificial
  Synthetic oligonucleotide
tttgatggcacccaacgtaacagaagtataaacccgtgaatgtaactcct

SEQ ID NO: 172517 - DNA, 50 bp, Artificial
  Synthetic oligonucleotide
tgccataggctaagccggaaccgaagcagtacggccaccccaaagagcga

SEQ ID NO: 172518 - DNA, 50 bp, Artificial
  Synthetic oligonucleotide
aaacgggggtcccggttctcataaggcgaactggcgtgagccggattgct

SEQ ID NO: 172519 - DNA, 50 bp, Artificial
  Synthetic oligonucleotide
gtggataccacaaatccggggcaacctccacaacaaggaccaccgggcca

SEQ ID NO: 172520 - DNA, 50 bp, Artificial
  Synthetic oligonucleotide
aaacggtgccggttaccgccactttcaaatcgacgcgcgtggtgaatggg

SEQ ID NO: 172521 - DNA, 50 bp, Artificial
  Synthetic oligonucleotide
tgacgggcggtaagtacctgaccatcgatgtgaaccgggaggccctgggt

SEQ ID NO: 172522 - DNA, 50 bp, Artificial
  Synthetic oligonucleotide
tgacccggtttatgagcccccttatccccttagacttagctgtcttatga

SEQ ID NO: 172523 - DNA, 58 bp, Artificial
  Synthetic oligonucleotide
atcaccccgtgtgatgacttcggcagaacattgtaccgaggcggtatctaccaaggcc

SEQ ID NO: 172524 - DNA, 50 bp, Artificial
  Synthetic oligonucleotide
aacagagcccctacgcctttatgcaggcgcatatggcagcagacgtccgc

SEQ ID NO: 172525 - DNA, 50 bp, Artificial
  Synthetic oligonucleotide
aaacgcctgactaccccgacccgccatgacgtcatagaacaaggccctcc

SEQ ID NO: 172526 - DNA, 50 bp, Artificial
  Synthetic oligonucleotide
aacatgcggcaagctacgcatcgcggtggtaaagaatgagccggagctga

SEQ ID NO: 172527 - DNA, 50 bp, Artificial
  Synthetic oligonucleotide
aaacgccgcgctaccaagtcactgcttccctcatggtccgcgacgattcc

SEQ ID NO: 172528 - DNA, 50 bp, Artificial
  Synthetic oligonucleotide
aaagcaatctgagcatagggctgcgctgggctacccccgtcacagagcgt

SEQ ID NO: 172529 - DNA, 50 bp, Artificial
  Synthetic oligonucleotide
tctgggtttgatcgaagaacgctatgaacggtgggttaaccaccaaacga

SEQ ID NO: 172530 - DNA, 50 bp, Artificial
  Synthetic oligonucleotide
aaagctttcatacgagcccgctaccaccgcaatggccccgcgtcccggcg

SEQ ID NO: 172531 - DNA, 50 bp, Artificial
  Synthetic oligonucleotide
aacactgaccccgcctaaccgttttacggtccacatgccggacgtcccat

SEQ ID NO: 172532 - DNA, 50 bp, Artificial
  Synthetic oligonucleotide
aaaatgtaggctatacgccctgttttcgccgtgaggcgggcagctggggt

SEQ ID NO: 172533 - DNA, 50 bp, Artificial
  Synthetic oligonucleotide
aacatttcgagcgactcgttctccgcaacccggttggtatcgccgccctc

SEQ ID NO: 172534 - DNA, 55 bp, Artificial
  Synthetic oligonucleotide
atcaatgaaccgttgaccacggcccgtttttcaggcttgtacgggttatggcatc

SEQ ID NO: 172535 - DNA, 50 bp, Artificial
  Synthetic oligonucleotide
tcggcaggaatttcatccggcatcattggttcgggagccgctgcgatcat

SEQ ID NO: 172536 - DNA, 50 bp, Artificial
  Synthetic oligonucleotide
tcgcggctcgctccgtaggggtaatttcagtgaccacgtcatggtcagcc

SEQ ID NO: 172537 - DNA, 50 bp, Artificial
  Synthetic oligonucleotide
tcgcaacctgcaaggcggataaagtacgctgctctgccctggtaatgccc

SEQ ID NO: 172538 - DNA, 50 bp, Artificial
  Synthetic oligonucleotide
ttcgggcttacctgccaggtagtaattcggtgcgggtgggtcaactggcc

SEQ ID NO: 172539 - DNA, 50 bp, Artificial
  Synthetic oligonucleotide
aaaggcgtgtccccgggctcatgcggtccttcctgacgcagaatggactc

SEQ ID NO: 172540 - DNA, 50 bp, Artificial
  Synthetic oligonucleotide
aaaatccctcccacagccgtagcttcggggttggactcgtggcagttgcc

SEQ ID NO: 172541 - DNA, 50 bp, Artificial
  Synthetic oligonucleotide
aacacgggcgccgttgccaacatgtcggaatcggataaaccgctaacggc

SEQ ID NO: 172542 - DNA, 50 bp, Artificial
  Synthetic oligonucleotide
tcatttcggaccggaaccttgggtggaaaaagctccgcgtcccgactgga

SEQ ID NO: 172543 - DNA, 50 bp, Artificial
  Synthetic oligonucleotide
aaccagctctcggaattaccggcccggattgaccgcatgaaacgcgtcca

SEQ ID NO: 172544 - DNA, 50 bp, Artificial
  Synthetic oligonucleotide
aacaccccgctggtagtgctgagggtaccgctgccttctaagccggtacc

SEQ ID NO: 172545 - DNA, 56 bp, Artificial
  Synthetic oligonucleotide
atagtgtagggacagttaggccaatcatcggtcccgctacgtaccagggccaaggc

SEQ ID NO: 172546 - DNA, 50 bp, Artificial
  Synthetic oligonucleotide
aacaccccgccatgtgggctatcagggcgttccggagtcgatggatacgc

SEQ ID NO: 172547 - DNA, 50 bp, Artificial
  Synthetic oligonucleotide
aaaaggccgtatccggaccgactccgtgggctaccccctcgaccacattc

SEQ ID NO: 172548 - DNA, 50 bp, Artificial
  Synthetic oligonucleotide
agggcttggaacaccacccgaaccgatagagaggtggcgcaaaactggct

SEQ ID NO: 172549 - DNA, 50 bp, Artificial
  Synthetic oligonucleotide
aggcttaggccagccggggaggctgccagatgtgaagccgaaacgtggtc

SEQ ID NO: 172550 - DNA, 50 bp, Artificial
  Synthetic oligonucleotide
aggcagtgatgtgaggcgtgtcttcgtagccgtagacacctgccctgggg

SEQ ID NO: 172551 - DNA, 50 bp, Artificial
  Synthetic oligonucleotide
agcttatttcgttacacgaaatctgggcttaacggctagtctgaactaca

SEQ ID NO: 172552 - DNA, 50 bp, Artificial
  Synthetic oligonucleotide
agctaagcacccacggtggctcggtgcgaggcaacattcgcgacttgttt

SEQ ID NO: 172553 - DNA, 50 bp, Artificial
  Synthetic oligonucleotide
aatgcgcctgcaagcggacgagtatgttaccctctccggcccgtacctct

SEQ ID NO: 172554 - DNA, 50 bp, Artificial
  Synthetic oligonucleotide
agcggctgagagtgcttcgcttgccgaagaggtacgacttgcttgcgagc

SEQ ID NO: 172555 - DNA, 50 bp, Artificial
  Synthetic oligonucleotide
agcgactaccgggcttccttcatcgtactcctcactggtgagtgcccccg

SEQ ID NO: 172556 - DNA, 59 bp, Artificial
  Synthetic oligonucleotide
ataccactgacttgcacggcagtacccgcgttacggatcatagccaatggggccgctcc

SEQ ID NO: 172557 - DNA, 50 bp, Artificial
  Synthetic oligonucleotide
agccggttatcacttcgtcgaagactaaagccgttcccgaagcttcggta

SEQ ID NO: 172558 - DNA, 50 bp, Artificial
  Synthetic oligonucleotide
agccgctcagggtctggctaggtcccaggtcgagcaagggtcggtaacta

SEQ ID NO: 172559 - DNA, 50 bp, Artificial
  Synthetic oligonucleotide
agccgcaggtaagcgggcgtcaaccccagctagagccttggcgggtagac

SEQ ID NO: 172560 - DNA, 50 bp, Artificial
  Synthetic oligonucleotide
aatgcgtaatagagccccgcattgtcgtgcagcctgaggtcccggcgaaa

SEQ ID NO: 172561 - DNA, 50 bp, Artificial
  Synthetic oligonucleotide
agaggtccatacctgtgcaggtccgcctccccatcctgtaccgtctgtgg

SEQ ID NO: 172562 - DNA, 50 bp, Artificial
  Synthetic oligonucleotide
agagccaatggaacagcttgtggagctcccgcgtcgctcactgaggtggt

SEQ ID NO: 172563 - DNA, 50 bp, Artificial
  Synthetic oligonucleotide
acttccggtgcagatggactggttgttgcctgggatatgcatgcgcccga

SEQ ID NO: 172564 - DNA, 50 bp, Artificial
  Synthetic oligonucleotide
actggtggttcggggcctactggcggagaccctaaccccggttgctatcg

SEQ ID NO: 172565 - DNA, 50 bp, Artificial
  Synthetic oligonucleotide
actggcgcgggcaaagggttttgtaccgggcacgacctcaaagcacccga

SEQ ID NO: 172566 - DNA, 50 bp, Artificial
  Synthetic oligonucleotide
aatgggggtcggagccgttgtattgcctgcccctcccgaagcaacggtat

SEQ ID NO: 172567 - DNA, 59 bp, Artificial
  Synthetic oligonucleotide
ccatcatggaaacggaccatcactattcggtagagctggttttagacatgacttagggc

SEQ ID NO: 172568 - DNA, 60 bp, Artificial
  Synthetic oligonucleotide
atacagcacgactctggaagagtgacagttatggatgtcagtaatgcctatgacagttat

SEQ ID NO: 172569 - DNA, 50 bp, Artificial
  Synthetic oligonucleotide
actgaccaatacgtgcggccttcggccactgtctcatcaggcccggtgct

SEQ ID NO: 172570 - DNA, 50 bp, Artificial
  Synthetic oligonucleotide
acaaaccttgaaggcactgcgtgcgggcaaacacgtggcctgtaccgtcc

SEQ ID NO: 172571 - DNA, 50 bp, Artificial
  Synthetic oligonucleotide
atttggcacaaagcctcccacaccctgcgctgaaaccccgtaccttgtgg

SEQ ID NO: 172572 - DNA, 50 bp, Artificial
  Synthetic oligonucleotide
attggacgccagtctagaggttgtgagcaaccgggaggtgcaagggcacc

SEQ ID NO: 172573 - DNA, 50 bp, Artificial
  Synthetic oligonucleotide
attgcccccgctcccctgttgggtgcccggtaggcgtacaatgatgttgt

SEQ ID NO: 172574 - DNA, 50 bp, Artificial
  Synthetic oligonucleotide
atgtctaccaccgaagacaaccgccctccgtagcgggcaggcatcccacc

SEQ ID NO: 172575 - DNA, 50 bp, Artificial
  Synthetic oligonucleotide
atgctcagggttggtcaggcaagttcaaaggttggcgcaccgcacgcatt

SEQ ID NO: 172576 - DNA, 50 bp, Artificial
  Synthetic oligonucleotide
atcggtacgttgacgcgccccgtgtccgctaaaccaaaacaacagcgtgg

SEQ ID NO: 172577 - DNA, 50 bp, Artificial
  Synthetic oligonucleotide
atcggggcagctctgctgtggcgagctctgcgaagctaatgtggtaggaa

SEQ ID NO: 172578 - DNA, 50 bp, Artificial
  Synthetic oligonucleotide
atcgcccacggttgttgccaataggctgacaggcgaatttgccccacggc

SEQ ID NO: 172579 - DNA, 60 bp, Artificial
  Synthetic oligonucleotide
ataatttattcctacatgagcgaccgaaaaagtctatctgtcagcgcaggtactcaccaa

SEQ ID NO: 172580 - DNA, 50 bp, Artificial
  Synthetic oligonucleotide
atcgcattcgtcaggtgcaagcgcacgagtcttcgcgtcgttcgcggatg

SEQ ID NO: 172581 - DNA, 50 bp, Artificial
  Synthetic oligonucleotide
aagtcaacggcctcccgctgagtacgggggacagcattcaacgacccaac

SEQ ID NO: 172582 - DNA, 50 bp, Artificial
  Synthetic oligonucleotide
aagtggatgcccctcagcagcataccgaagccgtagggacctggcgccgc

SEQ ID NO: 172583 - DNA, 50 bp, Artificial
  Synthetic oligonucleotide
aagttaagcggggctgcctaagcccgggtccgccgatgatacttggactg

SEQ ID NO: 172584 - DNA, 50 bp, Artificial
  Synthetic oligonucleotide
atagtggcttggcggggcctgatggcactgaacgcactccgttgagcggg

SEQ ID NO: 172585 - DNA, 50 bp, Artificial
  Synthetic oligonucleotide
atactttcggcacgtgtcgggcgcataacccaacgtccgcagccagccac

SEQ ID NO: 172586 - DNA, 50 bp, Artificial
  Synthetic oligonucleotide
atacgctgggggcacccaaacccaccctcaacatcgcttggtgggcaaca

SEQ ID NO: 172587 - DNA, 50 bp, Artificial
  Synthetic oligonucleotide
aatcctcgcactatcgaccggaccatacccgggcgcggtaacagtcccgt

SEQ ID NO: 172588 - DNA, 50 bp, Artificial
  Synthetic oligonucleotide
aatcgctttcggtacaagcgtggatcgacgggcgggtccgtcagttcagc

SEQ ID NO: 172589 - DNA, 50 bp, Artificial
  Synthetic oligonucleotide
agtggctggctgcggacgttgggttatgcgcccgacacgtgccgaaagta

SEQ ID NO: 172590 - DNA, 58 bp, Artificial
  Synthetic oligonucleotide
ataaagagcgggtaaaacttatcagtgcccctttggtggcagcataatctatcagccc

SEQ ID NO: 172591 - DNA, 50 bp, Artificial
  Synthetic oligonucleotide
aggttggtcgggcaagatcaaaggttggcgcacggcacacattgccttgg

SEQ ID NO: 172592 - DNA, 50 bp, Artificial
  Synthetic oligonucleotide
aggtgttaccaaaagaagcgttccgaagccggggcaacttgcggggcaaa

SEQ ID NO: 172593 - DNA, 50 bp, Artificial
  Synthetic oligonucleotide
aggtaccgtcgggcaatacttccccgttgcggaagttggtcgcatcccac

SEQ ID NO: 172594 - DNA, 50 bp, Artificial
  Synthetic oligonucleotide
acgcatcagggtgcgctcgttttcaggccccaactcggcacggcctacgt

SEQ ID NO: 172595 - DNA, 50 bp, Artificial
  Synthetic oligonucleotide
acgcagcattgggattcgcaccgcgaatggtgggtaaccgcggagggtat

SEQ ID NO: 172596 - DNA, 50 bp, Artificial
  Synthetic oligonucleotide
acgattgtcggccgtagatgtacgtgatgcccggtgcctccacgggtacc

SEQ ID NO: 172597 - DNA, 50 bp, Artificial
  Synthetic oligonucleotide
acagcgtgggggattcgtaccgcttcaactcgcgcacaatgccgaggtca

SEQ ID NO: 172598 - DNA, 50 bp, Artificial
  Synthetic oligonucleotide
acagctcagtgccgttgggcgcaggctcgtacaacaggggcgatgtaagc

SEQ ID NO: 172599 - DNA, 50 bp, Artificial
  Synthetic oligonucleotide
acgacccttcccaatccggcatttgtagccccggaccttccggatgcaca

SEQ ID NO: 172600 - DNA, 50 bp, Artificial
  Synthetic oligonucleotide
accttgcgcgctacgtcgtccggtgtatcttcgggggttaccgggcaagt

SEQ ID NO: 172601 - DNA, 58 bp, Artificial
  Synthetic oligonucleotide
agttacatcaatagatgccccccattcgcctgtataagtctgtactaccctaggtata

SEQ ID NO: 172602 - DNA, 50 bp, Artificial
  Synthetic oligonucleotide
acctcccacgccggccgtacccagagtaaaacccagccgtcactaggcta

SEQ ID NO: 172603 - DNA, 50 bp, Artificial
  Synthetic oligonucleotide
accggcgtggatgtttcgcccgtttggctgggcaggtcggagaaagtaag

SEQ ID NO: 172604 - DNA, 50 bp, Artificial
  Synthetic oligonucleotide
accgcccccatttccgcctgcgaggtaaggacgcgcattacttcgggcag

SEQ ID NO: 172605 - DNA, 50 bp, Artificial
  Synthetic oligonucleotide
acatctacggcgcattgccccatggcttggcggatttcgggtgtcaggca

SEQ ID NO: 172606 - DNA, 50 bp, Artificial
  Synthetic oligonucleotide
accgcaaccgaagcccccggatgttccgtgaatacgtgcattccctagcg

SEQ ID NO: 172607 - DNA, 50 bp, Artificial
  Synthetic oligonucleotide
accccgcgaccatagctggctacccacaatgtgccctcggcgtcttcatg

SEQ ID NO: 172608 - DNA, 50 bp, Artificial
  Synthetic oligonucleotide
acccccctgtgtagcttatccgtaacgatttggtatctatttttacgggg

SEQ ID NO: 172609 - DNA, 50 bp, Artificial
  Synthetic oligonucleotide
accccagggcggttggatggcagggtaattgtcggggtctctgaattggc

SEQ ID NO: 172610 - DNA, 50 bp, Artificial
  Synthetic oligonucleotide
acccaatccaatagccgtacgggcagcgtattcggccactgttccggcac

SEQ ID NO: 172611 - DNA, 50 bp, Artificial
  Synthetic oligonucleotide
accagtaggcgaccggttgaaaaacaagagggccggtgcaacccgccggg

SEQ ID NO: 172612 - DNA, 60 bp, Artificial
  Synthetic oligonucleotide
aggtgccgtatctcgagggagcaaagtagtctatgatcgtgcacattctgcaatggccga

SEQ ID NO: 172613 - DNA, 50 bp, Artificial
  Synthetic oligonucleotide
accaggcgtccaggattttgtcccaccggttgtatccttgctcggccccg

SEQ ID NO: 172614 - DNA, 50 bp, Artificial
  Synthetic oligonucleotide
accaggactgtaacccggtgtttcaaacgcagctcgcatccgccgaacgg

SEQ ID NO: 172615 - DNA, 50 bp, Artificial
  Synthetic oligonucleotide
accagctcgtaggtcccgaagcggttgcgccgtgggccgttcccatccgg

SEQ ID NO: 172616 - DNA, 50 bp, Artificial
  Synthetic oligonucleotide
acaaccgcccgcgtgtgaacgactcgccgggtaatgcgaacttcgcgatg

SEQ ID NO: 172617 - DNA, 50 bp, Artificial
  Synthetic oligonucleotide
acgttgggttatgcgcccgacacgtgccgaaagtatccgcgtcagttgcg

SEQ ID NO: 172618 - DNA, 50 bp, Artificial
  Synthetic oligonucleotide
acgtgacggtgggcagtgaccctaagaaagcggaggaatggtcgccgacc

SEQ ID NO: 172619 - DNA, 50 bp, Artificial
  Synthetic oligonucleotide
acgtacgggcatcacaaaactccgctttgaccccgcgccctttgagggct

SEQ ID NO: 172620 - DNA, 50 bp, Artificial
  Synthetic oligonucleotide
acaagtacccgatttgccgtgccgtccttgtggtttgcatgggcatgccg

SEQ ID NO: 172621 - DNA, 50 bp, Artificial
  Synthetic oligonucleotide
acgggtacacgtgtgtgtcactgcgcgaagctgacgaaaccgtcaggggg

SEQ ID NO: 172622 - DNA, 50 bp, Artificial
  Synthetic oligonucleotide
acggggcgactgccgaagtaggcagcgtgcagttgagggtaagggcttat

SEQ ID NO: 172623 - DNA, 60 bp, Artificial
  Synthetic oligonucleotide
aggcgtcacttacagcgtcgatccccggattgagctctttcagactgtcatgttactggc

SEQ ID NO: 172624 - DNA, 50 bp, Artificial
  Synthetic oligonucleotide
acggggagggttggctctttgcgttgttcctccgtcattcgccgggtata

SEQ ID NO: 172625 - DNA, 50 bp, Artificial
  Synthetic oligonucleotide
acgggcgtgccgcgcttagactctcggtttgaatgggagcctacctgcgc

SEQ ID NO: 172626 - DNA, 50 bp, Artificial
  Synthetic oligonucleotide
acgggcggaggcactacccgcacgtagggacggggagcataataacgtga

SEQ ID NO: 172627 - DNA, 50 bp, Artificial
  Synthetic oligonucleotide
acgggccaggtcatagaccgctaccgagtctgcactgctgaattccggct

SEQ ID NO: 172628 - DNA, 50 bp, Artificial
  Synthetic oligonucleotide
acgggcacgggaaagtgtcgtgggtgtcaaccgccctggcaggaatcgcc

SEQ ID NO: 172629 - DNA, 50 bp, Artificial
  Synthetic oligonucleotide
acgggcacattgccttcgggcttcgttcaaacccaggcggccaattccgc

SEQ ID NO: 172630 - DNA, 50 bp, Artificial
  Synthetic oligonucleotide
acgggatgcccaaactggccacgccctccaaagagccccgtatcatggaa

SEQ ID NO: 172631 - DNA, 50 bp, Artificial
  Synthetic oligonucleotide
acggcttttggccgacccggggcacagttgttaccgaaacctgatccacg

SEQ ID NO: 172632 - DNA, 50 bp, Artificial
  Synthetic oligonucleotide
acggcacttttgccccctgcgggtgccccttgtacaaagccagcgccatt

SEQ ID NO: 172633 - DNA, 50 bp, Artificial
  Synthetic oligonucleotide
acggatttccagggtgcacggggaacggggaatggcccgtacacaaggac

SEQ ID NO: 172634 - DNA, 60 bp, Artificial
  Synthetic oligonucleotide
tctttcggacagtagctttacacttggtgaaaggttgaacgttgctgtgctgactcagaa

SEQ ID NO: 172635 - DNA, 50 bp, Artificial
  Synthetic oligonucleotide
acacaacgatcgctccaactgcccggttagctttgggcaacgccacatag

SEQ ID NO: 172636 - DNA, 50 bp, Artificial
  Synthetic oligonucleotide
acgctattcgtacccaggtcacgcgttcgggagagcgcgaacactctgcg

SEQ ID NO: 172637 - DNA, 50 bp, Artificial
  Synthetic oligonucleotide
acacacgcacgtgtgggactggggcctgttgcttcctgcaactagctgcg

SEQ ID NO: 172638 - DNA, 50 bp, Artificial
  Synthetic oligonucleotide
acgccctatgaatcaggtgggtttgcttcgtggcatacctacgcccgcgg

SEQ ID NO: 172639 - DNA, 50 bp, Artificial
  Synthetic oligonucleotide
gcaatctgaggaaccagcgctcccgacgcacgaagggctatccggggtgt

SEQ ID NO: 172640 - DNA, 50 bp, Artificial
  Synthetic oligonucleotide
aacgaaccaaaaccccgtacccgaacctggctagtcgtaccaggctggcc

SEQ ID NO: 172641 - DNA, 50 bp, Artificial
  Synthetic oligonucleotide
aacgaccgggtagggtagggcccgcccgtaaaaagcgtacgcaatgcatc

SEQ ID NO: 172642 - DNA, 50 bp, Artificial
  Synthetic oligonucleotide
gagcgcgtctctgcgtttacccgcccgatccacaccatactccgcacgta

SEQ ID NO: 172643 - DNA, 50 bp, Artificial
  Synthetic oligonucleotide
aacgacgacagatacccaatctgctcccccggccgactgccgtagccgta

SEQ ID NO: 172644 - DNA, 50 bp, Artificial
  Synthetic oligonucleotide
aacgcaggcatacatgcgcccctgccgaccaagaggatcatactgtcccc

SEQ ID NO: 172645 - DNA, 56 bp, Artificial
  Synthetic oligonucleotide
tcttgctcccaacgctaaggggtagcgaagctccaagttcaaccgatttgttccga

SEQ ID NO: 172646 - DNA, 50 bp, Artificial
  Synthetic oligonucleotide
aacgcgagcatgctgctgactggctgttgtaccctgagaacaccggtccg

SEQ ID NO: 172647 - DNA, 50 bp, Artificial
  Synthetic oligonucleotide
aacgcgctcggcactcccgctccgcacgacaataacctggctctttctgt

SEQ ID NO: 172648 - DNA, 50 bp, Artificial
  Synthetic oligonucleotide
aacgcggcactttgagcgaggagttggcattgagcaccacttggcttccg

SEQ ID NO: 172649 - DNA, 50 bp, Artificial
  Synthetic oligonucleotide
cttaagctgggtcaccgtgtacgtaccccgcctaatcttatgctctacgt

SEQ ID NO: 172650 - DNA, 50 bp, Artificial
  Synthetic oligonucleotide
aacggcacccagcactttgcgaacgcccacttcccgtgcgcgtctgagtg

SEQ ID NO: 172651 - DNA, 50 bp, Artificial
  Synthetic oligonucleotide
aacggccccaatagccaggacagatgccgcgtcggaaggagccgacaggt

SEQ ID NO: 172652 - DNA, 49 bp, Artificial
  Synthetic oligonucleotide
aacggcctatacggtgtacccaacgcttcgccgacccacccccgtttta

SEQ ID NO: 172653 - DNA, 50 bp, Artificial
  Synthetic oligonucleotide
aacggcctttgggcagcattgttattcgtcgagcccccgattggttgcgg

SEQ ID NO: 172654 - DNA, 50 bp, Artificial
  Synthetic oligonucleotide
aacgggcaagaccatacccatcaaacaggtggctgaaacccgcacggcag

SEQ ID NO: 172655 - DNA, 50 bp, Artificial
  Synthetic oligonucleotide
aacgggtaaaccgcttgttctgggtgggtcgctgggccgtactgaagcaa

SEQ ID NO: 172656 - DNA, 58 bp, Artificial
  Synthetic oligonucleotide
tctctcagataaccatagatccaggtaccggcaagggcacttactaaggtaacaataa

SEQ ID NO: 172657 - DNA, 50 bp, Artificial
  Synthetic oligonucleotide
ctaggccgaaccaggaaggtactgccccgtattccgttcgtggctccggc

SEQ ID NO: 172658 - DNA, 50 bp, Artificial
  Synthetic oligonucleotide
ctactaaattctcgaattgtccgccgtaggttacgtaataaccttcgggt

SEQ ID NO: 172659 - DNA, 50 bp, Artificial
  Synthetic oligonucleotide
cgggtaatgtatcaagaccgccccgccagaacacgagtccccaggccaca

SEQ ID NO: 172660 - DNA, 50 bp, Artificial
  Synthetic oligonucleotide
aacccagccaaacgggcattcgaggtagatcgggcgctcacggcaggcat

SEQ ID NO: 172661 - DNA, 50 bp, Artificial
  Synthetic oligonucleotide
aaccccattccgacacagcgggccggtacaacaacggttgcactggacgg

SEQ ID NO: 172662 - DNA, 50 bp, Artificial
  Synthetic oligonucleotide
aacccggcacacactacaggctttggaacggtctgccgcgcgtaagccca

SEQ ID NO: 172663 - DNA, 50 bp, Artificial
  Synthetic oligonucleotide
aacccggcccgtaagctcacctgggacgattttaaggctcctccgcgcca

SEQ ID NO: 172664 - DNA, 50 bp, Artificial
  Synthetic oligonucleotide
ggccgactaagggctatacgctaagaacgcggcttccgcgcaaacgggta

SEQ ID NO: 172665 - DNA, 50 bp, Artificial
  Synthetic oligonucleotide
aacccgggtgaaacagcgtgggggattcgtaccgcttcaactcgcgcaca

SEQ ID NO: 172666 - DNA, 50 bp, Artificial
  Synthetic oligonucleotide
ggcaactgtcccgtgaaccaccgccagtttagcgaactcactgggtgcta

SEQ ID NO: 172667 - DNA, 58 bp, Artificial
  Synthetic oligonucleotide
tctcatcataacgtcggtttgtaaattcgagcgtgtgtggaaacgtacatatttgacc

SEQ ID NO: 172668 - DNA, 50 bp, Artificial
  Synthetic oligonucleotide
aacccgtgaagtgtggctgagaggtccgttgccggatgtgccgcccctat

SEQ ID NO: 172669 - DNA, 50 bp, Artificial
  Synthetic oligonucleotide
aaccctggttaggtggccgcaaacccaacgcgctgtcggtaagtgccagc

SEQ ID NO: 172670 - DNA, 50 bp, Artificial
  Synthetic oligonucleotide
ggacggttccgtctgtcaccgtcgattatgccctgagcgaccgtacccgg

SEQ ID NO: 172671 - DNA, 50 bp, Artificial
  Synthetic oligonucleotide
aaccgacccgacatctggcgtaaccgcgagttctggctccgaagtggaac

SEQ ID NO: 172672 - DNA, 50 bp, Artificial
  Synthetic oligonucleotide
aaccgcatagtacccagtgaagccccgccatttcgggccgcaacggaaga

SEQ ID NO: 172673 - DNA, 50 bp, Artificial
  Synthetic oligonucleotide
gcgaaacacagccgactggttgagaggatgcagatctggaagcgccggct

SEQ ID NO: 172674 - DNA, 50 bp, Artificial
  Synthetic oligonucleotide
gccggcagtataacgggggagataaccggccgcagagacggattggtgcg

SEQ ID NO: 172675 - DNA, 50 bp, Artificial
  Synthetic oligonucleotide
aaccgcggcttctggtttccctctccgctgaggatcagcccccattcatg

SEQ ID NO: 172676 - DNA, 50 bp, Artificial
  Synthetic oligonucleotide
gccataggacgccagaagggccgctacggcgatcacagcgcctaacgtga

SEQ ID NO: 172677 - DNA, 50 bp, Artificial
  Synthetic oligonucleotide
aaccggacaatggggcatcaaacggggcggtgaaacaactcgcctacccg

SEQ ID NO: 172678 - DNA, 55 bp, Artificial
  Synthetic oligonucleotide
cccgaagacgtataggtagtaatggatcggactcggctcatacaggttccggaag

SEQ ID NO: 172679 - DNA, 54 bp, Artificial
  Synthetic oligonucleotide
tcgggggctattttcgggtttctgttcgattttctgttgctgggctaacttctg

SEQ ID NO: 172680 - DNA, 50 bp, Artificial
  Synthetic oligonucleotide
aaccgtcggttggatggatcgtggtactcccgttcgcagtcggcgcacat

SEQ ID NO: 172681 - DNA, 50 bp, Artificial
  Synthetic oligonucleotide
aaccgtgggcggggcggacagatcaagcgaaaactgtgcgtaaccgggtt

SEQ ID NO: 172682 - DNA, 50 bp, Artificial
  Synthetic oligonucleotide
gcacgcttcaccggctcacctatcaccaccggtcgcgtagcctgtttctt

SEQ ID NO: 172683 - DNA, 50 bp, Artificial
  Synthetic oligonucleotide
gcacacctacatggatgcgagggccgggcgactgtacaggggactttgcc

SEQ ID NO: 172684 - DNA, 50 bp, Artificial
  Synthetic oligonucleotide
cccgtcagggcatccaacactagagcagggcgggtttggaggtgggccaa

SEQ ID NO: 172685 - DNA, 50 bp, Artificial
  Synthetic oligonucleotide
aagcgcaggagccataggaggcatgcccaatgccccctcgatagcccgcg

SEQ ID NO: 172686 - DNA, 50 bp, Artificial
  Synthetic oligonucleotide
aagcgcgtttctggggacaatacaaccggccttacaacgcctacccgcgc

SEQ ID NO: 172687 - DNA, 50 bp, Artificial
  Synthetic oligonucleotide
aagcggcctggggacgtaattgaagcgaccagcttgaatcggcgcgcaca

SEQ ID NO: 172688 - DNA, 50 bp, Artificial
  Synthetic oligonucleotide
ccactggccaccgccgtaagcgtaccgatgacgccccactgctgcgcttt

SEQ ID NO: 172689 - DNA, 50 bp, Artificial
  Synthetic oligonucleotide
aagcgtccggattgggcccccatcgtcgtagaacagctgcgaccggaggt

SEQ ID NO: 172690 - DNA, 58 bp, Artificial
  Synthetic oligonucleotide
tcggcatcccgttctcacaactcgactactacccgtactatttctgactagatggaac

SEQ ID NO: 172691 - DNA, 50 bp, Artificial
  Synthetic oligonucleotide
ccacagctcctcaggtagggtgtcccccactttaaacgcctgagcgtgga

SEQ ID NO: 172692 - DNA, 50 bp, Artificial
  Synthetic oligonucleotide
aagcgtggatcgacgggcgggtccgtcagttcagcattccgttgcattgg

SEQ ID NO: 172693 - DNA, 50 bp, Artificial
  Synthetic oligonucleotide
aagctcacctcggggcaagacgtgtgcaaggctatccgtacagtgtgcga

SEQ ID NO: 172694 - DNA, 50 bp, Artificial
  Synthetic oligonucleotide
aagctgggaagcacccgaatcaggctcgtaacctacccgcgctgttacgc

SEQ ID NO: 172695 - DNA, 50 bp, Artificial
  Synthetic oligonucleotide
aagcttgcagggaggcaacccccaatatgtatgcgatgcggcgggtacta

SEQ ID NO: 172696 - DNA, 50 bp, Artificial
  Synthetic oligonucleotide
aaggattgtccgggtgccaaatcccacttgagcgaaccgcgtggctccac

SEQ ID NO: 172697 - DNA, 50 bp, Artificial
  Synthetic oligonucleotide
aaggccaaaaccgatttgccccaaaacctcgacacgggccccacagccca

SEQ ID NO: 172698 - DNA, 50 bp, Artificial
  Synthetic oligonucleotide
caatatgggcggctcagacgtgcagggttttatgggcgctgcgtccacat

SEQ ID NO: 172699 - DNA, 50 bp, Artificial
  Synthetic oligonucleotide
aaggggatgcgctgggcgcaaaataccggggaaccgtgttaagctgcgaa

SEQ ID NO: 172700 - DNA, 50 bp, Artificial
  Synthetic oligonucleotide
aagggtgaccaagtagcgcatctctgccgttgcccgttggagtacgctcg

SEQ ID NO: 172701 - DNA, 56 bp, Artificial
  Synthetic oligonucleotide
tcgatacttctgtatagttgagtacgtcggcaatgggcgccgtaccgccttttttg

SEQ ID NO: 172702 - DNA, 50 bp, Artificial
  Synthetic oligonucleotide
caactggtacggatttccagggtgcacggggaacggggaatggcccgtac

SEQ ID NO: 172703 - DNA, 50 bp, Artificial
  Synthetic oligonucleotide
caacccgtgctgcgggcagttcctgccacatctaaacggtaggcattgct

SEQ ID NO: 172704 - DNA, 50 bp, Artificial
  Synthetic oligonucleotide
caaatccggggcaacctccacaacaaggaccaccgggccagacgttgctt

SEQ ID NO: 172705 - DNA, 50 bp, Artificial
  Synthetic oligonucleotide
caaagtagcccctaccaggctcataaacgcccctggcaccccatgacccg

SEQ ID NO: 172706 - DNA, 50 bp, Artificial
  Synthetic oligonucleotide
caaagcctcccacaccctgcgctgaaaccccgtaccttgtgggttgagca

SEQ ID NO: 172707 - DNA, 50 bp, Artificial
  Synthetic oligonucleotide
aacgtcgacagtcactggattaaggacggttcgttcctgcggggccgcaa

SEQ ID NO: 172708 - DNA, 50 bp, Artificial
  Synthetic oligonucleotide
aacgttacgggcgaaatatgaacgggcttcccaccgctcaagtgccgggc

SEQ ID NO: 172709 - DNA, 50 bp, Artificial
  Synthetic oligonucleotide
cgccccgccagaacacgagtccccaggccacaaccaaaatgacgacggtt

SEQ ID NO: 172710 - DNA, 50 bp, Artificial
  Synthetic oligonucleotide
cgcacttcgactcaaaagcgcccgaagtcaagccaaactatctatgcgag

SEQ ID NO: 172711 - DNA, 50 bp, Artificial
  Synthetic oligonucleotide
cgatgaatacctgcatcaggaacgggatcaagatcattgatcaaagcgtt

SEQ ID NO: 172712 - DNA, 52 bp, Artificial
  Synthetic oligonucleotide
taggtaaagcggaaggtataacgttgagtaaatcagccttttataaaccgat

SEQ ID NO: 172713 - DNA, 50 bp, Artificial
  Synthetic oligonucleotide
aactttcgtcggacacaatgttgtaggccgcagcatccggcacgggcacg

SEQ ID NO: 172714 - DNA, 50 bp, Artificial
  Synthetic oligonucleotide
aagagcggggacgggacgtatgtaggctttctgtcggcaacgacggccaa

SEQ ID NO: 172715 - DNA, 50 bp, Artificial
  Synthetic oligonucleotide
cgaacttatcttaccaggcgaaacaaagcgaatttgtccctcagtctggg

SEQ ID NO: 172716 - DNA, 50 bp, Artificial
  Synthetic oligonucleotide
aagagggccggtgcaacccgccgggacttgcggataaaagccgtgaagcc

SEQ ID NO: 172717 - DNA, 50 bp, Artificial
  Synthetic oligonucleotide
cctgtccctacgcaccgcagggcctgtttgtacttccgcaggatgttccg

SEQ ID NO: 172718 - DNA, 50 bp, Artificial
  Synthetic oligonucleotide
cctgccaggtagtaattcggtgcgggtgggtcaactggcccgggcagcta

SEQ ID NO: 172719 - DNA, 50 bp, Artificial
  Synthetic oligonucleotide
aagcagaacctcacggcccgtggccaacttagtgaagatccgggcgtcca

SEQ ID NO: 172720 - DNA, 50 bp, Artificial
  Synthetic oligonucleotide
aagccctcctttaagccaacgtcccccgttcgcgtcactcgcagatggcg

SEQ ID NO: 172721 - DNA, 50 bp, Artificial
  Synthetic oligonucleotide
aagccgaaggcgccccacgaatgtccgccggggcctttgaaggtaatgcg

SEQ ID NO: 172722 - DNA, 50 bp, Artificial
  Synthetic oligonucleotide
cctacaaccctgcagatgccggcagtataacgggggagataaccggccgc

SEQ ID NO: 172723 - DNA, 55 bp, Artificial
  Synthetic oligonucleotide
tagggccgctccaaatgtaccttcgggaccacttccagccgtaccccctgccaca

SEQ ID NO: 172724 - DNA, 50 bp, Artificial
  Synthetic oligonucleotide
aagccgcgtgcgttttctgtacgtcaggattagggaacggcccgggagaa

SEQ ID NO: 172725 - DNA, 50 bp, Artificial
  Synthetic oligonucleotide
aagccggtatcgaaccgtgggcggggcggacagatcaagcgaaaactgtg

SEQ ID NO: 172726 - DNA, 50 bp, Artificial
  Synthetic oligonucleotide
ccgcggatgctacggttgccgccggaaacggagattgcctctttattccg

SEQ ID NO: 172727 - DNA, 50 bp, Artificial
  Synthetic oligonucleotide
aagcctgtgggccgtttgcctcggcttactaaccggctgtgaaagcggca

SEQ ID NO: 172728 - DNA, 50 bp, Artificial
  Synthetic oligonucleotide
ccctatgaaagccgttttcgataagcggtacgccaaaaatctggaaggtg

SEQ ID NO: 172729 - DNA, 50 bp, Artificial
  Synthetic oligonucleotide
aagcgagtgttgatctgtgctcagcccggcagaaacggattctggccgca

SEQ ID NO: 172730 - DNA, 59 bp, Artificial
  Synthetic oligonucleotide
taggcccttcttcaattcgggcaggacaaacccggcgatctgttggctgtcgatggtga

SEQ ID NO: 172731 - DNA, 60 bp, Artificial
  Synthetic oligonucleotide
tacgaggagtgcccattgaagcccgaaaccatgtttggtccactgacatcagtgcgccat

SEQ ID NO: 172732 - DNA, 57 bp, Artificial
  Synthetic oligonucleotide
taccattgctccatgacgaaatcaacccacaagcctacggcggtgtttattcgtcgg

SEQ ID NO: 172733 - DNA, 60 bp, Artificial
  Synthetic oligonucleotide
tacatgagcgaccgaaaaagtctatctgtcagcgcaggtactcaccaacaattagagcgg

SEQ ID NO: 172734 - DNA, 55 bp, Artificial
  Synthetic oligonucleotide
tacacggctaaatcgttcggtgtttagcaccaaagggacagaaaaatgcttgaat

SEQ ID NO: 172735 - DNA, 52 bp, Artificial
  Synthetic oligonucleotide
ccctaagccctaataagagttacttgcctaaaccacccatgaaatacgttcc

SEQ ID NO: 172736 - DNA, 52 bp, Artificial
  Synthetic oligonucleotide
taatgtccattgttcttcgtaagtttaattgcggtaccgggcggatttaccc

SEQ ID NO: 172737 - DNA, 56 bp, Artificial
  Synthetic oligonucleotide
taaagccctgacattcactatagttacgggcttaaaagatgacttttcgtaagcta

SEQ ID NO: 172738 - DNA, 52 bp, Artificial
  Synthetic oligonucleotide
gtttttgtccgttaagtcaatccgtgtctgaccggcgctaaccggccaagtt

SEQ ID NO: 172739 - DNA, 53 bp, Artificial
  Synthetic oligonucleotide
tttttgagtaatccccccaatcctcctgaactcaggccaccgtgttttcgtcg

SEQ ID NO: 172740 - DNA, 51 bp, Artificial
  Synthetic oligonucleotide
ttttctatacgccgggtaccaactggggtacgggtaggttcaatttcactc

SEQ ID NO: 172741 - DNA, 55 bp, Artificial
  Synthetic oligonucleotide
tttgccaaaaccgatggatttcaatacccttaccgaaacgctgctaaccgcttgc

SEQ ID NO: 172742 - DNA, 60 bp, Artificial
  Synthetic oligonucleotide
ttgtgtatactgccactgccgaccggtcaatatttcgatttcacgagcgtatataacgta

SEQ ID NO: 172743 - DNA, 54 bp, Artificial
  Synthetic oligonucleotide
ttgtagtccacgttgctttcgtacgattggtacggtgtaaattcctgccccgta

SEQ ID NO: 172744 - DNA, 60 bp, Artificial
  Synthetic oligonucleotide
ttggccatcagccttcgccaaactaatcacatcggtgatgaacgaaaagcggagttgact

SEQ ID NO: 172745 - DNA, 60 bp, Artificial
  Synthetic oligonucleotide
ttctacatggtctgctctcaaatccagcctgaccacaccgcagaaaccatttatgagatt

SEQ ID NO: 172746 - DNA, 54 bp, Artificial
  Synthetic oligonucleotide
ccgaatcaaccgaaaccacgactaaaagtacccgtctggattcactggcaacca

SEQ ID NO: 172747 - DNA, 60 bp, Artificial
  Synthetic oligonucleotide
ttcgcgagtatgatctaagcgatccaggccaacgaattgacttcgacgctttttgggatg

SEQ ID NO: 172748 - DNA, 58 bp, Artificial
  Synthetic oligonucleotide
tgttgagacttcaaacatacggctacccatctcctcagtagcctttttgaggtagccg

SEQ ID NO: 172749 - DNA, 53 bp, Artificial
  Synthetic oligonucleotide
tgtgaaaagaaacgtttggtgtgtgaaaagaaacgtttggtgtgtgaaaagaa

SEQ ID NO: 172750 - DNA, 60 bp, Artificial
  Synthetic oligonucleotide
tgtagtacatcgccattagtgagagtcgtttcaaagacacggctcattaactttcgtgta

SEQ ID NO: 172751 - DNA, 55 bp, Artificial
  Synthetic oligonucleotide
tgtacctcgggcgaaacaatgacgggtcttgcgttaggttgtcccaatagaacac

SEQ ID NO: 172752 - DNA, 55 bp, Artificial
  Synthetic oligonucleotide
tggtcctaaagaacccgccgcttccgagtatgaccgggccagagtcttttcaagc

SEQ ID NO: 172753 - DNA, 60 bp, Artificial
  Synthetic oligonucleotide
tgcattaggaacgcctgtgcaaaatcctatccctcaaaaaatcgcaatgtcagggttaca

SEQ ID NO: 172754 - DNA, 60 bp, Artificial
  Synthetic oligonucleotide
tgataagtcgggatacttcacgtcatatataagagcagagtagcctttgtagacagactg

SEQ ID NO: 172755 - DNA, 57 bp, Artificial
  Synthetic oligonucleotide
tgaggcccggtgttttggagccgttgacggacgcagttacgtttacatctgctgccg

SEQ ID NO: 172756 - DNA, 50 bp, Artificial
  Synthetic oligonucleotide
tgacggactaaacctctttttttgacggactaaacctcttttttgacgga

SEQ ID NO: 172757 - DNA, 57 bp, Artificial
  Synthetic oligonucleotide
gtttttgtctactactgcttcaacttctctgaaaagttttaatagctccatgattac

SEQ ID NO: 172758 - DNA, 57 bp, Artificial
  Synthetic oligonucleotide
gagcagggtatcagcgacttccccgatgttactcgggtcgtactcgggtctcagcct

SEQ ID NO: 172759 - DNA, 55 bp, Artificial
  Synthetic oligonucleotide
tgttaaatatcagcttcgctgattgcctgtggctagtaccagtcttttagactgg

SEQ ID NO: 172760 - DNA, 55 bp, Artificial
  Synthetic oligonucleotide
ttactatggttccgtattacgcagtttacaggattatggtagcagtttatgcccg

SEQ ID NO: 172761 - DNA, 55 bp, Artificial
  Synthetic oligonucleotide
ttctttggggattgaagccatagtcgaaagtttactcccatttggttacaatgcg

SEQ ID NO: 172762 - DNA, 55 bp, Artificial
  Synthetic oligonucleotide
aaatatcagaggagctggaagataccttacttttccgcaaaaggctcaatattac

SEQ ID NO: 172763 - DNA, 55 bp, Artificial
  Synthetic oligonucleotide
ccccataatgttagtcttaattcttggtagagtatggtgtagctggatgtgccca

SEQ ID NO: 172764 - DNA, 55 bp, Artificial
  Synthetic oligonucleotide
cccatgttagcaccacgtctaactccaccttgttttacatgctctgttgcactat

SEQ ID NO: 172765 - DNA, 55 bp, Artificial
  Synthetic oligonucleotide
cccacgatacagaatacggtaaatatgacgttatagctcttgttgaaaacagtcg

SEQ ID NO: 172766 - DNA, 55 bp, Artificial
  Synthetic oligonucleotide
ccattctcagcgtggttatcagattcctatccagagtctacagtaacaggtactg

SEQ ID NO: 172767 - DNA, 55 bp, Artificial
  Synthetic oligonucleotide
ccatgctgaatgcatttgacggagctttgttagatgccggcattggtaatacgaa

SEQ ID NO: 172768 - DNA, 55 bp, Artificial
  Synthetic oligonucleotide
ccatcctgtgtcccaaagcaaatacaacttgtaattcaggagcattagttaaact

SEQ ID NO: 172769 - DNA, 59 bp, Artificial
  Synthetic oligonucleotide
aggtcttgcaataaagattctatctctgagtccgtcaagagtactgaaccgcagaaggt

SEQ ID NO: 172770 - DNA, 55 bp, Artificial
  Synthetic oligonucleotide
ccactcaagatcagagtatcgtttactgcttagggaggataatgccgagtatcgt

SEQ ID NO: 172771 - DNA, 55 bp, Artificial
  Synthetic oligonucleotide
ggtgaagcgagtaaactccgacacgcctgatccactattatctacgctccgcaga

SEQ ID NO: 172772 - DNA, 55 bp, Artificial
  Synthetic oligonucleotide
cattcggtataggtacaagtcaggtaagagatgtccttgccacccagacaatggc

SEQ ID NO: 172773 - DNA, 55 bp, Artificial
  Synthetic oligonucleotide
catctgagaaggactatgcggcagttaagcttatgtcggatatactcggcggagg

SEQ ID NO: 172774 - DNA, 55 bp, Artificial
  Synthetic oligonucleotide
cagtatcaaccggatcaacggaaatcatatccacagccacacctttaacaccact

SEQ ID NO: 172775 - DNA, 55 bp, Artificial
  Synthetic oligonucleotide
cagtacattcgtatgcacaccgatgcagcagaagtaggtaacggcacagtaaagc

SEQ ID NO: 172776 - DNA, 55 bp, Artificial
  Synthetic oligonucleotide
caggctacaaaaccgctgacaatgtgggtaactatttcggaaggatgtatcaggc

SEQ ID NO: 172777 - DNA, 55 bp, Artificial
  Synthetic oligonucleotide
ggttagatttttgtgaaagtatatgttgaaatgcctctgtaatatcaatcatagg

SEQ ID NO: 172778 - DNA, 55 bp, Artificial
  Synthetic oligonucleotide
gtaacacaaactgccctcattagtcaagacaactttatctgctgccatcacccca

SEQ ID NO: 172779 - DNA, 55 bp, Artificial
  Synthetic oligonucleotide
ggtttcaggtgtatttgcaaccaagagcctgaatcttacatcgatagcaggttat

SEQ ID NO: 172780 - DNA, 58 bp, Artificial
  Synthetic oligonucleotide
cagatgttgcgacaactggatataatattcctaatatacgttgtatgttatacctggc

SEQ ID NO: 172781 - DNA, 55 bp, Artificial
  Synthetic oligonucleotide
gtacccgcagagcagatagtacctgtcgccacttcggggctgtaccctcttttaa

SEQ ID NO: 172782 - DNA, 55 bp, Artificial
  Synthetic oligonucleotide
gtactacatttgaagggtatttaatgaatggagtaatagctcctacagcacctgg

SEQ ID NO: 172783 - DNA, 53 bp, Artificial
  Synthetic oligonucleotide
cactacaaatcctttggagaggtttcataaggaggttaaaagacgatctaagg

SEQ ID NO: 172784 - DNA, 53 bp, Artificial
  Synthetic oligonucleotide
attcgtgataaccaaacgatagtagtagaggacttaaacgttaagggtctatc

SEQ ID NO: 172785 - DNA, 55 bp, Artificial
  Synthetic oligonucleotide
atgtggtgggtataggctgtagaaaaggggtagataagcagactgttgttgaagc

SEQ ID NO: 172786 - DNA, 55 bp, Artificial
  Synthetic oligonucleotide
atgcaggtgtgagtatagtcccctatcctggtccttccagtataacggctgctct

SEQ ID NO: 172787 - DNA, 55 bp, Artificial
  Synthetic oligonucleotide
gtagaactctacagccttggagtaatcttgcccaacaccttgtccattatagtac

SEQ ID NO: 172788 - DNA, 54 bp, Artificial
  Synthetic oligonucleotide
gcagggacagatgacagtttcgcattattaagtggcgaggattcattgacttac

SEQ ID NO: 172789 - DNA, 54 bp, Artificial
  Synthetic oligonucleotide
gcggagctccaccacaggaacctgcaaaatagcttggagaccataaagcgtttt

SEQ ID NO: 172790 - DNA, 54 bp, Artificial
  Synthetic oligonucleotide
tacgcattgctttttggtggggcatctgtgctccccgccgttattactggggct

SEQ ID NO: 172791 - DNA, 58 bp, Artificial
  Synthetic oligonucleotide
agcatcgagctatacacgttggaagtggtctcagccccaccaatcacagccgctttgc

SEQ ID NO: 172792 - DNA, 54 bp, Artificial
  Synthetic oligonucleotide
gatataggtgttatggagattgcagtgggtggtggtaatcctattgaacatcca

SEQ ID NO: 172793 - DNA, 53 bp, Artificial
  Synthetic oligonucleotide
ttcccatccgaaaactataagaccctgaaccaagtaattaccttcggttggca

SEQ ID NO: 172794 - DNA, 53 bp, Artificial
  Synthetic oligonucleotide
atacccgatgcaattactatcgctttactcggcgcaatagaatcccttttaag

SEQ ID NO: 172795 - DNA, 53 bp, Artificial
  Synthetic oligonucleotide
gcagccctcaacgcagcgctaaacgattgtgtcatcgacccaacctccctgtg

SEQ ID NO: 172796 - DNA, 53 bp, Artificial
  Synthetic oligonucleotide
ccctgatggcaagccccggtcctgggaaagggtgcctaaagaggatatcctcc

SEQ ID NO: 172797 - DNA, 53 bp, Artificial
  Synthetic oligonucleotide
catatatcgacaccattataagcgaacatgacgtcataggtatcggtggatca

SEQ ID NO: 172798 - DNA, 53 bp, Artificial
  Synthetic oligonucleotide
ccttgctatatgctctttcgttgttcctctagtaattccaatgattactcccc

SEQ ID NO: 172799 - DNA, 53 bp, Artificial
  Synthetic oligonucleotide
ctttagctcctcgcaatgactgagaaattggtcattgcgtaagcagtgaagca

SEQ ID NO: 172800 - DNA, 53 bp, Artificial
  Synthetic oligonucleotide
agccgtgcagagattccggtcattgtttcacgcactgcgccgtccaaactggg

SEQ ID NO: 172801 - DNA, 53 bp, Artificial
  Synthetic oligonucleotide
aggttgcccccaccttgcacttaatacggcgggaatccctgcgtgaccagttt

SEQ ID NO: 172802 - DNA, 58 bp, Artificial
  Synthetic oligonucleotide
agcaggtatcttgcgggtaatccccctggatctggagagccttcggcacattgccatg

SEQ ID NO: 172803 - DNA, 53 bp, Artificial
  Synthetic oligonucleotide
aggtccgctgagtacaccgtgcgtagctgcagccctgacagatttggctccgt

SEQ ID NO: 172804 - DNA, 53 bp, Artificial
  Synthetic oligonucleotide
aggccttatggcctcattggggcataccctttcgcatacaccgcaccctctgc

SEQ ID NO: 172805 - DNA, 52 bp, Artificial
  Synthetic oligonucleotide
ggtggagccggggttggtggataccgattggggtgaagatctaccggatgct

SEQ ID NO: 172806 - DNA, 52 bp, Artificial
  Synthetic oligonucleotide
tgcgtaggatgatagaccaaccaactcccaaccaacgaataacataaggaag

SEQ ID NO: 172807 - DNA, 52 bp, Artificial
  Synthetic oligonucleotide
tgccccgagacagagggcggctgccaaaccacgtccgtctgcaaaaccacct

SEQ ID NO: 172808 - DNA, 52 bp, Artificial
  Synthetic oligonucleotide
ggttggaaggagtagagttagaaaagctaagatattggtataacggctacag

SEQ ID NO: 172809 - DNA, 52 bp, Artificial
  Synthetic oligonucleotide
tagcatcctctatagttaaacttcctccaggaatagaagctccatctactcc

SEQ ID NO: 172810 - DNA, 52 bp, Artificial
  Synthetic oligonucleotide
ttgacgagttggatgggtgtcgcaaggatggttagagcagaagttctaagcg

SEQ ID NO: 172811 - DNA, 52 bp, Artificial
  Synthetic oligonucleotide
gcagagtcatcccatccgctccccgatgaaagcagcctggaggccggaagta

SEQ ID NO: 172812 - DNA, 52 bp, Artificial
  Synthetic oligonucleotide
ccctcatcacgcgtcacggtatcgcagcatttcccgtctgcacaggcggtct

SEQ ID NO: 172813 - DNA, 54 bp, Artificial
  Synthetic oligonucleotide
caaccctagctacaacttcttcacctattgaaacagtaaataacgacaagttac

SEQ ID NO: 172814 - DNA, 52 bp, Artificial
  Synthetic oligonucleotide
atacgctccactgcaggtccgctgagtacaccgtgcgtagctgcagccctga

SEQ ID NO: 172815 - DNA, 52 bp, Artificial
  Synthetic oligonucleotide
aatggtgcagcacttaccacggctgcttataaccaggctttgcccgggggat

SEQ ID NO: 172816 - DNA, 52 bp, Artificial
  Synthetic oligonucleotide
aagcttccagtagtatcatagctatcagtcttaaagcctaatacggctcccg

SEQ ID NO: 172817 - DNA, 52 bp, Artificial
  Synthetic oligonucleotide
catgcctgatctttcttatggacaacctcaactcagcgaatatgaacccgct

SEQ ID NO: 172818 - DNA, 51 bp, Artificial
  Synthetic oligonucleotide
ccggtcgccgtctatacaggccggccggcaatttatcccatccaccaacct

SEQ ID NO: 172819 - DNA, 51 bp, Artificial
  Synthetic oligonucleotide
acagtgcatggtatgagtttataaggcaactgcgttacaaggcaatgtggt

SEQ ID NO: 172820 - DNA, 51 bp, Artificial
  Synthetic oligonucleotide
tgatatttaacagggtgagggaagccgagggatctctatctatgtactaac

SEQ ID NO: 172821 - DNA, 51 bp, Artificial
  Synthetic oligonucleotide
tcttacctcgctgacaaatattaaccttgttctctctcatgacaggattac

SEQ ID NO: 172822 - DNA, 51 bp, Artificial
  Synthetic oligonucleotide
cacttcccggtacctctgagatactgcgctgcactttccggtgcaacaggg

SEQ ID NO: 172823 - DNA, 51 bp, Artificial
  Synthetic oligonucleotide
tcaaggtcgttgagcttacagatgccttcgggtcgttcggggtatttacct

SEQ ID NO: 172824 - DNA, 57 bp, Artificial
  Synthetic oligonucleotide
gatcctaagttgcaagcttcattaggaaaaagtggttgttcgccacatggattagtt

SEQ ID NO: 172825 - DNA, 51 bp, Artificial
  Synthetic oligonucleotide
agagccaaatttctctaacgcactccggtcccaatacccggggacacttac

SEQ ID NO: 172826 - DNA, 51 bp, Artificial
  Synthetic oligonucleotide
caaaggcgaatcgtcagtaacttcactgtcgcctgaaacattactgatagg

SEQ ID NO: 172827 - DNA, 51 bp, Artificial
  Synthetic oligonucleotide
taagtgcatccgatctgcctaccggcagggtactgttgcctatgggtgcga

SEQ ID NO: 172828 - DNA, 51 bp, Artificial
  Synthetic oligonucleotide
aggtttcccgaatacgcagagctgcaaactaacaattaactagtgatgaac

SEQ ID NO: 172829 - DNA, 51 bp, Artificial
  Synthetic oligonucleotide
gctcaaattaccagattgcttcgtcgctaaaactcctcttaatgacaaact

SEQ ID NO: 172830 - DNA, 51 bp, Artificial
  Synthetic oligonucleotide
ggacgccattgcagctctccgcaaagaatacgagcctaggctggccctagg

SEQ ID NO: 172831 - DNA, 51 bp, Artificial
  Synthetic oligonucleotide
ggactctaagcccgttttcaaaggatcactgccggcgatacctgatgccgt

SEQ ID NO: 172832 - DNA, 51 bp, Artificial
  Synthetic oligonucleotide
gcaaacagagtacacgcactgcttcgcaaaatgtttaccttggctgagaca

SEQ ID NO: 172833 - DNA, 51 bp, Artificial
  Synthetic oligonucleotide
aacaactgcggtgaaatggccgtctgtgtacccaacaaagccgcggtgcaa

SEQ ID NO: 172834 - DNA, 51 bp, Artificial
  Synthetic oligonucleotide
ctcggttagcgccatattggatgcataatttccgtgcattccagcccatcc

SEQ ID NO: 172835 - DNA, 57 bp, Artificial
  Synthetic oligonucleotide
cattaggtttcaactcctgataggtacaatataaacctcatccaattcctaagtgtg

SEQ ID NO: 172836 - DNA, 51 bp, Artificial
  Synthetic oligonucleotide
tgtagacactgtttacaagcgtctcggcaactaccatacagtaaacttcct

SEQ ID NO: 172837 - DNA, 51 bp, Artificial
  Synthetic oligonucleotide
cgaaagtttgataaatgttacactcaacgggccgagacttgtactgaattc

SEQ ID NO: 172838 - DNA, 51 bp, Artificial
  Synthetic oligonucleotide
cgtttgaaatttgcgtacaggctcaaggttccatggattattctgcatgta

SEQ ID NO: 172839 - DNA, 50 bp, Artificial
  Synthetic oligonucleotide
agaaccggctctgtatgtgcggcggcggaactgactttcggcaggtcaac

SEQ ID NO: 172840 - DNA, 50 bp, Artificial
  Synthetic oligonucleotide
ttagctctacagctgaacgcaagtctaatccactcgaaccaaccgactga

SEQ ID NO: 172841 - DNA, 50 bp, Artificial
  Synthetic oligonucleotide
aacgatattactgacaagattaataagggtaaggggacagttgggactct

SEQ ID NO: 172842 - DNA, 50 bp, Artificial
  Synthetic oligonucleotide
aaccccgctatacactggcgcacgatttgcgggactgctgttgaccggac

SEQ ID NO: 172843 - DNA, 50 bp, Artificial
  Synthetic oligonucleotide
agacttgaaaagggctcaacgcctcaacccgaaagtctggggctgccgta

SEQ ID NO: 172844 - DNA, 50 bp, Artificial
  Synthetic oligonucleotide
acggcaggctcacctatgcggcaagtcaggactttacagttgcgggcggt

SEQ ID NO: 172845 - DNA, 50 bp, Artificial
  Synthetic oligonucleotide
aagctgccacgacccacacggatggtcgatgaacctttcgccgaaggacg

SEQ ID NO: 172846 - DNA, 56 bp, Artificial
  Synthetic oligonucleotide
ctgggcctccttttccgggattatcccccgcagcatcacaccacttacattggcgg

SEQ ID NO: 172847 - DNA, 50 bp, Artificial
  Synthetic oligonucleotide
agattgcttcgtcactaccactcctcgcaatgactgtggaatttgccatt

SEQ ID NO: 172848 - DNA, 50 bp, Artificial
  Synthetic oligonucleotide
agcctcgcctcacctttcgctgccacaacgccatcctcgtcaggacttag

SEQ ID NO: 172849 - DNA, 50 bp, Artificial
  Synthetic oligonucleotide
aggacagaccggatgtcaagcagcccggaggtgacgtgtgagcccgaaag

SEQ ID NO: 172850 - DNA, 50 bp, Artificial
  Synthetic oligonucleotide
acacggcgtatgcagtatgacggaagcacgcgcactcgcagaccaggcag

SEQ ID NO: 172851 - DNA, 50 bp, Artificial
  Synthetic oligonucleotide
agacgggagcatgacggggtagggtgcaaaacctctggcacggcgcataa

SEQ ID NO: 172852 - DNA, 50 bp, Artificial
  Synthetic oligonucleotide
taaccgcaaccccagccctccccttcagtgcctttacaaccgacaaccga

SEQ ID NO: 172853 - DNA, 50 bp, Artificial
  Synthetic oligonucleotide
aaacagaggtttgcggctgcgtgcagggatggtgctcgctgtggaaccaa

SEQ ID NO: 172854 - DNA, 50 bp, Artificial
  Synthetic oligonucleotide
agaatgcgacttaccgcccggcagtcccataccgcacaaggaaggtacgc

SEQ ID NO: 172855 - DNA, 50 bp, Artificial
  Synthetic oligonucleotide
gctgcttcagctggagacttctgggacgtaagctgggccgctccaaaggg

SEQ ID NO: 172856 - DNA, 50 bp, Artificial
  Synthetic oligonucleotide
gcaaaacctctggcacggcgcataacgtagggcatgccgtccacaacaga

SEQ ID NO: 172857 - DNA, 57 bp, Artificial
  Synthetic oligonucleotide
ctcagcactatttgaaccattaccaccaaatatactatcataactactactggaacc

SEQ ID NO: 172858 - DNA, 50 bp, Artificial
  Synthetic oligonucleotide
gacggaagcacgcgcactcgcagaccaggcaggtctggatctagtggaga

SEQ ID NO: 172859 - DNA, 50 bp, Artificial
  Synthetic oligonucleotide
gacagagtgcgccccggcaatagcaggacgtgcgcttaactgcgacgtat

SEQ ID NO: 172860 - DNA, 50 bp, Artificial
  Synthetic oligonucleotide
ctgccacaacccagtcccccacgtcggctttgtcagagtcaccgagagtt

SEQ ID NO: 172861 - DNA, 50 bp, Artificial
  Synthetic oligonucleotide
ctcaggcggggactatcggctatcttggcagtgacggcgctcttaccagc

SEQ ID NO: 172862 - DNA, 50 bp, Artificial
  Synthetic oligonucleotide
cggtgtgacttccgctgcgacactttctgcaaagatgcgagcggctctga

SEQ ID NO: 172863 - DNA, 50 bp, Artificial
  Synthetic oligonucleotide
cgggggaaggcgtcgtaactggaatggggagtgttgacggcaggctcacc

SEQ ID NO: 172864 - DNA, 50 bp, Artificial
  Synthetic oligonucleotide
cggctttaagagcctgctggtctgttgcgtgtgagcgtgtggcaagggct

SEQ ID NO: 172865 - DNA, 50 bp, Artificial
  Synthetic oligonucleotide
ccgttactgtcatcttcaaccgtaattacagttttaggttgtactccaga

SEQ ID NO: 172866 - DNA, 50 bp, Artificial
  Synthetic oligonucleotide
cccggagaagacagagcccccgtcgttatggcaaaggggcaacgtctgat

SEQ ID NO: 172867 - DNA, 50 bp, Artificial
  Synthetic oligonucleotide
ggtagggtgcaaaacctctggcacggcgcataacgtagggcatgccgtcc

SEQ ID NO: 172868 - DNA, 53 bp, Artificial
  Synthetic oligonucleotide
ggattcacctaccggtattcggagtttgtcagggttcggtaaccgcaatggcc

SEQ ID NO: 172869 - DNA, 57 bp, Artificial
  Synthetic oligonucleotide
ttccgggattatcccccgcagcatcacaccacttacattggcgggtcctgtgagaag

SEQ ID NO: 172870 - DNA, 50 bp, Artificial
  Synthetic oligonucleotide
cccgcacggggtaaagatgcggggcacaaatatggttcgggttccctgtg

SEQ ID NO: 172871 - DNA, 50 bp, Artificial
  Synthetic oligonucleotide
ccacatgccgcccaaccatcagttcgttgcttcaggctggacgcctgaaa

SEQ ID NO: 172872 - DNA, 50 bp, Artificial
  Synthetic oligonucleotide
ccaatcatgagcaggttgtgcatgcccgctgctgctatctccgcacagcg

SEQ ID NO: 172873 - DNA, 50 bp, Artificial
  Synthetic oligonucleotide
ggtgagtagagtaagttggttctggcataataattctagcatctacacgg

SEQ ID NO: 172874 - DNA, 50 bp, Artificial
  Synthetic oligonucleotide
caggcacaatttcctccagaagtgccgctgccagtaacccgtcggctccg

SEQ ID NO: 172875 - DNA, 50 bp, Artificial
  Synthetic oligonucleotide
ggtttacaggctgtcgtcctcaagggggcgtgtggtgagtcctgtgacga

SEQ ID NO: 172876 - DNA, 50 bp, Artificial
  Synthetic oligonucleotide
cacagccgttcaccgcagacgggagcatgacggggtagggtgcaaaacct

SEQ ID NO: 172877 - DNA, 50 bp, Artificial
  Synthetic oligonucleotide
caaccaggcaggcgcattggcacggcacaaacccgggcatactctcaggt

SEQ ID NO: 172878 - DNA, 50 bp, Artificial
  Synthetic oligonucleotide
attgcgattaataacctaaaagctatgggacacgaggttgtaaccatagc

SEQ ID NO: 172879 - DNA, 50 bp, Artificial
  Synthetic oligonucleotide
atcgaccccacagacaagggcggtcagttcgcagacagaggcacacagta

SEQ ID NO: 172880 - DNA, 57 bp, Artificial
  Synthetic oligonucleotide
gcgcttatctttggccgcatattcgcgacagatggcttccgtttcatcggtggaggc

SEQ ID NO: 172881 - DNA, 50 bp, Artificial
  Synthetic oligonucleotide
atccccggagtctgccgcaaagcgtcttccagattggcaagtctgcggtt

SEQ ID NO: 172882 - DNA, 50 bp, Artificial
  Synthetic oligonucleotide
agttttcggcgtagccatgcgtacggaacccgttgagagaaacgggcgga

SEQ ID NO: 172883 - DNA, 50 bp, Artificial
  Synthetic oligonucleotide
agtacccggcatcccgggactctatgatataatgctgccgcgcaatgaac

SEQ ID NO: 172884 - DNA, 50 bp, Artificial
  Synthetic oligonucleotide
gtgttatcgttctccgccactgagtttatgtcgttgagaagcttgttata

SEQ ID NO: 172885 - DNA, 50 bp, Artificial
  Synthetic oligonucleotide
aggccatacaaggcagatttagcccccgtcctcccccatgtacgccgtta

SEQ ID NO: 172886 - DNA, 56 bp, Artificial
  Synthetic oligonucleotide
cgttaaacaattatatacttagatatctctctggattcgaagactctgcggctaac

SEQ ID NO: 172887 - DNA, 56 bp, Artificial
  Synthetic oligonucleotide
cagtggcggtaagcgcccccaaattaccaatagccatagacagggccgacaacgta

SEQ ID NO: 172888 - DNA, 56 bp, Artificial
  Synthetic oligonucleotide
cctggtatttcttcattgttggaccataatatcccctgtaaatcttcatggtttac

SEQ ID NO: 172889 - DNA, 56 bp, Artificial
  Synthetic oligonucleotide
atacacgttggaagtggtctcagccccaccaatcacagccgctttgctggcatgta

SEQ ID NO: 172890 - DNA, 56 bp, Artificial
  Synthetic oligonucleotide
gttagagttgacgctaaaaacacctctataacctgtcctctatgtgattacactaa

SEQ ID NO: 172891 - DNA, 55 bp, Artificial
  Synthetic oligonucleotide
ctccatgttgggttagatacgtagtcatcagtaatcattttgaagccgtttaacg

SEQ ID NO: 172892 - DNA, 55 bp, Artificial
  Synthetic oligonucleotide
ctcagattgcgtcgctgatgctcgcaataacggcattttagagtcattgcgtggc

SEQ ID NO: 172893 - DNA, 55 bp, Artificial
  Synthetic oligonucleotide
ctcacctataaatgccccggcttccacttgagcactctcagcaacgaccgcgtcg

SEQ ID NO: 172894 - DNA, 52 bp, Artificial
  Synthetic oligonucleotide
gggctaggggccattgcggttaccgaaccctgacaaactccgaataccggta

SEQ ID NO: 172895 - DNA, 55 bp, Artificial
  Synthetic oligonucleotide
ggctatcatctccctctctatactggacagtatcctgtttacgtttgtcgaagag

SEQ ID NO: 172896 - DNA, 55 bp, Artificial
  Synthetic oligonucleotide
ggcggaatagaatttaatgtaatggcaaccacatccaatacacaatctctacaag

SEQ ID NO: 172897 - DNA, 55 bp, Artificial
  Synthetic oligonucleotide
ggcagacgtgaaatattgacatattgtttacctggtggagatgagaaatcatcgg

SEQ ID NO: 172898 - DNA, 54 bp, Artificial
  Synthetic oligonucleotide
cggactggacgaaatccttgctgtaatggcttttggggcttataccactaattt

SEQ ID NO: 172899 - DNA, 55 bp, Artificial
  Synthetic oligonucleotide
cgatagcttcggctactttaggcccgaatgctggggaaagagcgagtgttccgct

SEQ ID NO: 172900 - DNA, 54 bp, Artificial
  Synthetic oligonucleotide
ggggtaagttcttaaactatctaaagtacaaagcagagtggtatggtagaacga

SEQ ID NO: 172901 - DNA, 55 bp, Artificial
  Synthetic oligonucleotide
ggggtcgtccatctctttagcgcattcatcgcataaagcagtatccggcgggacg

SEQ ID NO: 172902 - DNA, 55 bp, Artificial
  Synthetic oligonucleotide
ccgtcgaggctgacaagagtccactccagagtattgtttatgccgtaatctgccg

SEQ ID NO: 172903 - DNA, 55 bp, Artificial
  Synthetic oligonucleotide
ggggtgacggcagtgacacaattaagttgacattaccaaaagtttacttgtggac

SEQ ID NO: 172904 - DNA, 54 bp, Artificial
  Synthetic oligonucleotide
ccggaggatacttcttgctctgttaagtccaacaagaagagtttacccggcgta

SEQ ID NO: 172905 - DNA, 57 bp, Artificial
  Synthetic oligonucleotide
tgtggatttgataggtgaggatgtgacaaataagggtaggattgatttaacggtatt

SEQ ID NO: 172906 - DNA, 55 bp, Artificial
  Synthetic oligonucleotide
ccgatgccaaattgcccgttttacccaggcctcctgcggcccatagcggaatctg

SEQ ID NO: 172907 - DNA, 55 bp, Artificial
  Synthetic oligonucleotide
gggtaaacagatctcatgatgtaactgatgcacaacaaagtagtagtggagctca

SEQ ID NO: 172908 - DNA, 55 bp, Artificial
  Synthetic oligonucleotide
gggtagattccacaccatacagtttgcaagttaaattcgggtgctgcggtaagga

SEQ ID NO: 172909 - DNA, 55 bp, Artificial
  Synthetic oligonucleotide
ccctattttactaaagcccacaggggatggtaaatcacagataattagacttgga

SEQ ID NO: 172910 - DNA, 55 bp, Artificial
  Synthetic oligonucleotide
gggtcccagacaacgtattattatggacatgggagatctgtctcatattcctccc

SEQ ID NO: 172911 - DNA, 55 bp, Artificial
  Synthetic oligonucleotide
ggtatatatcacacaagcatatcacccagatcgaatgtggaattgagaggtgggg

SEQ ID NO: 172912 - DNA, 55 bp, Artificial
  Synthetic oligonucleotide
ccccttccgatagattggttaggattgccgccagatccccaggcttttctattac

SEQ ID NO: 172913 - DNA, 54 bp, Artificial
  Synthetic oligonucleotide
cccctccggtgaagaatatttcaatcttagggatcgatcctgcttttaggaccg

SEQ ID NO: 172914 - DNA, 55 bp, Artificial
  Synthetic oligonucleotide
gctccgtatgttaagaacggcatgacaactcttgactatggatgcggctttgggc

SEQ ID NO: 172915 - DNA, 55 bp, Artificial
  Synthetic oligonucleotide
gctcactatatgcaagtcgccatagcataaagttgcttattcttatctcaccact

SEQ ID NO: 172916 - DNA, 58 bp, Artificial
  Synthetic oligonucleotide
ggtgaggatgtgacaaataagggtaggattgatttaacggtatttgtgtcagataaga

SEQ ID NO: 172917 - DNA, 55 bp, Artificial
  Synthetic oligonucleotide
gctaaatccggttctacatgtaaagtaacaaccctggtattatgagctccactca

SEQ ID NO: 172918 - DNA, 55 bp, Artificial
  Synthetic oligonucleotide
gcggactctgtctcggcaagatatagccccagacaggatttatgaccttctaggc

SEQ ID NO: 172919 - DNA, 55 bp, Artificial
  Synthetic oligonucleotide
gcccatgttgtaagctatgagggcatacttttggttgtcgaacttgttaatcagg

SEQ ID NO: 172920 - DNA, 55 bp, Artificial
  Synthetic oligonucleotide
ggagcatgctgcaagaggtgtgtttcaactcctgataggtacaatataaacttgc

SEQ ID NO: 172921 - DNA, 55 bp, Artificial
  Synthetic oligonucleotide
ggaggagcggtcgtcgggctttgtattttgctttatagcgcgcttgttcgctctg

SEQ ID NO: 172922 - DNA, 55 bp, Artificial
  Synthetic oligonucleotide
gatgcctttgacagaacttttgcaggaacttaatacctgcctcgcagagaaccct

SEQ ID NO: 172923 - DNA, 55 bp, Artificial
  Synthetic oligonucleotide
gatctatagacattataatccatccctgtcttgattgtccatgagctaatacccg

SEQ ID NO: 172924 - DNA, 55 bp, Artificial
  Synthetic oligonucleotide
gagtggtcagataaactttctgtagggattgataagtttgatgaacagcacaaga

SEQ ID NO: 172925 - DNA, 55 bp, Artificial
  Synthetic oligonucleotide
gaggtgccatagctgggatgaggacagttgggattggagctttgatggggttaga

SEQ ID NO: 172926 - DNA, 55 bp, Artificial
  Synthetic oligonucleotide
gagcgtcagaatttaagtcagcttatatctctgctaaacacggccttatggggct

SEQ ID NO: 172927 - DNA, 56 bp, Artificial
  Synthetic oligonucleotide
caagattgggaactttatgtaagaaggatatatgatactttagatgtccaaatttt

SEQ ID NO: 172928 - DNA, 55 bp, Artificial
  Synthetic oligonucleotide
gagaggacatctatggaacccatctacttatattgaaaccataggtcacatatcg

SEQ ID NO: 172929 - DNA, 55 bp, Artificial
  Synthetic oligonucleotide
ctcccatttcaaaggcgcttacagctattatcgtatccatgaagtcgtggtaccc

SEQ ID NO: 172930 - DNA, 55 bp, Artificial
  Synthetic oligonucleotide
ctccctggacttgagtcataagcttttgcttgtttatttagtcttcgtgatctac

SEQ ID NO: 172931 - DNA, 55 bp, Artificial
  Synthetic oligonucleotide
ctcgaaagaggaagaggcgcatgctctgggagatgtcacaaggagcactacggac

SEQ ID NO: 172932 - DNA, 55 bp, Artificial
  Synthetic oligonucleotide
ctcggccatttggtaacgcaataatctatggtcggctcaaaagacgcaggagtct

SEQ ID NO: 172933 - DNA, 55 bp, Artificial
  Synthetic oligonucleotide
ggatgccataccgtgcacaacaacggacctgtgaaaggcgaagaaggaacgatac

SEQ ID NO: 172934 - DNA, 55 bp, Artificial
  Synthetic oligonucleotide
ctgagggccacctccgtgtactatgattggatttatgccgacgtattttagtagg

SEQ ID NO: 172935 - DNA, 55 bp, Artificial
  Synthetic oligonucleotide
ggagtgagtaaattttcaaaggcatcgatattcagtggcttaaatatgcttaccg

SEQ ID NO: 172936 - DNA, 55 bp, Artificial
  Synthetic oligonucleotide
ctgtcatgttgaacgactttgagagagagtgtatctctataccaacgtccatcgc

SEQ ID NO: 172937 - DNA, 55 bp, Artificial
  Synthetic oligonucleotide
ctttacgacggtttgaagagtatgtccgatttgctgatgaccttcggagggcata

SEQ ID NO: 172938 - DNA, 57 bp, Artificial
  Synthetic oligonucleotide
tgctaaggctgagacccgagtacgacccgagtaacatcggggaagtcgctgataccc

SEQ ID NO: 172939 - DNA, 55 bp, Artificial
  Synthetic oligonucleotide
ctttgatttccatcccgtagctgatgaataccgagtaaatttcgatgttagtgga

SEQ ID NO: 172940 - DNA, 52 bp, Artificial
  Synthetic oligonucleotide
gaaagtgtccccgggtattgggaccggagtgctttagttattcggctctccg

SEQ ID NO: 172941 - DNA, 55 bp, Artificial
  Synthetic oligonucleotide
gaacctatatgatgcgataaacaactttgaccagtgttttaccggtacaatacac

SEQ ID NO: 172942 - DNA, 55 bp, Artificial
  Synthetic oligonucleotide
ggagtgaacagcacatgcgatacaaggatcgaatgagtgtaccgttctgataact

SEQ ID NO: 172943 - DNA, 55 bp, Artificial
  Synthetic oligonucleotide
ggaggtggccgatagggaattatccatttacagggagtttgctgggagaatttcg

SEQ ID NO: 172944 - DNA, 55 bp, Artificial
  Synthetic oligonucleotide
gacggatccggtaattacaatggtcaggcaatgcttatcgcaactgtctcacttc

SEQ ID NO: 172945 - DNA, 55 bp, Artificial
  Synthetic oligonucleotide
gacgtaagagagctgaaagtaatggtattgttttcaatcctaatcatccgtccga

SEQ ID NO: 172946 - DNA, 55 bp, Artificial
  Synthetic oligonucleotide
gactaatgaaacctcagttgtagcctttgctggtacgcttgtataagctgatgat

SEQ ID NO: 172947 - DNA, 55 bp, Artificial
  Synthetic oligonucleotide
gtagccacaactgacgctaatgctgctagttttactgtaactggacaagctaatg

SEQ ID NO: 172948 - DNA, 55 bp, Artificial
  Synthetic oligonucleotide
atcccatcccactttacacctggaactgtccacccttcgacacaattgaaatcgc

SEQ ID NO: 172949 - DNA, 53 bp, Artificial
  Synthetic oligonucleotide
gaacttaattaaggttgctttatcggccttaacctatttaagagatgtgaaag

SEQ ID NO: 172950 - DNA, 55 bp, Artificial
  Synthetic oligonucleotide
gtcagtttctaagaaagagtttataaggctgctctttccagcactaaaaggtcct

SEQ ID NO: 172951 - DNA, 55 bp, Artificial
  Synthetic oligonucleotide
ataaacgccatattagtggcaacgagttccattcctgatagacaggcggcctttt

SEQ ID NO: 172952 - DNA, 55 bp, Artificial
  Synthetic oligonucleotide
gtgccctcacttcagagcaaataaatgccggatgatgtttgttatccacgaaacc

SEQ ID NO: 172953 - DNA, 55 bp, Artificial
  Synthetic oligonucleotide
agtggggcataagctctggtagaagcgtctgaagcgatgtcaatatatccggtga

SEQ ID NO: 172954 - DNA, 55 bp, Artificial
  Synthetic oligonucleotide
agtctggtcaacgctaaagtcattattgggacagcgtgtaattgagactggtatg

SEQ ID NO: 172955 - DNA, 55 bp, Artificial
  Synthetic oligonucleotide
gtggagaaagaagagtaaccgcagctaaagaatgtagatatgaatttataccagc

SEQ ID NO: 172956 - DNA, 55 bp, Artificial
  Synthetic oligonucleotide
gttactgctccacctgtatataaatcgtatttaagcgcagccatagcttcggtgt

SEQ ID NO: 172957 - DNA, 55 bp, Artificial
  Synthetic oligonucleotide
tacataccataggacagactctgcacgtgttagtgacgatggtattaaattagca

SEQ ID NO: 172958 - DNA, 55 bp, Artificial
  Synthetic oligonucleotide
agctatttcaaccatattacttgcgatttcctggcttgtagctgattgttgatct

SEQ ID NO: 172959 - DNA, 55 bp, Artificial
  Synthetic oligonucleotide
agcacctgtaggtattactggcggcttttctatcgctttatcaccaagtcgcata

SEQ ID NO: 172960 - DNA, 59 bp, Artificial
  Synthetic oligonucleotide
agctaggcagtcatcgcgaggaagcgtaagctgacgaagctatctgcaacgtccttgga

SEQ ID NO: 172961 - DNA, 55 bp, Artificial
  Synthetic oligonucleotide
tactgcggcatcacaatttgtcgcaaaattagaaacagctcttactgcaaggggt

SEQ ID NO: 172962 - DNA, 55 bp, Artificial
  Synthetic oligonucleotide
tatacgcctcacacttaaacttcctatgtggtgttatagtcttaggtgcagccaa

SEQ ID NO: 172963 - DNA, 55 bp, Artificial
  Synthetic oligonucleotide
tgccaaactcagtcttacaaggagtaacgttaataaacttttggccacacttgaa

SEQ ID NO: 172964 - DNA, 55 bp, Artificial
  Synthetic oligonucleotide
agaattcaggacgcggcatttctataagagagtcatcaatgctaatcctgatgtc

SEQ ID NO: 172965 - DNA, 55 bp, Artificial
  Synthetic oligonucleotide
agaaaacttataaacgaacgggcagactcctctgccatagcgaaagaggctagga

SEQ ID NO: 172966 - DNA, 55 bp, Artificial
  Synthetic oligonucleotide
acttattatcccagcggtgtaggatgattcaagtccgaaggggtttcctattgcc

SEQ ID NO: 172967 - DNA, 55 bp, Artificial
  Synthetic oligonucleotide
tggattaagtcagacacttggtggtttatttggtagagaaagtgtagtagggaaa

SEQ ID NO: 172968 - DNA, 55 bp, Artificial
  Synthetic oligonucleotide
tgtagagatagaacaacaatgtaatatccaaccaccgaagaatgaagtctgcgga

SEQ ID NO: 172969 - DNA, 52 bp, Artificial
  Synthetic oligonucleotide
aatcgaaaacttatagttatttcgggaagctctacccacctcataccccaaa

SEQ ID NO: 172970 - DNA, 55 bp, Artificial
  Synthetic oligonucleotide
aatatctgtggctatacccagagggatattgagacgagctttaaagactattttg

SEQ ID NO: 172971 - DNA, 57 bp, Artificial
  Synthetic oligonucleotide
gtaaatcgggtcagatagggcttccactaccgatttactcggcatgtcggttgcaaa

SEQ ID NO: 172972 - DNA, 58 bp, Artificial
  Synthetic oligonucleotide
gggaatatcacgtggaacagtcagcggtcgcgtctgctcagtacgttccgtgggggaa

SEQ ID NO: 172973 - DNA, 57 bp, Artificial
  Synthetic oligonucleotide
tggcgaaggcccaggactgccggtatccggtgatccccaactcggcggccttccaca

SEQ ID NO: 172974 - DNA, 58 bp, Artificial
  Synthetic oligonucleotide
tgcgcagcgcttgcagaagtattaccaccgtgaagcgcaaatcctctttgcacctgtg

SEQ ID NO: 172975 - DNA, 57 bp, Artificial
  Synthetic oligonucleotide
gagcatggcccgcacggtcccagtcataggggtggcggcctgctcaggctgttcgct

SEQ ID NO: 172976 - DNA, 51 bp, Artificial
  Synthetic oligonucleotide
gggtaggacaccgcgaaaaacatccactaaaccgtcccaaacggatagacc

SEQ ID NO: 172977 - DNA, 57 bp, Artificial
  Synthetic oligonucleotide
tgaccgtggcggaccagaatcagttcactcatcggtggcctgggacggaggggtctg

SEQ ID NO: 172978 - DNA, 55 bp, Artificial
  Synthetic oligonucleotide
atacaactgttccggtgaatcgtacacgcccaagtccctttctagtgcttttcgc

SEQ ID NO: 172979 - DNA, 57 bp, Artificial
  Synthetic oligonucleotide
cccaggccgcctttcccggagaccccatgcctgatgacgctctccctggcctagtgc

SEQ ID NO: 172980 - DNA, 57 bp, Artificial
  Synthetic oligonucleotide
catcaggccaccgttccagcgtgctggacactcaatcagccgtgcgcgaacctccca

SEQ ID NO: 172981 - DNA, 57 bp, Artificial
  Synthetic oligonucleotide
gctcctgattcaaggagcggtgcctccgtctttaaaagcggtcgcctatccacaacg

SEQ ID NO: 172982 - DNA, 56 bp, Artificial
  Synthetic oligonucleotide
atattcatagctactacagccctggctacgactattgatagcggcgtaagttggcg

SEQ ID NO: 172983 - DNA, 59 bp, Artificial
  Synthetic oligonucleotide
ggcgtcgcttgtgggctgagatgagaggccctcaacctccccaccttcggattcaccca

SEQ ID NO: 172984 - DNA, 56 bp, Artificial
  Synthetic oligonucleotide
ctggggggcagggtcatagctaggtgttagcgcatgcgggcgactgagacaaatag

SEQ ID NO: 172985 - DNA, 56 bp, Artificial
  Synthetic oligonucleotide
acgacaacacctattggggatgcggtccggcttccggtgcagctatgctgtggtgg

SEQ ID NO: 172986 - DNA, 56 bp, Artificial
  Synthetic oligonucleotide
aggtctccttgctggtccgcaatgcacagctccaggtcgtcagcacccaacccctc

SEQ ID NO: 172987 - DNA, 56 bp, Artificial
  Synthetic oligonucleotide
acggacgaaaggaacgctgaactggcaagaacgtgcgcccatctgattgaggccgg

SEQ ID NO: 172988 - DNA, 56 bp, Artificial
  Synthetic oligonucleotide
gggctatgtcagaatgttttcgtatgatgtggagcagcaatcctcatctcacgatg

SEQ ID NO: 172989 - DNA, 56 bp, Artificial
  Synthetic oligonucleotide
ccctcacgtcatgacacttgtccagtaccaaggcaacctgctctcgcaaacgcgcg

SEQ ID NO: 172990 - DNA, 56 bp, Artificial
  Synthetic oligonucleotide
acaagcggcccacacagtgcaaagccgtgaaacccacattcctcggttggtcagtg

SEQ ID NO: 172991 - DNA, 54 bp, Artificial
  Synthetic oligonucleotide
taccaaccagacccgcccgtaccctgaaagcatgacccacgcccacctgtcccg

SEQ ID NO: 172992 - DNA, 55 bp, Artificial
  Synthetic oligonucleotide
cccgagattccattatccacttgtcgaagtttgaaagccgctcattatccacctg

SEQ ID NO: 172993 - DNA, 55 bp, Artificial
  Synthetic oligonucleotide
gcgaaacctccgttgctaatacgtattggcttaaagggcacagtacgagacggct

SEQ ID NO: 172994 - DNA, 60 bp, Artificial
  Synthetic oligonucleotide
caggaccaagacacctaggggcagagcctgtgtaccgtccagcaatgggagcgcgggcag

SEQ ID NO: 172995 - DNA, 55 bp, Artificial
  Synthetic oligonucleotide
gccgcagggtccgtatcgccgttcagtgtggtagaggacagcgaatcaccgtaaa

SEQ ID NO: 172996 - DNA, 55 bp, Artificial
  Synthetic oligonucleotide
gcccctgttggggcatttgcatgggtaacgggcgctacggcacactggcttacac

SEQ ID NO: 172997 - DNA, 55 bp, Artificial
  Synthetic oligonucleotide
ggaacgcctgtatgcccacatccttaagaagctacggcccacgacgcgggtacca

SEQ ID NO: 172998 - DNA, 55 bp, Artificial
  Synthetic oligonucleotide
gcccaggttgggaaggctcctctccccagtgctcttatttggcgtcgttaccgtc

SEQ ID NO: 172999 - DNA, 55 bp, Artificial
  Synthetic oligonucleotide
cattcggccgggtgacacggcagcaggcagttcggtaggtagggtatcgtgcgct

SEQ ID NO: 173000 - DNA, 55 bp, Artificial
  Synthetic oligonucleotide
catcttcgtggtgggtatctgctctgtactagcatttgcgacatcagaatagctg

SEQ ID NO: 173001 - DNA, 55 bp, Artificial
  Synthetic oligonucleotide
tgttccagactccaggccacgtcctccactcgagtgcggttccaactgctgcggg

SEQ ID NO: 173002 - DNA, 54 bp, Artificial
  Synthetic oligonucleotide
ccggtacgccaaggtttcatcagggccggatggtagggagctttgcttcggtgg

SEQ ID NO: 173003 - DNA, 55 bp, Artificial
  Synthetic oligonucleotide
catccgtgcagcgaatgagcatgactacagcgtcctgtgtgagatgaaccggaag

SEQ ID NO: 173004 - DNA, 55 bp, Artificial
  Synthetic oligonucleotide
gccagccggacgctagcccttgacacttccggcgaagagctactacactcccctt

SEQ ID NO: 173005 - DNA, 59 bp, Artificial
  Synthetic oligonucleotide
caggtactggacgattgcacccgacggtgtgacccaggcgtgcagcttgtacccgtaca

SEQ ID NO: 173006 - DNA, 55 bp, Artificial
  Synthetic oligonucleotide
gcggctacgattgcttgagagactgccgcgtaaccttcaagtgacaatgtgcccc

SEQ ID NO: 173007 - DNA, 55 bp, Artificial
  Synthetic oligonucleotide
cccaaatcgctgccaacgaggcacaagaacgctatgttctcggactgcgttcagc

SEQ ID NO: 173008 - DNA, 53 bp, Artificial
  Synthetic oligonucleotide
ccgtattccgttcaacacgtaacatttggcaccctgacgtaccctcggcaggg

SEQ ID NO: 173009 - DNA, 55 bp, Artificial
  Synthetic oligonucleotide
ccgtcaatgacctgggcgtctctctaccatcaggatggaccgtcaagatacgcac

SEQ ID NO: 173010 - DNA, 55 bp, Artificial
  Synthetic oligonucleotide
gccaccatgcgggcacggaaattcagccagactgaggggcctatgagcaagcacg

SEQ ID NO: 173011 - DNA, 55 bp, Artificial
  Synthetic oligonucleotide
ggaatcacaactcgccgtctggacgtctcagcacatactgaaccatcgcgacagg

SEQ ID NO: 173012 - DNA, 55 bp, Artificial
  Synthetic oligonucleotide
gctaccgggcctggacatcctcccgatgcgcgttaccgtgtcccatgagacgcgg

SEQ ID NO: 173013 - DNA, 55 bp, Artificial
  Synthetic oligonucleotide
cccctatgaatgatgccgcacctacgccccttactccacgtcccatgcgggtaat

SEQ ID NO: 173014 - DNA, 55 bp, Artificial
  Synthetic oligonucleotide
cccgctagtcttgacctgtgaactgcacgatgagacaagtcagcggttgtcagcc

SEQ ID NO: 173015 - DNA, 55 bp, Artificial
  Synthetic oligonucleotide
gcgcttcccgtttgtgtgaaccggacaccagcggttcggagtgagcatagcacct

SEQ ID NO: 173016 - DNA, 53 bp, Artificial
  Synthetic oligonucleotide
ccacacccgtttttggactacccccgagcacttcggcactctcgttagaagag

SEQ ID NO: 173017 - DNA, 55 bp, Artificial
  Synthetic oligonucleotide
tgtcggttacgtgctgcaaacgtaagacttctcagcctacactccggcccatgcc

SEQ ID NO: 173018 - DNA, 55 bp, Artificial
  Synthetic oligonucleotide
ccaggcatactgagcacgtcggtacccatccacttctcgcgggctgcaggaaaac

SEQ ID NO: 173019 - DNA, 55 bp, Artificial
  Synthetic oligonucleotide
gcgcttcttctaaacacaacgcgactcgactcaacacataggctctccccttctt

SEQ ID NO: 173020 - DNA, 55 bp, Artificial
  Synthetic oligonucleotide
cccggtgctgtgacagcgcccactggagtaagcgctatcgcctataccaacggtg

SEQ ID NO: 173021 - DNA, 55 bp, Artificial
  Synthetic oligonucleotide
ggaaagcggagcagcggactctgctagcattccagcaaccacaacgcagtgtttt

SEQ ID NO: 173022 - DNA, 55 bp, Artificial
  Synthetic oligonucleotide
cccggttaagcacgcatatgcctcgggtatcggggcgcagacagggatcgaatac

SEQ ID NO: 173023 - DNA, 55 bp, Artificial
  Synthetic oligonucleotide
cccgtgaggccctctacggctcaaatgtagtaactgctcagcacgagaagtcgag

SEQ ID NO: 173024 - DNA, 55 bp, Artificial
  Synthetic oligonucleotide
gcgagaattgcttttcggacggtagaagggagattctgcaagctcgtgccattgg

SEQ ID NO: 173025 - DNA, 55 bp, Artificial
  Synthetic oligonucleotide
ccctctgtaacgaccacaaaactgcacgaaccattgatataagccccttgatata

SEQ ID NO: 173026 - DNA, 55 bp, Artificial
  Synthetic oligonucleotide
ccagaggatcccgcatgtggatgaacctctggcgcaagctgtacgtttctgagcg

SEQ ID NO: 173027 - DNA, 58 bp, Artificial
  Synthetic oligonucleotide
ccacacgtcaaagtgccgcccaatcaggttggtgacgcgtagggtcgtccaggtgtca

SEQ ID NO: 173028 - DNA, 55 bp, Artificial
  Synthetic oligonucleotide
ccacgctcctggggagtcctttggcctccggagagcctctaacgtacgctcagat

SEQ ID NO: 173029 - DNA, 55 bp, Artificial
  Synthetic oligonucleotide
ccaccacacactcaacgtgaagctcagatcaaagctgtggcacgcgccttagggc

SEQ ID NO: 173030 - DNA, 55 bp, Artificial
  Synthetic oligonucleotide
ccagtgggaacacccaggcactgcgtcctggtgcccgatgattcatttcatcggg

SEQ ID NO: 173031 - DNA, 55 bp, Artificial
  Synthetic oligonucleotide
ccgaatgagagcgcttgtggctttagcaaccctgctaggtctgagtgggtggagc

SEQ ID NO: 173032 - DNA, 55 bp, Artificial
  Synthetic oligonucleotide
tgtaaacctctgaacgagtgacgaaaggccccgaatggggagatgacggtagctc

SEQ ID NO: 173033 - DNA, 55 bp, Artificial
  Synthetic oligonucleotide
cattgcggtagccgagtatttgaagtccgctgcaggcgccaagtggccccggtca

SEQ ID NO: 173034 - DNA, 55 bp, Artificial
  Synthetic oligonucleotide
ccattggtaagtcacgcatgaagacaatttctccgcaagtgctcagctccgcctg

SEQ ID NO: 173035 - DNA, 55 bp, Artificial
  Synthetic oligonucleotide
gcgaacgaaggtctacttatgagtgttccgattatgaagcgcggaccagattccg

SEQ ID NO: 173036 - DNA, 55 bp, Artificial
  Synthetic oligonucleotide
tttcataagtgacccctcagaggcaggaacaggtgcggacccacgcagcaggcgc

SEQ ID NO: 173037 - DNA, 55 bp, Artificial
  Synthetic oligonucleotide
cgggtcagttgaggtcatggccgcaacctagcattctttgaacggcggttcagtg

SEQ ID NO: 173038 - DNA, 60 bp, Artificial
  Synthetic oligonucleotide
gcttagcggcgtctcctgcgaccagttgactcacggcaaggggattgtgcccttcagcca

SEQ ID NO: 173039 - DNA, 55 bp, Artificial
  Synthetic oligonucleotide
cgggtggtctccgagcaactcctggtagcacgccaggagttcatccacgctcaga

SEQ ID NO: 173040 - DNA, 55 bp, Artificial
  Synthetic oligonucleotide
gaccgaagctgtgcagcgagttcgcagttttgaccccatgtcctgatctcgaccg

SEQ ID NO: 173041 - DNA, 52 bp, Artificial
  Synthetic oligonucleotide
aacccagggcgaataagttttaccttctcccggaccgtctgccccagaggca

SEQ ID NO: 173042 - DNA, 55 bp, Artificial
  Synthetic oligonucleotide
cgtcgctaaggacaagttctagagcttacgccatggcgcaaaattctctaaagcg

SEQ ID NO: 173043 - DNA, 55 bp, Artificial
  Synthetic oligonucleotide
cgtgacgtctgcgtcggtaaacagaagaaagtctccctgagccgcgcgggagagc

SEQ ID NO: 173044 - DNA, 55 bp, Artificial
  Synthetic oligonucleotide
cgtgatgtaaagctcacactgatcaatcaacacgatcagcttggcttaggtcacg

SEQ ID NO: 173045 - DNA, 55 bp, Artificial
  Synthetic oligonucleotide
gaactgacgaaagggaggggaagcgtcaccgcctacactgcgcggtatgtggatg

SEQ ID NO: 173046 - DNA, 55 bp, Artificial
  Synthetic oligonucleotide
ctacactccaaaggtgttcgctgtgtctcggccttccggaggtcaaacccgtgtc

SEQ ID NO: 173047 - DNA, 55 bp, Artificial
  Synthetic oligonucleotide
ctacagtcctgcctcccttattccttacgcgtcaggacgacatcgtaggtcgtgg

SEQ ID NO: 173048 - DNA, 55 bp, Artificial
  Synthetic oligonucleotide
tttcgcgtttgacctcccgctcaagctgccgcaattgatagcgagcagagcgggg

SEQ ID NO: 173049 - DNA, 58 bp, Artificial
  Synthetic oligonucleotide
gctagaaacactgtagggcgaacagtctgggcacaaccaccggaaacagtcaggtcgc

SEQ ID NO: 173050 - DNA, 55 bp, Artificial
  Synthetic oligonucleotide
ctactctccgctctttgctgtgattcagtcatctgctcccgcctctgcgggcacg

SEQ ID NO: 173051 - DNA, 55 bp, Artificial
  Synthetic oligonucleotide
ctactgccttccccaaggaatacagtcaatgccagacaggttcagcgttctgggg

SEQ ID NO: 173052 - DNA, 54 bp, Artificial
  Synthetic oligonucleotide
gaacccaccgatcgggattcgggaccctcttcttttgagcgaacgcgtacagga

SEQ ID NO: 173053 - DNA, 55 bp, Artificial
  Synthetic oligonucleotide
ctatgggtgggtcaagccctctcggtgcttggcggcgcactgtctttcaccgtag

SEQ ID NO: 173054 - DNA, 55 bp, Artificial
  Synthetic oligonucleotide
tttcgtgcgcccgcttccgctgtccttcctgcacgccggagtttgcatgcgccgt

SEQ ID NO: 173055 - DNA, 55 bp, Artificial
  Synthetic oligonucleotide
ctcagcagacaccgtgccctgagtagacgccgtgacgctggagtctccacgtatg

SEQ ID NO: 173056 - DNA, 55 bp, Artificial
  Synthetic oligonucleotide
gaacattccagcttggaggtcatatgaacgtgccgaagctcagcctcgcagggca

SEQ ID NO: 173057 - DNA, 55 bp, Artificial
  Synthetic oligonucleotide
tttggctggcgttactcacaacgcggaccccgatggttcggctcacggtgtcgtg

SEQ ID NO: 173058 - DNA, 54 bp, Artificial
  Synthetic oligonucleotide
aaaggccacgtaagccttgttggtcagccgaccctgccggtagtggtctttgcc

SEQ ID NO: 173059 - DNA, 54 bp, Artificial
  Synthetic oligonucleotide
gaaaatccgtttcgaaggtctggtattgcctggtgacgtaccgttcctgttcga

SEQ ID NO: 173060 - DNA, 58 bp, Artificial
  Synthetic oligonucleotide
cccgcaagcttccaaatgaggtttctcgctcggcgaagtatgtttgacgtgatggccc

SEQ ID NO: 173061 - DNA, 55 bp, Artificial
  Synthetic oligonucleotide
ctcgcatggcaagaagacccgtgatgagcaattaccggtcgtcaactcaccgcgc

SEQ ID NO: 173062 - DNA, 55 bp, Artificial
  Synthetic oligonucleotide
aaactgccgtacgtgccgggagaggcccatccgtcctggacagctcaactccgct

SEQ ID NO: 173063 - DNA, 55 bp, Artificial
  Synthetic oligonucleotide
ctgacggcaaacgtgtcctgacagtcaggctctccgtattccgcggactatgcgc

SEQ ID NO: 173064 - DNA, 55 bp, Artificial
  Synthetic oligonucleotide
ttttatccgtcggtcctgaactccacccggtacgccggcgtgatgacaggggtgc

SEQ ID NO: 173065 - DNA, 55 bp, Artificial
  Synthetic oligonucleotide
ctttctcgaacccggcagcccaggtccattcgagctgatctggttgttcaatgcc

SEQ ID NO: 173066 - DNA, 55 bp, Artificial
  Synthetic oligonucleotide
cttggcggttctattagttgtagtccgaagtacgtctgatcacctccggtgatcg

SEQ ID NO: 173067 - DNA, 55 bp, Artificial
  Synthetic oligonucleotide
ctggtcacgcagcacccctgcctgaactgtcctctgattgtgagcgccagctagg

SEQ ID NO: 173068 - DNA, 55 bp, Artificial
  Synthetic oligonucleotide
ctgtccagttcgccagaaattcttgctctctccgtgcctgttcacgttgccgggg

SEQ ID NO: 173069 - DNA, 55 bp, Artificial
  Synthetic oligonucleotide
cctactggtctgaccatcagacgttggccagggacgctatgctgcgcccatgtgg

SEQ ID NO: 173070 - DNA, 55 bp, Artificial
  Synthetic oligonucleotide
cctccagccatgcccacaattcaaaaggggcctgacgaagggtcaggtcctagtg

SEQ ID NO: 173071 - DNA, 57 bp, Artificial
  Synthetic oligonucleotide
tccgctcgttcagtcttcggacctgttgaagggcgctgggatcggcacactcccccg

SEQ ID NO: 173072 - DNA, 55 bp, Artificial
  Synthetic oligonucleotide
cctccaggcgattgaattgagcagggatcggctcattggcacagtaacacactgt

SEQ ID NO: 173073 - DNA, 55 bp, Artificial
  Synthetic oligonucleotide
aagttgtcactgcgtttctcgagcttcttaacaccaatgtctctgcacttctccc

SEQ ID NO: 173074 - DNA, 55 bp, Artificial
  Synthetic oligonucleotide
cctggatgagacgcttcctggcaacgtggttcctcaccggatcatgcattatcga

SEQ ID NO: 173075 - DNA, 55 bp, Artificial
  Synthetic oligonucleotide
tgttgcccaagaccacaggattggccgcaacaacttgtgccacaaagctcgacgt

SEQ ID NO: 173076 - DNA, 55 bp, Artificial
  Synthetic oligonucleotide
gcatcgtggggcgtaaccaatccatcgcgtatgacacgtgacagaatgtgctcac

SEQ ID NO: 173077 - DNA, 55 bp, Artificial
  Synthetic oligonucleotide
gcagttctagaccctccgagaaactctcgaacatgagaacttcgtttctcgcttg

SEQ ID NO: 173078 - DNA, 55 bp, Artificial
  Synthetic oligonucleotide
cgaagactgttaaagagcattcgggagatccagtcaagatcataattggtgcatt

SEQ ID NO: 173079 - DNA, 55 bp, Artificial
  Synthetic oligonucleotide
gcaggtgccggggtttggtgcctgccttttcgcgaccgcccaactcgtgctattt

SEQ ID NO: 173080 - DNA, 55 bp, Artificial
  Synthetic oligonucleotide
cgagaatcaaccgggagtgctcagcttcacggcgcattctagagatcctgtctgc

SEQ ID NO: 173081 - DNA, 55 bp, Artificial
  Synthetic oligonucleotide
gcagactgccgtttagagcagggccacagcagacagctggtggtagcagcaagcg

SEQ ID NO: 173082 - DNA, 55 bp, Artificial
  Synthetic oligonucleotide
ataaaagggctgctcggtgctgtaaggccggtcgataatggtggttcggccgtaa

SEQ ID NO: 173083 - DNA, 59 bp, Artificial
  Synthetic oligonucleotide
tcaaaagatgtattcgtattcgggccaataccgtggtagacggtgaatatgctcgtgac

SEQ ID NO: 173084 - DNA, 55 bp, Artificial
  Synthetic oligonucleotide
ttcctgccagcctaccagctcacacagtccacgccagcgggtcaggaacccctgt

SEQ ID NO: 173085 - DNA, 55 bp, Artificial
  Synthetic oligonucleotide
cgcaaggctaagacgaaagcatgagcgacgctgccatttcgtgttcttggaagcc

SEQ ID NO: 173086 - DNA, 55 bp, Artificial
  Synthetic oligonucleotide
cgcacaggtccgtcaggagtttgttcccaggtggttgggtcactttcttcgcgcg

SEQ ID NO: 173087 - DNA, 55 bp, Artificial
  Synthetic oligonucleotide
gatctggaagggattccaagaaagttgacaggtgacccatgaaacactctgaccg

SEQ ID NO: 173088 - DNA, 55 bp, Artificial
  Synthetic oligonucleotide
cgcccgctgacctgacagcgttccattctttgtgagccttcccctggaacggcgt

SEQ ID NO: 173089 - DNA, 55 bp, Artificial
  Synthetic oligonucleotide
cgcctggaggttgcctcacgtgtccagcaggaattcacgtgatgcggccaatccc

SEQ ID NO: 173090 - DNA, 55 bp, Artificial
  Synthetic oligonucleotide
cgcgacttagacagacctaaccgagcgggaagaaaagccataaagtcgcaagaac

SEQ ID NO: 173091 - DNA, 55 bp, Artificial
  Synthetic oligonucleotide
gagtgtagagagcactccgaacaacgagtacagtgccgtcattcacaagggcgtc

SEQ ID NO: 173092 - DNA, 55 bp, Artificial
  Synthetic oligonucleotide
gagtgcccaccggtgacaccccagcaatggattgcctcctgctctaggcaaattg

SEQ ID NO: 173093 - DNA, 55 bp, Artificial
  Synthetic oligonucleotide
cgctggtcttcgaggtgggtgcccggtgtcacaggaacagtgcagatggaacgga

SEQ ID NO: 173094 - DNA, 57 bp, Artificial
  Synthetic oligonucleotide
tatacgggccgtctctagaggtcgagttgtacgctaagcgaagttcggtgacccaga

SEQ ID NO: 173095 - DNA, 55 bp, Artificial
  Synthetic oligonucleotide
cgctgtagacggctcctttccgttattccggttcgctctaagtcaaagcctcgct

SEQ ID NO: 173096 - DNA, 55 bp, Artificial
  Synthetic oligonucleotide
gaggcggattacgactacatactgattgacacaccacccagcaacggtggtctga

SEQ ID NO: 173097 - DNA, 55 bp, Artificial
  Synthetic oligonucleotide
gaggcgcagttcgaaattccgtaccagcccgctcgtgttgcttgacagcacctcg

SEQ ID NO: 173098 - DNA, 55 bp, Artificial
  Synthetic oligonucleotide
gaggcatcattttcagtgtagagcgtctttgccccgcttatgccccggtcctcac

SEQ ID NO: 173099 - DNA, 55 bp, Artificial
  Synthetic oligonucleotide
gacgtttcgactcttagacttgaaaaggacaaatctaaatgaccaatcatcaacc

SEQ ID NO: 173100 - DNA, 55 bp, Artificial
  Synthetic oligonucleotide
gacggtgaattgcatagcctgagaggacgacagctggctatgtcgtgtcagcgtg

SEQ ID NO: 173101 - DNA, 55 bp, Artificial
  Synthetic oligonucleotide
cgggctgaccaggtgtatggtacgctcgccccaagttgaaacgtgttgcctgccc

SEQ ID NO: 173102 - DNA, 55 bp, Artificial
  Synthetic oligonucleotide
gacggtcaaacgattctggcgagccccaatccctttcagccgaatgtcgaggcct

SEQ ID NO: 173103 - DNA, 55 bp, Artificial
  Synthetic oligonucleotide
gtcacagctagatagagccagccttctttggtcgggatagaggtaatatcgctcg

SEQ ID NO: 173104 - DNA, 55 bp, Artificial
  Synthetic oligonucleotide
actggcccgcaccgcgcaccatacgttgaccagttctgcgccaggtgacatgtac

SEQ ID NO: 173105 - DNA, 58 bp, Artificial
  Synthetic oligonucleotide
tagggggcgacgtggtggaagatacaaagtcaactcgcacttcgggagtccagctcaa

SEQ ID NO: 173106 - DNA, 55 bp, Artificial
  Synthetic oligonucleotide
gtaccgttcgttacgagcacccgtttcgcttgacatgccacctgtaagcgcttac

SEQ ID NO: 173107 - DNA, 55 bp, Artificial
  Synthetic oligonucleotide
actggagccggattctgcgaccggagcacttcgtcaggagacccacccagttcag

SEQ ID NO: 173108 - DNA, 55 bp, Artificial
  Synthetic oligonucleotide
agtacgaagatggatgccaagagcatagtcattactcccttttgcattgtcgctc

SEQ ID NO: 173109 - DNA, 55 bp, Artificial
  Synthetic oligonucleotide
agtcgcgtgatgactgtaattgcttcgacaaggacggccatgggtctatgatgcc

SEQ ID NO: 173110 - DNA, 55 bp, Artificial
  Synthetic oligonucleotide
tcaatcggaatctgaatcagccctcgtacttgctcagaacctgctcggttcgggc

SEQ ID NO: 173111 - DNA, 55 bp, Artificial
  Synthetic oligonucleotide
agtgcagcgggtagtgacctccggctcgggaagagtggagtgtgttgcaccgcgc

SEQ ID NO: 173112 - DNA, 55 bp, Artificial
  Synthetic oligonucleotide
agtggcatgtgagcgggtctgccccacttgcgccctcccctaagctgcggcaact

SEQ ID NO: 173113 - DNA, 53 bp, Artificial
  Synthetic oligonucleotide
ggtgcttccagaaggaatagttccggtgggaatagttccgaatgaaacgaccg

SEQ ID NO: 173114 - DNA, 55 bp, Artificial
  Synthetic oligonucleotide
ggtgaggaactgataggtgtcatacgcctcctgaagaaccgatcaaactgccctc

SEQ ID NO: 173115 - DNA, 55 bp, Artificial
  Synthetic oligonucleotide
ggtctgaggcacagactgattctctgtcgaccagaagtcattgaatcgaagtatc

SEQ ID NO: 173116 - DNA, 60 bp, Artificial
  Synthetic oligonucleotide
tagagcgggagccaccgttgcgagataccccggtgtggacgcagccatgagcggagtaag

SEQ ID NO: 173117 - DNA, 55 bp, Artificial
  Synthetic oligonucleotide
tgccggtataactgctcctggcgtcttcggagccaggaggtgaggctcgcttgtg

SEQ ID NO: 173118 - DNA, 55 bp, Artificial
  Synthetic oligonucleotide
acggggcaggccccttgcaggagttccaacacatcgttcttccgcactggaccca

SEQ ID NO: 173119 - DNA, 55 bp, Artificial
  Synthetic oligonucleotide
gggttccctgatgaaacttggacgacaaaacgcgtggcagagctgattggacggc

SEQ ID NO: 173120 - DNA, 55 bp, Artificial
  Synthetic oligonucleotide
atcaacacccgaaagtcctccgaaggctcagcttgaaaagcccacccggacagga

SEQ ID NO: 173121 - DNA, 55 bp, Artificial
  Synthetic oligonucleotide
gggtatgggtactgccgaatcacagcgaggtctcccgtgatccacaaacgcgtcg

SEQ ID NO: 173122 - DNA, 55 bp, Artificial
  Synthetic oligonucleotide
tgcggcgggccgtgtgtccggtgatactggctgaactagcgctcgacaaccgtga

SEQ ID NO: 173123 - DNA, 55 bp, Artificial
  Synthetic oligonucleotide
ggggcccgctcacttcggccaattttctcccagccgttcagtttctacgacatga

SEQ ID NO: 173124 - DNA, 55 bp, Artificial
  Synthetic oligonucleotide
tccacatggaaccagtcacggtaggcgctcgcctcgccctgttccaagaggtcgt

SEQ ID NO: 173125 - DNA, 55 bp, Artificial
  Synthetic oligonucleotide
atcgtcaagcatccttggtcgggccggcagggtacctgggcaccaaaagacgcac

SEQ ID NO: 173126 - DNA, 55 bp, Artificial
  Synthetic oligonucleotide
atctcgcacggctgggccgccaattgagagggaaataggccgcctgtcaccttcc

SEQ ID NO: 173127 - DNA, 56 bp, Artificial
  Synthetic oligonucleotide
tagaactagtccgccgcccactatacataacagagctaaggcgtttattagaaagt

SEQ ID NO: 173128 - DNA, 55 bp, Artificial
  Synthetic oligonucleotide
tccatacgtgaggccttctcttgatggcgatgtgacaacgctctgtgtgcagggg

SEQ ID NO: 173129 - DNA, 55 bp, Artificial
  Synthetic oligonucleotide
ggggagtatctagaacctcgtaacgggcgagatccatcagtcgggcgtactcgtc

SEQ ID NO: 173130 - DNA, 55 bp, Artificial
  Synthetic oligonucleotide
tagaccccgcgacgacgttggagcgcctaatcgtccaactcagcgttgaggaccg

SEQ ID NO: 173131 - DNA, 55 bp, Artificial
  Synthetic oligonucleotide
tagacgcgtcaggaagtgatgacgggcgaagcggcgcaatgaccacatggcggtc

SEQ ID NO: 173132 - DNA, 55 bp, Artificial
  Synthetic oligonucleotide
acctgcgtcctatgaactgtagccacccactccggaggggaccacacgcccatga

SEQ ID NO: 173133 - DNA, 55 bp, Artificial
  Synthetic oligonucleotide
tcggcctgccactcggcaggtttgccaagaatagacacgcggtggtaccagggga

SEQ ID NO: 173134 - DNA, 55 bp, Artificial
  Synthetic oligonucleotide
tcgtcctgaactcagaagcattcggacggtattgaagtcacccgtttcagacccc

SEQ ID NO: 173135 - DNA, 55 bp, Artificial
  Synthetic oligonucleotide
taccgactccaccacagtttaggccgtcgtcgcgtcatccgcaccctctggcgtt

SEQ ID NO: 173136 - DNA, 55 bp, Artificial
  Synthetic oligonucleotide
tataagcctcgcactgccggcgcccctcaatgtccctctcctggggacagactga

SEQ ID NO: 173137 - DNA, 55 bp, Artificial
  Synthetic oligonucleotide
tacccgcagacgagtcacgtggaggtcgtgagtgtgttgtcgcgtgggtagggtg

SEQ ID NO: 173138 - DNA, 60 bp, Artificial
  Synthetic oligonucleotide
agattattcactcgcccaaacaggacacgcacaagcgcgctatgcaggttcagccgaccg

SEQ ID NO: 173139 - DNA, 55 bp, Artificial
  Synthetic oligonucleotide
accgttgacgtagaccatcatgcgttgcccgagaagccactgcgttcacgcgtgg

SEQ ID NO: 173140 - DNA, 55 bp, Artificial
  Synthetic oligonucleotide
tctgaagaacgatcagtcctgagacgcctcacgttggatctcaactcggaacctc

SEQ ID NO: 173141 - DNA, 51 bp, Artificial
  Synthetic oligonucleotide
accgtgggcggtacacgcaccggtttaccgtcgtttcccctgcgtggtcta

SEQ ID NO: 173142 - DNA, 55 bp, Artificial
  Synthetic oligonucleotide
gtttggcataactcacctgggcgtagttcattcgccccgtatccttgagctggcc

SEQ ID NO: 173143 - DNA, 55 bp, Artificial
  Synthetic oligonucleotide
acttggcgcgtgcgggttgcatgtggctccccgcacacggactgctggtgaaagc

SEQ ID NO: 173144 - DNA, 55 bp, Artificial
  Synthetic oligonucleotide
gtttactccacccgacctccagtgtcaagcagtgaactcagttgacgtgccgtgc

SEQ ID NO: 173145 - DNA, 55 bp, Artificial
  Synthetic oligonucleotide
gttggtcatcaaccgccgagtttactgtccgaatgtgggagtgaacatgaaccgc

SEQ ID NO: 173146 - DNA, 55 bp, Artificial
  Synthetic oligonucleotide
gttgggaggtgacgcacctgcgagatacgttgggcatcactacgggcacggcttc

SEQ ID NO: 173147 - DNA, 55 bp, Artificial
  Synthetic oligonucleotide
tcgaccgaccggtcaggcatacccagcatgagaccagattgaggggcgggcaagt

SEQ ID NO: 173148 - DNA, 55 bp, Artificial
  Synthetic oligonucleotide
gtggggtgaccctcatcaggcgaacgggcaacttaggaaagcccacttgaccacc

SEQ ID NO: 173149 - DNA, 49 bp, Artificial
  Synthetic oligonucleotide
taataccgacacctttgggccgttttcggaccggaaaaggtccaaagaa

SEQ ID NO: 173150 - DNA, 55 bp, Artificial
  Synthetic oligonucleotide
actgtcctggctttctggggctctgctctgagcatcgaggaaggccagtgcccac

SEQ ID NO: 173151 - DNA, 55 bp, Artificial
  Synthetic oligonucleotide
gtgctgtaaggccggtcgataatggtggttcggccgtaaggcaggccacggagca

SEQ ID NO: 173152 - DNA, 55 bp, Artificial
  Synthetic oligonucleotide
tgacataccctccgtgcggacaatccgccactgtcacccgcccaggatgatccgt

SEQ ID NO: 173153 - DNA, 55 bp, Artificial
  Synthetic oligonucleotide
acctgttctgggtttgttgtgccgggcgtcaaaggtccgccaggcaccgtcgatc

SEQ ID NO: 173154 - DNA, 55 bp, Artificial
  Synthetic oligonucleotide
gtgaccggagcaggcgtttcctgatgtcacgcaggactacctgtgacaggcccga

SEQ ID NO: 173155 - DNA, 55 bp, Artificial
  Synthetic oligonucleotide
tgactgttctggatgctcgcaagactgtcactgacatggcccaagcgcacctgaa

SEQ ID NO: 173156 - DNA, 55 bp, Artificial
  Synthetic oligonucleotide
gtcactcagtgacgctgagcgaaaggggaaaggacttccattccaccctaccgaa

SEQ ID NO: 173157 - DNA, 55 bp, Artificial
  Synthetic oligonucleotide
caagggacaatggtaagcgttcccagagcttgaacgctgtttgctcactgcggtc

SEQ ID NO: 173158 - DNA, 55 bp, Artificial
  Synthetic oligonucleotide
tgctcagagtgcccaagcgtaccgagctcctgaacccaactgccggagaccccgt

SEQ ID NO: 173159 - DNA, 55 bp, Artificial
  Synthetic oligonucleotide
caatcaggaacttgcccgtgacatcacgccctactggaacagtggccgttgggtc

SEQ ID NO: 173160 - DNA, 60 bp, Artificial
  Synthetic oligonucleotide
agcgaattagactgagtgcctcaaggaggtgcaatctgagtgccctgaacacaaaacggg

SEQ ID NO: 173161 - DNA, 55 bp, Artificial
  Synthetic oligonucleotide
caatcatggacttaacctaggctcggtgtacacactgcgcaatgaggttccttac

SEQ ID NO: 173162 - DNA, 55 bp, Artificial
  Synthetic oligonucleotide
gggaagacgggacgggcagtcagaacgaggctatgacgctctttctagaacgcgc

SEQ ID NO: 173163 - DNA, 55 bp, Artificial
  Synthetic oligonucleotide
ggctcgcacacgtctagcaaccgaaagcaaccgaattgcgcgaactgcagcctgc

SEQ ID NO: 173164 - DNA, 55 bp, Artificial
  Synthetic oligonucleotide
ggctcagacatcaacgcagtgtacttcgcttaacctgagcggcttactctggccg

SEQ ID NO: 173165 - DNA, 55 bp, Artificial
  Synthetic oligonucleotide
ggcggcattctagcagcccggatgagacagactgaagtaagtgaatagtttcacg

SEQ ID NO: 173166 - DNA, 55 bp, Artificial
  Synthetic oligonucleotide
cactgcggcccaggggttgcgtctccgaggcaggtcacggacaccagaccctcag

SEQ ID NO: 173167 - DNA, 55 bp, Artificial
  Synthetic oligonucleotide
ggcgatcagaattggagagacgcaactcacattgttctctccaggagggctttgc

SEQ ID NO: 173168 - DNA, 55 bp, Artificial
  Synthetic oligonucleotide
cagaccgaaatcaaagtgcgcgcccaaaacaatgaggtgaacagcaacggagccg

SEQ ID NO: 173169 - DNA, 55 bp, Artificial
  Synthetic oligonucleotide
ggcctcagtatgccgcttgcacatggcatggactgccagtatagttacgaggttg

SEQ ID NO: 173170 - DNA, 53 bp, Artificial
  Synthetic oligonucleotide
ggccgttttcggaccggaaaaggtccaaagaacgctgcaagcaataccgacac

SEQ ID NO: 173171 - DNA, 60 bp, Artificial
  Synthetic oligonucleotide
taagtgtacatcgaagtgtacaaagtagagggtgcatactgaaatgcggacgaaattcag

SEQ ID NO: 173172 - DNA, 55 bp, Artificial
  Synthetic oligonucleotide
accttattgatcgcggcgtagatttgagtcgataagtcgttgaggcagttcgata

SEQ ID NO: 173173 - DNA, 55 bp, Artificial
  Synthetic oligonucleotide
ggcccctgaagctaccctcctcacctgtctagaccttttgcgagtagacgcagct

SEQ ID NO: 173174 - DNA, 55 bp, Artificial
  Synthetic oligonucleotide
ggcccaccgttgagactccactttcctggtgcggcaatctcttggacagttaccc

SEQ ID NO: 173175 - DNA, 55 bp, Artificial
  Synthetic oligonucleotide
ggcaaccctttaccgttatgtcaacctggactacctgcccaccctgacgagcgcc

SEQ ID NO: 173176 - DNA, 55 bp, Artificial
  Synthetic oligonucleotide
ggataaaggccatacgttcaccatttgtactgaaagtgaccttgccatcgtaaaa

SEQ ID NO: 173177 - DNA, 55 bp, Artificial
  Synthetic oligonucleotide
ggagtgcgctccaaacgtcagctcgaggtgaatgtcccctacgccaccagggttc

SEQ ID NO: 173178 - DNA, 55 bp, Artificial
  Synthetic oligonucleotide
tcctttgtcccgcgttttaccctcgttctccagtgatagcgtgtccgaacgctcc

SEQ ID NO: 173179 - DNA, 55 bp, Artificial
  Synthetic oligonucleotide
caggtcggcttgctttccacaccggaaagattggataccctagtgaaaatgcctc

SEQ ID NO: 173180 - DNA, 55 bp, Artificial
  Synthetic oligonucleotide
cagtgctttcagggcgtatgcctgtgagagcgcgtcctctcccggttcatccagg

SEQ ID NO: 173181 - DNA, 55 bp, Artificial
  Synthetic oligonucleotide
ggagtacctccctgatgggaagtagatagggagagcagctcagcccctatgcctt

SEQ ID NO: 173182 - DNA, 60 bp, Artificial
  Synthetic oligonucleotide
agcttatccaggtgcccgtgcagtgctttcagggcgtatgcctgtgagagcgcgtcctct

SEQ ID NO: 173183 - DNA, 55 bp, Artificial
  Synthetic oligonucleotide
catccaaccgggaatcgttgacaacaaatttacagctaagctgcctacagatggg

SEQ ID NO: 173184 - DNA, 54 bp, Artificial
  Synthetic oligonucleotide
accaggcgggacccagcttcgccatcctgaattggaaggggcagccgtacggtt

SEQ ID NO: 173185 - DNA, 55 bp, Artificial
  Synthetic oligonucleotide
gggcccagcttaaagcgctgctgttcacaaggctcttatcgcgtcacgccctcag

SEQ ID NO: 173186 - DNA, 55 bp, Artificial
  Synthetic oligonucleotide
gggagctagtggtgcgaccggcttttcgtctgccttcaaggcactatccaatgag

SEQ ID NO: 173187 - DNA, 55 bp, Artificial
  Synthetic oligonucleotide
attaccttccgcagcagggcgtgactggtatccagagcctcccgcgtgacctgga

SEQ ID NO: 173188 - DNA, 55 bp, Artificial
  Synthetic oligonucleotide
caacagcccgcatgaggtgacctacgaactacttgaccatacagcggacaccttt

SEQ ID NO: 173189 - DNA, 55 bp, Artificial
  Synthetic oligonucleotide
tccctgatgttcacccctcgggtgcgctagcctgtgcgggatgcctgcggtgacg

SEQ ID NO: 173190 - DNA, 55 bp, Artificial
  Synthetic oligonucleotide
caacctggagtacgctcaggatgaagccatggccctggacaccgtcatgcctctg

SEQ ID NO: 173191 - DNA, 55 bp, Artificial
  Synthetic oligonucleotide
atgcgatgcgcctcggtagcaccatccagcgcactatcaggacggacctgtgggc

SEQ ID NO: 173192 - DNA, 55 bp, Artificial
  Synthetic oligonucleotide
caagcgagcgatgacaagtcactgccaccaacgcgtcaatcagagacggcccaga

SEQ ID NO: 173193 - DNA, 59 bp, Artificial
  Synthetic oligonucleotide
ggtctatggcacccgcacggggtcgactgtaaacgcctcacatgttgaactcttcttgc

SEQ ID NO: 173194 - DNA, 60 bp, Artificial
  Synthetic oligonucleotide
gttgattgagccatcccactccgaaggaccacttccgatgaacaatcaaaagcaggacag

SEQ ID NO: 173195 - DNA, 55 bp, Artificial
  Synthetic oligonucleotide
ggggagcaggcgaggcaaaagccaggaatctggccgtcaaagttttgtgacaacg

SEQ ID NO: 173196 - DNA, 55 bp, Artificial
  Synthetic oligonucleotide
caagatgaccaaaggctgaaaacagaacgaccggcagttaagcccgtcgctctag

SEQ ID NO: 173197 - DNA, 54 bp, Artificial
  Synthetic oligonucleotide
ggccttgataggcctgccactgaacaggaagacgttggggtgattcccacgcct

SEQ ID NO: 173198 - DNA, 54 bp, Artificial
  Synthetic oligonucleotide
ctgaggtcaacccctaatcgccattaaaggtgtgctaaattgctgtcatatcaa

SEQ ID NO: 173199 - DNA, 54 bp, Artificial
  Synthetic oligonucleotide
ttggctcgctagcctgacagcctctaggctgaaggtctgatgcctctgacatct

SEQ ID NO: 173200 - DNA, 54 bp, Artificial
  Synthetic oligonucleotide
atgacgagttcatggcgctgaagtaaggctcctggcggagcggtctaagggtct

SEQ ID NO: 173201 - DNA, 54 bp, Artificial
  Synthetic oligonucleotide
cggcggagcgcactaccctgagggggatgagcactccgccgctgttgcgtcccg

SEQ ID NO: 173202 - DNA, 54 bp, Artificial
  Synthetic oligonucleotide
cgttcggcggtaagacaaatgcagttacgctacgtcgtgccatcagctacgcgt

SEQ ID NO: 173203 - DNA, 54 bp, Artificial
  Synthetic oligonucleotide
gactccagtcggcgctctcagtaggtgacaacttcggttcgacgttgtcccaga

SEQ ID NO: 173204 - DNA, 54 bp, Artificial
  Synthetic oligonucleotide
agcgacccctctacatcaattaaacactcctcgaaactcctacgtcattgaggc

SEQ ID NO: 173205 - DNA, 57 bp, Artificial
  Synthetic oligonucleotide
gtggggtaagcgctgtggcttagctgtccggtcgccgacttgtgcggtccccacgaa

SEQ ID NO: 173206 - DNA, 54 bp, Artificial
  Synthetic oligonucleotide
ttggctcgctagcctgacagcctctatgtaggtttttacatagaaacctacatc

SEQ ID NO: 173207 - DNA, 54 bp, Artificial
  Synthetic oligonucleotide
gcctgctcgctccttgatggtcgatacgtggacttggatgggacaaccggttta

SEQ ID NO: 173208 - DNA, 54 bp, Artificial
  Synthetic oligonucleotide
taccacggcaggtcacggtccattccattgcggtaggcatacttgcggaagtta

SEQ ID NO: 173209 - DNA, 54 bp, Artificial
  Synthetic oligonucleotide
ccgggaaacctggcttaccgcacagggcacgtactccggccaggacgtatacca

SEQ ID NO: 173210 - DNA, 54 bp, Artificial
  Synthetic oligonucleotide
tagttgatttttgaccgctaagagcggtggctttcgcctatgcccatgttacgc

SEQ ID NO: 173211 - DNA, 54 bp, Artificial
  Synthetic oligonucleotide
tacgggccatagcgtccccgacgctctgcccaggtccgaaactcacgctcccgc

SEQ ID NO: 173212 - DNA, 54 bp, Artificial
  Synthetic oligonucleotide
atggggacatacaggctccttgaagaggggagtttgaggtctcgcctaatcgtc

SEQ ID NO: 173213 - DNA, 54 bp, Artificial
  Synthetic oligonucleotide
ggttgaatcctacgcaaataggacttacagccgtcttacagaatgagggcactt

SEQ ID NO: 173214 - DNA, 54 bp, Artificial
  Synthetic oligonucleotide
aaatccgcgcgaaggcttgtgtcctgatcaccggaccgccatacttcatgcgga

SEQ ID NO: 173215 - DNA, 54 bp, Artificial
  Synthetic oligonucleotide
cccggtgcaacccataccgggcagttttcaaccgcagtagcataccgcgtgagg

SEQ ID NO: 173216 - DNA, 60 bp, Artificial
  Synthetic oligonucleotide
aggggaccgcacgcagcgtttgcaccatgagtcagggtagatgaagcgcaactgacgaag

SEQ ID NO: 173217 - DNA, 54 bp, Artificial
  Synthetic oligonucleotide
agttctctacctgagcgatagaccgcgagtgctcgtacagtcgcttgtacaggc

SEQ ID NO: 173218 - DNA, 54 bp, Artificial
  Synthetic oligonucleotide
tgggtagagggtcaaacagcgcaaggcaactcttttatcagacgcaccaaatca

SEQ ID NO: 173219 - DNA, 54 bp, Artificial
  Synthetic oligonucleotide
acgtacccttgacctctcctttcagcagagtagccaatggtgattaatccggct

SEQ ID NO: 173220 - DNA, 54 bp, Artificial
  Synthetic oligonucleotide
cgcatgtcttctggcccattcgtttcagataattaggtatgtcgaactccacgt

SEQ ID NO: 173221 - DNA, 54 bp, Artificial
  Synthetic oligonucleotide
aggggcgaggcatctgcatgatttgtgcttgcgggaaagtggtcttccaacatt

SEQ ID NO: 173222 - DNA, 54 bp, Artificial
  Synthetic oligonucleotide
tgaacaagtgatggtctccgctggccccacgatcaagcgtgacctgcaacacag

SEQ ID NO: 173223 - DNA, 54 bp, Artificial
  Synthetic oligonucleotide
gttgagtccgcgtccccgcacggcacccaggacacgcggcaaacccagcaacaa

SEQ ID NO: 173224 - DNA, 54 bp, Artificial
  Synthetic oligonucleotide
ttgacttctccccgacgccagatcctgtcacgtgcaagcggtgcgccttcaagg

SEQ ID NO: 173225 - DNA, 54 bp, Artificial
  Synthetic oligonucleotide
tttcccggatcacctcgtagggactggcaaagctgcatagccgaacactgctct

SEQ ID NO: 173226 - DNA, 53 bp, Artificial
  Synthetic oligonucleotide
ctggcgttggcccgtgaacggggccagattaccaccacccggttcttcctgac

SEQ ID NO: 173227 - DNA, 59 bp, Artificial
  Synthetic oligonucleotide
gtgctcacggggaagagggtgaatatcgggctgctggcctataagggcgtgtatgaccg

SEQ ID NO: 173228 - DNA, 54 bp, Artificial
  Synthetic oligonucleotide
tcacggcgggcagtgtagaggctcagaccgacgcagctctggtcagacggcaca

SEQ ID NO: 173229 - DNA, 54 bp, Artificial
  Synthetic oligonucleotide
aataggaaatggtcctccgggctctctgcggtctgtgaggggacgaaaggaacc

SEQ ID NO: 173230 - DNA, 53 bp, Artificial
  Synthetic oligonucleotide
tcctgccgtcctggcgcgtgcttttattgacgcaagcacgcttccggtttaaa

SEQ ID NO: 173231 - DNA, 53 bp, Artificial
  Synthetic oligonucleotide
tccgatgggcaactgaagctttccacctatccacgtccacgatgttgatagaa

SEQ ID NO: 173232 - DNA, 53 bp, Artificial
  Synthetic oligonucleotide
tccacctcacgccagggagcggacagaactgttaagctgcccggctgtatgac

SEQ ID NO: 173233 - DNA, 53 bp, Artificial
  Synthetic oligonucleotide
ctgatcacctccggtgatcgtttctcgccctccacccgagggaacttcgccat

SEQ ID NO: 173234 - DNA, 53 bp, Artificial
  Synthetic oligonucleotide
tcacttatcttgaccttctgccaggattcgactgtccatgctggatagtgctg

SEQ ID NO: 173235 - DNA, 53 bp, Artificial
  Synthetic oligonucleotide
gaacgggccctgagctgctctccagttacggcactcaggctgatgctctgtta

SEQ ID NO: 173236 - DNA, 53 bp, Artificial
  Synthetic oligonucleotide
acggcggtcgcttgccagggactaacacacaccttacaagatcagacgatcaa

SEQ ID NO: 173237 - DNA, 53 bp, Artificial
  Synthetic oligonucleotide
ctttgagttcaacgatcgaacgcgcacagaaattccccaacgcattccgcttc

SEQ ID NO: 173238 - DNA, 60 bp, Artificial
  Synthetic oligonucleotide
gtcggtgtccctggacagcttgtgcagtcgcccctgtgacactccatgtgactgtgacgc

SEQ ID NO: 173239 - DNA, 53 bp, Artificial
  Synthetic oligonucleotide
tttgttggaatcccgcacagcgtcaaacagtgtctcaaatagcgaacgttcag

SEQ ID NO: 173240 - DNA, 53 bp, Artificial
  Synthetic oligonucleotide
actgcacggactattgattaggtggcgccattgcttagtgcagttccctttgt

SEQ ID NO: 173241 - DNA, 53 bp, Artificial
  Synthetic oligonucleotide
ctgtccaacccgtgcccgccacaacggagaacaccgatgactaaccccccgac

SEQ ID NO: 173242 - DNA, 53 bp, Artificial
  Synthetic oligonucleotide
ccctggggcgaactgtgcggtgaatgccagcgacaaacacgccgtcagtgttc

SEQ ID NO: 173243 - DNA, 53 bp, Artificial
  Synthetic oligonucleotide
tgtgcgtcccctgcatcagcgtcgagggggcgcaaagcacgggtgtggtcaat

SEQ ID NO: 173244 - DNA, 53 bp, Artificial
  Synthetic oligonucleotide
gggcacgcatgatgctggtgggtcaactgctgaaacgcctacccgcacgcagg

SEQ ID NO: 173245 - DNA, 53 bp, Artificial
  Synthetic oligonucleotide
atcgagctgtactcgatttcggcctgacgaaccacactgtccgcaccgacact

SEQ ID NO: 173246 - DNA, 53 bp, Artificial
  Synthetic oligonucleotide
ccgggcgtgtcaggaggccggtgtagtcccggtggttctggacgtttcaggtg

SEQ ID NO: 173247 - DNA, 53 bp, Artificial
  Synthetic oligonucleotide
gcgctgactgagcgttcctccctaggctgggatttcctgatgttctgcgggat

SEQ ID NO: 173248 - DNA, 53 bp, Artificial
  Synthetic oligonucleotide
gggagaatttacgctgttggatctgagtaatgagcaactcgagcctcatggcg

SEQ ID NO: 173249 - DNA, 58 bp, Artificial
  Synthetic oligonucleotide
gtccagtgttgtgcggggtcccagtgtcgtgcgggtctcagtgtcgttcccgcaattg

SEQ ID NO: 173250 - DNA, 53 bp, Artificial
  Synthetic oligonucleotide
ataaacgccaaacccgtcagttccggtcgtgaatgcgtgtgcgctcagacgct

SEQ ID NO: 173251 - DNA, 52 bp, Artificial
  Synthetic oligonucleotide
ttatgccgtgccggacaaggtttttcctacggaacacctcagagggccgttt

SEQ ID NO: 173252 - DNA, 53 bp, Artificial
  Synthetic oligonucleotide
gcgtctgggaccagacacgtgaagctccacaccgcacctgtgcacccctcacc

SEQ ID NO: 173253 - DNA, 53 bp, Artificial
  Synthetic oligonucleotide
cgacatggctaaatatcgtctccaccatagtttaggacgtcgacacgtcattc

SEQ ID NO: 173254 - DNA, 53 bp, Artificial
  Synthetic oligonucleotide
ttcaagaccttatcctccgatacccgcgattatacgcgcggggtcagaataca

SEQ ID NO: 173255 - DNA, 53 bp, Artificial
  Synthetic oligonucleotide
tgatctcaatcacactcaggaacggttcttcctgcatgtggactgcttcgatg

SEQ ID NO: 173256 - DNA, 53 bp, Artificial
  Synthetic oligonucleotide
ttgaccactccgaggtaggagacctctccggcctacgattcgcgagaatcgga

SEQ ID NO: 173257 - DNA, 53 bp, Artificial
  Synthetic oligonucleotide
cgcctctccccggtcttcctaccaccctacgcaccagaactgaatcccatcga

SEQ ID NO: 173258 - DNA, 53 bp, Artificial
  Synthetic oligonucleotide
gttctagagcagcccttggaatggggcaggcttactggagaagtcccggtcag

SEQ ID NO: 173259 - DNA, 53 bp, Artificial
  Synthetic oligonucleotide
gctcaagtttctgtgagcttcgtgatagtgaatttgccgtactgtacgcgctc

SEQ ID NO: 173260 - DNA, 60 bp, Artificial
  Synthetic oligonucleotide
gtcaatcgatcactgtgtcgctgaggggtgagaagtccctctccacaggtcacgcgaagt

SEQ ID NO: 173261 - DNA, 53 bp, Artificial
  Synthetic oligonucleotide
tctgtccggttgtgtccaccgggaatgggatggtgtccggaaatgggcgattg

SEQ ID NO: 173262 - DNA, 53 bp, Artificial
  Synthetic oligonucleotide
cagccgtctgagcacccttgacctctcttcggaggcagagccgaacctcaatg

SEQ ID NO: 173263 - DNA, 53 bp, Artificial
  Synthetic oligonucleotide
cgggtccatgtaggcgatggacgcgataaccgctggcccgataaatggcagaa

SEQ ID NO: 173264 - DNA, 53 bp, Artificial
  Synthetic oligonucleotide
aaccagcgtaaggggccttcggggtctagaagcgccccgcgccatgtttcgcg

SEQ ID NO: 173265 - DNA, 53 bp, Artificial
  Synthetic oligonucleotide
tggtccaaggtgacaatcgaacaggaaccgcccagtcagccttgccgcacccc

SEQ ID NO: 173266 - DNA, 52 bp, Artificial
  Synthetic oligonucleotide
tccgagcgtgtcttcccgagcagggagggtgatcacgttttatcgcgcgacc

SEQ ID NO: 173267 - DNA, 52 bp, Artificial
  Synthetic oligonucleotide
tccggatggctctcagggcgcttgaccctacccaactccagcgaggaagcgc

SEQ ID NO: 173268 - DNA, 52 bp, Artificial
  Synthetic oligonucleotide
gcgagtacaaaataccgagcagaacggacttgcaaagctgcgaagcagagaa

SEQ ID NO: 173269 - DNA, 52 bp, Artificial
  Synthetic oligonucleotide
tgggtttgcgcatagctctcacctccaccataccccgacgtttggaacccgt

SEQ ID NO: 173270 - DNA, 52 bp, Artificial
  Synthetic oligonucleotide
gcccagggctccgagaaatagagtccgcatgggatcgggctcaccaggacgg

SEQ ID NO: 173271 - DNA, 60 bp, Artificial
  Synthetic oligonucleotide
gactggacaacgcgcccaagttcgtttctcgcaccctgagctatcagtaccagcgcgatt

SEQ ID NO: 173272 - DNA, 51 bp, Artificial
  Synthetic oligonucleotide
gggtaggagtggccgaaccgggaaggggaggtcccactcggcgccttgcgt

SEQ ID NO: 173273 - DNA, 52 bp, Artificial
  Synthetic oligonucleotide
gccacaaagagcaaacccggggatagggtgagacttctccttgtcgtgctca

SEQ ID NO: 173274 - DNA, 52 bp, Artificial
  Synthetic oligonucleotide
gaacagtcagcggtcgcgtctgctcagtacgttccgtgggggaagcgtttga

SEQ ID NO: 173275 - DNA, 52 bp, Artificial
  Synthetic oligonucleotide
ttcaacctgacgctgactcatcacgatcaggctgtacgggaggtttcgttcg

SEQ ID NO: 173276 - DNA, 52 bp, Artificial
  Synthetic oligonucleotide
gagggcagaacaaaagtctctgcgcccgtcacactccctccgctggtgctaa

SEQ ID NO: 173277 - DNA, 52 bp, Artificial
  Synthetic oligonucleotide
gtttgaccggaacgcccgcggtttccctcagcgccaacgggacgtgacagcc

SEQ ID NO: 173278 - DNA, 52 bp, Artificial
  Synthetic oligonucleotide
tagggctgaccgtcgtccctgactgacaactgggtggccgcagcttccgtga

SEQ ID NO: 173279 - DNA, 52 bp, Artificial
  Synthetic oligonucleotide
gaccatcatgcgttgcccgagaagccactgcgttcacgcgtggggtaggtca

SEQ ID NO: 173280 - DNA, 52 bp, Artificial
  Synthetic oligonucleotide
acccgtagtgacctgtacagtttcgctgtcctaatggtcgctgtgcttacgt

SEQ ID NO: 173281 - DNA, 52 bp, Artificial
  Synthetic oligonucleotide
cgggagggggaacctcgtctcagacacacccaagtgccgatgagtatgcaga

SEQ ID NO: 173282 - DNA, 60 bp, Artificial
  Synthetic oligonucleotide
cggggacgtggctaactcacgtgatggtgcgagaaaacgtacatctgttgcgtcagctta

SEQ ID NO: 173283 - DNA, 52 bp, Artificial
  Synthetic oligonucleotide
cgggagagggatttagaggcctgatgggataacgcgagtacgaacatccgcc

SEQ ID NO: 173284 - DNA, 52 bp, Artificial
  Synthetic oligonucleotide
acgcccggaaggagttcacctgtacttcggtcagattggggagcgggatgac

SEQ ID NO: 173285 - DNA, 52 bp, Artificial
  Synthetic oligonucleotide
agattccagcctgcccctctcctacgctgcgtccgattccctaaaacccgga

SEQ ID NO: 173286 - DNA, 52 bp, Artificial
  Synthetic oligonucleotide
agccatacaattttcggcgaggaccctatggaccctacggcttcccccgtct

SEQ ID NO: 173287 - DNA, 52 bp, Artificial
  Synthetic oligonucleotide
cgcgggttcagtggggttcaaactcagctgagaaccacggttttgagatacg

SEQ ID NO: 173288 - DNA, 52 bp, Artificial
  Synthetic oligonucleotide
atccctcgcctgaacggcactctgaggctttatgaccactctattcgaccat

SEQ ID NO: 173289 - DNA, 52 bp, Artificial
  Synthetic oligonucleotide
attcagttcgcgtcggcatggagcgacattcactcggagggcaacacgaaaa

SEQ ID NO: 173290 - DNA, 52 bp, Artificial
  Synthetic oligonucleotide
caaggggggtcagttttgacctgacccagcgaacgcgcgcagacgatactgg

SEQ ID NO: 173291 - DNA, 52 bp, Artificial
  Synthetic oligonucleotide
cacctgacggcgtcatggccctggaatggtggggtgttactcctgacgcggg

SEQ ID NO: 173292 - DNA, 52 bp, Artificial
  Synthetic oligonucleotide
ccccatccgctccgaccactgttcaggaggttcccgcgtgacgcattccgct

SEQ ID NO: 173293 - DNA, 60 bp, Artificial
  Synthetic oligonucleotide
gacgcggacacctgtcggactcgtcgtctttgcgtaaggccctggatcggctcatcactg

SEQ ID NO: 173294 - DNA, 52 bp, Artificial
  Synthetic oligonucleotide
ccctggtgacgtcagatgacgaggtgattcttgaaatcacgctccgagatgc

SEQ ID NO: 173295 - DNA, 52 bp, Artificial
  Synthetic oligonucleotide
ctgtaaccatcacgcgcggggccaataacgtggggccttaccagtatccaga

SEQ ID NO: 173296 - DNA, 52 bp, Artificial
  Synthetic oligonucleotide
ctggttgggttttgcggcgtcatacctgccacttgtatcggtcaggatcctc

SEQ ID NO: 173297 - DNA, 52 bp, Artificial
  Synthetic oligonucleotide
ctatccgccaggaaacctataccttgccgcagcggtttatcgagaaccccga

SEQ ID NO: 173298 - DNA, 52 bp, Artificial
  Synthetic oligonucleotide
ctgctttcaaggtgtgagccgtcaatctgtcggaagtgccttccgcgggtgg

SEQ ID NO: 173299 - DNA, 52 bp, Artificial
  Synthetic oligonucleotide
aaaaggtccacatagggtcagggtacgggatacaccgccaagcatgtgcaat

SEQ ID NO: 173300 - DNA, 52 bp, Artificial
  Synthetic oligonucleotide
aagacaggacgggctgcagtaccacctcaaaaggagtgttcccggctggcac

SEQ ID NO: 173301 - DNA, 52 bp, Artificial
  Synthetic oligonucleotide
cgttactcacaacgcggaccccgatggttcggctcacggtgtcgtggaagac

SEQ ID NO: 173302 - DNA, 52 bp, Artificial
  Synthetic oligonucleotide
ctgcgcccgtcacactccctccgctggtgctaaccagttcaggttcataggg

SEQ ID NO: 173303 - DNA, 51 bp, Artificial
  Synthetic oligonucleotide
aaccgcgactcagacgaggttacgacctattgagctgggatcgcatgaacg

SEQ ID NO: 173304 - DNA, 60 bp, Artificial
  Synthetic oligonucleotide
atcagtgcgcatggaaggaggccgcaacaacacgtggtcagcccggtccgcctcagacag

SEQ ID NO: 173305 - DNA, 60 bp, Artificial
  Synthetic oligonucleotide
cgggtatcagccaagcggcctgatacccggaggtttcctatgaagaaagcgctgctcgca

SEQ ID NO: 173306 - DNA, 51 bp, Artificial
  Synthetic oligonucleotide
aaatgaactgctccaggtttaaatctcggtccaaaatcatagttgagctcc

SEQ ID NO: 173307 - DNA, 51 bp, Artificial
  Synthetic oligonucleotide
tttgcaccgactccaaaatttagagtgtctcctcagaaagtggacgcacaa

SEQ ID NO: 173308 - DNA, 51 bp, Artificial
  Synthetic oligonucleotide
aaagggtcagcctcgctcttacggaccagcgtcgtatgggcttcacgaggc

SEQ ID NO: 173309 - DNA, 51 bp, Artificial
  Synthetic oligonucleotide
cagagctccacgtaagcacgctgtaagccgaaattcgccatagtagaggca

SEQ ID NO: 173310 - DNA, 51 bp, Artificial
  Synthetic oligonucleotide
cagcgggtcaaccgaatgggcggcagctccgaggatgtgtgcgcggcgcgt

SEQ ID NO: 173311 - DNA, 51 bp, Artificial
  Synthetic oligonucleotide
ttttcgtaagttccatgcctgggctttgggctgcactttgatatgacgggg

SEQ ID NO: 173312 - DNA, 51 bp, Artificial
  Synthetic oligonucleotide
catatgtgctcgcagacgttgcagcgctgcgaagtgtactgcccgacatcg

SEQ ID NO: 173313 - DNA, 51 bp, Artificial
  Synthetic oligonucleotide
aaaagctgacctacccatcacaatcgcgtgacaggcaggtcttgactgagg

SEQ ID NO: 173314 - DNA, 51 bp, Artificial
  Synthetic oligonucleotide
ccgaatgatccctttagcgcagcgaccgagtgggacagttttccagttgac

SEQ ID NO: 173315 - DNA, 51 bp, Artificial
  Synthetic oligonucleotide
gccccgtcacgtcatacgtctggtacatcaggtactgcgggtaggacgtgt

SEQ ID NO: 173316 - DNA, 51 bp, Artificial
  Synthetic oligonucleotide
cgggttgtccgttccggtaggcttggacagtcaggttgtaggtggtcgggg

SEQ ID NO: 173317 - DNA, 51 bp, Artificial
  Synthetic oligonucleotide
tgagccttttcccctaacgtcccgatcccaacgtcccaaggaggaccaatg

SEQ ID NO: 173318 - DNA, 51 bp, Artificial
  Synthetic oligonucleotide
accctttgagaccctctctgccgcacttgaacgcgagttggggtctatgcc

SEQ ID NO: 173319 - DNA, 51 bp, Artificial
  Synthetic oligonucleotide
accgacattttgtttacccaccgggggtattcttctccggttgtgacacag

SEQ ID NO: 173320 - DNA, 51 bp, Artificial
  Synthetic oligonucleotide
tctttacgccgttcgccctactgtgcagttctccctggcacgcgctcgggt

SEQ ID NO: 173321 - DNA, 51 bp, Artificial
  Synthetic oligonucleotide
tgcgtagggtttggtcccccagacgcaacgtgaaggtttgtcggtcggctg

SEQ ID NO: 173322 - DNA, 51 bp, Artificial
  Synthetic oligonucleotide
acgccataccttaatcataaccgcagcataaagcagtcgtctctcccttct

SEQ ID NO: 173323 - DNA, 51 bp, Artificial
  Synthetic oligonucleotide
ttacacgcagttcacggacacgtaccaggaacgcaacgggctgctgttcat

SEQ ID NO: 173324 - DNA, 51 bp, Artificial
  Synthetic oligonucleotide
agcacccgccctcgatttgctgccccagtgcgtgcgttagactccgggcta

SEQ ID NO: 173325 - DNA, 51 bp, Artificial
  Synthetic oligonucleotide
agcgccccaatgtcagcatgacagactttgcgaacacgctctagtacaccc

SEQ ID NO: 173326 - DNA, 51 bp, Artificial
  Synthetic oligonucleotide
aactccttcggaggtctaaaggtcgaaatgtctaagggtctcacgggtcag

SEQ ID NO: 173327 - DNA, 60 bp, Artificial
  Synthetic oligonucleotide
gacccgactcatgaggtgctttaggttgagaggtctcttccacatcatgccctactctca

SEQ ID NO: 173328 - DNA, 51 bp, Artificial
  Synthetic oligonucleotide
ggttccgtctgcacagaaggagctccctatgcgtcccctgaaacccctgat

SEQ ID NO: 173329 - DNA, 51 bp, Artificial
  Synthetic oligonucleotide
ggtcgcctaggccgtccggatacccagcgtagcgaatcagctggtcgttga

SEQ ID NO: 173330 - DNA, 51 bp, Artificial
  Synthetic oligonucleotide
ggtcgaaccgtctaaggaaggctcaagactggggctcaaggctgaagaggt

SEQ ID NO: 173331 - DNA, 51 bp, Artificial
  Synthetic oligonucleotide
ggtcaaacggaacgagcacgtagtggactgtgcaataaggacggtgagttt

SEQ ID NO: 173332 - DNA, 51 bp, Artificial
  Synthetic oligonucleotide
ttggtcccccagacgcaacgtgaaggtttgtcggtcggctgaactgagcaa

SEQ ID NO: 173333 - DNA, 51 bp, Artificial
  Synthetic oligonucleotide
gggtcggctccgggtgtctttcatcgcagaaaacaccgtacaggagccgac

SEQ ID NO: 173334 - DNA, 51 bp, Artificial
  Synthetic oligonucleotide
cgtatttctcttgcggagcgacttttaccttacgtagcttgccagccattt

SEQ ID NO: 173335 - DNA, 51 bp, Artificial
  Synthetic oligonucleotide
ctacggtatccctgtaaccatcacgcgcggggccaataacgtggggcctta

SEQ ID NO: 173336 - DNA, 51 bp, Artificial
  Synthetic oligonucleotide
cgattgcctacgtgcgtacgctgagcagtgcggtctgaagactgttcccag

SEQ ID NO: 173337 - DNA, 51 bp, Artificial
  Synthetic oligonucleotide
ctcaaagtgcacagcagtttagtggcgcggcttaccgggcgagtttgcgtc

SEQ ID NO: 173338 - DNA, 58 bp, Artificial
  Synthetic oligonucleotide
cggtttagacgcgagttcacggctgcagctcagaacagtctcccgtctgtgggggagg

SEQ ID NO: 173339 - DNA, 51 bp, Artificial
  Synthetic oligonucleotide
ccgtacgtgtcagttaggcaaacgccagtctcgtgcatgagtgagaaaaga

SEQ ID NO: 173340 - DNA, 51 bp, Artificial
  Synthetic oligonucleotide
cgcatgacgttcggtgggagtagttcctcggctttcacgcgcgagtacagg

SEQ ID NO: 173341 - DNA, 51 bp, Artificial
  Synthetic oligonucleotide
gacctgactgctggatgcccgctctagcggggtggggagctacagaaacgt

SEQ ID NO: 173342 - DNA, 51 bp, Artificial
  Synthetic oligonucleotide
ctgacggggtctcgcaccctacctgggtcattctcgacgtgacggggccct

SEQ ID NO: 173343 - DNA, 50 bp, Artificial
  Synthetic oligonucleotide
cggctgcccctctgcgccgacatctcacggcaagccggtgaggacccaat

SEQ ID NO: 173344 - DNA, 50 bp, Artificial
  Synthetic oligonucleotide
acgcaagacacggtacggggtctgatgcgggcgttactccggcttgacag

SEQ ID NO: 173345 - DNA, 50 bp, Artificial
  Synthetic oligonucleotide
acgaaacccgctgccgccacaagaaaccctcaggcgggtcgtgaggaggt

SEQ ID NO: 173346 - DNA, 50 bp, Artificial
  Synthetic oligonucleotide
acgcgaccttacaggagcacgccgacatgttggaagccagtaccggggta

SEQ ID NO: 173347 - DNA, 50 bp, Artificial
  Synthetic oligonucleotide
accttccccctgtaacccctgtagaagcggtgaactgggcggacatcccc

SEQ ID NO: 173348 - DNA, 50 bp, Artificial
  Synthetic oligonucleotide
acctggcttgaaagggcgtatccgagcagacaggaagcgggccggggtac

SEQ ID NO: 173349 - DNA, 57 bp, Artificial
  Synthetic oligonucleotide
gaagtcttcgcttttaatgcgactgacgggcgaaagctctggtccacggtacttaca

SEQ ID NO: 173350 - DNA, 50 bp, Artificial
  Synthetic oligonucleotide
acctgattcgtgcgtgtttacgagacgcggggatcgctccggggagagtg

SEQ ID NO: 173351 - DNA, 50 bp, Artificial
  Synthetic oligonucleotide
tcggaacattgtccccaaggctccgcacgtcggattactccttcgcacgc

SEQ ID NO: 173352 - DNA, 50 bp, Artificial
  Synthetic oligonucleotide
acctcgtcgtaccaccgttcggctttcaggacgttccagcgttccgggat

SEQ ID NO: 173353 - DNA, 50 bp, Artificial
  Synthetic oligonucleotide
acctcgacgctcagtcacccaccctctgggtcggaaccgcgatatagcgc

SEQ ID NO: 173354 - DNA, 50 bp, Artificial
  Synthetic oligonucleotide
accggggccgcagaaggtgctccacagcaagcgacgtttaagaaggccgc

SEQ ID NO: 173355 - DNA, 50 bp, Artificial
  Synthetic oligonucleotide
gacgactggccaaagatatgccctgaggagttttcagacacactttagcg

SEQ ID NO: 173356 - DNA, 50 bp, Artificial
  Synthetic oligonucleotide
gaccttgcctgcggtccgttgggacgacagccgccgttcttcttgtgggc

SEQ ID NO: 173357 - DNA, 50 bp, Artificial
  Synthetic oligonucleotide
agcctaaactgctgaggtcacctaccccgcccggcgtggaccctacgatg

SEQ ID NO: 173358 - DNA, 50 bp, Artificial
  Synthetic oligonucleotide
gagcgaattgcagatgctggggtaggaggtctaagggtcgaaaagtctaa

SEQ ID NO: 173359 - DNA, 50 bp, Artificial
  Synthetic oligonucleotide
agcacggtggcaacagtgaatccagagcacgcatgatgttggtcggtcaa

SEQ ID NO: 173360 - DNA, 60 bp, Artificial
  Synthetic oligonucleotide
gaacgtatcactccgttgcggattggagaggtacttcatctgctcactaagggtggtgta

SEQ ID NO: 173361 - DNA, 50 bp, Artificial
  Synthetic oligonucleotide
gagcctgtgtaccgtccagcaatgggagcgcgggcagtaggaacgcggcc

SEQ ID NO: 173362 - DNA, 50 bp, Artificial
  Synthetic oligonucleotide
tacctgcgagagcatctgccgcccgccgcaaaactgcactacgctgtcac

SEQ ID NO: 173363 - DNA, 50 bp, Artificial
  Synthetic oligonucleotide
tacctgtgctgccacgctggcagtaatgtctgtcaccacaaactcccgct

SEQ ID NO: 173364 - DNA, 50 bp, Artificial
  Synthetic oligonucleotide
cggcgcaagttgtccgatacctcccctcctaaacggcgcaagttgtccga

SEQ ID NO: 173365 - DNA, 50 bp, Artificial
  Synthetic oligonucleotide
agagggagaaatggcgcctgaaacatatgacgaacagttaactcgagaac

SEQ ID NO: 173366 - DNA, 50 bp, Artificial
  Synthetic oligonucleotide
agagacgtcccggcttaccatgtggcttctggggttccggcagtgagccg

SEQ ID NO: 173367 - DNA, 50 bp, Artificial
  Synthetic oligonucleotide
agactgaggccggctgaggacgcaagacaccaagctcgggtcgcccgtct

SEQ ID NO: 173368 - DNA, 50 bp, Artificial
  Synthetic oligonucleotide
tagagagaagctcaggaagtcgaaagggtataagggcaagattggggagt

SEQ ID NO: 173369 - DNA, 50 bp, Artificial
  Synthetic oligonucleotide
agactgaactcgaagctgacgcctgaggtgaagcccacccggtgtcctga

SEQ ID NO: 173370 - DNA, 50 bp, Artificial
  Synthetic oligonucleotide
tagcgtgcgcatagacggggaattgtcccctggaccggactcaagcgagt

SEQ ID NO: 173371 - DNA, 55 bp, Artificial
  Synthetic oligonucleotide
ctaccgctcccgcctgaaaaggtgccgggcgacttctcggaattgcaccccagcc

SEQ ID NO: 173372 - DNA, 50 bp, Artificial
  Synthetic oligonucleotide
agacgtcgctatccagttcatctgatcaggcggcgcccgaatgcccccag

SEQ ID NO: 173373 - DNA, 50 bp, Artificial
  Synthetic oligonucleotide
agacctcagggcccgccgctggagtacactgggcgcacatgcttaccgga

SEQ ID NO: 173374 - DNA, 50 bp, Artificial
  Synthetic oligonucleotide
agacacggagcacccgcctaccgaattcccccggagcatgtggggttacg

SEQ ID NO: 173375 - DNA, 50 bp, Artificial
  Synthetic oligonucleotide
agaaacaccattccggcactcagaaccgggctggctgtgacgcggccttc

SEQ ID NO: 173376 - DNA, 50 bp, Artificial
  Synthetic oligonucleotide
actgtgggcctgcccacccgctttaacccgctcgtcacgtatcccattgg

SEQ ID NO: 173377 - DNA, 50 bp, Artificial
  Synthetic oligonucleotide
actctgaccaaccggggccgcagaaggtgctccacagcaagcgacgttta

SEQ ID NO: 173378 - DNA, 50 bp, Artificial
  Synthetic oligonucleotide
acggtgtgcgcggcatacggaggcaggccggagccctctgttgatggcac

SEQ ID NO: 173379 - DNA, 50 bp, Artificial
  Synthetic oligonucleotide
acgggcgcgggcaacccagagtgccgtgtctcagcttgcaaggtacgtcc

SEQ ID NO: 173380 - DNA, 50 bp, Artificial
  Synthetic oligonucleotide
acggctgcgagtctgggatgccgctttgctacgtccttccgggctgtggt

SEQ ID NO: 173381 - DNA, 50 bp, Artificial
  Synthetic oligonucleotide
acggcacgggcacatcagagaaagccctgacggccttcccctattccctg

SEQ ID NO: 173382 - DNA, 60 bp, Artificial
  Synthetic oligonucleotide
ctatgcagcacgggttccctgatgaaacttggacgacaaaacgcgtggcagagctgattg

SEQ ID NO: 173383 - DNA, 50 bp, Artificial
  Synthetic oligonucleotide
acgctcccagatacacccgttatagggtggccggtcacgtgcgctgtgac

SEQ ID NO: 173384 - DNA, 50 bp, Artificial
  Synthetic oligonucleotide
tccagaaggactgtcagctcacccagagtcgcggcctccctggcacggtt

SEQ ID NO: 173385 - DNA, 50 bp, Artificial
  Synthetic oligonucleotide
aagtgggtgtctcatacagcctcctagcatgccacgctcgcagggtgcgc

SEQ ID NO: 173386 - DNA, 50 bp, Artificial
  Synthetic oligonucleotide
cgtcgtcccagactttaactgccaagatggcggaactaaaagacgacccc

SEQ ID NO: 173387 - DNA, 50 bp, Artificial
  Synthetic oligonucleotide
aagtggagtgagagacacacagggcccccgcacggctggagggcagtaga

SEQ ID NO: 173388 - DNA, 50 bp, Artificial
  Synthetic oligonucleotide
aaggtggggcgcagtacggattactggtttcacgcgcaggggtacgcggg

SEQ ID NO: 173389 - DNA, 50 bp, Artificial
  Synthetic oligonucleotide
ttccgcgaggagcctacgactggtcatccggtaaccgaagtcttctttga

SEQ ID NO: 173390 - DNA, 50 bp, Artificial
  Synthetic oligonucleotide
aagctcggacgcacatctccgtgtccccaccgccgatgtattccgttgat

SEQ ID NO: 173391 - DNA, 50 bp, Artificial
  Synthetic oligonucleotide
aacgagtaccactgaagacctgctgcgaaacaaggggccgtgccgaccag

SEQ ID NO: 173392 - DNA, 50 bp, Artificial
  Synthetic oligonucleotide
aacgagccagcaagccttggttactcccggcaccagttccgctgtgcttt

SEQ ID NO: 173393 - DNA, 51 bp, Artificial
  Synthetic oligonucleotide
gaaccacctaaaggttatttatccaactcacaagatgcgggggggaaacct

SEQ ID NO: 173394 - DNA, 50 bp, Artificial
  Synthetic oligonucleotide
aacctctcccccgttcgcaccacacaaggagcgtgtctcaccccatgcca

SEQ ID NO: 173395 - DNA, 50 bp, Artificial
  Synthetic oligonucleotide
tttcagtggtgcccgaaactcgccaaagtccagttagactggggctaaga

SEQ ID NO: 173396 - DNA, 50 bp, Artificial
  Synthetic oligonucleotide
ctcagccccataggccgggctaagcgaccacgcctcccaacgcgtcactg

SEQ ID NO: 173397 - DNA, 50 bp, Artificial
  Synthetic oligonucleotide
aaccctgtgcggaaagaaccctgtcagagtcatgcaagggccccgtgctt

SEQ ID NO: 173398 - DNA, 50 bp, Artificial
  Synthetic oligonucleotide
aacacgaacgtgggcaaacgggtgacggtccctgcgcccttatgcctcta

SEQ ID NO: 173399 - DNA, 50 bp, Artificial
  Synthetic oligonucleotide
ctcagcttgcaaggtacgtccgatccatccagttggctttgccagcggga

SEQ ID NO: 173400 - DNA, 50 bp, Artificial
  Synthetic oligonucleotide
aaaggtccaccggttgtgtaccgcccgcgatgagccttttcagaccgcat

SEQ ID NO: 173401 - DNA, 50 bp, Artificial
  Synthetic oligonucleotide
gaaaggcaccgcccgcacttatgccgcctacaatcccaccgcaagtccca

SEQ ID NO: 173402 - DNA, 50 bp, Artificial
  Synthetic oligonucleotide
ctccctgccgtcggaacattgtccccaaggctccgcacgtcggattactc

SEQ ID NO: 173403 - DNA, 50 bp, Artificial
  Synthetic oligonucleotide
aaacggcgtgccttccacgaccgtcttcacgggtctccctgacaacacct

SEQ ID NO: 173404 - DNA, 60 bp, Artificial
  Synthetic oligonucleotide
ctcatcactgctggattagtggtcacgaggaggactgagaatcgggagcgcttctactgg

SEQ ID NO: 173405 - DNA, 50 bp, Artificial
  Synthetic oligonucleotide
ctgcggtccgttgggacgacagccgccgttcttcttgtgggctacaggtc

SEQ ID NO: 173406 - DNA, 50 bp, Artificial
  Synthetic oligonucleotide
ctggctgcttggtccctggtcggtcggtcaggacaactttgaacgctcgc

SEQ ID NO: 173407 - DNA, 50 bp, Artificial
  Synthetic oligonucleotide
accgggaaacgccatacggtctgtttgtgggccggcactttgaaggccac

SEQ ID NO: 173408 - DNA, 50 bp, Artificial
  Synthetic oligonucleotide
cggtactacatgcagagagcagtgcggtcaggattagggcagcggggctc

SEQ ID NO: 173409 - DNA, 50 bp, Artificial
  Synthetic oligonucleotide
tgagcctattaggacccctcaaccagattttgctccctaaatcagctcgc

SEQ ID NO: 173410 - DNA, 50 bp, Artificial
  Synthetic oligonucleotide
acccgggaagccgggaagttgcgtgtcagggcggcgggtccggagtatcg

SEQ ID NO: 173411 - DNA, 50 bp, Artificial
  Synthetic oligonucleotide
accccgtaacatctctgctcccttaccggcgggtaggcacacgcagcgta

SEQ ID NO: 173412 - DNA, 50 bp, Artificial
  Synthetic oligonucleotide
acccagtccctccgccattgtgcgtagggtagagctcatccgaacgggcg

SEQ ID NO: 173413 - DNA, 50 bp, Artificial
  Synthetic oligonucleotide
tgcctccgagagcatcatcaagccagttgatgccaagcgcagctgggtct

SEQ ID NO: 173414 - DNA, 50 bp, Artificial
  Synthetic oligonucleotide
acccacccgtccaaacatgcagtttccccctgcatgcgcctcaggtttcg

SEQ ID NO: 173415 - DNA, 60 bp, Artificial
  Synthetic oligonucleotide
atcttcagtcccgaactcctgaaaggtgagtggggcgatcagggtgtgccaactcatcag

SEQ ID NO: 173416 - DNA, 60 bp, Artificial
  Synthetic oligonucleotide
ctccacgaccaaccattcagtcacaatcgatctgccgggaacacttgacaggaacggcac

SEQ ID NO: 173417 - DNA, 50 bp, Artificial
  Synthetic oligonucleotide
accatttccgctctgcacgcgctaagcgccgttgacgctgcctctaccgg

SEQ ID NO: 173418 - DNA, 50 bp, Artificial
  Synthetic oligonucleotide
accatgggcctcgcaaggactctcatgaagtgctggcagtcgctcccata

SEQ ID NO: 173419 - DNA, 50 bp, Artificial
  Synthetic oligonucleotide
acatgcctcaaccctacgttccgcctgcgttcggctgcactcagggtcct

SEQ ID NO: 173420 - DNA, 50 bp, Artificial
  Synthetic oligonucleotide
acatcgcgttcctccgagatggggtcactgcttggcactgcgaccgttca

SEQ ID NO: 173421 - DNA, 50 bp, Artificial
  Synthetic oligonucleotide
acagtgcgccgcgcctctatggtactgaggtcacgctccgctcagttcgt

SEQ ID NO: 173422 - DNA, 50 bp, Artificial
  Synthetic oligonucleotide
acactggagttctcccccgcttggttgtccatcctcgcaggtgcctggtg

SEQ ID NO: 173423 - DNA, 50 bp, Artificial
  Synthetic oligonucleotide
acacgataccctgcttggacttgggtacgttgcagatcccagcgaacttg

SEQ ID NO: 173424 - DNA, 50 bp, Artificial
  Synthetic oligonucleotide
tggtgagttcttctcgggtacgcccgcactgtggctaccagcagcaccga

SEQ ID NO: 173425 - DNA, 50 bp, Artificial
  Synthetic oligonucleotide
acacatgacccctgaggctctgtccgcgctacatgcccgtttcggagagc

SEQ ID NO: 173426 - DNA, 50 bp, Artificial
  Synthetic oligonucleotide
aatctccgcagtaccccctggcggtcatagggaatggccctgaactccgg

SEQ ID NO: 173427 - DNA, 60 bp, Artificial
  Synthetic oligonucleotide
ctctgcgacccttcataggaatggtcacgactacaaggcaggattcattcagggcgacgt

SEQ ID NO: 173428 - DNA, 50 bp, Artificial
  Synthetic oligonucleotide
gacatcgtgctcgggggctcactgacccgcctgggtgaaccgctacttgg

SEQ ID NO: 173429 - DNA, 50 bp, Artificial
  Synthetic oligonucleotide
aatccggaccctgctttggtagacaggcgccgcaacgtagacccgctgca

SEQ ID NO: 173430 - DNA, 50 bp, Artificial
  Synthetic oligonucleotide
ccagcgtcctgccaggctcccatgtgcggcattaacgcccaacgggtctc

SEQ ID NO: 173431 - DNA, 50 bp, Artificial
  Synthetic oligonucleotide
ccagcctgcggaccgttacaaagcgcaattctgcacccgcgtggattgaa

SEQ ID NO: 173432 - DNA, 50 bp, Artificial
  Synthetic oligonucleotide
catccggcactttaccggccgcccttcccgactgattccctcctgctacg

SEQ ID NO: 173433 - DNA, 50 bp, Artificial
  Synthetic oligonucleotide
catcccccaggtgcagtcgggcgctatgaggctgctacgaacgaatggaa

SEQ ID NO: 173434 - DNA, 50 bp, Artificial
  Synthetic oligonucleotide
cgaacctcgctttgttctccggcgatgggggaaactgcgttgttgccagc

SEQ ID NO: 173435 - DNA, 50 bp, Artificial
  Synthetic oligonucleotide
ggacgtgctgcctccagtgaaccggacgtttgagggtcagggctaaccga

SEQ ID NO: 173436 - DNA, 50 bp, Artificial
  Synthetic oligonucleotide
ggagagggtagcgtgcgcatagacggggaattgtcccctggaccggactc

SEQ ID NO: 173437 - DNA, 50 bp, Artificial
  Synthetic oligonucleotide
cgacattccgcgtcactaccgtgggcaactgggcgtgaggtacaggaggg

SEQ ID NO: 173438 - DNA, 60 bp, Artificial
  Synthetic oligonucleotide
gaaaagtgtaaggctcacgcaaaagccgactgacactcagccagccgtctacagccttca

SEQ ID NO: 173439 - DNA, 50 bp, Artificial
  Synthetic oligonucleotide
cagggtgccggttggcgcctccttttcaacacagatgcccaacaggggag

SEQ ID NO: 173440 - DNA, 50 bp, Artificial
  Synthetic oligonucleotide
caggcgaaaggtaaggctgaagcaaccgcctggtgtgcgctcacggacat

SEQ ID NO: 173441 - DNA, 50 bp, Artificial
  Synthetic oligonucleotide
cgatccagtacgcccacccctggaagacctgtgcccggtcccgatcagag

SEQ ID NO: 173442 - DNA, 50 bp, Artificial
  Synthetic oligonucleotide
gcacctgggacagggggagctagtggtgcgaccggcttttcgtctgcctt

SEQ ID NO: 173443 - DNA, 50 bp, Artificial
  Synthetic oligonucleotide
cagcagggcgtgactggtatccagagcctcccgcgtgacctggagctctg

SEQ ID NO: 173444 - DNA, 50 bp, Artificial
  Synthetic oligonucleotide
cagaggggccccagcgtaaaagcgcaatccatgttcggccatcaccccat

SEQ ID NO: 173445 - DNA, 50 bp, Artificial
  Synthetic oligonucleotide
cactgcccacgctcctggggagtcctttggcctccggagagcctctaacg

SEQ ID NO: 173446 - DNA, 50 bp, Artificial
  Synthetic oligonucleotide
cacgtccatatctggccgcgctccacggtaagcgtgccctgtacacttgc

SEQ ID NO: 173447 - DNA, 50 bp, Artificial
  Synthetic oligonucleotide
cacgaccaggtctgcccgcagtccttctgaaatttgcccgcggtcagtca

SEQ ID NO: 173448 - DNA, 50 bp, Artificial
  Synthetic oligonucleotide
cgcagctctggacgagagaggcacgctgacgggtgaacggtggtgcatta

SEQ ID NO: 173449 - DNA, 60 bp, Artificial
  Synthetic oligonucleotide
ctgcctacggtcatgaggttctggtcacgcagcacccctgcctgaactgtcctctgattg

SEQ ID NO: 173450 - DNA, 50 bp, Artificial
  Synthetic oligonucleotide
gggaagcacccgttttccactgcgaccaagcagcccgtctttaacgccga

SEQ ID NO: 173451 - DNA, 50 bp, Artificial
  Synthetic oligonucleotide
ccgggaccgctgatttcaaggagaaccccacctcactcgtgcatagccga

SEQ ID NO: 173452 - DNA, 50 bp, Artificial
  Synthetic oligonucleotide
ccgctgaggcgcagttcgaaattccgtaccagcccgctcgtgttgcttga

SEQ ID NO: 173453 - DNA, 50 bp, Artificial
  Synthetic oligonucleotide
gcccggacgacggactgcttcataccacggcgtaccagattctcaagcgg

SEQ ID NO: 173454 - DNA, 50 bp, Artificial
  Synthetic oligonucleotide
gcctccagtgaaccggacgtttgagggtcagggctaaccgatcgccgttt

SEQ ID NO: 173455 - DNA, 50 bp, Artificial
  Synthetic oligonucleotide
ccgcagctcgaccgtatggataccgcgatgatgcatgtgctgcttcccga

SEQ ID NO: 173456 - DNA, 50 bp, Artificial
  Synthetic oligonucleotide
ccgtcccgtgaccgaggctgtgttgggctgatcctgcgttgaacttcccc

SEQ ID NO: 173457 - DNA, 50 bp, Artificial
  Synthetic oligonucleotide
gcattaccctcttgcgtacgcggcacacgcccggagcaagctctttgctg

SEQ ID NO: 173458 - DNA, 50 bp, Artificial
  Synthetic oligonucleotide
cctcgaggcgtgcagggcccaatgtttccaggtacgttgctctggtcagc

SEQ ID NO: 173459 - DNA, 50 bp, Artificial
  Synthetic oligonucleotide
ccctacttccgtgcttaccccggcagcgtgacactgcgtgttcagacgta

SEQ ID NO: 173460 - DNA, 55 bp, Artificial
  Synthetic oligonucleotide
cttccgggttagccgctttacccccaagagcggttcatcgtaggctcgccacaga

SEQ ID NO: 173461 - DNA, 50 bp, Artificial
  Synthetic oligonucleotide
gcgcgtttttccaggacgcttgctgggcgtcacactccggcgtatccctg

SEQ ID NO: 173462 - DNA, 50 bp, Artificial
  Synthetic oligonucleotide
cccggagtcatgacgaacacacccagcgggccctgcgtgatctgggggca

SEQ ID NO: 173463 - DNA, 50 bp, Artificial
  Synthetic oligonucleotide
cccgcacttatgccgcctacaatcccaccgcaagtcccatcaccgtgacc

SEQ ID NO: 173464 - DNA, 50 bp, Artificial
  Synthetic oligonucleotide
gcggacaatccgccactgtcacccgcccaggatgatccgtgcgtcggttg

SEQ ID NO: 173465 - DNA, 50 bp, Artificial
  Synthetic oligonucleotide
cctggctctcaagctggctgccccggacgaagtcctgatacgacgcgtat

SEQ ID NO: 173466 - DNA, 50 bp, Artificial
  Synthetic oligonucleotide
cccgaaagcccacctcgcggcttcgtttctgccgcacttctaccacgtcc

SEQ ID NO: 173467 - DNA, 50 bp, Artificial
  Synthetic oligonucleotide
cctgggcatgcactctcttgaccgcaggaccgggccaagtgctgagaaca

SEQ ID NO: 173468 - DNA, 50 bp, Artificial
  Synthetic oligonucleotide
cccactaagatgacgacctacctgttcaaacgcagcaaataacctcgttg

SEQ ID NO: 173469 - DNA, 50 bp, Artificial
  Synthetic oligonucleotide
cccaagttcggacccaaagccttcgagaccctgagcaattacgccgcggg

SEQ ID NO: 173470 - DNA, 50 bp, Artificial
  Synthetic oligonucleotide
ccatccgcagaggccaccactaacgcctttgcctgaagacgcagtgcata

SEQ ID NO: 173471 - DNA, 52 bp, Artificial
  Synthetic oligonucleotide
cccgggacgtagggagccatacaattttcggcgaggaccctatggaccctac

SEQ ID NO: 173472 - DNA, 50 bp, Artificial
  Synthetic oligonucleotide
ccagtgccggaggagatgtcaaccgtgcgtaccgcctgtttgcgagtgcg

SEQ ID NO: 173473 - DNA, 50 bp, Artificial
  Synthetic oligonucleotide
ccagtcaagcgtagggaccggagcctgggcatgcactctcttgaccgcag

SEQ ID NO: 173474 - DNA, 50 bp, Artificial
  Synthetic oligonucleotide
aggtgccttaactggcaaacaggccagtgacgttttcccggccgctctgg

SEQ ID NO: 173475 - DNA, 50 bp, Artificial
  Synthetic oligonucleotide
aggtgacctgggcacacaggagggcgttgttcggtgagtctcccgcgccg

SEQ ID NO: 173476 - DNA, 50 bp, Artificial
  Synthetic oligonucleotide
aggtcaaaggttgaggcctggtcaggggtcgagaaggacagccgctcgat

SEQ ID NO: 173477 - DNA, 50 bp, Artificial
  Synthetic oligonucleotide
aggtacaggagggtcggccacacagaggtgccgcacttgaggagggcatg

SEQ ID NO: 173478 - DNA, 50 bp, Artificial
  Synthetic oligonucleotide
gtctgctctatcgttgaggcatgcctgatcaccacggcacgctcgcgccc

SEQ ID NO: 173479 - DNA, 50 bp, Artificial
  Synthetic oligonucleotide
agggttccaggccatatgccgagcgtagcgagaccaacctcgtcttgtgc

SEQ ID NO: 173480 - DNA, 50 bp, Artificial
  Synthetic oligonucleotide
cggcccttcgtgacgtgcagggcgcatagctcctgggtacatctggagat

SEQ ID NO: 173481 - DNA, 50 bp, Artificial
  Synthetic oligonucleotide
aggggtcacgggccagcggtcagcgtttaccgtaggagcatgcctacgcg

SEQ ID NO: 173482 - DNA, 52 bp, Artificial
  Synthetic oligonucleotide
gcgaagtaggcagcggggtcttcgtaggccgaaaaatcggtttgggtcggta

SEQ ID NO: 173483 - DNA, 50 bp, Artificial
  Synthetic oligonucleotide
aggggatggtctgctggcgcccgaacgcccagaatgagaacgtgaaaagg

SEQ ID NO: 173484 - DNA, 50 bp, Artificial
  Synthetic oligonucleotide
agggcctgcacgcactgtcccaccagacttagcagaaaggcccgctcatg

SEQ ID NO: 173485 - DNA, 50 bp, Artificial
  Synthetic oligonucleotide
agggactggactacacgcctgggatcagtgccacaagcgttggctcacgg

SEQ ID NO: 173486 - DNA, 50 bp, Artificial
  Synthetic oligonucleotide
aggctatgagggcaacaggcaccctctacgcacagaagcgtgtcacgtcg

SEQ ID NO: 173487 - DNA, 50 bp, Artificial
  Synthetic oligonucleotide
aggccgcaacaacacgtggtcagcccggtccgcctcagacaggctgccta

SEQ ID NO: 173488 - DNA, 50 bp, Artificial
  Synthetic oligonucleotide
aggcccccgtagatttcgctgccctggaagatgaacccgcggcgtttgca

SEQ ID NO: 173489 - DNA, 50 bp, Artificial
  Synthetic oligonucleotide
aggaggcactacactcctcacgtcctcatgtctgaccagttggcggcccc

SEQ ID NO: 173490 - DNA, 50 bp, Artificial
  Synthetic oligonucleotide
aggagacagcggcgggcgtgtctgctggtgaagcagaatcaaggaacctg

SEQ ID NO: 173491 - DNA, 50 bp, Artificial
  Synthetic oligonucleotide
gaggcacgctgacgggtgaacggtggtgcattattcaggccccggcgatc

SEQ ID NO: 173492 - DNA, 50 bp, Artificial
  Synthetic oligonucleotide
gtttcgggacagcgctgaacaggagcgcgaaatcacgcctgaatccggca

SEQ ID NO: 173493 - DNA, 60 bp, Artificial
  Synthetic oligonucleotide
ccgctgcctgagggactaggcagcctgtctgaggcggaccgggctgaccacgtgttgttg

SEQ ID NO: 173494 - DNA, 50 bp, Artificial
  Synthetic oligonucleotide
agctccggcctacaggaccgccccgtacaacggcgttcagaaagcccttc

SEQ ID NO: 173495 - DNA, 50 bp, Artificial
  Synthetic oligonucleotide
gagcggcagaccacagaggacgaggcgtggtcatttgcgagtacgaaggg

SEQ ID NO: 173496 - DNA, 50 bp, Artificial
  Synthetic oligonucleotide
taagttctgaagacctgctgcgaaacaaggggccgtgccgaccaggcacg

SEQ ID NO: 173497 - DNA, 50 bp, Artificial
  Synthetic oligonucleotide
agcctaacaggaccttcacacccccacgcgcaccccatcaagtggtctac

SEQ ID NO: 173498 - DNA, 50 bp, Artificial
  Synthetic oligonucleotide
cacagcggggcttctcaggagggtcccacgtctctcaccctaacgcctgt

SEQ ID NO: 173499 - DNA, 50 bp, Artificial
  Synthetic oligonucleotide
cacacaccatggactcgcctctaaggggccatttgcgcgggcttcatgag

SEQ ID NO: 173500 - DNA, 50 bp, Artificial
  Synthetic oligonucleotide
gatcaggcgccacgtactcgcaacactcctgcgtcttcccggaagtctgg

SEQ ID NO: 173501 - DNA, 50 bp, Artificial
  Synthetic oligonucleotide
caaaggaaagaagggtgagccgaccggccctgcagcactgaagcggccct

SEQ ID NO: 173502 - DNA, 50 bp, Artificial
  Synthetic oligonucleotide
caaaccgttccgtagcgtaggcacagcggggacctctctgatgctcggtg

SEQ ID NO: 173503 - DNA, 50 bp, Artificial
  Synthetic oligonucleotide
atggggtctctcaacgtgccagaggcaacgacctggcttgaaagggcgta

SEQ ID NO: 173504 - DNA, 60 bp, Artificial
  Synthetic oligonucleotide
ccggcttctccacaactcgctcagatgttgataggcccggcagtgcggggcaccaacaag

SEQ ID NO: 173505 - DNA, 50 bp, Artificial
  Synthetic oligonucleotide
atgcccggacgcatgaacgtcctgattcctgacctgccggctttccgctc

SEQ ID NO: 173506 - DNA, 50 bp, Artificial
  Synthetic oligonucleotide
atgaccgttgcgtcctgccgctcgggagcaccgaacaacacgggtttatg

SEQ ID NO: 173507 - DNA, 50 bp, Artificial
  Synthetic oligonucleotide
cgcgacaaagccacccggctgagttgaggtccagctcagaactccggttc

SEQ ID NO: 173508 - DNA, 50 bp, Artificial
  Synthetic oligonucleotide
atcacctcaatgtcctgcgggctacggcacggaagcttgccggaactcca

SEQ ID NO: 173509 - DNA, 50 bp, Artificial
  Synthetic oligonucleotide
atcaccaagccgatgcaccccggttcaacagacgccatgctgggcacgtg

SEQ ID NO: 173510 - DNA, 50 bp, Artificial
  Synthetic oligonucleotide
cgcgctctcacaggcatacgccctgaaagcactgcacgggcacctggata

SEQ ID NO: 173511 - DNA, 50 bp, Artificial
  Synthetic oligonucleotide
atatgaacggccggacacgcagactgagcgccctgctgcccaatcgtgac

SEQ ID NO: 173512 - DNA, 50 bp, Artificial
  Synthetic oligonucleotide
cgctgacttcgatccagtacgcccacccctggaagacctgtgcccggtcc

SEQ ID NO: 173513 - DNA, 50 bp, Artificial
  Synthetic oligonucleotide
gaggtccgctcaagcgccctacaccagccgtgcacccacgtcggttgctc

SEQ ID NO: 173514 - DNA, 50 bp, Artificial
  Synthetic oligonucleotide
cggaactccataccgcgtggctgggctgttggacagagatggcggactgg

SEQ ID NO: 173515 - DNA, 60 bp, Artificial
  Synthetic oligonucleotide
gccataagcgggccacttccggttcatctcacacaggacgctgtagtcatgctcattcgc

SEQ ID NO: 173516 - DNA, 50 bp, Artificial
  Synthetic oligonucleotide
atacccgagcgggtctgacagtgctcttccggtgggggttgtgcttgggc

SEQ ID NO: 173517 - DNA, 50 bp, Artificial
  Synthetic oligonucleotide
cggaagcttgccggaactccataccgcgtggctgggctgttggacagaga

SEQ ID NO: 173518 - DNA, 50 bp, Artificial
  Synthetic oligonucleotide
agttcccaactgtgctcccagcgtaggtctgggctgtccgacatgtgccc

SEQ ID NO: 173519 - DNA, 50 bp, Artificial
  Synthetic oligonucleotide
cggattgaatccgaaacaacaggattcactcggaatccgtatcccttatt

SEQ ID NO: 173520 - DNA, 50 bp, Artificial
  Synthetic oligonucleotide
agtctcaattcactccgcagttcatgagtgtgcggtaggtcccctggacg

SEQ ID NO: 173521 - DNA, 50 bp, Artificial
  Synthetic oligonucleotide
agtcatggccccaagcaccgactggcccccgtccttgaccggaagtgaca

SEQ ID NO: 173522 - DNA, 50 bp, Artificial
  Synthetic oligonucleotide
aggtttcacgacaggcgaccgaacgaacgctacgcggctcaccctttcag

SEQ ID NO: 173523 - DNA, 60 bp, Artificial
  Synthetic oligonucleotide
attcctataccgaagagtacgaagatggatgccaagagcatagtcattactcccttttgc

SEQ ID NO: 173524 - DNA, 60 bp, Artificial
  Synthetic oligonucleotide
ccgttgttgctgctcgaagctagagagtaaaaccttgagaggcatcgagcacttgaacag

SEQ ID NO: 173525 - DNA, 52 bp, Artificial
  Synthetic oligonucleotide
cctctgaaactgcgttccagaggggaaaaaaccagggtgctgttaattttaa

SEQ ID NO: 173526 - DNA, 60 bp, Artificial
  Synthetic oligonucleotide
gcatggatgcgaaacctgactcttaccagtatcgtttttagcttgctcctagcagcctgt

SEQ ID NO: 173527 - DNA, 60 bp, Artificial
  Synthetic oligonucleotide
ccttgcatgacgcacagaagccaccacacactcaacgtgaagctcagatcaaagctgtgg

SEQ ID NO: 173528 - DNA, 54 bp, Artificial
  Synthetic oligonucleotide
cgaatacgcacggaagaccaaggcgcccgcggtcaagtcctggtaacgggttga

SEQ ID NO: 173529 - DNA, 56 bp, Artificial
  Synthetic oligonucleotide
cgaatccggctcaccagcaaagggcaacggttcctgagcaacctccccaactgaaa

SEQ ID NO: 173530 - DNA, 60 bp, Artificial
  Synthetic oligonucleotide
gcagagttgctctctgagggacactcttgcagttatgggggggataggagtcgttcgtgt

SEQ ID NO: 173531 - DNA, 59 bp, Artificial
  Synthetic oligonucleotide
gcaactgggccggggtacgctgaacgcattcaagtttgcagacatctaccgctaaggag

SEQ ID NO: 173532 - DNA, 60 bp, Artificial
  Synthetic oligonucleotide
gataaagaaattcgacgtgaagaatatcatcctagcaactgctttcctcatctgcgcggc

SEQ ID NO: 173533 - DNA, 58 bp, Artificial
  Synthetic oligonucleotide
cgccatctggattactgacacggcgagaagcgtaaaaagtcgtccctcctacattcta

SEQ ID NO: 173534 - DNA, 57 bp, Artificial
  Synthetic oligonucleotide
caacattctcgcagttcccacgatgggaactcgtttgctctaccggttcccatcgtg

SEQ ID NO: 173535 - DNA, 60 bp, Artificial
  Synthetic oligonucleotide
gagttgcttgaagaccacccgaagctgagtctcagcaagtttgccagcgaggtagagcgc

SEQ ID NO: 173536 - DNA, 58 bp, Artificial
  Synthetic oligonucleotide
gagtcggctacgtcaatgctccgtacgagagtgccacgcccaccaagcccacggttta

SEQ ID NO: 173537 - DNA, 60 bp, Artificial
  Synthetic oligonucleotide
cggatgctgggtgcgcatctcaagtcttgcaactcggggaggcctcggtacttcgctttc

SEQ ID NO: 173538 - DNA, 56 bp, Artificial
  Synthetic oligonucleotide
aacatacaccgtcagccagcgttacctgaaacacgagggggaacaatcgccagaag

SEQ ID NO: 173539 - DNA, 60 bp, Artificial
  Synthetic oligonucleotide
tcgctgtctacttccataggcactgttgaaactgcggccaagcgcaaagtgaggcctttc

SEQ ID NO: 173540 - DNA, 60 bp, Artificial
  Synthetic oligonucleotide
acaggctgtactgaccgaagctgtgcagcgagttcgcagttttgaccccatgtcctgatc

SEQ ID NO: 173541 - DNA, 60 bp, Artificial
  Synthetic oligonucleotide
tgtcatgaggcgtttatgtcagttctcgttacgaagagaaattcctgtccaaatggctgc

SEQ ID NO: 173542 - DNA, 53 bp, Artificial
  Synthetic oligonucleotide
aattactggtcaacttttgggccgtttttcgaggggtcaatgcgcgagaaatg

SEQ ID NO: 173543 - DNA, 56 bp, Artificial
  Synthetic oligonucleotide
tttcagtgtgccttgatgtgaggtgaaagccggaaagcccccccacctgtagcccg

SEQ ID NO: 173544 - DNA, 59 bp, Artificial
  Synthetic oligonucleotide
aacgaagtgcatagccaggcgagaacactagattaagatttggttaaagtggctggcgc

SEQ ID NO: 173545 - DNA, 55 bp, Artificial
  Synthetic oligonucleotide
caaggtggggacgaggggctcttctctgccgggttcaacgaatgacactaatctt

SEQ ID NO: 173546 - DNA, 58 bp, Artificial
  Synthetic oligonucleotide
tgcgtctcagacgggattgccggagttttgaggggtagtcagccgaacagattcccgc

SEQ ID NO: 173547 - DNA, 60 bp, Artificial
  Synthetic oligonucleotide
tgaaccgggagaggacgcgctctcacaggcatacgccctgaaagcactgcacgggcacct

SEQ ID NO: 173548 - DNA, 55 bp, Artificial
  Synthetic oligonucleotide
aatcggagaccggccgagaagtctggagggtgcagaccggggcgacaccacttct

SEQ ID NO: 173549 - DNA, 57 bp, Artificial
  Synthetic oligonucleotide
aacgggcaattcagtgcagtcgatttaactcgtgaactgacggctcggaaggccaag

SEQ ID NO: 173550 - DNA, 60 bp, Artificial
  Synthetic oligonucleotide
acagacatatgaggttctcatgcaaggtgtatagagacagcccataagcattcttaacct

SEQ ID NO: 173551 - DNA, 60 bp, Artificial
  Synthetic oligonucleotide
ttctgcgggtgctggggtgttacgcaagattagcactaaagtgcatcttgcctctgaaac

SEQ ID NO: 173552 - DNA, 60 bp, Artificial
  Synthetic oligonucleotide
tgcggtttcctctcgtctatttatagcacgtatgtgctaaaacctgtcaggctgtggtag

SEQ ID NO: 173553 - DNA, 56 bp, Artificial
  Synthetic oligonucleotide
aatcctgaccgtgccaaagccccagcaaaaacaggaattgggtgccgattttctgc

SEQ ID NO: 173554 - DNA, 54 bp, Artificial
  Synthetic oligonucleotide
ttagacccttagacgtttcgactcttagacttgaaaaggacaaatctaaatgac

SEQ ID NO: 173555 - DNA, 60 bp, Artificial
  Synthetic oligonucleotide
ttttgtcaagtgacatgttgttaagtaagtgctagactaaagctatgcttccgcctgctg

SEQ ID NO: 173556 - DNA, 59 bp, Artificial
  Synthetic oligonucleotide
gggacagggcaaaggggcgacgtgtcgtagcgcgacctatagtcgctgtgcagtttgtg

SEQ ID NO: 173557 - DNA, 56 bp, Artificial
  Synthetic oligonucleotide
gcggtaagaaaccagccgtgcgagtaggcacgggcgttctctgctgaaccccccga

SEQ ID NO: 173558 - DNA, 57 bp, Artificial
  Synthetic oligonucleotide
cgtgtctggaagcgccttttgactacctattcaggtgcaagttctgaggcgacccgt

SEQ ID NO: 173559 - DNA, 53 bp, Artificial
  Synthetic oligonucleotide
atcagggtgccaataaacgagttggggcccaccgagtagggtgtcgggtccac

SEQ ID NO: 173560 - DNA, 56 bp, Artificial
  Synthetic oligonucleotide
agcaggacagctataccgatagggtacggcaaatcgcccccgtagttccactcctg

SEQ ID NO: 173561 - DNA, 59 bp, Artificial
  Synthetic oligonucleotide
acgcatacgtccggctgagcgagctagatagcttcttcgccagcgtactgccgagacga

SEQ ID NO: 173562 - DNA, 57 bp, Artificial
  Synthetic oligonucleotide
tcaccgctactgttcgtctccaacctaagccggagtcaataacgtcgattgaaccag

SEQ ID NO: 173563 - DNA, 58 bp, Artificial
  Synthetic oligonucleotide
tgcaccgatctgtggcgagcctacgatgaaccgctcttgggggtaaagcggctaaccc

SEQ ID NO: 173564 - DNA, 59 bp, Artificial
  Synthetic oligonucleotide
agggtcctttcatgatgagtagccagagcgtacagcgcgctcacttacggatgactcac

SEQ ID NO: 173565 - DNA, 54 bp, Artificial
  Synthetic oligonucleotide
ggaacggcgagcgagtagacgacccggccagctttttcgtaccgccgcgttcga

SEQ ID NO: 173566 - DNA, 56 bp, Artificial
  Synthetic oligonucleotide
aacccgtaccagagtaaaatctcgtgccgagctaagaactcttgctgcgacgaaaa

SEQ ID NO: 173567 - DNA, 55 bp, Artificial
  Synthetic oligonucleotide
gacgtgccatgtgcagattctcctactgtctcggaggcctgagccgatccctcgc

SEQ ID NO: 173568 - DNA, 55 bp, Artificial
  Synthetic oligonucleotide
cgtccgaacgtagtggccaggcaggtttgccgtgaaacttgatatgacgacagtg

SEQ ID NO: 173569 - DNA, 55 bp, Artificial
  Synthetic oligonucleotide
tgcgggtcccgatgcccgctcacctcgagcgttgggagcggggcgtacccgtgga

SEQ ID NO: 173570 - DNA, 55 bp, Artificial
  Synthetic oligonucleotide
tgctgtgctccgcgacatctgtccacatcatgacgcgcctggccgcatgtcggaa

SEQ ID NO: 173571 - DNA, 55 bp, Artificial
  Synthetic oligonucleotide
acggtccgagaccgaagtgttaccgccagatggaccgtggttgacagagcagggt

SEQ ID NO: 173572 - DNA, 51 bp, Artificial
  Synthetic oligonucleotide
acgaaaggtcccatgtaacggttaagctcggttcaccggttaagttgcgta

SEQ ID NO: 173573 - DNA, 55 bp, Artificial
  Synthetic oligonucleotide
tggtgcggacattcttcctcacgatctctcggatggttcgcggcacacctgcggg

SEQ ID NO: 173574 - DNA, 55 bp, Artificial
  Synthetic oligonucleotide
acattgtacggagacgtgctggctgtgggccgagaggcgggcgcttggtaggttg

SEQ ID NO: 173575 - DNA, 55 bp, Artificial
  Synthetic oligonucleotide
tgtgagctgtttcgtgcgagaacgtcgagggatggctaccgcgacgactcctcgg

SEQ ID NO: 173576 - DNA, 55 bp, Artificial
  Synthetic oligonucleotide
acagccgcaactccggagcgatcacggaccagcacatatcccgacgcatgttccg

SEQ ID NO: 173577 - DNA, 55 bp, Artificial
  Synthetic oligonucleotide
tgttccgccggccagggcttgtgtggccgtggagcaccatcgtactaatctcggt

SEQ ID NO: 173578 - DNA, 55 bp, Artificial
  Synthetic oligonucleotide
gcctcgtctcggaactggatgtgagcgagaacgtaacgctccgaggctacgatcc

SEQ ID NO: 173579 - DNA, 55 bp, Artificial
  Synthetic oligonucleotide
tttctgaggggagcccgggcatggacccgggatggagtggatcagtggaatgcag

SEQ ID NO: 173580 - DNA, 54 bp, Artificial
  Synthetic oligonucleotide
cgacgtgagtagaccgcgacagacatcgccggaaccccgatgtcagctcactga

SEQ ID NO: 173581 - DNA, 54 bp, Artificial
  Synthetic oligonucleotide
acgcctacgatctgcagtccggggagcgcctgtggacctaccacagcggcgctg

SEQ ID NO: 173582 - DNA, 53 bp, Artificial
  Synthetic oligonucleotide
tcacgcgcaccaacttcttgtcgctggcgtgacctgaactcgcctgggaggtt

SEQ ID NO: 173583 - DNA, 52 bp, Artificial
  Synthetic oligonucleotide
ccccagtcgggaatgaacctggccgggcaagagttgagtctggtgtactcaa

SEQ ID NO: 173584 - DNA, 52 bp, Artificial
  Synthetic oligonucleotide
gcacattgatgttcgagtggtagtccgaggaccactggggatggttcgagtg

SEQ ID NO: 173585 - DNA, 52 bp, Artificial
  Synthetic oligonucleotide
ggatcgtgtcgtaccggtcgccagactatgcggagggctcttcctcccgaca

SEQ ID NO: 173586 - DNA, 52 bp, Artificial
  Synthetic oligonucleotide
cacgcgagactgcctcatcgagccaccaggtcaacccctcgatgccgtcttg

SEQ ID NO: 173587 - DNA, 51 bp, Artificial
  Synthetic oligonucleotide
tccgatcgaaggcatgagggcattctaggcgtgtcgacgcactggtgagga

SEQ ID NO: 173588 - DNA, 50 bp, Artificial
  Synthetic oligonucleotide
ctcgctccgcggcccctccgtcatcgttcggtgcaaattcgtcgagaaac

SEQ ID NO: 173589 - DNA, 55 bp, Artificial
  Synthetic oligonucleotide
cttccgaatccataaccgcaggtcaacaggtcgcacctctgtctagaagaccaga

SEQ ID NO: 173590 - DNA, 50 bp, Artificial
  Synthetic oligonucleotide
gtcagcggttgtgtgccacgtgcagaagtgaaggccgtcacggtacggta

SEQ ID NO: 173591 - DNA, 50 bp, Artificial
  Synthetic oligonucleotide
cgtgcaaatccgtggggatacggcccccaaaagaccctggtacggaggag

SEQ ID NO: 173592 - DNA, 50 bp, Artificial
  Synthetic oligonucleotide
cgtacgtccaggtgatgtgcatcgcgcccgtgtgctgcgacctgcgagga

SEQ ID NO: 173593 - DNA, 50 bp, Artificial
  Synthetic oligonucleotide
aaaatgggtgcatggcacaggattcgcagagcgcgcactcagagcccgag

SEQ ID NO: 173594 - DNA, 50 bp, Artificial
  Synthetic oligonucleotide
aatgttcaacaacgggggaggctcagatattcccgcccgtggcgtcccgc

SEQ ID NO: 173595 - DNA, 50 bp, Artificial
  Synthetic oligonucleotide
acatgggagcccccgttctcggggcagggatacggtgtcgccatggagac

SEQ ID NO: 173596 - DNA, 50 bp, Artificial
  Synthetic oligonucleotide
accttagcagtgttccgcggcccagtccaactccgcgtcgtgtgctcctg

SEQ ID NO: 173597 - DNA, 50 bp, Artificial
  Synthetic oligonucleotide
agacgtgctggctgtgggccgagaggcgggcgcttggtaggttgcgtctg

SEQ ID NO: 173598 - DNA, 50 bp, Artificial
  Synthetic oligonucleotide
aggggtggtccgtgtcacgaaatgccgtgctccgtggtcattcccggggc

SEQ ID NO: 173599 - DNA, 50 bp, Artificial
  Synthetic oligonucleotide
agtccgtctaagcgtgcagcccgatcccgggtaatgctggggtctttggg

SEQ ID NO: 173600 - DNA, 55 bp, Artificial
  Synthetic oligonucleotide
catgtgatggcccagaaagaccgtcgaacaatcaaggtctgcaagactagccaag

SEQ ID NO: 173601 - DNA, 50 bp, Artificial
  Synthetic oligonucleotide
atggcacaggattcgcagagcgcgcactcagagcccgagaggacctcaca

SEQ ID NO: 173602 - DNA, 50 bp, Artificial
  Synthetic oligonucleotide
atggcagtagtttcgtgagctcagggtacatgagcgctctggggtccggc

SEQ ID NO: 173603 - DNA, 50 bp, Artificial
  Synthetic oligonucleotide
attgctcggggcgccgaacgaaatattcgggcagtgtcgagttgcccacg

SEQ ID NO: 173604 - DNA, 50 bp, Artificial
  Synthetic oligonucleotide
catcggaatgtgctgtcccccatgagtcgcagcggagcgcgattcggttg

SEQ ID NO: 173605 - DNA, 50 bp, Artificial
  Synthetic oligonucleotide
ccactccgcgctgagggaggagccacgatgcgagaccctcgtgatctgta

SEQ ID NO: 173606 - DNA, 50 bp, Artificial
  Synthetic oligonucleotide
cccaaagaccccagcattacccgggatcgggctgcacgcttagacggact

SEQ ID NO: 173607 - DNA, 50 bp, Artificial
  Synthetic oligonucleotide
ccgtgtcacgaaatgccgtgctccgtggtcattcccggggctgcgtggtc

SEQ ID NO: 173608 - DNA, 50 bp, Artificial
  Synthetic oligonucleotide
cctacctggacgagcatgctgagcgtaggccgagttctgtgttccggcag

SEQ ID NO: 173609 - DNA, 50 bp, Artificial
  Synthetic oligonucleotide
cctgcgaggggccgtgccggatccatcgattcgggccgtgggatgagtgc

SEQ ID NO: 173610 - DNA, 50 bp, Artificial
  Synthetic oligonucleotide
cgagggcgttatactcgacaggcttgacggcaccgtgcgttcgtgcgccg

SEQ ID NO: 173611 - DNA, 55 bp, Artificial
  Synthetic oligonucleotide
ggcacgctcgcacgagcaccccaccctttaacgacacgtcctgtgaggcgtggaa

SEQ ID NO: 173612 - DNA, 55 bp, Artificial
  Synthetic oligonucleotide
cactggcgtttagggcgttcacgccccgcgcaccgagagacgtctccatggcccg

SEQ ID NO: 173613 - DNA, 55 bp, Artificial
  Synthetic oligonucleotide
ctcaccgcgaggatcacagggtgcggtcggctcttggccggacatagaataggta

SEQ ID NO: 173614 - DNA, 55 bp, Artificial
  Synthetic oligonucleotide
gggctaccggccagttatgtgcaactgggagccgcgaacggaactgagcgacaca

SEQ ID NO: 173615 - DNA, 55 bp, Artificial
  Synthetic oligonucleotide
tatccctgcgaggggtggtccgtgtcacgaaatgccgtgctccgtggtcattccc

SEQ ID NO: 173616 - DNA, 55 bp, Artificial
  Synthetic oligonucleotide
gatgggtggtcaatgaggcgcggccactcgtccaagaacggccaaccggctcaca

SEQ ID NO: 173617 - DNA, 55 bp, Artificial
  Synthetic oligonucleotide
cgagcatgcagatcgacccacctacccctcgagacggggtgctcagatgagcgct

SEQ ID NO: 173618 - DNA, 50 bp, Artificial
  Synthetic oligonucleotide
aggacggacctctccaacggaatccctctgtgcggcaggcacaaccgcct

SEQ ID NO: 173619 - DNA, 50 bp, Artificial
  Synthetic oligonucleotide
cagcttcacgctcggaccgccccctcgaaatactcacacagggcatcgct

SEQ ID NO: 173620 - DNA, 50 bp, Artificial
  Synthetic oligonucleotide
cagcgattgccgtgcagggggagtggctcagtcgcgggtaccggaccgat

SEQ ID NO: 173621 - DNA, 50 bp, Artificial
  Synthetic oligonucleotide
aggcccaggtcacaggacacgccctgagacgactgtgggggacccgttcg

SEQ ID NO: 173622 - DNA, 50 bp, Artificial
  Synthetic oligonucleotide
caccccatcgagaccggtctggaacacctagactcccgcccatgcgcatc

SEQ ID NO: 173623 - DNA, 50 bp, Artificial
  Synthetic oligonucleotide
caacgatgctcaaaaggcagccctcgccgcgaagtacgactcctgcgccg

SEQ ID NO: 173624 - DNA, 50 bp, Artificial
  Synthetic oligonucleotide
caaaaggcagccctcgccgcgaagtacgactcctgcgccgaacgggactg

SEQ ID NO: 173625 - DNA, 55 bp, Artificial
  Synthetic oligonucleotide
cgacactgacgcgggtgatcagacccgctgcccgaatcaaccacgtgtatcggag

SEQ ID NO: 173626 - DNA, 55 bp, Artificial
  Synthetic oligonucleotide
agcggaggacttcaccgggcacctttcggacacgcgcgcggaatgcgacagactg

SEQ ID NO: 173627 - DNA, 55 bp, Artificial
  Synthetic oligonucleotide
ccgtaccagcaggagcggtgcccactccccggagctcgttgtggagaccggtccc

SEQ ID NO: 173628 - DNA, 55 bp, Artificial
  Synthetic oligonucleotide
cccggagaaggacaacacatcgctcatacccgtgaccctactgactcgacggggt

SEQ ID NO: 173629 - DNA, 55 bp, Artificial
  Synthetic oligonucleotide
cccgactacaccctcgtttgtgaagagcctccaatcggctgtcgctcgagccgtg

SEQ ID NO: 173630 - DNA, 55 bp, Artificial
  Synthetic oligonucleotide
ccaacgattcgagggtacgcgacgaaggactcgtgacgggcttgtgggacatgcg

SEQ ID NO: 173631 - DNA, 55 bp, Artificial
  Synthetic oligonucleotide
catgacctctcggtgcgcgatcacgtgtcccgcgagtaccaccttgtggacggga

SEQ ID NO: 173632 - DNA, 55 bp, Artificial
  Synthetic oligonucleotide
cagggaccgctcctgagtgaatgcagacgtgcacttcagggtattgctccctgac

SEQ ID NO: 173633 - DNA, 55 bp, Artificial
  Synthetic oligonucleotide
cagcccgacggatgtgaccaagaatcgcggatgggcacgaacatcgcagatgggg

SEQ ID NO: 173634 - DNA, 55 bp, Artificial
  Synthetic oligonucleotide
gacgtcgttggtgcagtcgtagcggggtgcgacctcatcgaacatcgaggagacg

SEQ ID NO: 173635 - DNA, 55 bp, Artificial
  Synthetic oligonucleotide
atgtgcatgacccttcgttatggtcgagccccgtcacagcccatcaccgatcccc

SEQ ID NO: 173636 - DNA, 53 bp, Artificial
  Synthetic oligonucleotide
agtaaggccacactaggggtctacccgtgggtacggagtctctactcgcggac

SEQ ID NO: 173637 - DNA, 55 bp, Artificial
  Synthetic oligonucleotide
atgcgggcacaaaatggctcagccgcgcgttacagcggggaatcaagtgatgggg

SEQ ID NO: 173638 - DNA, 55 bp, Artificial
  Synthetic oligonucleotide
tggggcccggatgtggcgcctctcacgaactccgacagagcatcggaggtccgtg

SEQ ID NO: 173639 - DNA, 55 bp, Artificial
  Synthetic oligonucleotide
tgcactgcgtctgcgaggggcggtacctgccggttcaggcacctggagtcatctc

SEQ ID NO: 173640 - DNA, 55 bp, Artificial
  Synthetic oligonucleotide
tgtcggaactctggtggtcgtgagggatggatcccgcaccgcgtccttactgttg

SEQ ID NO: 173641 - DNA, 55 bp, Artificial
  Synthetic oligonucleotide
tctacgcctggcacccgttgcggggagcgctcaattcttgacgtcggactgagct

SEQ ID NO: 173642 - DNA, 55 bp, Artificial
  Synthetic oligonucleotide
acaggccccgagctggctcgatagcatccaatgggtcgccccggatggacgagag

SEQ ID NO: 173643 - DNA, 55 bp, Artificial
  Synthetic oligonucleotide
tcgtccgagttcacagtggtatcgaggcgcgaaaccccgtctcacgatgtgatcg

SEQ ID NO: 173644 - DNA, 55 bp, Artificial
  Synthetic oligonucleotide
tccctctggccggtttcacaggagccgaacccgacaggtcatgcttcgcaagcga

SEQ ID NO: 173645 - DNA, 55 bp, Artificial
  Synthetic oligonucleotide
cttacgcgagacaatgcagcggagtcgagacgacattcgctgtcagggagtagac

SEQ ID NO: 173646 - DNA, 53 bp, Artificial
  Synthetic oligonucleotide
accgaaactcgcaagggtggacgaaaatcgcagaaggggacgggaaccgcaga

SEQ ID NO: 173647 - DNA, 55 bp, Artificial
  Synthetic oligonucleotide
tagatcgcagatggggcgggcacggacggagacaagagtcggtgaggggcggagt

SEQ ID NO: 173648 - DNA, 55 bp, Artificial
  Synthetic oligonucleotide
gtgacccacttcacacgtaccgcgcagtaaccctggtcgtgtttggcaatgtcgt

SEQ ID NO: 173649 - DNA, 55 bp, Artificial
  Synthetic oligonucleotide
gtgaagagccaccaaaccgttagccagatctcactaccgccacctgcgatccacc

SEQ ID NO: 173650 - DNA, 55 bp, Artificial
  Synthetic oligonucleotide
gtctggtctgggtggctccactggttgcttcgtgtgttggtgggtcgtgcctggt

SEQ ID NO: 173651 - DNA, 55 bp, Artificial
  Synthetic oligonucleotide
gggtctaccgacgagatcggagaccgatagagccgtccgtagtggactcgcgagg

SEQ ID NO: 173652 - DNA, 55 bp, Artificial
  Synthetic oligonucleotide
gcattcgctcgggaccggacgtggggatgcccgtggttgagcggtactcgcaaag

SEQ ID NO: 173653 - DNA, 54 bp, Artificial
  Synthetic oligonucleotide
accgctagactgacggacgctgattcgtcagtaagcacaactccacagagcgaa

SEQ ID NO: 173654 - DNA, 54 bp, Artificial
  Synthetic oligonucleotide
ctgaggtcatgcctgcagtgtatggaacatccgtaccagatatccaatgggcgc

SEQ ID NO: 173655 - DNA, 54 bp, Artificial
  Synthetic oligonucleotide
ggtggaacatcgattgatcatgttggtcatgtgtgacttctttgtgagtacggc

SEQ ID NO: 173656 - DNA, 55 bp, Artificial
  Synthetic oligonucleotide
ctgggcacaacatacgcaactctaatcgaacctgttgtggccagtagtagcgccg

SEQ ID NO: 173657 - DNA, 54 bp, Artificial
  Synthetic oligonucleotide
agtagctgtcgcccgagatgtcaacgacgagcactctgtcggagtcgtccagtg

SEQ ID NO: 173658 - DNA, 53 bp, Artificial
  Synthetic oligonucleotide
taggctgggtccccacgtcactgtcagaactcccggaagtaggtgtgccccat

SEQ ID NO: 173659 - DNA, 53 bp, Artificial
  Synthetic oligonucleotide
atgtcgatgtcaccacctcgtgagaggatcacgccagatcactcagcgagcga

SEQ ID NO: 173660 - DNA, 53 bp, Artificial
  Synthetic oligonucleotide
tgagccactaggcagaacccgactggagccccatgctcgtgtcatgagcacac

SEQ ID NO: 173661 - DNA, 52 bp, Artificial
  Synthetic oligonucleotide
gcatggtccgattctccttcagatgagtcggaaccaaacccagggcgcttca

SEQ ID NO: 173662 - DNA, 51 bp, Artificial
  Synthetic oligonucleotide
tgccatcacacctcctcgcttgcagaatgactctgcccttcccgacgcccc

SEQ ID NO: 173663 - DNA, 51 bp, Artificial
  Synthetic oligonucleotide
tgacctaattgctacacatgagcgtggataggttgtcgatatctactgacc

SEQ ID NO: 173664 - DNA, 51 bp, Artificial
  Synthetic oligonucleotide
cctcgccgcgagttgcatggggttccaagggttttcgcagcgtctgccaag

SEQ ID NO: 173665 - DNA, 51 bp, Artificial
  Synthetic oligonucleotide
tgtgacctctccgcaccccgggccgtctagcgtgagggcaatcagcacaca

SEQ ID NO: 173666 - DNA, 50 bp, Artificial
  Synthetic oligonucleotide
agccgtacaaacgacccaccagttcccacgggaatcaaaggccccgacca

SEQ ID NO: 173667 - DNA, 55 bp, Artificial
  Synthetic oligonucleotide
ctcggggctctgtctcacgttgtgcaagaacccggccacacggttcccagtgcgc

SEQ ID NO: 173668 - DNA, 50 bp, Artificial
  Synthetic oligonucleotide
agccgcaagcactccccttctccgagtcccctcagcggtcgaagcgtccg

SEQ ID NO: 173669 - DNA, 50 bp, Artificial
  Synthetic oligonucleotide
agccagatgtccctctggccggtttcacaggagccgaacccgacaggtca

SEQ ID NO: 173670 - DNA, 50 bp, Artificial
  Synthetic oligonucleotide
agcaggctcacaacgtttcgtcgccgtcagagtcgcgtcagccgcccgca

SEQ ID NO: 173671 - DNA, 50 bp, Artificial
  Synthetic oligonucleotide
agcagacccaacgattcgagggtacgcgacgaaggactcgtgacgggctt

SEQ ID NO: 173672 - DNA, 50 bp, Artificial
  Synthetic oligonucleotide
agatgcacatcagcggaggcgaatcaacatctagggggaagcgggggcca

SEQ ID NO: 173673 - DNA, 50 bp, Artificial
  Synthetic oligonucleotide
agatgacgatgacgcacggtgagcgggcatgaaactgcgtcctctgcgcc

SEQ ID NO: 173674 - DNA, 50 bp, Artificial
  Synthetic oligonucleotide
actggggcaatcgcgggagcatcggctacgatgagggcatgtcggcagta

SEQ ID NO: 173675 - DNA, 50 bp, Artificial
  Synthetic oligonucleotide
acgtgggggacggctcacctaggctgtgcccgtggattcctggacctcac

SEQ ID NO: 173676 - DNA, 50 bp, Artificial
  Synthetic oligonucleotide
acgtcgtctcctgacatctggggtgctccggcgatcctatgcgcaggctg

SEQ ID NO: 173677 - DNA, 50 bp, Artificial
  Synthetic oligonucleotide
acgtcaggcgcaccacgagttctcctgacggccaacctaccgacctcgta

SEQ ID NO: 173678 - DNA, 55 bp, Artificial
  Synthetic oligonucleotide
ctacttgggaaagcgcttgtaccacaagtcgacggtcacaggcactcctcagcgg

SEQ ID NO: 173679 - DNA, 50 bp, Artificial
  Synthetic oligonucleotide
acggcgttcgcatcatgactcgggtagaggggcacacgatgcaccgtgat

SEQ ID NO: 173680 - DNA, 50 bp, Artificial
  Synthetic oligonucleotide
acggatttcccacgacgggccacaagatcgtctactgtcactcgcccgcc

SEQ ID NO: 173681 - DNA, 50 bp, Artificial
  Synthetic oligonucleotide
acggaggcaagcggactcacttgagaatcccaccggagcagtcggcgcta

SEQ ID NO: 173682 - DNA, 50 bp, Artificial
  Synthetic oligonucleotide
aaaccgcgattcgcgtccccatctgcgaatcccgtccccaacgactcgcc

SEQ ID NO: 173683 - DNA, 50 bp, Artificial
  Synthetic oligonucleotide
aaacctcctcacgacgaggcgcgttgaggccctgatctatcgatgcggca

SEQ ID NO: 173684 - DNA, 50 bp, Artificial
  Synthetic oligonucleotide
tgtcatcactctcagtacgcttcacgacaaatgaccgttgatcggaaagg

SEQ ID NO: 173685 - DNA, 50 bp, Artificial
  Synthetic oligonucleotide
aacgcagtacgacgagaggaaacccatggggcaacgggcaagcagtgcag

SEQ ID NO: 173686 - DNA, 50 bp, Artificial
  Synthetic oligonucleotide
aactgacgttatgtgtcacccgccgcacgagctgtgcaccatgtggggtg

SEQ ID NO: 173687 - DNA, 50 bp, Artificial
  Synthetic oligonucleotide
aagtacgactcctgcgccgaacgggactgcgaacgacccttcgcctggtg

SEQ ID NO: 173688 - DNA, 50 bp, Artificial
  Synthetic oligonucleotide
aatcgcggatgggcacgaacatcgcagatggggacgggaatcgcagtcgt

SEQ ID NO: 173689 - DNA, 55 bp, Artificial
  Synthetic oligonucleotide
cggaaggcactatcgccacatggcctccgaggaccgactatgacgatctacgcag

SEQ ID NO: 173690 - DNA, 50 bp, Artificial
  Synthetic oligonucleotide
acagaccccacgttcctacccggcagtaccccagcggttcgttaggctcg

SEQ ID NO: 173691 - DNA, 50 bp, Artificial
  Synthetic oligonucleotide
acccctggcggcaatttcgggttgccccctcgagccggtaagctggagac

SEQ ID NO: 173692 - DNA, 50 bp, Artificial
  Synthetic oligonucleotide
acccggcagtaccccagcggttcgttaggctcgacactgacgcgggtgat

SEQ ID NO: 173693 - DNA, 50 bp, Artificial
  Synthetic oligonucleotide
accggttgcgttcatgcggtcattcttccaccccggtgcgagaatccccg

SEQ ID NO: 173694 - DNA, 50 bp, Artificial
  Synthetic oligonucleotide
acctgccggttcaggcacctggagtcatctcccgggggcgtcgatcgttt

SEQ ID NO: 173695 - DNA, 50 bp, Artificial
  Synthetic oligonucleotide
acctggcgatgagagaccgctggttactgctgttgcgtgtgcgcacgacc

SEQ ID NO: 173696 - DNA, 50 bp, Artificial
  Synthetic oligonucleotide
acggacggaacgacgggcgacctctaccgctcgaagagtgagcgcgacct

SEQ ID NO: 173697 - DNA, 50 bp, Artificial
  Synthetic oligonucleotide
acggagaacgccattcgtgaagccgtgcgttctggggacctccagcgagt

SEQ ID NO: 173698 - DNA, 50 bp, Artificial
  Synthetic oligonucleotide
attgggtaggctcgacggcaagttgtccgttcacatgaaatggagccaca

SEQ ID NO: 173699 - DNA, 50 bp, Artificial
  Synthetic oligonucleotide
atgtgggagcaaacgctaaggtacctcgcagacttccaggcaccctccga

SEQ ID NO: 173700 - DNA, 55 bp, Artificial
  Synthetic oligonucleotide
cgcgtcacggtactcgcccgtgacccacatcacacctcctcgcgcctcgctcagt

SEQ ID NO: 173701 - DNA, 50 bp, Artificial
  Synthetic oligonucleotide
atgtggcgctaggtgaccctaacaccagcagggccccactccgtcagtga

SEQ ID NO: 173702 - DNA, 50 bp, Artificial
  Synthetic oligonucleotide
agggtacgcgacgaaggactcgtgacgggcttgtgggacatgcgttcatt

SEQ ID NO: 173703 - DNA, 50 bp, Artificial
  Synthetic oligonucleotide
agtaccttggcacacgggtctgacaacctcggcaggacggggtgaaaagc

SEQ ID NO: 173704 - DNA, 50 bp, Artificial
  Synthetic oligonucleotide
atgggcacgaacatcgcagatggggacgggaatcgcagtcgtgcagggga

SEQ ID NO: 173705 - DNA, 50 bp, Artificial
  Synthetic oligonucleotide
agtccgcacgacgcacgacactgggccacgcaccatcgtgaccccactca

SEQ ID NO: 173706 - DNA, 50 bp, Artificial
  Synthetic oligonucleotide
atcgcggcatgtcacgagtaccttggcacacgggtctgacaacctcggca

SEQ ID NO: 173707 - DNA, 50 bp, Artificial
  Synthetic oligonucleotide
atcgatgggttcacgagagctgggacggacccggcgttggagacgtctgc

SEQ ID NO: 173708 - DNA, 50 bp, Artificial
  Synthetic oligonucleotide
atcgagaagaccccaggtgttcgctatcggcgggcccaactcctgacccc

SEQ ID NO: 173709 - DNA, 50 bp, Artificial
  Synthetic oligonucleotide
atccgttgcaggacagtcgatgtaccgcaagcgtgtcgcgaggtccactg

SEQ ID NO: 173710 - DNA, 50 bp, Artificial
  Synthetic oligonucleotide
atccacaggcgtgctcccttccacttgagggtggtcgagtgtgctacccg

SEQ ID NO: 173711 - DNA, 55 bp, Artificial
  Synthetic oligonucleotide
cgagtgtggaaccgccattccggctcaggtggccccgactccactcgcgaagcga

SEQ ID NO: 173712 - DNA, 50 bp, Artificial
  Synthetic oligonucleotide
atcagccagggctggtctccccaatgcgaagacactcccgtggacgatcc

SEQ ID NO: 173713 - DNA, 50 bp, Artificial
  Synthetic oligonucleotide
agttcagtcaccgtcttgttgcgcagcccccacaggtacacggcgagcga

SEQ ID NO: 173714 - DNA, 50 bp, Artificial
  Synthetic oligonucleotide
agtggggcgacgtcacgggctcaggtagcgagagtcatgaaacagaggga

SEQ ID NO: 173715 - DNA, 50 bp, Artificial
  Synthetic oligonucleotide
agcgtcattctgtgtgaggaaaggggccccgctgggttcggcgaaatgga

SEQ ID NO: 173716 - DNA, 50 bp, Artificial
  Synthetic oligonucleotide
cccgtggtcgtgacctgcgctcatacgtcagctccttgcataccagccga

SEQ ID NO: 173717 - DNA, 50 bp, Artificial
  Synthetic oligonucleotide
agcgttgatcgggtgataggcagggccgagcgagcatgcagatcgaccca

SEQ ID NO: 173718 - DNA, 50 bp, Artificial
  Synthetic oligonucleotide
agctgccgtgagaacaccgatcccccgaatcgagttcaccgggcgcccaa

SEQ ID NO: 173719 - DNA, 50 bp, Artificial
  Synthetic oligonucleotide
aggacacggggcacctctcgaaggggtctgtgggccagaccacgatgtca

SEQ ID NO: 173720 - DNA, 50 bp, Artificial
  Synthetic oligonucleotide
aggacagtcgatgtaccgcaagcgtgtcgcgaggtccactggcgccgagg

SEQ ID NO: 173721 - DNA, 50 bp, Artificial
  Synthetic oligonucleotide
cagggtcacctgtcagtgcgtcgtgtccccgaggggttcagtgaagtcta

SEQ ID NO: 173722 - DNA, 55 bp, Artificial
  Synthetic oligonucleotide
cctgcccggtcgttttgatttgacgcccgaccaagttctggccatcgattacaac

SEQ ID NO: 173723 - DNA, 55 bp, Artificial
  Synthetic oligonucleotide
gccgctttcgtctcgcacgaaaacatagagcccgctttgggcgtcgtaccagggg

SEQ ID NO: 173724 - DNA, 54 bp, Artificial
  Synthetic oligonucleotide
gcgaatcacacctaaataacggcctaacccaccgatatctgttttaattaacca

SEQ ID NO: 173725 - DNA, 55 bp, Artificial
  Synthetic oligonucleotide
gcgatgtttcgcctcccgcccaaaagacgcaaaatgtcacacacgccccgttgcg

SEQ ID NO: 173726 - DNA, 55 bp, Artificial
  Synthetic oligonucleotide
gcgctccgatggcaattttggcttgatcgagccccaataacgaacaagccgcggc

SEQ ID NO: 173727 - DNA, 55 bp, Artificial
  Synthetic oligonucleotide
ggcggaatgcccacaagcgacttgccttagcacctgcgatttgctaagttgcggc

SEQ ID NO: 173728 - DNA, 55 bp, Artificial
  Synthetic oligonucleotide
ggcgggcatatctattgttatagcgagccggggcaaggcacggtgttcaaatgct

SEQ ID NO: 173729 - DNA, 55 bp, Artificial
  Synthetic oligonucleotide
tcccctggcgacttgtgctaaattgcgctttctgatagcgtgcactccaggaggc

SEQ ID NO: 173730 - DNA, 55 bp, Artificial
  Synthetic oligonucleotide
tgtttgggtttacaagccggagctgggtcaacggcgcaactgtgtcgctctgcgg

SEQ ID NO: 173731 - DNA, 54 bp, Artificial
  Synthetic oligonucleotide
aaaacatggacgagggataaacgtcgtgacttggtttggctaatcaaacgagag

SEQ ID NO: 173732 - DNA, 52 bp, Artificial
  Synthetic oligonucleotide
aagggtccccaaccaaattttgcggtcgccaacaacacactccctattgcgg

SEQ ID NO: 173733 - DNA, 55 bp, Artificial
  Synthetic oligonucleotide
cgagagtagacgttgatccaggtgtagccataagcgccgccatagcttacggtta

SEQ ID NO: 173734 - DNA, 55 bp, Artificial
  Synthetic oligonucleotide
cacgaggttgactcactccgcccgaaagcttcgagcgctatcctcttgttaagta

SEQ ID NO: 173735 - DNA, 55 bp, Artificial
  Synthetic oligonucleotide
caatggccattccactacacgatagaccaggggcgggcatatgtcaaacagattc

SEQ ID NO: 173736 - DNA, 55 bp, Artificial
  Synthetic oligonucleotide
caccgtgcagcagcctcataatgccacagtcaactcacggaggcccgctcccatg

SEQ ID NO: 173737 - DNA, 55 bp, Artificial
  Synthetic oligonucleotide
agagcgatgcgcatcttgaaggtctctcgatccgcccgagcctactccttgggct

SEQ ID NO: 173738 - DNA, 54 bp, Artificial
  Synthetic oligonucleotide
cggaccgcgcacaagcccattcaatcgccgcgcccttgcagacgcgtggcgtgc

SEQ ID NO: 173739 - DNA, 53 bp, Artificial
  Synthetic oligonucleotide
gaaggatagcgctcttgcagccccacgaagtcaaaatcgtcaatcgtcattga

SEQ ID NO: 173740 - DNA, 52 bp, Artificial
  Synthetic oligonucleotide
ggacggcaacaggagaatgacttgaccgacgatcgcctcaaaattgtcactt

SEQ ID NO: 173741 - DNA, 52 bp, Artificial
  Synthetic oligonucleotide
atcgaatagagtaagaagcacagcgttgattctgtccaacgcttaggctgag

SEQ ID NO: 173742 - DNA, 51 bp, Artificial
  Synthetic oligonucleotide
ccgttctctcttgacttgccggtcgacgattgactaacgttgttcatgctc

SEQ ID NO: 173743 - DNA, 51 bp, Artificial
  Synthetic oligonucleotide
tatcgatggacatggttataacatcagccgcgcaaagccacaaggacggct

SEQ ID NO: 173744 - DNA, 55 bp, Artificial
  Synthetic oligonucleotide
cgcataagcgcaaagggctacgattgcccggcattaaggcaatccgtagcatcca

SEQ ID NO: 173745 - DNA, 50 bp, Artificial
  Synthetic oligonucleotide
ctcgcacgaaaacatagagcccgctttgggcgtcgtaccagggggcctgc

SEQ ID NO: 173746 - DNA, 50 bp, Artificial
  Synthetic oligonucleotide
ctgccctggccagtcggtacactgaatgacctcttaacccgccgcggaag

SEQ ID NO: 173747 - DNA, 50 bp, Artificial
  Synthetic oligonucleotide
cttcgttatgcccggacatgccgcgacacctccaacaagcacgcgaaaga

SEQ ID NO: 173748 - DNA, 50 bp, Artificial
  Synthetic oligonucleotide
gaccaccgggagcttaacgccttcattcacgccggcagttcgtcggaata

SEQ ID NO: 173749 - DNA, 50 bp, Artificial
  Synthetic oligonucleotide
gaccgacgatcgttcatcgcgcagtccgccctagtcgattttccgccccg

SEQ ID NO: 173750 - DNA, 50 bp, Artificial
  Synthetic oligonucleotide
gaccggagtgtttccggccttcaccccatacataccggctgggcgtgaaa

SEQ ID NO: 173751 - DNA, 50 bp, Artificial
  Synthetic oligonucleotide
atcataattcctcggccatgggccctcagttcgcccagacctgtcgggac

SEQ ID NO: 173752 - DNA, 50 bp, Artificial
  Synthetic oligonucleotide
agcttctatcatgcccactcctaagccgtaggccgcccgttcgattcggg

SEQ ID NO: 173753 - DNA, 50 bp, Artificial
  Synthetic oligonucleotide
agcgggccgaaacccgatcaggggtaaatgcttaccggcagtcgtcgctt

SEQ ID NO: 173754 - DNA, 50 bp, Artificial
  Synthetic oligonucleotide
acccgaatttcatggtcggaattcatgccggctcctccgggcgttggtcc

SEQ ID NO: 173755 - DNA, 55 bp, Artificial
  Synthetic oligonucleotide
cgtcctttgcgagggtggtttgcgggccacgacgccttgaagtatgagcccgaca

SEQ ID NO: 173756 - DNA, 50 bp, Artificial
  Synthetic oligonucleotide
acatgcgcctgccttggggcaagtcgcctgctcgtggccccaaccttcaa

SEQ ID NO: 173757 - DNA, 50 bp, Artificial
  Synthetic oligonucleotide
aatctgtccacgtcatcggcgctagtgctgtccccgcacatgagacggtg

SEQ ID NO: 173758 - DNA, 50 bp, Artificial
  Synthetic oligonucleotide
aagggtacaataacgccggctcgaccctctcgcgccaacgggccaggccg

SEQ ID NO: 173759 - DNA, 50 bp, Artificial
  Synthetic oligonucleotide
ccccgcacatgagacggtgacggcccagaatccagacatcccccggtttg

SEQ ID NO: 173760 - DNA, 50 bp, Artificial
  Synthetic oligonucleotide
ccgtgtcgcgcttatggttgaatcaagccgcgtcccgccttagcgagcct

SEQ ID NO: 173761 - DNA, 50 bp, Artificial
  Synthetic oligonucleotide
cctgaaaccgccaaccggggaggcgtccggtgctcttcaaccaaaagttt

SEQ ID NO: 173762 - DNA, 50 bp, Artificial
  Synthetic oligonucleotide
cactcaggccgtcccggggcataattccgcgcaacacgccaacggagtca

SEQ ID NO: 173763 - DNA, 50 bp, Artificial
  Synthetic oligonucleotide
cgataagcttcaagcttctctcgcagcgtgggtttcggggcccctacggc

SEQ ID NO: 173764 - DNA, 50 bp, Artificial
  Synthetic oligonucleotide
cgatggagaaacgatggatcagatctcgcaaaccggacgggcgggcgtcc

SEQ ID NO: 173765 - DNA, 50 bp, Artificial
  Synthetic oligonucleotide
cgatgtgttccgggggtgcgaaaagatggcgcgttatgtgcacggtggat

SEQ ID NO: 173766 - DNA, 55 bp, Artificial
  Synthetic oligonucleotide
cgttctaccatcggcgcgcgaacaatgtatacttgctcccatcggacaaacgacc

SEQ ID NO: 173767 - DNA, 50 bp, Artificial
  Synthetic oligonucleotide
cgcagtaggtcgcgcaatcgctcacaaaccgtcgcccgaggcggttgtta

SEQ ID NO: 173768 - DNA, 50 bp, Artificial
  Synthetic oligonucleotide
cacctgctcggtgcacatgatcacgaggcgggatttgcgttcgtcgggta

SEQ ID NO: 173769 - DNA, 50 bp, Artificial
  Synthetic oligonucleotide
cgccaagattatgtcaaacggaagtacgctaaacccattcccacccgctg

SEQ ID NO: 173770 - DNA, 50 bp, Artificial
  Synthetic oligonucleotide
cgcgcagtccgccctagtcgattttccgccccggcccaatatcacccgcc

SEQ ID NO: 173771 - DNA, 50 bp, Artificial
  Synthetic oligonucleotide
cgcggcttagtcggcaatttcgaagcgtgtcagcgagggcccgcttgagt

SEQ ID NO: 173772 - DNA, 50 bp, Artificial
  Synthetic oligonucleotide
cggcagccccactcttttgtcaaggccgcttgcaagggcgattatccggt

SEQ ID NO: 173773 - DNA, 50 bp, Artificial
  Synthetic oligonucleotide
cggcgctagtgctgtccccgcacatgagacggtgacggcccagaatccag

SEQ ID NO: 173774 - DNA, 50 bp, Artificial
  Synthetic oligonucleotide
atgcggcgctccgtgaggggttgctttctcgcctgccccacagtatgcac

SEQ ID NO: 173775 - DNA, 55 bp, Artificial
  Synthetic oligonucleotide
ctcctcgggccaacggcgaaaggcgctgtattgccagcgcgtgacgttgatcacc

SEQ ID NO: 173776 - DNA, 55 bp, Artificial
  Synthetic oligonucleotide
ctggcccaatgcacttgcagctatggctcttgcgacaaaacagggttatgctgtc

SEQ ID NO: 173777 - DNA, 55 bp, Artificial
  Synthetic oligonucleotide
gactgattacgatcaaaccttgcgcacgtaatgcttggcgaacaagccgctgggc

SEQ ID NO: 173778 - DNA, 55 bp, Artificial
  Synthetic oligonucleotide
gatcggggccataatatatagtcgcattttatttcgcaagataatttacctgggc

SEQ ID NO: 173779 - DNA, 60 bp, Artificial
  Synthetic oligonucleotide
gatggccatgactatttttacatacgccagagtatcaactctcgatcagcatacggattt

SEQ ID NO: 173780 - DNA, 57 bp, Artificial
  Synthetic oligonucleotide
ccgttgctccgctgcaatacaccacccagcaggttattcccgggatggaaaacaatc

SEQ ID NO: 173781 - DNA, 50 bp, Artificial
  Synthetic oligonucleotide
atatgggggctgtggcatctaccggccttcctcctgagcggaacccagca

SEQ ID NO: 173782 - DNA, 50 bp, Artificial
  Synthetic oligonucleotide
atccgttcctgaggggaccgggactgccagaacgcaaaatcggtgggctg

SEQ ID NO: 173783 - DNA, 50 bp, Artificial
  Synthetic oligonucleotide
gccagggcgataaattagtcgtatggaaacttgatcgattagcccggaat

SEQ ID NO: 173784 - DNA, 50 bp, Artificial
  Synthetic oligonucleotide
tccattccatcatgcggtcgttaaggtaatgcagggtgtaatccggggag

SEQ ID NO: 173785 - DNA, 50 bp, Artificial
  Synthetic oligonucleotide
tggctgcacctgtttattgtaagactgattccatcgattgcaaccgagcc

SEQ ID NO: 173786 - DNA, 50 bp, Artificial
  Synthetic oligonucleotide
ttttccgtctaaggtggtaggtgagcaacgcaaggcttaaagcggaagat

SEQ ID NO: 173787 - DNA, 50 bp, Artificial
  Synthetic oligonucleotide
aacgcgttggatgtactcggggttgcctatggcctgggccgtgatggaat

SEQ ID NO: 173788 - DNA, 50 bp, Artificial
  Synthetic oligonucleotide
aacgctgtcagcccccaaagtaacgccgtcgctgatgttggggtccccta

SEQ ID NO: 173789 - DNA, 50 bp, Artificial
  Synthetic oligonucleotide
aacggaccacggcaaggatctttcctgcgttttggaagcggtggctgcaa

SEQ ID NO: 173790 - DNA, 50 bp, Artificial
  Synthetic oligonucleotide
aacgtggaaacctcggaggacgcaggattcagcagcccctatcgcatggc

SEQ ID NO: 173791 - DNA, 58 bp, Artificial
  Synthetic oligonucleotide
ctcggctttccagtttgacacgcaagggctctgatatgtcgcattaccgcaacctgct

SEQ ID NO: 173792 - DNA, 50 bp, Artificial
  Synthetic oligonucleotide
aactgcttgactgcactggcgccgtcagcttcttccgggctctatgggac

SEQ ID NO: 173793 - DNA, 50 bp, Artificial
  Synthetic oligonucleotide
aactggaggaaaccggccccaacacaggcgtcttccgctccagggttccc

SEQ ID NO: 173794 - DNA, 50 bp, Artificial
  Synthetic oligonucleotide
aactggcgctgcactccctggaaaattttccctatcccaccctggccgcg

SEQ ID NO: 173795 - DNA, 50 bp, Artificial
  Synthetic oligonucleotide
aacttcggcaaccacacctgcgctgcctcccaagccatcggccacaccca

SEQ ID NO: 173796 - DNA, 50 bp, Artificial
  Synthetic oligonucleotide
aagacgacgagcctgcgtttggttacggccacccgtcagcctatgagtga

SEQ ID NO: 173797 - DNA, 50 bp, Artificial
  Synthetic oligonucleotide
aagacgcccccttcaggaccgcccgtattctcaacagcgtgttggcgtaa

SEQ ID NO: 173798 - DNA, 50 bp, Artificial
  Synthetic oligonucleotide
aagccgtgagcgccgtaggcatagccctgaatgcgcagggagttgtacga

SEQ ID NO: 173799 - DNA, 50 bp, Artificial
  Synthetic oligonucleotide
aaggcgctccccttgcgaacagcccttgtgaggccgctggtgactatgac

SEQ ID NO: 173800 - DNA, 50 bp, Artificial
  Synthetic oligonucleotide
aagggcgtttctgccccgcaggcgaagggtgacagcggttaagacatcct

SEQ ID NO: 173801 - DNA, 50 bp, Artificial
  Synthetic oligonucleotide
aaggggtccatacccggtgccccaactgtaaccgcgtgctgattttccgc

SEQ ID NO: 173802 - DNA, 58 bp, Artificial
  Synthetic oligonucleotide
atgttggattgtcggcctgatggttgtatggtgggggcgcctatctcttccgattgtg

SEQ ID NO: 173803 - DNA, 50 bp, Artificial
  Synthetic oligonucleotide
aaggtgccaagttccgacgtttccgacacgtgggtcccgatgcagggaca

SEQ ID NO: 173804 - DNA, 50 bp, Artificial
  Synthetic oligonucleotide
aaggtttctgacggggcgaccctgaaggtcgtggaattcattcccccgga

SEQ ID NO: 173805 - DNA, 50 bp, Artificial
  Synthetic oligonucleotide
aagttccgacgtttccgacacgtgggtcccgatgcagggacaggcatcat

SEQ ID NO: 173806 - DNA, 50 bp, Artificial
  Synthetic oligonucleotide
aatacgccgcgcatgtgccttcagaggacaccatgcaagggcccaaaggg

SEQ ID NO: 173807 - DNA, 50 bp, Artificial
  Synthetic oligonucleotide
aatatggcgccgctcttacgcgaccccaccccctgcgcttacggaaaatg

SEQ ID NO: 173808 - DNA, 50 bp, Artificial
  Synthetic oligonucleotide
aatcacgacttgggcggtttgtaccgggggccggtcaattgcttggggga

SEQ ID NO: 173809 - DNA, 50 bp, Artificial
  Synthetic oligonucleotide
aatccttgagtgacagctcgttgccgtgggttcgcagctgggcaaaggct

SEQ ID NO: 173810 - DNA, 50 bp, Artificial
  Synthetic oligonucleotide
aatcgacgcttctgcagcaacccttggcccggtgtcagcctttgagccga

SEQ ID NO: 173811 - DNA, 50 bp, Artificial
  Synthetic oligonucleotide
aatcggcccccgtggatgaagcgcccatgaaatcgatccccaggtccatc

SEQ ID NO: 173812 - DNA, 50 bp, Artificial
  Synthetic oligonucleotide
aatctggctggaaggccatgccacacccgagcggatgacagacggcggaa

SEQ ID NO: 173813 - DNA, 55 bp, Artificial
  Synthetic oligonucleotide
gtgtttcataaccgcgaccggttggccaattgtctcgtttaacctcgtgtgtgaa

SEQ ID NO: 173814 - DNA, 50 bp, Artificial
  Synthetic oligonucleotide
aaaagccgggttggtaagcgctcccgaagattggccccatagctccgcca

SEQ ID NO: 173815 - DNA, 50 bp, Artificial
  Synthetic oligonucleotide
aaacagggacagcgtcagtgtcctgttggccgcgtcccattgccccaata

SEQ ID NO: 173816 - DNA, 50 bp, Artificial
  Synthetic oligonucleotide
aaacagtccactgacctggcctatattccccgggcagacaaagccggcgc

SEQ ID NO: 173817 - DNA, 50 bp, Artificial
  Synthetic oligonucleotide
aaacattcgggttaaagccgccagtggcccaatgtctgccacggggatgg

SEQ ID NO: 173818 - DNA, 50 bp, Artificial
  Synthetic oligonucleotide
aaaccaagtccgaacgcacaaacccaaggccggtccgaacgcatgggacg

SEQ ID NO: 173819 - DNA, 50 bp, Artificial
  Synthetic oligonucleotide
aaacccccaggtgaatttgtctaagccctccaggcaccccacgccatgca

SEQ ID NO: 173820 - DNA, 50 bp, Artificial
  Synthetic oligonucleotide
aaaccggtgacccccgggccaatgtcctttcggatatgtcccgtcgcctg

SEQ ID NO: 173821 - DNA, 50 bp, Artificial
  Synthetic oligonucleotide
aaaccgtgaggccacggtgacacgaaaggacggaagcctcggacaccttc

SEQ ID NO: 173822 - DNA, 50 bp, Artificial
  Synthetic oligonucleotide
aaacctttgagggccggggccccttttatgtgttctccagtgccgcagtg

SEQ ID NO: 173823 - DNA, 50 bp, Artificial
  Synthetic oligonucleotide
aaacggctcttgtccaacgtgcccttactcaccagaccgcacgcgggatc

SEQ ID NO: 173824 - DNA, 55 bp, Artificial
  Synthetic oligonucleotide
cacaatgcgttacatagcggacctgcatattcattcagcctactcacgggccact

SEQ ID NO: 173825 - DNA, 50 bp, Artificial
  Synthetic oligonucleotide
aaagacccccggcacgcaaacgccacgatcctggactaccggcaggtcag

SEQ ID NO: 173826 - DNA, 50 bp, Artificial
  Synthetic oligonucleotide
aaagagaccctctcccacaccgtggtcaattacgtggcccggacccagga

SEQ ID NO: 173827 - DNA, 50 bp, Artificial
  Synthetic oligonucleotide
aaagggacctgccttcactttgaggtgaggcaccatggacgaccggtgga

SEQ ID NO: 173828 - DNA, 50 bp, Artificial
  Synthetic oligonucleotide
aaaggggaattgccgcaaccgtgggacccgtgggtgaaccctatgtccag

SEQ ID NO: 173829 - DNA, 50 bp, Artificial
  Synthetic oligonucleotide
aaatacgcgcaatagcccgccactcgcaccacgattcccggatgggcgct

SEQ ID NO: 173830 - DNA, 50 bp, Artificial
  Synthetic oligonucleotide
aaattgggcggttaagccgaactccgattccaaggcccggagcatggcga

SEQ ID NO: 173831 - DNA, 50 bp, Artificial
  Synthetic oligonucleotide
aacaaagggggatctgtcgatccctgagcaggccctccatatccggggcc

SEQ ID NO: 173832 - DNA, 50 bp, Artificial
  Synthetic oligonucleotide
aacaccggccgattcccctgtgatggtacccgatgcccgttctaaaccgc

SEQ ID NO: 173833 - DNA, 50 bp, Artificial
  Synthetic oligonucleotide
aacacttcggcgtacacgcccccaaggccgcacatgacgcaagggccgaa

SEQ ID NO: 173834 - DNA, 50 bp, Artificial
  Synthetic oligonucleotide
aacagggctctcggatatggggtatgcgacacttagctggaccccgggcc

SEQ ID NO: 173835 - DNA, 55 bp, Artificial
  Synthetic oligonucleotide
catacgccagagtatcaactctcgatcagcatacggatttacaaacagcagagct

SEQ ID NO: 173836 - DNA, 50 bp, Artificial
  Synthetic oligonucleotide
aacatccatgccaagggggttcgccaggcagttgctcacctggctgtctc

SEQ ID NO: 173837 - DNA, 50 bp, Artificial
  Synthetic oligonucleotide
aacccacggacgaagaagccagggtggcccaatcctacgtaaacgccctc

SEQ ID NO: 173838 - DNA, 50 bp, Artificial
  Synthetic oligonucleotide
aaccccaggcagaccattggcacctccattggcgaacccatggtgatcca

SEQ ID NO: 173839 - DNA, 50 bp, Artificial
  Synthetic oligonucleotide
aacccccggcttaagcgccgttgccacaacagcggacaaccattatgtgg

SEQ ID NO: 173840 - DNA, 50 bp, Artificial
  Synthetic oligonucleotide
aaccccgtgtaccgccaactcctgggactgtgtcctaccctggccgttac

SEQ ID NO: 173841 - DNA, 50 bp, Artificial
  Synthetic oligonucleotide
accgcacctacggcctatcgggccatccgccgggaggaccctgacgccag

SEQ ID NO: 173842 - DNA, 50 bp, Artificial
  Synthetic oligonucleotide
accgggcaccgatgtgaccgcccacactggaactgcccatgagtccagac

SEQ ID NO: 173843 - DNA, 50 bp, Artificial
  Synthetic oligonucleotide
accggggccttggggcagaaccacccgtgttcggccatgttcccatggta

SEQ ID NO: 173844 - DNA, 50 bp, Artificial
  Synthetic oligonucleotide
accgtgcatcgcttgcaccgtgttcgttgcccgtgactgcttggggaaca

SEQ ID NO: 173845 - DNA, 50 bp, Artificial
  Synthetic oligonucleotide
accgttcggatgccgcgttgaggcgcaacacaaccccattgccgtcacag

SEQ ID NO: 173846 - DNA, 55 bp, Artificial
  Synthetic oligonucleotide
gagccaaagtcctgcgcaatttcgggtcactttatttcatctgcggtccttagcg

SEQ ID NO: 173847 - DNA, 50 bp, Artificial
  Synthetic oligonucleotide
accgttgccatttaacccgttcaagccaacacccgtccccaccggcctac

SEQ ID NO: 173848 - DNA, 50 bp, Artificial
  Synthetic oligonucleotide
acctcgtgtccaccgttgccatttaacccgttcaggccaacacccgtccc

SEQ ID NO: 173849 - DNA, 50 bp, Artificial
  Synthetic oligonucleotide
acctttgccccagggttcgtgcgaatgatgctgcgtatggcctggcggga

SEQ ID NO: 173850 - DNA, 50 bp, Artificial
  Synthetic oligonucleotide
acgccgtcgcccctgactcgggcaccataaccgccattgcctcgtacacg

SEQ ID NO: 173851 - DNA, 50 bp, Artificial
  Synthetic oligonucleotide
acggggtaaaggcaggctcagtgggggttccggtgttttcgtaaagccgc

SEQ ID NO: 173852 - DNA, 50 bp, Artificial
  Synthetic oligonucleotide
acttcggacggattgacccgttcaagcgtccagaggcgccgtctctgcca

SEQ ID NO: 173853 - DNA, 50 bp, Artificial
  Synthetic oligonucleotide
agaacttggtggcagcccttatgtgtgtggggaccccattggtcccgaga

SEQ ID NO: 173854 - DNA, 50 bp, Artificial
  Synthetic oligonucleotide
agaccccatacccccggaggctctgacccaccagccattcgggtgacatc

SEQ ID NO: 173855 - DNA, 50 bp, Artificial
  Synthetic oligonucleotide
agacccccacccgttgttccgggaattcataaaggcggccctggcttata

SEQ ID NO: 173856 - DNA, 50 bp, Artificial
  Synthetic oligonucleotide
agaggctccggttgggaatgttgctatggtccctgcgggtcttcgcccct

SEQ ID NO: 173857 - DNA, 55 bp, Artificial
  Synthetic oligonucleotide
aatatcattacagtgcccttggacaggaattgaccggccacttctgggtctacgg

SEQ ID NO: 173858 - DNA, 50 bp, Artificial
  Synthetic oligonucleotide
agagggttgcagcgggtgtcactggaaccccattcggggtccggtccacg

SEQ ID NO: 173859 - DNA, 50 bp, Artificial
  Synthetic oligonucleotide
agatgcccgttctgccccggtcaagacccgaccttgttgcacccgtacca

SEQ ID NO: 173860 - DNA, 50 bp, Artificial
  Synthetic oligonucleotide
agccaaggagtcccttctgggccccattgacacccaacgccttgaacggt

SEQ ID NO: 173861 - DNA, 50 bp, Artificial
  Synthetic oligonucleotide
agccgccaatcgcggggtttctgctttgaccgaaacctgggcccgcatgg

SEQ ID NO: 173862 - DNA, 50 bp, Artificial
  Synthetic oligonucleotide
agccgccttttccgatccagtggggactttacggggtggggctggttgtc

SEQ ID NO: 173863 - DNA, 50 bp, Artificial
  Synthetic oligonucleotide
agccttgtacggcgaacggatgacctggtgccccggacgggctttcttat

SEQ ID NO: 173864 - DNA, 50 bp, Artificial
  Synthetic oligonucleotide
agcgacccggaaaatattcccctccaccagcgcccctccataagcatccg

SEQ ID NO: 173865 - DNA, 50 bp, Artificial
  Synthetic oligonucleotide
agcggaaactggaatgtccccgaacagttggttgtccgcacgcccaaagg

SEQ ID NO: 173866 - DNA, 50 bp, Artificial
  Synthetic oligonucleotide
aggacgggtacggcgaccccaagtaccggccctctccgctgctcaagtcc

SEQ ID NO: 173867 - DNA, 50 bp, Artificial
  Synthetic oligonucleotide
aatctggggcagcacttctttgtagtcgcccgccactccgtagtccgcaa

SEQ ID NO: 173868 - DNA, 55 bp, Artificial
  Synthetic oligonucleotide
ccaccataatcagacgacgtctaaaatcggttacgcctatatgtagcaaggcaca

SEQ ID NO: 173869 - DNA, 50 bp, Artificial
  Synthetic oligonucleotide
aatgcgacgcctcgggcgctcccctccgggacgaaaccctgacccatgaa

SEQ ID NO: 173870 - DNA, 50 bp, Artificial
  Synthetic oligonucleotide
aatggcaggcaccccggtcagatgtggcataggcaagccccattcccttg

SEQ ID NO: 173871 - DNA, 50 bp, Artificial
  Synthetic oligonucleotide
aattgacaatcatggggtgggcaccattcaccgctgcaataccgccgccg

SEQ ID NO: 173872 - DNA, 50 bp, Artificial
  Synthetic oligonucleotide
acaaacacatccccgggcttgtcctggggctcagtgggggcgtcgccttt

SEQ ID NO: 173873 - DNA, 50 bp, Artificial
  Synthetic oligonucleotide
acaagcgcgcctcccgtagcgtaatgccgcacggacgaatccgcacgccc

SEQ ID NO: 173874 - DNA, 50 bp, Artificial
  Synthetic oligonucleotide
acaatcgcggccatacacgacggggttcggccctttgtcacagcggaagc

SEQ ID NO: 173875 - DNA, 50 bp, Artificial
  Synthetic oligonucleotide
acacaccaggcccaaagggctggaaatcccggtcttcggacttgaggcca

SEQ ID NO: 173876 - DNA, 50 bp, Artificial
  Synthetic oligonucleotide
acagggccgtccgattcaaggtggatccccagcgcctggaagtaagcgtg

SEQ ID NO: 173877 - DNA, 50 bp, Artificial
  Synthetic oligonucleotide
acaggggcgcctattcattcacgcccgcgcctgtttggcgaatcgcgttt

SEQ ID NO: 173878 - DNA, 50 bp, Artificial
  Synthetic oligonucleotide
acataggtgcccacgtggcgaagggaggcaaaggtgtcgtacagcgcctt

SEQ ID NO: 173879 - DNA, 55 bp, Artificial
  Synthetic oligonucleotide
atcgctgcacgcatatagggcacagaaggcttgatcccgtaccggggcaaaactg

SEQ ID NO: 173880 - DNA, 50 bp, Artificial
  Synthetic oligonucleotide
acatgcgaaaactcgttgtcccggcccaggcaaaggggtgtgtggacctt

SEQ ID NO: 173881 - DNA, 50 bp, Artificial
  Synthetic oligonucleotide
accacacctgcgctgcctcccaagccatcggccacacccattctgatatc

SEQ ID NO: 173882 - DNA, 50 bp, Artificial
  Synthetic oligonucleotide
accaccgggtcctccgtgttgtccgacattgaaggcgtgtccaaggggct

SEQ ID NO: 173883 - DNA, 50 bp, Artificial
  Synthetic oligonucleotide
accacgatcaactcgcccgttgcactcccgtccgttacacggtccaggct

SEQ ID NO: 173884 - DNA, 50 bp, Artificial
  Synthetic oligonucleotide
accacgcccaacaggaaatctcggacgctcaagtgatttccgcagcggcg

SEQ ID NO: 173885 - DNA, 50 bp, Artificial
  Synthetic oligonucleotide
accacggatgcaaaaaccccggcaaccatggccccagcggttcgtatggg

SEQ ID NO: 173886 - DNA, 50 bp, Artificial
  Synthetic oligonucleotide
accatgagcccgtcttcgggagcgtccccttgctccgcaataaagcgcgc

SEQ ID NO: 173887 - DNA, 50 bp, Artificial
  Synthetic oligonucleotide
accatggtgtcgcaggaatagccgcagagggtctctacgccgcccacaag

SEQ ID NO: 173888 - DNA, 50 bp, Artificial
  Synthetic oligonucleotide
acccaacaagataatgagcggacctggatatcatgcttgttatccgaatc

SEQ ID NO: 173889 - DNA, 50 bp, Artificial
  Synthetic oligonucleotide
acccccgggccaatgtcctttcggatatgtcccgtcgcctgggtgatttg

SEQ ID NO: 173890 - DNA, 57 bp, Artificial
  Synthetic oligonucleotide
cacaaggctgaagaatatagccgcaagtatgaccgaaaggttgccgggggctcggtc

SEQ ID NO: 173891 - DNA, 55 bp, Artificial
  Synthetic oligonucleotide
gagattcgtcaaccctatgccagttgcatgaatttgtcgtaatatgtttatcgtt

SEQ ID NO: 173892 - DNA, 50 bp, Artificial
  Synthetic oligonucleotide
acccggtcccgctcaacggaagaggtcacaatacccgtcagggtgacacg

SEQ ID NO: 173893 - DNA, 50 bp, Artificial
  Synthetic oligonucleotide
accgaccgtgaccccacaccggtctcgtcccttaaaagggctgtctcagc

SEQ ID NO: 173894 - DNA, 50 bp, Artificial
  Synthetic oligonucleotide
accgatggcttgtggatggcggccttgtggatcctatccccgttggcatc

SEQ ID NO: 173895 - DNA, 55 bp, Artificial
  Synthetic oligonucleotide
gagattccgcgggagaacgatttcgagtcccaatccacgtcttattactatatgg

SEQ ID NO: 173896 - DNA, 55 bp, Artificial
  Synthetic oligonucleotide
cccaacataagtgcgcctgactcgattcatgacagtatggcgaaacatcaggctt

SEQ ID NO: 173897 - DNA, 55 bp, Artificial
  Synthetic oligonucleotide
cttttcgtttctgatcccggtagtgggcgtggggtgctttgcctacatcatggca

SEQ ID NO: 173898 - DNA, 55 bp, Artificial
  Synthetic oligonucleotide
cttcaatggtaaaactgccctctccgacaaagaaagggatggcaatccttgggcc

SEQ ID NO: 173899 - DNA, 54 bp, Artificial
  Synthetic oligonucleotide
ccccagcaggtctgaccccgaccccagtttcggagggacagaattcagtggttc

SEQ ID NO: 173900 - DNA, 50 bp, Artificial
  Synthetic oligonucleotide
ctccaccggtgaaccctcctttatcgcccgggtgtttgaaacttacggac

SEQ ID NO: 173901 - DNA, 55 bp, Artificial
  Synthetic oligonucleotide
ccgagacaacctttgcaacatcccggaacttgttacagccgaagtggcacccgga

SEQ ID NO: 173902 - DNA, 53 bp, Artificial
  Synthetic oligonucleotide
cggtggagtccgaaccgtccagtctgaccgacccgtacacaaagggcggctcg

SEQ ID NO: 173903 - DNA, 55 bp, Artificial
  Synthetic oligonucleotide
cggtaggcagtccgtaatgatgggttcccaccgcaaacaaagaggcgttgctggt

SEQ ID NO: 173904 - DNA, 59 bp, Artificial
  Synthetic oligonucleotide
gatcgaaccccgtttgatgctatctcaggtccatatagtttaacgtcagagtcacactt

SEQ ID NO: 173905 - DNA, 54 bp, Artificial
  Synthetic oligonucleotide
cggggccttttccgatctcaatgaaattgtctcaagacgggtaacccaccacgc

SEQ ID NO: 173906 - DNA, 55 bp, Artificial
  Synthetic oligonucleotide
cggggacacgataagctactcggatgaccttggcgccacatggacctactccccg

SEQ ID NO: 173907 - DNA, 55 bp, Artificial
  Synthetic oligonucleotide
cggatgcaatatagaatctccgaacgaggcgggagattcgcccctgctccaagcc

SEQ ID NO: 173908 - DNA, 55 bp, Artificial
  Synthetic oligonucleotide
cgcttcgtacaacaattcaccgtcggtactgaatatatacaccgtggcggtttca

SEQ ID NO: 173909 - DNA, 55 bp, Artificial
  Synthetic oligonucleotide
cgcataaaaggacgattggcaggcctgcagggcgttgcacatggccaggagcacg

SEQ ID NO: 173910 - DNA, 55 bp, Artificial
  Synthetic oligonucleotide
cgcaatatcaacgctcatatcctctcttttgtaccgccaaagccgcaacgtgtca

SEQ ID NO: 173911 - DNA, 55 bp, Artificial
  Synthetic oligonucleotide
cgaaaagggtctttccgtagtgcatcagaatgtgccagtagcgatcccgggaaag

SEQ ID NO: 173912 - DNA, 54 bp, Artificial
  Synthetic oligonucleotide
ccttaccgtcaagcgtcctccccaggttagcctgaacgtatcacaggcggttat

SEQ ID NO: 173913 - DNA, 55 bp, Artificial
  Synthetic oligonucleotide
cctgattgactggcctaaagactcggtttaccgcactcgtcaggtggatcttgcc

SEQ ID NO: 173914 - DNA, 49 bp, Artificial
  Synthetic oligonucleotide
cctcgtaaaaccggggtaaaatcgttgggaagcacgggatattattttc

SEQ ID NO: 173915 - DNA, 60 bp, Artificial
  Synthetic oligonucleotide
caccacgataactgaccgggatgttttaaacctgctgctcgatatgattggccagggcga

SEQ ID NO: 173916 - DNA, 53 bp, Artificial
  Synthetic oligonucleotide
ccggaaacgatctccggatgatggttcaaacccgggtcggacgcaaagtcgta

SEQ ID NO: 173917 - DNA, 55 bp, Artificial
  Synthetic oligonucleotide
atgccctggccccggcctttctcaaccacgcccacaaggtggccgggcatgttct

SEQ ID NO: 173918 - DNA, 53 bp, Artificial
  Synthetic oligonucleotide
gggtaaatagatgttcacgggtataacgggaaccggccatggcagttcctacc

SEQ ID NO: 173919 - DNA, 49 bp, Artificial
  Synthetic oligonucleotide
ggttgtttccacccgggttttaacggccactccttcaactgttccaggg

SEQ ID NO: 173920 - DNA, 55 bp, Artificial
  Synthetic oligonucleotide
gtcactccgggcaatgacgggcacgaaggcaggtcaattttacactgggtccccg

SEQ ID NO: 173921 - DNA, 55 bp, Artificial
  Synthetic oligonucleotide
gtgccctcggtttaatctggaaatcaagccaccccggcaataggtcttaactgca

SEQ ID NO: 173922 - DNA, 55 bp, Artificial
  Synthetic oligonucleotide
tagaccgttgcatcgacaatgacagtaaggtgactggatcttttcagaatccgtg

SEQ ID NO: 173923 - DNA, 55 bp, Artificial
  Synthetic oligonucleotide
agggcaatcacccgggataaatcaggctgtttcttggcgtccattcccgtgtggc

SEQ ID NO: 173924 - DNA, 55 bp, Artificial
  Synthetic oligonucleotide
tccattgaagtcggtgaatccgaaaccgtgcctgatgtaatggctatagaggtgg

SEQ ID NO: 173925 - DNA, 51 bp, Artificial
  Synthetic oligonucleotide
atatccctggggccgttatacacggggccgtccggagttttaaaggcaagc

SEQ ID NO: 173926 - DNA, 51 bp, Artificial
  Synthetic oligonucleotide
aaggatgtggttacgaagggtaaatagatgttcacgggtataacgggaacc

SEQ ID NO: 173927 - DNA, 55 bp, Artificial
  Synthetic oligonucleotide
tctcacctggtctgcctggtgccccggtaagcgatttcgacgcacgcacttccac

SEQ ID NO: 173928 - DNA, 52 bp, Artificial
  Synthetic oligonucleotide
aaacggaaactaacttttaaggatacaccatggcacgcgttgtccctttgcg

SEQ ID NO: 173929 - DNA, 55 bp, Artificial
  Synthetic oligonucleotide
tctttaacccatagcataaggcaccaaaagaccgatcaaagtttaacagagaccc

SEQ ID NO: 173930 - DNA, 55 bp, Artificial
  Synthetic oligonucleotide
tggatgacccagcctttgtactgctcccaacgccttcgcacggcgaaaggcccct

SEQ ID NO: 173931 - DNA, 55 bp, Artificial
  Synthetic oligonucleotide
agcacctgctgaccgggaggcgccgggtttcacgtcaagatctcctggctctgct

SEQ ID NO: 173932 - DNA, 52 bp, Artificial
  Synthetic oligonucleotide
tggggcgtatagggtgtacggaaccgcaaactggggtgaggccttaaatcgg

SEQ ID NO: 173933 - DNA, 55 bp, Artificial
  Synthetic oligonucleotide
tgtgtccttgaggataggctccaactcgggaagcgcataagtgacggggatgtcc

SEQ ID NO: 173934 - DNA, 55 bp, Artificial
  Synthetic oligonucleotide
tttgatcactaaggcagacctcctggagatatttcccatccagcctgataccggc

SEQ ID NO: 173935 - DNA, 55 bp, Artificial
  Synthetic oligonucleotide
ataaaggccatgtggtaaaccgtgtgcacccctttcaagaccttgtccagattgg

SEQ ID NO: 173936 - DNA, 55 bp, Artificial
  Synthetic oligonucleotide
agccttaagaatcttttgatcgcctatgtgggcagtcttgacacaccggcagatg

SEQ ID NO: 173937 - DNA, 60 bp, Artificial
  Synthetic oligonucleotide
gctaataaaacatcgcaatttgccatagctcggtgcatgtctgctactggatgtcctgct

SEQ ID NO: 173938 - DNA, 55 bp, Artificial
  Synthetic oligonucleotide
gcccattggtctttgactgagtcgtctggctgtacattggtttccatgaatcgtc

SEQ ID NO: 173939 - DNA, 55 bp, Artificial
  Synthetic oligonucleotide
gcgcctcaggcatgggcccaagtatagaattgagccccgttcgcataaatgcggt

SEQ ID NO: 173940 - DNA, 55 bp, Artificial
  Synthetic oligonucleotide
aagctcatgcaccgggataaactcatctcccttgggcggttgagtgccagtgtgg

SEQ ID NO: 173941 - DNA, 54 bp, Artificial
  Synthetic oligonucleotide
gcgtaacttttgatagcccgggcgtcctggacattacggagcgtaaacactccg

SEQ ID NO: 173942 - DNA, 55 bp, Artificial
  Synthetic oligonucleotide
gctatctcaggtccatatagtttaacgtcagagtcacactttcctatacgcgacc

SEQ ID NO: 173943 - DNA, 54 bp, Artificial
  Synthetic oligonucleotide
gctcctttccggtgagtttacaaacaagagtttccaggtgggagcatccacccg

SEQ ID NO: 173944 - DNA, 55 bp, Artificial
  Synthetic oligonucleotide
atccaccgccacgtcttctccgaccatccggttcatcatttgcctgaagccgcga

SEQ ID NO: 173945 - DNA, 55 bp, Artificial
  Synthetic oligonucleotide
ggcaatttgtacaaccgtataatacgctcatccctcatgtcaagggcttttcgac

SEQ ID NO: 173946 - DNA, 55 bp, Artificial
  Synthetic oligonucleotide
ggcgacttgtaggtcggattacgcggagccaggatagaggtccaaacaagacggg

SEQ ID NO: 173947 - DNA, 55 bp, Artificial
  Synthetic oligonucleotide
ggcgccttgcaaccaaaaggctgcgacaaaattgaggccgcctgggacacagggg

SEQ ID NO: 173948 - DNA, 56 bp, Artificial
  Synthetic oligonucleotide
gaccaattttaccgttgctccgctgcaatacaccacccagcaggttattcccggga

SEQ ID NO: 173949 - DNA, 55 bp, Artificial
  Synthetic oligonucleotide
ggctatgtccgcagagcggcccgtggtgtataccaatgaccggcaggcgtccaga

SEQ ID NO: 173950 - DNA, 54 bp, Artificial
  Synthetic oligonucleotide
atatggaggtcaccgcttttatgggcgtccctcacttcgggcggatagacccgg

SEQ ID NO: 173951 - DNA, 54 bp, Artificial
  Synthetic oligonucleotide
tattgcacagatagatcagataatggggggaataccatttgaggacgccgttgc

SEQ ID NO: 173952 - DNA, 54 bp, Artificial
  Synthetic oligonucleotide
aaatgtctgtactgagaaaagcgctacaacccacagcgctacgcatattaccga

SEQ ID NO: 173953 - DNA, 54 bp, Artificial
  Synthetic oligonucleotide
ggcgacaatagtccggcggagacgtctgacacgataatatcatttggagagaag

SEQ ID NO: 173954 - DNA, 54 bp, Artificial
  Synthetic oligonucleotide
tcgccaggattgaccctaaaggcgtccgacatttccggtttaagcacttgcggc

SEQ ID NO: 173955 - DNA, 54 bp, Artificial
  Synthetic oligonucleotide
ctgcggacgggtgaggtcatggtccgtcccttggctgaccgttgacctttgatg

SEQ ID NO: 173956 - DNA, 54 bp, Artificial
  Synthetic oligonucleotide
tttgactacgaactgtaagggttaaacgccacaggagaccgcatgcgacttttc

SEQ ID NO: 173957 - DNA, 54 bp, Artificial
  Synthetic oligonucleotide
aattcgatcgaagtgcgtatggctaacgcatattttccctgacaacagagacct

SEQ ID NO: 173958 - DNA, 53 bp, Artificial
  Synthetic oligonucleotide
cccctccatagtggacggaaccagcctccaggcaaccatgcttatcaatatag

SEQ ID NO: 173959 - DNA, 59 bp, Artificial
  Synthetic oligonucleotide
tctgtcagaccaattttaccgttgctccgctgcaatacaccacccagcaggttattccc

SEQ ID NO: 173960 - DNA, 53 bp, Artificial
  Synthetic oligonucleotide
gagcaatacacttccgataccccggtagagttcgctgcccgaacccgttgcaa

SEQ ID NO: 173961 - DNA, 53 bp, Artificial
  Synthetic oligonucleotide
ggtccgcaagatattcgtgattggtccggcctgcttgatagtcggacaaacga

SEQ ID NO: 173962 - DNA, 51 bp, Artificial
  Synthetic oligonucleotide
agtcccaggttgtttaaggcaaggtcggagtccggtttatacgtaagcgcc

SEQ ID NO: 173963 - DNA, 52 bp, Artificial
  Synthetic oligonucleotide
taccgcttgtttttctgacggtactgcttccagtaatcggggttattgtcgg

SEQ ID NO: 173964 - DNA, 52 bp, Artificial
  Synthetic oligonucleotide
gtcacactttcctatacgcgaccaacgcctgagaatagtgtgcactcattcg

SEQ ID NO: 173965 - DNA, 51 bp, Artificial
  Synthetic oligonucleotide
ccgtcggatactttcagacggcggagcaatccttcgcccaaaaccaggacc

SEQ ID NO: 173966 - DNA, 51 bp, Artificial
  Synthetic oligonucleotide
aatatccggtgaagcggcatcatccgaggtgccaccgccacagcctgtcaa

SEQ ID NO: 173967 - DNA, 51 bp, Artificial
  Synthetic oligonucleotide
gcttcattgtcccccgggcttcattgtcccccgggcttcattgtcccccgg

SEQ ID NO: 173968 - DNA, 51 bp, Artificial
  Synthetic oligonucleotide
ggggctcttcccaacagcgcggcatggagagtcatgggttgggttaagaag

SEQ ID NO: 173969 - DNA, 51 bp, Artificial
  Synthetic oligonucleotide
tataaaccccgtaccacatggtaaagtacatttcgttatgccgttccatgg

SEQ ID NO: 173970 - DNA, 54 bp, Artificial
  Synthetic oligonucleotide
cgtttccttgtgtttcgccgccgaacgaattaatcagcggcgcggctttttgtg

SEQ ID NO: 173971 - DNA, 51 bp, Artificial
  Synthetic oligonucleotide
tccatttgcgtggaagcgccggtcaactgcatccaggcgccggttcccaaa

SEQ ID NO: 173972 - DNA, 50 bp, Artificial
  Synthetic oligonucleotide
aggggatggctcctttgacgcgccgggtgatgccagcgtcaccgttctca

SEQ ID NO: 173973 - DNA, 50 bp, Artificial
  Synthetic oligonucleotide
agggtgcatccgtcaaccttcatgcccgggtctacagcgccggaacagta

SEQ ID NO: 173974 - DNA, 50 bp, Artificial
  Synthetic oligonucleotide
agtgcccgccatgtcgcaccgcaggtcgatacggcaccagtcgcaaatgc

SEQ ID NO: 173975 - DNA, 50 bp, Artificial
  Synthetic oligonucleotide
agggatgtgcgttgcggacgaagcatccgtttgtagtgtgcccgtaaggt

SEQ ID NO: 173976 - DNA, 50 bp, Artificial
  Synthetic oligonucleotide
agtgctccgttgacagcgtcatagggctgggacgatccgattttccggcc

SEQ ID NO: 173977 - DNA, 50 bp, Artificial
  Synthetic oligonucleotide
aggcgtggttgttttggccgcaccgcaaagaccatcaggcgacaaacgtt

SEQ ID NO: 173978 - DNA, 50 bp, Artificial
  Synthetic oligonucleotide
ataagccagccccggccgttacagcggaaccccctgaggataccgccgat

SEQ ID NO: 173979 - DNA, 50 bp, Artificial
  Synthetic oligonucleotide
ataagcgccagccggaacggatttccctcgtcagccgcccgcctgaattc

SEQ ID NO: 173980 - DNA, 50 bp, Artificial
  Synthetic oligonucleotide
ataatggcccgagaggctccggttgggaatgttgctatggtccctgcggg

SEQ ID NO: 173981 - DNA, 58 bp, Artificial
  Synthetic oligonucleotide
gtaatccgcttggcaaagaaaagatgattggctaacaataatagccccctcttctgaa

SEQ ID NO: 173982 - DNA, 60 bp, Artificial
  Synthetic oligonucleotide
gattctaagcgccttcacatatatggcgtggtgcatgttagatgtcataaggtgggataa

SEQ ID NO: 173983 - DNA, 54 bp, Artificial
  Synthetic oligonucleotide
attctcaacagtgatgttgaaatcatctgtccagctagttccgtcgaaacttcg

SEQ ID NO: 173984 - DNA, 54 bp, Artificial
  Synthetic oligonucleotide
agaattgctcttcaggtagccgccgttgtgttccatgcttggaatctgatcgct

SEQ ID NO: 173985 - DNA, 54 bp, Artificial
  Synthetic oligonucleotide
gacaccagggtgggatcaccgaaccccttgagaaacaggttgtgctgatcatcg

SEQ ID NO: 173986 - DNA, 54 bp, Artificial
  Synthetic oligonucleotide
gaggggaagcaaacccacgagcaacagcaagctcacgagcaacagcaagctcac

SEQ ID NO: 173987 - DNA, 54 bp, Artificial
  Synthetic oligonucleotide
ggggttgtgtttactgtcgtgggacaattcagcgccaggggtatcgttccaggc

SEQ ID NO: 173988 - DNA, 54 bp, Artificial
  Synthetic oligonucleotide
aattctgacctgccgcgttggctgaagttaagcgcaagctgcgcagagttaggt

SEQ ID NO: 173989 - DNA, 54 bp, Artificial
  Synthetic oligonucleotide
aatccaataccctttccgatggattgaaatgggaacaggacgccaactattccc

SEQ ID NO: 173990 - DNA, 54 bp, Artificial
  Synthetic oligonucleotide
tcaaaacgatgagatcctctttatcgccatggaaccaaagggccttatcatcga

SEQ ID NO: 173991 - DNA, 54 bp, Artificial
  Synthetic oligonucleotide
tgtcaaacaaccttggcagtagggacatattgtggtgttcttgttaagaggtgc

SEQ ID NO: 173992 - DNA, 54 bp, Artificial
  Synthetic oligonucleotide
aaccggtgcggctctattccgactccagttacgtggtcaacggtatcaacaagg

SEQ ID NO: 173993 - DNA, 58 bp, Artificial
  Synthetic oligonucleotide
gatcctgggctttccttgatatctcctcacacactttttgttcaagtaactgtttgtc

SEQ ID NO: 173994 - DNA, 54 bp, Artificial
  Synthetic oligonucleotide
ttgaactcggcagacggaatgggcttggaatctggcaactcaccaaccgaatta

SEQ ID NO: 173995 - DNA, 54 bp, Artificial
  Synthetic oligonucleotide
ttggaatttctgcgggctccttcgcgtcgcatagtcatggccgaggagtatgtt

SEQ ID NO: 173996 - DNA, 53 bp, Artificial
  Synthetic oligonucleotide
cctcgtttatcgattgcagttttgctaactcttcgattctctcattacccgta

SEQ ID NO: 173997 - DNA, 50 bp, Artificial
  Synthetic oligonucleotide
ccccgggaccgggttacggccgttaaagcatcaagcaacaggtggtaact

SEQ ID NO: 173998 - DNA, 53 bp, Artificial
  Synthetic oligonucleotide
aagagtgctattatagtagaagcaagattgaaagttttacgaaaacattcatc

SEQ ID NO: 173999 - DNA, 53 bp, Artificial
  Synthetic oligonucleotide
gagggcactcgacaagccgcctatcctggggcggtttccccgcgatctacacc

SEQ ID NO: 174000 - DNA, 53 bp, Artificial
  Synthetic oligonucleotide
tggcgattccgatggttccaaatctgcagctgatcatgtaatcggcgacgttc

SEQ ID NO: 174001 - DNA, 53 bp, Artificial
  Synthetic oligonucleotide
ggatagcgaggtacgttttggtagcaacggtaaggcccgccttattatgactg

SEQ ID NO: 174002 - DNA, 53 bp, Artificial
  Synthetic oligonucleotide
cgttctgatgatgcatctcggattctttgccgggtaccggcatgtactcgaga

SEQ ID NO: 174003 - DNA, 53 bp, Artificial
  Synthetic oligonucleotide
atacgggcaagacagtagtagctctcgccagcatagcgacctgtggtcagccg

SEQ ID NO: 174004 - DNA, 60 bp, Artificial
  Synthetic oligonucleotide
ctttaatctgaagaaatcgattaaagtcagctgttgactgattagcgtgctcatttttac

SEQ ID NO: 174005 - DNA, 52 bp, Artificial
  Synthetic oligonucleotide
gtaaagcagcgctttccagtgtctgtttctcgacttgcgacaagaccagccc

SEQ ID NO: 174006 - DNA, 52 bp, Artificial
  Synthetic oligonucleotide
gatggttggatgaagttcgttgtttcaccggcgccaatcgaaaagtcctgcc

SEQ ID NO: 174007 - DNA, 52 bp, Artificial
  Synthetic oligonucleotide
ccgaagttgtatatcaccttgtctttaacagctttgttaagacttgtcatag

SEQ ID NO: 174008 - DNA, 52 bp, Artificial
  Synthetic oligonucleotide
ccctaagatccgcgggttgaattggtcgttggccatggctctttactcctta

SEQ ID NO: 174009 - DNA, 52 bp, Artificial
  Synthetic oligonucleotide
tggcgtcccttccaagtattaagatacgcatggtactctcgaagcaagaata

SEQ ID NO: 174010 - DNA, 52 bp, Artificial
  Synthetic oligonucleotide
ccaaacaaatcgagattatccgcgtcttgcatggcagacaggatccaaaccg

SEQ ID NO: 174011 - DNA, 51 bp, Artificial
  Synthetic oligonucleotide
tcctggatgatcaacacagaaattggggtaggtcacgacccaaccaaccat

SEQ ID NO: 174012 - DNA, 51 bp, Artificial
  Synthetic oligonucleotide
ttttaaccggatagaagagggtagtactaaacgtggatttattactgcggg

SEQ ID NO: 174013 - DNA, 51 bp, Artificial
  Synthetic oligonucleotide
ccagtccgggacaatccctgaatcaacgggactcattgaattacccgccct

SEQ ID NO: 174014 - DNA, 51 bp, Artificial
  Synthetic oligonucleotide
ctttcgctcgccgatgcttctttatttaaatgcagatatgcgaactttgtg

SEQ ID NO: 174015 - DNA, 60 bp, Artificial
  Synthetic oligonucleotide
cgagatcttgtgataacgataatttatgattttcaatatctttgacaagaaactgaccga

SEQ ID NO: 174016 - DNA, 51 bp, Artificial
  Synthetic oligonucleotide
accctccacactgttactagctttcacaggcctggacttaataactactac

SEQ ID NO: 174017 - DNA, 51 bp, Artificial
  Synthetic oligonucleotide
gggcaaaagaggacgattgtgggttgatggacaacacgacacggcgacaac

SEQ ID NO: 174018 - DNA, 51 bp, Artificial
  Synthetic oligonucleotide
agcatcgtggtagagagcggttaaactctctttgtccgccacgggtacggc

SEQ ID NO: 174019 - DNA, 51 bp, Artificial
  Synthetic oligonucleotide
ctggtggtaattacgccacctgattgattaatcgtgtagccagaatggatc

SEQ ID NO: 174020 - DNA, 51 bp, Artificial
  Synthetic oligonucleotide
atcaacgtgaacgttttcgagttgtcgctccgtattctgatcaagggtgct

SEQ ID NO: 174021 - DNA, 51 bp, Artificial
  Synthetic oligonucleotide
accacctcatttctcatccctattggataagcgatatatgactttaaactt

SEQ ID NO: 174022 - DNA, 50 bp, Artificial
  Synthetic oligonucleotide
acatccggccgaccaacaaggccatcgctgggcgcatcaagggtgcctac

SEQ ID NO: 174023 - DNA, 50 bp, Artificial
  Synthetic oligonucleotide
accaggttgcacgtgccaggggcgaggtgattgccagtagtcgggtgcag

SEQ ID NO: 174024 - DNA, 50 bp, Artificial
  Synthetic oligonucleotide
accagatgctcaggcgacgtcccgtagaccgtaccccgcaggcactgcca

SEQ ID NO: 174025 - DNA, 50 bp, Artificial
  Synthetic oligonucleotide
acccgaaccccggaatccgatgtcaccagaacccttgaagcccgcgacag

SEQ ID NO: 174026 - DNA, 55 bp, Artificial
  Synthetic oligonucleotide
tggaactttagatatttacgggggcttgtttagtagtgataaaatggagagctta

SEQ ID NO: 174027 - DNA, 50 bp, Artificial
  Synthetic oligonucleotide
acagggagtgggtgtgggacgacaacaaggagccgcgtccaaggtggcat

SEQ ID NO: 174028 - DNA, 50 bp, Artificial
  Synthetic oligonucleotide
atcgctgagttcggtgaggcaggcgatatggcgtatgggggcaacaagca

SEQ ID NO: 174029 - DNA, 50 bp, Artificial
  Synthetic oligonucleotide
ggggtacttcgttttagcgcttccactataccagaagccctgtatccacc

SEQ ID NO: 174030 - DNA, 50 bp, Artificial
  Synthetic oligonucleotide
acccggaaccgctggagagtatcaacgaaccctgcggccaggcccctgaa

SEQ ID NO: 174031 - DNA, 50 bp, Artificial
  Synthetic oligonucleotide
accgctctgctgggccaggctaacgtcgccggacctaccctatcggctct

SEQ ID NO: 174032 - DNA, 50 bp, Artificial
  Synthetic oligonucleotide
accgctggagaacgggtgcgtggatggagggagcaaatcgtttctgccgc

SEQ ID NO: 174033 - DNA, 50 bp, Artificial
  Synthetic oligonucleotide
acgaggacacccgaatgcgaagcgacgccctgcgcaaaggattggaacgc

SEQ ID NO: 174034 - DNA, 50 bp, Artificial
  Synthetic oligonucleotide
acgagggggtcagtctgcacagtcgggatatccgcaagtcaaccgggccg

SEQ ID NO: 174035 - DNA, 50 bp, Artificial
  Synthetic oligonucleotide
acgctgcgcctggctgcttgcccgaatatacggcactgctgaacgattac

SEQ ID NO: 174036 - DNA, 50 bp, Artificial
  Synthetic oligonucleotide
acggagttggtggcatgagcaacgaacagtgggcggcccggggcaacgcg

SEQ ID NO: 174037 - DNA, 57 bp, Artificial
  Synthetic oligonucleotide
tggactttcgtctataactgggacggtggcctctgtgggtgcagcgtcaactaccgg

SEQ ID NO: 174038 - DNA, 50 bp, Artificial
  Synthetic oligonucleotide
acggatggcctgttggtccgtgagatcgcagtcggtctgatccaccgccg

SEQ ID NO: 174039 - DNA, 50 bp, Artificial
  Synthetic oligonucleotide
acggcacggctgttcgcttacggcccgttagaccggcagatcagtacccc

SEQ ID NO: 174040 - DNA, 50 bp, Artificial
  Synthetic oligonucleotide
acggcgaccaacggatattgcgttgtggtcatggatcgcccgagcggtga

SEQ ID NO: 174041 - DNA, 50 bp, Artificial
  Synthetic oligonucleotide
agtgtcggcagtcttggcctcatcacccgagcgacgttgcgcgttgagcc

SEQ ID NO: 174042 - DNA, 50 bp, Artificial
  Synthetic oligonucleotide
aaacttgaaacgggaccctatatgggggtcaggttcagtgccggcgccct

SEQ ID NO: 174043 - DNA, 50 bp, Artificial
  Synthetic oligonucleotide
aaagatgacgttgcgtccccgcttgaccacgccgatgattgcccgcgccg

SEQ ID NO: 174044 - DNA, 50 bp, Artificial
  Synthetic oligonucleotide
agtgccggcgcccttgattataagagcacccggcccctggattatggcct

SEQ ID NO: 174045 - DNA, 50 bp, Artificial
  Synthetic oligonucleotide
ttcctatccccagggttttacgataattggcaaaccagcgagagagcttg

SEQ ID NO: 174046 - DNA, 50 bp, Artificial
  Synthetic oligonucleotide
aaaggctcctcgccagggtaaagacctcgattcgcgtcgcgcctcccgcc

SEQ ID NO: 174047 - DNA, 50 bp, Artificial
  Synthetic oligonucleotide
aacaacgacccttgggaactcgccgagctatcgctcctgtcaaccgaggc

SEQ ID NO: 174048 - DNA, 60 bp, Artificial
  Synthetic oligonucleotide
aagaaacacgctgtggagatacttttctgtaggatctagatccagtatatagcgagcgct

SEQ ID NO: 174049 - DNA, 50 bp, Artificial
  Synthetic oligonucleotide
aacaaggccatcgctgggcgcatcaagggtgcctacagcgtcccctacga

SEQ ID NO: 174050 - DNA, 50 bp, Artificial
  Synthetic oligonucleotide
atccatagggcaccccggcactgattctagcagcgaacggctcacgcact

SEQ ID NO: 174051 - DNA, 50 bp, Artificial
  Synthetic oligonucleotide
aacgaattcagggagacggtggaccccggttccccgcccaaggatctgat

SEQ ID NO: 174052 - DNA, 50 bp, Artificial
  Synthetic oligonucleotide
atcccccagctcggaacaaactccgaggggccatagtcgggttgccattt

SEQ ID NO: 174053 - DNA, 50 bp, Artificial
  Synthetic oligonucleotide
aagacctcgattcgcgtcgcgcctcccgcccgtaatactttgctgcactc

SEQ ID NO: 174054 - DNA, 50 bp, Artificial
  Synthetic oligonucleotide
aagcggtcacggggcaccaaatcttgtaagggacccccatgcgacgcaat

SEQ ID NO: 174055 - DNA, 50 bp, Artificial
  Synthetic oligonucleotide
aaggcagccctcattgcagccatagcacccatggggtttacggtgccctg

SEQ ID NO: 174056 - DNA, 50 bp, Artificial
  Synthetic oligonucleotide
aaggtgcgggacagacttctgcgtggggcaatagctcagaccctgagcag

SEQ ID NO: 174057 - DNA, 50 bp, Artificial
  Synthetic oligonucleotide
aatagacgatcctcgctccggggcaacaacgcgctcctagcccgatcgcc

SEQ ID NO: 174058 - DNA, 50 bp, Artificial
  Synthetic oligonucleotide
aatcaggccgcgaagggacgcgccgtgcaaatcacctatgaaatgcgtga

SEQ ID NO: 174059 - DNA, 54 bp, Artificial
  Synthetic oligonucleotide
tgggaaaggtaactcttctgccgtaaatatctcaccagtacctttttgttctac

SEQ ID NO: 174060 - DNA, 50 bp, Artificial
  Synthetic oligonucleotide
atcctcgctccggggcaacaacgcgctcctagcccgatcgccctcgattc

SEQ ID NO: 174061 - DNA, 50 bp, Artificial
  Synthetic oligonucleotide
atcctcggcgcagtgggggtgttgcaatttgaggtcacggtggcccggct

SEQ ID NO: 174062 - DNA, 50 bp, Artificial
  Synthetic oligonucleotide
aatcgacgcatcgttatcacaggggtaggccttgccgcaccaaatgcgga

SEQ ID NO: 174063 - DNA, 50 bp, Artificial
  Synthetic oligonucleotide
aatggcgcccttgggaaccagaccgtgatccttgcccacgctgtagactc

SEQ ID NO: 174064 - DNA, 50 bp, Artificial
  Synthetic oligonucleotide
atcgagctcgtctgtgagggggcaccggcctacctgcttatggtggactc

SEQ ID NO: 174065 - DNA, 50 bp, Artificial
  Synthetic oligonucleotide
acaccgggatgcaaaaggtttccggaaggagcggacccgccaatacgctg

SEQ ID NO: 174066 - DNA, 50 bp, Artificial
  Synthetic oligonucleotide
acaccttggccagggctgtcgaatcccgccaatcggtgcctggacgaacc

SEQ ID NO: 174067 - DNA, 50 bp, Artificial
  Synthetic oligonucleotide
acactggccggcgatacccgtactcccggtcgtaacggctccgcgaatcg

SEQ ID NO: 174068 - DNA, 50 bp, Artificial
  Synthetic oligonucleotide
acacttgccacgcgaatgcgggccggttgcttatagctcacagctgggct

SEQ ID NO: 174069 - DNA, 50 bp, Artificial
  Synthetic oligonucleotide
acagaccgacatcgagctcgtctgtgagggggcaccggcctacctgctta

SEQ ID NO: 174070 - DNA, 60 bp, Artificial
  Synthetic oligonucleotide
cacttggcaagcctacatcatcatttttacctgttgtcttatcttccttgattcctaata

SEQ ID NO: 174071 - DNA, 50 bp, Artificial
  Synthetic oligonucleotide
acagccggtcgcctcagcaccctcgtgggccttgataccgctgtaatcaa

SEQ ID NO: 174072 - DNA, 50 bp, Artificial
  Synthetic oligonucleotide
agcggagttacgggaaatggggacgccgctcggcttaagtcaacggcatt

SEQ ID NO: 174073 - DNA, 50 bp, Artificial
  Synthetic oligonucleotide
agcggccctcgctctacttcacccgggaacagttgttggccaactgggac

SEQ ID NO: 174074 - DNA, 50 bp, Artificial
  Synthetic oligonucleotide
agcgtgcatcggggctatagcaggagaacctgcggacctccttccgtggt

SEQ ID NO: 174075 - DNA, 50 bp, Artificial
  Synthetic oligonucleotide
agcgttcagcagtgccgcatattcgggcaagcagccaggcgcagcgtacc

SEQ ID NO: 174076 - DNA, 50 bp, Artificial
  Synthetic oligonucleotide
atggcagtgagtacagccggtcgcctcagcaccctcgtgggccttgatac

SEQ ID NO: 174077 - DNA, 50 bp, Artificial
  Synthetic oligonucleotide
ccctagccttagttcacttggagtccatagcgatggaagtgttcgtaccg

SEQ ID NO: 174078 - DNA, 50 bp, Artificial
  Synthetic oligonucleotide
agctcgcacggagctgcgagatgcagttgccagagaggtgacaacgggtc

SEQ ID NO: 174079 - DNA, 50 bp, Artificial
  Synthetic oligonucleotide
aggcaggctcttccgtgagcgatcagttaccctcttcgggcccagcgatt

SEQ ID NO: 174080 - DNA, 50 bp, Artificial
  Synthetic oligonucleotide
aggccataaactttgccggcacctaatgctctcacggccaacgccgcaca

SEQ ID NO: 174081 - DNA, 58 bp, Artificial
  Synthetic oligonucleotide
ttaacggaaaatggtgatgaatggggatatattagtttggcagaacttgcgagtataa

SEQ ID NO: 174082 - DNA, 50 bp, Artificial
  Synthetic oligonucleotide
cagtacccgaccgccatgatcggagacgacaatggcctcgcaacctgcct

SEQ ID NO: 174083 - DNA, 50 bp, Artificial
  Synthetic oligonucleotide
aggcccaatcatccaggtcggtgcagcctttggctccagcctcgggcaaa

SEQ ID NO: 174084 - DNA, 50 bp, Artificial
  Synthetic oligonucleotide
aggcccccggtggctttccactgccacgaatttgcgttggcgccccacac

SEQ ID NO: 174085 - DNA, 50 bp, Artificial
  Synthetic oligonucleotide
caggcccttatggattcggccaaacagaggcacggggtgcgccttaaacg

SEQ ID NO: 174086 - DNA, 50 bp, Artificial
  Synthetic oligonucleotide
aggctgtggtcgccaatgatcccctgcggcggggagaaaacctgagtaag

SEQ ID NO: 174087 - DNA, 50 bp, Artificial
  Synthetic oligonucleotide
aggggagagttgtcgtggtctggttggtttgtcacccgtggctgctcccg

SEQ ID NO: 174088 - DNA, 50 bp, Artificial
  Synthetic oligonucleotide
agggggacgataagaccgttttgagcgccgaggctgacaattaccggggc

SEQ ID NO: 174089 - DNA, 50 bp, Artificial
  Synthetic oligonucleotide
caatgatcccctgcggcggggagaaaacctgagtaaggccattgccctga

SEQ ID NO: 174090 - DNA, 50 bp, Artificial
  Synthetic oligonucleotide
agggtgaaacatcaaatactcgcgacggttcggccctctggcgcaacggc

SEQ ID NO: 174091 - DNA, 50 bp, Artificial
  Synthetic oligonucleotide
caagccgggccgatcgccccagaatgcggtgctgctgcaagtttacatgc

SEQ ID NO: 174092 - DNA, 56 bp, Artificial
  Synthetic oligonucleotide
gtattttcgagacattaatacattaagtataacctaactcagaatttgtcaaacaa

SEQ ID NO: 174093 - DNA, 57 bp, Artificial
  Synthetic oligonucleotide
atgacttgggggggtggtctgatagtttggctgaaaaagtagctagtaactgtgaga

SEQ ID NO: 174094 - DNA, 50 bp, Artificial
  Synthetic oligonucleotide
agggtgcgacgggtcagtatgccatagatgcccatgccaaagagtgccgc

SEQ ID NO: 174095 - DNA, 50 bp, Artificial
  Synthetic oligonucleotide
agtaccgtggtggcaagttacccgccccgatcgcctgtgaggcagatagt

SEQ ID NO: 174096 - DNA, 50 bp, Artificial
  Synthetic oligonucleotide
caaccacagggctagcgccaccttggcgtgtgtcattggtgttgccgtgc

SEQ ID NO: 174097 - DNA, 50 bp, Artificial
  Synthetic oligonucleotide
atttgcatcgctcatcgcgtccgcctttggccttagatcgcggtaccggg

SEQ ID NO: 174098 - DNA, 50 bp, Artificial
  Synthetic oligonucleotide
attgcctccagacgcttacgggccaggggtgctattcgtccggcatagac

SEQ ID NO: 174099 - DNA, 50 bp, Artificial
  Synthetic oligonucleotide
attctgcgggccatgcaacgggtgttggcaagcggcaacgattatgcggt

SEQ ID NO: 174100 - DNA, 50 bp, Artificial
  Synthetic oligonucleotide
agtactaggcccaccgcgcatgacattaaccacaacacagggggcctcgg

SEQ ID NO: 174101 - DNA, 50 bp, Artificial
  Synthetic oligonucleotide
attcgcgcagcaacactggactgcagagatgtcgcggctcaggggccatt

SEQ ID NO: 174102 - DNA, 50 bp, Artificial
  Synthetic oligonucleotide
atggtgactggcctaaggtggcaatgggagtaaacctgcaccccggcgat

SEQ ID NO: 174103 - DNA, 50 bp, Artificial
  Synthetic oligonucleotide
acgggaaatggggacgccgctcggcttaagtcaacggcattggggcaggg

SEQ ID NO: 174104 - DNA, 56 bp, Artificial
  Synthetic oligonucleotide
ttaggttaaaccctagtaatattaatcagtcgtcaagatttaatccatttcatgga

SEQ ID NO: 174105 - DNA, 50 bp, Artificial
  Synthetic oligonucleotide
acgtacctggggtacgctgcgcctgtctgcttgcccgaacctgcggcacg

SEQ ID NO: 174106 - DNA, 50 bp, Artificial
  Synthetic oligonucleotide
acgtggcaacaccgggatgcaaaaggtttccggaaggagcggacccgcca

SEQ ID NO: 174107 - DNA, 50 bp, Artificial
  Synthetic oligonucleotide
actccatagccgtcaagtacctgactcgctgccaagcccacccgacctcc

SEQ ID NO: 174108 - DNA, 50 bp, Artificial
  Synthetic oligonucleotide
actccgaggggccatagtcgggttgccattttgcctctgtcaggcggaga

SEQ ID NO: 174109 - DNA, 50 bp, Artificial
  Synthetic oligonucleotide
actctgctgacacggggcgtgaggccctgttggctggcctaactgaggag

SEQ ID NO: 174110 - DNA, 50 bp, Artificial
  Synthetic oligonucleotide
actgctgcacgattaccgcccgttaaaccggcaggttagcacccctggca

SEQ ID NO: 174111 - DNA, 50 bp, Artificial
  Synthetic oligonucleotide
atcgtctggactcctgccgtacacgccacataccaccggtcatgcgggcc

SEQ ID NO: 174112 - DNA, 50 bp, Artificial
  Synthetic oligonucleotide
actgttgacggacagctccggatgaatctccaccctggggctgcgacgga

SEQ ID NO: 174113 - DNA, 50 bp, Artificial
  Synthetic oligonucleotide
atctgccacctccctgatatccacccctgccatgagcaggtggcttgcgg

SEQ ID NO: 174114 - DNA, 50 bp, Artificial
  Synthetic oligonucleotide
actttcgggtcggtggccgcttggtccgccaggacaggggtcttggcacg

SEQ ID NO: 174115 - DNA, 59 bp, Artificial
  Synthetic oligonucleotide
ataagctgtcacaaaggccaatataaccgtaagcaactggaatcccatggatattcggc

SEQ ID NO: 174116 - DNA, 50 bp, Artificial
  Synthetic oligonucleotide
agaatacgcatgccgcagtcccgctaccatagtttcccgtaggccggaga

SEQ ID NO: 174117 - DNA, 50 bp, Artificial
  Synthetic oligonucleotide
agtgccagcaatgcaggcccactatcaggtcgaacccccacaggttcctc

SEQ ID NO: 174118 - DNA, 50 bp, Artificial
  Synthetic oligonucleotide
atgccgaagaggctgtggtcgccaatgatcccctgcggcggggagaaaac

SEQ ID NO: 174119 - DNA, 50 bp, Artificial
  Synthetic oligonucleotide
agacaacagccgagagccgaggcgccgttctaagaggccgataggcaacc

SEQ ID NO: 174120 - DNA, 50 bp, Artificial
  Synthetic oligonucleotide
agaccacggcactcgacctgccaacaaccacggatatgccctgagacagg

SEQ ID NO: 174121 - DNA, 50 bp, Artificial
  Synthetic oligonucleotide
agaccgcagagagcaggttgcactccatcgtgggcggtgacggagcaatt

SEQ ID NO: 174122 - DNA, 50 bp, Artificial
  Synthetic oligonucleotide
agacgagcagggtcgcgtgattgcaactatgcaacggtgcacagggtcgc

SEQ ID NO: 174123 - DNA, 50 bp, Artificial
  Synthetic oligonucleotide
agacgatgtccgggtcttaaacggcggcaccgactcctggcttttggctg

SEQ ID NO: 174124 - DNA, 50 bp, Artificial
  Synthetic oligonucleotide
agactgggtgcaacggatatcggctgccttttcacctggaacagtgtatt

SEQ ID NO: 174125 - DNA, 50 bp, Artificial
  Synthetic oligonucleotide
agagctgatcggtgagtgccgctgctacccgtgccacttggcgagagtgg

SEQ ID NO: 174126 - DNA, 57 bp, Artificial
  Synthetic oligonucleotide
ttttcgttctttattgctagcgatttcggctaatttgtttttgtgatcttcgagatc

SEQ ID NO: 174127 - DNA, 50 bp, Artificial
  Synthetic oligonucleotide
cgttcaaatccgcatcatgtaccgtgatatcctgccgacaggcatcaaag

SEQ ID NO: 174128 - DNA, 50 bp, Artificial
  Synthetic oligonucleotide
agaggactccggggattccgaataggctgggcgccagttctcctgcgatc

SEQ ID NO: 174129 - DNA, 50 bp, Artificial
  Synthetic oligonucleotide
atgccttgttgtgcggattgcatagatgcctcctggccgcttggccgtgg

SEQ ID NO: 174130 - DNA, 50 bp, Artificial
  Synthetic oligonucleotide
agcaccgccatcaagataggccaccgcttgcgcctggtcctggaataccg

SEQ ID NO: 174131 - DNA, 50 bp, Artificial
  Synthetic oligonucleotide
agcattgacgataaaacgagttaaccatggcccggcaaccggccccaccc

SEQ ID NO: 174132 - DNA, 50 bp, Artificial
  Synthetic oligonucleotide
agccgccgttgccgcctcatcttgataacgcccaccacctgtcaacaccg

SEQ ID NO: 174133 - DNA, 50 bp, Artificial
  Synthetic oligonucleotide
agcgatgctccacgttctcggtttgccctcggagaaaagtcccctctggc

SEQ ID NO: 174134 - DNA, 50 bp, Artificial
  Synthetic oligonucleotide
agcggaaactgatccccgaagggttgctgatgttagaggggacctgcccc

SEQ ID NO: 174135 - DNA, 55 bp, Artificial
  Synthetic oligonucleotide
gatttcgacttagtaagtttcaaatcaaccttatagtcaatatgcgagttttctt

SEQ ID NO: 174136 - DNA, 57 bp, Artificial
  Synthetic oligonucleotide
cccgacgtagcggagacagtccccttgaaagtgttagcgagagacgtggcgagaaca

SEQ ID NO: 174137 - DNA, 59 bp, Artificial
  Synthetic oligonucleotide
ataaccagcgaagttccccgatcatcatcccactccggatgatgtgtcccgacacccca

SEQ ID NO: 174138 - DNA, 59 bp, Artificial
  Synthetic oligonucleotide
tatctccatcgattgccaccacgctacccacagactggctcaacaaaccacccacagtc

SEQ ID NO: 174139 - DNA, 58 bp, Artificial
  Synthetic oligonucleotide
ctcaaggccgcttttactgctgatcgcatcgttcccattcagatctaacccttggaat

SEQ ID NO: 174140 - DNA, 55 bp, Artificial
  Synthetic oligonucleotide
agtggcgcgtcagaaaacacggggcttccaaacgtagaacctggcgcaaacttca

SEQ ID NO: 174141 - DNA, 59 bp, Artificial
  Synthetic oligonucleotide
gtaaggtcgccaaattgtttagtctatggtggtctgcatgaggcagaaaataacctaca

SEQ ID NO: 174142 - DNA, 56 bp, Artificial
  Synthetic oligonucleotide
tcacaccagaagagcatagggcaaggtccagctacctggaactgtcagtggcggtt

SEQ ID NO: 174143 - DNA, 56 bp, Artificial
  Synthetic oligonucleotide
caagatccaagtgtacgaggtgcggacttaaaacgacagtactttcaccttgggca

SEQ ID NO: 174144 - DNA, 55 bp, Artificial
  Synthetic oligonucleotide
ccgaggtgaactgacctctgagtcgctgattgcatagccggcgtgtacgcatccc

SEQ ID NO: 174145 - DNA, 55 bp, Artificial
  Synthetic oligonucleotide
cctctctcatgatatgggtaactccgcccggtctcaccaggcccttaccaaagcg

SEQ ID NO: 174146 - DNA, 55 bp, Artificial
  Synthetic oligonucleotide
cctgaattcacaccagaagagcatagggcaaggtccagctacctggaactgtcag

SEQ ID NO: 174147 - DNA, 54 bp, Artificial
  Synthetic oligonucleotide
cctgtactacctaaacgatgtgaacggtaaaacttttgtagtatgtaatcgcat

SEQ ID NO: 174148 - DNA, 55 bp, Artificial
  Synthetic oligonucleotide
cgagaaggtaacaacaacatttgatagcaacgaagtatcgtcttgggtctcaacg

SEQ ID NO: 174149 - DNA, 55 bp, Artificial
  Synthetic oligonucleotide
tgccatccctctgtttggtctagagatcggtgtcttacctgaatgggtacttgcc

SEQ ID NO: 174150 - DNA, 55 bp, Artificial
  Synthetic oligonucleotide
cgcaattcgcaggcagcgggtactcagcgaactacaaccaggatccaaggtggcc

SEQ ID NO: 174151 - DNA, 55 bp, Artificial
  Synthetic oligonucleotide
cggaaattgctcaacagatccacatagtaagagccaacgatacttactcgatgcc

SEQ ID NO: 174152 - DNA, 54 bp, Artificial
  Synthetic oligonucleotide
ggtcgtcaacccaccctaaataacgcattgcaatttttagatgttggtttccga

SEQ ID NO: 174153 - DNA, 55 bp, Artificial
  Synthetic oligonucleotide
cggaaggctcttcaacgttcacaaattccgaaccatggtgcaaaatgccgacagt

SEQ ID NO: 174154 - DNA, 55 bp, Artificial
  Synthetic oligonucleotide
cggatgctgcatcatgtagggccgactttaaacaaggctgttgcccgtcgccaga

SEQ ID NO: 174155 - DNA, 55 bp, Artificial
  Synthetic oligonucleotide
cggccataccagatcgtgtctttgcccctcccgccggtattgtggccgagcgtaa

SEQ ID NO: 174156 - DNA, 54 bp, Artificial
  Synthetic oligonucleotide
cggctgttcgcttacggcccgttagaccggcagatcagtacccctggtgaacgg

SEQ ID NO: 174157 - DNA, 55 bp, Artificial
  Synthetic oligonucleotide
cgtacctacaactccgagcttggctatagggtagaactgcgatatggcaccctgg

SEQ ID NO: 174158 - DNA, 55 bp, Artificial
  Synthetic oligonucleotide
ttgcccgcagatattccataaaatcccgcatactcaaacgagaggcaatatcttc

SEQ ID NO: 174159 - DNA, 55 bp, Artificial
  Synthetic oligonucleotide
ttgacaacgcctcttggtcaaccaatgaccgcagccttgtgctgcacgtacaata

SEQ ID NO: 174160 - DNA, 55 bp, Artificial
  Synthetic oligonucleotide
atatggcgtggtgcatgttagatgtcataaggtgggataatctattccacagggg

SEQ ID NO: 174161 - DNA, 55 bp, Artificial
  Synthetic oligonucleotide
ttagctttgctctcatgtgctagacgtgtttcggtgtttagccgtaaggaaggtg

SEQ ID NO: 174162 - DNA, 55 bp, Artificial
  Synthetic oligonucleotide
atgggcacttaattacacggcgatacacagcaagctcttatatggcacactggtc

SEQ ID NO: 174163 - DNA, 56 bp, Artificial
  Synthetic oligonucleotide
gtcataataggcagttagcccacaaacaagcaaaacctcggagttaacaagcaaaa

SEQ ID NO: 174164 - DNA, 55 bp, Artificial
  Synthetic oligonucleotide
caaccgcagtccgtttgacacgattacttgattacacgacagaagacgaaacagg

SEQ ID NO: 174165 - DNA, 54 bp, Artificial
  Synthetic oligonucleotide
caatccggttcaatgaaaaccggaagttgacgcgggtatctgtcaggcgttttc

SEQ ID NO: 174166 - DNA, 55 bp, Artificial
  Synthetic oligonucleotide
cacgaagcggtggttatcttacacgaagcggtggttatcttacacgaagcggtgg

SEQ ID NO: 174167 - DNA, 55 bp, Artificial
  Synthetic oligonucleotide
tgtggtattggcctcgcacgacgtttgccgaccttcgtccttggccggctgggct

SEQ ID NO: 174168 - DNA, 54 bp, Artificial
  Synthetic oligonucleotide
caggcgaagataagtttcgacctcggaaggcaccggaatttccaccccgtcatg

SEQ ID NO: 174169 - DNA, 55 bp, Artificial
  Synthetic oligonucleotide
caggtctgtataacacacaattttgcgtaataggtagactgtcgccactccaccc

SEQ ID NO: 174170 - DNA, 55 bp, Artificial
  Synthetic oligonucleotide
cattgccagagagctctttacagctataagtggggttctgtttaatatatcgttc

SEQ ID NO: 174171 - DNA, 55 bp, Artificial
  Synthetic oligonucleotide
ccaaaagctgggttacggccgtcggattagcttgacgaatccattaacagcatgg

SEQ ID NO: 174172 - DNA, 55 bp, Artificial
  Synthetic oligonucleotide
ccaaagacctcaaagggacgatgtagagggtgcggagtatgagcaaacagtacga

SEQ ID NO: 174173 - DNA, 55 bp, Artificial
  Synthetic oligonucleotide
tggtcatggagagcgaccctatgacatgtattgaaatcgcgattccggcccaaag

SEQ ID NO: 174174 - DNA, 57 bp, Artificial
  Synthetic oligonucleotide
gtctattcttgatttttggataggtcttaggtctaataatgctaatatgttaactag

SEQ ID NO: 174175 - DNA, 55 bp, Artificial
  Synthetic oligonucleotide
ccctgcagaatcccgtggggccctgtatgatttccaatgagggcatttgtgctgc

SEQ ID NO: 174176 - DNA, 55 bp, Artificial
  Synthetic oligonucleotide
gcttctcgatcaggacttgatcgttgcttgcgaaggcacggagtaagccgtctta

SEQ ID NO: 174177 - DNA, 55 bp, Artificial
  Synthetic oligonucleotide
ggaatctaattacggtgctgtcctcagtaataagagccgacttcactatgtgccg

SEQ ID NO: 174178 - DNA, 52 bp, Artificial
  Synthetic oligonucleotide
ggactcccgggtcaaaatgcacgtcaaaccctcggtggtccgtgtccccaag

SEQ ID NO: 174179 - DNA, 55 bp, Artificial
  Synthetic oligonucleotide
ggcagcacggatgggacatccagcgacaaaatcttcgcgcacaccgtacagcccc

SEQ ID NO: 174180 - DNA, 55 bp, Artificial
  Synthetic oligonucleotide
taatatatgtacggtcaagcaacgagattcctctgctatagtcaggtattgggac

SEQ ID NO: 174181 - DNA, 55 bp, Artificial
  Synthetic oligonucleotide
ggcggacagagccagttgtatgatggtcttaccggagaaccctttgccaaccttg

SEQ ID NO: 174182 - DNA, 55 bp, Artificial
  Synthetic oligonucleotide
ggcgtggggtggggtactgtgcaaagtcctgaggactgtcataacggggttggga

SEQ ID NO: 174183 - DNA, 55 bp, Artificial
  Synthetic oligonucleotide
ggctgagttgtatgctgattctaacttctgtagtgtgggaagaacgggaaagact

SEQ ID NO: 174184 - DNA, 54 bp, Artificial
  Synthetic oligonucleotide
ggggccgggtttcccatccttccaagatgtacaaggtgggcgatgaaattcagg

SEQ ID NO: 174185 - DNA, 60 bp, Artificial
  Synthetic oligonucleotide
gtttgccagcttaaggcctctcttgccccactcactcgccataataggcactgggataac

SEQ ID NO: 174186 - DNA, 55 bp, Artificial
  Synthetic oligonucleotide
ggggcctccattcagattagccccgactcctattccaccacgctttattacacgg

SEQ ID NO: 174187 - DNA, 55 bp, Artificial
  Synthetic oligonucleotide
ggggcgatttctttgcttgaactgtttgctaaatgtttagcttatacacaacctg

SEQ ID NO: 174188 - DNA, 53 bp, Artificial
  Synthetic oligonucleotide
ggtaaggggctctggcgtttatcgattcccctaaagtacagcccgtagagacg

SEQ ID NO: 174189 - DNA, 55 bp, Artificial
  Synthetic oligonucleotide
gtcaccatctgaggggcacgacgacgtacctcccgcaggagttccagagaacgtc

SEQ ID NO: 174190 - DNA, 55 bp, Artificial
  Synthetic oligonucleotide
ggtcgtcgtaagtacgaatatccaccagtaatggcgcctatcgcaagtggacctg

SEQ ID NO: 174191 - DNA, 55 bp, Artificial
  Synthetic oligonucleotide
ggtggcgcatgtacagttacagcctcgcgaagcagtctgttgatcgtcgaggtag

SEQ ID NO: 174192 - DNA, 55 bp, Artificial
  Synthetic oligonucleotide
gtcaccaatagcagtgaggctaacaggcagctcaatcgcagagttgaggtgtcgc

SEQ ID NO: 174193 - DNA, 55 bp, Artificial
  Synthetic oligonucleotide
gtacttcttctttaccctagccttagttcacttggagtccatagcgatggaagtg

SEQ ID NO: 174194 - DNA, 55 bp, Artificial
  Synthetic oligonucleotide
ctccacctgcaaggacacggatttattgccgccactatacagattggcaggggtg

SEQ ID NO: 174195 - DNA, 55 bp, Artificial
  Synthetic oligonucleotide
ctcttcgttaatagggtagctttgctcaaagcgagaggcaactccctgactggca

SEQ ID NO: 174196 - DNA, 60 bp, Artificial
  Synthetic oligonucleotide
ggccatagcagtggagtcataggggttcaaatctaccgcctgcttataggcccgagccga

SEQ ID NO: 174197 - DNA, 54 bp, Artificial
  Synthetic oligonucleotide
ctgggagcgaaggagaccattgtctggccggcctcccgttgtccccggtgtaaa

SEQ ID NO: 174198 - DNA, 55 bp, Artificial
  Synthetic oligonucleotide
ctgtcgactgaggatattgagtaagacatccacattctcacttccccgaatggag

SEQ ID NO: 174199 - DNA, 55 bp, Artificial
  Synthetic oligonucleotide
cttaccattgattaccgcaaacagcaaaatgcggtgcacttgcgcttgtccggcg

SEQ ID NO: 174200 - DNA, 55 bp, Artificial
  Synthetic oligonucleotide
tgagagaaggaggcctgtatggcgaaagtcggagtgtacgtctgtcattgcggtt

SEQ ID NO: 174201 - DNA, 55 bp, Artificial
  Synthetic oligonucleotide
tgaagtattcgccaccagcctgagcatacttgagcaaaactatatccagccactg

SEQ ID NO: 174202 - DNA, 55 bp, Artificial
  Synthetic oligonucleotide
gagaagcgatggacaagaattggtataatggcctccgccccatggatattacggg

SEQ ID NO: 174203 - DNA, 55 bp, Artificial
  Synthetic oligonucleotide
gagattcgcaaaaggctgtggcgcgactccaaaatctattcctggagccgggtga

SEQ ID NO: 174204 - DNA, 55 bp, Artificial
  Synthetic oligonucleotide
gagtcggtgccatcatcagtataatcgggatagagattgccatagccagctatgg

SEQ ID NO: 174205 - DNA, 55 bp, Artificial
  Synthetic oligonucleotide
tcgtcttctcaccgattattgagagcatcttgtaggcgattcttttggtcaggcc

SEQ ID NO: 174206 - DNA, 55 bp, Artificial
  Synthetic oligonucleotide
gatgagtcctaggcatgcgaggagcgttgtcagacgacgaatgctgaacccctgg

SEQ ID NO: 174207 - DNA, 60 bp, Artificial
  Synthetic oligonucleotide
tataagctaacaagttattatccgattaccacaccatattatgctaaatctaagcaataa

SEQ ID NO: 174208 - DNA, 55 bp, Artificial
  Synthetic oligonucleotide
gcaagcgcaaagggttgcgaacattaagaccatggtgcaaggcaagcgatttacc

SEQ ID NO: 174209 - DNA, 55 bp, Artificial
  Synthetic oligonucleotide
gccaccgggagtaagcacagaacagattggggcaaacattgcggctggctatgcc

SEQ ID NO: 174210 - DNA, 55 bp, Artificial
  Synthetic oligonucleotide
gcccttgcggcccgacttattgagccctaccttgctgcctgtgaacccgcctaga

SEQ ID NO: 174211 - DNA, 55 bp, Artificial
  Synthetic oligonucleotide
gccgcaacttgcgtcctcaaaggagtagatatcgatacgtttgcgtccatacttc

SEQ ID NO: 174212 - DNA, 55 bp, Artificial
  Synthetic oligonucleotide
gcgatacccgtactcccggtcgtaacggctccgcgaatcgtatcgacggtcatcg

SEQ ID NO: 174213 - DNA, 55 bp, Artificial
  Synthetic oligonucleotide
aaactgcagggcctgactgatattttcgccacggacaaatttaggctgcaattgc

SEQ ID NO: 174214 - DNA, 55 bp, Artificial
  Synthetic oligonucleotide
agctataatcgacaacggcgcttcaacatttattccactaggatcttatatcgcc

SEQ ID NO: 174215 - DNA, 55 bp, Artificial
  Synthetic oligonucleotide
agagtgtttatgtctctggaccggcacttgacgccgggaaacacagggtctgaat

SEQ ID NO: 174216 - DNA, 55 bp, Artificial
  Synthetic oligonucleotide
aactaggttatattatgcttgctgaatgctatcccctcttgtagattagcccgcc

SEQ ID NO: 174217 - DNA, 55 bp, Artificial
  Synthetic oligonucleotide
actggagcgcctgtcttcagtccgccaagatcgttaaagagcacccttatattta

SEQ ID NO: 174218 - DNA, 60 bp, Artificial
  Synthetic oligonucleotide
attacgtctacggacaatacgtcacatacatgattctaagattatacctaatcgcggcgc

SEQ ID NO: 174219 - DNA, 53 bp, Artificial
  Synthetic oligonucleotide
tagaaaccttccttacccaaaaggggatccgtacctgggacatgcaggacaac

SEQ ID NO: 174220 - DNA, 50 bp, Artificial
  Synthetic oligonucleotide
agatcctgggtaaccattcagggggcatattccggcccggggacagtccc

SEQ ID NO: 174221 - DNA, 50 bp, Artificial
  Synthetic oligonucleotide
agagtgtacacagcccggactcggctggactgccccggttgacagtaccc

SEQ ID NO: 174222 - DNA, 50 bp, Artificial
  Synthetic oligonucleotide
agagcagtggcaccaaagcatcccagggtctgcttgtcctcccgggttct

SEQ ID NO: 174223 - DNA, 50 bp, Artificial
  Synthetic oligonucleotide
agacgcccgtccgtaagcagggcaaaaagatctccggagggggaaaggcc

SEQ ID NO: 174224 - DNA, 50 bp, Artificial
  Synthetic oligonucleotide
agaccctcatggtcacccccattgacggggccaggctgacttccggatac

SEQ ID NO: 174225 - DNA, 50 bp, Artificial
  Synthetic oligonucleotide
agacagtttacgccctgtttgcaaagcccccggaccctggattgcagcgg

SEQ ID NO: 174226 - DNA, 50 bp, Artificial
  Synthetic oligonucleotide
actgtccccgggccgattgaggcactgaatggttgctcaactcccggctt

SEQ ID NO: 174227 - DNA, 50 bp, Artificial
  Synthetic oligonucleotide
actgggtccggtctctggctgttccggtgctcatagtcgcccccaacaga

SEQ ID NO: 174228 - DNA, 50 bp, Artificial
  Synthetic oligonucleotide
actggagcggagagccgggtcgtggattgggaaatttgtgccacagccgg

SEQ ID NO: 174229 - DNA, 50 bp, Artificial
  Synthetic oligonucleotide
actgccttgacgaagtggcgggcccatggacaaattccgctgcgcgagtt

SEQ ID NO: 174230 - DNA, 57 bp, Artificial
  Synthetic oligonucleotide
taatcccgtagggaatccatgttcttacgtgttcagttctctagccagagaaggcta

SEQ ID NO: 174231 - DNA, 50 bp, Artificial
  Synthetic oligonucleotide
actcggctccccttggcccgtccttcacactcgtatttgtccggtcagcg

SEQ ID NO: 174232 - DNA, 50 bp, Artificial
  Synthetic oligonucleotide
actcggagctggggcccattgtgagcacctaccgcgagtacaggcggatt

SEQ ID NO: 174233 - DNA, 50 bp, Artificial
  Synthetic oligonucleotide
actccagcccagatccgagccgctagaggactacttagatggtcgcaaaa

SEQ ID NO: 174234 - DNA, 50 bp, Artificial
  Synthetic oligonucleotide
actacgacgtccaggtcaagtacggccgcctccgggaatccgggtttcag

SEQ ID NO: 174235 - DNA, 50 bp, Artificial
  Synthetic oligonucleotide
acgtggatgcgccataggacatccctcctgttccaagcacccgcgtttgc

SEQ ID NO: 174236 - DNA, 50 bp, Artificial
  Synthetic oligonucleotide
acgtgctccacgaacctgaattgcggcccctgcaagcgagaaacccgttt

SEQ ID NO: 174237 - DNA, 50 bp, Artificial
  Synthetic oligonucleotide
accacgacaggtgtcaaaacgcgggggttgacccacccgggcaaagtcgc

SEQ ID NO: 174238 - DNA, 50 bp, Artificial
  Synthetic oligonucleotide
acccaaccagccgccccttttcattcgtcgcattgcgggccatgacgcaa

SEQ ID NO: 174239 - DNA, 50 bp, Artificial
  Synthetic oligonucleotide
acccgaggtgcattcgtccaggaacaaaaatcgcggcccaccgctcatgg

SEQ ID NO: 174240 - DNA, 50 bp, Artificial
  Synthetic oligonucleotide
acccgcgacctcctggggtcctgtcgcactgaactcgcaggcgtcctaag

SEQ ID NO: 174241 - DNA, 57 bp, Artificial
  Synthetic oligonucleotide
ttttggagatgcccccggtacaacgacaaatatttgtcacacagcatatgtcttatc

SEQ ID NO: 174242 - DNA, 50 bp, Artificial
  Synthetic oligonucleotide
acccgggctcgcaaacgttccgccacctccctggctccgtccagatcagt

SEQ ID NO: 174243 - DNA, 50 bp, Artificial
  Synthetic oligonucleotide
acccggggtgctccggtctgggcacgtccatggagtacgacaaatccacc

SEQ ID NO: 174244 - DNA, 50 bp, Artificial
  Synthetic oligonucleotide
accgaatacaagagctcccgatgcggttttgccccatcaggcagaggcgc

SEQ ID NO: 174245 - DNA, 50 bp, Artificial
  Synthetic oligonucleotide
accgcgttttcccgggctgcgacccgcacggcgtctttgcttttggccaa

SEQ ID NO: 174246 - DNA, 50 bp, Artificial
  Synthetic oligonucleotide
accgggttggagtctgtcggggcaatcacctggcaggaactctcagctgg

SEQ ID NO: 174247 - DNA, 50 bp, Artificial
  Synthetic oligonucleotide
accgtgggctggggatttatggaggcagcaggtccggtgcgggtaacaga

SEQ ID NO: 174248 - DNA, 50 bp, Artificial
  Synthetic oligonucleotide
acctgagcccctccgggcaggatatggtccgtggagatattgtccccgca

SEQ ID NO: 174249 - DNA, 50 bp, Artificial
  Synthetic oligonucleotide
acctgggcgtaatgccgcctgacctggttgtccccgggcctggattccag

SEQ ID NO: 174250 - DNA, 50 bp, Artificial
  Synthetic oligonucleotide
acgccgcccccttgaatgccggacattgaactgtcaggccccggaggcat

SEQ ID NO: 174251 - DNA, 50 bp, Artificial
  Synthetic oligonucleotide
acgggagagccattcagggggcgtaaccattcaaggggtcctcggtgctg

SEQ ID NO: 174252 - DNA, 56 bp, Artificial
  Synthetic oligonucleotide
gcgagggatttcgcttgccacgctccaccatactgatataggtacggtcaaatccg

SEQ ID NO: 174253 - DNA, 50 bp, Artificial
  Synthetic oligonucleotide
acgtccttggaggtcctgacaaccgtggccttagagcaggcgtgaaccga

SEQ ID NO: 174254 - DNA, 51 bp, Artificial
  Synthetic oligonucleotide
ggactgggcgcaaatagaaaccttccttacccaaaaggggatccgtacctg

SEQ ID NO: 174255 - DNA, 55 bp, Artificial
  Synthetic oligonucleotide
gatcgcctagttccccggaaccaccagacaacgcagcggcgcgagacaagctctg

SEQ ID NO: 174256 - DNA, 55 bp, Artificial
  Synthetic oligonucleotide
gaggtggattattcccgtgtactggtctgtattgtcgatatcaccgagcttgtta

SEQ ID NO: 174257 - DNA, 55 bp, Artificial
  Synthetic oligonucleotide
gaatgctcatagacgtgccatacatcagcatgcccaatcttatactggacagggg

SEQ ID NO: 174258 - DNA, 55 bp, Artificial
  Synthetic oligonucleotide
cttccggggatcgtcggtctcccagttctcagtactgttgccacagtgttcacaa

SEQ ID NO: 174259 - DNA, 55 bp, Artificial
  Synthetic oligonucleotide
ctggtatccgtgaacggatatgagggagtcacggccagtcccgacgccttgagat

SEQ ID NO: 174260 - DNA, 55 bp, Artificial
  Synthetic oligonucleotide
ccaaaaggggatccgtacctgggacatgcaggacaacggggaaatcttctatcgc

SEQ ID NO: 174261 - DNA, 55 bp, Artificial
  Synthetic oligonucleotide
cggtagcaggaacgagcggtgattatgaactgcgaatcgcctcaacggacccgga

SEQ ID NO: 174262 - DNA, 55 bp, Artificial
  Synthetic oligonucleotide
ttcccaccgcctctcggccacccacggcgattttcatccctggaatgtcctggtc

SEQ ID NO: 174263 - DNA, 55 bp, Artificial
  Synthetic oligonucleotide
ccttatatatcccgctgattatacgcatggtgctgccactctgattgtttgcccg

SEQ ID NO: 174264 - DNA, 55 bp, Artificial
  Synthetic oligonucleotide
ccgggtggattccatctggcgggactgcagggagcatacatctcccagccacctt

SEQ ID NO: 174265 - DNA, 55 bp, Artificial
  Synthetic oligonucleotide
aaaattcactctggcggataagcccggaatgacctccaaggcggtgcagatattc

SEQ ID NO: 174266 - DNA, 55 bp, Artificial
  Synthetic oligonucleotide
ccgcttagagcggtcacgtttccactcgctgacgcctgataagcgaaacggaagc

SEQ ID NO: 174267 - DNA, 55 bp, Artificial
  Synthetic oligonucleotide
ccgacccgaagcagaaacttttcaacccatgcgcacctttgaccgttctgtacta

SEQ ID NO: 174268 - DNA, 52 bp, Artificial
  Synthetic oligonucleotide
cccaggttgttttacctcctttggccctaggtattatgtggtcaccttcgag

SEQ ID NO: 174269 - DNA, 55 bp, Artificial
  Synthetic oligonucleotide
ccaatgtctgttcgatatagtggggagagagatattccgccgccggggaatgggg

SEQ ID NO: 174270 - DNA, 55 bp, Artificial
  Synthetic oligonucleotide
catggtcgacatgaacagtggccccttatggacaagggcgatatagcctggagga

SEQ ID NO: 174271 - DNA, 60 bp, Artificial
  Synthetic oligonucleotide
acgaactcgctctattgctggtaaccaatgtaatcggtaggcatcttagtagcggacagc

SEQ ID NO: 174272 - DNA, 55 bp, Artificial
  Synthetic oligonucleotide
caacgaggacatgaacacaaggagtagcgtgtcatgcatacatcagtgttgaccg

SEQ ID NO: 174273 - DNA, 55 bp, Artificial
  Synthetic oligonucleotide
atacttaacggagtcattaagaggtcaggcggtgattttcggcatttgaaggctg

SEQ ID NO: 174274 - DNA, 55 bp, Artificial
  Synthetic oligonucleotide
tatcgggacagatcggggcatcgctgtgtccgatgcagtcacaccctggcgtgac

SEQ ID NO: 174275 - DNA, 55 bp, Artificial
  Synthetic oligonucleotide
aagccattcccacggcggacccaaccagccgccccttttcattcgtcgcattgcg

SEQ ID NO: 174276 - DNA, 55 bp, Artificial
  Synthetic oligonucleotide
tattcgaagggtagagaaaagcaggcaggattcgacgcgcatcccagaagggcac

SEQ ID NO: 174277 - DNA, 55 bp, Artificial
  Synthetic oligonucleotide
gttgagcctgcccgacaaaattgcttggccccacgtttcacagggatcctggtcc

SEQ ID NO: 174278 - DNA, 55 bp, Artificial
  Synthetic oligonucleotide
gtccgatatgacccgggcggtatgacccaagccggtcatttgtgaaatcgttcgc

SEQ ID NO: 174279 - DNA, 55 bp, Artificial
  Synthetic oligonucleotide
gtcacatacatgattctaagattatacctaatcgcggcgctcatctgtcggttcg

SEQ ID NO: 174280 - DNA, 55 bp, Artificial
  Synthetic oligonucleotide
gtaggcacactccatactggaggattgcgcgtggttgttccagagaggggtctgc

SEQ ID NO: 174281 - DNA, 55 bp, Artificial
  Synthetic oligonucleotide
ggttctccagtggcttcgactcagcagtcgcctctccctgaaggttccgaccggt

SEQ ID NO: 174282 - DNA, 60 bp, Artificial
  Synthetic oligonucleotide
ttcgacctggttcaatctctgggtcgtatgttgcagttgagcattagtgtcgcgtaatat

SEQ ID NO: 174283 - DNA, 55 bp, Artificial
  Synthetic oligonucleotide
ggtgtaccgcaatcccgtgccgactgtagacgtggtggtccaatttccggaccgc

SEQ ID NO: 174284 - DNA, 54 bp, Artificial
  Synthetic oligonucleotide
gggttcgcaccagaacccgaaggatctctcgtttatcacctataaactggtccg

SEQ ID NO: 174285 - DNA, 54 bp, Artificial
  Synthetic oligonucleotide
gggctcgctcgataacgcttccggccgtagtacaggaaaaggcggcccaacgct

SEQ ID NO: 174286 - DNA, 55 bp, Artificial
  Synthetic oligonucleotide
gggcggcagataggaatcgctgtggagagcctgagggatatgcacctcttattgc

SEQ ID NO: 174287 - DNA, 55 bp, Artificial
  Synthetic oligonucleotide
gggcagaaaacggctcacgccatggatagtgccagtttccgagtgcgaattcccg

SEQ ID NO: 174288 - DNA, 55 bp, Artificial
  Synthetic oligonucleotide
gggacccggagcctgaacgagggcctggaagagcaaaacatccctccgattctcg

SEQ ID NO: 174289 - DNA, 55 bp, Artificial
  Synthetic oligonucleotide
ggactttatcgattgctcgtttatacatccggttcagggcgtcatagtattcctg

SEQ ID NO: 174290 - DNA, 55 bp, Artificial
  Synthetic oligonucleotide
ggagtcttacttaatggttgcaggccctctacaggccacgggacttaatctgcag

SEQ ID NO: 174291 - DNA, 54 bp, Artificial
  Synthetic oligonucleotide
ctcttactcttactattcacgtaacacgcaaggaggacaccatatggttgaatt

SEQ ID NO: 174292 - DNA, 53 bp, Artificial
  Synthetic oligonucleotide
ggggcctcatagtctggagggcaggcattgtattcagccggccctaaaaccgg

SEQ ID NO: 174293 - DNA, 60 bp, Artificial
  Synthetic oligonucleotide
cctttggcgctatcgaacaacacatggcgcagggaattacgatgcggcatgattgtgggt

SEQ ID NO: 174294 - DNA, 53 bp, Artificial
  Synthetic oligonucleotide
agcctgttgcagtccgtgagcacgagtggggcgtcgaagtcaaaggggcgaca

SEQ ID NO: 174295 - DNA, 53 bp, Artificial
  Synthetic oligonucleotide
ggcgagaacgtattgtgaatgctatccaggttgggaaagtgccggtgttgtgt

SEQ ID NO: 174296 - DNA, 53 bp, Artificial
  Synthetic oligonucleotide
ttgacgttgtcgggtcatgcgaagttcgggtatatgggtcatggcgccctccc

SEQ ID NO: 174297 - DNA, 52 bp, Artificial
  Synthetic oligonucleotide
cgtatttcatgcggcagtcagacatccttcacatgtaattgaatggttatgg

SEQ ID NO: 174298 - DNA, 52 bp, Artificial
  Synthetic oligonucleotide
cgcggctatcaccaacccctctgagatcccagccctactgggcgctatcagc

SEQ ID NO: 174299 - DNA, 52 bp, Artificial
  Synthetic oligonucleotide
ctttacagcagaaaagtcgtagcttggcaggtgcatgacagagaggatgcga

SEQ ID NO: 174300 - DNA, 51 bp, Artificial
  Synthetic oligonucleotide
attgttcttctctccccgggcctggttttttcctggacaggtaaggcggtc

SEQ ID NO: 174301 - DNA, 51 bp, Artificial
  Synthetic oligonucleotide
atgaccagatttatttccgggtgggctttgagcatatcatggtgggattca

SEQ ID NO: 174302 - DNA, 51 bp, Artificial
  Synthetic oligonucleotide
ggacgctgataaaagcggcccaccgcaacacaccagcgagactgcgcaggc

SEQ ID NO: 174303 - DNA, 51 bp, Artificial
  Synthetic oligonucleotide
caagtagcgaatgcactcccaggctttcactgcacatcacccgttgtacga

SEQ ID NO: 174304 - DNA, 59 bp, Artificial
  Synthetic oligonucleotide
tgtttcctgtggtgggactgcccaggcccacagtgcacaaagaaattcagggcttcgtc

SEQ ID NO: 174305 - DNA, 51 bp, Artificial
  Synthetic oligonucleotide
tcccgaggtgagggtcacttccccttcgatgtacgatttctcgagcagtaa

SEQ ID NO: 174306 - DNA, 51 bp, Artificial
  Synthetic oligonucleotide
tcattgccaggtccacggcaaacctgggtttaaaatcgtcagcagctatcc

SEQ ID NO: 174307 - DNA, 50 bp, Artificial
  Synthetic oligonucleotide
aggctaccgtaagggacgccggtcccgggaagaactacgcttcggagaca

SEQ ID NO: 174308 - DNA, 50 bp, Artificial
  Synthetic oligonucleotide
agctcggatttgccggtagccatacgtaaatcggtgcgtaatcgctctaa

SEQ ID NO: 174309 - DNA, 50 bp, Artificial
  Synthetic oligonucleotide
agcggggaacgacaggacaggataagcgccctgggctctttgcgcgacga

SEQ ID NO: 174310 - DNA, 50 bp, Artificial
  Synthetic oligonucleotide
agcggaccagactgaagcgcgggcatcttgtgtttgcatacgcgggttgc

SEQ ID NO: 174311 - DNA, 50 bp, Artificial
  Synthetic oligonucleotide
agccctgttaagccagaatctgcggaccgtggggataactgcccagcacc

SEQ ID NO: 174312 - DNA, 50 bp, Artificial
  Synthetic oligonucleotide
agccaggcgcaaaagggccactggagcaagagggctgtccggaaactctt

SEQ ID NO: 174313 - DNA, 50 bp, Artificial
  Synthetic oligonucleotide
agcacctggtggattacagactgtccagggtcagagggactccgctgggg

SEQ ID NO: 174314 - DNA, 50 bp, Artificial
  Synthetic oligonucleotide
acagtgtttcgccgggcgtcatacaccgagccgtacaccgatggggagcg

SEQ ID NO: 174315 - DNA, 53 bp, Artificial
  Synthetic oligonucleotide
aagccgaaacctagaggagtggactgggcgcaaatagaaaccttccttaccca

SEQ ID NO: 174316 - DNA, 50 bp, Artificial
  Synthetic oligonucleotide
acaggtacacccatccacagggcctcgcagctggtaagaccgccggtaaa

SEQ ID NO: 174317 - DNA, 50 bp, Artificial
  Synthetic oligonucleotide
acacggggcaggcaggattaaccacgccaaagacgcgtggcaggcataga

SEQ ID NO: 174318 - DNA, 50 bp, Artificial
  Synthetic oligonucleotide
acacggagtgcggcaagttgggccggtccgcaatgggaggagtcggtttt

SEQ ID NO: 174319 - DNA, 50 bp, Artificial
  Synthetic oligonucleotide
acaccgtgggtctggtcagggtccggagggcatattgggataagcctgcg

SEQ ID NO: 174320 - DNA, 50 bp, Artificial
  Synthetic oligonucleotide
acaacgggctctgtccggcgagactacgcgggtcaaaatgggccacgata

SEQ ID NO: 174321 - DNA, 50 bp, Artificial
  Synthetic oligonucleotide
acaacatgcgaggggttgctgccatgcctcctcttggggcgggttaccgc

SEQ ID NO: 174322 - DNA, 50 bp, Artificial
  Synthetic oligonucleotide
acaacaccgggtctggaccgatataccgggccgtccacacgatctcacgc

SEQ ID NO: 174323 - DNA, 50 bp, Artificial
  Synthetic oligonucleotide
aatggcgctacaccggccaacgcgaggtcccgttgaccgcagtcggacgc

SEQ ID NO: 174324 - DNA, 50 bp, Artificial
  Synthetic oligonucleotide
aatccgcttcggaagaaccttcggtgctcgaggccgcttctcaggctcct

SEQ ID NO: 174325 - DNA, 50 bp, Artificial
  Synthetic oligonucleotide
aatccgcctggggatataccggggacagggggtcaagctccctccacacg

SEQ ID NO: 174326 - DNA, 56 bp, Artificial
  Synthetic oligonucleotide
gcaatttaaggcgtggctgattcgctagaagggtagggccaataagggggattggc

SEQ ID NO: 174327 - DNA, 50 bp, Artificial
  Synthetic oligonucleotide
aatcacgcaaagcccgtcatcctgaaccccctcccggatctggtgcctgg

SEQ ID NO: 174328 - DNA, 50 bp, Artificial
  Synthetic oligonucleotide
aagtccattggcggcgggattaaacgccatcgtcgggcaatccaaacccg

SEQ ID NO: 174329 - DNA, 50 bp, Artificial
  Synthetic oligonucleotide
aagggtcgccacccgggctcgcaaacgttccgccacctccctggctccgt

SEQ ID NO: 174330 - DNA, 50 bp, Artificial
  Synthetic oligonucleotide
aagggagagtgcagcgcatgtcgttcctcctctgcgctcggtcaacgctc

SEQ ID NO: 174331 - DNA, 50 bp, Artificial
  Synthetic oligonucleotide
aaggcaggcctagggaaaacgcagggtcttgacctcaccggatgaggcat

SEQ ID NO: 174332 - DNA, 50 bp, Artificial
  Synthetic oligonucleotide
aagcttccctggctctggtcaggctgcgaggttgtatacggtcgtccgta

SEQ ID NO: 174333 - DNA, 50 bp, Artificial
  Synthetic oligonucleotide
aagctgtcttgaacgcccacccttgcactcgtccgggacagcctgtagtc

SEQ ID NO: 174334 - DNA, 50 bp, Artificial
  Synthetic oligonucleotide
aagcgtctacttgcagatccatggtccgggggctttgcaaacagggcgta

SEQ ID NO: 174335 - DNA, 50 bp, Artificial
  Synthetic oligonucleotide
aagcggagtagccgccaacgagaccaggacagccaacagcggtttgagag

SEQ ID NO: 174336 - DNA, 50 bp, Artificial
  Synthetic oligonucleotide
aagacccggggcagagcccataacacgggttcctgcgttagtaccgtcgg

SEQ ID NO: 174337 - DNA, 54 bp, Artificial
  Synthetic oligonucleotide
gggccaccatgccccatagaaacccctgtaaggcccatatacccccaggctccc

SEQ ID NO: 174338 - DNA, 50 bp, Artificial
  Synthetic oligonucleotide
aactcggttcttcccacctgggtctggaaacgccatgctgcaatcccggg

SEQ ID NO: 174339 - DNA, 50 bp, Artificial
  Synthetic oligonucleotide
aacctgaattgcggcccctgcaagcgagaaacccgttttaccgccaccat

SEQ ID NO: 174340 - DNA, 50 bp, Artificial
  Synthetic oligonucleotide
aaccctgaaactcggactgacccccacaccggctcacggatcgagcagtg

SEQ ID NO: 174341 - DNA, 50 bp, Artificial
  Synthetic oligonucleotide
aacagtttcccggtcttcctgtcctgcgcacatgtctggaaagcggccct

SEQ ID NO: 174342 - DNA, 50 bp, Artificial
  Synthetic oligonucleotide
aaatgcaacaccctcaaacggccagcttctggcaattgtacggccccgcc

SEQ ID NO: 174343 - DNA, 50 bp, Artificial
  Synthetic oligonucleotide
aaagaaccgcgcttatccgtcccggccagtcgcagaggctgaagggctca

SEQ ID NO: 174344 - DNA, 50 bp, Artificial
  Synthetic oligonucleotide
aaactcctgtatgacctcttgcccgctggaaccgctcccctggacccagc

SEQ ID NO: 174345 - DNA, 50 bp, Artificial
  Synthetic oligonucleotide
aaacctcgatcgttctgcctcgggtgacctgcggggagtggcattgccaa

SEQ ID NO: 174346 - DNA, 50 bp, Artificial
  Synthetic oligonucleotide
aaaccggcactgcccggaacacgtccaagattcaggcaccccagggtgag

SEQ ID NO: 174347 - DNA, 50 bp, Artificial
  Synthetic oligonucleotide
aaaacggagcatccgctttcggagcgtctgccgtgtgatgcgtgtgttgg

SEQ ID NO: 174348 - DNA, 55 bp, Artificial
  Synthetic oligonucleotide
caaaccagagcacgaaggcgttttgtttatccacggcagtcctcctcggggtgcg

SEQ ID NO: 174349 - DNA, 55 bp, Artificial
  Synthetic oligonucleotide
gactgtctgaccgagccaggcatcgtttgtcgcattgtcgcgttacgcccgaagt

SEQ ID NO: 174350 - DNA, 55 bp, Artificial
  Synthetic oligonucleotide
gcacaggaggacattacgtttcatacaattctccggaacgcagctccaatgtgcg

SEQ ID NO: 174351 - DNA, 55 bp, Artificial
  Synthetic oligonucleotide
gcatgttcttctaaccctgcgcgctctgttgttacgacacccctgccaggcacga

SEQ ID NO: 174352 - DNA, 55 bp, Artificial
  Synthetic oligonucleotide
ggattccatacgggccatcgcaatggatatgtgggagccatatttcacggcgacc

SEQ ID NO: 174353 - DNA, 55 bp, Artificial
  Synthetic oligonucleotide
ggattcgtcacctcgcaccagaagtactatctcgtcttcaatgccgcccacggcc

SEQ ID NO: 174354 - DNA, 55 bp, Artificial
  Synthetic oligonucleotide
ggtcacgtacgaagtcggaaacagtggagacaaagggcctcgcgccctgaatgtg

SEQ ID NO: 174355 - DNA, 55 bp, Artificial
  Synthetic oligonucleotide
gttgcttccaaacatttccgtaagggatgtctcgttgaaattcaggggagcatgc

SEQ ID NO: 174356 - DNA, 55 bp, Artificial
  Synthetic oligonucleotide
tccgctgaagtacggataggcgaatctgggatgcccgtggatggatacggtcaga

SEQ ID NO: 174357 - DNA, 55 bp, Artificial
  Synthetic oligonucleotide
tttcccgtaacgacggtgaccgccaatagaaacatccgatccataattcgcgaat

SEQ ID NO: 174358 - DNA, 55 bp, Artificial
  Synthetic oligonucleotide
tttgtctacaagctcgaaggcgtggactccgcctggaccgacgccggaacgcagt

SEQ ID NO: 174359 - DNA, 55 bp, Artificial
  Synthetic oligonucleotide
catacaccgcaaccgggatatatgacgggtcaggccggaggggagcccagcgtat

SEQ ID NO: 174360 - DNA, 55 bp, Artificial
  Synthetic oligonucleotide
aaaacggggcaactcgtctatagctcctctccatgattgcctatcttgaaggaac

SEQ ID NO: 174361 - DNA, 53 bp, Artificial
  Synthetic oligonucleotide
gttcgccacagggatgtgcgaccatcggtgctcctcgttcaaagagtattgcg

SEQ ID NO: 174362 - DNA, 53 bp, Artificial
  Synthetic oligonucleotide
cggttgttaagtcctacttcgcttctttgtcaagaagtgtgcggcgtctctct

SEQ ID NO: 174363 - DNA, 53 bp, Artificial
  Synthetic oligonucleotide
cgcatcccgtttctaaaccgactcgcctcatatccccgaagggacggacccta

SEQ ID NO: 174364 - DNA, 52 bp, Artificial
  Synthetic oligonucleotide
gcgaaattgtatgaatgacgccgcagctagatttgctgtgaatggtacggac

SEQ ID NO: 174365 - DNA, 52 bp, Artificial
  Synthetic oligonucleotide
gtcccatggaacaggccactctggcgcgctcccggattctcctcgttggctg

SEQ ID NO: 174366 - DNA, 52 bp, Artificial
  Synthetic oligonucleotide
cgaggtgcttccggaagaaattcgcacaagggtagacaaactggggtttgtc

SEQ ID NO: 174367 - DNA, 52 bp, Artificial
  Synthetic oligonucleotide
tggagcccggcgacagtctgtatttcacctcgcgtactcctcacgccctgcg

SEQ ID NO: 174368 - DNA, 52 bp, Artificial
  Synthetic oligonucleotide
ttttcgcgtgtgaagatggattgcggaattcagggcgggacgaatgcgggcg

SEQ ID NO: 174369 - DNA, 51 bp, Artificial
  Synthetic oligonucleotide
cgggttaggagtaggaggacgtgtactggcggaacgtgtcgggacagatca

SEQ ID NO: 174370 - DNA, 55 bp, Artificial
  Synthetic oligonucleotide
ccagtaccgctcgcaggtcacgaattacgaactggagagatacttaccccggctg

SEQ ID NO: 174371 - DNA, 51 bp, Artificial
  Synthetic oligonucleotide
cctgaacgcggcggtagaattcctcgtatcctttgccgaaacagcgcatat

SEQ ID NO: 174372 - DNA, 50 bp, Artificial
  Synthetic oligonucleotide
acgccggcatgcccaccaacgcgaactgtgtcggatgccatgaggatgtt

SEQ ID NO: 174373 - DNA, 50 bp, Artificial
  Synthetic oligonucleotide
acgattcgatcaggaaacgttcccagccggtgtcgcagcggagcaatgcg

SEQ ID NO: 174374 - DNA, 50 bp, Artificial
  Synthetic oligonucleotide
acgacgggacgattcgatcaggaaacgttcccagccggtgtcgcagcgga

SEQ ID NO: 174375 - DNA, 50 bp, Artificial
  Synthetic oligonucleotide
accttgcctcgggatacatcgcggagccgcacccttcggggatgcattta

SEQ ID NO: 174376 - DNA, 50 bp, Artificial
  Synthetic oligonucleotide
accccgttttgtctacaagctcgaaggcgtggactccgcctggaccgacg

SEQ ID NO: 174377 - DNA, 50 bp, Artificial
  Synthetic oligonucleotide
accccatgcggtagacccagacgggcttgtccgcccggtttcggagcacg

SEQ ID NO: 174378 - DNA, 50 bp, Artificial
  Synthetic oligonucleotide
acagtccccaactccgatccgtccgtgatggcagaacatcccggcagctc

SEQ ID NO: 174379 - DNA, 50 bp, Artificial
  Synthetic oligonucleotide
aatcgggatgccaggtgaggcacagcttgcgaaacgcaccctggacgagt

SEQ ID NO: 174380 - DNA, 50 bp, Artificial
  Synthetic oligonucleotide
aatcccgttctccgcagaaggggcgctttgggattccggccaggaacttt

SEQ ID NO: 174381 - DNA, 55 bp, Artificial
  Synthetic oligonucleotide
ccgttgcgtcggccatgcgtcctgtcctgctccacgactttcggtcacgtaactc

SEQ ID NO: 174382 - DNA, 50 bp, Artificial
  Synthetic oligonucleotide
aatattgggtgcaggcagggataggtgtgaggcattcctcccgcgcctcc

SEQ ID NO: 174383 - DNA, 50 bp, Artificial
  Synthetic oligonucleotide
aactcgcgtccgcagagctcatgggcgtaagccgctttcttggtctgacc

SEQ ID NO: 174384 - DNA, 50 bp, Artificial
  Synthetic oligonucleotide
aacctacgcagacctcgcgccgggacaaataggactcctggcgggcagtc

SEQ ID NO: 174385 - DNA, 50 bp, Artificial
  Synthetic oligonucleotide
aaccgtccgaggtgcgaccatgcttctcctaggcatcatcggccacccgc

SEQ ID NO: 174386 - DNA, 50 bp, Artificial
  Synthetic oligonucleotide
aaccggctgtgcaggggaaaacgctcgtcatccaatcgggctgccacggt

SEQ ID NO: 174387 - DNA, 50 bp, Artificial
  Synthetic oligonucleotide
aaccctgcgcgctctgttgttacgacacccctgccaggcacgaattcgaa

SEQ ID NO: 174388 - DNA, 50 bp, Artificial
  Synthetic oligonucleotide
aaagcgcgagaggtccaaggaaatcgatgcgagcaaagccattgccccgc

SEQ ID NO: 174389 - DNA, 50 bp, Artificial
  Synthetic oligonucleotide
agcaaaagtgccgcgccattgctcactcggaaggtttgctgccgtttccg

SEQ ID NO: 174390 - DNA, 50 bp, Artificial
  Synthetic oligonucleotide
agcactctgtaggctggatgcgtttgccggaccgatgcgtctgcccagaa

SEQ ID NO: 174391 - DNA, 50 bp, Artificial
  Synthetic oligonucleotide
agccgcccaattctcgaaacaagtcggctcgcacgagtaggcaggctccg

SEQ ID NO: 174392 - DNA, 55 bp, Artificial
  Synthetic oligonucleotide
cgaaatgaccgatcctgtccggttgcctggacccgccggtctgtgtcactactcg

SEQ ID NO: 174393 - DNA, 50 bp, Artificial
  Synthetic oligonucleotide
agcctacccgcgcccctttttgagcactttcgcgaactgggtccggaaca

SEQ ID NO: 174394 - DNA, 50 bp, Artificial
  Synthetic oligonucleotide
agcgcaaagcatgcgggtcgaagtagaacgggcctcccgcgtcctcgaaa

SEQ ID NO: 174395 - DNA, 50 bp, Artificial
  Synthetic oligonucleotide
agcgccgtgctcaggctgtgagtccagaatttgcgcacagagaacgaggg

SEQ ID NO: 174396 - DNA, 50 bp, Artificial
  Synthetic oligonucleotide
agcggcaaacggcgcgttgataacagcaggcggtgtaggcgacagtccgt

SEQ ID NO: 174397 - DNA, 50 bp, Artificial
  Synthetic oligonucleotide
agctcattcccgtactgccgtaggtgagcggctccattcggacagcccaa

SEQ ID NO: 174398 - DNA, 50 bp, Artificial
  Synthetic oligonucleotide
agcttcgacctttctcccggaagaggggcgcattcgtgatacggcgtcca

SEQ ID NO: 174399 - DNA, 50 bp, Artificial
  Synthetic oligonucleotide
aggagtcgcggtgtttcgcggttccaagctccgccagccggatatacttc

SEQ ID NO: 174400 - DNA, 50 bp, Artificial
  Synthetic oligonucleotide
agattccgctcccgttccagtttgcggcctccgtccatgtggcgtttcgc

SEQ ID NO: 174401 - DNA, 50 bp, Artificial
  Synthetic oligonucleotide
agacggcaaacacgaaccgggaaccgctacactgcgtgtcctcaagggag

SEQ ID NO: 174402 - DNA, 50 bp, Artificial
  Synthetic oligonucleotide
agaagaattccggtccggagtccaagggacgcggcagaaggaacgaacgg

SEQ ID NO: 174403 - DNA, 55 bp, Artificial
  Synthetic oligonucleotide
ctccaatctgttatggccgaaatttacgcaaactgtatctgtaccgcaaacagtt

SEQ ID NO: 174404 - DNA, 50 bp, Artificial
  Synthetic oligonucleotide
agaaaccatcccggaaggggccccggctcttgttgacgaacgcacatacg

SEQ ID NO: 174405 - DNA, 50 bp, Artificial
  Synthetic oligonucleotide
acttttcacgccggacatcctgagggatgcctggtccgccgcagtccttc

SEQ ID NO: 174406 - DNA, 50 bp, Artificial
  Synthetic oligonucleotide
acttcgaataggccgcgccgttgccccgaggttcgctcagcggaggtagc

SEQ ID NO: 174407 - DNA, 50 bp, Artificial
  Synthetic oligonucleotide
acttcaagcgtgccgccccggagtcccatgttgcacaggcctcttgcgac

SEQ ID NO: 174408 - DNA, 50 bp, Artificial
  Synthetic oligonucleotide
actgtctgaccgagccaggcatcgtttgtttccccgctgctggtccgccc

SEQ ID NO: 174409 - DNA, 50 bp, Artificial
  Synthetic oligonucleotide
actgaacaaacgaggcctggatcggtcagacagtcggcggcccttgcccg

SEQ ID NO: 174410 - DNA, 55 bp, Artificial
  Synthetic oligonucleotide
ctcgactactatgcacacgtcctgcgcatggatcctgaagagccacaagccctgt

SEQ ID NO: 174411 - DNA, 55 bp, Artificial
  Synthetic oligonucleotide
cttgtcaggactcatcggcgtgcgtagagtctgtatatattcgtagctaacgggg

SEQ ID NO: 174412 - DNA, 55 bp, Artificial
  Synthetic oligonucleotide
ctttgaaggccgggattttggagaacgcgttttgccatttcatgcggatgccaac

SEQ ID NO: 174413 - DNA, 55 bp, Artificial
  Synthetic oligonucleotide
atgacgaaaaactagaccagggacattatgtaaagacaacttttgttctaaagca

SEQ ID NO: 174414 - DNA, 58 bp, Artificial
  Synthetic oligonucleotide
taaaggcaacgatgttggcacttcgagaggggtacaacgggcagacaaaggcgaagca

SEQ ID NO: 174415 - DNA, 55 bp, Artificial
  Synthetic oligonucleotide
ctctcaaatacggcaactgcagctacccatctttcacggaagtctttggccaaac

SEQ ID NO: 174416 - DNA, 55 bp, Artificial
  Synthetic oligonucleotide
agtgtgcgagaaccctgaactgcatatcggagagggaacctacatcgcgcctcgc

SEQ ID NO: 174417 - DNA, 55 bp, Artificial
  Synthetic oligonucleotide
atccgctatggcaccgtcaagggtattcgggtctaccgctcgtccgtggaacgct

SEQ ID NO: 174418 - DNA, 55 bp, Artificial
  Synthetic oligonucleotide
agtgttgtgctgatagccatagcgctctacgtacggacccatattcttgaaaccc

SEQ ID NO: 174419 - DNA, 55 bp, Artificial
  Synthetic oligonucleotide
ctatcggccaacaggcctatctgggcttttcttcatgcttatccagcgataaccg

SEQ ID NO: 174420 - DNA, 55 bp, Artificial
  Synthetic oligonucleotide
ctatgcccagctgtggtgattgcattaattttgtctgcacattgtctggcaagtg

SEQ ID NO: 174421 - DNA, 55 bp, Artificial
  Synthetic oligonucleotide
ataatgcgtgaacttccgcatggattggcacatggtacgaataatggtggcgggg

SEQ ID NO: 174422 - DNA, 55 bp, Artificial
  Synthetic oligonucleotide
cccatcccattaattccccgagtggcgagaaacgttggcaggagtggacgaacag

SEQ ID NO: 174423 - DNA, 55 bp, Artificial
  Synthetic oligonucleotide
ctcaaggcattcagcggacaccatatagactggaacctttcccctgaacatgcgg

SEQ ID NO: 174424 - DNA, 55 bp, Artificial
  Synthetic oligonucleotide
atatctacggggaggaccagaaatgcagcggtgtcacttggcaatccttgcactc

SEQ ID NO: 174425 - DNA, 60 bp, Artificial
  Synthetic oligonucleotide
caagcggcaatgcagtgacaatagggtctgcattctcaggcagcaacagtatcgatgtct

SEQ ID NO: 174426 - DNA, 55 bp, Artificial
  Synthetic oligonucleotide
ctcactccagcggaccttgtccccttagacaccgcaactatggaggtgcttcagc

SEQ ID NO: 174427 - DNA, 55 bp, Artificial
  Synthetic oligonucleotide
ctccagctttctgcggcccagggttctacctgaaggtccttgtcataacgcaggg

SEQ ID NO: 174428 - DNA, 55 bp, Artificial
  Synthetic oligonucleotide
atacaggagttagccctgctgagaacgacagatatacagctgataattcccttct

SEQ ID NO: 174429 - DNA, 55 bp, Artificial
  Synthetic oligonucleotide
ctcccacgaggaaaacttctcgtagaattcaatgagcaggcgggtgagttgttcg

SEQ ID NO: 174430 - DNA, 54 bp, Artificial
  Synthetic oligonucleotide
atagactgctccgaggataaactcaaccaggccgtttggtcccggtggagttcg

SEQ ID NO: 174431 - DNA, 55 bp, Artificial
  Synthetic oligonucleotide
ctccttctcacggcacttatcggacgctaagaccatacctttagggccttcctcg

SEQ ID NO: 174432 - DNA, 54 bp, Artificial
  Synthetic oligonucleotide
atacggactcgggcattgaacagtaggggctgtttctaaactgtcctttcgccc

SEQ ID NO: 174433 - DNA, 55 bp, Artificial
  Synthetic oligonucleotide
ctccgcaagaggtccacattacggacggaccattccttatccaagagccttatcg

SEQ ID NO: 174434 - DNA, 55 bp, Artificial
  Synthetic oligonucleotide
gaatcgctctctggttgactatctctgcctacgaaatcgtttaatgctagtacgt

SEQ ID NO: 174435 - DNA, 55 bp, Artificial
  Synthetic oligonucleotide
gacccacaggcaaatttaagtcaaagtcttggggtccagcatgctgaaatgacta

SEQ ID NO: 174436 - DNA, 54 bp, Artificial
  Synthetic oligonucleotide
aatcgaaggtcggcattccgacaccttactgtcgaaaaacctcgcacttgacgt

SEQ ID NO: 174437 - DNA, 55 bp, Artificial
  Synthetic oligonucleotide
gaccgacgctagtggtagtggccagggacactcgcatgattacgccccgccgtat

SEQ ID NO: 174438 - DNA, 55 bp, Artificial
  Synthetic oligonucleotide
gactatgggctggtctgctttgtcggcggtgaccgtaagatcggtgccgtgaccg

SEQ ID NO: 174439 - DNA, 55 bp, Artificial
  Synthetic oligonucleotide
gagcgacgggcctgatcaaccaggaggtaataaggcgcggactcgaactggggtg

SEQ ID NO: 174440 - DNA, 55 bp, Artificial
  Synthetic oligonucleotide
gagcgttgtaccaagcggctatgtcgccttgagctatgccgtcaggtatgatgcc

SEQ ID NO: 174441 - DNA, 55 bp, Artificial
  Synthetic oligonucleotide
gagcttggatttccggacacggcattgaacggatcacggccataagcggtgtgcg

SEQ ID NO: 174442 - DNA, 55 bp, Artificial
  Synthetic oligonucleotide
gagtacgagttatgccctgacagatgtagctaccaatcagtaatgcgggagcttc

SEQ ID NO: 174443 - DNA, 55 bp, Artificial
  Synthetic oligonucleotide
gataggaaccgattttgcgcggttcattctcaggggtagagttgaacatgggcgg

SEQ ID NO: 174444 - DNA, 55 bp, Artificial
  Synthetic oligonucleotide
gatcaatgcaggaccggaaaagcagacgtccaacttttgtatgccagagtgcgta

SEQ ID NO: 174445 - DNA, 55 bp, Artificial
  Synthetic oligonucleotide
ccgcgtggcagtcttcccgcttgctgcggggtaagtcctccacgcatatcgcatt

SEQ ID NO: 174446 - DNA, 55 bp, Artificial
  Synthetic oligonucleotide
gatctccggcctccaatgcccctctgtcgctggacgaaagcgagaaacaggccat

SEQ ID NO: 174447 - DNA, 60 bp, Artificial
  Synthetic oligonucleotide
acatgggtttgtgctttcatgataggcggttgtccgatttcacagtgaaccacagcgcat

SEQ ID NO: 174448 - DNA, 55 bp, Artificial
  Synthetic oligonucleotide
gattctgtatcaatcgcaggtgcctctgagtattttaacccttctagtacctccg

SEQ ID NO: 174449 - DNA, 55 bp, Artificial
  Synthetic oligonucleotide
gattgcagacctaaccttaggcaatcacgagcaaagcacttcaccaatgcgtgct

SEQ ID NO: 174450 - DNA, 55 bp, Artificial
  Synthetic oligonucleotide
gattgcgatactgcaacttatgactgcgccagttgcaagtctgaagacaaccaca

SEQ ID NO: 174451 - DNA, 55 bp, Artificial
  Synthetic oligonucleotide
gcaactgtcccgtgcggcttacgtataacgttgaccgctgtaaacgctgcggttc

SEQ ID NO: 174452 - DNA, 55 bp, Artificial
  Synthetic oligonucleotide
gcaaggaaaacgagcctgccatgagggagtatactcttatcgtatttgaccgaca

SEQ ID NO: 174453 - DNA, 54 bp, Artificial
  Synthetic oligonucleotide
gcactgggccgattttaggggaaccggatggtcttgctttcgcctttctcggtc

SEQ ID NO: 174454 - DNA, 55 bp, Artificial
  Synthetic oligonucleotide
gcatacttataacctgtttgtaatgcaacagctactcccatattaaagggatgac

SEQ ID NO: 174455 - DNA, 55 bp, Artificial
  Synthetic oligonucleotide
gcatagcacctttaattcgattctcagcatatgtttcaaaccgaatacctagctg

SEQ ID NO: 174456 - DNA, 55 bp, Artificial
  Synthetic oligonucleotide
agattcgttgcagcgctgagtaagggtaaaacttgacgccttgccgttttccgag

SEQ ID NO: 174457 - DNA, 55 bp, Artificial
  Synthetic oligonucleotide
gcatgccgacaccctctgagtatcggaaaggtctcccgtgcacattgacgggcgg

SEQ ID NO: 174458 - DNA, 59 bp, Artificial
  Synthetic oligonucleotide
catgacacaccagtcacccccgtgacaacaaaagccacgggtgactgcgatagacaccc

SEQ ID NO: 174459 - DNA, 55 bp, Artificial
  Synthetic oligonucleotide
gcattgctgagcccggtccgcacaggcgacggggtaatataggtataccccgtgt

SEQ ID NO: 174460 - DNA, 51 bp, Artificial
  Synthetic oligonucleotide
gccaaatgcgtatactggacccgtcccggcctttcggggcgggtcttccct

SEQ ID NO: 174461 - DNA, 55 bp, Artificial
  Synthetic oligonucleotide
ctctgagttctccggagaatgctcaatacagaatgtcatccactcagacgccctt

SEQ ID NO: 174462 - DNA, 52 bp, Artificial
  Synthetic oligonucleotide
ctgccgacacgggaaacgtcggcctttaacctttggtatcgctttccgagag

SEQ ID NO: 174463 - DNA, 55 bp, Artificial
  Synthetic oligonucleotide
ctgcgaccatattcgcgcatgacaaagagccatccgtcgtccaccaaatggtgga

SEQ ID NO: 174464 - DNA, 55 bp, Artificial
  Synthetic oligonucleotide
ctgcggattgggatagagtgtcttttcctgccgaattcaaccttgttttccccgc

SEQ ID NO: 174465 - DNA, 55 bp, Artificial
  Synthetic oligonucleotide
ctgcgtcacagccaaagtggttccacagtccgcagccacactacatgccacagtg

SEQ ID NO: 174466 - DNA, 55 bp, Artificial
  Synthetic oligonucleotide
ctgcttccttcagtttcatgtgacattactatgtgacgctataaagagatgtcta

SEQ ID NO: 174467 - DNA, 55 bp, Artificial
  Synthetic oligonucleotide
ctggccgtcaaagataagtgttatcggtcagatgggaattctcggcggaactatc

SEQ ID NO: 174468 - DNA, 55 bp, Artificial
  Synthetic oligonucleotide
ctggctgtacggaccctcccaggtaatcctcagtctttacttattattgcacagc

SEQ ID NO: 174469 - DNA, 60 bp, Artificial
  Synthetic oligonucleotide
tgggaggtgtgatgtacttgaggtcaaatggtgttgagctaatcgacttgactgatgttc

SEQ ID NO: 174470 - DNA, 55 bp, Artificial
  Synthetic oligonucleotide
ctggtgcccagtctgtatcaaaagtgattgcaattgcattttgcgtttgtatggg

SEQ ID NO: 174471 - DNA, 55 bp, Artificial
  Synthetic oligonucleotide
ctgtccgggcgataatagggatcataggaaacatatatccgcttggcgctagccg

SEQ ID NO: 174472 - DNA, 55 bp, Artificial
  Synthetic oligonucleotide
ctgtcgcgaaacgtggatctcgtcggctggaattaatccaacgtcgggcaccagg

SEQ ID NO: 174473 - DNA, 55 bp, Artificial
  Synthetic oligonucleotide
ctgttccttgcattgtgggtcttctcgtcacgcaagcgccccaccgggcatgtct

SEQ ID NO: 174474 - DNA, 55 bp, Artificial
  Synthetic oligonucleotide
cttacatcatgcccattttgctctgctacaccgacagcatatgctaaccaaaatg

SEQ ID NO: 174475 - DNA, 55 bp, Artificial
  Synthetic oligonucleotide
cttatagatttcttaggggagaagtaatgatgttaggtcgcatgttaggtagtct

SEQ ID NO: 174476 - DNA, 54 bp, Artificial
  Synthetic oligonucleotide
cttcccatttggtacgtagacgcgatgcgttgttggaaaatgtcggccccaacg

SEQ ID NO: 174477 - DNA, 55 bp, Artificial
  Synthetic oligonucleotide
cttctagggaatctcctggtgttccagccataatgcaaccatgtaccataattcc

SEQ ID NO: 174478 - DNA, 55 bp, Artificial
  Synthetic oligonucleotide
cttgaacgggtagtttccgcttccgaacagatgtctgtacaatccaatcaattgc

SEQ ID NO: 174479 - DNA, 55 bp, Artificial
  Synthetic oligonucleotide
aggcaggttagggatatcagccaacgtgttgaaagcactaaagtgtcaggatgag

SEQ ID NO: 174480 - DNA, 57 bp, Artificial
  Synthetic oligonucleotide
atcttatggaaacaaatcggaattaaccttcagacattgatcgcttttgtaggcaag

SEQ ID NO: 174481 - DNA, 55 bp, Artificial
  Synthetic oligonucleotide
cttggcctcggcccacaaaagccagtttcgacatatccgtttgaaatgcacagca

SEQ ID NO: 174482 - DNA, 55 bp, Artificial
  Synthetic oligonucleotide
cttgttcaaaagtaaactctatttcacgcaactcagataatgctcgtcttacacg

SEQ ID NO: 174483 - DNA, 54 bp, Artificial
  Synthetic oligonucleotide
aggagtgttcgcggggattacgggccccgcgatgacgtcgctaaccccaactca

SEQ ID NO: 174484 - DNA, 55 bp, Artificial
  Synthetic oligonucleotide
gaaaacgagcctgccatgagggagtgccctagccgttaggcgagcgaagcgaacc

SEQ ID NO: 174485 - DNA, 55 bp, Artificial
  Synthetic oligonucleotide
gaaacctcatgcgtggtactgattggtaccactaaccctgcggacgcggattgtc

SEQ ID NO: 174486 - DNA, 55 bp, Artificial
  Synthetic oligonucleotide
gaaagacgactaacagcaatgccaacctacaaggacatagagtatatcctcaccc

SEQ ID NO: 174487 - DNA, 55 bp, Artificial
  Synthetic oligonucleotide
gaagtgacggattaagcggcgagtacggagtaaaggcagtcttttgctgttcgcg

SEQ ID NO: 174488 - DNA, 55 bp, Artificial
  Synthetic oligonucleotide
cctataattgtcgacgcctcaggtcggggtatgcttgtacaaagtcatcatcgcc

SEQ ID NO: 174489 - DNA, 55 bp, Artificial
  Synthetic oligonucleotide
cagggcagcattcaagaacgttggaagaacgactccgtcgcctgcctcgttcgcc

SEQ ID NO: 174490 - DNA, 55 bp, Artificial
  Synthetic oligonucleotide
cagggagttattcaacatgcgtatggcgaaaattgtcgctctggcagtggctatg

SEQ ID NO: 174491 - DNA, 60 bp, Artificial
  Synthetic oligonucleotide
acattctcacagcgctgcttatgatccttcttcacggcaatataagggtcggcagaacca

SEQ ID NO: 174492 - DNA, 55 bp, Artificial
  Synthetic oligonucleotide
cctattgacctagtctctgtagcagcttttctaaatgaccaagggttgcttgaac

SEQ ID NO: 174493 - DNA, 55 bp, Artificial
  Synthetic oligonucleotide
cagcatacatgagtgttgccgtgtcgggcaacacacgaccaacagacgaagggag

SEQ ID NO: 174494 - DNA, 55 bp, Artificial
  Synthetic oligonucleotide
cctcatggaactgcttctcgacatgcggtgcatggagaagattcctgttggtatt

SEQ ID NO: 174495 - DNA, 53 bp, Artificial
  Synthetic oligonucleotide
cagagagtaagcacttcggccccggttgtcacgatttcctcccgtttcggtgg

SEQ ID NO: 174496 - DNA, 55 bp, Artificial
  Synthetic oligonucleotide
cactttctctcacggctgaggtcgcgtcccacaagctacacccaatggcggtcac

SEQ ID NO: 174497 - DNA, 55 bp, Artificial
  Synthetic oligonucleotide
cactcttcgatgctcatggggaacgggatgtaggtcagctcgcccacgtaattgg

SEQ ID NO: 174498 - DNA, 55 bp, Artificial
  Synthetic oligonucleotide
cacggtggaacacagacagagcgtcatgtccggaaaggggaccacgacgctcaac

SEQ ID NO: 174499 - DNA, 52 bp, Artificial
  Synthetic oligonucleotide
cctccccggacaacccgttcattgcttttacccttgtacaaaggattattgc

SEQ ID NO: 174500 - DNA, 52 bp, Artificial
  Synthetic oligonucleotide
cctccggtagttcccagaacggaaacataatagcagaagccgttaccgccct

SEQ ID NO: 174501 - DNA, 55 bp, Artificial
  Synthetic oligonucleotide
cctcctgtgctgcgcaagtttaacacacgtcagcttgaatgtcgacagaatctag

SEQ ID NO: 174502 - DNA, 55 bp, Artificial
  Synthetic oligonucleotide
ccgtccttatgcaccttttcgtgataggtcggacagcaccatccgtaaagtcgtt

SEQ ID NO: 174503 - DNA, 55 bp, Artificial
  Synthetic oligonucleotide
cctgcaagtattgatcatacagtaaccgctggttgtaatatgccactctgggtcg

SEQ ID NO: 174504 - DNA, 55 bp, Artificial
  Synthetic oligonucleotide
cctgcgccgttccccgtatcatcactagcggcaggacaccgttacaatacttcgt

SEQ ID NO: 174505 - DNA, 55 bp, Artificial
  Synthetic oligonucleotide
cacgaccagtattatagcgaaaggttgtacgagcactatgtagaacttcatcgtg

SEQ ID NO: 174506 - DNA, 55 bp, Artificial
  Synthetic oligonucleotide
ccttcccagagcggttcatgtccacaagaaagtgaagtccgaatagcaatgatgg

SEQ ID NO: 174507 - DNA, 55 bp, Artificial
  Synthetic oligonucleotide
ccttctgttcaataccctgtacgctacgcccggatcacaccgcaaatattctcgt

SEQ ID NO: 174508 - DNA, 55 bp, Artificial
  Synthetic oligonucleotide
ccttcttcagggtcatggattgcttgtttaagtttcatcaaaatatatgctggtc

SEQ ID NO: 174509 - DNA, 55 bp, Artificial
  Synthetic oligonucleotide
caccaaaagcaagaccataaagggctttcatatctaaccttggtagttgttgaag

SEQ ID NO: 174510 - DNA, 55 bp, Artificial
  Synthetic oligonucleotide
cgaacaaccgtcgaaacgcaaggcgcttgtccgagcagcttcccttggaccatgt

SEQ ID NO: 174511 - DNA, 55 bp, Artificial
  Synthetic oligonucleotide
cgaccaagcttgttccgaatgctgcaatcctcaagtcagtaacgactgttgttcc

SEQ ID NO: 174512 - DNA, 55 bp, Artificial
  Synthetic oligonucleotide
cgaccattaccttgtgagcctaaggtaaggtttgcaataagtccgtcgtgtatgg

SEQ ID NO: 174513 - DNA, 60 bp, Artificial
  Synthetic oligonucleotide
ggcgtgccagcaacgtcatggcagcttactttgtctggagcacaggaggttatacgacgt

SEQ ID NO: 174514 - DNA, 55 bp, Artificial
  Synthetic oligonucleotide
cccataaacttgagcattggggaaacactttgcgagtgttactgtatgtaaacct

SEQ ID NO: 174515 - DNA, 55 bp, Artificial
  Synthetic oligonucleotide
cccaggttggcccgcattttcgtatgtcgcatcctgatacatgttgggagccgcc

SEQ ID NO: 174516 - DNA, 55 bp, Artificial
  Synthetic oligonucleotide
ccatgcggcttctcgccatcctgatactctgcatcctcgtggcggcctgtgacag

SEQ ID NO: 174517 - DNA, 55 bp, Artificial
  Synthetic oligonucleotide
ccatgacgatgcatcaacccgctaccataaatatagtggccacgaatgcctactt

SEQ ID NO: 174518 - DNA, 55 bp, Artificial
  Synthetic oligonucleotide
ccatcgtgtccgctccgggatagaaacacgtcatggtattacgtgtaaagccctc

SEQ ID NO: 174519 - DNA, 55 bp, Artificial
  Synthetic oligonucleotide
ccagccttctaggagaagaagctctaccctgtatgagtactatggtcacctgcgc

SEQ ID NO: 174520 - DNA, 55 bp, Artificial
  Synthetic oligonucleotide
ccgctactattgtggctcctcttggtgaaatccgtactgatcctaaaatgggccg

SEQ ID NO: 174521 - DNA, 55 bp, Artificial
  Synthetic oligonucleotide
ccgcttcatgggttacgtcataattttgcctctaggttagcttcaagtggaaaag

SEQ ID NO: 174522 - DNA, 55 bp, Artificial
  Synthetic oligonucleotide
ccggagcttccggttctcgacagtcagttcatggacgaagcccagcatgggccac

SEQ ID NO: 174523 - DNA, 55 bp, Artificial
  Synthetic oligonucleotide
ccggcgcatcctagccgcaatatggattcgccagtgttacgcctccacgcactgc

SEQ ID NO: 174524 - DNA, 60 bp, Artificial
  Synthetic oligonucleotide
tcttggcactggcaactctggtggcagtacggaagcccgcaaagggaacatcgttgccac

SEQ ID NO: 174525 - DNA, 60 bp, Artificial
  Synthetic oligonucleotide
caccggagactccatgcatcacgctcatgcacagcccggaacacctcaaacagggatgac

SEQ ID NO: 174526 - DNA, 55 bp, Artificial
  Synthetic oligonucleotide
ccacaatggttgatgacgttatgcccgctgttggcactctcttgtgatgagtgcc

SEQ ID NO: 174527 - DNA, 55 bp, Artificial
  Synthetic oligonucleotide
ccacaagtctttggtccccagccacgttttggccgacagcatacggacgatgttg

SEQ ID NO: 174528 - DNA, 52 bp, Artificial
  Synthetic oligonucleotide
ccgggaacgtcctcaagagctgtaccgatatgggaaagttcgggaaaaccaa

SEQ ID NO: 174529 - DNA, 55 bp, Artificial
  Synthetic oligonucleotide
ccaagcggcgtatcctcaaccaaaccacgaaggccccgcaactcgttgcctctgg

SEQ ID NO: 174530 - DNA, 55 bp, Artificial
  Synthetic oligonucleotide
ccaagcgagcattggaaagcaaggagtcccatcttctcaatattcgaggcaaatg

SEQ ID NO: 174531 - DNA, 54 bp, Artificial
  Synthetic oligonucleotide
ccggggaaagtgaggttacgattgcatccaagggagatagggcccggtcccgca

SEQ ID NO: 174532 - DNA, 55 bp, Artificial
  Synthetic oligonucleotide
ccggtactcaaccggaataaagggcaaatttcaacgcagagctgacagaagagac

SEQ ID NO: 174533 - DNA, 55 bp, Artificial
  Synthetic oligonucleotide
catggtggtgtatgatttgccgtcaatggtataggtgtgcgattttacggggcct

SEQ ID NO: 174534 - DNA, 55 bp, Artificial
  Synthetic oligonucleotide
cctacccaagcaggacaggctaggcaataggagacgatcatgggttatggcatcg

SEQ ID NO: 174535 - DNA, 55 bp, Artificial
  Synthetic oligonucleotide
cctagagtatattgtgtaggttgcttccctcttgtgagaaatcggatgacttctg

SEQ ID NO: 174536 - DNA, 60 bp, Artificial
  Synthetic oligonucleotide
cttgaatatgcgcgtagatttttacagctaattcatggtcctcccgcgcgatatattcaa

SEQ ID NO: 174537 - DNA, 55 bp, Artificial
  Synthetic oligonucleotide
catcctccatttctcagcgcacaccatttgccagacaattcatatgccggccatc

SEQ ID NO: 174538 - DNA, 55 bp, Artificial
  Synthetic oligonucleotide
catccgtcacacttgctcggatccacaaaggtaggcatagttagtcctccaaacg

SEQ ID NO: 174539 - DNA, 55 bp, Artificial
  Synthetic oligonucleotide
catactttcgagcacttgaacgtacacggcaaggcgacgaatggtggctctggga

SEQ ID NO: 174540 - DNA, 55 bp, Artificial
  Synthetic oligonucleotide
cctagtgtgcatatgtatcagccctgacatgtcacggtcaacgcacaacgcgtgt

SEQ ID NO: 174541 - DNA, 55 bp, Artificial
  Synthetic oligonucleotide
cggctcgaccgtcaataatatgaagcctgggccgacgataccctgcgagctgagt

SEQ ID NO: 174542 - DNA, 55 bp, Artificial
  Synthetic oligonucleotide
attactgctaacgaacgactggtgagaaactatgtccaactcggtatcttacgga

SEQ ID NO: 174543 - DNA, 55 bp, Artificial
  Synthetic oligonucleotide
cgggaagcggtgctacgaatacaccgcacaatttggcgcgttgccagactccagt

SEQ ID NO: 174544 - DNA, 55 bp, Artificial
  Synthetic oligonucleotide
cgggcctaggcctgaagttcttcatttacgtcgtgcccttgggaggctcttgtgc

SEQ ID NO: 174545 - DNA, 53 bp, Artificial
  Synthetic oligonucleotide
cgggcggcgtgggtattcagtcccattggcgggaaattaccccaagtgcaacc

SEQ ID NO: 174546 - DNA, 55 bp, Artificial
  Synthetic oligonucleotide
cggggagggaaccctttgcctcagccgttaggcgagtctgcgagccttatggatg

SEQ ID NO: 174547 - DNA, 59 bp, Artificial
  Synthetic oligonucleotide
gctgtagctatcatagtacgaccattaccttgtgagcctaaggtaaggtttgcaataag

SEQ ID NO: 174548 - DNA, 55 bp, Artificial
  Synthetic oligonucleotide
cggggcttccttgccagatgacgaaatccccgtccggaaacggtgtcgcgctcat

SEQ ID NO: 174549 - DNA, 55 bp, Artificial
  Synthetic oligonucleotide
cggtacatgtgattcgctccgtataaatggtcataaagcctcactcgcggtgggt

SEQ ID NO: 174550 - DNA, 55 bp, Artificial
  Synthetic oligonucleotide
atggattacttcgtaagatataatcttctgaatccccataggagggaataagacc

SEQ ID NO: 174551 - DNA, 55 bp, Artificial
  Synthetic oligonucleotide
cggtatgggtatatcgcaatcaaaggcccctaccgggtacaggttataatgtcca

SEQ ID NO: 174552 - DNA, 55 bp, Artificial
  Synthetic oligonucleotide
cggttcgcgaatgactatgaagtccacggcgggagaggacaggcagtactggggc

SEQ ID NO: 174553 - DNA, 55 bp, Artificial
  Synthetic oligonucleotide
cggttgcagaacatatactacaggcatgaattcgacgtcctgttattggtcccgc

SEQ ID NO: 174554 - DNA, 55 bp, Artificial
  Synthetic oligonucleotide
cggttgttgtgttccatatcgccggatgggaatctctgacaaacgggcatatctg

SEQ ID NO: 174555 - DNA, 55 bp, Artificial
  Synthetic oligonucleotide
atgcggagaggaccgaaggcggggccttcttctacgatttcgaggaagaccattg

SEQ ID NO: 174556 - DNA, 55 bp, Artificial
  Synthetic oligonucleotide
atgccaaactagcgggcttcaccccaagcgactctggagggcggatccgtttcgg

SEQ ID NO: 174557 - DNA, 55 bp, Artificial
  Synthetic oligonucleotide
atgacacgttcgcgcacgggtgcaacccgctcaaacgacggacagagaggaacgc

SEQ ID NO: 174558 - DNA, 59 bp, Artificial
  Synthetic oligonucleotide
cgactatatatcaaaccaaagtgtactccagtacataactcagcaattacacctgtttg

SEQ ID NO: 174559 - DNA, 55 bp, Artificial
  Synthetic oligonucleotide
cgtcctttgtccacacgcatggaacacgcgagcgtacagccgagaacggagtccg

SEQ ID NO: 174560 - DNA, 55 bp, Artificial
  Synthetic oligonucleotide
atcttaaaatcgtcatgggtatggtggacgcacatcagtttgccgggttcacggg

SEQ ID NO: 174561 - DNA, 55 bp, Artificial
  Synthetic oligonucleotide
atctcgctgaaatctatgcctgccgcaagggacaacgaggaatattcggaaccga

SEQ ID NO: 174562 - DNA, 55 bp, Artificial
  Synthetic oligonucleotide
cgtggggttgcctgctcgcttccatgaagacgcaccctcttcgtctacgcacaga

SEQ ID NO: 174563 - DNA, 54 bp, Artificial
  Synthetic oligonucleotide
atccgttatggacaaaccgaccattgtcgcccctgtttattattcctgccccac

SEQ ID NO: 174564 - DNA, 55 bp, Artificial
  Synthetic oligonucleotide
cgttcgttggcgaggaaaacgagcctgccatgagggaatatactcttatcgtatt

SEQ ID NO: 174565 - DNA, 55 bp, Artificial
  Synthetic oligonucleotide
ctacggatatcgtcgtataacgacaactttgcatcgtgaagggcttatcgtaaaa

SEQ ID NO: 174566 - DNA, 55 bp, Artificial
  Synthetic oligonucleotide
caatgtctacgacgcacttggagtagtaatttccgacgtatacacagctgcaccc

SEQ ID NO: 174567 - DNA, 55 bp, Artificial
  Synthetic oligonucleotide
cgcaccttacgggctcgatgctactgataacgggaaaaccatgtcaccacaggtc

SEQ ID NO: 174568 - DNA, 55 bp, Artificial
  Synthetic oligonucleotide
caatgcgtcgtgggacaaagcttcgactgacaacgaacgctgcgcctatgacata

SEQ ID NO: 174569 - DNA, 52 bp, Artificial
  Synthetic oligonucleotide
tcccgtgaacactcggagaagggaattttttactttcggtctccaggtgaac

SEQ ID NO: 174570 - DNA, 55 bp, Artificial
  Synthetic oligonucleotide
cgcacggcttcaggtctatggcctccaccatgcttaacgagcttggctataacgc

SEQ ID NO: 174571 - DNA, 55 bp, Artificial
  Synthetic oligonucleotide
caaggtggaagagcccgtcattgagcatacgcacttcaccgccacgggaacccgg

SEQ ID NO: 174572 - DNA, 55 bp, Artificial
  Synthetic oligonucleotide
caagggaggctttaacgcgccatgcgaggcttattactcggtcttactcacatca

SEQ ID NO: 174573 - DNA, 55 bp, Artificial
  Synthetic oligonucleotide
caaggactactagacgctctatccggcaatctcttgtcatacctacctttccgga

SEQ ID NO: 174574 - DNA, 55 bp, Artificial
  Synthetic oligonucleotide
caagcgtaatgccgacggagcccggtcgtgattctcggtacgttgagcctgacca

SEQ ID NO: 174575 - DNA, 55 bp, Artificial
  Synthetic oligonucleotide
cgcccagttccttgttgatttcgtaatcgagatggttgctcatgttctcccctcc

SEQ ID NO: 174576 - DNA, 55 bp, Artificial
  Synthetic oligonucleotide
cgcctcctgcattaggagtattaacaataaatgcccttacagcatgttcaagtat

SEQ ID NO: 174577 - DNA, 55 bp, Artificial
  Synthetic oligonucleotide
caagcaatgtccccagatgttattgtattgcgtcattcaagtagtggtgctgcat

SEQ ID NO: 174578 - DNA, 55 bp, Artificial
  Synthetic oligonucleotide
cgcgcatgacgtcctctctttcggagcgctgtgtgtgaaaacgcgtttgctcaga

SEQ ID NO: 174579 - DNA, 55 bp, Artificial
  Synthetic oligonucleotide
caacgcataccaccgtatatccgttataaataagctcaataaccatatggcttcc

SEQ ID NO: 174580 - DNA, 55 bp, Artificial
  Synthetic oligonucleotide
cttgaagactcagtaaaaacacggattaaaaatcttgctgctattcgtaaacgga

SEQ ID NO: 174581 - DNA, 54 bp, Artificial
  Synthetic oligonucleotide
caacacttaatccatccttaggggttacaagaagtcctacctgacttgaaccta

SEQ ID NO: 174582 - DNA, 55 bp, Artificial
  Synthetic oligonucleotide
caaatgcatgttgatagagcctagtacatgtccattttgagtatagacaccacca

SEQ ID NO: 174583 - DNA, 55 bp, Artificial
  Synthetic oligonucleotide
caaacgtcatatcttcaaaagtcgccttcagttactttggcgatcccacagtggt

SEQ ID NO: 174584 - DNA, 54 bp, Artificial
  Synthetic oligonucleotide
cgcggaaagatggggaaaactgtccggggacggacagcctgaaaacatacgcaa

SEQ ID NO: 174585 - DNA, 55 bp, Artificial
  Synthetic oligonucleotide
cgcttaatctaaatggggaatgcttggataatgtcgcgtgatccgtgtatctatc

SEQ ID NO: 174586 - DNA, 55 bp, Artificial
  Synthetic oligonucleotide
cggaagtcagatgaacgttttgagccaggagcgcctatgcgtgtattgttcgtgg

SEQ ID NO: 174587 - DNA, 55 bp, Artificial
  Synthetic oligonucleotide
cccatactgtctgtatggtaacagttcccaaagcttgttgtaataatgtgccaag

SEQ ID NO: 174588 - DNA, 55 bp, Artificial
  Synthetic oligonucleotide
cggataacctcctgacgacccaagccacacaactcacccgaatgacgcatccgcc

SEQ ID NO: 174589 - DNA, 55 bp, Artificial
  Synthetic oligonucleotide
cggccatactaatgcaattcacctcgcaccgcccaggttgagaacatgcgaataa

SEQ ID NO: 174590 - DNA, 55 bp, Artificial
  Synthetic oligonucleotide
cggcgtttctggacaaagcagtgccgctggacggaatgtcgcatggtgatgtgac

SEQ ID NO: 174591 - DNA, 60 bp, Artificial
  Synthetic oligonucleotide
tatacatctagcacttctattccagtggatagccctgtcttgttgtcagacaaggatgga

SEQ ID NO: 174592 - DNA, 55 bp, Artificial
  Synthetic oligonucleotide
attccctaatttaggtagatcttccatagacttagaaccagagcagcgagagctt

SEQ ID NO: 174593 - DNA, 55 bp, Artificial
  Synthetic oligonucleotide
gtcgcacttggggaagcggttgcacgagtagaatatcttgccgcgcttcgagctt

SEQ ID NO: 174594 - DNA, 55 bp, Artificial
  Synthetic oligonucleotide
gtcgccatgagtgtcttttatgcaaccgagacgcgctgcgaaatttgacgccgcc

SEQ ID NO: 174595 - DNA, 55 bp, Artificial
  Synthetic oligonucleotide
gtcgcgcggctatgaacacgcagttatccgacgtccaagcggagggtctgtcgtg

SEQ ID NO: 174596 - DNA, 55 bp, Artificial
  Synthetic oligonucleotide
gtcgtccgttcgcatcagagtaatcgcgcccggatgcgggaaggttacaccggca

SEQ ID NO: 174597 - DNA, 55 bp, Artificial
  Synthetic oligonucleotide
gtctcggagctgtgatcagtctctttgtcggatctttagtgttgtttagggaagg

SEQ ID NO: 174598 - DNA, 55 bp, Artificial
  Synthetic oligonucleotide
gtcttcgcgttctgacaaccgagattagtgcttgccaaaccccgcgggataccct

SEQ ID NO: 174599 - DNA, 55 bp, Artificial
  Synthetic oligonucleotide
gtcttcttcgtatgtagaaagttttggtccagtatatgtaatttctccccagttg

SEQ ID NO: 174600 - DNA, 55 bp, Artificial
  Synthetic oligonucleotide
gtgcaggctctgcgtgggccccttgagggtgacggaaagatccatagagtgctgg

SEQ ID NO: 174601 - DNA, 55 bp, Artificial
  Synthetic oligonucleotide
gtgcaggtagcccctactcctgagccactcaaagaaacggttctgcccgatgtcg

SEQ ID NO: 174602 - DNA, 60 bp, Artificial
  Synthetic oligonucleotide
gtataacttaatgtattcatctagtgcaactaagtatctatttgtaaggacatgatatct

SEQ ID NO: 174603 - DNA, 55 bp, Artificial
  Synthetic oligonucleotide
gtgctaacatcacatgcatgaacgaatatgattccacgggtaccgactgggacga

SEQ ID NO: 174604 - DNA, 55 bp, Artificial
  Synthetic oligonucleotide
gtggattcgcccaacgacattttccgaaatgcttcccataaagccttacggtgag

SEQ ID NO: 174605 - DNA, 55 bp, Artificial
  Synthetic oligonucleotide
gtgggacaccgcccaattatgaaagacacttcgtagtttactgcaaggagagttc

SEQ ID NO: 174606 - DNA, 55 bp, Artificial
  Synthetic oligonucleotide
gtgtccgacacgggccttgctcttttagagcagattagctttgaaccgctacacg

SEQ ID NO: 174607 - DNA, 54 bp, Artificial
  Synthetic oligonucleotide
aatcgtcgcgcacggggtaatcttcccggtagtggcccgcacgggtctccttgc

SEQ ID NO: 174608 - DNA, 55 bp, Artificial
  Synthetic oligonucleotide
gttcgttcctgtgaataccgatttcgacggtatgattccttcgctgctttccgga

SEQ ID NO: 174609 - DNA, 55 bp, Artificial
  Synthetic oligonucleotide
gttgtgctgcagcgtccgttagatcaagaattgcgagccgacagtgcccaagtgc

SEQ ID NO: 174610 - DNA, 55 bp, Artificial
  Synthetic oligonucleotide
taagaacttactgtctatgatgagacctggcttctatgaacaacggcttttcctg

SEQ ID NO: 174611 - DNA, 55 bp, Artificial
  Synthetic oligonucleotide
cccggtatgaaccgggtacatgattgacagaacggaccgggtacatggttgacac

SEQ ID NO: 174612 - DNA, 52 bp, Artificial
  Synthetic oligonucleotide
tactcgttgttagggttgttccccagcgacgggaaaggaccgcggaggatgg

SEQ ID NO: 174613 - DNA, 53 bp, Artificial
  Synthetic oligonucleotide
gggaaagggtcttacccgagttgtccaagggctggatcacgcggaatgggaat

SEQ ID NO: 174614 - DNA, 55 bp, Artificial
  Synthetic oligonucleotide
tactgcttgggagactgactttcttgagcaattgttaccttctttaataacctcc

SEQ ID NO: 174615 - DNA, 55 bp, Artificial
  Synthetic oligonucleotide
tagattgtgcatgatcgcctaagacagccatatcagactttagctcacgggattg

SEQ ID NO: 174616 - DNA, 55 bp, Artificial
  Synthetic oligonucleotide
tagttgtttctgctatacgatgaacatctgctatccctacatgtataaacgcggc

SEQ ID NO: 174617 - DNA, 55 bp, Artificial
  Synthetic oligonucleotide
tatctaccggcgaacaagtttccgtagccctgttttccatgcttcttaaagatcg

SEQ ID NO: 174618 - DNA, 55 bp, Artificial
  Synthetic oligonucleotide
tatgcttacttccttctgcggctagaggattgggaaacactggcctgctcgtctg

SEQ ID NO: 174619 - DNA, 55 bp, Artificial
  Synthetic oligonucleotide
ggtctgggagtttcctaaatctatcgtacagggagacagcgataaccagacgcgg

SEQ ID NO: 174620 - DNA, 55 bp, Artificial
  Synthetic oligonucleotide
ccgatatggcgttctgaagattcggaacaagaacagacgttccaaccccaagggc

SEQ ID NO: 174621 - DNA, 55 bp, Artificial
  Synthetic oligonucleotide
ggttggaccatataatcgggagagcgtcggccacttggtacactatgaaccaatg

SEQ ID NO: 174622 - DNA, 55 bp, Artificial
  Synthetic oligonucleotide
gtaagctgatgtagtccttcctgcctgatattggcgattctggcatggagcctgg

SEQ ID NO: 174623 - DNA, 55 bp, Artificial
  Synthetic oligonucleotide
gtaatggcaagtaacctagtgaagttaagcatcccacggcttattgtatatttgg

SEQ ID NO: 174624 - DNA, 60 bp, Artificial
  Synthetic oligonucleotide
gcgggcacagcacactcgtcgtcagacgcaagacggcgcggccctaatccgagcagatcc

SEQ ID NO: 174625 - DNA, 55 bp, Artificial
  Synthetic oligonucleotide
gtaatgtgagaacgggtggggtatagggccatgcatagtgtatgtttgcgaggcc

SEQ ID NO: 174626 - DNA, 55 bp, Artificial
  Synthetic oligonucleotide
gtaatgtgttacacggcaggacagacaacgaaaggcgctgtcgctatccgtaagc

SEQ ID NO: 174627 - DNA, 55 bp, Artificial
  Synthetic oligonucleotide
gtacagggtatacggccagtcaggcacggaacagggacggtaatagacgtgggag

SEQ ID NO: 174628 - DNA, 54 bp, Artificial
  Synthetic oligonucleotide
acaggtaatcgaggctgtccggggattccttggacacgtagtccacgactttct

SEQ ID NO: 174629 - DNA, 55 bp, Artificial
  Synthetic oligonucleotide
gtaccagatcgagtagcagcggtctggcttcccgcgaagagtacgagatacgctc

SEQ ID NO: 174630 - DNA, 55 bp, Artificial
  Synthetic oligonucleotide
gtaccctcgatcgtgaaccccactgtagtgcgccgccggaattttgaaatcgggc

SEQ ID NO: 174631 - DNA, 55 bp, Artificial
  Synthetic oligonucleotide
ccgacatacaccacaaggcctgaagccctgtcgcacagcctcttctctcgacggc

SEQ ID NO: 174632 - DNA, 55 bp, Artificial
  Synthetic oligonucleotide
gtagatctggaaagcgaagcgggtgatatccgaatgtagaaaaggctccccgccc

SEQ ID NO: 174633 - DNA, 55 bp, Artificial
  Synthetic oligonucleotide
gtaggatgtgctaggtgccggatggttactgcaagcggggttccccggcaagtgc

SEQ ID NO: 174634 - DNA, 55 bp, Artificial
  Synthetic oligonucleotide
acagccctgcgacaggggcaagcggcgttttacggaacttgaacaccgcatcaga

SEQ ID NO: 174635 - DNA, 60 bp, Artificial
  Synthetic oligonucleotide
caagggacatgatgactgcgaatcttttcactaccttgctcccgatcctgaaagtacgac

SEQ ID NO: 174636 - DNA, 57 bp, Artificial
  Synthetic oligonucleotide
gtacatggagtcgggacggccgagtcctcggaatggcgaacgaggcaggcgacggag

SEQ ID NO: 174637 - DNA, 55 bp, Artificial
  Synthetic oligonucleotide
gtagttctcttgactatcaatagtaggtcgcacccataacacggccatcgagagg

SEQ ID NO: 174638 - DNA, 54 bp, Artificial
  Synthetic oligonucleotide
acagacacttcgccctcgccagacccggggggaccgtctacatctcgttcccca

SEQ ID NO: 174639 - DNA, 55 bp, Artificial
  Synthetic oligonucleotide
gtatacggtctggtcagccaccgttacgcagcatacggaaccgggaataggaacc

SEQ ID NO: 174640 - DNA, 54 bp, Artificial
  Synthetic oligonucleotide
gtatattcttaaccttaccccaaccataagaactaattagctgacctgtaaagc

SEQ ID NO: 174641 - DNA, 55 bp, Artificial
  Synthetic oligonucleotide
ccgaactcggaccattttcggaccatctgcccgaaatggcctgttcagggagccg

SEQ ID NO: 174642 - DNA, 55 bp, Artificial
  Synthetic oligonucleotide
gtatgtagaaagttttggtccagtatatgtaatttctccccagttggcagaagtg

SEQ ID NO: 174643 - DNA, 55 bp, Artificial
  Synthetic oligonucleotide
gtccaccacagtcacacctaagagagtctaaaacgtctcctgtaaggcattcact

SEQ ID NO: 174644 - DNA, 55 bp, Artificial
  Synthetic oligonucleotide
gtcccgtacatgacgggctgtcattatccatacgcgaggccacccacattgtccg

SEQ ID NO: 174645 - DNA, 55 bp, Artificial
  Synthetic oligonucleotide
gtccctcatgcgcgtctatctcgccggtccgcttttcaccttggccgagcgtcgt

SEQ ID NO: 174646 - DNA, 55 bp, Artificial
  Synthetic oligonucleotide
tgctccgttcgttctgattgtagacgtctcaaagtagagattgctccgattcttg

SEQ ID NO: 174647 - DNA, 58 bp, Artificial
  Synthetic oligonucleotide
tcgtgcatataaaatttttttcggtatcccatctggaaaagcagtgcatgtaaatgtt

SEQ ID NO: 174648 - DNA, 55 bp, Artificial
  Synthetic oligonucleotide
tggacatatcattcggtgcgccgtagcgtccagaccatgcactcggcccctgtgg

SEQ ID NO: 174649 - DNA, 55 bp, Artificial
  Synthetic oligonucleotide
tggacggtcttgagtcgtttgccggaggtgtcttttgcctgcaacccctagcgtc

SEQ ID NO: 174650 - DNA, 55 bp, Artificial
  Synthetic oligonucleotide
tggtcccgtgttcagggaggtgcaatgaattccggatacttgtggcgaccgcagc

SEQ ID NO: 174651 - DNA, 55 bp, Artificial
  Synthetic oligonucleotide
tgtcaaaagcattctgccgtaggatgaaatcatgaccgctcttggcgcgcttttc

SEQ ID NO: 174652 - DNA, 55 bp, Artificial
  Synthetic oligonucleotide
ccctcgttccccaacttttcatctcccctccactgttaggatatatccatgactc

SEQ ID NO: 174653 - DNA, 55 bp, Artificial
  Synthetic oligonucleotide
tgtcccaggctcccacgcttcgaatagtcgctatcccgacgtcggcactcgaagc

SEQ ID NO: 174654 - DNA, 55 bp, Artificial
  Synthetic oligonucleotide
tgtcgacgtctttgagtcaggacgccacggccccagtggccctcgccagccatac

SEQ ID NO: 174655 - DNA, 55 bp, Artificial
  Synthetic oligonucleotide
tgttgtacgcccggtctctggcaggccaacgttgtgaacccgtctggtgtcgcgt

SEQ ID NO: 174656 - DNA, 55 bp, Artificial
  Synthetic oligonucleotide
aacaagtgtaataagtataagtccaagtccttcccagaatgcataagctactccg

SEQ ID NO: 174657 - DNA, 55 bp, Artificial
  Synthetic oligonucleotide
tgttgttcgtcaggagtatttgcaattctggctctagaacgagcccattggcgta

SEQ ID NO: 174658 - DNA, 55 bp, Artificial
  Synthetic oligonucleotide
tagagtaactagtaaaatctgacaccaaacaagtgttaattacttaactagctaa

SEQ ID NO: 174659 - DNA, 55 bp, Artificial
  Synthetic oligonucleotide
aaatgttcggcaaggagcgcttcagggacgtcgtgcgtcggtatgccgcgaggac

SEQ ID NO: 174660 - DNA, 55 bp, Artificial
  Synthetic oligonucleotide
tgttttatacgcattgagccatagcccagacagtccccactgtccagccgtgagc

SEQ ID NO: 174661 - DNA, 55 bp, Artificial
  Synthetic oligonucleotide
ccctgaaaggtgcgcgtacatggattccagcccggcagtatgcttgacgataatc

SEQ ID NO: 174662 - DNA, 55 bp, Artificial
  Synthetic oligonucleotide
aaaggattattgcggctgtggtacgagtatgcttttacattgtaccagtcttcgc

SEQ ID NO: 174663 - DNA, 55 bp, Artificial
  Synthetic oligonucleotide
aaaggacgcacatcgccgtagtggtatcccgcggcaagccccatcacaaggtcgg

SEQ ID NO: 174664 - DNA, 55 bp, Artificial
  Synthetic oligonucleotide
ttcagagcaatctctatgaccaaagctaccaccccatccatatagttgtcctaac

SEQ ID NO: 174665 - DNA, 55 bp, Artificial
  Synthetic oligonucleotide
ttcagctccggggacattttccttatgcatggtgatagcatcaatggggcaggca

SEQ ID NO: 174666 - DNA, 55 bp, Artificial
  Synthetic oligonucleotide
ttccgctcgtcttgcaacgccggacacaagtaccgttctgacacgtcattgcctg

SEQ ID NO: 174667 - DNA, 55 bp, Artificial
  Synthetic oligonucleotide
ttcggggccatgggatcaagtatccgtttccccgcaaaacataggcatgtttcgc

SEQ ID NO: 174668 - DNA, 55 bp, Artificial
  Synthetic oligonucleotide
ttgtgctctccggctacgcttgctggactgaacaccattctcgacggttctccgc

SEQ ID NO: 174669 - DNA, 60 bp, Artificial
  Synthetic oligonucleotide
ccctcaacgcactagaatagtcgcctcgaaggagatagagttgcatcattaaagttccta

SEQ ID NO: 174670 - DNA, 55 bp, Artificial
  Synthetic oligonucleotide
tttctgggcggaaggatatttcgtcagtacggtaggactcaatgaggtaacggtc

SEQ ID NO: 174671 - DNA, 50 bp, Artificial
  Synthetic oligonucleotide
aaaaccggcgagggtgggcctcttgggttcaaccgcacctttcctccaag

SEQ ID NO: 174672 - DNA, 51 bp, Artificial
  Synthetic oligonucleotide
cccttcccggtcggctattttgtcattttccccgaagggttgccagcaaac

SEQ ID NO: 174673 - DNA, 55 bp, Artificial
  Synthetic oligonucleotide
tattcgggcagggctgaagcattgcggtgcatcaagggatgtatgcgcgccagtc

SEQ ID NO: 174674 - DNA, 55 bp, Artificial
  Synthetic oligonucleotide
tcaagaacccggctcaaataggtggtctgcacattcagattgttccgcaaagtca

SEQ ID NO: 174675 - DNA, 55 bp, Artificial
  Synthetic oligonucleotide
tcaaggaaccttgtgacatcgcgggagaaagaacacgtccaccgtcgacagtggc

SEQ ID NO: 174676 - DNA, 55 bp, Artificial
  Synthetic oligonucleotide
tccagacgactaccgactcctaaccaccactgcttatcgctaacgcgccggttgg

SEQ ID NO: 174677 - DNA, 55 bp, Artificial
  Synthetic oligonucleotide
tcccgcgttggtctcaagctgactgacgtggacaagtacgccccggaactgcaca

SEQ ID NO: 174678 - DNA, 55 bp, Artificial
  Synthetic oligonucleotide
aagcgttcattgtctaccgaaaagtatatgtcgccgacctcttctgtatacactg

SEQ ID NO: 174679 - DNA, 55 bp, Artificial
  Synthetic oligonucleotide
tcctgaggtatagtggactttattacgatcgatacaggctggtcctgtccattcg

SEQ ID NO: 174680 - DNA, 60 bp, Artificial
  Synthetic oligonucleotide
atgtatacgcttactattgaacagctgcgtagtgatcttgaagctcacttaacagagctt

SEQ ID NO: 174681 - DNA, 54 bp, Artificial
  Synthetic oligonucleotide
aagcatcttcccgacacctctccggacccgtctggcgaaccgtgtggcaaaccg

SEQ ID NO: 174682 - DNA, 55 bp, Artificial
  Synthetic oligonucleotide
tcgactctgagtaagccacccaaagcgaaagcccctgcagtgagcgctccgcctt

SEQ ID NO: 174683 - DNA, 55 bp, Artificial
  Synthetic oligonucleotide
tcgagcgggctgtggtcgccgaaaccgtatacgaccacctgagaatgggtcagcc

SEQ ID NO: 174684 - DNA, 55 bp, Artificial
  Synthetic oligonucleotide
aagcacagggcgccgtgtgatgcacacgtacccgcagagtccgcattcgaggcac

SEQ ID NO: 174685 - DNA, 55 bp, Artificial
  Synthetic oligonucleotide
cccgttgcatgacgtaaagtagggcatgacagacaggcccaggcgtggcccttcg

SEQ ID NO: 174686 - DNA, 55 bp, Artificial
  Synthetic oligonucleotide
aagattcttcagagcagtccgcaaccacttaacgtgcacggtagccccacttccg

SEQ ID NO: 174687 - DNA, 55 bp, Artificial
  Synthetic oligonucleotide
ccctactcgtacaagctttccgctagctttggcggcttgttgaatactcaatagt

SEQ ID NO: 174688 - DNA, 55 bp, Artificial
  Synthetic oligonucleotide
aactttgatgtggcgatacgtttagggtcgcctagcagaccttctgcctcacacc

SEQ ID NO: 174689 - DNA, 55 bp, Artificial
  Synthetic oligonucleotide
tctcatgcgcgcttgtcacggcctatctccgggattggcgtccggccttttctcc

SEQ ID NO: 174690 - DNA, 55 bp, Artificial
  Synthetic oligonucleotide
tctggttcaggattttctcttgatgggttattacgtactataaaacttatccaag

SEQ ID NO: 174691 - DNA, 59 bp, Artificial
  Synthetic oligonucleotide
tctcttgtccggaggcgtgaagtactgttcgacgggcaactcgctaaccatgactgggc

SEQ ID NO: 174692 - DNA, 55 bp, Artificial
  Synthetic oligonucleotide
tctgtttgcgaggtcgatatccaagtagttggccgggacatcaaacgaccggacc

SEQ ID NO: 174693 - DNA, 55 bp, Artificial
  Synthetic oligonucleotide
aacggaaccgtaaggctccacagcgatgggtccgattatttcggcctcagggtgc

SEQ ID NO: 174694 - DNA, 55 bp, Artificial
  Synthetic oligonucleotide
tgaaagggagttacctccagaaatactcacttctacagaagtcaaaagctttgat

SEQ ID NO: 174695 - DNA, 55 bp, Artificial
  Synthetic oligonucleotide
tgacgcaacccatgccggacaatacattggagaatacatcatgttcgattatacc

SEQ ID NO: 174696 - DNA, 54 bp, Artificial
  Synthetic oligonucleotide
tgcccgaaaacgccccgggactgccaaggtcgtaatggggataccaggcgtgct

SEQ ID NO: 174697 - DNA, 55 bp, Artificial
  Synthetic oligonucleotide
tgcggcgactgaaatgctgcgacagctaggcaatgcccttcgcctgaaggactgc

SEQ ID NO: 174698 - DNA, 53 bp, Artificial
  Synthetic oligonucleotide
tgcgtttcccaaacacggggaaacaggggtgcagtatccgatttggcccggcc

SEQ ID NO: 174699 - DNA, 55 bp, Artificial
  Synthetic oligonucleotide
gcggcctttaggctatcccaggagttagtcattcggttgaacgctgcctgggtgc

SEQ ID NO: 174700 - DNA, 55 bp, Artificial
  Synthetic oligonucleotide
gcggcgtatctgccagtctgcccgtgacccgcagtcccacggaatcctcggtcag

SEQ ID NO: 174701 - DNA, 55 bp, Artificial
  Synthetic oligonucleotide
gcgggatcatgtggtgtccgatcccctctccatcgaatggaatgcggcggctgtc

SEQ ID NO: 174702 - DNA, 55 bp, Artificial
  Synthetic oligonucleotide
acactcagtcccgacggtaattgcgaacctacggttatcccactgattctcgaaa

SEQ ID NO: 174703 - DNA, 53 bp, Artificial
  Synthetic oligonucleotide
gcggtaaggaaaggattcaaacgcaaggctgacctccgaagggacggtgtccc

SEQ ID NO: 174704 - DNA, 55 bp, Artificial
  Synthetic oligonucleotide
ccccgctgaaggccgcatatctccgcggactgtctttaagctgaccgcaaaagac

SEQ ID NO: 174705 - DNA, 55 bp, Artificial
  Synthetic oligonucleotide
gctcctcggtatccatggcaagacggacctgtttaaggttgagtacgatatcggt

SEQ ID NO: 174706 - DNA, 55 bp, Artificial
  Synthetic oligonucleotide
gctgcccctagcatagcggtcatgcccgtgcaagaggaggtgtaccatgttcctg

SEQ ID NO: 174707 - DNA, 55 bp, Artificial
  Synthetic oligonucleotide
acggataggaaaattcctgccgactggcaactagttccgtgcccggtggcatgtt

SEQ ID NO: 174708 - DNA, 55 bp, Artificial
  Synthetic oligonucleotide
gcttcctaaaatgaaattaggagatccttattatactcggactatccctcctacg

SEQ ID NO: 174709 - DNA, 55 bp, Artificial
  Synthetic oligonucleotide
ccgcatgggttgaggctgacaaggtataaccccttaattcgctgagttggaggat

SEQ ID NO: 174710 - DNA, 55 bp, Artificial
  Synthetic oligonucleotide
gcttgtcgtatgtgatgaggtattccgaaccctgcggccacagtggttttacgcc

SEQ ID NO: 174711 - DNA, 55 bp, Artificial
  Synthetic oligonucleotide
gctttcatgataggcggttgtccgatttcacagtgaaccacagcgcatggtgtct

SEQ ID NO: 174712 - DNA, 55 bp, Artificial
  Synthetic oligonucleotide
ggaaaccgaagcatggagtcctctgcgaatggcgttaaaccgcgatttaggaggc

SEQ ID NO: 174713 - DNA, 59 bp, Artificial
  Synthetic oligonucleotide
ggtccgtgcgggggggatgtcgcacgcttcatgcgacagacggactgtatagacggcgg

SEQ ID NO: 174714 - DNA, 55 bp, Artificial
  Synthetic oligonucleotide
ggaaacgcacaacgacgtgatgtcggatctcaccaatgttatttacgatcccacc

SEQ ID NO: 174715 - DNA, 55 bp, Artificial
  Synthetic oligonucleotide
ggacaaagtctatactttcgcccctgaaccaagaagcatctggtgctgaaaatcc

SEQ ID NO: 174716 - DNA, 55 bp, Artificial
  Synthetic oligonucleotide
ggacaacgtaagctaggtacgattactgctcaaccattgaaatcgaccaactcta

SEQ ID NO: 174717 - DNA, 54 bp, Artificial
  Synthetic oligonucleotide
ggaccggggatagcggtactttccgatggcaccaaggtcggtaagcacaacggc

SEQ ID NO: 174718 - DNA, 55 bp, Artificial
  Synthetic oligonucleotide
ggacgagatgttgccataaggtcagaaagttccgtttgcaatgaacttatcactg

SEQ ID NO: 174719 - DNA, 52 bp, Artificial
  Synthetic oligonucleotide
ggacggccctccgggaaaggcgtgttccggattggaactatatgtgaaaccc

SEQ ID NO: 174720 - DNA, 55 bp, Artificial
  Synthetic oligonucleotide
ggacgtcaacgggtacaagcaatggaacttagctttcataatgcagcaattagtc

SEQ ID NO: 174721 - DNA, 55 bp, Artificial
  Synthetic oligonucleotide
ggagctcccattccgctcctcctggagcgaattgcacacatctatttgaggaacg

SEQ ID NO: 174722 - DNA, 55 bp, Artificial
  Synthetic oligonucleotide
ggaggaatagtcgcgtctggagcttgggagagtccgcagcggtatcttgccacgc

SEQ ID NO: 174723 - DNA, 55 bp, Artificial
  Synthetic oligonucleotide
ggaggagtgtcgcacgtcgatgatacggaaatggcaagccccttgcacagcgcgc

SEQ ID NO: 174724 - DNA, 59 bp, Artificial
  Synthetic oligonucleotide
aattagcccatgaccagatgttggacaaagctggccagcccgtagcggacccctgttca

SEQ ID NO: 174725 - DNA, 55 bp, Artificial
  Synthetic oligonucleotide
gccaagccggatggcggattaggggttcatggcgaatgatgcatcctgttgcgcg

SEQ ID NO: 174726 - DNA, 55 bp, Artificial
  Synthetic oligonucleotide
gccacatcaggacagaagtaggcagttcttacacagctattgtaatagataatct

SEQ ID NO: 174727 - DNA, 55 bp, Artificial
  Synthetic oligonucleotide
gccacatgtactgcgggccgcccatcgaggaaaactgggtctaccaccgctggat

SEQ ID NO: 174728 - DNA, 54 bp, Artificial
  Synthetic oligonucleotide
agaaccggggaggggaccctttgcctcagccgttaggcgagtctgcgagcctta

SEQ ID NO: 174729 - DNA, 55 bp, Artificial
  Synthetic oligonucleotide
gccacttaataaaactccttatgcgcgatttcggatgatagcgtaaagcgtgggg

SEQ ID NO: 174730 - DNA, 55 bp, Artificial
  Synthetic oligonucleotide
gccccacataaggccctccggatgctctcacctcgtgagtttatccgttcattgc

SEQ ID NO: 174731 - DNA, 55 bp, Artificial
  Synthetic oligonucleotide
gccccactggccgcaggtatgacagcgcagattgcacacgtccgtgatgcggatg

SEQ ID NO: 174732 - DNA, 55 bp, Artificial
  Synthetic oligonucleotide
gcccgttgtttgaggatggagtcaataagttgtatttgtccttctcctattgcag

SEQ ID NO: 174733 - DNA, 55 bp, Artificial
  Synthetic oligonucleotide
actggccagagtatgcggactggccagagtacgcggactgcccggattacacgga

SEQ ID NO: 174734 - DNA, 55 bp, Artificial
  Synthetic oligonucleotide
actcttatcgtattcgaccgagccttagccgttaggtgagcaaagcgaaccttac

SEQ ID NO: 174735 - DNA, 59 bp, Artificial
  Synthetic oligonucleotide
ttcaacagttgaagccgacagttgagctcgtaagagtagttcaaccgctggccccaaca

SEQ ID NO: 174736 - DNA, 55 bp, Artificial
  Synthetic oligonucleotide
actcgtgggttttcgcatacaacagatcttcgggaatcatatctctctccttgat

SEQ ID NO: 174737 - DNA, 55 bp, Artificial
  Synthetic oligonucleotide
ccgcatttgtattcttagaatcacccgtaaacactgccatgactcgatcaccatc

SEQ ID NO: 174738 - DNA, 55 bp, Artificial
  Synthetic oligonucleotide
actaggtagggccgggtcacgtccaatgatccctcgtgcgctggcgtccactgct

SEQ ID NO: 174739 - DNA, 55 bp, Artificial
  Synthetic oligonucleotide
gccgaatggcaacgatctgattggcgtccaatatcatctgacggatgtcctcaaa

SEQ ID NO: 174740 - DNA, 55 bp, Artificial
  Synthetic oligonucleotide
gccggattcacggatactatttcggctgacttgcagtgctatgcggacagggtag

SEQ ID NO: 174741 - DNA, 55 bp, Artificial
  Synthetic oligonucleotide
gccgtcatcgactagctgcgcgccgcgaaatctccgcttgacagttctcgcgcaa

SEQ ID NO: 174742 - DNA, 55 bp, Artificial
  Synthetic oligonucleotide
gccgtccaggaaggtcgtatccaggctggggatgcgttactccgaccgaccttct

SEQ ID NO: 174743 - DNA, 55 bp, Artificial
  Synthetic oligonucleotide
gcgatgagaaaccgtcgtctgttcatgtgcccgttgcgtgtccccgaaagtgtgg

SEQ ID NO: 174744 - DNA, 55 bp, Artificial
  Synthetic oligonucleotide
gcgcatacatgtctgcgtcatttacggcggcctttgtactgcggatacaggaggc

SEQ ID NO: 174745 - DNA, 55 bp, Artificial
  Synthetic oligonucleotide
gcgccatgcgtgtctcttctgtcagctctgcgttgaaatttgccctttattccgg

SEQ ID NO: 174746 - DNA, 58 bp, Artificial
  Synthetic oligonucleotide
tgaaagcatagatgtcatatatcgctttttgggttcacgtcgttttcctgcttttgtt

SEQ ID NO: 174747 - DNA, 55 bp, Artificial
  Synthetic oligonucleotide
ggtagacacctacaacggcaataaatcttccgggcctccgtgatttcgctggact

SEQ ID NO: 174748 - DNA, 55 bp, Artificial
  Synthetic oligonucleotide
acggtacatttgtgctgacgacatatgacggctgccttgtcggctatcccgcacc

SEQ ID NO: 174749 - DNA, 55 bp, Artificial
  Synthetic oligonucleotide
gcggacccaataccgccttcggaggatatcgatgcccctcattcaatgggacgag

SEQ ID NO: 174750 - DNA, 55 bp, Artificial
  Synthetic oligonucleotide
gcggccttctttccacgcgcgcataagttcggaggctttggttcgcacctcatcg

SEQ ID NO: 174751 - DNA, 55 bp, Artificial
  Synthetic oligonucleotide
acgggacgcctccgcgtaggaagtcacggcattcaccgcataccagcccagacct

SEQ ID NO: 174752 - DNA, 55 bp, Artificial
  Synthetic oligonucleotide
accttcaaaggacttcctaccttcattatgacgtgtataggctaatccagctgtc

SEQ ID NO: 174753 - DNA, 55 bp, Artificial
  Synthetic oligonucleotide
ggcccacgtctacacggctatccgtcgaaaacgactttacggatggtgctgtccg

SEQ ID NO: 174754 - DNA, 55 bp, Artificial
  Synthetic oligonucleotide
gggtcgcatgctttctgctccataaacatggtttgttgcggaaataaagaacggt

SEQ ID NO: 174755 - DNA, 55 bp, Artificial
  Synthetic oligonucleotide
ggcccatatccggaccaaacatgcgccaagcatgggccataaagggtccaatccg

SEQ ID NO: 174756 - DNA, 53 bp, Artificial
  Synthetic oligonucleotide
ggcccggaggacatatcgaggtaggtctctatttcggattcccgcgtaaaagg

SEQ ID NO: 174757 - DNA, 55 bp, Artificial
  Synthetic oligonucleotide
ggggtacatatttcttggacagataacgactgttctttattacaagcatggactg

SEQ ID NO: 174758 - DNA, 60 bp, Artificial
  Synthetic oligonucleotide
ggtaaccctggttgacactctattactgcattagataaacgctccctagtctgacgatgc

SEQ ID NO: 174759 - DNA, 55 bp, Artificial
  Synthetic oligonucleotide
ggcctaagtggagatgtccagtttgaaaagaatagaccattgaagaacggtaatg

SEQ ID NO: 174760 - DNA, 55 bp, Artificial
  Synthetic oligonucleotide
ggcgcccaagttttagcacttaggctttgggtgtcaactcacgcgcgccacccca

SEQ ID NO: 174761 - DNA, 55 bp, Artificial
  Synthetic oligonucleotide
ggcgctgcctgaactcaaacatcgttccctccgatggggacaagtccgaggccag

SEQ ID NO: 174762 - DNA, 55 bp, Artificial
  Synthetic oligonucleotide
ggggcttgtcgcattattccgtgagaaggtgttgcgtctttcgttctttcatcgt

SEQ ID NO: 174763 - DNA, 55 bp, Artificial
  Synthetic oligonucleotide
ggcggacttctgcctctagtcggcatcaagcttgcatcctgcctcgcgctgtgtc

SEQ ID NO: 174764 - DNA, 55 bp, Artificial
  Synthetic oligonucleotide
ggcgttgtcatgattcgtaatcctgatcctaccttaacagagatgttactccctg

SEQ ID NO: 174765 - DNA, 55 bp, Artificial
  Synthetic oligonucleotide
ggggcccgaatttaagcgaaactacggcctgtctccacgatgtcatggacgtgcg

SEQ ID NO: 174766 - DNA, 54 bp, Artificial
  Synthetic oligonucleotide
ggggcaataacgactggcgttccgaacatccgccggtccgttccaagagcgacg

SEQ ID NO: 174767 - DNA, 54 bp, Artificial
  Synthetic oligonucleotide
ggctaaccgtgtaaaacggaacctacacagagatattacatcttaccggtctgg

SEQ ID NO: 174768 - DNA, 55 bp, Artificial
  Synthetic oligonucleotide
ggctgctgttgtatgaagtatatctggaagatcgtatctgtgagcttcactaaca

SEQ ID NO: 174769 - DNA, 60 bp, Artificial
  Synthetic oligonucleotide
ttccgactcaagggtgaggaagattggaccccgatagggcgtcgctatctgctggatctg

SEQ ID NO: 174770 - DNA, 55 bp, Artificial
  Synthetic oligonucleotide
ccgcacctgcttatgacggcacagccatctttcgccccttcggccatattcacgc

SEQ ID NO: 174771 - DNA, 55 bp, Artificial
  Synthetic oligonucleotide
gggactgaaaagttgatcgctcataatgagtgcgtcgtaagctgtttgggcccgt

SEQ ID NO: 174772 - DNA, 55 bp, Artificial
  Synthetic oligonucleotide
ggggataatcccgggcctagagctcgctcatcccattacctcaaacttggttagc

SEQ ID NO: 174773 - DNA, 55 bp, Artificial
  Synthetic oligonucleotide
gggccgacgcctatgtgcagaagccctacgacttcacagcactggagaaggccct

SEQ ID NO: 174774 - DNA, 55 bp, Artificial
  Synthetic oligonucleotide
gggcgtggaaagcgtgatacgtcgctacgtataggcgacactattcagtaaggca

SEQ ID NO: 174775 - DNA, 55 bp, Artificial
  Synthetic oligonucleotide
gggctactcttcgttgccatacaataaagtgaatagtagccatagttccatgtcc

SEQ ID NO: 174776 - DNA, 55 bp, Artificial
  Synthetic oligonucleotide
accaccgggaacacaggaggcttaaccctggggacggctgacgttcttgctcaga

SEQ ID NO: 174777 - DNA, 54 bp, Artificial
  Synthetic oligonucleotide
ggaggtaacctatgcccgaactttcctggagagaagcttgtataagagttttaa

SEQ ID NO: 174778 - DNA, 55 bp, Artificial
  Synthetic oligonucleotide
ggataaggcccgattttccgtaccgcaatggcatcccggctatgacggtatctac

SEQ ID NO: 174779 - DNA, 55 bp, Artificial
  Synthetic oligonucleotide
ggatacgatcagcacaaaggttaggtaaaggttgttctagagcactgtaagaagg

SEQ ID NO: 174780 - DNA, 58 bp, Artificial
  Synthetic oligonucleotide
gcatatccgacagtgcagggcgttatcgtacagggaacgttatcatttccggtgccgg

SEQ ID NO: 174781 - DNA, 55 bp, Artificial
  Synthetic oligonucleotide
ggatcaccgcacatgccttcggggcttgatcgggcagaccgccaggccgttattt

SEQ ID NO: 174782 - DNA, 55 bp, Artificial
  Synthetic oligonucleotide
ggcagactcaaaacgcgctatgtccagattatttacatccacctcggcatatacg

SEQ ID NO: 174783 - DNA, 55 bp, Artificial
  Synthetic oligonucleotide
ggcataaatcgctgtaccattaacgattgtcgagagcacagccatagtctgggac

SEQ ID NO: 174784 - DNA, 55 bp, Artificial
  Synthetic oligonucleotide
acgaacgccccaacggcccgtgccttgatacgctagtgcccatgcagcttatgga

SEQ ID NO: 174785 - DNA, 55 bp, Artificial
  Synthetic oligonucleotide
ggtctaaattcatcttattccgaacttcgagatatgtctgccagcgtggagtctg

SEQ ID NO: 174786 - DNA, 55 bp, Artificial
  Synthetic oligonucleotide
ggcataaggtggtaactaagcaattcgggattccatcgtgtccaaaatccgggac

SEQ ID NO: 174787 - DNA, 55 bp, Artificial
  Synthetic oligonucleotide
ggcatctaactatcctgcgtcaattggtgtggctgtgggcgaaacgctctaccac

SEQ ID NO: 174788 - DNA, 55 bp, Artificial
  Synthetic oligonucleotide
ggtccttgtaaatgacgttacgcgccgcgcccataagatcagcgggtttggctcc

SEQ ID NO: 174789 - DNA, 55 bp, Artificial
  Synthetic oligonucleotide
ggcatgagacagtacagtgtataactgacaatggcgaagacatagcgctaatctg

SEQ ID NO: 174790 - DNA, 55 bp, Artificial
  Synthetic oligonucleotide
gggtttcaccaactgggagcacttcattgacggtgccctggcggtgatcaacttg

SEQ ID NO: 174791 - DNA, 57 bp, Artificial
  Synthetic oligonucleotide
ggccattaatgtgtcttcttcgtatgtagaaagttttggtccagtatatgtaatttc

SEQ ID NO: 174792 - DNA, 55 bp, Artificial
  Synthetic oligonucleotide
ggccactgttttgggattatgtctcggcggcgtcctattttctcgtccccatagc

SEQ ID NO: 174793 - DNA, 54 bp, Artificial
  Synthetic oligonucleotide
ttggaagctctccccgcagaaaaatcccctggtccggggcaacatctatcccgt

SEQ ID NO: 174794 - DNA, 54 bp, Artificial
  Synthetic oligonucleotide
ggttctgcccatgaagaggatggcatgacgcggtccacgcaaaagaaggcggta

SEQ ID NO: 174795 - DNA, 54 bp, Artificial
  Synthetic oligonucleotide
agaaatggtcttcggaactgactttatgctctgcccaagactacctttcggacc

SEQ ID NO: 174796 - DNA, 54 bp, Artificial
  Synthetic oligonucleotide
cgtccgaatatatggaggatgtcatgtccaagcagtgcgaattttgtggcaaaa

SEQ ID NO: 174797 - DNA, 54 bp, Artificial
  Synthetic oligonucleotide
aaatcgaccgcctagatcatctcctgtacgctctggtgcgcgttatcccatccc

SEQ ID NO: 174798 - DNA, 54 bp, Artificial
  Synthetic oligonucleotide
ttttacggctctttccgaaagtacccaggatacatcccttctcatgattgatgc

SEQ ID NO: 174799 - DNA, 54 bp, Artificial
  Synthetic oligonucleotide
actttgcaatccacgaaagattaagtatcttgtcattccagattttgaaaagcc

SEQ ID NO: 174800 - DNA, 54 bp, Artificial
  Synthetic oligonucleotide
gcataacgaacccagacgtttgacctgatcagcggtcagcgctgtaccaagaac

SEQ ID NO: 174801 - DNA, 54 bp, Artificial
  Synthetic oligonucleotide
cccacatcgaataggaacgctccggtccctgatggtcgttgatggaaccgccct

SEQ ID NO: 174802 - DNA, 59 bp, Artificial
  Synthetic oligonucleotide
ttcggtgcatctgcgcaaggaagttttcagtccagtcagattcttttccgtctcggcct

SEQ ID NO: 174803 - DNA, 54 bp, Artificial
  Synthetic oligonucleotide
agaagctcagtatggcattcctatctttgccagccttatctttggtgcattatg

SEQ ID NO: 174804 - DNA, 51 bp, Artificial
  Synthetic oligonucleotide
gggttacatttaggccgcttgaaaactgggactactcctaggttacttaaa

SEQ ID NO: 174805 - DNA, 53 bp, Artificial
  Synthetic oligonucleotide
taatacccgtaaaacgccgtttatggtccttatcaacaagtgtgacctcgccc

SEQ ID NO: 174806 - DNA, 54 bp, Artificial
  Synthetic oligonucleotide
ccccttggtttgtaagtatgagcggcgagagaggtacttgacttatcccctttg

SEQ ID NO: 174807 - DNA, 54 bp, Artificial
  Synthetic oligonucleotide
tagttgccatgtaacaagtgagggaatggcggatggcaagcagtttgcgacagg

SEQ ID NO: 174808 - DNA, 54 bp, Artificial
  Synthetic oligonucleotide
cttcctaccatgtcttgcaggcatcgttccgtcaatctgttctgaagtgtctgc

SEQ ID NO: 174809 - DNA, 54 bp, Artificial
  Synthetic oligonucleotide
tcagcttctaagccttaggaggcttaagggctggggcacacggaggccggaaaa

SEQ ID NO: 174810 - DNA, 54 bp, Artificial
  Synthetic oligonucleotide
tcatcaatgggaacgtctcctatgacaggatagacgttagcgacgagtcgcccc

SEQ ID NO: 174811 - DNA, 54 bp, Artificial
  Synthetic oligonucleotide
cttgcggctagccattcacgggacaggctctataagtgtgtattatcttggacg

SEQ ID NO: 174812 - DNA, 52 bp, Artificial
  Synthetic oligonucleotide
aagcgttggccggcgagtaaccggtggttgtgccgtaagagtagtccaggtt

SEQ ID NO: 174813 - DNA, 60 bp, Artificial
  Synthetic oligonucleotide
ttctttgattggtatggtcaggaagagatgcaactccatcccgtggagcgagcagcccga

SEQ ID NO: 174814 - DNA, 50 bp, Artificial
  Synthetic oligonucleotide
aagcgcggactgggccaatcctttcggggttacgcccgtaaagaccgccg

SEQ ID NO: 174815 - DNA, 54 bp, Artificial
  Synthetic oligonucleotide
cctgtcttcacaatatgatacgaccgtatcttccggtcgtgcgtatcaacgcca

SEQ ID NO: 174816 - DNA, 54 bp, Artificial
  Synthetic oligonucleotide
tccctgctaagtcggagcaggaaacatgccgttttagaccatccagcaatcagc

SEQ ID NO: 174817 - DNA, 54 bp, Artificial
  Synthetic oligonucleotide
tccctgtgtccattggtgaccaggaattggttgcgttgggcactgagaacacgg

SEQ ID NO: 174818 - DNA, 54 bp, Artificial
  Synthetic oligonucleotide
gcttacctctccggcttccgtggagcagtagttgtccataaccgggcactggaa

SEQ ID NO: 174819 - DNA, 54 bp, Artificial
  Synthetic oligonucleotide
cggacgccgtgttgtctcgtcgccatatggaccccgctacaggaatgcgcgtgg

SEQ ID NO: 174820 - DNA, 54 bp, Artificial
  Synthetic oligonucleotide
gtcggagagtcgatgccgctctccttagccatgcgcaggagcatcttgcggtag

SEQ ID NO: 174821 - DNA, 54 bp, Artificial
  Synthetic oligonucleotide
cctccaatttactccacgtgttgttcaaggtgttccacacaataaagctataga

SEQ ID NO: 174822 - DNA, 53 bp, Artificial
  Synthetic oligonucleotide
ctcgaatcgttcgccccgtcgcatccagacactacgggtgtacccgaaacccc

SEQ ID NO: 174823 - DNA, 54 bp, Artificial
  Synthetic oligonucleotide
gagagccacggaacggagcgtttcggagggcgttgtctccgtgcaggcacggat

SEQ ID NO: 174824 - DNA, 55 bp, Artificial
  Synthetic oligonucleotide
ctacttgatttaatgagtgattttttggaagatgacaccctatcggagggttaaa

SEQ ID NO: 174825 - DNA, 54 bp, Artificial
  Synthetic oligonucleotide
cagtctacatcgagcatagccagcgacattttatccccggaacgactacaacgg

SEQ ID NO: 174826 - DNA, 54 bp, Artificial
  Synthetic oligonucleotide
atagtcaccggagaagccagtgacggacagatggcggttgacctgtgtgacaga

SEQ ID NO: 174827 - DNA, 54 bp, Artificial
  Synthetic oligonucleotide
gtagttcgtttagtttatgaataacccacagtttgtgatgattattagactttt

SEQ ID NO: 174828 - DNA, 53 bp, Artificial
  Synthetic oligonucleotide
ttttggaagatgacaccctatcggagggttaaaatgacaacgatcatagcgtg

SEQ ID NO: 174829 - DNA, 53 bp, Artificial
  Synthetic oligonucleotide
tttatgcggttcgatgcgcggttattgacctcggaaaacacgtaccaatggtt

SEQ ID NO: 174830 - DNA, 53 bp, Artificial
  Synthetic oligonucleotide
ttatcgagcacttgcacaagaaatcttggagcttgttgagggttaattatggg

SEQ ID NO: 174831 - DNA, 53 bp, Artificial
  Synthetic oligonucleotide
tgtcaaacgacgtcatgggatggatttgacgctggaggtcaagattctctcat

SEQ ID NO: 174832 - DNA, 53 bp, Artificial
  Synthetic oligonucleotide
tctaggcaatggactcgtcttacgggacgttgcaagttgaaaggggacacggc

SEQ ID NO: 174833 - DNA, 53 bp, Artificial
  Synthetic oligonucleotide
tcgtggggcgtgggtatcgagtaaagaagccgactctacgacgctcgaagaat

SEQ ID NO: 174834 - DNA, 53 bp, Artificial
  Synthetic oligonucleotide
tcgatagctgtcctgtcttgccgcccatcgatgtcatgtggagtcggtgggcg

SEQ ID NO: 174835 - DNA, 60 bp, Artificial
  Synthetic oligonucleotide
tttaaggtttgttgtctcgagtacgacccaaggcacatgcgagacctgcatcgaatgacc

SEQ ID NO: 174836 - DNA, 53 bp, Artificial
  Synthetic oligonucleotide
taccctgcctgttcctggaaaacggcggatgctcggtctaccccgcccgtccc

SEQ ID NO: 174837 - DNA, 53 bp, Artificial
  Synthetic oligonucleotide
gttggggcgtagactactcccagaatcgggcgtttcttacgcatcagtgctat

SEQ ID NO: 174838 - DNA, 53 bp, Artificial
  Synthetic oligonucleotide
gtatgcatttcctgcgcagtgcaagctgttacagtataacggtaccggcagtg

SEQ ID NO: 174839 - DNA, 53 bp, Artificial
  Synthetic oligonucleotide
gtacctaacgaagcggatttactattcgacctaagattcctaccaaacccata

SEQ ID NO: 174840 - DNA, 53 bp, Artificial
  Synthetic oligonucleotide
ggttcccaatggttgtttctgcagctatcacagaaccaacaagagctgtactc

SEQ ID NO: 174841 - DNA, 53 bp, Artificial
  Synthetic oligonucleotide
ggcttcctttctggacagccgccccaagctcagcgcgttccggatctggtttt

SEQ ID NO: 174842 - DNA, 53 bp, Artificial
  Synthetic oligonucleotide
gcttgagtatgcgtacgcccaggcttccgtggtcgcacgactgcctgtcctta

SEQ ID NO: 174843 - DNA, 53 bp, Artificial
  Synthetic oligonucleotide
gcgtccatccgctgcaagggactgagattgtcgtaaactccgaccctgtatgg

SEQ ID NO: 174844 - DNA, 53 bp, Artificial
  Synthetic oligonucleotide
gatcacccgtcgtactcacgtcaaagtcgaatctcaagactgtgttgtgatac

SEQ ID NO: 174845 - DNA, 53 bp, Artificial
  Synthetic oligonucleotide
ctatgctcccgtactgatcccctccccacaccgcctatccgcctcacacggta

SEQ ID NO: 174846 - DNA, 56 bp, Artificial
  Synthetic oligonucleotide
ccctgttcatgggtttaccgctcattggctagggatgggtattaccgcaggcccaa

SEQ ID NO: 174847 - DNA, 53 bp, Artificial
  Synthetic oligonucleotide
cggcggatgaccaagatttagtgcgtcccctggaagctgtcaaccccgccata

SEQ ID NO: 174848 - DNA, 53 bp, Artificial
  Synthetic oligonucleotide
acatgaacgacgaagcgaacacatcggtaaatttgttggcaatgctcgttccc

SEQ ID NO: 174849 - DNA, 53 bp, Artificial
  Synthetic oligonucleotide
caatgcgtatgatgtagtccttctcatctattgcatcatgagcgggattgctc

SEQ ID NO: 174850 - DNA, 53 bp, Artificial
  Synthetic oligonucleotide
catgatgtgtatccccggaaaggactggtatcgcttccctggacatgcaacgc

SEQ ID NO: 174851 - DNA, 53 bp, Artificial
  Synthetic oligonucleotide
aaaacgctcgcacccctaccgcgaagccctggattccatctacggccaggatc

SEQ ID NO: 174852 - DNA, 53 bp, Artificial
  Synthetic oligonucleotide
aatgagttcccgtagaagcaccagggaacggaggttggatgaaacccttgacc

SEQ ID NO: 174853 - DNA, 53 bp, Artificial
  Synthetic oligonucleotide
aagtcattggcatactaaaggcggtgataatcggaccctcggaatcggtactt

SEQ ID NO: 174854 - DNA, 53 bp, Artificial
  Synthetic oligonucleotide
caggccaacccatagatatggacgggcagtaccccagcgatatcggattcttt

SEQ ID NO: 174855 - DNA, 53 bp, Artificial
  Synthetic oligonucleotide
cagcaggcaggtatccacgaacggagacaccgttaacgaggaacgtaggagtg

SEQ ID NO: 174856 - DNA, 52 bp, Artificial
  Synthetic oligonucleotide
atatccggggatatccagtgatatccggctaagtccggtgcgcttcggcact

SEQ ID NO: 174857 - DNA, 58 bp, Artificial
  Synthetic oligonucleotide
caggtgcttttggacaacgtaagctaggtacgattactgctcaaccattgaaatcgac

SEQ ID NO: 174858 - DNA, 58 bp, Artificial
  Synthetic oligonucleotide
tttcgtgccagcaacgtcaagtgcgaggtttttcgacagtaaggtgtcggaatgccga

SEQ ID NO: 174859 - DNA, 52 bp, Artificial
  Synthetic oligonucleotide
atatcgctatcttggggcacaaacgtcccacacattggatcacgaaccatct

SEQ ID NO: 174860 - DNA, 52 bp, Artificial
  Synthetic oligonucleotide
atccagtcgaaaccgactgcaaggccggaacgtatcgcggcaccaaggacca

SEQ ID NO: 174861 - DNA, 52 bp, Artificial
  Synthetic oligonucleotide
aagccgcggcctagttgcgaacgtaacgaaccaccacgcaagccaaagatcc

SEQ ID NO: 174862 - DNA, 52 bp, Artificial
  Synthetic oligonucleotide
aagccagctgcctggtgttgctttaaaggtatcgggaactagttgtgggttc

SEQ ID NO: 174863 - DNA, 52 bp, Artificial
  Synthetic oligonucleotide
tcgaagatcatgtggcagccaaccagactgtgacgccctatgcgaacgctct

SEQ ID NO: 174864 - DNA, 52 bp, Artificial
  Synthetic oligonucleotide
cgtgtgggctacctgcgtccctatgcacgtgtcgcgggcattcgtccctcgc

SEQ ID NO: 174865 - DNA, 52 bp, Artificial
  Synthetic oligonucleotide
atggagagtacggaattctgggaatcttcgttaccgaaagtcagtttgccgt

SEQ ID NO: 174866 - DNA, 52 bp, Artificial
  Synthetic oligonucleotide
aacgttggaagaacgactccgtcgcctgcctcgttcgccattccgaggactc

SEQ ID NO: 174867 - DNA, 52 bp, Artificial
  Synthetic oligonucleotide
tgaagtacgcggcaggccacggtgtcacgccacgcacctgtgcatggacctc

SEQ ID NO: 174868 - DNA, 52 bp, Artificial
  Synthetic oligonucleotide
tgacagatacaatgcatggggattccggttcgggtcgtagggagacgtaggg

SEQ ID NO: 174869 - DNA, 60 bp, Artificial
  Synthetic oligonucleotide
agaggatgcaacagtagttaacgtatgcccactagtcatagcagttgctagtggagtagg

SEQ ID NO: 174870 - DNA, 52 bp, Artificial
  Synthetic oligonucleotide
caagccctgcccagcgaacgcatgtaacgcctgtaattgatgagaccgttat

SEQ ID NO: 174871 - DNA, 52 bp, Artificial
  Synthetic oligonucleotide
gctactaccttttgcgtccggccaaggatgtgccgcgccaggaccggggatt

SEQ ID NO: 174872 - DNA, 52 bp, Artificial
  Synthetic oligonucleotide
gcgctagaagcatgctaaccgaattctcgcgacttaaggacaggcggatgcg

SEQ ID NO: 174873 - DNA, 52 bp, Artificial
  Synthetic oligonucleotide
gcgatggtcgctggtataacgtggtctatatggaaatgctcgcttcggagta

SEQ ID NO: 174874 - DNA, 52 bp, Artificial
  Synthetic oligonucleotide
agaacgactccgtcgcctgcctcgttcgccattccgaggactcggccgtccc

SEQ ID NO: 174875 - DNA, 52 bp, Artificial
  Synthetic oligonucleotide
acacacccggatcaaggtgggccgataggattgtgctcgacttcaatcttat

SEQ ID NO: 174876 - DNA, 52 bp, Artificial
  Synthetic oligonucleotide
gtgggatgggtaggtggttcggtaagagtcggatgatgatcacgcaccctct

SEQ ID NO: 174877 - DNA, 52 bp, Artificial
  Synthetic oligonucleotide
gacgtgtacttgataggtcgaagacgtcaggttgcgatacgcacctcgactg

SEQ ID NO: 174878 - DNA, 52 bp, Artificial
  Synthetic oligonucleotide
ctttggaacttgctggacgtgataaagcagggatactcctagattgttcagc

SEQ ID NO: 174879 - DNA, 52 bp, Artificial
  Synthetic oligonucleotide
taatacgtattccggaataagggacttttggtctatctgcttggacaacaat

SEQ ID NO: 174880 - DNA, 58 bp, Artificial
  Synthetic oligonucleotide
agacggattgtattaacaacattaggtgattcaccagaacaactaattacaacaagca

SEQ ID NO: 174881 - DNA, 52 bp, Artificial
  Synthetic oligonucleotide
ctgtcggataggttgacaacgccagcctgtgccgagaggggtatcaaggctc

SEQ ID NO: 174882 - DNA, 52 bp, Artificial
  Synthetic oligonucleotide
tattgtcccttacggaacttcgccacactacgggcatactccccggaaatca

SEQ ID NO: 174883 - DNA, 52 bp, Artificial
  Synthetic oligonucleotide
tcacgaccccatcacccacagctttgaccggagtacctgtaggcgcggcata

SEQ ID NO: 174884 - DNA, 52 bp, Artificial
  Synthetic oligonucleotide
ctgcaggtgtggcaaacactagctctacgttcatagtcgaggagcaatcgtc

SEQ ID NO: 174885 - DNA, 52 bp, Artificial
  Synthetic oligonucleotide
tcaggttggcgcagtgaaagacagggcttggacgtcctgtataatggatgaa

SEQ ID NO: 174886 - DNA, 52 bp, Artificial
  Synthetic oligonucleotide
tccactgcgtagagttctcccgtggagcggatcttggcgtaatgataggtgg

SEQ ID NO: 174887 - DNA, 52 bp, Artificial
  Synthetic oligonucleotide
atacagcaagaggcttcaagtgatcgtttctcagagcttatgggactatacc

SEQ ID NO: 174888 - DNA, 52 bp, Artificial
  Synthetic oligonucleotide
caccttcgactgctaaaccacttagtatcaatatagtgtcaaggctgtcgtg

SEQ ID NO: 174889 - DNA, 52 bp, Artificial
  Synthetic oligonucleotide
cccctgcatgctctcgcgaagggacgagacctgtcgggcgaacggggtcacg

SEQ ID NO: 174890 - DNA, 52 bp, Artificial
  Synthetic oligonucleotide
aaacgtgtatatgcccttattgctgaacgacagagctaaccattcaactaga

SEQ ID NO: 174891 - DNA, 56 bp, Artificial
  Synthetic oligonucleotide
ctgccctgatcctgaaaagcgaaaattagccaattctcgggccttttcgcgtggct

SEQ ID NO: 174892 - DNA, 52 bp, Artificial
  Synthetic oligonucleotide
ccccttacccatctgtttgcgggtaggcataacttcacgggcagtatcaccg

SEQ ID NO: 174893 - DNA, 52 bp, Artificial
  Synthetic oligonucleotide
aaacagaaggcgtagatcaatcagttagctcaagtcgttgtcctgaggctct

SEQ ID NO: 174894 - DNA, 51 bp, Artificial
  Synthetic oligonucleotide
taacgcgaacgccaagcgttacctacatctttcccgcagaagggggcccga

SEQ ID NO: 174895 - DNA, 51 bp, Artificial
  Synthetic oligonucleotide
gaatcaacagagtgccaaacgagtaacaatccgatcacggcgtgtcaaggg

SEQ ID NO: 174896 - DNA, 51 bp, Artificial
  Synthetic oligonucleotide
gacagcgaacacagaaggcggcaccacgccccaagcggccacatcccctgt

SEQ ID NO: 174897 - DNA, 51 bp, Artificial
  Synthetic oligonucleotide
taaagcgtggatgttatcgtaaacgaccgttggagccaaccgtaatcattc

SEQ ID NO: 174898 - DNA, 51 bp, Artificial
  Synthetic oligonucleotide
gttgtccatgagacggtccctaacccaggctgccacaaagtcgttaggagc

SEQ ID NO: 174899 - DNA, 51 bp, Artificial
  Synthetic oligonucleotide
gttgatctgtacgcggttctcaacgggagagttggatagcgggccttccgt

SEQ ID NO: 174900 - DNA, 51 bp, Artificial
  Synthetic oligonucleotide
gagcaacactatacgcctgaacacctctggatcatagggattgtcgaatga

SEQ ID NO: 174901 - DNA, 51 bp, Artificial
  Synthetic oligonucleotide
agcgtcgtcgtcgataacaatggacatgaccggtcctccttaaaaggtttg

SEQ ID NO: 174902 - DNA, 60 bp, Artificial
  Synthetic oligonucleotide
ccgtaaaatcgagcctgatgtagggatggaacttgcagacgagcaacacgccgcgtgctc

SEQ ID NO: 174903 - DNA, 51 bp, Artificial
  Synthetic oligonucleotide
cccatctcacgtcctgcgccgatggcaccctgcctgcggaagagatttcag

SEQ ID NO: 174904 - DNA, 51 bp, Artificial
  Synthetic oligonucleotide
gaggcgcagccagcccaaattccacgtgaggcacactaacgtgccggggct

SEQ ID NO: 174905 - DNA, 51 bp, Artificial
  Synthetic oligonucleotide
ttttcggcacaagagcgggagtggtttgtccggcactggcttcccgtttga

SEQ ID NO: 174906 - DNA, 51 bp, Artificial
  Synthetic oligonucleotide
gtgctgttgcgtcaggacctagggccggctttacgctttcaggcaatgtcc

SEQ ID NO: 174907 - DNA, 51 bp, Artificial
  Synthetic oligonucleotide
taagtaatgtcagaccatatagccctatacatgcaataccccatattggga

SEQ ID NO: 174908 - DNA, 51 bp, Artificial
  Synthetic oligonucleotide
tacattattaaccgcgttgacgctaaagataatcgcgcgaagcctactgat

SEQ ID NO: 174909 - DNA, 51 bp, Artificial
  Synthetic oligonucleotide
tacccgttcccatggtctgacccgcaaagagtacatggacaaattcgtggt

SEQ ID NO: 174910 - DNA, 51 bp, Artificial
  Synthetic oligonucleotide
taggtccttcaacgctcacatggcgtacggcttttgtcgaattgtacctgt

SEQ ID NO: 174911 - DNA, 51 bp, Artificial
  Synthetic oligonucleotide
aaggctgccacggttccaggggccggattcatgcgcagtgaaccaggggtc

SEQ ID NO: 174912 - DNA, 51 bp, Artificial
  Synthetic oligonucleotide
ttgttgcggtttgcgggcttcggtgctaatcaagaaaccttctcataatat

SEQ ID NO: 174913 - DNA, 60 bp, Artificial
  Synthetic oligonucleotide
ctctaagattctgaattgctagttcatcagtagcttgtaatttaatccctgatgtctcta

SEQ ID NO: 174914 - DNA, 51 bp, Artificial
  Synthetic oligonucleotide
aaggccgagacacgagtccgtgaccgcaaggtctgaagtcgccgagtccat

SEQ ID NO: 174915 - DNA, 51 bp, Artificial
  Synthetic oligonucleotide
ttggtctgttcgttcactgcgggcaccgcatctgtggataccgtggctagc

SEQ ID NO: 174916 - DNA, 51 bp, Artificial
  Synthetic oligonucleotide
ttcgtaacgaagatggatctgaacttaacgtacctattcctactacgcctg

SEQ ID NO: 174917 - DNA, 51 bp, Artificial
  Synthetic oligonucleotide
cagatttgatgccatgagaactgttgtggccgctccgaattccacagaaaa

SEQ ID NO: 174918 - DNA, 51 bp, Artificial
  Synthetic oligonucleotide
tcgacctacttcgggagtcttcctgggtaattctatgcagcggcttccgcg

SEQ ID NO: 174919 - DNA, 51 bp, Artificial
  Synthetic oligonucleotide
tcggtatcccatctggaaaagcagtgcatgtaaatgttttgtcatttcgat

SEQ ID NO: 174920 - DNA, 51 bp, Artificial
  Synthetic oligonucleotide
atgccttctgccaactgcacggtctggggcgtgacgaggtggtgggacgtt

SEQ ID NO: 174921 - DNA, 51 bp, Artificial
  Synthetic oligonucleotide
ggcgcggtggagacatcgcacccttttcttgtgaccttcaggacaggaggc

SEQ ID NO: 174922 - DNA, 51 bp, Artificial
  Synthetic oligonucleotide
ggatgaaagcaacgggctggaaggaagaagactgcgcacgtgggataactg

SEQ ID NO: 174923 - DNA, 51 bp, Artificial
  Synthetic oligonucleotide
ggagggctaggcggggctacattcctcttgggtggtcgcttcgccccacac

SEQ ID NO: 174924 - DNA, 52 bp, Artificial
  Synthetic oligonucleotide
gttaagttcttctctcctaactcgtagttgaaaacgagtcctaaacaccgga

SEQ ID NO: 174925 - DNA, 51 bp, Artificial
  Synthetic oligonucleotide
gggacaggaagaaccccggcgaacgtgcacctagtagcgcgggcgaacccg

SEQ ID NO: 174926 - DNA, 51 bp, Artificial
  Synthetic oligonucleotide
gggcccagtcatggttagcgagttgcccgtcgaacagtacttcacgcctcc

SEQ ID NO: 174927 - DNA, 51 bp, Artificial
  Synthetic oligonucleotide
acccggaacgagggcccagtcatggttagcgagttgcccgtcgaacagtac

SEQ ID NO: 174928 - DNA, 51 bp, Artificial
  Synthetic oligonucleotide
gggtttataacctccacatcgagcgtcattttaagatagcggcgccccaga

SEQ ID NO: 174929 - DNA, 51 bp, Artificial
  Synthetic oligonucleotide
gctctacctccatgacgatattcttcctcgtcgcacgggaagggcattcgc

SEQ ID NO: 174930 - DNA, 51 bp, Artificial
  Synthetic oligonucleotide
gctcgatacatgccggaaaagcaactcagggtcgaatgcctggccgtgacc

SEQ ID NO: 174931 - DNA, 51 bp, Artificial
  Synthetic oligonucleotide
acggccgagtcctcggaatggcgaacgaggcaggcgacggagtcgttcttc

SEQ ID NO: 174932 - DNA, 51 bp, Artificial
  Synthetic oligonucleotide
acattccggctagttcatatttcaaggagatcccatgacgcttgatcccac

SEQ ID NO: 174933 - DNA, 51 bp, Artificial
  Synthetic oligonucleotide
gcgcgggttcaaggccccgtatccgggaatgtccttctcaggcgcgagcaa

SEQ ID NO: 174934 - DNA, 51 bp, Artificial
  Synthetic oligonucleotide
ccgatgattcccactaatattgatatgtgttctgtctgagagttgtatatc

SEQ ID NO: 174935 - DNA, 60 bp, Artificial
  Synthetic oligonucleotide
cggctcatgaagtagtctatttcagatttcttgatcgaccatggaacgctgaccttgccc

SEQ ID NO: 174936 - DNA, 51 bp, Artificial
  Synthetic oligonucleotide
ccgcaagagaaggcatcgtacgaccaccactgcaagtgtacctgcgcgggg

SEQ ID NO: 174937 - DNA, 51 bp, Artificial
  Synthetic oligonucleotide
gccttgccgagtagccgaacctgtccatccagagcctgttccggctcatga

SEQ ID NO: 174938 - DNA, 51 bp, Artificial
  Synthetic oligonucleotide
acgttcgccggggttcttcctgtcccgcaggtgcccgcgaccattgccccg

SEQ ID NO: 174939 - DNA, 51 bp, Artificial
  Synthetic oligonucleotide
agaacgcccttaaaggaaatgttaccgatctcaacatcacggcgcttaact

SEQ ID NO: 174940 - DNA, 51 bp, Artificial
  Synthetic oligonucleotide
agacgcaagacggcgcggccctaatccgagcagatccgggcagacccgagc

SEQ ID NO: 174941 - DNA, 51 bp, Artificial
  Synthetic oligonucleotide
gcatcctccgagatgtcagtgttgctcctcctggtagcaagacccttgcca

SEQ ID NO: 174942 - DNA, 51 bp, Artificial
  Synthetic oligonucleotide
ttttgcgtggggtagtatggaaacgggtaccggcgcacctgcgtgtgcctt

SEQ ID NO: 174943 - DNA, 51 bp, Artificial
  Synthetic oligonucleotide
gcactgcctctacgggtgcgagatactcggtcccctcgacgacagggaggc

SEQ ID NO: 174944 - DNA, 51 bp, Artificial
  Synthetic oligonucleotide
aatgtgcaggcggatcgacatgagtaccccactgtcctacatgcgtgaagg

SEQ ID NO: 174945 - DNA, 51 bp, Artificial
  Synthetic oligonucleotide
agccggaacaggctctggatggacaggttcggctactcggcaaggcgtagc

SEQ ID NO: 174946 - DNA, 60 bp, Artificial
  Synthetic oligonucleotide
tgttgccagactcgttgaaactgacacgccgaaggtcaggcgacgcttatggctcggact

SEQ ID NO: 174947 - DNA, 51 bp, Artificial
  Synthetic oligonucleotide
cgccacaacggaaccgtggcccgcgtgataggagtgcccgcatgtgcgttg

SEQ ID NO: 174948 - DNA, 51 bp, Artificial
  Synthetic oligonucleotide
attaactcccatgaaccgtggccttgtcgggacgtcaaacctgaatagcgc

SEQ ID NO: 174949 - DNA, 51 bp, Artificial
  Synthetic oligonucleotide
tctggaatgtcgtcggcactgatgtcgggtagccaagtggtagttccttca

SEQ ID NO: 174950 - DNA, 51 bp, Artificial
  Synthetic oligonucleotide
atttccctctgtcttccgccatattccgtgctgcgggcatcgactactgtt

SEQ ID NO: 174951 - DNA, 51 bp, Artificial
  Synthetic oligonucleotide
cggaacctaagccacttaaagatctgtatgaacttggagagcactatcccc

SEQ ID NO: 174952 - DNA, 51 bp, Artificial
  Synthetic oligonucleotide
aacatacccctgtacgaataggttcgatgaggtgccctgtatgacgcgacg

SEQ ID NO: 174953 - DNA, 51 bp, Artificial
  Synthetic oligonucleotide
cggaacagcttctccggggagtccgacacaacctgcactcgaacggcccga

SEQ ID NO: 174954 - DNA, 51 bp, Artificial
  Synthetic oligonucleotide
atttccggtgaaccgtatagtatcgcccctgtgaagtccgtgtgcttggct

SEQ ID NO: 174955 - DNA, 51 bp, Artificial
  Synthetic oligonucleotide
cacgcgtcatccctgtttgaggtgttccgggctgtgcatgagcgtgatgca

SEQ ID NO: 174956 - DNA, 51 bp, Artificial
  Synthetic oligonucleotide
cctgcctcgttcgccattccgaggactcggccgtcccgactccatgtaccc

SEQ ID NO: 174957 - DNA, 56 bp, Artificial
  Synthetic oligonucleotide
aacacaatccaacatttcgtaataaatttccatgccaaccgtggaaatttctagca

SEQ ID NO: 174958 - DNA, 51 bp, Artificial
  Synthetic oligonucleotide
tgtcttgcagcctattctggtccgtcctgttgcaggtcgtaaagatcgttt

SEQ ID NO: 174959 - DNA, 51 bp, Artificial
  Synthetic oligonucleotide
tgtttcgctcccttggttcgggtgacggtcgggtggagaccttacggcacg

SEQ ID NO: 174960 - DNA, 51 bp, Artificial
  Synthetic oligonucleotide
caatgctcttacagcatctgatgaagtgtatatccctctccaaactcaata

SEQ ID NO: 174961 - DNA, 51 bp, Artificial
  Synthetic oligonucleotide
tctactgaaagtcgcgatggaaccaatgcacaggtggatcattccgagatc

SEQ ID NO: 174962 - DNA, 51 bp, Artificial
  Synthetic oligonucleotide
atggactcggcgacttcagaccttgcggtcacggactcgtgtctcggcctt

SEQ ID NO: 174963 - DNA, 51 bp, Artificial
  Synthetic oligonucleotide
aaccaggcctgaaccagtcccgcgtcaaatgacgtgccacgaggaatcccc

SEQ ID NO: 174964 - DNA, 51 bp, Artificial
  Synthetic oligonucleotide
cgcaaggtatcgagagccttatcgtcgtccctctcgtcctgaacgacgtca

SEQ ID NO: 174965 - DNA, 51 bp, Artificial
  Synthetic oligonucleotide
cgatccacattgtacctcaaacttcggcagtacggtatcaagccaggagag

SEQ ID NO: 174966 - DNA, 51 bp, Artificial
  Synthetic oligonucleotide
cacgccatgtgcttggttgattctgccccgaataacagctgaaaatcaagg

SEQ ID NO: 174967 - DNA, 51 bp, Artificial
  Synthetic oligonucleotide
tgccaataaggccattaatgtgtcttcttcgtatgtagaaagttttggtcc

SEQ ID NO: 174968 - DNA, 59 bp, Artificial
  Synthetic oligonucleotide
tgaaaggtccccccgccgtctatacagtccgtctgtcgcatgaagcgtgcgacatcccc

SEQ ID NO: 174969 - DNA, 57 bp, Artificial
  Synthetic oligonucleotide
ccggggtcttctgaataaccataacagacaaatcctcagtcgtatgccatttttgta

SEQ ID NO: 174970 - DNA, 50 bp, Artificial
  Synthetic oligonucleotide
tgtaagctacatgggtatttccgtcgccccaatcattgttacctgaagcc

SEQ ID NO: 174971 - DNA, 50 bp, Artificial
  Synthetic oligonucleotide
acagtcagccgtggcttggctcctgcgccggcctttgtccgcatacatgg

SEQ ID NO: 174972 - DNA, 50 bp, Artificial
  Synthetic oligonucleotide
acagtgccgtttttgcgcgcccccttgtcgtcattacgcggggtactctt

SEQ ID NO: 174973 - DNA, 50 bp, Artificial
  Synthetic oligonucleotide
acaggggagtgctcggttcgcatatggcgcagctgttccgcagactggaa

SEQ ID NO: 174974 - DNA, 50 bp, Artificial
  Synthetic oligonucleotide
acatccccgtccagggagaagatttcccgccgaccatgccgcacgatgtg

SEQ ID NO: 174975 - DNA, 50 bp, Artificial
  Synthetic oligonucleotide
aacccgaaataaccgtgcgaaccacatggacaggcgccacgccctacgaa

SEQ ID NO: 174976 - DNA, 50 bp, Artificial
  Synthetic oligonucleotide
acaggcggggtccgtctcccggcactcctttcgggcgcgcatgcatgtct

SEQ ID NO: 174977 - DNA, 50 bp, Artificial
  Synthetic oligonucleotide
aaaggctgcgccccatagtcaggccatacgcgggcacttttcgagggtat

SEQ ID NO: 174978 - DNA, 50 bp, Artificial
  Synthetic oligonucleotide
aacccatgaactttcacaggacgcggcccagttttcccccacgggaaggc

SEQ ID NO: 174979 - DNA, 50 bp, Artificial
  Synthetic oligonucleotide
acagctgaccggaccacctgtggcgcaacgggggatgcaaggggaatcat

SEQ ID NO: 174980 - DNA, 59 bp, Artificial
  Synthetic oligonucleotide
gccctgtgtgaaaccctcgaacagagcctgttcggacaatgaaacgcggccgcaatgtc

SEQ ID NO: 174981 - DNA, 50 bp, Artificial
  Synthetic oligonucleotide
acatcggcggaccgttgccctgagaaaaagggccttcagtgtcggcacac

SEQ ID NO: 174982 - DNA, 50 bp, Artificial
  Synthetic oligonucleotide
acaggctccacggacttttgaaccacggaggacgggcatctgccgatgca

SEQ ID NO: 174983 - DNA, 50 bp, Artificial
  Synthetic oligonucleotide
acaacggctcttcccccgcgctagcactaggctttcgagagtgggtcagc

SEQ ID NO: 174984 - DNA, 50 bp, Artificial
  Synthetic oligonucleotide
acaagaaaaccttcgcggctggcaatgcccgaaagagggcgggcgccttc

SEQ ID NO: 174985 - DNA, 50 bp, Artificial
  Synthetic oligonucleotide
aaccgctgggcctcaagactgaaattgttccgcttacccgcccctttgcc

SEQ ID NO: 174986 - DNA, 50 bp, Artificial
  Synthetic oligonucleotide
aaccgcgctttttactccacacaagcccccgctccacaggctttgcgccg

SEQ ID NO: 174987 - DNA, 50 bp, Artificial
  Synthetic oligonucleotide
acaccgcctctatggccgaatcaacaaaccggcacggctcgttacagggc

SEQ ID NO: 174988 - DNA, 50 bp, Artificial
  Synthetic oligonucleotide
acaccgctcagacgccgctgcaccgcatataaggcgccgcatcaatgagt

SEQ ID NO: 174989 - DNA, 50 bp, Artificial
  Synthetic oligonucleotide
acacgccgtctgccccctgcgatcatcacccaacgccgcgttataacttg

SEQ ID NO: 174990 - DNA, 50 bp, Artificial
  Synthetic oligonucleotide
aaccctgtacggtccatcagaatgcccgcgcctatttccacatcgccgcc

SEQ ID NO: 174991 - DNA, 60 bp, Artificial
  Synthetic oligonucleotide
gcaaccatgctcctggccaatgtctcattcgcagctgaattggaaagggatctgatttcg

SEQ ID NO: 174992 - DNA, 50 bp, Artificial
  Synthetic oligonucleotide
acacggccccgcaaaggagaccagcatcatatctctggaaggcttgcgga

SEQ ID NO: 174993 - DNA, 50 bp, Artificial
  Synthetic oligonucleotide
aaaacacgggtcgcctcggcgcataaggttcaaaccggaaccagcttcgg

SEQ ID NO: 174994 - DNA, 50 bp, Artificial
  Synthetic oligonucleotide
acacggcttcagggcgggtcaaggaaaggcatcaagactgcgcgcgtccc

SEQ ID NO: 174995 - DNA, 50 bp, Artificial
  Synthetic oligonucleotide
acacgggggccttgccggttctgtgatgcgtcaactcactcgtgtccgga

SEQ ID NO: 174996 - DNA, 50 bp, Artificial
  Synthetic oligonucleotide
acactgcttaccgccgcactgttgtgggacggctcgctggacaggaccaa

SEQ ID NO: 174997 - DNA, 50 bp, Artificial
  Synthetic oligonucleotide
acactgtcagtgagaacgcgcggagcgacgtgaccacgtgaggaatcgga

SEQ ID NO: 174998 - DNA, 50 bp, Artificial
  Synthetic oligonucleotide
acagatcatccactacggccagttggctacgctcgggctgaggtcgggca

SEQ ID NO: 174999 - DNA, 50 bp, Artificial
  Synthetic oligonucleotide
aacccgaccttcgcacggggcaaaccggacgcagacagagggcgaaaggg

SEQ ID NO: 175000 - DNA, 50 bp, Artificial
  Synthetic oligonucleotide
acagcacgcacaacaggagtgaccctgggcgaatcaggcaacgggccatg

SEQ ID NO: 175001 - DNA, 50 bp, Artificial
  Synthetic oligonucleotide
acagcgcccccaggtaattccactgccgcggacggggagttttgccggca

SEQ ID NO: 175002 - DNA, 60 bp, Artificial
  Synthetic oligonucleotide
gcagtcggccgtctcgtgatattcggtgaggtcatcttgaaggatgtcacgttgtatgta

SEQ ID NO: 175003 - DNA, 50 bp, Artificial
  Synthetic oligonucleotide
accctcacggggccccttaccgatctgtcacggcgcgattcccattttgg

SEQ ID NO: 175004 - DNA, 50 bp, Artificial
  Synthetic oligonucleotide
accctgatcggtcccatgggggagaaccagcgaattccggcaccgatact

SEQ ID NO: 175005 - DNA, 50 bp, Artificial
  Synthetic oligonucleotide
accctgcgagaccgccaggacgatattcccaggctcgcccactacttcaa

SEQ ID NO: 175006 - DNA, 50 bp, Artificial
  Synthetic oligonucleotide
accctgtggacggcacgacaaatctcgtacaccgtatcccccaggtcggc

SEQ ID NO: 175007 - DNA, 50 bp, Artificial
  Synthetic oligonucleotide
aacacgggctacggcccagagtaccacaagcctcccccggtggacgttcc

SEQ ID NO: 175008 - DNA, 50 bp, Artificial
  Synthetic oligonucleotide
accgaccatgttcactcccctcggcggagttgaagcacctgcggacaccc

SEQ ID NO: 175009 - DNA, 50 bp, Artificial
  Synthetic oligonucleotide
aaatttactgcgccattcccctacgccacagggcagcacctcacgcgagg

SEQ ID NO: 175010 - DNA, 50 bp, Artificial
  Synthetic oligonucleotide
accgaccgatccctgggccgtctcatgcgggtccatgcaggctcctaggt

SEQ ID NO: 175011 - DNA, 50 bp, Artificial
  Synthetic oligonucleotide
accgcagccagtggatggaatttacaaggcgtctggccggagtgcgcggt

SEQ ID NO: 175012 - DNA, 50 bp, Artificial
  Synthetic oligonucleotide
accgcatcccgcccttgcctgcatcacgggagcaaggtactctccgagcc

SEQ ID NO: 175013 - DNA, 56 bp, Artificial
  Synthetic oligonucleotide
cgcgctactaggtgcacgttcgccggggttcttcctgtcccgcaggtgcccgcgac

SEQ ID NO: 175014 - DNA, 50 bp, Artificial
  Synthetic oligonucleotide
accgggccaagtacaatggacgcaactctgtggtgtgccaggatgcgccc

SEQ ID NO: 175015 - DNA, 50 bp, Artificial
  Synthetic oligonucleotide
aaatgcacggctgacccactctcgaaagcctagtgcgagcgcgggggaga

SEQ ID NO: 175016 - DNA, 50 bp, Artificial
  Synthetic oligonucleotide
accgtcccgcccgggaacttaagcgcctggggaaaagaccttgacaggcg

SEQ ID NO: 175017 - DNA, 50 bp, Artificial
  Synthetic oligonucleotide
accgtgcgtcccgcaccggctgcaacgtgttcgcatcaagggagttttca

SEQ ID NO: 175018 - DNA, 50 bp, Artificial
  Synthetic oligonucleotide
accgtggtgcgagcctctctgcccttcggctctcggccatctggagaatt

SEQ ID NO: 175019 - DNA, 50 bp, Artificial
  Synthetic oligonucleotide
accgttgcccgcaaggcaggtaacgtacccccgctccatgagatcaatga

SEQ ID NO: 175020 - DNA, 50 bp, Artificial
  Synthetic oligonucleotide
aaataggacgcccaaaccaccaacgaggcacgcccatgctcttgcaagcc

SEQ ID NO: 175021 - DNA, 50 bp, Artificial
  Synthetic oligonucleotide
acctataccagccttgtcacggcgccctgcatcaatgcctgccccgggca

SEQ ID NO: 175022 - DNA, 50 bp, Artificial
  Synthetic oligonucleotide
ggcgatcaaacgcgtgcgacagtaccgtgaaggctacgagcctctggtcg

SEQ ID NO: 175023 - DNA, 50 bp, Artificial
  Synthetic oligonucleotide
acctcaccccaaaccagatcgcctacatgagcctcggctccttccgctgc

SEQ ID NO: 175024 - DNA, 56 bp, Artificial
  Synthetic oligonucleotide
gtccgtgaaaacacgtacagggcagcattcaagaacgttggaagaacgactccgtc

SEQ ID NO: 175025 - DNA, 50 bp, Artificial
  Synthetic oligonucleotide
acctgcggtgacgctcccctgatgacgacctgtcgaaagaccgcccagat

SEQ ID NO: 175026 - DNA, 50 bp, Artificial
  Synthetic oligonucleotide
acatgacatgccgggacggcttgcctgtgaatgggcctcgctcctgaatt

SEQ ID NO: 175027 - DNA, 50 bp, Artificial
  Synthetic oligonucleotide
acatgaggcctccttgttgcacggcgacacagcggtctgccggcgggtaa

SEQ ID NO: 175028 - DNA, 50 bp, Artificial
  Synthetic oligonucleotide
acatgccatcccctgtcgccccggatggtacgggtttcagggctagggcc

SEQ ID NO: 175029 - DNA, 50 bp, Artificial
  Synthetic oligonucleotide
acatggcggaacccgtacgcaagggcccaggcaaggtccagggccggaac

SEQ ID NO: 175030 - DNA, 50 bp, Artificial
  Synthetic oligonucleotide
accaactgtgtcaggcagggaagcacttgcagcgggtcgaggggcgtacc

SEQ ID NO: 175031 - DNA, 50 bp, Artificial
  Synthetic oligonucleotide
accacctcagggcaagaaactggagcaagccctggacatgacttggcgga

SEQ ID NO: 175032 - DNA, 50 bp, Artificial
  Synthetic oligonucleotide
aaccagctctgggcgtatggcaatccaccgtccatgacagggcgactgac

SEQ ID NO: 175033 - DNA, 50 bp, Artificial
  Synthetic oligonucleotide
accactctgtttgagcccccaggccaaaacgccacaacagcgctgtccca

SEQ ID NO: 175034 - DNA, 50 bp, Artificial
  Synthetic oligonucleotide
aaccaccggattcatggtctgcaagctgcctgcccggaaaatgcgaacga

SEQ ID NO: 175035 - DNA, 57 bp, Artificial
  Synthetic oligonucleotide
aaatagttacttcaagacctcatttccattttgctagctcccccatggttcctgctc

SEQ ID NO: 175036 - DNA, 50 bp, Artificial
  Synthetic oligonucleotide
accagtccggccaaacctcctaaaccaagcaccccggtggctgctactcc

SEQ ID NO: 175037 - DNA, 50 bp, Artificial
  Synthetic oligonucleotide
accagttccaagcaaagccccttccttgcgtccagggcgatctcacgtgc

SEQ ID NO: 175038 - DNA, 50 bp, Artificial
  Synthetic oligonucleotide
accatggcatcggcggctcctcgcaataccgcaaggatcaggtcacgctc

SEQ ID NO: 175039 - DNA, 50 bp, Artificial
  Synthetic oligonucleotide
acccccagcggcccaagtcccggaaaagaccgggaacgactctcaggtca

SEQ ID NO: 175040 - DNA, 50 bp, Artificial
  Synthetic oligonucleotide
aacatggtttccccgcttggctagccttcaaggatgaccacggccgaagc

SEQ ID NO: 175041 - DNA, 50 bp, Artificial
  Synthetic oligonucleotide
accccgaaactcccaccggtgacgatgtgcccatcgaagaccgcacaccc

SEQ ID NO: 175042 - DNA, 50 bp, Artificial
  Synthetic oligonucleotide
accccgaaagaggaggcgaccctgtggcaggctcgaagctgagtagcgat

SEQ ID NO: 175043 - DNA, 50 bp, Artificial
  Synthetic oligonucleotide
accccgatgccagaacaacgcatacacgtctgcagggcgaaccgcccagt

SEQ ID NO: 175044 - DNA, 50 bp, Artificial
  Synthetic oligonucleotide
acccgcccccgttggtggttctcaggcatgccccgtatggaaattaggcg

SEQ ID NO: 175045 - DNA, 50 bp, Artificial
  Synthetic oligonucleotide
acccgctccggagtgctttccatgtgccgggacgcaaggtatgaggctcc

SEQ ID NO: 175046 - DNA, 58 bp, Artificial
  Synthetic oligonucleotide
aatgctatcttatattgaactccatgttgtgagaaatttttgtggcccaacgcgaaag

SEQ ID NO: 175047 - DNA, 50 bp, Artificial
  Synthetic oligonucleotide
aacatgctttatggttcctacttcgtagggtacttcgtgcttgggcactt

SEQ ID NO: 175048 - DNA, 50 bp, Artificial
  Synthetic oligonucleotide
acccgtgaccctgcctctgcctgaatcggccagggagcccgtccgtagcg

SEQ ID NO: 175049 - DNA, 50 bp, Artificial
  Synthetic oligonucleotide
aaggagtctcttccttgcggggattcagcagcccgtccagagagccgata

SEQ ID NO: 175050 - DNA, 50 bp, Artificial
  Synthetic oligonucleotide
aaggcaaacgatcggcccttgctgcacttacggaccagtctgcggattgc

SEQ ID NO: 175051 - DNA, 50 bp, Artificial
  Synthetic oligonucleotide
aaacgactgagccgggtccgtcttgacaggtgccccgcgcggcagataga

SEQ ID NO: 175052 - DNA, 50 bp, Artificial
  Synthetic oligonucleotide
aacgtcacatggtcctgcataaaccgctcgacaaccgcaaagccgcccga

SEQ ID NO: 175053 - DNA, 50 bp, Artificial
  Synthetic oligonucleotide
aaaccgggccgaattgagagatgcatggggcgtgtcgaatttagggccgc

SEQ ID NO: 175054 - DNA, 50 bp, Artificial
  Synthetic oligonucleotide
aaggccattttccggccccacgtctacatggcaacgtgagcgcagcaggg

SEQ ID NO: 175055 - DNA, 50 bp, Artificial
  Synthetic oligonucleotide
aaggccgctacccttatgcgtgagctttactcaccgtttgcccgcacccg

SEQ ID NO: 175056 - DNA, 50 bp, Artificial
  Synthetic oligonucleotide
aaggcgctcaaactactgtctcgcatgctgcgatcctcctgtctgccggg

SEQ ID NO: 175057 - DNA, 52 bp, Artificial
  Synthetic oligonucleotide
acaccattgggttttgaagtaggataattcgggttttgaagtaggataattc

SEQ ID NO: 175058 - DNA, 50 bp, Artificial
  Synthetic oligonucleotide
aacgtatgtgatcaatgtagggcgggcgggttcgtttgtccggggccact

SEQ ID NO: 175059 - DNA, 50 bp, Artificial
  Synthetic oligonucleotide
aagggtgccgttgcataagcgaggtgcaagtgagcgttcagggacggaca

SEQ ID NO: 175060 - DNA, 50 bp, Artificial
  Synthetic oligonucleotide
aaggtgggggatctgcccccgtctcgtggggttcgcgcatggggtgaagg

SEQ ID NO: 175061 - DNA, 50 bp, Artificial
  Synthetic oligonucleotide
tagtttatgttgtagctgctgaagcaggtgcatacaaaacagcgctgtgt

SEQ ID NO: 175062 - DNA, 50 bp, Artificial
  Synthetic oligonucleotide
aacgtaaaccgtcccggctgcacacgccaaaccagtcagggctccactta

SEQ ID NO: 175063 - DNA, 50 bp, Artificial
  Synthetic oligonucleotide
tttaccgctctgtagtggaggccgaattgaatcagtttagtcgcaacctg

SEQ ID NO: 175064 - DNA, 50 bp, Artificial
  Synthetic oligonucleotide
aagtcgcccagggaattcgaccattcactgacaagcgtggggctgtccgg

SEQ ID NO: 175065 - DNA, 50 bp, Artificial
  Synthetic oligonucleotide
aagtcggaaggagccggcggatttgcatgggtggacttttccacaggcga

SEQ ID NO: 175066 - DNA, 50 bp, Artificial
  Synthetic oligonucleotide
aagtgaaaaccccggcctcccccgaggttgggtgtgacctcacataaggg

SEQ ID NO: 175067 - DNA, 50 bp, Artificial
  Synthetic oligonucleotide
aagtgcacggccgtcatcgactagctgcgcgccgcgaaatctccgcttga

SEQ ID NO: 175068 - DNA, 59 bp, Artificial
  Synthetic oligonucleotide
acagggccgtaccctcgcgcctctctccatgaatggggcatatctagcggttgagtgca

SEQ ID NO: 175069 - DNA, 50 bp, Artificial
  Synthetic oligonucleotide
aagacctctccacgacaggccatgcggcaaacaaaccggccccggtctga

SEQ ID NO: 175070 - DNA, 50 bp, Artificial
  Synthetic oligonucleotide
aagcaatacgcccacatccgtcaaccagacgcgcgtactccccgactgat

SEQ ID NO: 175071 - DNA, 50 bp, Artificial
  Synthetic oligonucleotide
aagcacaacttgtgagggagcaatcccttgcccacgtgtccgcctccaca

SEQ ID NO: 175072 - DNA, 50 bp, Artificial
  Synthetic oligonucleotide
aagcactcgatcaggccccacattgacagccgaggccagacggacccgaa

SEQ ID NO: 175073 - DNA, 50 bp, Artificial
  Synthetic oligonucleotide
aagcagcgttgcacggaagaggcaccctaagggccaacgtatgccgcagc

SEQ ID NO: 175074 - DNA, 50 bp, Artificial
  Synthetic oligonucleotide
aaagcgtagcgaaaatcggccgggtaggatgtggccccttgcgtcgtgaa

SEQ ID NO: 175075 - DNA, 50 bp, Artificial
  Synthetic oligonucleotide
aaagctcaaccgtggaggacgtttctggcatgtgcgggttcctgcgaggc

SEQ ID NO: 175076 - DNA, 50 bp, Artificial
  Synthetic oligonucleotide
aacttccgggcgcggagagcccaaaccggactcaagccatgtagaatcga

SEQ ID NO: 175077 - DNA, 50 bp, Artificial
  Synthetic oligonucleotide
aaagcgcatgccctctgagctggactcccgctaaaataccctcccccggc

SEQ ID NO: 175078 - DNA, 50 bp, Artificial
  Synthetic oligonucleotide
aagccccttgagatggacatgcgcccactgttcgatccgcaaggcagtgt

SEQ ID NO: 175079 - DNA, 60 bp, Artificial
  Synthetic oligonucleotide
atgttttgtagcaagaacgtgtcattggatgacatatatgacacctgtgcagaagcagat

SEQ ID NO: 175080 - DNA, 59 bp, Artificial
  Synthetic oligonucleotide
cttctgcaccacgccagctacaccgattgcatggttatttaccgggccttcacgaaaca

SEQ ID NO: 175081 - DNA, 50 bp, Artificial
  Synthetic oligonucleotide
aaagatgttcgtagcctcaggcggaaagcctccacaggcagacccggccc

SEQ ID NO: 175082 - DNA, 50 bp, Artificial
  Synthetic oligonucleotide
aagccgtcactgcagaactgacagcgccgcatgtgaacgccgtcattgtc

SEQ ID NO: 175083 - DNA, 50 bp, Artificial
  Synthetic oligonucleotide
aaagacgtggcaaggggacagcgagactgccttaccgctaactcgggccc

SEQ ID NO: 175084 - DNA, 50 bp, Artificial
  Synthetic oligonucleotide
aagcgcccgataccggggaggtatcatgcagcccatcggaccactcatgc

SEQ ID NO: 175085 - DNA, 50 bp, Artificial
  Synthetic oligonucleotide
aacgtttggacgtgtgctcgaagctgcaggtcgtttccgtggccagcctt

SEQ ID NO: 175086 - DNA, 50 bp, Artificial
  Synthetic oligonucleotide
aaacggtggtccatgtgcggctccattgatgcgtgtgcgacggcgcgtct

SEQ ID NO: 175087 - DNA, 50 bp, Artificial
  Synthetic oligonucleotide
aagctctacattttgcgcgcgacaagcaagcttttccacatcaggggtct

SEQ ID NO: 175088 - DNA, 50 bp, Artificial
  Synthetic oligonucleotide
aagctgcctgcccggaaaatgcgaacgaaacggctgcgactgtaccgcat

SEQ ID NO: 175089 - DNA, 50 bp, Artificial
  Synthetic oligonucleotide
tccccggtataatagcatgtgatcttttgcacaatgtatcggaatggcca

SEQ ID NO: 175090 - DNA, 50 bp, Artificial
  Synthetic oligonucleotide
aaggaaacctcccgctggcacaacccgacctacgcacggaccatggaaaa

SEQ ID NO: 175091 - DNA, 59 bp, Artificial
  Synthetic oligonucleotide
cccatagttaataatccaatagttccaccattaacatttgctgtagctatcatagtacg

SEQ ID NO: 175092 - DNA, 50 bp, Artificial
  Synthetic oligonucleotide
aaacggccgcaacgggttagtgtcgcgcatatccctaccccggagaatcc

SEQ ID NO: 175093 - DNA, 50 bp, Artificial
  Synthetic oligonucleotide
aacctgacgtttcactacgaaggctgtcccgcccccgtgctggacaacat

SEQ ID NO: 175094 - DNA, 50 bp, Artificial
  Synthetic oligonucleotide
aatcctccggtctctacggccgctcatacctgcgcgtatgggacctgtcc

SEQ ID NO: 175095 - DNA, 50 bp, Artificial
  Synthetic oligonucleotide
aatcgcccgccgacttcatttgtaagcgatgcgtgagccccaacggctga

SEQ ID NO: 175096 - DNA, 50 bp, Artificial
  Synthetic oligonucleotide
aatgaacccttcaagcccgtacttgatgcccagcactgcgggaacgcggt

SEQ ID NO: 175097 - DNA, 50 bp, Artificial
  Synthetic oligonucleotide
aatgcatggccgaggcatgcgccgcacacaggggaagcgacgctttacct

SEQ ID NO: 175098 - DNA, 50 bp, Artificial
  Synthetic oligonucleotide
aatgcgtcttgcaacggcgtttctggacaaagcagtgccgctggacggaa

SEQ ID NO: 175099 - DNA, 50 bp, Artificial
  Synthetic oligonucleotide
aatgggacgcactcagcacacggcccgaaacatcgcctggtcgtgcggaa

SEQ ID NO: 175100 - DNA, 50 bp, Artificial
  Synthetic oligonucleotide
gtgcggcaaggattttgctacacggtttcctttagccccaacatcaagtg

SEQ ID NO: 175101 - DNA, 50 bp, Artificial
  Synthetic oligonucleotide
aacctcctgcggctggcctattccatgggttccggcatgtccatgtagcc

SEQ ID NO: 175102 - DNA, 57 bp, Artificial
  Synthetic oligonucleotide
tattagaccctggcctgttagataagaggtattttgcctaatctacccaggttcata

SEQ ID NO: 175103 - DNA, 50 bp, Artificial
  Synthetic oligonucleotide
aattacacccgcgttcgccgattcttacgccgactcgcacggcctgccaa

SEQ ID NO: 175104 - DNA, 50 bp, Artificial
  Synthetic oligonucleotide
gtgaacgtgaggccctctaccgtcagtgggctacctgccgtgtcgcggct

SEQ ID NO: 175105 - DNA, 50 bp, Artificial
  Synthetic oligonucleotide
aattcatgtgggtgggcgacgacagggcgaccacgtgaaagcctgcttca

SEQ ID NO: 175106 - DNA, 50 bp, Artificial
  Synthetic oligonucleotide
aaccgggcaagccccttgtgaccggcctatgctgcgggatgattacagcg

SEQ ID NO: 175107 - DNA, 50 bp, Artificial
  Synthetic oligonucleotide
aattcgccgggataccgctccagatgataggcaagggccgcgtccgtgat

SEQ ID NO: 175108 - DNA, 50 bp, Artificial
  Synthetic oligonucleotide
aattgccctcctcgcgaccctttcggccccaggcacgaatccacgatcag

SEQ ID NO: 175109 - DNA, 50 bp, Artificial
  Synthetic oligonucleotide
aaccggcttatccgcgacttcggtctgtggtccgaccccactgcttcgct

SEQ ID NO: 175110 - DNA, 50 bp, Artificial
  Synthetic oligonucleotide
aatttgcgcgcaccgagcaccccggttcccctatacttgccgggcagtat

SEQ ID NO: 175111 - DNA, 50 bp, Artificial
  Synthetic oligonucleotide
acaacattccagcgggcagacgccgggggcaattggagcagggaaacgga

SEQ ID NO: 175112 - DNA, 50 bp, Artificial
  Synthetic oligonucleotide
acaaccaagattgcgcgcccgcagcaacgttttcacctcgcagtcccagt

SEQ ID NO: 175113 - DNA, 55 bp, Artificial
  Synthetic oligonucleotide
cggttttcgaggctaccggacatgaccgactggagttccctgatttggtcgggca

SEQ ID NO: 175114 - DNA, 50 bp, Artificial
  Synthetic oligonucleotide
aaccgctgggtacacatcgcttcccccggtcctgacactatgccgcgtcg

SEQ ID NO: 175115 - DNA, 50 bp, Artificial
  Synthetic oligonucleotide
tagacacgacccgacttgtgaacgtttgcacgaagtgcccccggcaaccg

SEQ ID NO: 175116 - DNA, 50 bp, Artificial
  Synthetic oligonucleotide
aagtgctgccggcactgcaagttccgcgaaccagggacaggggccgacac

SEQ ID NO: 175117 - DNA, 50 bp, Artificial
  Synthetic oligonucleotide
aagttcgccagacacgctttccgcgctcaaccgttcctcggagtgcaggg

SEQ ID NO: 175118 - DNA, 50 bp, Artificial
  Synthetic oligonucleotide
aatagccgggcagctggactagagtcaggcgtcatcgccccctgacacgg

SEQ ID NO: 175119 - DNA, 50 bp, Artificial
  Synthetic oligonucleotide
tacgggtgcgagatactcggtcccctcgacgacagggaggccgcccaccg

SEQ ID NO: 175120 - DNA, 50 bp, Artificial
  Synthetic oligonucleotide
aatagcggctcacggcgtgcaggctctggtttgcaccaacatgcgtgatt

SEQ ID NO: 175121 - DNA, 50 bp, Artificial
  Synthetic oligonucleotide
aacggccagaaatttccctcctaccgcgagtatgcggcctttgcgagccg

SEQ ID NO: 175122 - DNA, 50 bp, Artificial
  Synthetic oligonucleotide
tcttttgctgtactgtccggcgaaaattactgctgcttgggcttcttgcg

SEQ ID NO: 175123 - DNA, 50 bp, Artificial
  Synthetic oligonucleotide
aaaagtggaatcgcgctggtcggggtttgacttcgtgaccgggtttggga

SEQ ID NO: 175124 - DNA, 59 bp, Artificial
  Synthetic oligonucleotide
tcccgatgggtgacacacgttgtcactggggggtgacatctggcgacacccccagtgac

SEQ ID NO: 175125 - DNA, 50 bp, Artificial
  Synthetic oligonucleotide
aaaagggggctgctgtcaagccccgatcctcagcagacggcccgcattgc

SEQ ID NO: 175126 - DNA, 50 bp, Artificial
  Synthetic oligonucleotide
aatcactgtactacgcagggcgagtgcgctccgaactgggggcccgctca

SEQ ID NO: 175127 - DNA, 49 bp, Artificial
  Synthetic oligonucleotide
aacgcctaggctgaccccgacttttgaacgccggccccggttccctaag

SEQ ID NO: 175128 - DNA, 50 bp, Artificial
  Synthetic oligonucleotide
aatccacgtccctttgcgagcacgaccttgaacgagggccgcacacagta

SEQ ID NO: 175129 - DNA, 50 bp, Artificial
  Synthetic oligonucleotide
aacgccgggctcagtgcctgcggtcggttttctacggatggtgaagttct

SEQ ID NO: 175130 - DNA, 50 bp, Artificial
  Synthetic oligonucleotide
aacgacgccttatacgccactcgctccgaagcctacgcccagacggacag

SEQ ID NO: 175131 - DNA, 50 bp, Artificial
  Synthetic oligonucleotide
aatccccgctaccagtgcggaccatacggctccgcccatcggatcgtaaa

SEQ ID NO: 175132 - DNA, 50 bp, Artificial
  Synthetic oligonucleotide
aatcccggggaacccccagcgaagaaggcccggacagttgaggaaccaat

SEQ ID NO: 175133 - DNA, 50 bp, Artificial
  Synthetic oligonucleotide
tgacccgtgcgtatgccgagacctttccgggggcgagtctggcactcgtc

SEQ ID NO: 175134 - DNA, 50 bp, Artificial
  Synthetic oligonucleotide
aatccgacagaagcccggctaaagccccgagtcccgtacccgccagcagg

SEQ ID NO: 175135 - DNA, 58 bp, Artificial
  Synthetic oligonucleotide
tacgttggccatgaagcgttcctttgcgtcactctccatgtcaggcgatgaaggtgtg

SEQ ID NO: 175136 - DNA, 50 bp, Artificial
  Synthetic oligonucleotide
aaaagcgagtaattaaaaggcgggcgctccgggctgcatggctccctagc

SEQ ID NO: 175137 - DNA, 50 bp, Artificial
  Synthetic oligonucleotide
atcccctttgcccgccagaggcgaaatgcgaccatcaaaagcgcgatagc

SEQ ID NO: 175138 - DNA, 50 bp, Artificial
  Synthetic oligonucleotide
atccgacctcccgaccccggacaaggctgcttaccgtccctgctccagcg

SEQ ID NO: 175139 - DNA, 50 bp, Artificial
  Synthetic oligonucleotide
atccggtcaccaattgtcgggcacagcgggactaagcaaagtccgggcca

SEQ ID NO: 175140 - DNA, 50 bp, Artificial
  Synthetic oligonucleotide
atccgtggcataggtcaggtagagggtgtgtcctttcgtcccgggctcga

SEQ ID NO: 175141 - DNA, 50 bp, Artificial
  Synthetic oligonucleotide
atcggaaacgggctaaccgcaggggacgtccaaaacacgggaggcagtca

SEQ ID NO: 175142 - DNA, 50 bp, Artificial
  Synthetic oligonucleotide
atgaactactgatgcgctgccggggcctggtgtagggagcttgtgaccgc

SEQ ID NO: 175143 - DNA, 50 bp, Artificial
  Synthetic oligonucleotide
atgccttccaccggagtgacaagctcgcatatctgccccactgcggcgtt

SEQ ID NO: 175144 - DNA, 50 bp, Artificial
  Synthetic oligonucleotide
cgtccacaacataggcgtcgttgaggtacggttccttgcggaaaagtttg

SEQ ID NO: 175145 - DNA, 50 bp, Artificial
  Synthetic oligonucleotide
atgctcacgtggtctccagggggcagactagcccaagggcggggccgtgt

SEQ ID NO: 175146 - DNA, 58 bp, Artificial
  Synthetic oligonucleotide
gtcgttgtgtacgtatatctactactaaccctatatcacaaaacatagtaccacatac

SEQ ID NO: 175147 - DNA, 50 bp, Artificial
  Synthetic oligonucleotide
atgctccaaagctatggcggctgtcggacacgggtgcccggattcgggtg

SEQ ID NO: 175148 - DNA, 50 bp, Artificial
  Synthetic oligonucleotide
atggccgcttcgcgggttcatccgcaacaaaaggcccccgactcataccc

SEQ ID NO: 175149 - DNA, 50 bp, Artificial
  Synthetic oligonucleotide
atggcgagcatagccgcacccttagcacagagagcaccttcactgaccgg

SEQ ID NO: 175150 - DNA, 50 bp, Artificial
  Synthetic oligonucleotide
atggcgtcactagtgcggtgattgcgccccgaaactccatacggacctcc

SEQ ID NO: 175151 - DNA, 50 bp, Artificial
  Synthetic oligonucleotide
atgtagtcggcaaggcagcaccctgcgggaaacgcggacaagccgaagga

SEQ ID NO: 175152 - DNA, 50 bp, Artificial
  Synthetic oligonucleotide
atgtagtggaccagagaaccgcggggcgcttcggagcagccatagccttc

SEQ ID NO: 175153 - DNA, 50 bp, Artificial
  Synthetic oligonucleotide
attcacggactccacctgccaagccagtcgacggcctaacttcacaggcg

SEQ ID NO: 175154 - DNA, 50 bp, Artificial
  Synthetic oligonucleotide
attccgggacgcataggagaaacttttacggcgcggctccgggatacgga

SEQ ID NO: 175155 - DNA, 50 bp, Artificial
  Synthetic oligonucleotide
attcgcgggataaaggcagtgccgccacattgggaacaatccatccccga

SEQ ID NO: 175156 - DNA, 50 bp, Artificial
  Synthetic oligonucleotide
attcggaccgcggggttcggattcacctcatgtgcctcggccgaacggaa

SEQ ID NO: 175157 - DNA, 58 bp, Artificial
  Synthetic oligonucleotide
cgcagggacaggggatgtggccgcttggggcgtggtgccgccttctgtgttcgctgtc

SEQ ID NO: 175158 - DNA, 50 bp, Artificial
  Synthetic oligonucleotide
attcttgaggtccccgaaggagagggccccggaggggcaattctgcacgc

SEQ ID NO: 175159 - DNA, 50 bp, Artificial
  Synthetic oligonucleotide
cggccagacaagtttcagctcgtggccggaagtcgtggccagcgggttgg

SEQ ID NO: 175160 - DNA, 50 bp, Artificial
  Synthetic oligonucleotide
cggcagtccgtcgcagaacctttagagtgacgactaccgtgtgcggcaga

SEQ ID NO: 175161 - DNA, 50 bp, Artificial
  Synthetic oligonucleotide
cggatcgggtgtcttacgccagagccagcgaaccttcgtaggcgggacgc

SEQ ID NO: 175162 - DNA, 50 bp, Artificial
  Synthetic oligonucleotide
attgagccgcggggcttgctttcggttcggacgggcctatctagaatggc

SEQ ID NO: 175163 - DNA, 50 bp, Artificial
  Synthetic oligonucleotide
attgggctcgcgctgtacaggcttggccgtgtaccgctcatccccgggag

SEQ ID NO: 175164 - DNA, 50 bp, Artificial
  Synthetic oligonucleotide
agggaatgacggctttggccttgcaatcgtgtccccctgtggcgtatgct

SEQ ID NO: 175165 - DNA, 50 bp, Artificial
  Synthetic oligonucleotide
agggagcggcccgttatctgtatccgtccctgacaatgcgtgctggggaa

SEQ ID NO: 175166 - DNA, 50 bp, Artificial
  Synthetic oligonucleotide
aggggaaaaacgcccctccgtgccgggactgctcccctatggcctgcctg

SEQ ID NO: 175167 - DNA, 50 bp, Artificial
  Synthetic oligonucleotide
agggggctccgatggctggtcatgcgccttcataccttgtgtcccgcgct

SEQ ID NO: 175168 - DNA, 58 bp, Artificial
  Synthetic oligonucleotide
tctgaaatctcttccgcaggcagggtgccatcggcgcaggacgtgagatgggtcccca

SEQ ID NO: 175169 - DNA, 50 bp, Artificial
  Synthetic oligonucleotide
agggggctggagaggccacaagcgcccgggaagtctgacggagaaaaatt

SEQ ID NO: 175170 - DNA, 50 bp, Artificial
  Synthetic oligonucleotide
aggtcccgatccgtttttgtgtacgcagcttcccggcacatggcaagccg

SEQ ID NO: 175171 - DNA, 50 bp, Artificial
  Synthetic oligonucleotide
ctggcttccagcgagaaatggcgtaacctcgtcaaccgtcggtaccggga

SEQ ID NO: 175172 - DNA, 50 bp, Artificial
  Synthetic oligonucleotide
aggtggatactcactcggagcgcgtgacccgtcctcatgaacgcgaagga

SEQ ID NO: 175173 - DNA, 50 bp, Artificial
  Synthetic oligonucleotide
agtagatggtcgcccagtcccgaagttggcgggaggttgtacgcttgcaa

SEQ ID NO: 175174 - DNA, 50 bp, Artificial
  Synthetic oligonucleotide
agtcaaagctgcgccgcccatgcttgtcataccggcactggcagacgagt

SEQ ID NO: 175175 - DNA, 50 bp, Artificial
  Synthetic oligonucleotide
agtcagggttctggcagacataaccgcaggaacggtgcagccgaagccta

SEQ ID NO: 175176 - DNA, 50 bp, Artificial
  Synthetic oligonucleotide
agtcccagggattcttccgcatttccgtaacctgcccgcagtgtcgggga

SEQ ID NO: 175177 - DNA, 50 bp, Artificial
  Synthetic oligonucleotide
agtcctgtgtaccagcgcctcaaggagttggcggccctgatgacgcccct

SEQ ID NO: 175178 - DNA, 50 bp, Artificial
  Synthetic oligonucleotide
agtgcagccggtatttaccggaccatgtccacactgtctccggccttcgg

SEQ ID NO: 175179 - DNA, 56 bp, Artificial
  Synthetic oligonucleotide
ccagcaaataaacaaggagtagatagtaggatagtttcctctttagacaagtttca

SEQ ID NO: 175180 - DNA, 50 bp, Artificial
  Synthetic oligonucleotide
agtgcctgcggtcggttttctacggatggtgaagttctcacgcagggcct

SEQ ID NO: 175181 - DNA, 50 bp, Artificial
  Synthetic oligonucleotide
agtggcatccgggtgacacatatcgccgacggttgcgctttattggggct

SEQ ID NO: 175182 - DNA, 50 bp, Artificial
  Synthetic oligonucleotide
agttctccacacgcccctcgcagtggctcctgcaaaagatcggctgccct

SEQ ID NO: 175183 - DNA, 50 bp, Artificial
  Synthetic oligonucleotide
ctcgtcggatacggccttatgatttacgtcatagttttgctagtgaactt

SEQ ID NO: 175184 - DNA, 50 bp, Artificial
  Synthetic oligonucleotide
ctcgacggaccccaatgcagagcccgcagaaagccaccggatgtgtgggg

SEQ ID NO: 175185 - DNA, 50 bp, Artificial
  Synthetic oligonucleotide
atacggtatgctcattcggcctccgttggtttcgtccccgaggcccatcc

SEQ ID NO: 175186 - DNA, 50 bp, Artificial
  Synthetic oligonucleotide
atagtggtcgtgggaaacctcctgcggctggcctattccatgggttccgg

SEQ ID NO: 175187 - DNA, 50 bp, Artificial
  Synthetic oligonucleotide
atatgccccaaggagtctcttccttgcggggattcagcagcccgtccaga

SEQ ID NO: 175188 - DNA, 50 bp, Artificial
  Synthetic oligonucleotide
atccagtggaagatgaactactgatgcgctgccggggcctggtgtaggga

SEQ ID NO: 175189 - DNA, 50 bp, Artificial
  Synthetic oligonucleotide
atccccgtcatcatttcagggcaggacggcttttggggagatgtcgcggg

SEQ ID NO: 175190 - DNA, 60 bp, Artificial
  Synthetic oligonucleotide
cagttctctacagtatagacgtcctgtaatgttaggagctatgcccccagcacgagctac

SEQ ID NO: 175191 - DNA, 58 bp, Artificial
  Synthetic oligonucleotide
agctatacctttatttcggacatttgctatatgctgtccagtaacgcgtcgtgtccag

SEQ ID NO: 175192 - DNA, 50 bp, Artificial
  Synthetic oligonucleotide
cacgacgaccttttcaggcacgtggatccgggcccccgcgaaattcagga

SEQ ID NO: 175193 - DNA, 50 bp, Artificial
  Synthetic oligonucleotide
cctgctgtcagggcagggcgggcggacctggtgccacttcacctttgaca

SEQ ID NO: 175194 - DNA, 50 bp, Artificial
  Synthetic oligonucleotide
cacgcgagggccttaccccttttgcggtccgggctcaacctccgtgtgtg

SEQ ID NO: 175195 - DNA, 50 bp, Artificial
  Synthetic oligonucleotide
cacggcccaccgctttccgagctttccccatgattcgaagcagctcgtgt

SEQ ID NO: 175196 - DNA, 50 bp, Artificial
  Synthetic oligonucleotide
cacggtgcttgtactcatgctcacgccgccagagatcatggaggacgccc

SEQ ID NO: 175197 - DNA, 50 bp, Artificial
  Synthetic oligonucleotide
cagggtgaacgcttctccctggagcggcagagggttagggggaacatcct

SEQ ID NO: 175198 - DNA, 50 bp, Artificial
  Synthetic oligonucleotide
cagtaaaagtggactccggccggtctagaacttgcccgcacggcggggcc

SEQ ID NO: 175199 - DNA, 50 bp, Artificial
  Synthetic oligonucleotide
cagttttacggcttgctgtttgcccaccgtccagcctgtgtgggccgaag

SEQ ID NO: 175200 - DNA, 50 bp, Artificial
  Synthetic oligonucleotide
catgacggaattctccttgggtggaaacgctcgggcgagggcccggaaag

SEQ ID NO: 175201 - DNA, 50 bp, Artificial
  Synthetic oligonucleotide
catgcttgaggaagggtttgccgcctggagaccggacccgagattcacgc

SEQ ID NO: 175202 - DNA, 57 bp, Artificial
  Synthetic oligonucleotide
tgttcagatcctaaaggtatcttgtaccctaactgagctaatactccactaaacctg

SEQ ID NO: 175203 - DNA, 50 bp, Artificial
  Synthetic oligonucleotide
catggccccgggtccaaccgcagtcgagaccacacagggggagcgtatga

SEQ ID NO: 175204 - DNA, 50 bp, Artificial
  Synthetic oligonucleotide
cattcggcctccgttggtttcgtccccgaggcccatccccgggaatccga

SEQ ID NO: 175205 - DNA, 50 bp, Artificial
  Synthetic oligonucleotide
cattctcgaacacggcgaaaaggtccgcatggtccccaccgacaagcgga

SEQ ID NO: 175206 - DNA, 50 bp, Artificial
  Synthetic oligonucleotide
ccaaccttatggccgggagtcctgtgtaccagcgcctcaaggagttggcg

SEQ ID NO: 175207 - DNA, 50 bp, Artificial
  Synthetic oligonucleotide
ccaattgcgataccccgtcctcttgtggcatggtcgtgccattgggctcg

SEQ ID NO: 175208 - DNA, 50 bp, Artificial
  Synthetic oligonucleotide
ccacaggttgggaagctcgggaagggccggattttcgtagggtctgccgc

SEQ ID NO: 175209 - DNA, 50 bp, Artificial
  Synthetic oligonucleotide
ccggcgactgcgagactgccccgaagagcggccgtaggaccgtgtccgtt

SEQ ID NO: 175210 - DNA, 50 bp, Artificial
  Synthetic oligonucleotide
ccggccgccaggccggtagtctggtttaatgacgacttcccacccgatac

SEQ ID NO: 175211 - DNA, 50 bp, Artificial
  Synthetic oligonucleotide
ccacctatacccgacccgccgtttctggtcgagggcggataaggaatgcc

SEQ ID NO: 175212 - DNA, 50 bp, Artificial
  Synthetic oligonucleotide
ccggaactgacatacagaggcatgccctcaacccggtaccaaccccgcac

SEQ ID NO: 175213 - DNA, 55 bp, Artificial
  Synthetic oligonucleotide
gttcgtttagatagtgtcaatacacggaagggaaataaacatgcctaaaattatc

SEQ ID NO: 175214 - DNA, 50 bp, Artificial
  Synthetic oligonucleotide
ccacgtcgcatagggcggactgacgagcgttacctgccagagatcggcca

SEQ ID NO: 175215 - DNA, 50 bp, Artificial
  Synthetic oligonucleotide
ccagagccccgcgccggaactgacatacagaggcatgccctcaacccggt

SEQ ID NO: 175216 - DNA, 50 bp, Artificial
  Synthetic oligonucleotide
ccgcgaagggacttattcaaacccgaccttcgcacggggcaaaccggacg

SEQ ID NO: 175217 - DNA, 50 bp, Artificial
  Synthetic oligonucleotide
cccatgtatgctcgggccatgcgcgctccaatcccacgttcgaaacggtc

SEQ ID NO: 175218 - DNA, 50 bp, Artificial
  Synthetic oligonucleotide
ccccggacaaggctgcttaccgtccctgctccagcggagcggacatgctc

SEQ ID NO: 175219 - DNA, 50 bp, Artificial
  Synthetic oligonucleotide
cccctcaaccggaaagcaatgtccggtctgcgatgcgtcacgggcgggaa

SEQ ID NO: 175220 - DNA, 50 bp, Artificial
  Synthetic oligonucleotide
cggagccaggtaatacggcgaccacatgtgcttgtcgtcccgcagaagcg

SEQ ID NO: 175221 - DNA, 50 bp, Artificial
  Synthetic oligonucleotide
atttcagggcaggacggcttttggggagatgtcgcgggaacggcagggcc

SEQ ID NO: 175222 - DNA, 50 bp, Artificial
  Synthetic oligonucleotide
cgctcaaacggagcgcgcctcggagcacccggggaaatcacaggccccca

SEQ ID NO: 175223 - DNA, 50 bp, Artificial
  Synthetic oligonucleotide
cgcggtgatggaacccctgtcggagttgcccgcacgttccatgaggcgcg

SEQ ID NO: 175224 - DNA, 57 bp, Artificial
  Synthetic oligonucleotide
cctataaatgccataactactcctatacacattcggataatatagtatataggccgg

SEQ ID NO: 175225 - DNA, 50 bp, Artificial
  Synthetic oligonucleotide
cgcggctacatttcccgccgattgaaagaaagtacgggcctccgccggtt

SEQ ID NO: 175226 - DNA, 50 bp, Artificial
  Synthetic oligonucleotide
caaaccggacgttgccttggccgtttgctgccctgcacgttcccggccca

SEQ ID NO: 175227 - DNA, 50 bp, Artificial
  Synthetic oligonucleotide
caaagggggctgcggaactcgtctcgtcgaaacgtgacacgaggggcgtt

SEQ ID NO: 175228 - DNA, 50 bp, Artificial
  Synthetic oligonucleotide
cgcgcgtggctgtggcgtaaatcctgtccgagccgggaatcaccatgtcc

SEQ ID NO: 175229 - DNA, 50 bp, Artificial
  Synthetic oligonucleotide
caagaggcagggggcccgcaaagacaggcgacggacgacatctttcagta

SEQ ID NO: 175230 - DNA, 50 bp, Artificial
  Synthetic oligonucleotide
caagccagacaaggttgaagcgccgggcatactcccgtttgaccgttgcg

SEQ ID NO: 175231 - DNA, 50 bp, Artificial
  Synthetic oligonucleotide
cgcccccgaaggttccggcgaagtaaagcgcgtccacaaagttcgcggca

SEQ ID NO: 175232 - DNA, 50 bp, Artificial
  Synthetic oligonucleotide
cgccagagatagcagcaggccccgaagctcagcgccgtaatgtaggcgat

SEQ ID NO: 175233 - DNA, 50 bp, Artificial
  Synthetic oligonucleotide
cgcatgccgtacttgcgacggaaatacgcggccagagtatgccaacgcac

SEQ ID NO: 175234 - DNA, 50 bp, Artificial
  Synthetic oligonucleotide
caatagtacataagtctgatacatacacttcataattaatacctaattcc

SEQ ID NO: 175235 - DNA, 57 bp, Artificial
  Synthetic oligonucleotide
atgaggcgaagcgaagccacatttcgacatccatgcagtaatggaggtcctcccgca

SEQ ID NO: 175236 - DNA, 50 bp, Artificial
  Synthetic oligonucleotide
cgcagaccagacggaaggagcgggagtgctgtttgggcatgacgcgccca

SEQ ID NO: 175237 - DNA, 50 bp, Artificial
  Synthetic oligonucleotide
cgcacggggcaaaccggacgcagacagagggcgaaagggcaatttagaaa

SEQ ID NO: 175238 - DNA, 50 bp, Artificial
  Synthetic oligonucleotide
cgatagtgacggatattctcccgcacaagcccgacgccccgtttccgctg

SEQ ID NO: 175239 - DNA, 50 bp, Artificial
  Synthetic oligonucleotide
cgagccagtggtatgccttcgccaccgtagtcctgtggtcgtccgcattc

SEQ ID NO: 175240 - DNA, 50 bp, Artificial
  Synthetic oligonucleotide
cgagatactcggtcccctcgacgacagggaggccgcccaccgcatatgct

SEQ ID NO: 175241 - DNA, 50 bp, Artificial
  Synthetic oligonucleotide
caattcaccggcaagggtaggggcttgaggtcccaattgggggcaatcgc

SEQ ID NO: 175242 - DNA, 50 bp, Artificial
  Synthetic oligonucleotide
caattgtcgggcacagcgggactaagcaaagtccgggccagcgggaaaga

SEQ ID NO: 175243 - DNA, 50 bp, Artificial
  Synthetic oligonucleotide
cacaacggaagcggaaacaatcccggcaatgcagactacgccacgcagga

SEQ ID NO: 175244 - DNA, 50 bp, Artificial
  Synthetic oligonucleotide
cgacaagtccctttacgtttcccagcgcgaaagtgaaccttccaagtaac

SEQ ID NO: 175245 - DNA, 50 bp, Artificial
  Synthetic oligonucleotide
ccttgctgcggccagacaagtttcagctcgtggccggaagtcgtggccag

SEQ ID NO: 175246 - DNA, 57 bp, Artificial
  Synthetic oligonucleotide
tagcgccttcagtgctgagccacgtataacagggacgtcgtctccagggtatccata

SEQ ID NO: 175247 - DNA, 50 bp, Artificial
  Synthetic oligonucleotide
caccaggaggacaggtgatccgactcgcgtttggctccgcgccccgcaaa

SEQ ID NO: 175248 - DNA, 50 bp, Artificial
  Synthetic oligonucleotide
caccggagtgactgctgcggacataggcagcaatgcatcctcactgcccg

SEQ ID NO: 175249 - DNA, 50 bp, Artificial
  Synthetic oligonucleotide
acggaagcgcactgtccagtaatcggcggtggcaacccagggccttacca

SEQ ID NO: 175250 - DNA, 50 bp, Artificial
  Synthetic oligonucleotide
acggagaggtcggacagagtcacgcggccatagcactgcagaggcgccgt

SEQ ID NO: 175251 - DNA, 50 bp, Artificial
  Synthetic oligonucleotide
acggagccgccctactcgtctcggccgctgtctccgcggtctgctacttc

SEQ ID NO: 175252 - DNA, 50 bp, Artificial
  Synthetic oligonucleotide
acggagcggatcggtgctatgtcgtgtggtaccgggacagcgagggaaag

SEQ ID NO: 175253 - DNA, 50 bp, Artificial
  Synthetic oligonucleotide
acggagggcgagccatgcatatcgacacagtttttcccatgccgggcgga

SEQ ID NO: 175254 - DNA, 50 bp, Artificial
  Synthetic oligonucleotide
acggcacaggtcggggaacccgcctgaaacgcgcagattgtcttgacacc

SEQ ID NO: 175255 - DNA, 50 bp, Artificial
  Synthetic oligonucleotide
acggccaaactgtagcgttctcggacaaagagacgcgggggaaggtggga

SEQ ID NO: 175256 - DNA, 50 bp, Artificial
  Synthetic oligonucleotide
acggcctgtcgcgataacgcatggccatcacacacccgtcatccaccgcc

SEQ ID NO: 175257 - DNA, 55 bp, Artificial
  Synthetic oligonucleotide
gacatcgttgttgacatatattagtaagacttaaggtaacaaaagaaggtactgg

SEQ ID NO: 175258 - DNA, 50 bp, Artificial
  Synthetic oligonucleotide
acggcctgtgcatctccttccattgctgcgtccggcatgacctgagcgta

SEQ ID NO: 175259 - DNA, 50 bp, Artificial
  Synthetic oligonucleotide
gcgggcaccgcatctgtggataccgtggctagcagcctgttgtcttcggt

SEQ ID NO: 175260 - DNA, 50 bp, Artificial
  Synthetic oligonucleotide
acggccttggggcaacggatcgtcaagccgtgtcatgcctatgactgccc

SEQ ID NO: 175261 - DNA, 50 bp, Artificial
  Synthetic oligonucleotide
acggcgcttgtacgccgttcattttcgcaagggctacgtggccaggcaac

SEQ ID NO: 175262 - DNA, 50 bp, Artificial
  Synthetic oligonucleotide
acggcttgatgtgtgcagacctttccgggcgcatgagtgatggggcggaa

SEQ ID NO: 175263 - DNA, 50 bp, Artificial
  Synthetic oligonucleotide
acggggcattggcttacgccgccccttgcgccaacattcccgatcaatcc

SEQ ID NO: 175264 - DNA, 50 bp, Artificial
  Synthetic oligonucleotide
gcgcgcctcggagcacccggggaaatcacaggcccccatacgtggatggc

SEQ ID NO: 175265 - DNA, 50 bp, Artificial
  Synthetic oligonucleotide
acggtgggtgtgggaacacgcacggagtaaccttcgaaacggcctgccat

SEQ ID NO: 175266 - DNA, 50 bp, Artificial
  Synthetic oligonucleotide
acgtactgggggccggcatgtgtaccttgcctttgggcgcgcatcagtgc

SEQ ID NO: 175267 - DNA, 50 bp, Artificial
  Synthetic oligonucleotide
acgtactgttgcggccacacgcttgcagcgcaggatctgccttgtggttt

SEQ ID NO: 175268 - DNA, 57 bp, Artificial
  Synthetic oligonucleotide
ttatcgtgagtgagctttccaggatcgggcgcagtatccgtgagaacctgaatattt

SEQ ID NO: 175269 - DNA, 50 bp, Artificial
  Synthetic oligonucleotide
acgtccatgaacatgacagtattacaccaactaagcttagaccctggtga

SEQ ID NO: 175270 - DNA, 50 bp, Artificial
  Synthetic oligonucleotide
acgtgggggctgacatactgtgggacctcggcgggaagcctctgtcggga

SEQ ID NO: 175271 - DNA, 50 bp, Artificial
  Synthetic oligonucleotide
acgtgtccagcatgaggttatcagccgtggaccccaggggcatgaccgta

SEQ ID NO: 175272 - DNA, 50 bp, Artificial
  Synthetic oligonucleotide
acgtgtgcgccccatgccttaccctgcctgaccgttgcgatgccggaacg

SEQ ID NO: 175273 - DNA, 50 bp, Artificial
  Synthetic oligonucleotide
actcccgcctctatcccttcggggcgttccgtggcatccctcatgatgag

SEQ ID NO: 175274 - DNA, 50 bp, Artificial
  Synthetic oligonucleotide
acttcaccggacctcagggcgtaggtgttgccaacgcaggcgactccctg

SEQ ID NO: 175275 - DNA, 50 bp, Artificial
  Synthetic oligonucleotide
acctggagggttgcacgctgaacgattgcagtgccggcatgaatggtggg

SEQ ID NO: 175276 - DNA, 50 bp, Artificial
  Synthetic oligonucleotide
acctggccgggggaccgtgacccaccccagttcttgtggaatccgtattg

SEQ ID NO: 175277 - DNA, 50 bp, Artificial
  Synthetic oligonucleotide
accttgaggtctgccggactgacggaaagggtgccgttacctgccagcgt

SEQ ID NO: 175278 - DNA, 50 bp, Artificial
  Synthetic oligonucleotide
accttgcaccgcagatagcctgccctcacctgcccgaaaatgttcgcccg

SEQ ID NO: 175279 - DNA, 57 bp, Artificial
  Synthetic oligonucleotide
ttattcggagtagaccatgtgccgcttattcgccctcagcagccgggaccccgtgtc

SEQ ID NO: 175280 - DNA, 50 bp, Artificial
  Synthetic oligonucleotide
accttgccggaaaggaatagtccctgtcgtcccgggcccacggaaagcat

SEQ ID NO: 175281 - DNA, 50 bp, Artificial
  Synthetic oligonucleotide
accttgtgaaccggcttatccgcgacttcggtctgtggtccgaccccact

SEQ ID NO: 175282 - DNA, 50 bp, Artificial
  Synthetic oligonucleotide
acgacaaacggataacacctgtcccccgtgtgcccgaatttctgcgcggg

SEQ ID NO: 175283 - DNA, 50 bp, Artificial
  Synthetic oligonucleotide
ggcacctgcgggacaggaagaaccccggcgaacgtgcacctagtagcgcg

SEQ ID NO: 175284 - DNA, 50 bp, Artificial
  Synthetic oligonucleotide
acgagcgatgatgaaccagtctcctttcaagctccatagcgcctatgtcc

SEQ ID NO: 175285 - DNA, 50 bp, Artificial
  Synthetic oligonucleotide
acgaggtgttccatggacggaaccggacgtaaaagttgcagccgcacgga

SEQ ID NO: 175286 - DNA, 50 bp, Artificial
  Synthetic oligonucleotide
acgcacgcggttttctccgtattgcgcacctgccggtctttgcctccggt

SEQ ID NO: 175287 - DNA, 50 bp, Artificial
  Synthetic oligonucleotide
acgcagcccgaaaacacgaccatgagacacccctcgaccccactccgccc

SEQ ID NO: 175288 - DNA, 50 bp, Artificial
  Synthetic oligonucleotide
acgcagctcaacatttcgcttgaccccgcgcacccccgtgtagatgccgc

SEQ ID NO: 175289 - DNA, 50 bp, Artificial
  Synthetic oligonucleotide
acgccaccgctgcatcactgccggttgtaattatgcgcctcgacgggttg

SEQ ID NO: 175290 - DNA, 56 bp, Artificial
  Synthetic oligonucleotide
acaatagaatgattaaaatgcatgataagtgggtttgttcctactaagatagtaat

SEQ ID NO: 175291 - DNA, 50 bp, Artificial
  Synthetic oligonucleotide
acgccagactccgctacggtccatcacccggtctatgcccccgaaaaggt

SEQ ID NO: 175292 - DNA, 50 bp, Artificial
  Synthetic oligonucleotide
acgccagtatgcgttcttcactgggcgcctggtaaggggagccttctgca

SEQ ID NO: 175293 - DNA, 50 bp, Artificial
  Synthetic oligonucleotide
acgcccgttcgcctgtgggcgctaccggagcctggcagttcatgccgcct

SEQ ID NO: 175294 - DNA, 50 bp, Artificial
  Synthetic oligonucleotide
acgccctggaccccgtatttctcgactgccggaggacaatagcgcaggac

SEQ ID NO: 175295 - DNA, 50 bp, Artificial
  Synthetic oligonucleotide
acgccggatgtctgcacataggcgccggtatcccatgtcgcttccaccag

SEQ ID NO: 175296 - DNA, 50 bp, Artificial
  Synthetic oligonucleotide
acgccgttcctcccgcagtctggctatcaatgcctcccgttgcatgcggc

SEQ ID NO: 175297 - DNA, 50 bp, Artificial
  Synthetic oligonucleotide
acgcgagtgtgacgcccctgtaacaaatcgggtcgcccgaatcgttgccc

SEQ ID NO: 175298 - DNA, 50 bp, Artificial
  Synthetic oligonucleotide
acgcggggccatgaacacgtcacccttgatacgcgcagtaaccagcggtt

SEQ ID NO: 175299 - DNA, 50 bp, Artificial
  Synthetic oligonucleotide
acgcggtttctttgaatccctggggcccatcggcgcaccctttgtgctgc

SEQ ID NO: 175300 - DNA, 50 bp, Artificial
  Synthetic oligonucleotide
acgctcctggcgccgccccatccgatgaggaccgcaatcccggacgagag

SEQ ID NO: 175301 - DNA, 60 bp, Artificial
  Synthetic oligonucleotide
tgcgatttggacacgcagtgcaatagcacttctctattgttaagacagggagataacccg

SEQ ID NO: 175302 - DNA, 55 bp, Artificial
  Synthetic oligonucleotide
ttagttaccgttttgccataaacgatattgtgttaataatcggaagcttatctag

SEQ ID NO: 175303 - DNA, 50 bp, Artificial
  Synthetic oligonucleotide
acggaacgagcatcaccccgccagcttcttagctatccccgccacatgct

SEQ ID NO: 175304 - DNA, 50 bp, Artificial
  Synthetic oligonucleotide
agcgcctggggaaaagaccttgacaggcgaacgacccacggctaacgact

SEQ ID NO: 175305 - DNA, 50 bp, Artificial
  Synthetic oligonucleotide
gaggcagttccaccagatcaactgcgaatgcctcgggccttccgaaccct

SEQ ID NO: 175306 - DNA, 50 bp, Artificial
  Synthetic oligonucleotide
agcgctggcttccagaatacttcgcgtgtctgcagcatgctagagccccg

SEQ ID NO: 175307 - DNA, 50 bp, Artificial
  Synthetic oligonucleotide
agcggcccgacacttataccgtggtccatgggaacaacgatagtgcggcc

SEQ ID NO: 175308 - DNA, 50 bp, Artificial
  Synthetic oligonucleotide
agctcagaccgatgcgacccagtgtatcctcaagggcttgccgggtagcg

SEQ ID NO: 175309 - DNA, 50 bp, Artificial
  Synthetic oligonucleotide
agctcagggccataatcggactatgcccccacaatgccggagcatcccgc

SEQ ID NO: 175310 - DNA, 50 bp, Artificial
  Synthetic oligonucleotide
gacgcttcgcaaatgaagacgtttagcccaaagccagaacatattagcca

SEQ ID NO: 175311 - DNA, 50 bp, Artificial
  Synthetic oligonucleotide
agctccataagacgaaagcgcgtactgtagccgaaactgagttccagtac

SEQ ID NO: 175312 - DNA, 50 bp, Artificial
  Synthetic oligonucleotide
agctgcttaataccgccccctacggcgaaggatggctcatacgcgtcacg

SEQ ID NO: 175313 - DNA, 56 bp, Artificial
  Synthetic oligonucleotide
gctgtagctactataaagtgtagggattgtctagaatagcttatatggtaatgcag

SEQ ID NO: 175314 - DNA, 50 bp, Artificial
  Synthetic oligonucleotide
agctggggcaaggcgcatgatcagcacgaggagtgtgggccatggtttca

SEQ ID NO: 175315 - DNA, 50 bp, Artificial
  Synthetic oligonucleotide
aggaagcctctatgccctgcccgaaagctggtgcaccatctcccctgttc

SEQ ID NO: 175316 - DNA, 50 bp, Artificial
  Synthetic oligonucleotide
aggacaagcccacccgcccccgttggtggttctcaggcatgccccgtatg

SEQ ID NO: 175317 - DNA, 50 bp, Artificial
  Synthetic oligonucleotide
aggagagcacccccagactgccgacaggcccccacaggcttaagggcaat

SEQ ID NO: 175318 - DNA, 50 bp, Artificial
  Synthetic oligonucleotide
aggagatgattctccggaagggccgctccacgtaccgccaggacacgtag

SEQ ID NO: 175319 - DNA, 50 bp, Artificial
  Synthetic oligonucleotide
ctttaacgtgaagcagggggagtccctcaagacgggccagaccttccccc

SEQ ID NO: 175320 - DNA, 50 bp, Artificial
  Synthetic oligonucleotide
aggataccggacgggcggcgtgggtattcagtcccattggcgggaaatta

SEQ ID NO: 175321 - DNA, 50 bp, Artificial
  Synthetic oligonucleotide
aggcaaggcccgacaggcaccaaccgtcaacaaaggggtatggcatgaaa

SEQ ID NO: 175322 - DNA, 50 bp, Artificial
  Synthetic oligonucleotide
aggcccagtctcatggcgggggcgtcgcttcctgtttcaggaaggaaacg

SEQ ID NO: 175323 - DNA, 50 bp, Artificial
  Synthetic oligonucleotide
aggccgcttccgtacagcgtgtggtcgcgcgcaattgtgcaagcctgtgt

SEQ ID NO: 175324 - DNA, 56 bp, Artificial
  Synthetic oligonucleotide
cacctttagtacacaactctattcaccattccaatatcttcctcaagtattaggag

SEQ ID NO: 175325 - DNA, 50 bp, Artificial
  Synthetic oligonucleotide
aggcctgacaccctccccggaatccacagacgaaccatccgagaggtgtc

SEQ ID NO: 175326 - DNA, 50 bp, Artificial
  Synthetic oligonucleotide
aggcgcaggcaaggctggtgtatatggctacccccaacccttgtggacgg

SEQ ID NO: 175327 - DNA, 50 bp, Artificial
  Synthetic oligonucleotide
aggcggacagctattggctgagggggagagggccccttttgaaatagggg

SEQ ID NO: 175328 - DNA, 50 bp, Artificial
  Synthetic oligonucleotide
aggcggggccatgttgctcggttaggtgggatatagcgggcatgcgttgt

SEQ ID NO: 175329 - DNA, 50 bp, Artificial
  Synthetic oligonucleotide
aggcgtgggacaagccgttacctggttgacaccctggcggtccataggat

SEQ ID NO: 175330 - DNA, 50 bp, Artificial
  Synthetic oligonucleotide
aggcgttgaccccgctggcctggtaggtacaagccgcatccagggcgcac

SEQ ID NO: 175331 - DNA, 50 bp, Artificial
  Synthetic oligonucleotide
acttcaggggtgtccgtggaatcgctcatggtgcctccgaggctgcctcc

SEQ ID NO: 175332 - DNA, 50 bp, Artificial
  Synthetic oligonucleotide
acttccgttcgaaatacgcatcgacacacgattccaaccgggagacaggc

SEQ ID NO: 175333 - DNA, 50 bp, Artificial
  Synthetic oligonucleotide
gcccaatcaagcgcacaggactccgctttcaacccggtcccgctacgatt

SEQ ID NO: 175334 - DNA, 50 bp, Artificial
  Synthetic oligonucleotide
acttgcatgtcggcaagcatgcatccctaagggcttcccgcacccctcca

SEQ ID NO: 175335 - DNA, 56 bp, Artificial
  Synthetic oligonucleotide
gcgcgactatcgggtgcggaccggatttgcgttggtcatggatccagcaatcgaga

SEQ ID NO: 175336 - DNA, 50 bp, Artificial
  Synthetic oligonucleotide
agacagtcggcggaaccacctctgccacagaacgtgcttccagcccgtat

SEQ ID NO: 175337 - DNA, 50 bp, Artificial
  Synthetic oligonucleotide
agactttcaagcccacggtgcacaaaaccaagctgcgggatagccccgac

SEQ ID NO: 175338 - DNA, 50 bp, Artificial
  Synthetic oligonucleotide
agatccctgcatgccgtctatctgcatggttccgcagtaaccggcggact

SEQ ID NO: 175339 - DNA, 50 bp, Artificial
  Synthetic oligonucleotide
agatggcccggcacaacctcgctggctgcgttgaccacacctaccagcgg

SEQ ID NO: 175340 - DNA, 50 bp, Artificial
  Synthetic oligonucleotide
gcatcatttacaactaagacatcaaagcctaacttacgtaattttctaac

SEQ ID NO: 175341 - DNA, 50 bp, Artificial
  Synthetic oligonucleotide
agattccacagacggaagccgggtatcccacgcacttccggccgataggg

SEQ ID NO: 175342 - DNA, 50 bp, Artificial
  Synthetic oligonucleotide
agcacaaacttattgcggccccctgggccttgcgcctcaccgtggaagaa

SEQ ID NO: 175343 - DNA, 50 bp, Artificial
  Synthetic oligonucleotide
agcacgcccccaaagggagcagggtagcgtcatatagggcgaccatctgc

SEQ ID NO: 175344 - DNA, 50 bp, Artificial
  Synthetic oligonucleotide
agcagggtggcaaccttacgcttacccttgcgcaatgcaaacgtcccctg

SEQ ID NO: 175345 - DNA, 50 bp, Artificial
  Synthetic oligonucleotide
agcatacgtgcaagaccgtgctggtatgctcgggggccaagcaccgtcag

SEQ ID NO: 175346 - DNA, 56 bp, Artificial
  Synthetic oligonucleotide
acgccatccccagaaagcgcactgagggatctccactgccgttacgaggcctaacg

SEQ ID NO: 175347 - DNA, 50 bp, Artificial
  Synthetic oligonucleotide
gcagggtatggtttattaactatcctgtagatagagattcctgtttgggg

SEQ ID NO: 175348 - DNA, 50 bp, Artificial
  Synthetic oligonucleotide
agccaagctgtccccacgctgtacaacgatatccatgctccgcgctctga

SEQ ID NO: 175349 - DNA, 50 bp, Artificial
  Synthetic oligonucleotide
agccaattcagctgtaggcgaccgggtttcggaccttcgagacgccgcgt

SEQ ID NO: 175350 - DNA, 50 bp, Artificial
  Synthetic oligonucleotide
agcccaaggcccgtccaaaggcaacgtaggatgcgtgggaaggtttagga

SEQ ID NO: 175351 - DNA, 50 bp, Artificial
  Synthetic oligonucleotide
gcaacgatgttccctttgcgggcttccgcactgccaccagagttgccagt

SEQ ID NO: 175352 - DNA, 50 bp, Artificial
  Synthetic oligonucleotide
agcccatgaatgcgtgcggggttggttctgcaagacccatcttgggcatt

SEQ ID NO: 175353 - DNA, 50 bp, Artificial
  Synthetic oligonucleotide
agccccggtatagcctacggggagggagttcgctcagaaatcgccgcaga

SEQ ID NO: 175354 - DNA, 50 bp, Artificial
  Synthetic oligonucleotide
agccctccttgtgcggacatgcagccgtcatatccgtccactatggcggg

SEQ ID NO: 175355 - DNA, 50 bp, Artificial
  Synthetic oligonucleotide
agccgggtatcccacgcacttccggccgatagggtcctgatcgctcggtc

SEQ ID NO: 175356 - DNA, 50 bp, Artificial
  Synthetic oligonucleotide
agccgtaggcggactgaaagtcgcgatgcaccgtggttacgtcacgcaga

SEQ ID NO: 175357 - DNA, 56 bp, Artificial
  Synthetic oligonucleotide
atcctgtaccaaacatacgggttggtttagcatacaactatagtagagatcatact

SEQ ID NO: 175358 - DNA, 50 bp, Artificial
  Synthetic oligonucleotide
agccttgtcacggcgccctgcatcaatgcctgccccgggcatgtgaaagt

SEQ ID NO: 175359 - DNA, 56 bp, Artificial
  Synthetic oligonucleotide
ggtttatttactgttttcaatgagtgcggtgaatactggattataaaatcagcccg

SEQ ID NO: 175360 - DNA, 56 bp, Artificial
  Synthetic oligonucleotide
gcatttaagtatacacctctattaggaatgtatgacctaggaacattaggtggtac

SEQ ID NO: 175361 - DNA, 55 bp, Artificial
  Synthetic oligonucleotide
atcccgcacaattcgcaacatcgcatctcggtatttgttaggaaagtcgtgtgcc

SEQ ID NO: 175362 - DNA, 55 bp, Artificial
  Synthetic oligonucleotide
ctatccgagccaactggttaagctcgtttccacgcttatataatgtcagcaaaag

SEQ ID NO: 175363 - DNA, 54 bp, Artificial
  Synthetic oligonucleotide
aacttacggtgatcccacctgcccaagcggtggaacggttgacccaaccctgca

SEQ ID NO: 175364 - DNA, 55 bp, Artificial
  Synthetic oligonucleotide
ctgccggggttgaagtctgtggctaaagccacgccgactccgctatcaacaagcc

SEQ ID NO: 175365 - DNA, 55 bp, Artificial
  Synthetic oligonucleotide
cgttgaaacagaatacgacaggggcactttcgatatagagctcagcccaacggtc

SEQ ID NO: 175366 - DNA, 55 bp, Artificial
  Synthetic oligonucleotide
ccttttggatgagtgtgtatcgacaactattagggtgtctatgctatttaagtct

SEQ ID NO: 175367 - DNA, 55 bp, Artificial
  Synthetic oligonucleotide
ccttgatgagcctgttgtatcaagcgatttgaacggtaatccgcattccagtatg

SEQ ID NO: 175368 - DNA, 54 bp, Artificial
  Synthetic oligonucleotide
ccttaacgtaaaatcccgtatactctgtagatgtaaaagcatttataacaccgc

SEQ ID NO: 175369 - DNA, 54 bp, Artificial
  Synthetic oligonucleotide
ccccgccaaagatctgcttaggaatgccgtttacggcttggttgagcttaaccg

SEQ ID NO: 175370 - DNA, 55 bp, Artificial
  Synthetic oligonucleotide
ccacatattcatacacccactataactcacccacaaacctaagaccactaacacc

SEQ ID NO: 175371 - DNA, 55 bp, Artificial
  Synthetic oligonucleotide
cacgcggatcagttcgcaggctctcatggagctgagctttaccaacatctactgc

SEQ ID NO: 175372 - DNA, 49 bp, Artificial
  Synthetic oligonucleotide
gggttgccaccttgccgaaaatgaaccaaacgtaaaataacccctcttt

SEQ ID NO: 175373 - DNA, 55 bp, Artificial
  Synthetic oligonucleotide
caagctgggtgtagataggccacggcatgggtgttggattagccccaagtgccct

SEQ ID NO: 175374 - DNA, 56 bp, Artificial
  Synthetic oligonucleotide
acggcgagcggagataaatgtgtcgccaatcctacctgcccaggtggaagcacata

SEQ ID NO: 175375 - DNA, 55 bp, Artificial
  Synthetic oligonucleotide
atggccaatgccaatagagccgtagccccaccatggagtatatgggcggagcaga

SEQ ID NO: 175376 - DNA, 55 bp, Artificial
  Synthetic oligonucleotide
atataaagaccacacactatttaataggcagcgttgttgggcctcacccgtttcc

SEQ ID NO: 175377 - DNA, 55 bp, Artificial
  Synthetic oligonucleotide
gtctgtgtctgttcggatgtaaataatattcggcctttcgactatggccaagctg

SEQ ID NO: 175378 - DNA, 55 bp, Artificial
  Synthetic oligonucleotide
agatgaacaccaagtattttcggtcttggcaggtagaatggcataccggccatag

SEQ ID NO: 175379 - DNA, 55 bp, Artificial
  Synthetic oligonucleotide
agaaaccattccgctaagaaacaaggctctactatattcaaatagttgccctcac

SEQ ID NO: 175380 - DNA, 55 bp, Artificial
  Synthetic oligonucleotide
taccatctgtcccgctaccccctatacgcaacgggtgcgccctttaacacgtata

SEQ ID NO: 175381 - DNA, 55 bp, Artificial
  Synthetic oligonucleotide
tatacgtgttaaagggcgcacccgttgcgtatagggggtagcgggacagatggta

SEQ ID NO: 175382 - DNA, 54 bp, Artificial
  Synthetic oligonucleotide
gggtatagatgagcctaaggatgcgcttgttgtaggtagcgctgttgagttgat

SEQ ID NO: 175383 - DNA, 54 bp, Artificial
  Synthetic oligonucleotide
gtagcatctaccttccatcgcccatttagcagcgttatagaaacccattaacct

SEQ ID NO: 175384 - DNA, 53 bp, Artificial
  Synthetic oligonucleotide
ggattaggttggcttacctctttcgtgcttgttacggttatggttagattacc

SEQ ID NO: 175385 - DNA, 56 bp, Artificial
  Synthetic oligonucleotide
aggccacggcatgggtgttggattagccccaagtgccctccagatctttacatgga

SEQ ID NO: 175386 - DNA, 53 bp, Artificial
  Synthetic oligonucleotide
cttgtatgcccacacactttgagcgctatccaattcgctacacgattcagtgg

SEQ ID NO: 175387 - DNA, 53 bp, Artificial
  Synthetic oligonucleotide
cgataacattaccgacttagacaacgtctcatgtataaactgcccggacaaca

SEQ ID NO: 175388 - DNA, 52 bp, Artificial
  Synthetic oligonucleotide
atctcagagggcaacccttaaagaatacggttgttctaacaccaggcccatc

SEQ ID NO: 175389 - DNA, 51 bp, Artificial
  Synthetic oligonucleotide
gcttataagtagataaattgctgcaggaatccaaataacggctgttcctac

SEQ ID NO: 175390 - DNA, 51 bp, Artificial
  Synthetic oligonucleotide
caatattagacaggcatatcttaagggcgcttttaagcgtgggcttaatag

SEQ ID NO: 175391 - DNA, 51 bp, Artificial
  Synthetic oligonucleotide
aagcgtatattcctacgttgaacatatgaacggctaagttgtgcacgtcgc

SEQ ID NO: 175392 - DNA, 50 bp, Artificial
  Synthetic oligonucleotide
ataccccttcgtaacaaccacaggaacacctgaggggccaactatcaaag

SEQ ID NO: 175393 - DNA, 50 bp, Artificial
  Synthetic oligonucleotide
aagacctccaagccacttctcgttaacatatggcatattgcatgactgtg

SEQ ID NO: 175394 - DNA, 50 bp, Artificial
  Synthetic oligonucleotide
tcccataatatgctcgcccaccacctcaggctcgggtagcgaggttaccc

SEQ ID NO: 175395 - DNA, 55 bp, Artificial
  Synthetic oligonucleotide
ggctgagcgagagtgtttattgctctttacctcttgaggcgttggacgtatgggt

SEQ ID NO: 175396 - DNA, 55 bp, Artificial
  Synthetic oligonucleotide
gctttgcctggacgccctctataaccctcgccaacgtataccataatgtactcgc

SEQ ID NO: 175397 - DNA, 55 bp, Artificial
  Synthetic oligonucleotide
ggctggtcttatcatatcccttgtgggcgtcgtattcatttacgcatcgactcac

SEQ ID NO: 175398 - DNA, 55 bp, Artificial
  Synthetic oligonucleotide
gcatataattacatttctcgaccacaggcaatctgcacacgatggagatagcccc

SEQ ID NO: 175399 - DNA, 55 bp, Artificial
  Synthetic oligonucleotide
gagcatcttgctggcgttatgccgtttagcttttatgcatcaagttggattaaac

SEQ ID NO: 175400 - DNA, 55 bp, Artificial
  Synthetic oligonucleotide
gggtatacatccttacccacatctatacccaaagccccaagtatcgttcttcctg

SEQ ID NO: 175401 - DNA, 57 bp, Artificial
  Synthetic oligonucleotide
tttaggcccgtgaagctctcgcttatctacggcgagggagacttctctccttacaac

SEQ ID NO: 175402 - DNA, 55 bp, Artificial
  Synthetic oligonucleotide
agggtctaggcaaatccggaccctcgctaaccccgagaactgatggggagccgca

SEQ ID NO: 175403 - DNA, 50 bp, Artificial
  Synthetic oligonucleotide
aatccccgttaagaacggcctcccgattcttggaccgtggcccaacgagg

SEQ ID NO: 175404 - DNA, 50 bp, Artificial
  Synthetic oligonucleotide
aaggttcctaaggctccttgacttctcggtagagcgggcaagcggcagga

SEQ ID NO: 175405 - DNA, 50 bp, Artificial
  Synthetic oligonucleotide
aagggggcggtgtctgccagtagctcttcgcacctgtaaacgagcttccc

SEQ ID NO: 175406 - DNA, 50 bp, Artificial
  Synthetic oligonucleotide
aaggggcgacctttgggcaacggtggagcttaccgacttagacggcagca

SEQ ID NO: 175407 - DNA, 50 bp, Artificial
  Synthetic oligonucleotide
aaacctgcaggggttgccgttgtgagggcactttttgagaagggggaccc

SEQ ID NO: 175408 - DNA, 50 bp, Artificial
  Synthetic oligonucleotide
aaggctccttgacttctcggtagagcgggcaagcggcaggagacttgcaa

SEQ ID NO: 175409 - DNA, 50 bp, Artificial
  Synthetic oligonucleotide
aactcctccggagggcggagcaaatcccattccgatacaggggccgcagg

SEQ ID NO: 175410 - DNA, 49 bp, Artificial
  Synthetic oligonucleotide
aaagccttaacggccctgtcgtaaacgtcccgaaggctctcccctccgg

SEQ ID NO: 175411 - DNA, 50 bp, Artificial
  Synthetic oligonucleotide
aactcacccacaacgagcagtatggggaggctcttcgacggagttgccgc

SEQ ID NO: 175412 - DNA, 50 bp, Artificial
  Synthetic oligonucleotide
aacggagctcgtcctaccgggctacctgtacgggaaacccacgttcctga

SEQ ID NO: 175413 - DNA, 52 bp, Artificial
  Synthetic oligonucleotide
cgtcccagaggttttaagggattacattaaagttgacgtattaagtagcgaa

SEQ ID NO: 175414 - DNA, 50 bp, Artificial
  Synthetic oligonucleotide
tggcctatgatgcacccgacagcaatgttaaatatacgctaaacggtggg

SEQ ID NO: 175415 - DNA, 50 bp, Artificial
  Synthetic oligonucleotide
cccgaccgaagagtgctggagattggccactgctcttgaactcggggcaa

SEQ ID NO: 175416 - DNA, 50 bp, Artificial
  Synthetic oligonucleotide
agggggagcttgagaacgcccagtgggtctgtcctaagtgcggctaccac

SEQ ID NO: 175417 - DNA, 50 bp, Artificial
  Synthetic oligonucleotide
aggggcgctccggaaggaaaccgaccttaaagcgaacggaaggctcttcc

SEQ ID NO: 175418 - DNA, 50 bp, Artificial
  Synthetic oligonucleotide
aggggagagcctatcgctgggcgacaggagcctacagttcttcatggccc

SEQ ID NO: 175419 - DNA, 50 bp, Artificial
  Synthetic oligonucleotide
agggcgatagcggcgatagttcacgagggtaagagcgccaaagaggccgt

SEQ ID NO: 175420 - DNA, 50 bp, Artificial
  Synthetic oligonucleotide
agggagtcggttgttccggccgctaaagtttacctgctgtcggggaaccc

SEQ ID NO: 175421 - DNA, 50 bp, Artificial
  Synthetic oligonucleotide
agggaagcagcaggtaaaggtctcccctcccgagaggccgtctccggtaa

SEQ ID NO: 175422 - DNA, 50 bp, Artificial
  Synthetic oligonucleotide
aggccggccttgaaatagaggttaagcctccgggcaaacggcacggaagc

SEQ ID NO: 175423 - DNA, 50 bp, Artificial
  Synthetic oligonucleotide
aggcccttgcaaggcacatctacggcagtaaggttcacccgggagagcac

SEQ ID NO: 175424 - DNA, 55 bp, Artificial
  Synthetic oligonucleotide
ctcactatctcctgtagatttaatcctcctcttgagctcaacctcagactccgaa

SEQ ID NO: 175425 - DNA, 50 bp, Artificial
  Synthetic oligonucleotide
aggagggactttgggtctaccgggaagaggtctccccacgcgaggaacgc

SEQ ID NO: 175426 - DNA, 50 bp, Artificial
  Synthetic oligonucleotide
agctcaggggcggggccatagacccgtgcttccccagtaaagtggccctt

SEQ ID NO: 175427 - DNA, 50 bp, Artificial
  Synthetic oligonucleotide
gaacgtttgctcttgtctctccaccaaaagcgctgttgtctccgattgct

SEQ ID NO: 175428 - DNA, 50 bp, Artificial
  Synthetic oligonucleotide
agccgtgtaggacttaccgcttcccgtgtcccccgtgatgattgcgagcc

SEQ ID NO: 175429 - DNA, 50 bp, Artificial
  Synthetic oligonucleotide
agcacctcgtcttcggaacgctcctctatggggatgtcggcaccgctctt

SEQ ID NO: 175430 - DNA, 50 bp, Artificial
  Synthetic oligonucleotide
agagagcctccacggtgcccagagaagctccataacccaacctcccggtt

SEQ ID NO: 175431 - DNA, 50 bp, Artificial
  Synthetic oligonucleotide
agacggctctctcattccggtgcccaggaacgttgacgttcacaggtggg

SEQ ID NO: 175432 - DNA, 50 bp, Artificial
  Synthetic oligonucleotide
actcccgctgaaaagcttcaagggggcagacgggttaagcgggtccagta

SEQ ID NO: 175433 - DNA, 50 bp, Artificial
  Synthetic oligonucleotide
acgttcagggcacttacaagcccgcctacggagcctcccgagaggtcgga

SEQ ID NO: 175434 - DNA, 50 bp, Artificial
  Synthetic oligonucleotide
acgggaacggggtactcccacgagctcaggattccccagtcgtaaagggc

SEQ ID NO: 175435 - DNA, 54 bp, Artificial
  Synthetic oligonucleotide
ctcggggagctcgcacgtaacgtcgcttcgcttgaaggtaacccagggaaactc

SEQ ID NO: 175436 - DNA, 50 bp, Artificial
  Synthetic oligonucleotide
acgagcggacagcgcccgacaaaaagaggtacaccgtagagccaggaggc

SEQ ID NO: 175437 - DNA, 50 bp, Artificial
  Synthetic oligonucleotide
acctgcgggcagaaaacggggctctgccttacaaaccccaagcccccgtt

SEQ ID NO: 175438 - DNA, 50 bp, Artificial
  Synthetic oligonucleotide
acccgggcgtaaggaagccctcctccgaagacatcgaaagggccggaagg

SEQ ID NO: 175439 - DNA, 50 bp, Artificial
  Synthetic oligonucleotide
acccgcctcgtcccggggaaaaccgtgtcttgtgaagattaccggcgtcc

SEQ ID NO: 175440 - DNA, 50 bp, Artificial
  Synthetic oligonucleotide
acccctctttcgggcaggcccttacgcactcgccgcagtagatgcacagg

SEQ ID NO: 175441 - DNA, 55 bp, Artificial
  Synthetic oligonucleotide
ctgagttcctgacgaactgtaaaatcctgcttcgtgcttaaccgagagtatccga

SEQ ID NO: 175442 - DNA, 55 bp, Artificial
  Synthetic oligonucleotide
ctgcccttccctttatgccctctatccagactaaggttcttccacacttacaggg

SEQ ID NO: 175443 - DNA, 55 bp, Artificial
  Synthetic oligonucleotide
ctgcgggctctccagtttaatcaggtgggacgggcacttacagtcggttgacccg

SEQ ID NO: 175444 - DNA, 55 bp, Artificial
  Synthetic oligonucleotide
gaaagcctataggataatctcttacgagcaaccgttaatctacatagctgctccg

SEQ ID NO: 175445 - DNA, 55 bp, Artificial
  Synthetic oligonucleotide
gaccaaccattctcatatgctgctcttcagctttagcgatgtttctaaacaccgg

SEQ ID NO: 175446 - DNA, 55 bp, Artificial
  Synthetic oligonucleotide
gactacggaaaagttctatacgttactgcagaggaatctccggaacaggtagctc

SEQ ID NO: 175447 - DNA, 58 bp, Artificial
  Synthetic oligonucleotide
ggttaaggccagtttaggccacgtcagagacctgcccccagacgaatttgcagtctca

SEQ ID NO: 175448 - DNA, 53 bp, Artificial
  Synthetic oligonucleotide
gaggtatgccgaggaacttcgctatctccctcgctttaaggggtttattaaag

SEQ ID NO: 175449 - DNA, 50 bp, Artificial
  Synthetic oligonucleotide
cccgcctcgaaaagaccaccctcttaacggttccgtaccttacgttgtga

SEQ ID NO: 175450 - DNA, 55 bp, Artificial
  Synthetic oligonucleotide
ccgtagcgcctccggaaccagagaactacgccaacaaaacagagctttctatcag

SEQ ID NO: 175451 - DNA, 55 bp, Artificial
  Synthetic oligonucleotide
cctccagacgcaagagtaaaaggacattcaccgttaggtacttatagaccaggag

SEQ ID NO: 175452 - DNA, 55 bp, Artificial
  Synthetic oligonucleotide
ccccagtgacactttgtacaggtctgaagtgaaggattgtagtcaagtgccggca

SEQ ID NO: 175453 - DNA, 55 bp, Artificial
  Synthetic oligonucleotide
cctgaagatcagcaaagttttcaatgcagaccttaatggagctttaaacgttgcg

SEQ ID NO: 175454 - DNA, 55 bp, Artificial
  Synthetic oligonucleotide
ccaggcgggaaggaagatatcggtggttatgccctactcctcttacatggccgag

SEQ ID NO: 175455 - DNA, 55 bp, Artificial
  Synthetic oligonucleotide
ccaattccgggacctccaatcgatgaatctactgttagagcatacccaaccaata

SEQ ID NO: 175456 - DNA, 55 bp, Artificial
  Synthetic oligonucleotide
ccaacgatcttgcttactatacccgtaacgcggatattttgtgtgttgcaacagg

SEQ ID NO: 175457 - DNA, 55 bp, Artificial
  Synthetic oligonucleotide
catgcgtaatacgcaacgttttctgaatgacccctagtgtaaggatcccggagct

SEQ ID NO: 175458 - DNA, 57 bp, Artificial
  Synthetic oligonucleotide
tgccgtcggagtagataaaggtcggtgtgcccgtaatctcaagggagcggagttctc

SEQ ID NO: 175459 - DNA, 55 bp, Artificial
  Synthetic oligonucleotide
cctgcagagaatctatagattggaaagaatgtgttgagcttagtgcaaagagtac

SEQ ID NO: 175460 - DNA, 53 bp, Artificial
  Synthetic oligonucleotide
cagtcttccctcggtttcagaaacggcgttgagaagggccctgagaacctcgg

SEQ ID NO: 175461 - DNA, 54 bp, Artificial
  Synthetic oligonucleotide
ccttaaagagcttgtaaacgtagctgtctgcggaaaccactacccgctttacgc

SEQ ID NO: 175462 - DNA, 55 bp, Artificial
  Synthetic oligonucleotide
caggaaacgtaacgtgatgccatgttccaaacatgtcagtaaatcttaggtcaac

SEQ ID NO: 175463 - DNA, 53 bp, Artificial
  Synthetic oligonucleotide
ccttaactacctgctcacactccttgaacagaaggcctccgttaaggtaaacc

SEQ ID NO: 175464 - DNA, 53 bp, Artificial
  Synthetic oligonucleotide
ccttacatatctaagggtaccgtagttagtgacctcggaagtgtaaagggaca

SEQ ID NO: 175465 - DNA, 55 bp, Artificial
  Synthetic oligonucleotide
cgaacttgttaaccgcaccagctactcctgccataggaccgacacccactttcgc

SEQ ID NO: 175466 - DNA, 55 bp, Artificial
  Synthetic oligonucleotide
cggcctgccaagagttctgtggataggagttgaatcccaaggcgtttatacggtt

SEQ ID NO: 175467 - DNA, 55 bp, Artificial
  Synthetic oligonucleotide
tgtccgaataacggcgtaggcagtttgatgttcgaggaggagcctcccgaggcgc

SEQ ID NO: 175468 - DNA, 54 bp, Artificial
  Synthetic oligonucleotide
aaaggtgctccttgagaagttcggcatagtttcgggtttcctcacaacggtaca

SEQ ID NO: 175469 - DNA, 55 bp, Artificial
  Synthetic oligonucleotide
ggacggctctcttttaggcgtagagcttttcgtgagggatttcacggtctctccg

SEQ ID NO: 175470 - DNA, 55 bp, Artificial
  Synthetic oligonucleotide
tgatgaggttccgggacgagtcggtgggcggagtaagggagggagctctcactga

SEQ ID NO: 175471 - DNA, 55 bp, Artificial
  Synthetic oligonucleotide
tcattaggtaggtggatgggccgtctactagtagcacacccgacctattcacttg

SEQ ID NO: 175472 - DNA, 55 bp, Artificial
  Synthetic oligonucleotide
tcagggagctactgcttgcggtgaggccttcaatccgcttttacctggacgttaa

SEQ ID NO: 175473 - DNA, 52 bp, Artificial
  Synthetic oligonucleotide
aagttccccttagagtcaaaagtctcctctatgggcctgaacaccccgcccc

SEQ ID NO: 175474 - DNA, 55 bp, Artificial
  Synthetic oligonucleotide
tatgagacggccttaatcggcagcggccgctattacctgggtgtaggtatccccg

SEQ ID NO: 175475 - DNA, 55 bp, Artificial
  Synthetic oligonucleotide
tagtcagggaggagctcaggggcggggccatagacccgtgcttccccagtaaagt

SEQ ID NO: 175476 - DNA, 55 bp, Artificial
  Synthetic oligonucleotide
acaaagtggatgtcccttctgaccgttgtctgtttaagcccctccgcgcagtggt

SEQ ID NO: 175477 - DNA, 55 bp, Artificial
  Synthetic oligonucleotide
tagcacttgttagcggactttctcccgcttggatacttgaaagagtagagtggac

SEQ ID NO: 175478 - DNA, 55 bp, Artificial
  Synthetic oligonucleotide
taacctctcttcggaggaccttgcaggcggctctatggttaactggatactcacc

SEQ ID NO: 175479 - DNA, 55 bp, Artificial
  Synthetic oligonucleotide
gtttataaggtctttcaccctgcccggagtgcccacgattatctggtggcgcccc

SEQ ID NO: 175480 - DNA, 52 bp, Artificial
  Synthetic oligonucleotide
accctcaaacgccagcctatttagccttgctccgggagggggttaccgtgcc

SEQ ID NO: 175481 - DNA, 55 bp, Artificial
  Synthetic oligonucleotide
acattgttgcataagaacggtctgggattgtaattacacagtcatctgtctctcc

SEQ ID NO: 175482 - DNA, 55 bp, Artificial
  Synthetic oligonucleotide
gtgcaagaccttatggaaggatgtatgctcacaggtggggtattgcaagtggagt

SEQ ID NO: 175483 - DNA, 54 bp, Artificial
  Synthetic oligonucleotide
gataactttactccttaaatggggaacggcagagcggaagttctctacccagcc

SEQ ID NO: 175484 - DNA, 55 bp, Artificial
  Synthetic oligonucleotide
gctacctgtgccatctttccgccttgagtgacccacgaagcttggatgttatcaa

SEQ ID NO: 175485 - DNA, 53 bp, Artificial
  Synthetic oligonucleotide
gctgtcgccctctccacaggcttaacttccccgcagtccacgggtagggtttt

SEQ ID NO: 175486 - DNA, 55 bp, Artificial
  Synthetic oligonucleotide
ggagctgcacactccggaagggtcgcccgtaacagaactccacctctcacagatg

SEQ ID NO: 175487 - DNA, 55 bp, Artificial
  Synthetic oligonucleotide
ggcctcctccagttacgcttacgcatacagaaccggcacagaaccggacagtagt

SEQ ID NO: 175488 - DNA, 55 bp, Artificial
  Synthetic oligonucleotide
acctaaccgccatggcactcacactaaaccggctcagagggctaccgagaacccc

SEQ ID NO: 175489 - DNA, 55 bp, Artificial
  Synthetic oligonucleotide
ggcctgctcttcacggggtagggccattacttacacctcacattcgtccctctaa

SEQ ID NO: 175490 - DNA, 55 bp, Artificial
  Synthetic oligonucleotide
ggcgttagagagcatggttctcctgcggtattctgtggcgtttatccttgcaggc

SEQ ID NO: 175491 - DNA, 56 bp, Artificial
  Synthetic oligonucleotide
gatgagagtagagttagatgtaaaagttccgattgacagtacttttagtgaggaac

SEQ ID NO: 175492 - DNA, 54 bp, Artificial
  Synthetic oligonucleotide
accccttcatcacctactctcacggcgggactcccacctctacaacgggagtcc

SEQ ID NO: 175493 - DNA, 55 bp, Artificial
  Synthetic oligonucleotide
ggttcctgttggacatgctacaagaggtagaattttcaacgttgttggggagcct

SEQ ID NO: 175494 - DNA, 51 bp, Artificial
  Synthetic oligonucleotide
cagggaaactcgttgggctggctaccgggaacctcctccactacgggaacc

SEQ ID NO: 175495 - DNA, 54 bp, Artificial
  Synthetic oligonucleotide
ctccgtttaccgacctctttattttccactgcgcccttgaagaggtgtccgtca

SEQ ID NO: 175496 - DNA, 54 bp, Artificial
  Synthetic oligonucleotide
caaccgacagtctgtctacgtataggttggccgtttctgagtggggcataacgg

SEQ ID NO: 175497 - DNA, 54 bp, Artificial
  Synthetic oligonucleotide
ggctattagctctccaacctgaaactctctggctccaacggttgtaatgttcgg

SEQ ID NO: 175498 - DNA, 53 bp, Artificial
  Synthetic oligonucleotide
ctactccctatagagaccctaaccttaaagaccctccaagtctaataaaatca

SEQ ID NO: 175499 - DNA, 54 bp, Artificial
  Synthetic oligonucleotide
tattaaggccggatactccttctacacagatgagcttcagcggaagaggagcgc

SEQ ID NO: 175500 - DNA, 53 bp, Artificial
  Synthetic oligonucleotide
tatgtttgcctttaccgtagagacctttacgtccgagcttaagaggttcgctc

SEQ ID NO: 175501 - DNA, 53 bp, Artificial
  Synthetic oligonucleotide
ggagcttctgtctcagctcggagtatctgctcttcccacggccgttctacttg

SEQ ID NO: 175502 - DNA, 56 bp, Artificial
  Synthetic oligonucleotide
tgcggctccccatcagttctcggggttagcgagggtccggatttgcctagaccctc

SEQ ID NO: 175503 - DNA, 53 bp, Artificial
  Synthetic oligonucleotide
cgccaagaggcgcagggttttcggctcctacagggagacaaagccctcccgct

SEQ ID NO: 175504 - DNA, 50 bp, Artificial
  Synthetic oligonucleotide
ttggggaatttggtgtccgtctattggggaatttttagggggtgtccgtc

SEQ ID NO: 175505 - DNA, 53 bp, Artificial
  Synthetic oligonucleotide
aaaacctcagccggctggcactcccacggagagtcgcaggttgccctttcggg

SEQ ID NO: 175506 - DNA, 51 bp, Artificial
  Synthetic oligonucleotide
acagttccccactccacaggcttaacttccccgctgtccacgggtagggtt

SEQ ID NO: 175507 - DNA, 52 bp, Artificial
  Synthetic oligonucleotide
cgggacgagtcggtgggcggagtaagggagggagctctcactgaggctgacg

SEQ ID NO: 175508 - DNA, 51 bp, Artificial
  Synthetic oligonucleotide
cgcttgaaggtaacccagggaaactcgttgggctggctaccgggaacctcc

SEQ ID NO: 175509 - DNA, 52 bp, Artificial
  Synthetic oligonucleotide
atcgggcagtagaggagagaactaatgcccacggctccctctgagtaggaga

SEQ ID NO: 175510 - DNA, 52 bp, Artificial
  Synthetic oligonucleotide
atggggaacggcagagcggaagttctctacccagccgttggggtagaaggag

SEQ ID NO: 175511 - DNA, 52 bp, Artificial
  Synthetic oligonucleotide
accgccaaactaaagtaggaggagtagtatgcccacaattaaccagcttgtt

SEQ ID NO: 175512 - DNA, 51 bp, Artificial
  Synthetic oligonucleotide
ggacttaccgcttcccgtgtcccccgtgatgattgcgagccaggcgttgag

SEQ ID NO: 175513 - DNA, 56 bp, Artificial
  Synthetic oligonucleotide
cttatgaagtccctaatctgcttaacgtcgccctccttaatcctgcctctgacgaa

SEQ ID NO: 175514 - DNA, 51 bp, Artificial
  Synthetic oligonucleotide
gtccctatagatttagaagctcctaaaggtcgtctaatactacctcaagtt

SEQ ID NO: 175515 - DNA, 51 bp, Artificial
  Synthetic oligonucleotide
agagccctcccaaaaacacggcgggggagctctcaaagagcccctttgcta

SEQ ID NO: 175516 - DNA, 51 bp, Artificial
  Synthetic oligonucleotide
agatgtggcaatcgtactagcagaagatattcataaacctctccagttaga

SEQ ID NO: 175517 - DNA, 51 bp, Artificial
  Synthetic oligonucleotide
gtagtcccaagggttagtctcgtaataacagcgggccttatacctgcccgc

SEQ ID NO: 175518 - DNA, 51 bp, Artificial
  Synthetic oligonucleotide
ctggttgttcccgaagttaaccccgaagacgttgagtggcataaggggata

SEQ ID NO: 175519 - DNA, 51 bp, Artificial
  Synthetic oligonucleotide
tccatacccggttaccccttcatcacctactctcacggcgggactcccacc

SEQ ID NO: 175520 - DNA, 51 bp, Artificial
  Synthetic oligonucleotide
cccctcgaataccatctcgtcggaagtcccctccacctctacttccgtctt

SEQ ID NO: 175521 - DNA, 51 bp, Artificial
  Synthetic oligonucleotide
cgtcgcttcgcttgaaggtaacccagggaaactcgttgggctggctaccgg

SEQ ID NO: 175522 - DNA, 51 bp, Artificial
  Synthetic oligonucleotide
cataggcgggtactcaggcgagttcacggcatatgcagtagcagaatgcta

SEQ ID NO: 175523 - DNA, 51 bp, Artificial
  Synthetic oligonucleotide
caggtagcaccgctacattgggacggttgacagcgccccactgggagggat

SEQ ID NO: 175524 - DNA, 55 bp, Artificial
  Synthetic oligonucleotide
agtctatccttaaacgttatcaccaccttagctatgcggtaggagagaatttcgt

SEQ ID NO: 175525 - DNA, 51 bp, Artificial
  Synthetic oligonucleotide
atccctcccagtggggcgctgtcaaccgtcccaatgtagcggtgctacctg

SEQ ID NO: 175526 - DNA, 51 bp, Artificial
  Synthetic oligonucleotide
cggctccgctccccaccagtgaaaggccacgcaggcggggtaggcaagctc

SEQ ID NO: 175527 - DNA, 51 bp, Artificial
  Synthetic oligonucleotide
atacccctgatagtagtacccgtacggcacctgggtagaggtcccgttgtc

SEQ ID NO: 175528 - DNA, 50 bp, Artificial
  Synthetic oligonucleotide
accccaggaacgaagtgtacccgggcaggttcgagtacggaggggcccac

SEQ ID NO: 175529 - DNA, 50 bp, Artificial
  Synthetic oligonucleotide
acccaagagcttccctcccaggtagtcgctcctgctaacgggccttgaga

SEQ ID NO: 175530 - DNA, 50 bp, Artificial
  Synthetic oligonucleotide
gtaaccataggtgcgtgtggtccctgccgatttggtatgtacgaaacaga

SEQ ID NO: 175531 - DNA, 50 bp, Artificial
  Synthetic oligonucleotide
gtcaatccttgagtcctggggaacggcgtaagagacgggatagggaaact

SEQ ID NO: 175532 - DNA, 50 bp, Artificial
  Synthetic oligonucleotide
acagcgtctcccgcttcaagccgacccttatagttgccgtaggcggagga

SEQ ID NO: 175533 - DNA, 50 bp, Artificial
  Synthetic oligonucleotide
acacggtgataggccccgaaaccgaggtgggtaaacggtgccagctgagg

SEQ ID NO: 175534 - DNA, 50 bp, Artificial
  Synthetic oligonucleotide
aatggcagaaaccgaaaggccgcctttggtgaaggggaaccacggaagct

SEQ ID NO: 175535 - DNA, 55 bp, Artificial
  Synthetic oligonucleotide
actcgacggctggacattaaaactgcccttgattggccggattcaacgcgagatt

SEQ ID NO: 175536 - DNA, 55 bp, Artificial
  Synthetic oligonucleotide
cctcaggtgcgtgacgaaacattaaaccgcttagcccggttccgcgacaaattga

SEQ ID NO: 175537 - DNA, 55 bp, Artificial
  Synthetic oligonucleotide
cgccggaggcatttatgtccgacctcagtctattgcgtgaccgtgagccattcag

SEQ ID NO: 175538 - DNA, 55 bp, Artificial
  Synthetic oligonucleotide
cgcgcggtcagattctcatgggcgagcgtaacaccacacgactccgtggacgcaa

SEQ ID NO: 175539 - DNA, 55 bp, Artificial
  Synthetic oligonucleotide
cgctacgctcaatgaggcacgccgtcacaccaccacagcgaatgtcaaactcggc

SEQ ID NO: 175540 - DNA, 55 bp, Artificial
  Synthetic oligonucleotide
cgctcttgaagacgcgatgcggacacatcctggacaaatcagctcaaatcgcagg

SEQ ID NO: 175541 - DNA, 55 bp, Artificial
  Synthetic oligonucleotide
cggatcgtgacatcgtacacatagttccagtcatagcgattggtcccattgagat

SEQ ID NO: 175542 - DNA, 55 bp, Artificial
  Synthetic oligonucleotide
cggctgcattgaccctcgttggtgatcgttgaaccaacgccatttatgtgaggac

SEQ ID NO: 175543 - DNA, 55 bp, Artificial
  Synthetic oligonucleotide
cggtgcggttttgattccgccgctagcgaagaccgaataggcactggctaactcg

SEQ ID NO: 175544 - DNA, 55 bp, Artificial
  Synthetic oligonucleotide
ctcaggccgagactctgttgtccagcgatgtgaccgctcaacttgatgggaccat

SEQ ID NO: 175545 - DNA, 55 bp, Artificial
  Synthetic oligonucleotide
gaggtactcaatggtctcttcactgatctggtagtgatcactgacctccatagcg

SEQ ID NO: 175546 - DNA, 55 bp, Artificial
  Synthetic oligonucleotide
agaacggtccatgtcgttgcgagaacagattacagaggttttaggcactcagatc

SEQ ID NO: 175547 - DNA, 55 bp, Artificial
  Synthetic oligonucleotide
gcaacagggaacaggtcaaagagctattgtcaccgagaatcacgcaccaaggcaa

SEQ ID NO: 175548 - DNA, 55 bp, Artificial
  Synthetic oligonucleotide
gccgagctaaagggaggcaagccgaatccgtaacgcatatcggaaacagacccag

SEQ ID NO: 175549 - DNA, 55 bp, Artificial
  Synthetic oligonucleotide
gcctgaacatgtgatttcccgagatcatgcggtgcattacgattcccatcttggc

SEQ ID NO: 175550 - DNA, 55 bp, Artificial
  Synthetic oligonucleotide
gcgccagtccgtcaaatacaatcggagatctgcggcctgtgattatcatccggaa

SEQ ID NO: 175551 - DNA, 55 bp, Artificial
  Synthetic oligonucleotide
ggcgctctatggcaaggagttggatactgaacgcactcaaatcgacatggctaac

SEQ ID NO: 175552 - DNA, 55 bp, Artificial
  Synthetic oligonucleotide
ggcgttttgcgcagtcaatacaaggtctgacctagaagtacccgctcttcttgcc

SEQ ID NO: 175553 - DNA, 55 bp, Artificial
  Synthetic oligonucleotide
ggtaccgatgttgtgactgcttcgtcagaatttgagttttccggaggcgcagttc

SEQ ID NO: 175554 - DNA, 55 bp, Artificial
  Synthetic oligonucleotide
ttctgcccgacaaccgtcatattataactcagttgcggccgatcgtaacgcccgg

SEQ ID NO: 175555 - DNA, 53 bp, Artificial
  Synthetic oligonucleotide
cggtgattcggtgtactacgactccacagaaccacacggctacattgcccgca

SEQ ID NO: 175556 - DNA, 52 bp, Artificial
  Synthetic oligonucleotide
gctggttgtcacacgatattctgcttcatggtccattggggctggaatggtt

SEQ ID NO: 175557 - DNA, 55 bp, Artificial
  Synthetic oligonucleotide
agaatatccgggaactgcgtcttatcgcgttgcgccaaccggaagctggttccct

SEQ ID NO: 175558 - DNA, 50 bp, Artificial
  Synthetic oligonucleotide
acgagctgtgggaaaagcgtatcggcgctgcagagtggcctgcactcagt

SEQ ID NO: 175559 - DNA, 50 bp, Artificial
  Synthetic oligonucleotide
acgagctgtaccgatcagcggcatcccgcattcatagggggcaagcttga

SEQ ID NO: 175560 - DNA, 50 bp, Artificial
  Synthetic oligonucleotide
acccaccagctccgtaggtcacactcaccgatgaaggggccaatggagct

SEQ ID NO: 175561 - DNA, 50 bp, Artificial
  Synthetic oligonucleotide
accagagcctccgccttcaagcccgtagggcgcaaacacccggcgttctg

SEQ ID NO: 175562 - DNA, 50 bp, Artificial
  Synthetic oligonucleotide
acaacgcttttgatggcccccgccgtagatatagggttgccgcccctgca

SEQ ID NO: 175563 - DNA, 50 bp, Artificial
  Synthetic oligonucleotide
acaacaccccactgccgcaataaggcgtacaccccttcggtcatcacggc

SEQ ID NO: 175564 - DNA, 50 bp, Artificial
  Synthetic oligonucleotide
aagctgcgcagagcataccctgactgccacgccattgacaagcctgcaac

SEQ ID NO: 175565 - DNA, 50 bp, Artificial
  Synthetic oligonucleotide
aagcggcacacgccacccggctccaacgcctgacaactgtcactgttggc

SEQ ID NO: 175566 - DNA, 50 bp, Artificial
  Synthetic oligonucleotide
aagcgcgtagcacgggacctctcaatggtgtgaggtacgacagcccggcc

SEQ ID NO: 175567 - DNA, 50 bp, Artificial
  Synthetic oligonucleotide
aaccggttggcacccgcaaacgataattggtttcgccgggcggggtacac

SEQ ID NO: 175568 - DNA, 55 bp, Artificial
  Synthetic oligonucleotide
agtctggcactatcgattcctgtcaaccgcaaaacctttgagtccatgagcgaag

SEQ ID NO: 175569 - DNA, 50 bp, Artificial
  Synthetic oligonucleotide
aacaggcgatggacagcattggtgttgcggtgccgcgttccggactggcg

SEQ ID NO: 175570 - DNA, 50 bp, Artificial
  Synthetic oligonucleotide
aacaccgcggataaccgcgttcaaccccggacaatcgccccctccagtca

SEQ ID NO: 175571 - DNA, 50 bp, Artificial
  Synthetic oligonucleotide
aacacagggcggtccatcatcttgcgcgtttgcgacagaaatgcctcgcc

SEQ ID NO: 175572 - DNA, 50 bp, Artificial
  Synthetic oligonucleotide
aaagtcattcgccgtggccgggtgattgctgaaagcgccccgcagtgttc

SEQ ID NO: 175573 - DNA, 50 bp, Artificial
  Synthetic oligonucleotide
aaacgctcacgagctgtaccgatcagcggcatcccgcattcatagggggc

SEQ ID NO: 175574 - DNA, 50 bp, Artificial
  Synthetic oligonucleotide
aaacgactcccgacattgcgccctgcgggttccctcacttcagtcgctta

SEQ ID NO: 175575 - DNA, 50 bp, Artificial
  Synthetic oligonucleotide
actcaggggtgcctcaaacaacgactgcccctcttctcccgccaggccat

SEQ ID NO: 175576 - DNA, 50 bp, Artificial
  Synthetic oligonucleotide
acgtaacgccatgggccacctaaacggcaaaccggctgagcaacacacgg

SEQ ID NO: 175577 - DNA, 50 bp, Artificial
  Synthetic oligonucleotide
acttcatccgctcgtaatgttggtacgcacgtgacgtgggcttccgcgcc

SEQ ID NO: 175578 - DNA, 50 bp, Artificial
  Synthetic oligonucleotide
agaaaacctgggcccacccagtaactccgggcttgatggtgtggcgagca

SEQ ID NO: 175579 - DNA, 55 bp, Artificial
  Synthetic oligonucleotide
atgcaagccaactgtcgtattacaatcagaaatcttttgacacggtgttgtcgga

SEQ ID NO: 175580 - DNA, 50 bp, Artificial
  Synthetic oligonucleotide
acggtggcacggtaaacgtcacctggcgcatctgtggcccgatcaactca

SEQ ID NO: 175581 - DNA, 50 bp, Artificial
  Synthetic oligonucleotide
acggtcctgacgttccgggcgcaaatcgtgacttgccggttgcacgtggt

SEQ ID NO: 175582 - DNA, 50 bp, Artificial
  Synthetic oligonucleotide
agacggccgaacgccattgataggtgaagcgcgtagcacgggacctctca

SEQ ID NO: 175583 - DNA, 50 bp, Artificial
  Synthetic oligonucleotide
agcacaattgaacagtcggcccccttgagcaatgggcgctccgacaatga

SEQ ID NO: 175584 - DNA, 50 bp, Artificial
  Synthetic oligonucleotide
agccagtcggcttgacccctttgatcgggccgccccaaccacgcaggtac

SEQ ID NO: 175585 - DNA, 50 bp, Artificial
  Synthetic oligonucleotide
acgggacctctcaatggtgtgaggtacgacagcccggccccaacaagtga

SEQ ID NO: 175586 - DNA, 50 bp, Artificial
  Synthetic oligonucleotide
acggaccaaccccgtttcctcatctacgctgtccggtaacggcaccgagg

SEQ ID NO: 175587 - DNA, 50 bp, Artificial
  Synthetic oligonucleotide
caccacgtctccggcacaatagatactgggaacggaggtgcgcaacgtcc

SEQ ID NO: 175588 - DNA, 50 bp, Artificial
  Synthetic oligonucleotide
acgcgactcaacacggtcctgacgttccgggcgcaaatcgtgacttgccg

SEQ ID NO: 175589 - DNA, 50 bp, Artificial
  Synthetic oligonucleotide
acgcctcaaacgcgccatcactgaacgggcatccccgcaacacaactgca

SEQ ID NO: 175590 - DNA, 55 bp, Artificial
  Synthetic oligonucleotide
cagcgccttaagggacgccaagttttcaacattagccacaggcatgcggcgctca

SEQ ID NO: 175591 - DNA, 50 bp, Artificial
  Synthetic oligonucleotide
acgccgcgttatgggtgccaactctgtcgccctatcagggcgcatcacag

SEQ ID NO: 175592 - DNA, 50 bp, Artificial
  Synthetic oligonucleotide
acgccagaacgcctcaaacgcgccatcactgaacgggcatccccgcaaca

SEQ ID NO: 175593 - DNA, 50 bp, Artificial
  Synthetic oligonucleotide
acgccaagcctgttgccccggtggattacgaaacacggacccggcattag

SEQ ID NO: 175594 - DNA, 50 bp, Artificial
  Synthetic oligonucleotide
acgcaatgccgattggggcagttcaacgcgaccaaggattttcgcgccac

SEQ ID NO: 175595 - DNA, 55 bp, Artificial
  Synthetic oligonucleotide
ccccgctgacaaccatttacactgtccccacatttgtcttatcatcatgccatgg

SEQ ID NO: 175596 - DNA, 55 bp, Artificial
  Synthetic oligonucleotide
ccgacggattacgacggcgatcctggatgacatggtagaccgcatcgaggatatc

SEQ ID NO: 175597 - DNA, 55 bp, Artificial
  Synthetic oligonucleotide
ccggcataacattattgagatcgctcaatgcttcagtgggacagggatagctttc

SEQ ID NO: 175598 - DNA, 57 bp, Artificial
  Synthetic oligonucleotide
cgtacccgagaacgagatgggcaatgtagcccaagaaaggtggcaccgcgagagtaa

SEQ ID NO: 175599 - DNA, 55 bp, Artificial
  Synthetic oligonucleotide
gctatgataggggtctctacaaagcttgttagggatgtgcctccttactccctct

SEQ ID NO: 175600 - DNA, 55 bp, Artificial
  Synthetic oligonucleotide
ggaataagcctcttgtagtacttgtgaataggtattctgcgagtgcatctgagat

SEQ ID NO: 175601 - DNA, 55 bp, Artificial
  Synthetic oligonucleotide
ggtctctccaacgtgtgtaagagtccccgtattaagaggacactcagaagtcatt

SEQ ID NO: 175602 - DNA, 55 bp, Artificial
  Synthetic oligonucleotide
ggtgatacttggagtaccgttggggtctctacaaacattattgaggcaagttggg

SEQ ID NO: 175603 - DNA, 55 bp, Artificial
  Synthetic oligonucleotide
ggtgatgctataggagctggacatacatggatgcaacttccaggatgccttccgt

SEQ ID NO: 175604 - DNA, 53 bp, Artificial
  Synthetic oligonucleotide
gtaccttccacattaggacaggtttctttaccacgtaatgagaccgtttatac

SEQ ID NO: 175605 - DNA, 55 bp, Artificial
  Synthetic oligonucleotide
gtctcaaggcaagattcttataccgtcctttgtggtagatagggctcaaagggtt

SEQ ID NO: 175606 - DNA, 55 bp, Artificial
  Synthetic oligonucleotide
gtctggatctttgagaggggctggtttctctaaaattcctatggtgataagtggt

SEQ ID NO: 175607 - DNA, 55 bp, Artificial
  Synthetic oligonucleotide
gttattataaacatggtacagcccacactataaaagtagaggcgttggatggtag

SEQ ID NO: 175608 - DNA, 53 bp, Artificial
  Synthetic oligonucleotide
taacctcaaagtcgatgtaagggtcttttcttcctaagacttcaactcctaac

SEQ ID NO: 175609 - DNA, 56 bp, Artificial
  Synthetic oligonucleotide
ccagggccataaaccataaatggtctaatggttaatgctttgagaccataattatc

SEQ ID NO: 175610 - DNA, 55 bp, Artificial
  Synthetic oligonucleotide
tactctctataccccttgctcctttgaaccccaaggctccaacatagacggaggg

SEQ ID NO: 175611 - DNA, 55 bp, Artificial
  Synthetic oligonucleotide
tctatttaagggtctttgtataccatcgtaaatctgacttataattccaggcccg

SEQ ID NO: 175612 - DNA, 55 bp, Artificial
  Synthetic oligonucleotide
tctcgtatttacgcatctcctacctcccttggacttatttggccccatactctcg

SEQ ID NO: 175613 - DNA, 55 bp, Artificial
  Synthetic oligonucleotide
tctcttgacagttttcccgagatttggaagaggagtagggcttgtaagaggtact

SEQ ID NO: 175614 - DNA, 55 bp, Artificial
  Synthetic oligonucleotide
aaaagacttgatgctcttatctctcatgccattatgagtataccctcggttaagg

SEQ ID NO: 175615 - DNA, 55 bp, Artificial
  Synthetic oligonucleotide
aagtatttaccgtagaaatctgaatatatcacggaatcccacccatattccaagg

SEQ ID NO: 175616 - DNA, 55 bp, Artificial
  Synthetic oligonucleotide
agaatggtccttaacgctatagacgaacccgtagtagtagctaatgccaccggat

SEQ ID NO: 175617 - DNA, 55 bp, Artificial
  Synthetic oligonucleotide
agcttgataaagaccgaagaccttattccagaagcggtggcagatatgagagtag

SEQ ID NO: 175618 - DNA, 55 bp, Artificial
  Synthetic oligonucleotide
aggagctccatatgtgaagcttgtggctatgggtagatcaactttgaccgcagca

SEQ ID NO: 175619 - DNA, 55 bp, Artificial
  Synthetic oligonucleotide
ataaacgctcaacctgatagacttgacctttgtgatatagacgccagaatagccc

SEQ ID NO: 175620 - DNA, 55 bp, Artificial
  Synthetic oligonucleotide
ctggagaccctaatagagaatctcttgctttactttcggtaagtcttggaggagg

SEQ ID NO: 175621 - DNA, 55 bp, Artificial
  Synthetic oligonucleotide
attgcaggagctccccttgtaaatcccttcgcaaaataagggatatctcttggag

SEQ ID NO: 175622 - DNA, 55 bp, Artificial
  Synthetic oligonucleotide
catactcctaatgccaatggacatatacctcttattggagatgatcctacaaagc

SEQ ID NO: 175623 - DNA, 55 bp, Artificial
  Synthetic oligonucleotide
ccttctattccccattgccttagtatatttgcatcctcagtgcagagccaatcca

SEQ ID NO: 175624 - DNA, 55 bp, Artificial
  Synthetic oligonucleotide
cccaccgaatgtccactatttggtaaagcctgtactccagaatatcctaaaggtc

SEQ ID NO: 175625 - DNA, 55 bp, Artificial
  Synthetic oligonucleotide
cctataagtattgtaatgggagatcttaatggcttaaagctcgtaaatgacgcct

SEQ ID NO: 175626 - DNA, 54 bp, Artificial
  Synthetic oligonucleotide
tcttagctggaggtattattgttcaccttatggattagattcctcgccagtaat

SEQ ID NO: 175627 - DNA, 54 bp, Artificial
  Synthetic oligonucleotide
ctgtcttatgccattatgaacctcttatgcctcaaggatcttgcagactctgtg

SEQ ID NO: 175628 - DNA, 54 bp, Artificial
  Synthetic oligonucleotide
gtctctaaattcaccgattcaccgctagtggcaagctgagctatataggaggtc

SEQ ID NO: 175629 - DNA, 54 bp, Artificial
  Synthetic oligonucleotide
gtataccttagctcaattgcttgagaccctaactcgacaaacgtcagtggtttt

SEQ ID NO: 175630 - DNA, 54 bp, Artificial
  Synthetic oligonucleotide
ataaggctccatctaccaagtcctaaggaggagtagtctctatcgtaaagatca

SEQ ID NO: 175631 - DNA, 55 bp, Artificial
  Synthetic oligonucleotide
cttcaatatagcccgagcaatacttaacctttgtctctggcctcccgaaagaaat

SEQ ID NO: 175632 - DNA, 53 bp, Artificial
  Synthetic oligonucleotide
ttagggtgtccatctcttcttattaaggggtcaacggtggctgagggcgaagg

SEQ ID NO: 175633 - DNA, 53 bp, Artificial
  Synthetic oligonucleotide
taccacgtcaacttttaaatcatccgtgggaaggtctatagccccaagagaac

SEQ ID NO: 175634 - DNA, 53 bp, Artificial
  Synthetic oligonucleotide
gagacagcgcttcttgctagtagtgtaagagtaactagtgatggtagttatat

SEQ ID NO: 175635 - DNA, 53 bp, Artificial
  Synthetic oligonucleotide
gggacttgctcagctatatcaacttcgtggaagaattggaagatcctataaac

SEQ ID NO: 175636 - DNA, 52 bp, Artificial
  Synthetic oligonucleotide
attatggtggtaactgcccagtttatagtcacccaagcaagaataggaagca

SEQ ID NO: 175637 - DNA, 52 bp, Artificial
  Synthetic oligonucleotide
gtaggtgtgagcatgtaagtgagatggaggtaatccttgccatccattcaaa

SEQ ID NO: 175638 - DNA, 52 bp, Artificial
  Synthetic oligonucleotide
cactgtacaccactactgcattaggaagttctaagtgtctaaacggagcaaa

SEQ ID NO: 175639 - DNA, 51 bp, Artificial
  Synthetic oligonucleotide
caagatcttgtcatatccagcaaagtttattggcccatgagtgagaatgta

SEQ ID NO: 175640 - DNA, 51 bp, Artificial
  Synthetic oligonucleotide
ggtcaaagatgggtacttattggttggagagactacatcttttggaagcgg

SEQ ID NO: 175641 - DNA, 51 bp, Artificial
  Synthetic oligonucleotide
aggcctattcacagcaattctaaaagtagtcacaggtataccagaaggtgt

SEQ ID NO: 175642 - DNA, 55 bp, Artificial
  Synthetic oligonucleotide
cttgtaggacaaatgagagtacctattggagttattgctataatctatgaggcac

SEQ ID NO: 175643 - DNA, 51 bp, Artificial
  Synthetic oligonucleotide
ggcaatgtagcccaagaaaggtggcaccgcgagagtaaaccctctcgccct

SEQ ID NO: 175644 - DNA, 51 bp, Artificial
  Synthetic oligonucleotide
cctgcaagagtttcagctatagggagagccgttaaagctcctccaccaagc

SEQ ID NO: 175645 - DNA, 51 bp, Artificial
  Synthetic oligonucleotide
aactataggtccttttaccatcgagacctttagacaaactcatagcattcc

SEQ ID NO: 175646 - DNA, 51 bp, Artificial
  Synthetic oligonucleotide
catgagggtaaggtactctgggatgtctaacttctattaaggtcttaatga

SEQ ID NO: 175647 - DNA, 50 bp, Artificial
  Synthetic oligonucleotide
cctaaagtaccgattgtattggtaagacttcctaagaaggatgctattcc

SEQ ID NO: 175648 - DNA, 50 bp, Artificial
  Synthetic oligonucleotide
catcaaggttcgatgaaatgtaaggacgggcgccaccaattccagagatg

SEQ ID NO: 175649 - DNA, 50 bp, Artificial
  Synthetic oligonucleotide
gcatcttggactagtttcatagcaactctggaagctctttcgatagtcct

SEQ ID NO: 175650 - DNA, 55 bp, Artificial
  Synthetic oligonucleotide
gactgggcttctcatgcaattgaacatgccatctccgccctttatgatatacccc

SEQ ID NO: 175651 - DNA, 55 bp, Artificial
  Synthetic oligonucleotide
gagctatcagatcttaatgtggttcagagttgtaggggttaccttcctatgggac

SEQ ID NO: 175652 - DNA, 55 bp, Artificial
  Synthetic oligonucleotide
gcagagatactggataagatattggagactaccgaacttgatcctcctctaagtt

SEQ ID NO: 175653 - DNA, 55 bp, Artificial
  Synthetic oligonucleotide
gcattgtttatattgctccactgacagctaaaccttccctgagtgtatacagtca

SEQ ID NO: 175654 - DNA, 55 bp, Artificial
  Synthetic oligonucleotide
ccgccaggcgattctcactaatcacacgtgtcacactggactcactaatcacagg

SEQ ID NO: 175655 - DNA, 55 bp, Artificial
  Synthetic oligonucleotide
gcacacagtgacctagatcacattaaagcgtttccgcgacttcacctgcgcaggt

SEQ ID NO: 175656 - DNA, 55 bp, Artificial
  Synthetic oligonucleotide
ggaacccgcatcaggacgattcgccaagaaccaatcgatccacacgacgttgacc

SEQ ID NO: 175657 - DNA, 55 bp, Artificial
  Synthetic oligonucleotide
acgagtcacagtaccctacagtatggttcggaggtggggatcaccgagtgaccgg

SEQ ID NO: 175658 - DNA, 55 bp, Artificial
  Synthetic oligonucleotide
ggccgagtttgcgggccgatcccttccactgccgcacagtgcggtaactgatctt

SEQ ID NO: 175659 - DNA, 55 bp, Artificial
  Synthetic oligonucleotide
gggtcacagtaccagagcacggctaacttacccgacagtagcccgcggtttgtcc

SEQ ID NO: 175660 - DNA, 54 bp, Artificial
  Synthetic oligonucleotide
ggtgacgagaacttcgagggaaagtgtggcgctcggaacttactccgaagtaag

SEQ ID NO: 175661 - DNA, 55 bp, Artificial
  Synthetic oligonucleotide
ggtgtgctcgggagcggtcatcagcggctctctctcggggatgaggtttcacgga

SEQ ID NO: 175662 - DNA, 55 bp, Artificial
  Synthetic oligonucleotide
attaagattgtccacggcttgagcgaattgctcggacgtagtccgatttgtcctg

SEQ ID NO: 175663 - DNA, 55 bp, Artificial
  Synthetic oligonucleotide
ggttgtggcccgccacctcattctataacctgttctcatacggctcgcgcccctc

SEQ ID NO: 175664 - DNA, 55 bp, Artificial
  Synthetic oligonucleotide
tacgggatcccttaggcgtagcggcatcggataggtggcgtgcagcgatgagtcc

SEQ ID NO: 175665 - DNA, 55 bp, Artificial
  Synthetic oligonucleotide
ccgcgccactaccaccggaccagaggttcggctacacgatcgggttgacaggcgt

SEQ ID NO: 175666 - DNA, 55 bp, Artificial
  Synthetic oligonucleotide
tgtcggtccgtgcgtcgtcagccactggtcggttctctcctcgtatcgcccgtga

SEQ ID NO: 175667 - DNA, 54 bp, Artificial
  Synthetic oligonucleotide
gctgaccgctccctgaccggggtaattgatgcagcacggaggcgcaccatgccc

SEQ ID NO: 175668 - DNA, 54 bp, Artificial
  Synthetic oligonucleotide
tccgcacatactacgtttgggaacagatcggaggaaatgtttgcgacgctgacc

SEQ ID NO: 175669 - DNA, 54 bp, Artificial
  Synthetic oligonucleotide
tgaggtccgttgagaaggttcgaactcgagccactaccgggaagaggccacaac

SEQ ID NO: 175670 - DNA, 54 bp, Artificial
  Synthetic oligonucleotide
ttcgcaccgccgtgaggacaaggaccccgactggcaaccgccgtgggaacgtga

SEQ ID NO: 175671 - DNA, 53 bp, Artificial
  Synthetic oligonucleotide
aagtcgggtactcggtcacgtggctggtgtgattagggtaatcccatgaggca

SEQ ID NO: 175672 - DNA, 52 bp, Artificial
  Synthetic oligonucleotide
acggtgcgtgactgtcgatccacggtcatcccttcgtgttgcgttgttcgtc

SEQ ID NO: 175673 - DNA, 51 bp, Artificial
  Synthetic oligonucleotide
gagatggccgtgccaatccactcgtccggaaatcggacgctgccggaacta

SEQ ID NO: 175674 - DNA, 51 bp, Artificial
  Synthetic oligonucleotide
gatgtactcacaggtcgtcacgctagcgaccaccgccacgtgcgtggaaga

SEQ ID NO: 175675 - DNA, 51 bp, Artificial
  Synthetic oligonucleotide
ggttctcggactgggagctcacgcgcccgagtctaggtcagtcgaggcgca

SEQ ID NO: 175676 - DNA, 55 bp, Artificial
  Synthetic oligonucleotide
cgcactcgcgctcgactctgcgatgccgccacccgaatatgtgattaaactcacc

SEQ ID NO: 175677 - DNA, 50 bp, Artificial
  Synthetic oligonucleotide
attcggcagggtattgagggggccactagcgcacaggcgggaaggattaa

SEQ ID NO: 175678 - DNA, 50 bp, Artificial
  Synthetic oligonucleotide
atggttcggaggtggggatcaccgagtgaccgggggagagatggcccgac

SEQ ID NO: 175679 - DNA, 50 bp, Artificial
  Synthetic oligonucleotide
atcatccgaaaggggcccggccgtgttgtctgatacccgtgctttgccta

SEQ ID NO: 175680 - DNA, 50 bp, Artificial
  Synthetic oligonucleotide
aaaacgggcgctagttgcctcctaattgccgtgccgagcctcgagagtga

SEQ ID NO: 175681 - DNA, 50 bp, Artificial
  Synthetic oligonucleotide
aacccgccccgaccacgctacccaccctggttttcgtcaggcagatctca

SEQ ID NO: 175682 - DNA, 50 bp, Artificial
  Synthetic oligonucleotide
aaccgggtttcccgtccacagagaggcggggtcccaataccaggcagcga

SEQ ID NO: 175683 - DNA, 50 bp, Artificial
  Synthetic oligonucleotide
aagctacgaccgtcctgagcgacgtgccaccgcgcaactcacgtatcgcc

SEQ ID NO: 175684 - DNA, 50 bp, Artificial
  Synthetic oligonucleotide
aatccggcccctgctgtttatggtcgggacagcgtcacttccgatgtcga

SEQ ID NO: 175685 - DNA, 50 bp, Artificial
  Synthetic oligonucleotide
acagccgcggcctaccctgtgctggtgagttcttccccgagagacgccgg

SEQ ID NO: 175686 - DNA, 50 bp, Artificial
  Synthetic oligonucleotide
acccgtcaccctttaggggcatcgggcgagtgccgtagaggttgagtgcg

SEQ ID NO: 175687 - DNA, 55 bp, Artificial
  Synthetic oligonucleotide
cgcccgagcgagacgccaagttcaggagcgaaacgccatcccaggaagcgagacg

SEQ ID NO: 175688 - DNA, 50 bp, Artificial
  Synthetic oligonucleotide
accctgccatccgtctgcggcccccaatttaccagtacggacgttctgta

SEQ ID NO: 175689 - DNA, 50 bp, Artificial
  Synthetic oligonucleotide
accgagtgcatctttgtaccgggtgaagtctgccacgcgccccgatttgg

SEQ ID NO: 175690 - DNA, 50 bp, Artificial
  Synthetic oligonucleotide
acctgacaccggcccctcacagcccctcagctgtactccgatgtccgcat

SEQ ID NO: 175691 - DNA, 50 bp, Artificial
  Synthetic oligonucleotide
acgagcagagtccgccgtcgcaagaagtgggggccttcggaggctgggcg

SEQ ID NO: 175692 - DNA, 50 bp, Artificial
  Synthetic oligonucleotide
acgagtgcgcgaaggctaatgcggctaacattgttagtggccgtcaggtg

SEQ ID NO: 175693 - DNA, 50 bp, Artificial
  Synthetic oligonucleotide
acgcacctggcaaggtggggtatcccttctcgaggtcttgtccgagctcc

SEQ ID NO: 175694 - DNA, 50 bp, Artificial
  Synthetic oligonucleotide
acgcccgcctgccctctggccgcgaaaacgaaacacttttccacgggatg

SEQ ID NO: 175695 - DNA, 50 bp, Artificial
  Synthetic oligonucleotide
agacgcctctagacctggcttccacccgaagtgcctcgtacacctcaggg

SEQ ID NO: 175696 - DNA, 50 bp, Artificial
  Synthetic oligonucleotide
agcgctgcatggagggagtgtacgtccgggtttcggcccacgggtcgcgt

SEQ ID NO: 175697 - DNA, 50 bp, Artificial
  Synthetic oligonucleotide
agcggccgcgccaatcgttgggagttgaggcgatgcactgaagattcagt

SEQ ID NO: 175698 - DNA, 55 bp, Artificial
  Synthetic oligonucleotide
cgggtcacaatcggccgacacaggcaattttcagctgcctcaaccggtgtggagc

SEQ ID NO: 175699 - DNA, 50 bp, Artificial
  Synthetic oligonucleotide
agctcggggttctcgagcccggctgagactcggcactggtctgtcagttg

SEQ ID NO: 175700 - DNA, 50 bp, Artificial
  Synthetic oligonucleotide
agctgggccgacagtaaccggcactcgcggaaatatacccccgcgggtac

SEQ ID NO: 175701 - DNA, 50 bp, Artificial
  Synthetic oligonucleotide
aggcgcagaggacccggagcgacgtggtcaccttgaggggttcttcgtca

SEQ ID NO: 175702 - DNA, 50 bp, Artificial
  Synthetic oligonucleotide
aggctaacactgagcttgtgggggccggacgactggatatagcggcatgc

SEQ ID NO: 175703 - DNA, 50 bp, Artificial
  Synthetic oligonucleotide
agggggtggggagatcggtgattcgtcaccaatgtgcgtggatcggtagc

SEQ ID NO: 175704 - DNA, 50 bp, Artificial
  Synthetic oligonucleotide
agtcttggtagccgccatgtgatcgaccctattgccccacccatcgtgcc

SEQ ID NO: 175705 - DNA, 50 bp, Artificial
  Synthetic oligonucleotide
agttgggtcgccggcccgtctgggattggctccgtgtcggacccggagtg

SEQ ID NO: 175706 - DNA, 50 bp, Artificial
  Synthetic oligonucleotide
ataagcggcgctagccacgggatgcggccgacccctctacactcgtcagt

SEQ ID NO: 175707 - DNA, 55 bp, Artificial
  Synthetic oligonucleotide
cggtgggctccgactagactcggccccgtgacctctcacgtggactccatctcgc

SEQ ID NO: 175708 - DNA, 55 bp, Artificial
  Synthetic oligonucleotide
ccccggtgcctgtccgcgggtagtgttcctggtcagcgaaagtcctctatggact

SEQ ID NO: 175709 - DNA, 55 bp, Artificial
  Synthetic oligonucleotide
actagaaccggtgctaggctccaccggatgtccgacggctcagaaggggtccgga

SEQ ID NO: 175710 - DNA, 55 bp, Artificial
  Synthetic oligonucleotide
cacaaggagtctaaggtggggcggtgcgtctggtccgtttactctgagagcgcgg

SEQ ID NO: 175711 - DNA, 60 bp, Artificial
  Synthetic oligonucleotide
gatagtagcgattatcgtaatcatgacaacggtgtatcccagtgagatcagcgacgagcg

SEQ ID NO: 175712 - DNA, 55 bp, Artificial
  Synthetic oligonucleotide
gacgtgtgcagtgccaatatggacggtcgtagatctaaaagtgcgcacgcgcact

SEQ ID NO: 175713 - DNA, 55 bp, Artificial
  Synthetic oligonucleotide
tacgtgcggggcttagaattcatgggcttatgaacaataagcagaaactgcgtac

SEQ ID NO: 175714 - DNA, 55 bp, Artificial
  Synthetic oligonucleotide
ggcactccggggtccatggaatcgtggcctcgcgggtactggagcgttatggccg

SEQ ID NO: 175715 - DNA, 55 bp, Artificial
  Synthetic oligonucleotide
ggccgaccagagtactcaacaagcggagggacgggcttgatgcctaatctcgcgc

SEQ ID NO: 175716 - DNA, 55 bp, Artificial
  Synthetic oligonucleotide
ggcggcacccaaagaatctccgacgcgattcggtttgtgaagtatcccgccttgc

SEQ ID NO: 175717 - DNA, 55 bp, Artificial
  Synthetic oligonucleotide
ggcggcatgtgtgcctttgattgtaaaccgcacgccctaatggttccccgacgct

SEQ ID NO: 175718 - DNA, 55 bp, Artificial
  Synthetic oligonucleotide
tacagtcagggctcataggtgattgtggggtaaattcgtcattacaatacgattg

SEQ ID NO: 175719 - DNA, 55 bp, Artificial
  Synthetic oligonucleotide
ggcttgtgatagaagcgaccctccacgttgtagacgcaaccactgcccgagtcgg

SEQ ID NO: 175720 - DNA, 54 bp, Artificial
  Synthetic oligonucleotide
ccccttgatgggatgtgcgcgagtggaatgttgatataactgccgagccacgac

SEQ ID NO: 175721 - DNA, 53 bp, Artificial
  Synthetic oligonucleotide
cccagaaggagtaaacgcccaagcctaagtcgaatttctcgtttaggcgccat

SEQ ID NO: 175722 - DNA, 54 bp, Artificial
  Synthetic oligonucleotide
cccgtaatgaccaaagccagctcgtcaccgtatgagacctgcgagagtgtacga

SEQ ID NO: 175723 - DNA, 55 bp, Artificial
  Synthetic oligonucleotide
acatagatgcgcgcctgatacaccaaatcggtacggacctcggggctctccaccg

SEQ ID NO: 175724 - DNA, 54 bp, Artificial
  Synthetic oligonucleotide
tagcttacgaacctgtccccgcctaagctggactcgtacggtcaacagccaaca

SEQ ID NO: 175725 - DNA, 54 bp, Artificial
  Synthetic oligonucleotide
tgagatgagcgtaccccaaaggcctctcgccaagtaaggcttcacgtggtggga

SEQ ID NO: 175726 - DNA, 54 bp, Artificial
  Synthetic oligonucleotide
gtaagatgcgtacaatgcgcatgttaatgtcggaggcgctgcttgtcaccctcc

SEQ ID NO: 175727 - DNA, 54 bp, Artificial
  Synthetic oligonucleotide
gcctggtcaagtttccacgcgaacgctctcggtcgaaccgatccactgatcagc

SEQ ID NO: 175728 - DNA, 54 bp, Artificial
  Synthetic oligonucleotide
cggggcgtgcgttttcatggggaaaaggaatcccctagcagctgaaaggagtca

SEQ ID NO: 175729 - DNA, 54 bp, Artificial
  Synthetic oligonucleotide
acaagccgtacagaagaagcttcaggcgacggtataggtagtgaaacgcaacca

SEQ ID NO: 175730 - DNA, 54 bp, Artificial
  Synthetic oligonucleotide
ctcgatgcatgggcgatggtagtcccgctcgcaccgctagagacgttagtcgct

SEQ ID NO: 175731 - DNA, 54 bp, Artificial
  Synthetic oligonucleotide
tgtcatgtgcatccggtcagctaccgagagcttcccatgtcacaaacaataacg

SEQ ID NO: 175732 - DNA, 54 bp, Artificial
  Synthetic oligonucleotide
cggtttacggccggctgtatcgtgagccctttcacctcgcccaaccctggatgg

SEQ ID NO: 175733 - DNA, 53 bp, Artificial
  Synthetic oligonucleotide
gctgacgcttcgtccctgggtcagcgacggtcggagctaactgcccgaaccga

SEQ ID NO: 175734 - DNA, 55 bp, Artificial
  Synthetic oligonucleotide
gaatgacttcgctcatccttatgctctccttctcagcggcctactcacggaactc

SEQ ID NO: 175735 - DNA, 53 bp, Artificial
  Synthetic oligonucleotide
catgcggcgagtccgttgctgggcagttgaatcgaaaaggattggcgggcgca

SEQ ID NO: 175736 - DNA, 53 bp, Artificial
  Synthetic oligonucleotide
gcccgagcgcttatgtccgagtcggttcgatcagcagcaagcttcaaggagac

SEQ ID NO: 175737 - DNA, 53 bp, Artificial
  Synthetic oligonucleotide
ggcggcgaatgacgcccggctgtatagctcgcggccaccaatactgttgacat

SEQ ID NO: 175738 - DNA, 53 bp, Artificial
  Synthetic oligonucleotide
ctataggggacactgttatagtgccgtcacgccgtagtgggccccatttggcc

SEQ ID NO: 175739 - DNA, 53 bp, Artificial
  Synthetic oligonucleotide
ggggttccctttgcgcatgtgtgcctcccttcggggtccgcttaccatttaac

SEQ ID NO: 175740 - DNA, 53 bp, Artificial
  Synthetic oligonucleotide
cggcgcaatcgggtgtccaatgggtcattgttaactgcccggacaatccgcgg

SEQ ID NO: 175741 - DNA, 53 bp, Artificial
  Synthetic oligonucleotide
agggcgcttgggaaatgtgacggctacagttctgatgttatcgatgctatgcg

SEQ ID NO: 175742 - DNA, 53 bp, Artificial
  Synthetic oligonucleotide
aggacaagcccatgatcaccattgaattgcacaaatcagcctaggctccgcac

SEQ ID NO: 175743 - DNA, 53 bp, Artificial
  Synthetic oligonucleotide
cacgctcagtcccatccaccagggttagcatgaccgcatgaggggaagccatt

SEQ ID NO: 175744 - DNA, 53 bp, Artificial
  Synthetic oligonucleotide
gtccagtcctcttcgccaagtcttgtcccgtcgaactcgtttgtaccctctga

SEQ ID NO: 175745 - DNA, 54 bp, Artificial
  Synthetic oligonucleotide
ctgtcctgccggattaatcgaaccggaggtccgaaccaaagctttcgggcgcgc

SEQ ID NO: 175746 - DNA, 52 bp, Artificial
  Synthetic oligonucleotide
gcgtacgattccctggtagtgtcagggtaaacttgtcaatccagagtcccgg

SEQ ID NO: 175747 - DNA, 52 bp, Artificial
  Synthetic oligonucleotide
gtaagggtagctgttcggccgaagtttgcatgtctggtcggatgcctttgcg

SEQ ID NO: 175748 - DNA, 52 bp, Artificial
  Synthetic oligonucleotide
tcagttgacaggctcgtcgggatgactgggcttttcctggcgcccgggcaat

SEQ ID NO: 175749 - DNA, 52 bp, Artificial
  Synthetic oligonucleotide
gctgcaactcaacgagggttacggcctgatactggtagacgggcgtcggatt

SEQ ID NO: 175750 - DNA, 52 bp, Artificial
  Synthetic oligonucleotide
attcccgggcgaataagggttcgtcggggaatgcacccggatccatccagat

SEQ ID NO: 175751 - DNA, 52 bp, Artificial
  Synthetic oligonucleotide
ccatcacgcgagaaaattcgggatgtacgccacgaatggggtaagatggcga

SEQ ID NO: 175752 - DNA, 52 bp, Artificial
  Synthetic oligonucleotide
ggaacagacgcagatctggattgagcgcctccgggcgcttgccaccccggag

SEQ ID NO: 175753 - DNA, 52 bp, Artificial
  Synthetic oligonucleotide
agactcattgatctcggctggcagttcgctacgttccggaatgctcttgaag

SEQ ID NO: 175754 - DNA, 52 bp, Artificial
  Synthetic oligonucleotide
agcagatatggctccggtgccaggcttggatcaggcgaaggtacgagcatca

SEQ ID NO: 175755 - DNA, 52 bp, Artificial
  Synthetic oligonucleotide
atgcttcgtgccactgcgtgatgtgatcatgataatcgggacctgactcaac

SEQ ID NO: 175756 - DNA, 55 bp, Artificial
  Synthetic oligonucleotide
ctggggctgccctttattgtgatcggctacaacaaccatatcgcttggagtcata

SEQ ID NO: 175757 - DNA, 52 bp, Artificial
  Synthetic oligonucleotide
gtggatgtagatgaaccgtctcatggtatccactgcgccaagccgattcacc

SEQ ID NO: 175758 - DNA, 51 bp, Artificial
  Synthetic oligonucleotide
tgatagtctgctaacaaaccggccaattccccgaggggtcccatggacatt

SEQ ID NO: 175759 - DNA, 51 bp, Artificial
  Synthetic oligonucleotide
tgtagaatggcgcgataactcgaaagccctatcccacagatgtcagcgacc

SEQ ID NO: 175760 - DNA, 51 bp, Artificial
  Synthetic oligonucleotide
tctttagtggggcgctcatagatatggatcgttcccgagaagatttggtcg

SEQ ID NO: 175761 - DNA, 51 bp, Artificial
  Synthetic oligonucleotide
tcgcaaaacggtcgagtgggttccaggcttcgattcggctttaatcggagg

SEQ ID NO: 175762 - DNA, 51 bp, Artificial
  Synthetic oligonucleotide
ccccactggctttcggaaggaccttgggaccatgtcgattgattcgattcg

SEQ ID NO: 175763 - DNA, 51 bp, Artificial
  Synthetic oligonucleotide
gtgtagatccggcggtgtacactatcccgcagcatctcgagaaaccccaga

SEQ ID NO: 175764 - DNA, 51 bp, Artificial
  Synthetic oligonucleotide
gtcggagacccgccgagacaaggaacacatacgccgagccactatcaaccg

SEQ ID NO: 175765 - DNA, 51 bp, Artificial
  Synthetic oligonucleotide
cgcacgaagcccagcgtgttaattgaacgtccgatttgtgaggaacgagca

SEQ ID NO: 175766 - DNA, 51 bp, Artificial
  Synthetic oligonucleotide
aacttcgtcaagatgttatggaagttctcaagtgtgtacaactcgaaacgt

SEQ ID NO: 175767 - DNA, 55 bp, Artificial
  Synthetic oligonucleotide
ctgcctcgcgcccggagtagcgtgtagcgcatgctgttttcagaagtcaccagcg

SEQ ID NO: 175768 - DNA, 51 bp, Artificial
  Synthetic oligonucleotide
ctcacggcagacactctacgctggaggaacgagggctcaaagataggcaat

SEQ ID NO: 175769 - DNA, 50 bp, Artificial
  Synthetic oligonucleotide
agtcgcgtcagtacctgatcctcgttcggagagagggaatcccgcctgga

SEQ ID NO: 175770 - DNA, 50 bp, Artificial
  Synthetic oligonucleotide
agtgcctgaagttagcgggtcaacccggccccggactcgccaccggaagt

SEQ ID NO: 175771 - DNA, 50 bp, Artificial
  Synthetic oligonucleotide
agtggcgtcagtgccggactttcgcgtcagtgggcttcaggggccgatct

SEQ ID NO: 175772 - DNA, 50 bp, Artificial
  Synthetic oligonucleotide
atcgcgggtaggcggagcgataagacccataccgcagccggtattgccgt

SEQ ID NO: 175773 - DNA, 50 bp, Artificial
  Synthetic oligonucleotide
atccgcgggagcgtggtcaatgcgttaacggtctccacccgaccctttgt

SEQ ID NO: 175774 - DNA, 50 bp, Artificial
  Synthetic oligonucleotide
agtgggatgcgcggtcacctgggcccttgccgtaattggctgaggtacat

SEQ ID NO: 175775 - DNA, 50 bp, Artificial
  Synthetic oligonucleotide
agtgtacaccgggggtgcggtgggctctaatctgaggggcatgcgcaagt

SEQ ID NO: 175776 - DNA, 50 bp, Artificial
  Synthetic oligonucleotide
agtgtgaattgggaggtgcgaagtgatgctcgcacgccaccgctgaggtt

SEQ ID NO: 175777 - DNA, 50 bp, Artificial
  Synthetic oligonucleotide
atagaccctgtatcggcgggcgtgtgcgggactttagaagaacctgccgc

SEQ ID NO: 175778 - DNA, 55 bp, Artificial
  Synthetic oligonucleotide
ctagtgaattcgcaccactgggttacgggtgccggggccttgccaggcaaatccc

SEQ ID NO: 175779 - DNA, 50 bp, Artificial
  Synthetic oligonucleotide
atagggttcagaaggggtgtcggctcccggattccctctcgttgaccgct

SEQ ID NO: 175780 - DNA, 50 bp, Artificial
  Synthetic oligonucleotide
atcccacgtgcgttctggaaacgtctgtttgcccgcgcgctaccggaagt

SEQ ID NO: 175781 - DNA, 50 bp, Artificial
  Synthetic oligonucleotide
atcaatgccgccacaggggaggacgggggaagctacgaaacgttcgcgct

SEQ ID NO: 175782 - DNA, 50 bp, Artificial
  Synthetic oligonucleotide
ttgcgttacgagatacatgatgagccattgaggatgcgtggtgaccgatt

SEQ ID NO: 175783 - DNA, 50 bp, Artificial
  Synthetic oligonucleotide
gctgctttatcccgactccagcagtccatgcctgtagtgagcgctattag

SEQ ID NO: 175784 - DNA, 50 bp, Artificial
  Synthetic oligonucleotide
gacgcggataagtgggcgctgggtgggaaccgcagggcggaaaacacccg

SEQ ID NO: 175785 - DNA, 50 bp, Artificial
  Synthetic oligonucleotide
ctggtccgttcggacacaggcgacctttcatgcatcccttcgggggtgca

SEQ ID NO: 175786 - DNA, 50 bp, Artificial
  Synthetic oligonucleotide
ctcaaggagtggtggcacgtttccctcctgctgcccgaagcatgggagga

SEQ ID NO: 175787 - DNA, 50 bp, Artificial
  Synthetic oligonucleotide
cgtttccctcctgctgcccgaagcatgggaggactaccgcagtacactcc

SEQ ID NO: 175788 - DNA, 50 bp, Artificial
  Synthetic oligonucleotide
cgggtcatggtcgatcctcaagtgcggtcgggtctgacgctccattcacg

SEQ ID NO: 175789 - DNA, 55 bp, Artificial
  Synthetic oligonucleotide
cgtgctagcggtatcgagttacggcgtagagttctgctcagcgtttcagcgcgag

SEQ ID NO: 175790 - DNA, 50 bp, Artificial
  Synthetic oligonucleotide
cctgctgcccgaagcatgggaggactaccgcagtacactccggtacgcct

SEQ ID NO: 175791 - DNA, 50 bp, Artificial
  Synthetic oligonucleotide
cctctatcgcccatgcaccacggatgtgcacgaaaagccttgatgcacta

SEQ ID NO: 175792 - DNA, 50 bp, Artificial
  Synthetic oligonucleotide
ccgaacccggccaggcaaaaaccccctgggagaaatcgatcgacacgcac

SEQ ID NO: 175793 - DNA, 50 bp, Artificial
  Synthetic oligonucleotide
catgctccgaaggtcatggtagacgcgacatagatcgcccgcccgtccga

SEQ ID NO: 175794 - DNA, 50 bp, Artificial
  Synthetic oligonucleotide
caagggggctcggtcaattccgggcacacctcacgggttttgcctgtcag

SEQ ID NO: 175795 - DNA, 50 bp, Artificial
  Synthetic oligonucleotide
caaggcggaggactagcgtcggacgagcaaacggcgtatcggcttctcca

SEQ ID NO: 175796 - DNA, 50 bp, Artificial
  Synthetic oligonucleotide
caaccacgcaccccgaagggtcgtgcgttccaccttggcctaagcgcatc

SEQ ID NO: 175797 - DNA, 50 bp, Artificial
  Synthetic oligonucleotide
attttgcacgggcatgagacctccagcggtcagacggtgtacgactggcc

SEQ ID NO: 175798 - DNA, 50 bp, Artificial
  Synthetic oligonucleotide
aatcaactccgggcctggaagcaaggagcgcgccgtaacgacccgctgag

SEQ ID NO: 175799 - DNA, 50 bp, Artificial
  Synthetic oligonucleotide
aatagacagattcagtgtcgaacgcgacctcttccagcttacgctcgatt

SEQ ID NO: 175800 - DNA, 55 bp, Artificial
  Synthetic oligonucleotide
cggagtgatatcctgattgttcgagctaacgcgatagaacggcgcgatcattgac

SEQ ID NO: 175801 - DNA, 50 bp, Artificial
  Synthetic oligonucleotide
aagtgcgggcattgcagcgcggtactctaccgtccggagctggagcgtaa

SEQ ID NO: 175802 - DNA, 50 bp, Artificial
  Synthetic oligonucleotide
aagtcctcggctagcccgacggacacctcgctatccgcaccacgatagac

SEQ ID NO: 175803 - DNA, 50 bp, Artificial
  Synthetic oligonucleotide
aagtccggtatacagtcccacccccacgcgcattcccgcatccaccgtgc

SEQ ID NO: 175804 - DNA, 50 bp, Artificial
  Synthetic oligonucleotide
aagtcccgcgggtcggggtgaaacgaaagcgggagcgccgcaacatagcg

SEQ ID NO: 175805 - DNA, 50 bp, Artificial
  Synthetic oligonucleotide
aagggtggtgccacatgagggtgcgacccacttccgcgttgaagtacgag

SEQ ID NO: 175806 - DNA, 50 bp, Artificial
  Synthetic oligonucleotide
aagggccgtcctcttgaaactaggcagtccttcgccccgcgtcaaagccg

SEQ ID NO: 175807 - DNA, 50 bp, Artificial
  Synthetic oligonucleotide
aagggccgcctttcgtcattgcgattgccgcgacgtgttgcccgtagtgg

SEQ ID NO: 175808 - DNA, 50 bp, Artificial
  Synthetic oligonucleotide
aagggcccactctcgatgtgttgagggcctggctgtcggacgttccggag

SEQ ID NO: 175809 - DNA, 50 bp, Artificial
  Synthetic oligonucleotide
aaggcgcgtgtaagtgacatcgtggcgtccggtcaaatctgcccacggtg

SEQ ID NO: 175810 - DNA, 50 bp, Artificial
  Synthetic oligonucleotide
aaggcgatcctctcacgggggcacggagccacgggggaaagaaatttggg

SEQ ID NO: 175811 - DNA, 55 bp, Artificial
  Synthetic oligonucleotide
cgcgaattcgagcccacagagattcagcttcggtacttcctggccgaatggacgg

SEQ ID NO: 175812 - DNA, 50 bp, Artificial
  Synthetic oligonucleotide
aaggcccgtttcggtaaccacgcgagtcaatggccggacaccctggataa

SEQ ID NO: 175813 - DNA, 50 bp, Artificial
  Synthetic oligonucleotide
aaggatccgccccggagggggaacatcgcctgtcattcgttcagcctcgc

SEQ ID NO: 175814 - DNA, 50 bp, Artificial
  Synthetic oligonucleotide
aagcgtgctcaggagtgtttcgcctgccacttgtggtactcgggcagcat

SEQ ID NO: 175815 - DNA, 50 bp, Artificial
  Synthetic oligonucleotide
aagcgtccaccccaggcgcgtagcctcgcaacaacttggtcgtcctaggt

SEQ ID NO: 175816 - DNA, 50 bp, Artificial
  Synthetic oligonucleotide
aagcggagggacgggcttgatgcctaatctcgcgctcccttcgttcgatt

SEQ ID NO: 175817 - DNA, 50 bp, Artificial
  Synthetic oligonucleotide
aagcggactctagcgtctcaagatcggcgcttgtcgcgtcaatgtcggcc

SEQ ID NO: 175818 - DNA, 50 bp, Artificial
  Synthetic oligonucleotide
aagcgcttacaccccggctttcgcgagggtggtatacaagggacagtccc

SEQ ID NO: 175819 - DNA, 50 bp, Artificial
  Synthetic oligonucleotide
aagcgcgcgtttgggttgatccggaggatatgctcgagggcgtctttcga

SEQ ID NO: 175820 - DNA, 50 bp, Artificial
  Synthetic oligonucleotide
aagccggattgtatcgcgacaggcgccaaggatgtctcggggaacacccg

SEQ ID NO: 175821 - DNA, 50 bp, Artificial
  Synthetic oligonucleotide
accaaccgccacggacgggccttgctcgagtcctgggttcaggacctagc

SEQ ID NO: 175822 - DNA, 60 bp, Artificial
  Synthetic oligonucleotide
caatcaatcctcgctacgcacgcgccaatcaggctggctcgtggcaacgagctgccccca

SEQ ID NO: 175823 - DNA, 55 bp, Artificial
  Synthetic oligonucleotide
gagttcgagatcaggctaccgaaggctggcggtctgtcgatttattcgcggcatc

SEQ ID NO: 175824 - DNA, 50 bp, Artificial
  Synthetic oligonucleotide
acatccatccagacgtatggcagaaaccctccggcgctgtagcgggcacc

SEQ ID NO: 175825 - DNA, 50 bp, Artificial
  Synthetic oligonucleotide
acatcacgcctcgcataccccgtgccccgttcgccacatccgacaccgcg

SEQ ID NO: 175826 - DNA, 50 bp, Artificial
  Synthetic oligonucleotide
acatacccatcgcgaacgtccagagtgacctccaggtccccttccacgcg

SEQ ID NO: 175827 - DNA, 50 bp, Artificial
  Synthetic oligonucleotide
acagatgcccggtacagcgcaactcctaccacgcacgcccgatgcacgac

SEQ ID NO: 175828 - DNA, 50 bp, Artificial
  Synthetic oligonucleotide
acagagcacgcgctccgtccagtcactcgtagacttccggccttgggaac

SEQ ID NO: 175829 - DNA, 50 bp, Artificial
  Synthetic oligonucleotide
acacgaggcggttgctccttgacccaccacagcagtggcgctactagcaa

SEQ ID NO: 175830 - DNA, 50 bp, Artificial
  Synthetic oligonucleotide
acacctcgatacggctcggatgtgagtagccagctcgccggatgtcgcta

SEQ ID NO: 175831 - DNA, 50 bp, Artificial
  Synthetic oligonucleotide
acaccagagggttggcggacatatcggcccgcgcgtgattaagcgtctgt

SEQ ID NO: 175832 - DNA, 50 bp, Artificial
  Synthetic oligonucleotide
acacagagccaacggctgaccgggaccgttagtcggttgcccacacggtc

SEQ ID NO: 175833 - DNA, 50 bp, Artificial
  Synthetic oligonucleotide
acaatccccactctttgggtcctgccaccctaggccgcccactcaccatg

SEQ ID NO: 175834 - DNA, 55 bp, Artificial
  Synthetic oligonucleotide
acacacggcccgctttgccccagcgaagacctgaggtatctttcgcccgcatgaa

SEQ ID NO: 175835 - DNA, 50 bp, Artificial
  Synthetic oligonucleotide
acaacgccaaggggacgtcacgtgtcatactccgccggcaaggcaccagc

SEQ ID NO: 175836 - DNA, 50 bp, Artificial
  Synthetic oligonucleotide
aatgttgggcagcgagggcgttgcagcggtcgattttcaggggaccggct

SEQ ID NO: 175837 - DNA, 50 bp, Artificial
  Synthetic oligonucleotide
aatgtccgccgggagaccgcgcttacgcggctaagcttcgactacaatgg

SEQ ID NO: 175838 - DNA, 50 bp, Artificial
  Synthetic oligonucleotide
aatgcggcgaggattgcaagcaagacgagcccgtgaatcacgcccgagag

SEQ ID NO: 175839 - DNA, 50 bp, Artificial
  Synthetic oligonucleotide
aatgcgctatgtgtgaattcgcctgctgggatcgccgagctgcactcggc

SEQ ID NO: 175840 - DNA, 50 bp, Artificial
  Synthetic oligonucleotide
aatgccgcggatgacggccctcgcagaaaagtcgatgacacaaggcctgg

SEQ ID NO: 175841 - DNA, 50 bp, Artificial
  Synthetic oligonucleotide
aatgaattgctcccgttcctccgtagtccgagccgcgattgcacgctcga

SEQ ID NO: 175842 - DNA, 50 bp, Artificial
  Synthetic oligonucleotide
aatccgattcggagcagcctaagagggggccccggacctgtcaagcaaac

SEQ ID NO: 175843 - DNA, 50 bp, Artificial
  Synthetic oligonucleotide
aatcacatgctatgctgattccccgccagtcgcggcacacacccgtggtc

SEQ ID NO: 175844 - DNA, 50 bp, Artificial
  Synthetic oligonucleotide
aacctagtcgtgccccttgtcgaccaagttgtgcagcggttctccccgat

SEQ ID NO: 175845 - DNA, 55 bp, Artificial
  Synthetic oligonucleotide
gatcaatcgatgtgacgcagtgtagctatgggacaccctactcagtagcttagag

SEQ ID NO: 175846 - DNA, 50 bp, Artificial
  Synthetic oligonucleotide
aaccgtcggctaggcgatttaagggacacacgcccccaggactgcgcttc

SEQ ID NO: 175847 - DNA, 50 bp, Artificial
  Synthetic oligonucleotide
aaccggccccatagccgaatatcttgtggcaatgcgctcgcccccgagca

SEQ ID NO: 175848 - DNA, 50 bp, Artificial
  Synthetic oligonucleotide
aaccgctgtgctctgtaccacctgacgatacagaccgtcgtccgcagcca

SEQ ID NO: 175849 - DNA, 50 bp, Artificial
  Synthetic oligonucleotide
aaccctataccgttcaagggggctcggtcaattccgggcacacctcacgg

SEQ ID NO: 175850 - DNA, 50 bp, Artificial
  Synthetic oligonucleotide
aacccggcggccctagcccaccgctggtattgtcgataatccgttgccag

SEQ ID NO: 175851 - DNA, 50 bp, Artificial
  Synthetic oligonucleotide
aacccggccaggcatatccacgccttgcgtcgctcccattggcgccgaat

SEQ ID NO: 175852 - DNA, 50 bp, Artificial
  Synthetic oligonucleotide
aaccccgcggcgtcttcctaaaggcgagctttcgactaaagccgggccgg

SEQ ID NO: 175853 - DNA, 50 bp, Artificial
  Synthetic oligonucleotide
aaccaacggcggagcgagacaagtggcccctcgtataggccaccactgcg

SEQ ID NO: 175854 - DNA, 50 bp, Artificial
  Synthetic oligonucleotide
aacattgtctggccgcccagcgaacgctgtttctcaccctgggtgtcgaa

SEQ ID NO: 175855 - DNA, 50 bp, Artificial
  Synthetic oligonucleotide
aacagtctggaatccctcgaaggaacccctatgccccggcgcatgctgaa

SEQ ID NO: 175856 - DNA, 54 bp, Artificial
  Synthetic oligonucleotide
gatcccgtttcccctataagggtgaattcggctggcaagggttcgatcgttgtg

SEQ ID NO: 175857 - DNA, 50 bp, Artificial
  Synthetic oligonucleotide
aacagcgcacgatccagtagcccctggccccaacaactggcataaccgag

SEQ ID NO: 175858 - DNA, 50 bp, Artificial
  Synthetic oligonucleotide
aacaccggacagctagacagcgtgtgtgcccgccagtctggttagccgtt

SEQ ID NO: 175859 - DNA, 50 bp, Artificial
  Synthetic oligonucleotide
aaaggtcggatactccggagccaggtccgtgaagtgggtacccagcgcca

SEQ ID NO: 175860 - DNA, 50 bp, Artificial
  Synthetic oligonucleotide
aaaggggcgggggcattcagatcacccgtatccggaagggttgagtcggg

SEQ ID NO: 175861 - DNA, 50 bp, Artificial
  Synthetic oligonucleotide
aaaggggccaggatgcgacgctcaagcctgtaacccgagggggctggcgt

SEQ ID NO: 175862 - DNA, 50 bp, Artificial
  Synthetic oligonucleotide
aaaggccgaatagtgggcggctcccgccagtgaaagcgctccgtatcgat

SEQ ID NO: 175863 - DNA, 50 bp, Artificial
  Synthetic oligonucleotide
aaagctcttggccgagacattgaacgagatgggagcagggggcgcatggc

SEQ ID NO: 175864 - DNA, 50 bp, Artificial
  Synthetic oligonucleotide
aaacgccttcccgccattgacccggacaacgcaggagcattccgtgtcca

SEQ ID NO: 175865 - DNA, 50 bp, Artificial
  Synthetic oligonucleotide
aaaccaaggtgcaggcaactgtttggcccggagggttaccgcgtgtttcg

SEQ ID NO: 175866 - DNA, 50 bp, Artificial
  Synthetic oligonucleotide
aagccgccaggtgggcaccaaaggacttacgctattgctgcggatgttcg

SEQ ID NO: 175867 - DNA, 55 bp, Artificial
  Synthetic oligonucleotide
acaacggatgcggttcggtacatgttgactccaagccagtagaacgtgtgacggg

SEQ ID NO: 175868 - DNA, 50 bp, Artificial
  Synthetic oligonucleotide
aagcccgatctacgcgcctgacacctcacgcctgacggcttagcgcaggt

SEQ ID NO: 175869 - DNA, 50 bp, Artificial
  Synthetic oligonucleotide
aagccagggcgttaagggcaagagcggggcctacggaacatgcctgttca

SEQ ID NO: 175870 - DNA, 50 bp, Artificial
  Synthetic oligonucleotide
aagcagggatcgcaagtgcggctctgcggacacgattggcgagtcagctc

SEQ ID NO: 175871 - DNA, 50 bp, Artificial
  Synthetic oligonucleotide
aagcaccgggctgcttgatcgaacccgtaaccccggtcatgcccatcaga

SEQ ID NO: 175872 - DNA, 50 bp, Artificial
  Synthetic oligonucleotide
aagagcgagcacgcgtgagccgaggttcggacagtggccttcaggaagaa

SEQ ID NO: 175873 - DNA, 50 bp, Artificial
  Synthetic oligonucleotide
aagaacgaccaccccctgatgtgcacgatggagccggtctgagcgtgttg

SEQ ID NO: 175874 - DNA, 50 bp, Artificial
  Synthetic oligonucleotide
aactgcggtagggcgctgaaggtaggcccgtgttcaagtgctcgattcgc

SEQ ID NO: 175875 - DNA, 50 bp, Artificial
  Synthetic oligonucleotide
aactgcggaccgcggagggtgctcttccaaggggcgatgtggtcctcctt

SEQ ID NO: 175876 - DNA, 50 bp, Artificial
  Synthetic oligonucleotide
aactaggcagtccttcgccccgcgtcaaagccggggatggctcaccgttc

SEQ ID NO: 175877 - DNA, 50 bp, Artificial
  Synthetic oligonucleotide
aacgttgcggcgcccctgacaggagacaacgacacttggagggttcagta

SEQ ID NO: 175878 - DNA, 55 bp, Artificial
  Synthetic oligonucleotide
aattgcggagtgtgatatagctcgagtcttcgatgctcaccgtgttacgcgcacg

SEQ ID NO: 175879 - DNA, 50 bp, Artificial
  Synthetic oligonucleotide
aacgtcttcacggatcgacccacaccgggcggagtcctgaacggcgcctg

SEQ ID NO: 175880 - DNA, 50 bp, Artificial
  Synthetic oligonucleotide
aacgtactgagcagggagtagccggacctcgtgtccctgagcaccgagtc

SEQ ID NO: 175881 - DNA, 50 bp, Artificial
  Synthetic oligonucleotide
aacgggcagcgaccttcccacgcgggttgcacgcgcactcgaagacgagc

SEQ ID NO: 175882 - DNA, 50 bp, Artificial
  Synthetic oligonucleotide
aacgggacaccgagctcaccgtactctgcgaggggttcagtcaccgactg

SEQ ID NO: 175883 - DNA, 49 bp, Artificial
  Synthetic oligonucleotide
aacgcgccgggaaggaaccctccgaccctttagtgcctccaaccgaccg

SEQ ID NO: 175884 - DNA, 50 bp, Artificial
  Synthetic oligonucleotide
aacgcgcccaactccgggccctcaagacccgtcacatcggacaccacccg

SEQ ID NO: 175885 - DNA, 50 bp, Artificial
  Synthetic oligonucleotide
aacgcctgaaggccattccgccagacttgcaagcacgctgcagtccgggt

SEQ ID NO: 175886 - DNA, 50 bp, Artificial
  Synthetic oligonucleotide
aacgacgagcgggcacatcgcgtacaatgttgcacctgttcttgccacga

SEQ ID NO: 175887 - DNA, 50 bp, Artificial
  Synthetic oligonucleotide
aacgacattgttccaagcgtcttcgccgccccgactgatcggtcgcacat

SEQ ID NO: 175888 - DNA, 50 bp, Artificial
  Synthetic oligonucleotide
aacctcttggagccggatgctggggccgttcggtgcactaaccgagaagt

SEQ ID NO: 175889 - DNA, 55 bp, Artificial
  Synthetic oligonucleotide
gatgagttaccggtctatgagcgattgggattaaccgagttgggtatctcagagc

SEQ ID NO: 175890 - DNA, 50 bp, Artificial
  Synthetic oligonucleotide
agcctctccgtgcaggcgttagaatgccgagtaccgcaatcgagggaggt

SEQ ID NO: 175891 - DNA, 50 bp, Artificial
  Synthetic oligonucleotide
agcctcagttcgacctaaagagcgggcaccgggtggggttcgaggcctta

SEQ ID NO: 175892 - DNA, 50 bp, Artificial
  Synthetic oligonucleotide
agcctcagtacgcttctggcgtcctgcactgcagtttgtgcgtgctcaga

SEQ ID NO: 175893 - DNA, 50 bp, Artificial
  Synthetic oligonucleotide
agccgatcggactcaggtccggatggtactggttgcgccacatgtgcggt

SEQ ID NO: 175894 - DNA, 50 bp, Artificial
  Synthetic oligonucleotide
agccgagacatacggtggcatcaggtggaagcgatcctcgggagtcgcgt

SEQ ID NO: 175895 - DNA, 50 bp, Artificial
  Synthetic oligonucleotide
agcccgctcgatcccagaggcccggaaggtaacgcggcatccgactgagg

SEQ ID NO: 175896 - DNA, 50 bp, Artificial
  Synthetic oligonucleotide
agccccttgctcacgtgaaaaattgccgggtgtgccacccaaggcccacc

SEQ ID NO: 175897 - DNA, 50 bp, Artificial
  Synthetic oligonucleotide
agcccagggaacgggcatgggctcaagaccttcataaggccctgcgactg

SEQ ID NO: 175898 - DNA, 50 bp, Artificial
  Synthetic oligonucleotide
agcatgatcccttagtctcctacggcgcgggggcccaaagctagtacccg

SEQ ID NO: 175899 - DNA, 50 bp, Artificial
  Synthetic oligonucleotide
agcaggagaatgtacgggggtcacaatcgaagcgcgccccacctgtaacg

SEQ ID NO: 175900 - DNA, 55 bp, Artificial
  Synthetic oligonucleotide
gcaagaggttcgtctactatcgacccgcttggttcagccggtcgcccgacctgtg

SEQ ID NO: 175901 - DNA, 50 bp, Artificial
  Synthetic oligonucleotide
agcagcgcctcaactatcccacccttcaccgcttacggcgggaacccgcg

SEQ ID NO: 175902 - DNA, 50 bp, Artificial
  Synthetic oligonucleotide
agcaaccgggaagcggcccattcgctgttcttgagagccatcccgttacc

SEQ ID NO: 175903 - DNA, 50 bp, Artificial
  Synthetic oligonucleotide
agatctccatgtcactcccctgaaccgcccgccactcgtcatgccgaagc

SEQ ID NO: 175904 - DNA, 50 bp, Artificial
  Synthetic oligonucleotide
agatacagtgcccaggaatcgcccgcccaacagtgtagcgctaagtcggc

SEQ ID NO: 175905 - DNA, 50 bp, Artificial
  Synthetic oligonucleotide
agagaccgcaagctaggcgtatctgaggatgtgagcgccccaacccgcgt

SEQ ID NO: 175906 - DNA, 50 bp, Artificial
  Synthetic oligonucleotide
agacatacgctaggccatccctgctgcgagctgcgttaagcgcccatcct

SEQ ID NO: 175907 - DNA, 50 bp, Artificial
  Synthetic oligonucleotide
agaatgcacccagtggtcccgacgacgccagcgtaagcccactccgactc

SEQ ID NO: 175908 - DNA, 50 bp, Artificial
  Synthetic oligonucleotide
agaacgggcgcacccaagagggccaccccgaaaccaattgaaccctgaac

SEQ ID NO: 175909 - DNA, 50 bp, Artificial
  Synthetic oligonucleotide
acttgcagagagtggccggaggcacgatgggacaaaagggcaaggggtct

SEQ ID NO: 175910 - DNA, 50 bp, Artificial
  Synthetic oligonucleotide
acttcggaggcagcccgcgtcttcgggttttcgcagcgcctgggggactt

SEQ ID NO: 175911 - DNA, 55 bp, Artificial
  Synthetic oligonucleotide
gcataaccacgaacatccatgaacctcggagaacatccacgaccctcggagaact

SEQ ID NO: 175912 - DNA, 50 bp, Artificial
  Synthetic oligonucleotide
actgtttgcgcctaccggggcggagtgactaccctcggggctctcagcga

SEQ ID NO: 175913 - DNA, 50 bp, Artificial
  Synthetic oligonucleotide
aggttccatgtcccttgacccctctgcccgttacggagcaggccagtttc

SEQ ID NO: 175914 - DNA, 50 bp, Artificial
  Synthetic oligonucleotide
aggtctgccccagccagatctgtataattgcgcgcccagcctcaccgttg

SEQ ID NO: 175915 - DNA, 50 bp, Artificial
  Synthetic oligonucleotide
aggtcggtagcattgcgccctgcataacgaaggcaacagggggaggactc

SEQ ID NO: 175916 - DNA, 50 bp, Artificial
  Synthetic oligonucleotide
agggttctggcagggtctttccggcgtgcgtttccacccacgacaagccg

SEQ ID NO: 175917 - DNA, 50 bp, Artificial
  Synthetic oligonucleotide
aggggtgtcggctcccggattccctctcgttgaccgcttgctcacactgg

SEQ ID NO: 175918 - DNA, 50 bp, Artificial
  Synthetic oligonucleotide
aggggtacaggcgccgtacagcggaggcgattccaacgatcgttctggaa

SEQ ID NO: 175919 - DNA, 50 bp, Artificial
  Synthetic oligonucleotide
agggggcttcgcgcggaatacaacctcctccggcaggatgagttcaatgc

SEQ ID NO: 175920 - DNA, 50 bp, Artificial
  Synthetic oligonucleotide
agggcgaaatctaaccccgaaaggcgatcctctcacgggggcacggagcc

SEQ ID NO: 175921 - DNA, 50 bp, Artificial
  Synthetic oligonucleotide
agggccgtgtcaatacatacgaccatgcacgcccccttggtccctcgcaa

SEQ ID NO: 175922 - DNA, 55 bp, Artificial
  Synthetic oligonucleotide
gcccgaccatttaacccgggagtccgatccatgagcgatgatgcattgcagttgt

SEQ ID NO: 175923 - DNA, 50 bp, Artificial
  Synthetic oligonucleotide
agggaattcgactcgtgacaatggaggaggcaataccgccgtggagcgga

SEQ ID NO: 175924 - DNA, 50 bp, Artificial
  Synthetic oligonucleotide
aggcgctactccacacccggttcggcctcccagcacggacgctccgcagg

SEQ ID NO: 175925 - DNA, 50 bp, Artificial
  Synthetic oligonucleotide
aggcgcgtagcctcgcaacaacttggtcgtcctaggtttgacgacaccgc

SEQ ID NO: 175926 - DNA, 50 bp, Artificial
  Synthetic oligonucleotide
aggcctacgagacacgcgacctctttcaagcaccggagggagagccggtg

SEQ ID NO: 175927 - DNA, 50 bp, Artificial
  Synthetic oligonucleotide
aggcccggaaggtaacgcggcatccgactgaggaggcgcaaccgtgagcg

SEQ ID NO: 175928 - DNA, 50 bp, Artificial
  Synthetic oligonucleotide
aggacaggttttctgcccgggtaccttgagacctcaggccctgctgaagc

SEQ ID NO: 175929 - DNA, 50 bp, Artificial
  Synthetic oligonucleotide
agcttaccaaccgccaacccaccgcggcaaaacatccgggaacgggagcc

SEQ ID NO: 175930 - DNA, 50 bp, Artificial
  Synthetic oligonucleotide
agctgccccgccaaccgcaaccgaagtcaggccgggacaacctctccacg

SEQ ID NO: 175931 - DNA, 50 bp, Artificial
  Synthetic oligonucleotide
agcggcagagacggtttgtgaactgctcccggccgttgggagtccctatg

SEQ ID NO: 175932 - DNA, 50 bp, Artificial
  Synthetic oligonucleotide
agcggagcacagcggacaacccagtttcgatgagcggcataccgcgctcg

SEQ ID NO: 175933 - DNA, 60 bp, Artificial
  Synthetic oligonucleotide
gatcggttagtccagcaagcagggatcgcaagtgcggctctgcggacacgattggcgagt

SEQ ID NO: 175934 - DNA, 55 bp, Artificial
  Synthetic oligonucleotide
gcccgatgattcagaaatcgacgggtcacaggggtctggtagcgtggtacctcga

SEQ ID NO: 175935 - DNA, 50 bp, Artificial
  Synthetic oligonucleotide
agcgaatcgcgggtgtgtgcgcccaagggaccgagaagggcccatttcgg

SEQ ID NO: 175936 - DNA, 50 bp, Artificial
  Synthetic oligonucleotide
acgagcgggtaaccggtaccgagcgtggagcgtgccaggatgtttccggg

SEQ ID NO: 175937 - DNA, 50 bp, Artificial
  Synthetic oligonucleotide
acctctgccatgtagtcggcttctggaactcgctcctcggggcccccgcc

SEQ ID NO: 175938 - DNA, 50 bp, Artificial
  Synthetic oligonucleotide
acctaaagagcgggcaccgggtggggttcgaggccttattgcgctaccaa

SEQ ID NO: 175939 - DNA, 50 bp, Artificial
  Synthetic oligonucleotide
accgtcggttttgacctaccctcccgatatgagccccttgtggagggcgt

SEQ ID NO: 175940 - DNA, 50 bp, Artificial
  Synthetic oligonucleotide
accgtcggaccacgagccagaaggtaaacctcccgactccccgacctgga

SEQ ID NO: 175941 - DNA, 50 bp, Artificial
  Synthetic oligonucleotide
accgggccacgcccgacgattccgactactccacacatacggttcaggac

SEQ ID NO: 175942 - DNA, 50 bp, Artificial
  Synthetic oligonucleotide
accgccacacggcccggacagacgtcactcagtgggcatccctgacaaag

SEQ ID NO: 175943 - DNA, 50 bp, Artificial
  Synthetic oligonucleotide
accgagcaagcccccagggaaagcatacgccggcctaacgcggcggcagt

SEQ ID NO: 175944 - DNA, 50 bp, Artificial
  Synthetic oligonucleotide
accgaagtcaggccgggacaacctctccacgcgggagcccctcgcgtaca

SEQ ID NO: 175945 - DNA, 55 bp, Artificial
  Synthetic oligonucleotide
gccgcaacgctattacgccgtcgcctagcgatccgtgctaccgatataggctcaa

SEQ ID NO: 175946 - DNA, 50 bp, Artificial
  Synthetic oligonucleotide
accctgacgaccccctgcgatcccaaccctaccacggcgcagcgcgcttc

SEQ ID NO: 175947 - DNA, 50 bp, Artificial
  Synthetic oligonucleotide
acccgtacacaccccggcattgacgcccttcacgtttccgaaaaccgcca

SEQ ID NO: 175948 - DNA, 50 bp, Artificial
  Synthetic oligonucleotide
acccggtctgtgtgaaggcttgatgtccgtccctggaccgtttgtgcgga

SEQ ID NO: 175949 - DNA, 50 bp, Artificial
  Synthetic oligonucleotide
acccgggaacggaactcggacactggtggacacccgatacccatggcagt

SEQ ID NO: 175950 - DNA, 50 bp, Artificial
  Synthetic oligonucleotide
accagacgaaatcccggctatcgacgtcccggttgccgcgtttgatgcga

SEQ ID NO: 175951 - DNA, 50 bp, Artificial
  Synthetic oligonucleotide
accactgtggaggttcagccatgcccgccattaccctccctgacggttcc

SEQ ID NO: 175952 - DNA, 50 bp, Artificial
  Synthetic oligonucleotide
accacgcacggtcagggatccccatgctgcggtacccgtacctgatgaag

SEQ ID NO: 175953 - DNA, 50 bp, Artificial
  Synthetic oligonucleotide
accacgagccagaaggtaaacctcccgactccccgacctggaggcatccg

SEQ ID NO: 175954 - DNA, 50 bp, Artificial
  Synthetic oligonucleotide
accacccccggattggaccggacaaccgcgccacggttcctggaacgatt

SEQ ID NO: 175955 - DNA, 50 bp, Artificial
  Synthetic oligonucleotide
accacaaggtctggcaggacgtgtaccacgtgccaacaagagcgggaccg

SEQ ID NO: 175956 - DNA, 55 bp, Artificial
  Synthetic oligonucleotide
gcctaccgcaaagcaggagccgacagcgatgttcaacgtagcgacccgcggtttc

SEQ ID NO: 175957 - DNA, 50 bp, Artificial
  Synthetic oligonucleotide
actgtagggtcccggatgatcgtacccagcacctctcgcgccagccagta

SEQ ID NO: 175958 - DNA, 50 bp, Artificial
  Synthetic oligonucleotide
actgcgccgcgtcaatcgaccgtccgatgggtgcattcccatgcccctga

SEQ ID NO: 175959 - DNA, 50 bp, Artificial
  Synthetic oligonucleotide
actgacgccgcatggagttcgtctgttacgcccactgggagcagttgccc

SEQ ID NO: 175960 - DNA, 50 bp, Artificial
  Synthetic oligonucleotide
actcgtagacttccggccttgggaacaagcgtccaccccaggcgcgtagc

SEQ ID NO: 175961 - DNA, 50 bp, Artificial
  Synthetic oligonucleotide
actccccttaggggccgatgagtgaaccccgcggcgtcttcctaaaggcg

SEQ ID NO: 175962 - DNA, 50 bp, Artificial
  Synthetic oligonucleotide
actacggctgagccactcgcgtcgcccactctgttttccgcgggttcaat

SEQ ID NO: 175963 - DNA, 50 bp, Artificial
  Synthetic oligonucleotide
acgttggatcagccgacagaatgcacccagtggtcccgacgacgccagcg

SEQ ID NO: 175964 - DNA, 50 bp, Artificial
  Synthetic oligonucleotide
acgtctgtctcctgaatcgctcgacggtccccctacgcaacgggccgtct

SEQ ID NO: 175965 - DNA, 50 bp, Artificial
  Synthetic oligonucleotide
acgtccgtgttggtgccccctgttttccgagacaaggcgcctctggcagc

SEQ ID NO: 175966 - DNA, 50 bp, Artificial
  Synthetic oligonucleotide
acgtcactcggggtacgtgggtcgagaccgaatccaccccttcgggtcgc

SEQ ID NO: 175967 - DNA, 55 bp, Artificial
  Synthetic oligonucleotide
gcgaaaaggcccgtgatccgtgactcctcgattgacacgtccctgcgatggtcgc

SEQ ID NO: 175968 - DNA, 50 bp, Artificial
  Synthetic oligonucleotide
acggtgcgcgagaacagtgccgctagctgcaggtaaggcccctccaggcg

SEQ ID NO: 175969 - DNA, 50 bp, Artificial
  Synthetic oligonucleotide
acggtcccagggtccggcaatgagctggtagccaccgaggatgtagctcg

SEQ ID NO: 175970 - DNA, 50 bp, Artificial
  Synthetic oligonucleotide
acgggggtcacaatcgaagcgcgccccacctgtaacgaggtgaggtgcca

SEQ ID NO: 175971 - DNA, 50 bp, Artificial
  Synthetic oligonucleotide
acggcgcaccctctaccggcgtctgggggaagactgacacggtccaggct

SEQ ID NO: 175972 - DNA, 50 bp, Artificial
  Synthetic oligonucleotide
acggcccggacagacgtcactcagtgggcatccctgacaaagcggtttgg

SEQ ID NO: 175973 - DNA, 50 bp, Artificial
  Synthetic oligonucleotide
acggatgagcgcacggatgcaggtaaaggacgacccggcatgagcccttc

SEQ ID NO: 175974 - DNA, 50 bp, Artificial
  Synthetic oligonucleotide
acgcgctgccacagggtggagtcggagttgagggtgacacggatggagct

SEQ ID NO: 175975 - DNA, 50 bp, Artificial
  Synthetic oligonucleotide
acgccgaacgctgcggtataccccaggctctcgatgggacggatcggact

SEQ ID NO: 175976 - DNA, 50 bp, Artificial
  Synthetic oligonucleotide
acgcccgctgcgctttgaacggttctgaaacgccccatacacactgccgg

SEQ ID NO: 175977 - DNA, 50 bp, Artificial
  Synthetic oligonucleotide
acgcccagtaccccgcaaagcgtggcagtgctgtaataggcccgattcac

SEQ ID NO: 175978 - DNA, 55 bp, Artificial
  Synthetic oligonucleotide
gcggccgtccagtgtgtccgactgttacccgtgtcattacgccaatgatcagagt

SEQ ID NO: 175979 - DNA, 50 bp, Artificial
  Synthetic oligonucleotide
acgatacacgccgacagcattgacctgccccgttccgcacatggcgaacc

SEQ ID NO: 175980 - DNA, 55 bp, Artificial
  Synthetic oligonucleotide
attgcaccccgagtgcatgtgacctctcgtgggtcccgtactctgtgttccggcc

SEQ ID NO: 175981 - DNA, 55 bp, Artificial
  Synthetic oligonucleotide
caaagctaaccggaccgccaggctaagggcaccaaactcaacgccacgatgtcgg

SEQ ID NO: 175982 - DNA, 55 bp, Artificial
  Synthetic oligonucleotide
caacataagaaatccctctctctgcggctattccacgcagcaccgggaaccactc

SEQ ID NO: 175983 - DNA, 55 bp, Artificial
  Synthetic oligonucleotide
cacccgcactcaccagggtcaactcgtctggcgtgtcgatacccagcaacctgga

SEQ ID NO: 175984 - DNA, 55 bp, Artificial
  Synthetic oligonucleotide
caccgcaagccttaccccgcgttatgtcaccgcttcggggcagacgggtatacag

SEQ ID NO: 175985 - DNA, 60 bp, Artificial
  Synthetic oligonucleotide
tgcatgcctattcagacgcactcgtgaccctggatcgcctggggaagcaaccgacagcgg

SEQ ID NO: 175986 - DNA, 55 bp, Artificial
  Synthetic oligonucleotide
cacctgggcccttgccgtaattggctgaggtacatcactggcatcacgcgcctgg

SEQ ID NO: 175987 - DNA, 55 bp, Artificial
  Synthetic oligonucleotide
cacgagatccaacagctcatcgcctaactgagcctctccatcgagctcgtagcgg

SEQ ID NO: 175988 - DNA, 55 bp, Artificial
  Synthetic oligonucleotide
cacgagcgcccagtcttctactggatgctgttcttcggatacaacctggcgggtc

SEQ ID NO: 175989 - DNA, 55 bp, Artificial
  Synthetic oligonucleotide
cagcatagatcggatggtccatgccttgatcgggcgggctaccctgaatctgtca

SEQ ID NO: 175990 - DNA, 55 bp, Artificial
  Synthetic oligonucleotide
caggattgatcataacgacggagaccaatgcatgtcgggacaactcctccgggcc

SEQ ID NO: 175991 - DNA, 53 bp, Artificial
  Synthetic oligonucleotide
caggcccggactccgggtaccgttgtgaacggaaccgtgactgatatccgtag

SEQ ID NO: 175992 - DNA, 55 bp, Artificial
  Synthetic oligonucleotide
cagttctgcgcgtcccgttggcctgctaaatccgaaggtggagcccattcccgca

SEQ ID NO: 175993 - DNA, 55 bp, Artificial
  Synthetic oligonucleotide
catattcgtccctaacttgcagccactatggttgcccgcacgccgcacgctcggg

SEQ ID NO: 175994 - DNA, 55 bp, Artificial
  Synthetic oligonucleotide
catcatctcaggcacctcagaatgcgtggtaagaccaacggtcatgatgcactgc

SEQ ID NO: 175995 - DNA, 55 bp, Artificial
  Synthetic oligonucleotide
catccacctgaaaggcacccgcctctgtgggcaccgagtaactcaggaccttgcg

SEQ ID NO: 175996 - DNA, 55 bp, Artificial
  Synthetic oligonucleotide
ctttccgtgcgtggggatcagaaaggccgattgccgggcacttcggggtgttgtg

SEQ ID NO: 175997 - DNA, 55 bp, Artificial
  Synthetic oligonucleotide
atcagcttcacattgcgcgcatccggcacactgatccgcgtgatctctgccaggg

SEQ ID NO: 175998 - DNA, 55 bp, Artificial
  Synthetic oligonucleotide
ccaaccgggcgagtgaggttttgcaatgcctgaacaagagacggcttctggactc

SEQ ID NO: 175999 - DNA, 55 bp, Artificial
  Synthetic oligonucleotide
ccagtgaaatgacagagcagagccatagcgtacataaacaaggggcacgtcccag

SEQ ID NO: 176000 - DNA, 55 bp, Artificial
  Synthetic oligonucleotide
cccagaagcgtgtctgacggtggcacgagaattacgcagccgttatagtggaacg

SEQ ID NO: 176001 - DNA, 55 bp, Artificial
  Synthetic oligonucleotide
ccccgagattttcagtcgccttgtgcaatgcccgcgtaggtcccatccccgcaac

SEQ ID NO: 176002 - DNA, 54 bp, Artificial
  Synthetic oligonucleotide
ccccgcccttagacatactaaagtggccctcgggcctgttaacaatcagccgtg

SEQ ID NO: 176003 - DNA, 55 bp, Artificial
  Synthetic oligonucleotide
cccgcccacgttggaacgtacgtgatatccgcgacatagagctggtctggcccat

SEQ ID NO: 176004 - DNA, 55 bp, Artificial
  Synthetic oligonucleotide
ccgctaccgggcgttgtgtgttgatcgggtcaataggcagcggctagaacgcctc

SEQ ID NO: 176005 - DNA, 55 bp, Artificial
  Synthetic oligonucleotide
ccggactatacgcactggacgggcagttccatccggtgggctgttgcacactacc

SEQ ID NO: 176006 - DNA, 55 bp, Artificial
  Synthetic oligonucleotide
ccggtgccgcattcctatacgatgccccgacacgaacccaacttccacgactcgg

SEQ ID NO: 176007 - DNA, 55 bp, Artificial
  Synthetic oligonucleotide
ccgcggctcagaccccctcgctcgaagggtggccgggaatataaggtgccaggaa

SEQ ID NO: 176008 - DNA, 54 bp, Artificial
  Synthetic oligonucleotide
ccgtcggagcggccacggtccgttgctcaccgagtcgggtgacgggcttctttc

SEQ ID NO: 176009 - DNA, 54 bp, Artificial
  Synthetic oligonucleotide
cctccctgtaacaacgtcttcacggatcgacccacaccgggcggagtcctgaac

SEQ ID NO: 176010 - DNA, 55 bp, Artificial
  Synthetic oligonucleotide
cgaaccttttagcacctcatccaacgtagagatccgaatgcgttccatgcgctcc

SEQ ID NO: 176011 - DNA, 55 bp, Artificial
  Synthetic oligonucleotide
accttggcgcattcccgccacaccaccggatatcaggctcagcatagatcccgcg

SEQ ID NO: 176012 - DNA, 55 bp, Artificial
  Synthetic oligonucleotide
cgcctgacactagaatgcttgaacactagggagggtgtatgcagatccagaaccg

SEQ ID NO: 176013 - DNA, 55 bp, Artificial
  Synthetic oligonucleotide
gggaacctcccctgttgtctacgggtgggatcgcgctgcagttttgacaatttcg

SEQ ID NO: 176014 - DNA, 53 bp, Artificial
  Synthetic oligonucleotide
gggaagggcgaattgggaagtgcgaaggacaaaccggcctccctcttgcctct

SEQ ID NO: 176015 - DNA, 55 bp, Artificial
  Synthetic oligonucleotide
aaacctgaatggcgatccccaagtccaactgaccccacgctcggtcggcggtcag

SEQ ID NO: 176016 - DNA, 52 bp, Artificial
  Synthetic oligonucleotide
ttcgattacggggtaactttcccgggatggaaccaaccggatgcctattctc

SEQ ID NO: 176017 - DNA, 55 bp, Artificial
  Synthetic oligonucleotide
gggacactgcggcaacaattcgccccggtctaagacgatgtccgatcggccacga

SEQ ID NO: 176018 - DNA, 57 bp, Artificial
  Synthetic oligonucleotide
atatgaatgccgccgtccgggtgttgagtgagcttcccgatagcgttgggaacgttg

SEQ ID NO: 176019 - DNA, 54 bp, Artificial
  Synthetic oligonucleotide
gggagaaggtagagaaattccctgaatcggctggtaacgactgcccgaaatccc

SEQ ID NO: 176020 - DNA, 55 bp, Artificial
  Synthetic oligonucleotide
gggccctgtctccgccctactggcgacaggatcgggttcaacccatctggacacc

SEQ ID NO: 176021 - DNA, 55 bp, Artificial
  Synthetic oligonucleotide
aaactgcgggcgtggctcaaggtcgggttcatggaacgaggggtgtttcatccca

SEQ ID NO: 176022 - DNA, 53 bp, Artificial
  Synthetic oligonucleotide
gggccgttgacaccctgaacgcaaaaggtaactttggtcggggatcgtcacat

SEQ ID NO: 176023 - DNA, 55 bp, Artificial
  Synthetic oligonucleotide
gggcgagttctactgaagttagataagtcatgattcctccgtgcgtatagccgct

SEQ ID NO: 176024 - DNA, 55 bp, Artificial
  Synthetic oligonucleotide
gttgacgtactcgggtccgtagcgggtgccccatttgatgcatagcacggtcttc

SEQ ID NO: 176025 - DNA, 55 bp, Artificial
  Synthetic oligonucleotide
tgtctgatgacttgccgtatggccgagcgaccggcgccccgattgatcgcaatgg

SEQ ID NO: 176026 - DNA, 55 bp, Artificial
  Synthetic oligonucleotide
gttcgaacgccatgtagtgggtaatcccataggactcgtcccaacgcccacaggc

SEQ ID NO: 176027 - DNA, 55 bp, Artificial
  Synthetic oligonucleotide
gtgtgattgtgtattggcgagccccgatccgggactcgtggaaagcacgccccag

SEQ ID NO: 176028 - DNA, 55 bp, Artificial
  Synthetic oligonucleotide
tgagtatcgctacctgttacctcatcggtcttaccatttattctcgcgcagaccg

SEQ ID NO: 176029 - DNA, 55 bp, Artificial
  Synthetic oligonucleotide
gagcgcgataataaagagcaccgccgtgagaatcaacttcacgacctctccgacg

SEQ ID NO: 176030 - DNA, 54 bp, Artificial
  Synthetic oligonucleotide
gggttttataacagccaaaaccacgcggcttacgtatcgtgctcgttgccttta

SEQ ID NO: 176031 - DNA, 55 bp, Artificial
  Synthetic oligonucleotide
aacgcaggatcggggaacctgggctgccaacgcgagcgtgtccattcatcactgc

SEQ ID NO: 176032 - DNA, 55 bp, Artificial
  Synthetic oligonucleotide
gtgaacagtgtaacgagtcagacaatcacaggtcgctgtccggaccaatgatccg

SEQ ID NO: 176033 - DNA, 55 bp, Artificial
  Synthetic oligonucleotide
gtcctcgcttgtgcccttatagcgaagagaagttgggtgtcctcgcttgtgccct

SEQ ID NO: 176034 - DNA, 55 bp, Artificial
  Synthetic oligonucleotide
tggaggcgacaacttcatcgggacgatagcttggaagtcacgagattctgtatca

SEQ ID NO: 176035 - DNA, 55 bp, Artificial
  Synthetic oligonucleotide
tgatttctgcaataaaggggccaggatgcgacgctcaagcctgtaacccgagggg

SEQ ID NO: 176036 - DNA, 55 bp, Artificial
  Synthetic oligonucleotide
ggtgtgcttaacgttatgagtgtcacggggctggtgctaattgtggctggcctcc

SEQ ID NO: 176037 - DNA, 55 bp, Artificial
  Synthetic oligonucleotide
gcgtcaagggcagtaggctgagattaatgacatggcgcccgttgttcgatagaac

SEQ ID NO: 176038 - DNA, 55 bp, Artificial
  Synthetic oligonucleotide
gcgtctcagcctgttacgcgtccgccggtgtccgaccggtgagatatgcaggtta

SEQ ID NO: 176039 - DNA, 55 bp, Artificial
  Synthetic oligonucleotide
tcgaccctgtggccgaccttggctacctcgaacatcgaacctgtacccgcttgcg

SEQ ID NO: 176040 - DNA, 55 bp, Artificial
  Synthetic oligonucleotide
gagcgccagaacagaccagccagaatcgagcacacccaagttaccggcaccttgg

SEQ ID NO: 176041 - DNA, 55 bp, Artificial
  Synthetic oligonucleotide
tccaagccgtcccggggaagccgcccattgagggtgacacgcccctcgcccagta

SEQ ID NO: 176042 - DNA, 55 bp, Artificial
  Synthetic oligonucleotide
aacatcagcgttcagtagcgctgacctgagctcgtcaccgagaaaagaccaggca

SEQ ID NO: 176043 - DNA, 55 bp, Artificial
  Synthetic oligonucleotide
gcttggggtcgattggacagatattatccgccaccaatatgccgcattttcagtt

SEQ ID NO: 176044 - DNA, 53 bp, Artificial
  Synthetic oligonucleotide
tagccgccggtttgaccccttggataaacggcgtaaattgggagtcagagcgg

SEQ ID NO: 176045 - DNA, 55 bp, Artificial
  Synthetic oligonucleotide
ggaaatcaatacttcggaggcagcccgcgtcttcgggttttcgcagcgcctgggg

SEQ ID NO: 176046 - DNA, 55 bp, Artificial
  Synthetic oligonucleotide
ggaacgcctatctgatataccgctgctcgcaaggcgtttcctaagcacgttcgcg

SEQ ID NO: 176047 - DNA, 55 bp, Artificial
  Synthetic oligonucleotide
ggactcatagggttgaaaactctccgcgacctcacccgtcagactgtgtttctcg

SEQ ID NO: 176048 - DNA, 55 bp, Artificial
  Synthetic oligonucleotide
ggagatgcactcacgatccaactcttggggtctatcgatgacatagtcgccccgg

SEQ ID NO: 176049 - DNA, 55 bp, Artificial
  Synthetic oligonucleotide
ggagcccgcgctagcgacccggtgtcaaacgtattgctgctgacaaccccttaac

SEQ ID NO: 176050 - DNA, 55 bp, Artificial
  Synthetic oligonucleotide
ggatgcgtaaggtgagcgtggaaaagtgcgaaggttttcgcatcgtcccgcaaga

SEQ ID NO: 176051 - DNA, 55 bp, Artificial
  Synthetic oligonucleotide
tttgcccgtatattcttccccgcaggcgtaaggcgcgagtttgccttcaggttta

SEQ ID NO: 176052 - DNA, 54 bp, Artificial
  Synthetic oligonucleotide
cgtccaattttggttagaaacggtgcccggcgtattaatacggtcagcgatgcc

SEQ ID NO: 176053 - DNA, 55 bp, Artificial
  Synthetic oligonucleotide
cggttcctgcacgcgcgaatgtttcgctaaagttcccacgcatgaccatgtgctg

SEQ ID NO: 176054 - DNA, 55 bp, Artificial
  Synthetic oligonucleotide
cggcgcgcttatcgctaaaagcgagtatggcaccatcattaatccccgttgcgtt

SEQ ID NO: 176055 - DNA, 50 bp, Artificial
  Synthetic oligonucleotide
cgcggaaagaagttcctccgttacggaaaacgcgataaaaccttatgaac

SEQ ID NO: 176056 - DNA, 52 bp, Artificial
  Synthetic oligonucleotide
cgcgcgggtttagaggctaaggcccggaaggtaagacctatttgacgtatag

SEQ ID NO: 176057 - DNA, 54 bp, Artificial
  Synthetic oligonucleotide
cccttacaccgttctcggcaacccagcctacgcttaaattagaaatctgcttag

SEQ ID NO: 176058 - DNA, 55 bp, Artificial
  Synthetic oligonucleotide
cacgcacgctaccattcttatgttcacaaccaggggcagagtgtttagcttacgc

SEQ ID NO: 176059 - DNA, 55 bp, Artificial
  Synthetic oligonucleotide
aacggcacaggttttattgtaagtccggacgggcttatagccacaagcaggcatg

SEQ ID NO: 176060 - DNA, 52 bp, Artificial
  Synthetic oligonucleotide
cacaccgttatcggtaagattcatagttgttttaccgttgtttacggcaaac

SEQ ID NO: 176061 - DNA, 55 bp, Artificial
  Synthetic oligonucleotide
caacgcaagatactctgaccccatagttgatatagtaacgggcgaaattacagga

SEQ ID NO: 176062 - DNA, 55 bp, Artificial
  Synthetic oligonucleotide
tgtgtacatggcggttactggtcaggcggtacggaatatcttaccgccgcgcctg

SEQ ID NO: 176063 - DNA, 55 bp, Artificial
  Synthetic oligonucleotide
atgccggctataggcccggccgaagctctgggaacaattcttataaatttaccgc

SEQ ID NO: 176064 - DNA, 55 bp, Artificial
  Synthetic oligonucleotide
agcgcttaaagcggctaatttacactctgtactttcacacttttgcgtgcggact

SEQ ID NO: 176065 - DNA, 53 bp, Artificial
  Synthetic oligonucleotide
ataaacgtgtcgctcccttcgatagcgggcgggtttaacgcttccaccgcgga

SEQ ID NO: 176066 - DNA, 54 bp, Artificial
  Synthetic oligonucleotide
gcgccctgtcatggaaggcttattcccgggagggcaaaccaaaactgtgcaaga

SEQ ID NO: 176067 - DNA, 52 bp, Artificial
  Synthetic oligonucleotide
atgggacgcgccccaccaacccattctgcccttaccaaaccatttaccgtcc

SEQ ID NO: 176068 - DNA, 52 bp, Artificial
  Synthetic oligonucleotide
gcgttttcccttaatgagtggtttatatggcaggcgtataccctaaaacgtt

SEQ ID NO: 176069 - DNA, 52 bp, Artificial
  Synthetic oligonucleotide
tacgaacatatttggcgctaaccggctctttccactcaatccaagaatactt

SEQ ID NO: 176070 - DNA, 52 bp, Artificial
  Synthetic oligonucleotide
gctaaaatgggcgatagaagaccgtgatgaacttttaacccaggaccctaaa

SEQ ID NO: 176071 - DNA, 51 bp, Artificial
  Synthetic oligonucleotide
aaaagacggtgagggcgccttatccggggctatggctgcttttcagggcgg

SEQ ID NO: 176072 - DNA, 51 bp, Artificial
  Synthetic oligonucleotide
cgagtattcaacaacatatcccgtaagatactcaacgcctttagccgagcc

SEQ ID NO: 176073 - DNA, 55 bp, Artificial
  Synthetic oligonucleotide
tgcgtaggtattgtgaaatcagaagagtaaggaacactccccttttacgcagggg

SEQ ID NO: 176074 - DNA, 50 bp, Artificial
  Synthetic oligonucleotide
ccatttgcggaagggtatgcccgcaggaaaaccattgcgaaggcgcctgt

SEQ ID NO: 176075 - DNA, 49 bp, Artificial
  Synthetic oligonucleotide
tttcggccgcgggaccccaaagggttacgggcacaaaggttgtttcgtc

SEQ ID NO: 176076 - DNA, 50 bp, Artificial
  Synthetic oligonucleotide
aacccaaagcgggccctctgggaataaccgaaactttgtgcacggggtcg

SEQ ID NO: 176077 - DNA, 50 bp, Artificial
  Synthetic oligonucleotide
tggaccagggtgctgtaggcgcggtggttattacgggcagtgaggctcct

SEQ ID NO: 176078 - DNA, 50 bp, Artificial
  Synthetic oligonucleotide
cccaataacgcagggcagagaagttgtgtggggaacactgataaaggaat

SEQ ID NO: 176079 - DNA, 50 bp, Artificial
  Synthetic oligonucleotide
tccccctcaggtgtggcaagacaggcaacggttttaaaacgcgccgttct

SEQ ID NO: 176080 - DNA, 50 bp, Artificial
  Synthetic oligonucleotide
tagggccggcttacatacaccatttcgcaagcccgcttacggaacgcagg

SEQ ID NO: 176081 - DNA, 50 bp, Artificial
  Synthetic oligonucleotide
ccgggcggacagctccgtttggtgcggagccgaaggaacaagtgaggata

SEQ ID NO: 176082 - DNA, 50 bp, Artificial
  Synthetic oligonucleotide
tacccacgctttgtaggcggggttaagtacatcgccgccgtttaacccgg

SEQ ID NO: 176083 - DNA, 50 bp, Artificial
  Synthetic oligonucleotide
acacccgcctgcgggattacctgggacttaggcaactgttttccgccacc

SEQ ID NO: 176084 - DNA, 55 bp, Artificial
  Synthetic oligonucleotide
tgatccgggctggcgcaaagcgttaaccccgttgacctggccttgggtgtcggaa

SEQ ID NO: 176085 - DNA, 50 bp, Artificial
  Synthetic oligonucleotide
taagccggctggggttgcgagttcagcagtggtacatcttctgtgcccta

SEQ ID NO: 176086 - DNA, 50 bp, Artificial
  Synthetic oligonucleotide
taagaaccgggccttcgggtgtaagcattatttccgtgtgggacgcgccg

SEQ ID NO: 176087 - DNA, 50 bp, Artificial
  Synthetic oligonucleotide
taacaccacggcggaatctttgcgtgtgggcgcggggcttatatcttgcg

SEQ ID NO: 176088 - DNA, 50 bp, Artificial
  Synthetic oligonucleotide
ggtcaactgcgttcattgcactgccgcgaaccgtaggttttacgccgcga

SEQ ID NO: 176089 - DNA, 50 bp, Artificial
  Synthetic oligonucleotide
accgaaggccaactggtcaggcagcgtaagtgcggcggaggcgttaccgt

SEQ ID NO: 176090 - DNA, 50 bp, Artificial
  Synthetic oligonucleotide
ggggcgcccggccttgttacgccgaccatgcctcctacccttgccatttc

SEQ ID NO: 176091 - DNA, 50 bp, Artificial
  Synthetic oligonucleotide
gggcgccttatccggggctatggctgcttttcagggcggtaaagccacag

SEQ ID NO: 176092 - DNA, 50 bp, Artificial
  Synthetic oligonucleotide
gggcacaagtttttccgcgtgagacatagcctccggcccttgcacggcaa

SEQ ID NO: 176093 - DNA, 50 bp, Artificial
  Synthetic oligonucleotide
acgcgcgcttataggcacggcgtgggttatcccgtgggtataccttgccg

SEQ ID NO: 176094 - DNA, 50 bp, Artificial
  Synthetic oligonucleotide
cggcgtatcaccggacggacgttccattattttaacccgctccggcggca

SEQ ID NO: 176095 - DNA, 55 bp, Artificial
  Synthetic oligonucleotide
tacaatgccgtcgtaagcgcccaaagaggaacgcgcggacatagcttttgccgca

SEQ ID NO: 176096 - DNA, 50 bp, Artificial
  Synthetic oligonucleotide
cgggaccccaaagggttacgggcacaaaggttgtttcgtcctgccagctg

SEQ ID NO: 176097 - DNA, 50 bp, Artificial
  Synthetic oligonucleotide
agcggaggaaagcacaaacgcctcttacgcggcggccgacattttaagcc

SEQ ID NO: 176098 - DNA, 50 bp, Artificial
  Synthetic oligonucleotide
agtttgtttgctgccttcggggcccatttcccactccactccgggagaac

SEQ ID NO: 176099 - DNA, 55 bp, Artificial
  Synthetic oligonucleotide
ggtatcttccgaagagttgtaagatgtgtttgacgctgagttaagaagcctgtcg

SEQ ID NO: 176100 - DNA, 49 bp, Artificial
  Synthetic oligonucleotide
ggcgggatcaacaactttaaaactttcggttcccaaatttactttagta

SEQ ID NO: 176101 - DNA, 55 bp, Artificial
  Synthetic oligonucleotide
gcgaaagccccacaggggataaacaaagttcgcctgtagtaaacactgcgtaagc

SEQ ID NO: 176102 - DNA, 55 bp, Artificial
  Synthetic oligonucleotide
ctggattttaggaacgcagggtaacccttttgcttacgcgcataccatacttata

SEQ ID NO: 176103 - DNA, 58 bp, Artificial
  Synthetic oligonucleotide
gtctccctgttacccattgcgccggggggtggattttgcaacagcgctctccctgaga

SEQ ID NO: 176104 - DNA, 60 bp, Artificial
  Synthetic oligonucleotide
gcatgtcggcaccgggcatatccccgccaccatcagtaataaccgcattcatcgcatcgc

SEQ ID NO: 176105 - DNA, 60 bp, Artificial
  Synthetic oligonucleotide
gcaccggaaacgcgctgacaacattttagcctgtctctgattaccatcccagcgaagggc

SEQ ID NO: 176106 - DNA, 58 bp, Artificial
  Synthetic oligonucleotide
cgggaaatcttgtgcaacgtaagaattctcatcttcgtccctgaaccaccacattgat

SEQ ID NO: 176107 - DNA, 50 bp, Artificial
  Synthetic oligonucleotide
atgcctcgccgctgttttgccacagaccgtccgtcaccccggcacggtgc

SEQ ID NO: 176108 - DNA, 50 bp, Artificial
  Synthetic oligonucleotide
gacggtaaagtaatgtgtactttcacttaatggcgtcgccatctcaaaga

SEQ ID NO: 176109 - DNA, 50 bp, Artificial
  Synthetic oligonucleotide
cccgtttaacaaatctgcgacgtttatattcacggaggctaacttcttgt

SEQ ID NO: 176110 - DNA, 50 bp, Artificial
  Synthetic oligonucleotide
agccagtcgcgtcaggggcagccagtgcgggaagttctctgtgcctgtca

SEQ ID NO: 176111 - DNA, 50 bp, Artificial
  Synthetic oligonucleotide
agcgccagcaatatggcgaacgcggaaagtgtggtaggccctgatggcga

SEQ ID NO: 176112 - DNA, 50 bp, Artificial
  Synthetic oligonucleotide
cccgttaatatgcccttccctgcgaagacgtaacatatgtttactgtatt

SEQ ID NO: 176113 - DNA, 50 bp, Artificial
  Synthetic oligonucleotide
agacgtaggccgtgactttctgccgggtactactggcctgctgggtcaga

SEQ ID NO: 176114 - DNA, 50 bp, Artificial
  Synthetic oligonucleotide
agcgccactggcaggcttaatcgtactgacagcggtacgctgggaaccgt

SEQ ID NO: 176115 - DNA, 50 bp, Artificial
  Synthetic oligonucleotide
catatccgatgcttggaatctattaaacgtatattctaacgaagcatatc

SEQ ID NO: 176116 - DNA, 50 bp, Artificial
  Synthetic oligonucleotide
cccgtgttgaccgcgaaaccaatcaggtgatccgcattgccggtaacccg

SEQ ID NO: 176117 - DNA, 55 bp, Artificial
  Synthetic oligonucleotide
cgggaaagcgtattatctgcctcccgcgttaccgtaagattcgccgcaaggcaaa

SEQ ID NO: 176118 - DNA, 50 bp, Artificial
  Synthetic oligonucleotide
acccttagcctcgcggggaaagtgccgatgtggcagcctccgttactgta

SEQ ID NO: 176119 - DNA, 50 bp, Artificial
  Synthetic oligonucleotide
gtataacgtaattgcactcgaccgggaatatcgtcacgcgctggtttgtg

SEQ ID NO: 176120 - DNA, 50 bp, Artificial
  Synthetic oligonucleotide
ggtgatgcctgaatctctccctgcggtgttttctcccctggtccgggaga

SEQ ID NO: 176121 - DNA, 50 bp, Artificial
  Synthetic oligonucleotide
aacagctaccaggggccgattaaccccgggccgccattggccgtctttta

SEQ ID NO: 176122 - DNA, 50 bp, Artificial
  Synthetic oligonucleotide
cgataaaacgtacggtctggctatcgtcgaaccgggtaatttgcgtcagt

SEQ ID NO: 176123 - DNA, 50 bp, Artificial
  Synthetic oligonucleotide
agcgcatcaaccgcgtacccatatggctttcccccggcagaataccggcc

SEQ ID NO: 176124 - DNA, 50 bp, Artificial
  Synthetic oligonucleotide
aaaacaatgtggccatacgtgccaacaatcataaaacctccggttacttc

SEQ ID NO: 176125 - DNA, 50 bp, Artificial
  Synthetic oligonucleotide
agccagacactgatgaccctctggccaaaacgcaccggggttccggacgg

SEQ ID NO: 176126 - DNA, 50 bp, Artificial
  Synthetic oligonucleotide
acgcgggatgggctcacgacgagttccaccaccattgaggggcccggtat

SEQ ID NO: 176127 - DNA, 50 bp, Artificial
  Synthetic oligonucleotide
tcatccggggctggaggaatattcgcttgtttaacggctatcagtgcggc

SEQ ID NO: 176128 - DNA, 55 bp, Artificial
  Synthetic oligonucleotide
cgggaaagagctactcaccaaagacagtgcgtaagagcctccgttcacgttccgg

SEQ ID NO: 176129 - DNA, 50 bp, Artificial
  Synthetic oligonucleotide
accccgtaaaagccacgcgcaggttttggccgcgtttgagctgttgtggg

SEQ ID NO: 176130 - DNA, 50 bp, Artificial
  Synthetic oligonucleotide
tatattgatgtgacgtcgttcaccgaacttatgagtgtggtccatgatta

SEQ ID NO: 176131 - DNA, 50 bp, Artificial
  Synthetic oligonucleotide
caaatgccgctgcttgcaacatgctcgccccacgacggcgcataagcggt

SEQ ID NO: 176132 - DNA, 50 bp, Artificial
  Synthetic oligonucleotide
aacgaaggtagtgccgccacagatagtccagacaccgcccccgtcctggt

SEQ ID NO: 176133 - DNA, 50 bp, Artificial
  Synthetic oligonucleotide
atctgcttcagggcgaacttgtctggctgccatcacacgctgacgggcac

SEQ ID NO: 176134 - DNA, 50 bp, Artificial
  Synthetic oligonucleotide
cagggtaacgcgctcagttgcagccagggaggttgatgcccccatcagga

SEQ ID NO: 176135 - DNA, 50 bp, Artificial
  Synthetic oligonucleotide
ttacgcgctagtgtgtcgttttttttgtggcgaagagtgggcaagaagcg

SEQ ID NO: 176136 - DNA, 50 bp, Artificial
  Synthetic oligonucleotide
tacgacatcagatccgccagtttatagaccagactgtactggcggtattt

SEQ ID NO: 176137 - DNA, 50 bp, Artificial
  Synthetic oligonucleotide
cgatcctgacgcgcgcaacgtgagttgacgccataaccactcgaccggtc

SEQ ID NO: 176138 - DNA, 50 bp, Artificial
  Synthetic oligonucleotide
tacgacgtcactactgcacgagctaaaattcggtgcatgaaggtactcac

SEQ ID NO: 176139 - DNA, 57 bp, Artificial
  Synthetic oligonucleotide
cggcttgctttgcgggtggtttctggttcacacttcgttacaggcataatcatcccc

SEQ ID NO: 176140 - DNA, 50 bp, Artificial
  Synthetic oligonucleotide
tcatagctactgcagcaactccactgagtgctaatcccgtcaacgcacgc

SEQ ID NO: 176141 - DNA, 50 bp, Artificial
  Synthetic oligonucleotide
aaccttccggcgttgcgacgtcttccaccttgtgttcttcccacagccca

SEQ ID NO: 176142 - DNA, 50 bp, Artificial
  Synthetic oligonucleotide
aaccttagcgcctgggcaagtgggtttgccgctgggtctaccggggatcc

SEQ ID NO: 176143 - DNA, 50 bp, Artificial
  Synthetic oligonucleotide
aaaacacgggtacggcgtttcatcaccgctgtgggcagcgttgcgacacg

SEQ ID NO: 176144 - DNA, 50 bp, Artificial
  Synthetic oligonucleotide
ggcatgtgggcgcacttttctcgttgggcgtcccccaagtatcaagccag

SEQ ID NO: 176145 - DNA, 50 bp, Artificial
  Synthetic oligonucleotide
agccagatgcaacttccttaattcgcgtggtcgcagcggggagtcgtggc

SEQ ID NO: 176146 - DNA, 50 bp, Artificial
  Synthetic oligonucleotide
atctgggtactgcccaaccccagtggactgaaccgcgcttcccagcagga

SEQ ID NO: 176147 - DNA, 50 bp, Artificial
  Synthetic oligonucleotide
tcataatggaggcctaatgaaggagtgtatatgtcagtcaaaacgttcac

SEQ ID NO: 176148 - DNA, 50 bp, Artificial
  Synthetic oligonucleotide
agcggtaacggtttaggcggcgtttcaagtttcggtgccgtccggcggat

SEQ ID NO: 176149 - DNA, 50 bp, Artificial
  Synthetic oligonucleotide
aacctgtccgactttcttcgttgcctgccatgcaccgctacaaccgctta

SEQ ID NO: 176150 - DNA, 60 bp, Artificial
  Synthetic oligonucleotide
cagtgaagcggcattcataaattgtgctacctgtttcagtaactgccacatgtaccgaca

SEQ ID NO: 176151 - DNA, 50 bp, Artificial
  Synthetic oligonucleotide
agaactgccccaagagactggcgctggcagggaggctttggtttgaccga

SEQ ID NO: 176152 - DNA, 50 bp, Artificial
  Synthetic oligonucleotide
gctgccggtcaattagggggaactcctccggttggcggtcagcgtttgaa

SEQ ID NO: 176153 - DNA, 50 bp, Artificial
  Synthetic oligonucleotide
ttagccgctacgtacttaaccagccaagtacattaaccgatgagctggca

SEQ ID NO: 176154 - DNA, 50 bp, Artificial
  Synthetic oligonucleotide
gcagggcaggaaaagagtttgagtctattcttgagctattaatgatgggg

SEQ ID NO: 176155 - DNA, 50 bp, Artificial
  Synthetic oligonucleotide
acccctgcctgagagacggcggcagtcccccgtcactggtcacgacccgc

SEQ ID NO: 176156 - DNA, 50 bp, Artificial
  Synthetic oligonucleotide
agcgggtcagtatgctgtgggctctccttgctccggctggaacatttccg

SEQ ID NO: 176157 - DNA, 50 bp, Artificial
  Synthetic oligonucleotide
cgcgcgggcaggactacaattccaaactgcgctacagcacccttacgtgc

SEQ ID NO: 176158 - DNA, 50 bp, Artificial
  Synthetic oligonucleotide
aacgccggttactgcttcctgagggcgggtcagaacgataaagcgcgcag

SEQ ID NO: 176159 - DNA, 50 bp, Artificial
  Synthetic oligonucleotide
tcatgtaaaatcctgtctatcgtgagaatgaccagcccttatcgggcttc

SEQ ID NO: 176160 - DNA, 50 bp, Artificial
  Synthetic oligonucleotide
gacaatttgttcagacatatgctattccggcctcgttattacacgttatg

SEQ ID NO: 176161 - DNA, 57 bp, Artificial
  Synthetic oligonucleotide
cagtgaaggctcaacccgcgttcgtcgctacactgtcacggaacccgtatcagaaaa

SEQ ID NO: 176162 - DNA, 50 bp, Artificial
  Synthetic oligonucleotide
ttaagggattatggtaaattcgacaatgtggctgatgttgacgcgtaaat

SEQ ID NO: 176163 - DNA, 50 bp, Artificial
  Synthetic oligonucleotide
aacgccggcatcccagcgccagtctgattcaaaccccgcctgaacgcgaa

SEQ ID NO: 176164 - DNA, 50 bp, Artificial
  Synthetic oligonucleotide
aacgccgcagcctaatgtagcccgtctgcgcagtttggtcgcacacacta

SEQ ID NO: 176165 - DNA, 50 bp, Artificial
  Synthetic oligonucleotide
aacgcccgctttttgttttgcgcgttgcggcgataaggcaatagcacggc

SEQ ID NO: 176166 - DNA, 50 bp, Artificial
  Synthetic oligonucleotide
ccgagggtttaccgagcgccactttgtaacgcaccagtcccggacgggtc

SEQ ID NO: 176167 - DNA, 50 bp, Artificial
  Synthetic oligonucleotide
acccccagcgcacctttgcgacggtagacccgggggcggaatatttgcat

SEQ ID NO: 176168 - DNA, 50 bp, Artificial
  Synthetic oligonucleotide
taccggtttgccaacttgcggcttggtaacgtgggtgaaaaggctcgcgt

SEQ ID NO: 176169 - DNA, 50 bp, Artificial
  Synthetic oligonucleotide
ctcaatggtggtagaggcgacgcccagaatatcggcagcggtctgcgcca

SEQ ID NO: 176170 - DNA, 50 bp, Artificial
  Synthetic oligonucleotide
gcatccaccatcccttgggggtgatcattgacccaggaacggccatcccg

SEQ ID NO: 176171 - DNA, 50 bp, Artificial
  Synthetic oligonucleotide
tatagccctgttcacagcctcgacagagaaatcgctggaaaaacacaggg

SEQ ID NO: 176172 - DNA, 60 bp, Artificial
  Synthetic oligonucleotide
cggctctgttgaaatactgtgccagcggtaaacatctagacaggatggaagtatcagtgt

SEQ ID NO: 176173 - DNA, 50 bp, Artificial
  Synthetic oligonucleotide
acccccggcaatacaaacggcgtcagcgtaaccaatgccagcagccaacg

SEQ ID NO: 176174 - DNA, 50 bp, Artificial
  Synthetic oligonucleotide
aacgcaggggcttccgcgagggtgatttccgttgcgctttgcgcgtagaa

SEQ ID NO: 176175 - DNA, 50 bp, Artificial
  Synthetic oligonucleotide
cgcggagagacgcaccgactcagctaccgtgaattgtggcagcaggtgaa

SEQ ID NO: 176176 - DNA, 50 bp, Artificial
  Synthetic oligonucleotide
ttacaattaccctggtccagttcgccccgacaccccatgtcagatacgga

SEQ ID NO: 176177 - DNA, 50 bp, Artificial
  Synthetic oligonucleotide
ggtagcttatggggttaaatggtcacggacatcatgcggacggttccctg

SEQ ID NO: 176178 - DNA, 50 bp, Artificial
  Synthetic oligonucleotide
aacgcacgagccgcttgggaagcttataccgcagccagtttcgcgtcgaa

SEQ ID NO: 176179 - DNA, 50 bp, Artificial
  Synthetic oligonucleotide
ccttatgcgataagcattcttgttaaaaataccgaaccgaataatttatg

SEQ ID NO: 176180 - DNA, 50 bp, Artificial
  Synthetic oligonucleotide
ccgactgtaggttaccgggcaaacgccgtaaaatggcgtcaatgacgtca

SEQ ID NO: 176181 - DNA, 50 bp, Artificial
  Synthetic oligonucleotide
atctgaagtcaaactagacaacaggtgtctagtgccataatactatgagt

SEQ ID NO: 176182 - DNA, 50 bp, Artificial
  Synthetic oligonucleotide
cagacgacatggacataatgaaattgacgatccgtcaataacacagccgg

SEQ ID NO: 176183 - DNA, 60 bp, Artificial
  Synthetic oligonucleotide
cggctcacaagggatggacggacatactgtcttttgaatgggatgtatctcagccagccc

SEQ ID NO: 176184 - DNA, 50 bp, Artificial
  Synthetic oligonucleotide
ccaaaggcccgttacagcgcctggaaacttgggtgacgacagaaagcgcg

SEQ ID NO: 176185 - DNA, 50 bp, Artificial
  Synthetic oligonucleotide
aacgatggtgtctatcagcgccgagctgcccacttcgccggtaacgttgg

SEQ ID NO: 176186 - DNA, 50 bp, Artificial
  Synthetic oligonucleotide
cgcggctcaatacccagcgcagttaatcccccgccggtcagtgtggtcag

SEQ ID NO: 176187 - DNA, 50 bp, Artificial
  Synthetic oligonucleotide
ctaccactgccgacttgacccgcctggtaggtcaccttcgctgtgacggt

SEQ ID NO: 176188 - DNA, 50 bp, Artificial
  Synthetic oligonucleotide
tacggatggtggtaagccatgctaccgatcagaccggttgccgtggtgcc

SEQ ID NO: 176189 - DNA, 50 bp, Artificial
  Synthetic oligonucleotide
catcatattcagagctacggtaatccggtggagcagacttggcagaaggt

SEQ ID NO: 176190 - DNA, 50 bp, Artificial
  Synthetic oligonucleotide
aaccggctggatttgtctgccgcgccggatattccctggcctgaaatccc

SEQ ID NO: 176191 - DNA, 50 bp, Artificial
  Synthetic oligonucleotide
cccttcgagcgcggaagaaattacccctagcgcctggagtgcattgggga

SEQ ID NO: 176192 - DNA, 50 bp, Artificial
  Synthetic oligonucleotide
atgaatagcgaaccccagcaccagtaacggtgccacgacaaaccccggga

SEQ ID NO: 176193 - DNA, 50 bp, Artificial
  Synthetic oligonucleotide
gagtatctatgtgactctcaaggtaaggagatgctgtgacgacatattgt

SEQ ID NO: 176194 - DNA, 60 bp, Artificial
  Synthetic oligonucleotide
cggctacctcttcccgcagcgctttaatctccgaaatcagtgcctcagacaccgatgctt

SEQ ID NO: 176195 - DNA, 50 bp, Artificial
  Synthetic oligonucleotide
agcattcaggcattttgggggcagcgtgacaaaggttacgccgcgcttcc

SEQ ID NO: 176196 - DNA, 50 bp, Artificial
  Synthetic oligonucleotide
aaccggagtccccagccgtgcccagacgttaccgggttgagacacagact

SEQ ID NO: 176197 - DNA, 50 bp, Artificial
  Synthetic oligonucleotide
tcaggatggtgaagcaaccatttctcgaaagctgactcgctatcagtttg

SEQ ID NO: 176198 - DNA, 50 bp, Artificial
  Synthetic oligonucleotide
agcggcagtcccacttgccggtcggtggcattcccagcatagaccccaca

SEQ ID NO: 176199 - DNA, 50 bp, Artificial
  Synthetic oligonucleotide
agaatggcgaacttcttacccagtacgccgagtgacagccacaccgccgg

SEQ ID NO: 176200 - DNA, 50 bp, Artificial
  Synthetic oligonucleotide
ccaccatgagcaatcagtaactctgggggcgctatctgagtaaccgttat

SEQ ID NO: 176201 - DNA, 50 bp, Artificial
  Synthetic oligonucleotide
agcggcaagcaccattggtttaatccccggcccagagtatccgcaaaccc

SEQ ID NO: 176202 - DNA, 50 bp, Artificial
  Synthetic oligonucleotide
attcggcgagcacccgtagacaacgccgccgtaacttgaaaggcgaaggg

SEQ ID NO: 176203 - DNA, 50 bp, Artificial
  Synthetic oligonucleotide
tatcacccggctgtcgacctgaacgaagtcatggcgctctctgcgtggat

SEQ ID NO: 176204 - DNA, 50 bp, Artificial
  Synthetic oligonucleotide
agcggatcttcaccagcgtgcgaccggtggccttatagtcattgcccagc

SEQ ID NO: 176205 - DNA, 57 bp, Artificial
  Synthetic oligonucleotide
cggcgtttcatttcatcaggggggagcagataaccgtgatgaatgacggttttatcc

SEQ ID NO: 176206 - DNA, 50 bp, Artificial
  Synthetic oligonucleotide
agtgtgcccccgctggtcttctatgccaatcactgccgtttgagccaccg

SEQ ID NO: 176207 - DNA, 50 bp, Artificial
  Synthetic oligonucleotide
cggtgacttcccccgggtggatttcacattcaaggcttgctaccgcgggt

SEQ ID NO: 176208 - DNA, 50 bp, Artificial
  Synthetic oligonucleotide
gcacgttccagacgctctttgaactcctgatcgccctctttgaagtaacg

SEQ ID NO: 176209 - DNA, 50 bp, Artificial
  Synthetic oligonucleotide
ctaccagcgttacatttggtgaatcgggatggttcaaaatcgccactgtt

SEQ ID NO: 176210 - DNA, 50 bp, Artificial
  Synthetic oligonucleotide
attccctgttactgaccattctctccatttcccgcttttcactacagaaa

SEQ ID NO: 176211 - DNA, 50 bp, Artificial
  Synthetic oligonucleotide
attcgtacataccaccccacggaacctttcgatttcattatgatgacgtt

SEQ ID NO: 176212 - DNA, 50 bp, Artificial
  Synthetic oligonucleotide
cccagatgcacaatacgggataccagacgtgatttgtcccagtttgggcg

SEQ ID NO: 176213 - DNA, 50 bp, Artificial
  Synthetic oligonucleotide
cactgctcacgccagagtcggtggcggatatctcccgcaccattacgctg

SEQ ID NO: 176214 - DNA, 50 bp, Artificial
  Synthetic oligonucleotide
acccggcctgactttatccaggcactgccgcatttcgattccgtccgtga

SEQ ID NO: 176215 - DNA, 50 bp, Artificial
  Synthetic oligonucleotide
cccagattgtttaccggcctgccagcaaactcgcgcacggttaagccacc

SEQ ID NO: 176216 - DNA, 60 bp, Artificial
  Synthetic oligonucleotide
atgagattgaacttttgattgcgggcatttttgcggtctttatagtgtgtgaaatacaga

SEQ ID NO: 176217 - DNA, 54 bp, Artificial
  Synthetic oligonucleotide
cggcgtgtatatgtcgacggtaaccacagactttatccgtgcggcggacctttt

SEQ ID NO: 176218 - DNA, 50 bp, Artificial
  Synthetic oligonucleotide
agcgcttaatgagcagtgttcatcccgccacagtgcggcatgccccaaca

SEQ ID NO: 176219 - DNA, 50 bp, Artificial
  Synthetic oligonucleotide
agccagccattctttggcgccattgacgttcggcaccaattagtgcccct

SEQ ID NO: 176220 - DNA, 50 bp, Artificial
  Synthetic oligonucleotide
ttagtcccaaataaagtctcaaaagacatgctggaaagaccagtaggacc

SEQ ID NO: 176221 - DNA, 50 bp, Artificial
  Synthetic oligonucleotide
ggcataattccttcgattctaaaatctgattatgcttatcctcaggggca

SEQ ID NO: 176222 - DNA, 50 bp, Artificial
  Synthetic oligonucleotide
tacgcgtaatgaagaccactctctacgagctaaatagtgtttacgtatct

SEQ ID NO: 176223 - DNA, 50 bp, Artificial
  Synthetic oligonucleotide
agaagcgctccgaacgcagcttgcccgtttgcctgacatgtctaaacccc

SEQ ID NO: 176224 - DNA, 50 bp, Artificial
  Synthetic oligonucleotide
acgcgcgctactgacgatactccgccagtggataacccggacacggacta

SEQ ID NO: 176225 - DNA, 50 bp, Artificial
  Synthetic oligonucleotide
acccgacgtttaggaagccgcagcggggttagcggtaaccgatcacctga

SEQ ID NO: 176226 - DNA, 50 bp, Artificial
  Synthetic oligonucleotide
cagacggcacccatattcacggcgcatcacacggctgccgacaggggtcg

SEQ ID NO: 176227 - DNA, 50 bp, Artificial
  Synthetic oligonucleotide
acccgactgatgccctcgatctatcaacgcaccaaatttacgggttcgac

SEQ ID NO: 176228 - DNA, 58 bp, Artificial
  Synthetic oligonucleotide
cggcggcactctgtgccgggagaaccgctcctgcgtgggcgaatcggcggcgcgtacg

SEQ ID NO: 176229 - DNA, 50 bp, Artificial
  Synthetic oligonucleotide
cccacaggtacacctatcattaacgaagtggggttccttttatcacgcca

SEQ ID NO: 176230 - DNA, 50 bp, Artificial
  Synthetic oligonucleotide
cagggtcatccagaagtattatggggttttcccccccagaattaaagacc

SEQ ID NO: 176231 - DNA, 50 bp, Artificial
  Synthetic oligonucleotide
aacctcctgctcagtcgcaggtaaagccggggccacaacctcactggtgg

SEQ ID NO: 176232 - DNA, 50 bp, Artificial
  Synthetic oligonucleotide
acccgcagaaacggccaacgatgcagtagacgccaaaccgccggaggacg

SEQ ID NO: 176233 - DNA, 50 bp, Artificial
  Synthetic oligonucleotide
aacctacggcgtgttgctgggccttgattccgcgtatgccgacgactggc

SEQ ID NO: 176234 - DNA, 50 bp, Artificial
  Synthetic oligonucleotide
agcgggacattatgcagttctttcgcgcgcagttgtggggcgacagccag

SEQ ID NO: 176235 - DNA, 50 bp, Artificial
  Synthetic oligonucleotide
cgatccaacggtggctttgttacgcctgaactgtagcatctgctgggttg

SEQ ID NO: 176236 - DNA, 50 bp, Artificial
  Synthetic oligonucleotide
agttcacgcgcggagaacgaactggtttgcggcactgtcgcggtgggttg

SEQ ID NO: 176237 - DNA, 50 bp, Artificial
  Synthetic oligonucleotide
agaaggcttgtcactttccggcctgccaacgatacgagcagggacaccgg

SEQ ID NO: 176238 - DNA, 50 bp, Artificial
  Synthetic oligonucleotide
ctgaccgtctgcccggataaaaaccgtcggcgtctcagtgagcagggacg

SEQ ID NO: 176239 - DNA, 60 bp, Artificial
  Synthetic oligonucleotide
cggcggacatctgcgctgaaagccggagccattcacccggctgcatggctatgcagtccg

SEQ ID NO: 176240 - DNA, 50 bp, Artificial
  Synthetic oligonucleotide
aaccgttggtattggcctctcctgcggcagtcgacccttcgctggtagca

SEQ ID NO: 176241 - DNA, 50 bp, Artificial
  Synthetic oligonucleotide
acccgcagggcttagggccatttgggcgcgcatctaagtgacgatccgct

SEQ ID NO: 176242 - DNA, 50 bp, Artificial
  Synthetic oligonucleotide
gaccggagaaataagaaccgcttagtgaggtagcctgagtttaacggaca

SEQ ID NO: 176243 - DNA, 50 bp, Artificial
  Synthetic oligonucleotide
atcttttccgcttgccatcgcatgaaattactccttttcgggcaacgctc

SEQ ID NO: 176244 - DNA, 50 bp, Artificial
  Synthetic oligonucleotide
aaccggttcgcgtcacaccgggcatgttgagtgcagaagcctacggggta

SEQ ID NO: 176245 - DNA, 50 bp, Artificial
  Synthetic oligonucleotide
atgaaccctgtttgccgcgcactgactgcacgatgttgtacggcccgccc

SEQ ID NO: 176246 - DNA, 50 bp, Artificial
  Synthetic oligonucleotide
aaccggtgccatggcaagctgcaagcctcatcaaaggatccacccccgct

SEQ ID NO: 176247 - DNA, 50 bp, Artificial
  Synthetic oligonucleotide
atgaacgttcgtagctttgatacgtccctatatagagcgcggcaaatccg

SEQ ID NO: 176248 - DNA, 50 bp, Artificial
  Synthetic oligonucleotide
acccgcatctgggcgggcttattcgtgggtacggatttattctgcccgga

SEQ ID NO: 176249 - DNA, 50 bp, Artificial
  Synthetic oligonucleotide
gtattaacccgagcgcacccttgctgagcctgcggcaatttatcgccgcc

SEQ ID NO: 176250 - DNA, 60 bp, Artificial
  Synthetic oligonucleotide
cagtgtaacttttattgtgcatccgccgattcagccgcgcaaaatccgtcaaatatccca

SEQ ID NO: 176251 - DNA, 50 bp, Artificial
  Synthetic oligonucleotide
agccggactgatcactgtcgataagccgtccctgccgctcactggtggtc

SEQ ID NO: 176252 - DNA, 50 bp, Artificial
  Synthetic oligonucleotide
agccggaatacactggctgggacggccatctgtcgcgtcttaccacgcaa

SEQ ID NO: 176253 - DNA, 50 bp, Artificial
  Synthetic oligonucleotide
agatggaacgcagccgtaaaacgtgctggcattcgccgctggaatccgta

SEQ ID NO: 176254 - DNA, 50 bp, Artificial
  Synthetic oligonucleotide
acgcagctcattgctggccttacgcggcaccagtgaaccaaacagggaga

SEQ ID NO: 176255 - DNA, 50 bp, Artificial
  Synthetic oligonucleotide
tttgatatcaatgagcgacgcctccaggggacgccagggcacagcggaga

SEQ ID NO: 176256 - DNA, 50 bp, Artificial
  Synthetic oligonucleotide
gtaaaaggatatacggtaactcagttctcagagagtcgttcccgtagtgt

SEQ ID NO: 176257 - DNA, 50 bp, Artificial
  Synthetic oligonucleotide
aaaagctccagtaatcaatctccgggctataaacaggatggcgcattaag

SEQ ID NO: 176258 - DNA, 50 bp, Artificial
  Synthetic oligonucleotide
aaacggtctgacatggcctgacggcagctgcacgctcactgacgttgcgc

SEQ ID NO: 176259 - DNA, 50 bp, Artificial
  Synthetic oligonucleotide
aaacgggtaagcagtgacgccggacgtatcgcgagtcggggctcctggta

SEQ ID NO: 176260 - DNA, 50 bp, Artificial
  Synthetic oligonucleotide
cggacttaaagtcgttcttacatcggtaagccttccaggtgcccgatgga

SEQ ID NO: 176261 - DNA, 60 bp, Artificial
  Synthetic oligonucleotide
cggcgctttattcggttgcagcagcgtcattccctgttcggaacgcgtgaccaacagcgc

SEQ ID NO: 176262 - DNA, 49 bp, Artificial
  Synthetic oligonucleotide
aaacggctcttaaacccgtttagacgagctataaggggctttcgttcgt

SEQ ID NO: 176263 - DNA, 50 bp, Artificial
  Synthetic oligonucleotide
acctcgaaagcctgtgctggccctgtcatcacggcaaaacgtcacgcgaa

SEQ ID NO: 176264 - DNA, 50 bp, Artificial
  Synthetic oligonucleotide
acctcatgcacccacttgtatttacccgtcgggtttttgcggatttcagt

SEQ ID NO: 176265 - DNA, 50 bp, Artificial
  Synthetic oligonucleotide
acgcagcggatcgttacgccccgttcccgctaacgcctattcagcatgct

SEQ ID NO: 176266 - DNA, 50 bp, Artificial
  Synthetic oligonucleotide
gtcagcgccgaacggtcgtgtgggcagtataacaggagtcccgcacagtc

SEQ ID NO: 176267 - DNA, 50 bp, Artificial
  Synthetic oligonucleotide
agccgccagacgcggttcactgcccgcttccgccatttgccagccacggg

SEQ ID NO: 176268 - DNA, 50 bp, Artificial
  Synthetic oligonucleotide
cgggagtgtaattcgcacgtttccggatatttcgtgagaattgtgcttgt

SEQ ID NO: 176269 - DNA, 50 bp, Artificial
  Synthetic oligonucleotide
tatgaatttagccgctcacggtgcaatgcttgcaaagctacaacaataat

SEQ ID NO: 176270 - DNA, 50 bp, Artificial
  Synthetic oligonucleotide
aaacgaactggcgcatttcgtatgctggcccttcggtttcaggcgcgtga

SEQ ID NO: 176271 - DNA, 50 bp, Artificial
  Synthetic oligonucleotide
ggatgtcatgtttacggggcgcatcgatcaggcagatcctatgaaacagg

SEQ ID NO: 176272 - DNA, 56 bp, Artificial
  Synthetic oligonucleotide
cagttatggcaggtgaacggctatgaatggaccccggactatgccgggttaaccgc

SEQ ID NO: 176273 - DNA, 50 bp, Artificial
  Synthetic oligonucleotide
cggagccgcaaaggccagactcagcgccgcattacaaagggaatccgcat

SEQ ID NO: 176274 - DNA, 50 bp, Artificial
  Synthetic oligonucleotide
accggtgccgggtaacaccatcacatcgggccgggtgggaggagaaacgc

SEQ ID NO: 176275 - DNA, 50 bp, Artificial
  Synthetic oligonucleotide
agcaaacctgccaatgcggtcagcgtcgcagggtcaatagccgggcggta

SEQ ID NO: 176276 - DNA, 50 bp, Artificial
  Synthetic oligonucleotide
acgcagcgagaatatggcctgaccggggttaaggtcgtttccccacgcta

SEQ ID NO: 176277 - DNA, 50 bp, Artificial
  Synthetic oligonucleotide
tagcgcaccattcaaacgcccgctttattgcgcttcgtttgtgtcccgga

SEQ ID NO: 176278 - DNA, 50 bp, Artificial
  Synthetic oligonucleotide
attgtggccggtggagtggactatggcagcctgcgtagtcaggcacgcaa

SEQ ID NO: 176279 - DNA, 50 bp, Artificial
  Synthetic oligonucleotide
gatgaaaaccggtgcgcttaagcaacgcaagaatgccactgcgactatcc

SEQ ID NO: 176280 - DNA, 50 bp, Artificial
  Synthetic oligonucleotide
acgcagacggcaagcgatggtaaacgcatgacactccctcctccatgggc

SEQ ID NO: 176281 - DNA, 50 bp, Artificial
  Synthetic oligonucleotide
accgtatggtgaccagttggttcccggagcatgagcgtgcctctgccgtt

SEQ ID NO: 176282 - DNA, 50 bp, Artificial
  Synthetic oligonucleotide
aaagcggaaactgtatcacccgagagggcgggggaaagggtgctgcgtgc

SEQ ID NO: 176283 - DNA, 60 bp, Artificial
  Synthetic oligonucleotide
cggcgaacgttatatcgcgatatggcagcgggccgcttgtcttggcgaagtaatgccgct

SEQ ID NO: 176284 - DNA, 50 bp, Artificial
  Synthetic oligonucleotide
aaagcgcgcacgcagtcgctagcccgcgaggaaaaacctgaacgccgggt

SEQ ID NO: 176285 - DNA, 50 bp, Artificial
  Synthetic oligonucleotide
accggcttggtgtcccaacgcacgagccgcttgggaagcttataccgcag

SEQ ID NO: 176286 - DNA, 50 bp, Artificial
  Synthetic oligonucleotide
accgggaaccacggaaagcagcggggaacccgtttcggcatattgaccag

SEQ ID NO: 176287 - DNA, 50 bp, Artificial
  Synthetic oligonucleotide
accgggaagtcggagcaaagcgtgcgcaaatggatagagcgccgcctctt

SEQ ID NO: 176288 - DNA, 50 bp, Artificial
  Synthetic oligonucleotide
accgggagatgactggctcccgccaatgagcgctcgataacctgcatcgc

SEQ ID NO: 176289 - DNA, 50 bp, Artificial
  Synthetic oligonucleotide
tttgcgcatcgagataacatctgtccgatatcgccttacgtgcctcggct

SEQ ID NO: 176290 - DNA, 50 bp, Artificial
  Synthetic oligonucleotide
agccggtacctggcacaatgccccacgcacccatagcggccaaaccgcgc

SEQ ID NO: 176291 - DNA, 50 bp, Artificial
  Synthetic oligonucleotide
gatgggatgcacctccaacgctcgacggtatgacggggcatgctggcgca

SEQ ID NO: 176292 - DNA, 50 bp, Artificial
  Synthetic oligonucleotide
accgggcagcgaggcgctatcccgtttcacggctgatcgacacgcttttt

SEQ ID NO: 176293 - DNA, 50 bp, Artificial
  Synthetic oligonucleotide
accgggggcggaaaacagcgggatatttaccaccggcagttgcggggaga

SEQ ID NO: 176294 - DNA, 60 bp, Artificial
  Synthetic oligonucleotide
cggccctttctaaagcccgcagatctccttcttcaagatgcatataatgaatcctttatg

SEQ ID NO: 176295 - DNA, 50 bp, Artificial
  Synthetic oligonucleotide
agcccgaccataaccacccgaggtagctggtattaccgaacggggcctct

SEQ ID NO: 176296 - DNA, 50 bp, Artificial
  Synthetic oligonucleotide
ttgtgatttttatcgtaccggcaaatctcggatcaccgctcacaacaata

SEQ ID NO: 176297 - DNA, 50 bp, Artificial
  Synthetic oligonucleotide
cagttctttcgcgcgcagttgtggggcgacagccagtgacgccacaatcg

SEQ ID NO: 176298 - DNA, 50 bp, Artificial
  Synthetic oligonucleotide
attgagcagatgggtaaacatatccacaggtgctatggcgatgcccacac

SEQ ID NO: 176299 - DNA, 50 bp, Artificial
  Synthetic oligonucleotide
agatgccctccaaactggcggcgacctaaccgcttttatgccggttcccg

SEQ ID NO: 176300 - DNA, 50 bp, Artificial
  Synthetic oligonucleotide
tattggaggtggcacaaaccacgacgcttgatgcgatacgcgattggcta

SEQ ID NO: 176301 - DNA, 50 bp, Artificial
  Synthetic oligonucleotide
cataatctaaacgtgacggcacacaatgaacgacatagcctatatgcgat

SEQ ID NO: 176302 - DNA, 50 bp, Artificial
  Synthetic oligonucleotide
agccggcgcggttaaaggccgtatcaagttcggaacgaccggtaaagcca

SEQ ID NO: 176303 - DNA, 50 bp, Artificial
  Synthetic oligonucleotide
cgacgaacaatccatgccgcccctggtgacatcaaggctcggtcgcgaat

SEQ ID NO: 176304 - DNA, 50 bp, Artificial
  Synthetic oligonucleotide
cggacaggggcaaaggcgcttctgccatgaataggggattgcccggtagt

SEQ ID NO: 176305 - DNA, 57 bp, Artificial
  Synthetic oligonucleotide
cggcagattaattaagttgcgtgcattcttttcacgttataatacaaacaagaacac

SEQ ID NO: 176306 - DNA, 50 bp, Artificial
  Synthetic oligonucleotide
tattgcacactacaatttatgggtttgaaggctgcacgttccgtaaccac

SEQ ID NO: 176307 - DNA, 50 bp, Artificial
  Synthetic oligonucleotide
cccctggagagacgcttcacggccgctcacgattttgggtattccagcct

SEQ ID NO: 176308 - DNA, 50 bp, Artificial
  Synthetic oligonucleotide
cagagactggcagcgcataatcgagccgtgtggcaccagaaaaccgtggc

SEQ ID NO: 176309 - DNA, 50 bp, Artificial
  Synthetic oligonucleotide
aaacttcacgcgtccgccccactgggagaccggccagttataccagcggt

SEQ ID NO: 176310 - DNA, 50 bp, Artificial
  Synthetic oligonucleotide
aaactggcggggctgaaaccccgatatcgactgcgggtggggagttatcg

SEQ ID NO: 176311 - DNA, 50 bp, Artificial
  Synthetic oligonucleotide
aaactgcggtctgaaagcgcccaccgcgaataatgtaatgcgtcatttgc

SEQ ID NO: 176312 - DNA, 50 bp, Artificial
  Synthetic oligonucleotide
tagcagcggtgttgcgggatcaacaaaggccccgggctgacacggtatat

SEQ ID NO: 176313 - DNA, 50 bp, Artificial
  Synthetic oligonucleotide
agatgcgtgctgccgagcgtaccaagtggcaccccgttgcggagtttgat

SEQ ID NO: 176314 - DNA, 49 bp, Artificial
  Synthetic oligonucleotide
tttctggctggttttcgggtggtttgttgccttgttttaccggtttccc

SEQ ID NO: 176315 - DNA, 50 bp, Artificial
  Synthetic oligonucleotide
gtcaatcgctgccccctcgcggtcaacgtcaaaaaccagccagaactgcg

SEQ ID NO: 176316 - DNA, 55 bp, Artificial
  Synthetic oligonucleotide
cagttgggtaaacctttaacgtcctggaaagacatggcaccacatgaaaaagcgc

SEQ ID NO: 176317 - DNA, 50 bp, Artificial
  Synthetic oligonucleotide
ccccgacgtcaacacccctcatatcgagcacgtggtggaggttccggttt

SEQ ID NO: 176318 - DNA, 50 bp, Artificial
  Synthetic oligonucleotide
cccaaacttgctgctatttcagcgcgtgttggtggcatgcccgtctgcga

SEQ ID NO: 176319 - DNA, 50 bp, Artificial
  Synthetic oligonucleotide
agccctttattcaaactacagcgatgcagtttcttacattcaagcgtacc

SEQ ID NO: 176320 - DNA, 50 bp, Artificial
  Synthetic oligonucleotide
attgggcgcaaaccccttatgccaccagatgaacggggtgccccaagatt

SEQ ID NO: 176321 - DNA, 50 bp, Artificial
  Synthetic oligonucleotide
aaaatggcgttcggcgtggcttctgaaccagtacccgccgtggtagggat

SEQ ID NO: 176322 - DNA, 50 bp, Artificial
  Synthetic oligonucleotide
ggacaccgggaagtcctgtttagcgcccctatagcgacagtgcgcggcta

SEQ ID NO: 176323 - DNA, 50 bp, Artificial
  Synthetic oligonucleotide
gtacaaatgccttaagtccggcatattgcgcatcagaacccagctgatat

SEQ ID NO: 176324 - DNA, 50 bp, Artificial
  Synthetic oligonucleotide
taggcagaggcggcgtcacactgtgtcagaacctactgcgactgattaac

SEQ ID NO: 176325 - DNA, 50 bp, Artificial
  Synthetic oligonucleotide
ccccccacttcaggcttcgcatcgacatgattgctatccgttaacacaat

SEQ ID NO: 176326 - DNA, 50 bp, Artificial
  Synthetic oligonucleotide
accgttcaggtttgcgccgtgatttggcagccctgcgttgtaggtcggat

SEQ ID NO: 176327 - DNA, 60 bp, Artificial
  Synthetic oligonucleotide
atgagcaataatggcctgttcatgctggtccataccggtcatacgaggagcagtcccctg

SEQ ID NO: 176328 - DNA, 60 bp, Artificial
  Synthetic oligonucleotide
cggcacccgtccatacccgaccgctttcactcatcactggtagctctgactcacggctca

SEQ ID NO: 176329 - DNA, 50 bp, Artificial
  Synthetic oligonucleotide
cgagcctaattgtggtttctgcgtacagcaatcacgtatccttgaaaact

SEQ ID NO: 176330 - DNA, 50 bp, Artificial
  Synthetic oligonucleotide
taggcctcctgaatggtaaaattgcggcgttatccctgaaaagggtgcgt

SEQ ID NO: 176331 - DNA, 50 bp, Artificial
  Synthetic oligonucleotide
taggcgactcataaccgcagaattcgcagcagtgtccactctggcgtgcg

SEQ ID NO: 176332 - DNA, 50 bp, Artificial
  Synthetic oligonucleotide
acgatgccaaaccctgccatgagtacaatcagggcggagcccccgtagct

SEQ ID NO: 176333 - DNA, 50 bp, Artificial
  Synthetic oligonucleotide
accgtggtcgtagacctcgcaccgcctaatccagcatgcactgtcgctga

SEQ ID NO: 176334 - DNA, 50 bp, Artificial
  Synthetic oligonucleotide
aaaatcgggagcgtgtaatcgtctctggatacctgctctaacgcctccac

SEQ ID NO: 176335 - DNA, 50 bp, Artificial
  Synthetic oligonucleotide
tttcgataaacgtgcttggcatgcgggagtctctcagtatcaggggcgtg

SEQ ID NO: 176336 - DNA, 50 bp, Artificial
  Synthetic oligonucleotide
aaaatcgccgcctctcgggcgcactattgggtgaaccggaatgcccacgc

SEQ ID NO: 176337 - DNA, 50 bp, Artificial
  Synthetic oligonucleotide
attggcggttgcagaccgtgaaatgccgggttatggcgagcagatgcgcc

SEQ ID NO: 176338 - DNA, 50 bp, Artificial
  Synthetic oligonucleotide
tatggaccgcatgaccatgaacggtggtcgatgggtgacgtttaactggg

SEQ ID NO: 176339 - DNA, 56 bp, Artificial
  Synthetic oligonucleotide
cggatttgcctaattatcatacctacacatttaaaccaggataaccgtcacctgga

SEQ ID NO: 176340 - DNA, 50 bp, Artificial
  Synthetic oligonucleotide
attggccacgcattcgcaccttcacggttagtcaggtcttgtgcaaagga

SEQ ID NO: 176341 - DNA, 50 bp, Artificial
  Synthetic oligonucleotide
agcccggcgtctgatgctgaacgaacaccgggatgtggcaaccgcagcct

SEQ ID NO: 176342 - DNA, 50 bp, Artificial
  Synthetic oligonucleotide
ctccctgatattcgccactcggttgaaagtggcggttcagctggttctga

SEQ ID NO: 176343 - DNA, 50 bp, Artificial
  Synthetic oligonucleotide
agcacccgtgatggctgggttgccattaattgccggtacggacgcatccc

SEQ ID NO: 176344 - DNA, 50 bp, Artificial
  Synthetic oligonucleotide
agcactaggggtgccgataccggaacgggccatgaatacgttgacggacg

SEQ ID NO: 176345 - DNA, 50 bp, Artificial
  Synthetic oligonucleotide
agcactacctcagcctggatgcggcaccccatttcaccggtgcgcgattt

SEQ ID NO: 176346 - DNA, 50 bp, Artificial
  Synthetic oligonucleotide
agcaacgtcgttacgaggttaccgagcccaaccgcataggagcgctgcga

SEQ ID NO: 176347 - DNA, 50 bp, Artificial
  Synthetic oligonucleotide
ctatccgctctttggatgcatatcctgtaaactcagaacatcaggactta

SEQ ID NO: 176348 - DNA, 50 bp, Artificial
  Synthetic oligonucleotide
aaaccgttaaccgccgggccaataacgcggcgtcattcccaccatgctat

SEQ ID NO: 176349 - DNA, 50 bp, Artificial
  Synthetic oligonucleotide
agcaacttaatgtctatctctattatcggtatgatatcgggtcgaattac

SEQ ID NO: 176350 - DNA, 60 bp, Artificial
  Synthetic oligonucleotide
cagtttggacgtgatgtatatccacatatctttatcgaatatggttgcggatccccatct

SEQ ID NO: 176351 - DNA, 50 bp, Artificial
  Synthetic oligonucleotide
ccccagaatgtgtcccgcagtatgaccttcctcactcgcccccgtcccca

SEQ ID NO: 176352 - DNA, 50 bp, Artificial
  Synthetic oligonucleotide
aaaccctttccgccgttaaacgcgccgcaggctgacaactccacccgcga

SEQ ID NO: 176353 - DNA, 50 bp, Artificial
  Synthetic oligonucleotide
aaacccgcccgctttaaggcatcacagatacccctggcactcacaccccg

SEQ ID NO: 176354 - DNA, 50 bp, Artificial
  Synthetic oligonucleotide
gatagcgtgcaaagagatcaaccagtgcatagctgccctgacgggcgcgc

SEQ ID NO: 176355 - DNA, 50 bp, Artificial
  Synthetic oligonucleotide
cgggagctacggtgttattaacgtcagtctgttcctcaatacctcatcca

SEQ ID NO: 176356 - DNA, 50 bp, Artificial
  Synthetic oligonucleotide
agccgcaacccgaaacacaacgaacgccgctgtaagtcggccactctcag

SEQ ID NO: 176357 - DNA, 50 bp, Artificial
  Synthetic oligonucleotide
ccccggtggcgagtcgaatgcagtttgtatggcccgccatcttcagacgg

SEQ ID NO: 176358 - DNA, 50 bp, Artificial
  Synthetic oligonucleotide
agccgagccgtgatgagcatgcagcctgtcgcgaaaatcccagggggtga

SEQ ID NO: 176359 - DNA, 50 bp, Artificial
  Synthetic oligonucleotide
aaacagctttgcggtaatgcctgggcgccagattttcacggctcgctcct

SEQ ID NO: 176360 - DNA, 50 bp, Artificial
  Synthetic oligonucleotide
aaacagcacgccggaaattccctcatcccagcgggaaggcggatcccagt

SEQ ID NO: 176361 - DNA, 51 bp, Artificial
  Synthetic oligonucleotide
ccggcggcttcccgcgcttcttttaaccgtttcggcaccatagacccaccc

SEQ ID NO: 176362 - DNA, 50 bp, Artificial
  Synthetic oligonucleotide
atgttctcatgtttaacggcataaccactcatgcttacagctacaaccat

SEQ ID NO: 176363 - DNA, 50 bp, Artificial
  Synthetic oligonucleotide
accgtcgcggccccggcgtgttgcaggagtatcgcgatttgttcaagttg

SEQ ID NO: 176364 - DNA, 50 bp, Artificial
  Synthetic oligonucleotide
gagcacaatggtgctgcatgcgctttttcactggccggacaatcgggcac

SEQ ID NO: 176365 - DNA, 50 bp, Artificial
  Synthetic oligonucleotide
agtcatggagttttcgcggattgtctgatccgtctggcgttcccagtctc

SEQ ID NO: 176366 - DNA, 50 bp, Artificial
  Synthetic oligonucleotide
attaaaatgctaccgggtttcctatcccggtaggcaggctgacacatata

SEQ ID NO: 176367 - DNA, 50 bp, Artificial
  Synthetic oligonucleotide
agcaatggcggccgtattacgacatcgggggcgggttcccatggctttac

SEQ ID NO: 176368 - DNA, 50 bp, Artificial
  Synthetic oligonucleotide
acgcacggtgagccgctgacgatttcacgcccgcagccattatggtccga

SEQ ID NO: 176369 - DNA, 50 bp, Artificial
  Synthetic oligonucleotide
agcccgcactccagccaacataaggcacattgcgctcacgcactgcccgc

SEQ ID NO: 176370 - DNA, 50 bp, Artificial
  Synthetic oligonucleotide
agcagagtcaggctagcggggcggttggcttaacgtgccttcccgagtga

SEQ ID NO: 176371 - DNA, 50 bp, Artificial
  Synthetic oligonucleotide
cggatccagacttccccagccaaacagcgtcgggttggcatgcatatgcc

SEQ ID NO: 176372 - DNA, 60 bp, Artificial
  Synthetic oligonucleotide
ccggcgcaatggcgctaaacatccgtggtctacagggaccacagatgttgcgtaatagcc

SEQ ID NO: 176373 - DNA, 50 bp, Artificial
  Synthetic oligonucleotide
ccaaaacgataaactgttcctggatcatcggcattaatgcattccgcgac

SEQ ID NO: 176374 - DNA, 50 bp, Artificial
  Synthetic oligonucleotide
acgcaatggggagccggggcggtagaccaaagcaatggtgcgctgaggaa

SEQ ID NO: 176375 - DNA, 50 bp, Artificial
  Synthetic oligonucleotide
attaagcgcgaacatcgcagtgtgggccgttgtagtcagccgcgacacca

SEQ ID NO: 176376 - DNA, 50 bp, Artificial
  Synthetic oligonucleotide
tttcagcggtgcgtacaattaagggattatggtaaatcccttactgtctg

SEQ ID NO: 176377 - DNA, 50 bp, Artificial
  Synthetic oligonucleotide
cagtctgttaactagatgcgttagccacatgataagtatatttcgtcctg

SEQ ID NO: 176378 - DNA, 50 bp, Artificial
  Synthetic oligonucleotide
accgtgactgcctgagcgatcctgcacaaatttcgccgggggaagcggct

SEQ ID NO: 176379 - DNA, 50 bp, Artificial
  Synthetic oligonucleotide
cgggtcaacagcggaagggcgcaaaacaggcttgcaagcgttaaccgtcg

SEQ ID NO: 176380 - DNA, 50 bp, Artificial
  Synthetic oligonucleotide
tagaaaccagatatgccgcgttaagacaacgcgccacggccatagcaaaa

SEQ ID NO: 176381 - DNA, 50 bp, Artificial
  Synthetic oligonucleotide
ctcgtaattcgtcagcaccagcggaaatagaaccccttattgcagaggcg

SEQ ID NO: 176382 - DNA, 50 bp, Artificial
  Synthetic oligonucleotide
tcacaggcgataagcagctctccgcgtcgctatcccagctggcaacaact

SEQ ID NO: 176383 - DNA, 53 bp, Artificial
  Synthetic oligonucleotide
ccggattcgtaagccaaacttgccgtaacctccctgtatccgtccttcagccg

SEQ ID NO: 176384 - DNA, 50 bp, Artificial
  Synthetic oligonucleotide
cgctggattgccccgccagtagcgctggctcagcattggtgtaaatcgtt

SEQ ID NO: 176385 - DNA, 50 bp, Artificial
  Synthetic oligonucleotide
acgcccggagatcccgtttgtcgttaggcgtgagcggaaaggcatccaga

SEQ ID NO: 176386 - DNA, 50 bp, Artificial
  Synthetic oligonucleotide
agtctgcgttgccgaagggataaccggacgcccattcccgtcccctatca

SEQ ID NO: 176387 - DNA, 50 bp, Artificial
  Synthetic oligonucleotide
agcctgtccgcagtcgaacgatttttacccgaccggaaaactggggcgga

SEQ ID NO: 176388 - DNA, 50 bp, Artificial
  Synthetic oligonucleotide
aaaacgcggcggcagttggtaatccaggcgcaccgcaaaaccgaagtggg

SEQ ID NO: 176389 - DNA, 50 bp, Artificial
  Synthetic oligonucleotide
agaggagttagtaggtcgggcggtgcttgcattaaccacgccggaggggg

SEQ ID NO: 176390 - DNA, 50 bp, Artificial
  Synthetic oligonucleotide
ttgaggctacggggtctgatatgattagtacagttgaggccgctcttatt

SEQ ID NO: 176391 - DNA, 50 bp, Artificial
  Synthetic oligonucleotide
aggttgatccacagccggtgcgggtggcacagttacgggtaccgcctgcc

SEQ ID NO: 176392 - DNA, 50 bp, Artificial
  Synthetic oligonucleotide
ttttaaagttaacgcctccggtgaaatttatgacgcgtctttcctgaaac

SEQ ID NO: 176393 - DNA, 50 bp, Artificial
  Synthetic oligonucleotide
atggatgcagagacgccgccaataacgaggcaggcgatggcaccaactct

SEQ ID NO: 176394 - DNA, 55 bp, Artificial
  Synthetic oligonucleotide
ccggatacgagactttcttatcgtatccggctatctctattaacgccataaaccc

SEQ ID NO: 176395 - DNA, 50 bp, Artificial
  Synthetic oligonucleotide
ggttcaccggggccggtaggtgcgggacgtgcggtgcaacgacgcaatgc

SEQ ID NO: 176396 - DNA, 50 bp, Artificial
  Synthetic oligonucleotide
atggatgccggtcgccgttcaggcttctgggcaaccctgttcggtggttg

SEQ ID NO: 176397 - DNA, 50 bp, Artificial
  Synthetic oligonucleotide
accgccgggtaaaaacgaagcgcgtagccgcctcctaaggaccgtgccgg

SEQ ID NO: 176398 - DNA, 50 bp, Artificial
  Synthetic oligonucleotide
atttgggccgccaggaaatacgcaacaccccgtggtcggtacaaacggtt

SEQ ID NO: 176399 - DNA, 50 bp, Artificial
  Synthetic oligonucleotide
atggcacctgacgctgagctgactttgccgccgtgggtatggggatcgtc

SEQ ID NO: 176400 - DNA, 50 bp, Artificial
  Synthetic oligonucleotide
cccggaagccgatacagcaccctcgccacaccatcaaacaaccgggccac

SEQ ID NO: 176401 - DNA, 50 bp, Artificial
  Synthetic oligonucleotide
catacgtagggcggttgccactcgcggtggttgcacggcgaatagccatg

SEQ ID NO: 176402 - DNA, 50 bp, Artificial
  Synthetic oligonucleotide
agagggctgcgactgggattgcaggttgagattcgcctcgcgactggcct

SEQ ID NO: 176403 - DNA, 50 bp, Artificial
  Synthetic oligonucleotide
gaggcgcccgctttacgccagctgatgagctgtgactcatcccggcctga

SEQ ID NO: 176404 - DNA, 50 bp, Artificial
  Synthetic oligonucleotide
tcacacccggcatggcgtacttttcatacaatccgcactgatgccgcatg

SEQ ID NO: 176405 - DNA, 55 bp, Artificial
  Synthetic oligonucleotide
ccaggtgggaccgtggtcccaattaccaacgttggcattggatatccaggtggga

SEQ ID NO: 176406 - DNA, 50 bp, Artificial
  Synthetic oligonucleotide
cccgctttaaggcatcacagatacccctggcactcacacccatcccgcct

SEQ ID NO: 176407 - DNA, 50 bp, Artificial
  Synthetic oligonucleotide
ccaatatccatttgagacattatccaacccccgaatatatctccgtttgc

SEQ ID NO: 176408 - DNA, 50 bp, Artificial
  Synthetic oligonucleotide
accgcgcaccagctgtaacggcgtgaatgagggcgatcccaaagccaatg

SEQ ID NO: 176409 - DNA, 50 bp, Artificial
  Synthetic oligonucleotide
aaaacggtgcgtttgccatttcgtggcccggtggataataccgtgcgcga

SEQ ID NO: 176410 - DNA, 50 bp, Artificial
  Synthetic oligonucleotide
accgcgcacctcgttgggttgcgctggggacaatgggaacgacgctgatc

SEQ ID NO: 176411 - DNA, 50 bp, Artificial
  Synthetic oligonucleotide
acgcccatacggcgatcgggggcataggccagttctttacggcccaccag

SEQ ID NO: 176412 - DNA, 50 bp, Artificial
  Synthetic oligonucleotide
acgccgaggccaaatcgggtgctgggttatactcggcccgtccggtgata

SEQ ID NO: 176413 - DNA, 50 bp, Artificial
  Synthetic oligonucleotide
agagacaggctgcagcgcacgtatggcagggccaggggagaatgcgggca

SEQ ID NO: 176414 - DNA, 50 bp, Artificial
  Synthetic oligonucleotide
aaaaccttccgggcttttgaaatcaccctgcacgcgcttggggccaagcc

SEQ ID NO: 176415 - DNA, 50 bp, Artificial
  Synthetic oligonucleotide
gtcggagtctttttcacgggcatactttccctcacgcgcaatataatcgg

SEQ ID NO: 176416 - DNA, 59 bp, Artificial
  Synthetic oligonucleotide
ccggagtgagtttaaaaattcctggctgtgaaactgttgaatgcgttgttgcacatcac

SEQ ID NO: 176417 - DNA, 50 bp, Artificial
  Synthetic oligonucleotide
cccggtctgcctatcctgccgaacggtgtcttgctgcttgcgctgcaaac

SEQ ID NO: 176418 - DNA, 50 bp, Artificial
  Synthetic oligonucleotide
ctcagtttggcgactcaggagaagactaacggggcccacttaaaccgtat

SEQ ID NO: 176419 - DNA, 50 bp, Artificial
  Synthetic oligonucleotide
ttctgttacgggaagccaccctgatgttgagagtgaaatccagataagcc

SEQ ID NO: 176420 - DNA, 50 bp, Artificial
  Synthetic oligonucleotide
agtgagcagggtaacggtcactgtgttcccgcgtttagcgtggcagccgt

SEQ ID NO: 176421 - DNA, 50 bp, Artificial
  Synthetic oligonucleotide
cggcccacactgtaagcggcgccacgccagcaagctgccacgttgctcat

SEQ ID NO: 176422 - DNA, 50 bp, Artificial
  Synthetic oligonucleotide
acgccctttccaccggtgactaagcaaccggtccctgtgacaccgtcact

SEQ ID NO: 176423 - DNA, 50 bp, Artificial
  Synthetic oligonucleotide
tcaccgctgcttaacgcattgcgacacgccggtttttcacgggtgccgca

SEQ ID NO: 176424 - DNA, 50 bp, Artificial
  Synthetic oligonucleotide
agagactggcgctggcagggaggctttggtttgaccgaagacagtccggg

SEQ ID NO: 176425 - DNA, 50 bp, Artificial
  Synthetic oligonucleotide
cccgggtttaacagatagctgcggcttggctggccacgtttgcccttcat

SEQ ID NO: 176426 - DNA, 50 bp, Artificial
  Synthetic oligonucleotide
tagttgctggtagttacgccattatcccaggaaccggtatatttcaggct

SEQ ID NO: 176427 - DNA, 58 bp, Artificial
  Synthetic oligonucleotide
ccggagacttcctgccagatagtcatggctccccggtgaaactccctgcgtaaagcga

SEQ ID NO: 176428 - DNA, 50 bp, Artificial
  Synthetic oligonucleotide
cagacaatacagcaacggcgacgtcataacccactcgctgtgaattacca

SEQ ID NO: 176429 - DNA, 50 bp, Artificial
  Synthetic oligonucleotide
attttcgccagcagggggtggttgaaggaagtggtgtaatgctgcggggg

SEQ ID NO: 176430 - DNA, 50 bp, Artificial
  Synthetic oligonucleotide
agcgacacgctgggcaaaggtcactggtacgccctcgaccagaatgcgta

SEQ ID NO: 176431 - DNA, 50 bp, Artificial
  Synthetic oligonucleotide
accgcagctcgcgctacctgttgatactgctcgtcacgggctacccgtta

SEQ ID NO: 176432 - DNA, 50 bp, Artificial
  Synthetic oligonucleotide
ggtgtctagctagaatagcacgaattggagagacgagagctaacttagcc

SEQ ID NO: 176433 - DNA, 50 bp, Artificial
  Synthetic oligonucleotide
agagatggcagcaggcctgacacgctctaccaggtgaatgcgggaacctt

SEQ ID NO: 176434 - DNA, 50 bp, Artificial
  Synthetic oligonucleotide
attttacgactaacggcccacactgtaagcggcgccacgccagcaagctg

SEQ ID NO: 176435 - DNA, 50 bp, Artificial
  Synthetic oligonucleotide
gactgactcatagcctagaagttgcccagatagcccgaagcatcgcatcc

SEQ ID NO: 176436 - DNA, 50 bp, Artificial
  Synthetic oligonucleotide
agagcacggtaggcggtgcgggcaaaattgcaggcttcctgcgaaatgtg

SEQ ID NO: 176437 - DNA, 50 bp, Artificial
  Synthetic oligonucleotide
agtgacggtgtcacatacggcgcagagggctgagtatgcgcttcgctgag

SEQ ID NO: 176438 - DNA, 57 bp, Artificial
  Synthetic oligonucleotide
atgaggcggcattaccgtctcatcgacctgtatgttttgggtagacccgaattagac

SEQ ID NO: 176439 - DNA, 54 bp, Artificial
  Synthetic oligonucleotide
ccagtacctcctcgtaataacgggagccgccaagatatacctaacgatcccgat

SEQ ID NO: 176440 - DNA, 50 bp, Artificial
  Synthetic oligonucleotide
catagagccggacgtgtcgagtagcagatatacgggtaagcgtctcaaat

SEQ ID NO: 176441 - DNA, 50 bp, Artificial
  Synthetic oligonucleotide
agagcgcgataattacggttactggactcacccgttgtacgaacagtttt

SEQ ID NO: 176442 - DNA, 50 bp, Artificial
  Synthetic oligonucleotide
acgccctgcccagaggcggatggcgtagtgggtatggagttcaatggtta

SEQ ID NO: 176443 - DNA, 50 bp, Artificial
  Synthetic oligonucleotide
ttttacagcggcgaaatgtcctggggtgcgctgaatgatttctcgcttta

SEQ ID NO: 176444 - DNA, 50 bp, Artificial
  Synthetic oligonucleotide
gtcgccataagacacccctggagtaatcaaacagttatcccgggattata

SEQ ID NO: 176445 - DNA, 50 bp, Artificial
  Synthetic oligonucleotide
agtgacgctcgggcgctttgtcaggcattagacgcggcaggagcacgtta

SEQ ID NO: 176446 - DNA, 50 bp, Artificial
  Synthetic oligonucleotide
tttgggtccaggattgtcgggattcgttgcttatacggctggaatggctg

SEQ ID NO: 176447 - DNA, 50 bp, Artificial
  Synthetic oligonucleotide
acgacctcaagccccataccggcggatccattacggttggcactggcgga

SEQ ID NO: 176448 - DNA, 50 bp, Artificial
  Synthetic oligonucleotide
acctgagcacgtaccgcggggctatgcacctcattgcaggccgttcttca

SEQ ID NO: 176449 - DNA, 50 bp, Artificial
  Synthetic oligonucleotide
atggtttgtaaggccagcaccagttgcgaagcggccacaatcgggtctgc

SEQ ID NO: 176450 - DNA, 60 bp, Artificial
  Synthetic oligonucleotide
ccggacagagtgcgcgccaacgcattctggtcgctactttaaacttaagtcgctgatata

SEQ ID NO: 176451 - DNA, 50 bp, Artificial
  Synthetic oligonucleotide
ttggcgcctgtaacgagctggtgactgaaaacctcagcccgattaccaaa

SEQ ID NO: 176452 - DNA, 50 bp, Artificial
  Synthetic oligonucleotide
tttggcctggaagttaattatcggattaccctgatggcgggagtcaatcc

SEQ ID NO: 176453 - DNA, 50 bp, Artificial
  Synthetic oligonucleotide
accggatgcaacccagttcgcttcaatatgcccacgacaaccgcgtgcga

SEQ ID NO: 176454 - DNA, 50 bp, Artificial
  Synthetic oligonucleotide
agcagccgtgatccacaggcgagcaccgttcagtgcaatacccgtcaata

SEQ ID NO: 176455 - DNA, 50 bp, Artificial
  Synthetic oligonucleotide
agtcggtgttccggatgcataagctgcgcgtaccatgccttctcctccgg

SEQ ID NO: 176456 - DNA, 50 bp, Artificial
  Synthetic oligonucleotide
agccgtggctgagttattctcaggttttgcctgcaatcgcgcagccggac

SEQ ID NO: 176457 - DNA, 50 bp, Artificial
  Synthetic oligonucleotide
gtccaggggcagcgtgcttgcagggctatccaacggccagcatgtgccag

SEQ ID NO: 176458 - DNA, 50 bp, Artificial
  Synthetic oligonucleotide
gatacagtataatcgacgagaaatgccgcctgattcttacgctgcagtac

SEQ ID NO: 176459 - DNA, 50 bp, Artificial
  Synthetic oligonucleotide
tagcaacaaaacgacgcttgtgtacctgccgtgttaattcgaggaaccat

SEQ ID NO: 176460 - DNA, 50 bp, Artificial
  Synthetic oligonucleotide
acgcatgacagcagggcgtgcggatacggtggcaaaccagcgggtaaggt

SEQ ID NO: 176461 - DNA, 57 bp, Artificial
  Synthetic oligonucleotide
ccggaacgaagcgcggaggctggcacagtcgagagattccgcggttaagaagttcaa

SEQ ID NO: 176462 - DNA, 50 bp, Artificial
  Synthetic oligonucleotide
gatacagtccgcttcgggggccacgcggagttcacacagggttccaccct

SEQ ID NO: 176463 - DNA, 50 bp, Artificial
  Synthetic oligonucleotide
ggtttactccacaaaaccggcgtgtacgaaaggctgatggttccaggcgt

SEQ ID NO: 176464 - DNA, 50 bp, Artificial
  Synthetic oligonucleotide
cggaaattccctcatcccagcgggaaggcggatcccagttagcggcggtg

SEQ ID NO: 176465 - DNA, 50 bp, Artificial
  Synthetic oligonucleotide
accggccaccgtcatccacgcgtcatcgcggcagccagagagcaactgga

SEQ ID NO: 176466 - DNA, 50 bp, Artificial
  Synthetic oligonucleotide
agatcgcaattttacaatagagtcatagatcggtaatcctgaatgcaaca

SEQ ID NO: 176467 - DNA, 50 bp, Artificial
  Synthetic oligonucleotide
cgaggcgttgtgaagcagtctgataggcgtgccggtagctgaaggccgat

SEQ ID NO: 176468 - DNA, 50 bp, Artificial
  Synthetic oligonucleotide
cccgatagtgcccctcagcatcgagctgaaccaacacgctgcggccaggg

SEQ ID NO: 176469 - DNA, 50 bp, Artificial
  Synthetic oligonucleotide
cggcgtccgttccgttgcttaaggagcagccatgagttgcacccgacgtc

SEQ ID NO: 176470 - DNA, 50 bp, Artificial
  Synthetic oligonucleotide
accggccagggtcgcaccccttccccgatcaaaagcgcacttgacgctgg

SEQ ID NO: 176471 - DNA, 50 bp, Artificial
  Synthetic oligonucleotide
aaaggaccgtccggcagtccctgaagtattctgaaatattcgctcatcct

SEQ ID NO: 176472 - DNA, 56 bp, Artificial
  Synthetic oligonucleotide
ccgcttcccgtgaaagttttgtctctgcattgcgcggggcgaaaataggaagtcgc

SEQ ID NO: 176473 - DNA, 50 bp, Artificial
  Synthetic oligonucleotide
aaagctctcgcccagagcccgccctgttgcagtagtgcgtcaaggaggga

SEQ ID NO: 176474 - DNA, 50 bp, Artificial
  Synthetic oligonucleotide
accggctgacgcatgtttgcagcggacgccgtagactggctctcgttgaa

SEQ ID NO: 176475 - DNA, 50 bp, Artificial
  Synthetic oligonucleotide
cgaggcgagatacctcacgctggaatggggccgcctgagtttcgattgcc

SEQ ID NO: 176476 - DNA, 50 bp, Artificial
  Synthetic oligonucleotide
aaagcggtgtatcaacagggccagggctcactgcgttgatacgaacccca

SEQ ID NO: 176477 - DNA, 50 bp, Artificial
  Synthetic oligonucleotide
aaatccccggtctgcatctggcgttaggccccaacagcgctgacgtgaaa

SEQ ID NO: 176478 - DNA, 50 bp, Artificial
  Synthetic oligonucleotide
tcaatggagcctacgcggcatttgaatgcgccatggaccccaaacttgcc

SEQ ID NO: 176479 - DNA, 50 bp, Artificial
  Synthetic oligonucleotide
ttgcgaagggccgcaaaaactttcgtcatcgcccttttcctgccgccccg

SEQ ID NO: 176480 - DNA, 50 bp, Artificial
  Synthetic oligonucleotide
catacggcgagtcgatggagggagcaactgcctctccaatttgattatgc

SEQ ID NO: 176481 - DNA, 50 bp, Artificial
  Synthetic oligonucleotide
cgggggtagacatataaatagtttgctttatgttcttgtggctatattag

SEQ ID NO: 176482 - DNA, 50 bp, Artificial
  Synthetic oligonucleotide
accgcggtcttcgcattgacctactgctggcctcacgaccgctggctgcg

SEQ ID NO: 176483 - DNA, 59 bp, Artificial
  Synthetic oligonucleotide
ccgcgtcttcaataaataccatgtacagcgccataatccctcactccgttgtcataaat

SEQ ID NO: 176484 - DNA, 50 bp, Artificial
  Synthetic oligonucleotide
cgcttccaccttgtaaccagacggcacggcgtaggaccacgccccggata

SEQ ID NO: 176485 - DNA, 50 bp, Artificial
  Synthetic oligonucleotide
attcaccccctcacgaaagccggacaggggcaaaggcgcttctgccatga

SEQ ID NO: 176486 - DNA, 50 bp, Artificial
  Synthetic oligonucleotide
atgggcgtacacgaatacgatgataaacggggaaacaaagcccgtggaga

SEQ ID NO: 176487 - DNA, 50 bp, Artificial
  Synthetic oligonucleotide
aaatcactttgggtagggactccccacacgggcggggcattcaccctctc

SEQ ID NO: 176488 - DNA, 50 bp, Artificial
  Synthetic oligonucleotide
ttgcgctggcgtcactttctgaggccgctatggacgcattactgcaactc

SEQ ID NO: 176489 - DNA, 50 bp, Artificial
  Synthetic oligonucleotide
accgcgtcgcccttaaccggctggatttgtctgccgcgccggatattacc

SEQ ID NO: 176490 - DNA, 50 bp, Artificial
  Synthetic oligonucleotide
accgctatgtcggtgccgggggaacctgtgaacgtccgacccgtaaaggc

SEQ ID NO: 176491 - DNA, 50 bp, Artificial
  Synthetic oligonucleotide
acgccaacgctcgcaacagggtcatttctacgcccatacggcgatcgggg

SEQ ID NO: 176492 - DNA, 50 bp, Artificial
  Synthetic oligonucleotide
agcccaagggcatcacagccagttgccaccatcgcttcgagccattgtcc

SEQ ID NO: 176493 - DNA, 50 bp, Artificial
  Synthetic oligonucleotide
accgctgaggagtcaccttctgccttcccggaacaatccccggccacggt

SEQ ID NO: 176494 - DNA, 57 bp, Artificial
  Synthetic oligonucleotide
ccgcgacacacgacaacgccgcgttatacaccttttccctgatactaccgcctgatg

SEQ ID NO: 176495 - DNA, 50 bp, Artificial
  Synthetic oligonucleotide
acgaccgcgttattccgaaccaggcgtttaccaccctgtggtcgctggcg

SEQ ID NO: 176496 - DNA, 50 bp, Artificial
  Synthetic oligonucleotide
aaatcaataccgtgcagcacccggcgttgggttttgcccagtgggaagct

SEQ ID NO: 176497 - DNA, 50 bp, Artificial
  Synthetic oligonucleotide
accgctttgcttgacgctgctagggcgcgttctgatgttgtcgcagggcg

SEQ ID NO: 176498 - DNA, 50 bp, Artificial
  Synthetic oligonucleotide
agcctcactgatatccatcccacggacgcccgccattcagaatccctcgc

SEQ ID NO: 176499 - DNA, 50 bp, Artificial
  Synthetic oligonucleotide
cgggggccgggttgcgctctctatgccatttacggggtagctatgcgcct

SEQ ID NO: 176500 - DNA, 50 bp, Artificial
  Synthetic oligonucleotide
aaaactgcggtccgccgatatcgcgcataaatccgacgtgcagggggtga

SEQ ID NO: 176501 - DNA, 50 bp, Artificial
  Synthetic oligonucleotide
aaataccgcctcgggaggcactgtaaccgccgattgtcctacggcatggc

SEQ ID NO: 176502 - DNA, 50 bp, Artificial
  Synthetic oligonucleotide
cgggggcactggcgggcatgtgttcccaggactttcggtcgctaatcacc

SEQ ID NO: 176503 - DNA, 50 bp, Artificial
  Synthetic oligonucleotide
atggtccgtcgctgtgataaaccggataaaacagcgatttcagggcggat

SEQ ID NO: 176504 - DNA, 50 bp, Artificial
  Synthetic oligonucleotide
cggggcgagcgtgacagaaaaagtgggccccgagacgtactgagctgacg

SEQ ID NO: 176505 - DNA, 57 bp, Artificial
  Synthetic oligonucleotide
ccgccgcttggccaacgcttcacggccgtgcaatcaattgctcgcccgttcaccgtt

SEQ ID NO: 176506 - DNA, 50 bp, Artificial
  Synthetic oligonucleotide
cagtatgagcccgtaactgagccgggacgtcgtctgctgtggttggggta

SEQ ID NO: 176507 - DNA, 50 bp, Artificial
  Synthetic oligonucleotide
atggttgcatctgtccggacgctcgcatgccactcaccctgcgctttccg

SEQ ID NO: 176508 - DNA, 50 bp, Artificial
  Synthetic oligonucleotide
cgaatatctttagatcgtcttttagcatctagcatagttataggttttag

SEQ ID NO: 176509 - DNA, 50 bp, Artificial
  Synthetic oligonucleotide
cccgccagtcccgctaacgcccaggcggttaacacatatccgtggatagc

SEQ ID NO: 176510 - DNA, 50 bp, Artificial
  Synthetic oligonucleotide
taatccctatgcagccctggctcgcgtcctctcccggctatcataccggt

SEQ ID NO: 176511 - DNA, 50 bp, Artificial
  Synthetic oligonucleotide
tgagggctaatatcgacagagccagtgttcataagttccgacagtttcgt

SEQ ID NO: 176512 - DNA, 50 bp, Artificial
  Synthetic oligonucleotide
acgggtaaggtacttggcggaatgcaagggcggtcatcgctgggactcct

SEQ ID NO: 176513 - DNA, 50 bp, Artificial
  Synthetic oligonucleotide
aatgacagcccaacgtgcgagtgatgtgctgcaaatggcactctggcggc

SEQ ID NO: 176514 - DNA, 50 bp, Artificial
  Synthetic oligonucleotide
acgggtagcgagggcagattctgaaagcttaccgcccattggcagcgagc

SEQ ID NO: 176515 - DNA, 50 bp, Artificial
  Synthetic oligonucleotide
aatgacccgtgctttctcagacagcggcggggtgaagtcagggctgctcg

SEQ ID NO: 176516 - DNA, 57 bp, Artificial
  Synthetic oligonucleotide
ccgccactcgcggtaaacaggagaaagactatccccagtaacatcatgcccgtattc

SEQ ID NO: 176517 - DNA, 50 bp, Artificial
  Synthetic oligonucleotide
gtttaaggaactgtgctgtaatcgtatcgtcgatgcagctgtgaaccaca

SEQ ID NO: 176518 - DNA, 50 bp, Artificial
  Synthetic oligonucleotide
aggcctcgccaggcttatcgaaatcgcacggcatgacgccagcttttgca

SEQ ID NO: 176519 - DNA, 50 bp, Artificial
  Synthetic oligonucleotide
aatgcatgcgcctccgccttttggctggataactcgcaattgggcccgtg

SEQ ID NO: 176520 - DNA, 50 bp, Artificial
  Synthetic oligonucleotide
ggcgctgaggcccccagccttgtacgatataagcgggttttgccgtccca

SEQ ID NO: 176521 - DNA, 50 bp, Artificial
  Synthetic oligonucleotide
tgagcaacgtctgtgccatcgtggataacaaccatgtgcagctggatggt

SEQ ID NO: 176522 - DNA, 50 bp, Artificial
  Synthetic oligonucleotide
tcggaagttcgcactgcatcgctgctccacagatggcgaggtacccggaa

SEQ ID NO: 176523 - DNA, 50 bp, Artificial
  Synthetic oligonucleotide
gtttactgtccggtgcattagtcgttagcctggtctcgatatttaactcg

SEQ ID NO: 176524 - DNA, 50 bp, Artificial
  Synthetic oligonucleotide
tcggacttattgcgccgctctgtcgacatactgcgttcaacccgcattca

SEQ ID NO: 176525 - DNA, 50 bp, Artificial
  Synthetic oligonucleotide
cttggtcaatcgctgtaaacttagtcggattatgttgcaccccaacaata

SEQ ID NO: 176526 - DNA, 50 bp, Artificial
  Synthetic oligonucleotide
cacaattgaatattgtctcattctctgagaccttcaacctttattacaca

SEQ ID NO: 176527 - DNA, 60 bp, Artificial
  Synthetic oligonucleotide
ccagtcttttatcgttgctggaagtaccacagaggctttgttcgcaacatgccgttgcga

SEQ ID NO: 176528 - DNA, 50 bp, Artificial
  Synthetic oligonucleotide
cgtgaggtaatgcgcgttgcttgccacccgtgcctggtcgccaatccgtg

SEQ ID NO: 176529 - DNA, 50 bp, Artificial
  Synthetic oligonucleotide
cagcgtttgactccgctcctccggaacctgatcgacgtagccggaagcag

SEQ ID NO: 176530 - DNA, 50 bp, Artificial
  Synthetic oligonucleotide
acaggacgcggttgaccactatgccgcacgcctggagcattacgcgcttc

SEQ ID NO: 176531 - DNA, 50 bp, Artificial
  Synthetic oligonucleotide
ccggtcaaactgctgcatacagtgcgaggcatggggtatgtccttgaaac

SEQ ID NO: 176532 - DNA, 50 bp, Artificial
  Synthetic oligonucleotide
taatgcgtccgcctttggcgagaacgtgtaaggtacgttgttcctgacgg

SEQ ID NO: 176533 - DNA, 50 bp, Artificial
  Synthetic oligonucleotide
aatcgatggagcccgcgtccgcaattttcagaccagcaaaggccagacgg

SEQ ID NO: 176534 - DNA, 50 bp, Artificial
  Synthetic oligonucleotide
aatcgccaactcgttagccgcggttgtgcctccatacccctgtagcccac

SEQ ID NO: 176535 - DNA, 50 bp, Artificial
  Synthetic oligonucleotide
tgatatgatgggattggttgccaacaccgacgagcatcactactaccgct

SEQ ID NO: 176536 - DNA, 50 bp, Artificial
  Synthetic oligonucleotide
atcaggaatgtgccttctgcgacagtgacggacggcatcgcgcctctgcc

SEQ ID NO: 176537 - DNA, 50 bp, Artificial
  Synthetic oligonucleotide
acaggacccgttagccgcgggggaacatcaggcccgtggtaatgacactg

SEQ ID NO: 176538 - DNA, 55 bp, Artificial
  Synthetic oligonucleotide
ccgccaatttggaatgctaactgatagtttttacccgccatattgcccccgcgaa

SEQ ID NO: 176539 - DNA, 50 bp, Artificial
  Synthetic oligonucleotide
aatcgcgttggaagtgattggcctcgtggatgtgcgcgtcggcaacggag

SEQ ID NO: 176540 - DNA, 50 bp, Artificial
  Synthetic oligonucleotide
gttgtccggactcacatcgtacagggccagaccagttactagcggattga

SEQ ID NO: 176541 - DNA, 50 bp, Artificial
  Synthetic oligonucleotide
gggagttttaaagccgaccattgaatcggtatattctgaattagcgcgaa

SEQ ID NO: 176542 - DNA, 50 bp, Artificial
  Synthetic oligonucleotide
atacgtcacgaatctacatcacgcaatagcctactattgttgcaacttcg

SEQ ID NO: 176543 - DNA, 50 bp, Artificial
  Synthetic oligonucleotide
agggctgggttacggtgcattgcaaaccgcgattaacaccatgtccggcg

SEQ ID NO: 176544 - DNA, 50 bp, Artificial
  Synthetic oligonucleotide
cgtgattttaatgaccctggcccaaattcagtacagtgctaaatcagaga

SEQ ID NO: 176545 - DNA, 50 bp, Artificial
  Synthetic oligonucleotide
actacgttaggctgcgactattgcgctgtcacggcaaaacggcctgcgcc

SEQ ID NO: 176546 - DNA, 50 bp, Artificial
  Synthetic oligonucleotide
gggaaggtcgtaacggactccctgccttggctggcaacgctgcacttcga

SEQ ID NO: 176547 - DNA, 50 bp, Artificial
  Synthetic oligonucleotide
aatggatctcacgatgcatcgcggcagcaagggagcgaatccccgggagc

SEQ ID NO: 176548 - DNA, 50 bp, Artificial
  Synthetic oligonucleotide
cgtgctcacgtacttatcgtgggtcttggcgggctaggatcccctgcggc

SEQ ID NO: 176549 - DNA, 60 bp, Artificial
  Synthetic oligonucleotide
gcacccgctagcggaacgtttcaggatagcgcagcagtcgaactacttcatactgaaccg

SEQ ID NO: 176550 - DNA, 59 bp, Artificial
  Synthetic oligonucleotide
ccgattgcaggttactgagttcattagtgaaggaggctatatttcggacacctgtagcg

SEQ ID NO: 176551 - DNA, 50 bp, Artificial
  Synthetic oligonucleotide
aatggcccccgtaaaggtgttaccgcccacgttaagcgtgaccgtaccgc

SEQ ID NO: 176552 - DNA, 50 bp, Artificial
  Synthetic oligonucleotide
tgacatatcaggaatttggttttgcccgttacccacatcccgttttgccg

SEQ ID NO: 176553 - DNA, 50 bp, Artificial
  Synthetic oligonucleotide
aatgggccgccaaaagagaggctacggaaattaacgcggctccagcgcgt

SEQ ID NO: 176554 - DNA, 50 bp, Artificial
  Synthetic oligonucleotide
taaggtggttaaccacaaaccccgcatcggtaagccatccgttgcgttta

SEQ ID NO: 176555 - DNA, 50 bp, Artificial
  Synthetic oligonucleotide
cgcaaggtctgacggcacatacggaagagactgacactcatcaatactat

SEQ ID NO: 176556 - DNA, 50 bp, Artificial
  Synthetic oligonucleotide
aatgggcggcgtatcaaaacccggtcgtggcattcggcatctatggcctg

SEQ ID NO: 176557 - DNA, 50 bp, Artificial
  Synthetic oligonucleotide
aatgggcgggtaagatatccggagccttatagtcaggaggcttctacagg

SEQ ID NO: 176558 - DNA, 50 bp, Artificial
  Synthetic oligonucleotide
tgaatggcattgtgaacgttttcagtcgtccattcggtgatagcagcaag

SEQ ID NO: 176559 - DNA, 50 bp, Artificial
  Synthetic oligonucleotide
aatggggagcggtttgccagatgtgccaaagtgcgttatcggccccgcgg

SEQ ID NO: 176560 - DNA, 50 bp, Artificial
  Synthetic oligonucleotide
aatggtgcacaaggtgcgattgggctgtgcggtacaggctcatcacaggc

SEQ ID NO: 176561 - DNA, 60 bp, Artificial
  Synthetic oligonucleotide
ccgattacgctgaacttcacgtgagatcgtcgaaggactgcgattcagcgcagtagctat

SEQ ID NO: 176562 - DNA, 50 bp, Artificial
  Synthetic oligonucleotide
gcgatctaatgcccaaatttcagagtcgctcatatcgtctaccaacgcgc

SEQ ID NO: 176563 - DNA, 50 bp, Artificial
  Synthetic oligonucleotide
gcgatgaccacatgaccctctccggggttatagcccccaaacgccgagag

SEQ ID NO: 176564 - DNA, 50 bp, Artificial
  Synthetic oligonucleotide
gcgacggcgggaaagagatcacttgcggctcgcaactgtcttcacaacgc

SEQ ID NO: 176565 - DNA, 50 bp, Artificial
  Synthetic oligonucleotide
aatgccgatgcacaaagcgacacggatcgcacgccccgagtgtggacaca

SEQ ID NO: 176566 - DNA, 50 bp, Artificial
  Synthetic oligonucleotide
ctggctagagcgaggtgtcaagggctgttcaggtgccgattgatgggcga

SEQ ID NO: 176567 - DNA, 50 bp, Artificial
  Synthetic oligonucleotide
aatgccgccctaagaccgacatcggggtaaaggaagggatcacgcggtgc

SEQ ID NO: 176568 - DNA, 50 bp, Artificial
  Synthetic oligonucleotide
cctccggggtgattgtctcaacagggctcggttcgacgggctggttacag

SEQ ID NO: 176569 - DNA, 50 bp, Artificial
  Synthetic oligonucleotide
actcaccggttgcctaactcagcgcagtgaaccgctgccactggccttcg

SEQ ID NO: 176570 - DNA, 50 bp, Artificial
  Synthetic oligonucleotide
atcacccgcagtttgtccgacgcgcacgtttactggagggttgtgcggag

SEQ ID NO: 176571 - DNA, 50 bp, Artificial
  Synthetic oligonucleotide
actatagccgcctcgcgcttacccctcaacgcgtttaacaccctccgccg

SEQ ID NO: 176572 - DNA, 60 bp, Artificial
  Synthetic oligonucleotide
ccgatgtatgctgtttccggaatgatagaacgttgtcagcaaaatccggagtgccacaat

SEQ ID NO: 176573 - DNA, 50 bp, Artificial
  Synthetic oligonucleotide
actataaaacgtttatcacaaagccggatcctgggcttatcaacagcgta

SEQ ID NO: 176574 - DNA, 50 bp, Artificial
  Synthetic oligonucleotide
atcacatttaaactgtgaaggatatcatccggagaaatttttcaatccga

SEQ ID NO: 176575 - DNA, 50 bp, Artificial
  Synthetic oligonucleotide
aatgcgctcgccgtgcattgccgccttagagccactgattagcgggtgcc

SEQ ID NO: 176576 - DNA, 50 bp, Artificial
  Synthetic oligonucleotide
aatgcggccggatgcgaactgactagcggtagtgcgactcctagcgcttt

SEQ ID NO: 176577 - DNA, 50 bp, Artificial
  Synthetic oligonucleotide
catgcagggctatatttccttaactcccgttacgactttatgaacacaac

SEQ ID NO: 176578 - DNA, 50 bp, Artificial
  Synthetic oligonucleotide
aatgctgaccgccggatgaacgcacaatgttcagtgccgggctgcgttta

SEQ ID NO: 176579 - DNA, 50 bp, Artificial
  Synthetic oligonucleotide
actagcgtatctagcgcccgcccaggatgcaccgtgtgcagcttcacgtc

SEQ ID NO: 176580 - DNA, 50 bp, Artificial
  Synthetic oligonucleotide
aggcggacgctcgatgattaggggttgtttgagtgatactgaacagccgg

SEQ ID NO: 176581 - DNA, 50 bp, Artificial
  Synthetic oligonucleotide
aataggctccagttcacgcgccccacgactagcagccagcacaagcccca

SEQ ID NO: 176582 - DNA, 50 bp, Artificial
  Synthetic oligonucleotide
gccgtttcgaatgcccatacgcctctcgaccgacatcggaggccctgatt

SEQ ID NO: 176583 - DNA, 57 bp, Artificial
  Synthetic oligonucleotide
ccgatcctgactcggtagacgctaactggcgtttgacgttccagcagttacctggta

SEQ ID NO: 176584 - DNA, 50 bp, Artificial
  Synthetic oligonucleotide
ccgggaggtggcgatacccacattgcgtttcgcctgcacaccacgttgca

SEQ ID NO: 176585 - DNA, 50 bp, Artificial
  Synthetic oligonucleotide
acggccgggttctttctctctatcgcacgaatgcggtgccacgcatcgcc

SEQ ID NO: 176586 - DNA, 50 bp, Artificial
  Synthetic oligonucleotide
actcggattacgcgacccgaatgacccccttaaccgccgtgcgctaacgc

SEQ ID NO: 176587 - DNA, 50 bp, Artificial
  Synthetic oligonucleotide
aatatcataataagctattgaatgacaatccatgcgggtatcatcaatag

SEQ ID NO: 176588 - DNA, 50 bp, Artificial
  Synthetic oligonucleotide
actcgctgttgggcaaatgacgccatgcctacgcgggtaagtgcctgcat

SEQ ID NO: 176589 - DNA, 50 bp, Artificial
  Synthetic oligonucleotide
ccgggatggagacagtatctcctggcggggctcaataccgggcgcactgc

SEQ ID NO: 176590 - DNA, 50 bp, Artificial
  Synthetic oligonucleotide
acagtatggtccgccagcgaacggacggtttctctgctgccggcacccgt

SEQ ID NO: 176591 - DNA, 50 bp, Artificial
  Synthetic oligonucleotide
ccgggatgggagctaggcgtcagccgttaatgtgggcaattacgacggcg

SEQ ID NO: 176592 - DNA, 50 bp, Artificial
  Synthetic oligonucleotide
gggcagacgagcgggtcagtatgctgtgggctctccttgctccggctgga

SEQ ID NO: 176593 - DNA, 50 bp, Artificial
  Synthetic oligonucleotide
aggcatcgttcctccacgctggcggatacggctgacgttcgcccctgggt

SEQ ID NO: 176594 - DNA, 55 bp, Artificial
  Synthetic oligonucleotide
ccgataagtacccagacaaacgcagcaccaaacaacgtagagaatgggtctttac

SEQ ID NO: 176595 - DNA, 50 bp, Artificial
  Synthetic oligonucleotide
cctgacattacgtattcaccgtgggcgtaagtcaggtcatagccatacac

SEQ ID NO: 176596 - DNA, 50 bp, Artificial
  Synthetic oligonucleotide
cgtttgctgcactgcgagtgccatcgctgaccatttgagtgagcccgcat

SEQ ID NO: 176597 - DNA, 50 bp, Artificial
  Synthetic oligonucleotide
gttgatgtccgggcagtaaaaccccgtaagccaaaggatggcgagtcctt

SEQ ID NO: 176598 - DNA, 50 bp, Artificial
  Synthetic oligonucleotide
tgcccaacgcatcttctaagaatgtgcaattaaacaatccggcagctgcg

SEQ ID NO: 176599 - DNA, 50 bp, Artificial
  Synthetic oligonucleotide
actcccggagcctggcaataagcggcggtagcacctcaacgccgataacg

SEQ ID NO: 176600 - DNA, 50 bp, Artificial
  Synthetic oligonucleotide
caatccataatagatgcggttcattatgcagtggatattgcgcgttatgc

SEQ ID NO: 176601 - DNA, 50 bp, Artificial
  Synthetic oligonucleotide
gaaactatcaggagcgcaggggttatcactgatcagctgcgttttacgga

SEQ ID NO: 176602 - DNA, 50 bp, Artificial
  Synthetic oligonucleotide
aatactggctatgggatgtttacaaggcgctccataaagccgtgatgttc

SEQ ID NO: 176603 - DNA, 50 bp, Artificial
  Synthetic oligonucleotide
acggcacttgccgccctgttacagctggggccggatttccgttttaccac

SEQ ID NO: 176604 - DNA, 50 bp, Artificial
  Synthetic oligonucleotide
aatagcatcgctgggactttctccatcgcccccgctggtgctcctaagcg

SEQ ID NO: 176605 - DNA, 60 bp, Artificial
  Synthetic oligonucleotide
ccgataaagtcgtatgaacgatcgtatgggcgatactcagaaagtgaggtgctcataagc

SEQ ID NO: 176606 - DNA, 50 bp, Artificial
  Synthetic oligonucleotide
acataacatagccgccagacgcggttcactgcccgcttccgccatttgcc

SEQ ID NO: 176607 - DNA, 50 bp, Artificial
  Synthetic oligonucleotide
cagctgctgattctgtgctgacaggaatttacccacctcgtaatcgataa

SEQ ID NO: 176608 - DNA, 50 bp, Artificial
  Synthetic oligonucleotide
cgccagcgcttacgttaagattttgagtaactaatgagcagtgcgcaacg

SEQ ID NO: 176609 - DNA, 50 bp, Artificial
  Synthetic oligonucleotide
ccggctggccgttattacacgttttggcctggaagaggggtagccaggcc

SEQ ID NO: 176610 - DNA, 50 bp, Artificial
  Synthetic oligonucleotide
gttctcaaaacgttgacatacacttatctggagcgtttacaggagatatc

SEQ ID NO: 176611 - DNA, 50 bp, Artificial
  Synthetic oligonucleotide
aatagcgcatccccgcagcctaaagtaaaagcgcggtgccgccacctcaa

SEQ ID NO: 176612 - DNA, 50 bp, Artificial
  Synthetic oligonucleotide
aataggacgcggcgccgggatgaggcataactaccgtgcctgacgttaga

SEQ ID NO: 176613 - DNA, 50 bp, Artificial
  Synthetic oligonucleotide
gttctcaggccagaacagtcttatatctctggcgctgacaacccatagta

SEQ ID NO: 176614 - DNA, 50 bp, Artificial
  Synthetic oligonucleotide
acagttcatccgcgggcgtacccgttacacggcgctgtcacgctggacat

SEQ ID NO: 176615 - DNA, 50 bp, Artificial
  Synthetic oligonucleotide
tgcgaaattcaggcgaatgctatttacggggttttttactggttggtact

SEQ ID NO: 176616 - DNA, 57 bp, Artificial
  Synthetic oligonucleotide
ccgagcggggggatcgaaaactttcatatgggccggacatgatcgtcgaatggtctc

SEQ ID NO: 176617 - DNA, 50 bp, Artificial
  Synthetic oligonucleotide
tcgcgactggtttgctccgctaggcatcaaggtcggttgtatcgctggca

SEQ ID NO: 176618 - DNA, 50 bp, Artificial
  Synthetic oligonucleotide
acaggctgatgccgcgctagctgactgggtcactcagcgccctgcgacgt

SEQ ID NO: 176619 - DNA, 50 bp, Artificial
  Synthetic oligonucleotide
aggccccattaacaggcgttgcgggggattaagctggctgactacaggct

SEQ ID NO: 176620 - DNA, 50 bp, Artificial
  Synthetic oligonucleotide
actcatgcccgtgtgcacagagtgccgaacgtcgaaagggaatgcctcgg

SEQ ID NO: 176621 - DNA, 50 bp, Artificial
  Synthetic oligonucleotide
aatccagcgccatatgcagccgcgaaggaagggcttcctgccggtgttta

SEQ ID NO: 176622 - DNA, 50 bp, Artificial
  Synthetic oligonucleotide
ccgggttaccagggattaccgccgctggttacccccacgcacagcgaagc

SEQ ID NO: 176623 - DNA, 50 bp, Artificial
  Synthetic oligonucleotide
acaggcgggtactgcttcggctgaaagcgattgacgccctgcagcggaag

SEQ ID NO: 176624 - DNA, 50 bp, Artificial
  Synthetic oligonucleotide
aggccccgggctgacacggtatataaatttcgcaacccatggcggaggca

SEQ ID NO: 176625 - DNA, 50 bp, Artificial
  Synthetic oligonucleotide
atcatgcagttgtgccggagccgcaaaggccagactcagcgccgcattac

SEQ ID NO: 176626 - DNA, 50 bp, Artificial
  Synthetic oligonucleotide
acaggccagttttcgtcccaacgatcaaccgaccacgcccacgccagata

SEQ ID NO: 176627 - DNA, 55 bp, Artificial
  Synthetic oligonucleotide
ccgtgtactcttcgcataaccgattaaatcgacagatttttccccgactatccag

SEQ ID NO: 176628 - DNA, 50 bp, Artificial
  Synthetic oligonucleotide
cgtgagcttgctgatgagagtcgggggttacagggcgggcgtatcaggct

SEQ ID NO: 176629 - DNA, 50 bp, Artificial
  Synthetic oligonucleotide
ctttgatccgggctttcgcggaacggacgttcagtgttggacacgcggcc

SEQ ID NO: 176630 - DNA, 50 bp, Artificial
  Synthetic oligonucleotide
ctttgagctgcgatgagtgccaactggccggagcgaggatttgtaactta

SEQ ID NO: 176631 - DNA, 50 bp, Artificial
  Synthetic oligonucleotide
atcaggcaggtgaacgaactcaatctctagcggtaggggtaagatatcgc

SEQ ID NO: 176632 - DNA, 50 bp, Artificial
  Synthetic oligonucleotide
ctttgaccgccttacctcctacgacagcaccagcgtaggcgctgcccagt

SEQ ID NO: 176633 - DNA, 50 bp, Artificial
  Synthetic oligonucleotide
aggcccggcgattgcgcccgaggcagtgcaaagcagcttcaacgccatga

SEQ ID NO: 176634 - DNA, 50 bp, Artificial
  Synthetic oligonucleotide
aatccggccgtactgcgctgatgacctcacgtatcacctcaggactgccg

SEQ ID NO: 176635 - DNA, 50 bp, Artificial
  Synthetic oligonucleotide
cacgaggggaacgcctgaggtttcgggccaatttcattcaggccacggcg

SEQ ID NO: 176636 - DNA, 50 bp, Artificial
  Synthetic oligonucleotide
cgccaatgttcgtggtccgatgctgcaacttgcccgcctttcagactggc

SEQ ID NO: 176637 - DNA, 50 bp, Artificial
  Synthetic oligonucleotide
tcgcccaatcaggtactgaattatcatcaaacacgataaacctcaaagtg

SEQ ID NO: 176638 - DNA, 55 bp, Artificial
  Synthetic oligonucleotide
ccgtgcaattaaaggtactcgcataggtcaagatgttacagaagcccttaaaggt

SEQ ID NO: 176639 - DNA, 50 bp, Artificial
  Synthetic oligonucleotide
actcccggacaccgtctgaacgcgcagtaaacaccgccaaagtgaccggc

SEQ ID NO: 176640 - DNA, 50 bp, Artificial
  Synthetic oligonucleotide
gaaaagagcctgcatgagttgagggtgttcagcacttcagtgtcagtttt

SEQ ID NO: 176641 - DNA, 50 bp, Artificial
  Synthetic oligonucleotide
acaggggatatggtcacgcggccaacaagtgaacgggcatagccgccgac

SEQ ID NO: 176642 - DNA, 50 bp, Artificial
  Synthetic oligonucleotide
aatcacgggcgtaagccgccagttgtgcacgctcattgggtgcctgctga

SEQ ID NO: 176643 - DNA, 50 bp, Artificial
  Synthetic oligonucleotide
cgtgacatggtgctacgggcatctcctgaaatcgattgagccggaagtgt

SEQ ID NO: 176644 - DNA, 50 bp, Artificial
  Synthetic oligonucleotide
gcgtctggttcatttacgatgaagtcgcgtcccttcagaagattcccggc

SEQ ID NO: 176645 - DNA, 50 bp, Artificial
  Synthetic oligonucleotide
aatcagccagtgtgttcccgcgctcataggattacccaaggcgccaggca

SEQ ID NO: 176646 - DNA, 50 bp, Artificial
  Synthetic oligonucleotide
caatgactgcgcgacggctaaacctagcacgcctgcaccgataacagcga

SEQ ID NO: 176647 - DNA, 50 bp, Artificial
  Synthetic oligonucleotide
caatgatttcggccagatgtgtgctggtagcgcgatcttgcagtattgac

SEQ ID NO: 176648 - DNA, 50 bp, Artificial
  Synthetic oligonucleotide
acagggcgggcggtctccactacccgtgttttgctcagggtccgccatat

SEQ ID NO: 176649 - DNA, 58 bp, Artificial
  Synthetic oligonucleotide
ccgtgatgtgaggtagctgatttacgtcatacccggttaatccctgatcctatctctt

SEQ ID NO: 176650 - DNA, 50 bp, Artificial
  Synthetic oligonucleotide
cacgaccggtctcatagaatgcacggccgacaggacggctttgcggtgag

SEQ ID NO: 176651 - DNA, 50 bp, Artificial
  Synthetic oligonucleotide
ccggggtgtgagtgccaggggtatctgtgatgccttaaagcgggcgggtt

SEQ ID NO: 176652 - DNA, 50 bp, Artificial
  Synthetic oligonucleotide
aatcagggtgtgcaccaaaggacgcgaaacaggtgccattcgccgggttg

SEQ ID NO: 176653 - DNA, 50 bp, Artificial
  Synthetic oligonucleotide
ctgtttgccttgcaaggatgccgtaagcgcctgcccccagagcgatgagc

SEQ ID NO: 176654 - DNA, 50 bp, Artificial
  Synthetic oligonucleotide
acaactgactgccccgagatccagccagttgtcacctgcaaccggcgtga

SEQ ID NO: 176655 - DNA, 50 bp, Artificial
  Synthetic oligonucleotide
acgtgattcggcgagcacccgcagacaacaaagccgtaacttgaaaggcg

SEQ ID NO: 176656 - DNA, 50 bp, Artificial
  Synthetic oligonucleotide
atatcccccggacggcggtcacagacagcatacgggatcggtttaccggc

SEQ ID NO: 176657 - DNA, 50 bp, Artificial
  Synthetic oligonucleotide
acgtcggccagccgtaagcttccacaaaccagcccgcgaccggaccgaca

SEQ ID NO: 176658 - DNA, 50 bp, Artificial
  Synthetic oligonucleotide
ggctcagcgcatgcacggccgagacagtctgatcagccagtagggcctca

SEQ ID NO: 176659 - DNA, 50 bp, Artificial
  Synthetic oligonucleotide
acaaggtgtcacccttctgtgcggcgccagacccttttgcgacatcagct

SEQ ID NO: 176660 - DNA, 60 bp, Artificial
  Synthetic oligonucleotide
atcaatggatctctacagctgagactacttttgcgcatgagtttaatgtcgcaccttcaa

SEQ ID NO: 176661 - DNA, 58 bp, Artificial
  Synthetic oligonucleotide
ccgtgatgcagtttgggatacccagcgcacgcttaccgattctgtcgggggtatctac

SEQ ID NO: 176662 - DNA, 50 bp, Artificial
  Synthetic oligonucleotide
caccatggccgaatatgctgaccactggtccgcgaccggggaacccaatt

SEQ ID NO: 176663 - DNA, 50 bp, Artificial
  Synthetic oligonucleotide
acggtttgcgctctaacctggtcaatggcctgacctccgacgtgcggggt

SEQ ID NO: 176664 - DNA, 50 bp, Artificial
  Synthetic oligonucleotide
aggctcggccctcccgtgtccgggactgcggcaacggaatgaatcacatg

SEQ ID NO: 176665 - DNA, 50 bp, Artificial
  Synthetic oligonucleotide
tctctttaaaatctgctgagtgacgcggatcctacgttgtccggtacgca

SEQ ID NO: 176666 - DNA, 50 bp, Artificial
  Synthetic oligonucleotide
gcgggaaaattttaacggtgtcagggtacagtgtggcgacttcatggaat

SEQ ID NO: 176667 - DNA, 50 bp, Artificial
  Synthetic oligonucleotide
tctctgccttgtccggcgatcctttcccggtatagtgcgcgatagacgga

SEQ ID NO: 176668 - DNA, 50 bp, Artificial
  Synthetic oligonucleotide
acgtcgcgctgtatgacggctcctggggcgaatggggtagccgtaatgac

SEQ ID NO: 176669 - DNA, 50 bp, Artificial
  Synthetic oligonucleotide
aggctggcatatcgccccggcgttactggcacagagcagtaaagatcgct

SEQ ID NO: 176670 - DNA, 50 bp, Artificial
  Synthetic oligonucleotide
tcgtgctagtaacgagctacgacagagtagtgccagtgatcgtagttcag

SEQ ID NO: 176671 - DNA, 50 bp, Artificial
  Synthetic oligonucleotide
atatgaaccgtgaggctgcattggcgcgcttggtagcactaattcgccag

SEQ ID NO: 176672 - DNA, 57 bp, Artificial
  Synthetic oligonucleotide
ccgtcttgcaggtggttggcctcactgcgtgacaccaaccaccatccccagtgtttt

SEQ ID NO: 176673 - DNA, 50 bp, Artificial
  Synthetic oligonucleotide
atatctgaatgatgcttcttatctactgactgacgactccgccagactcg

SEQ ID NO: 176674 - DNA, 50 bp, Artificial
  Synthetic oligonucleotide
cttaactcggctaaataggcaaacccgccacaatgatctagcgctccctc

SEQ ID NO: 176675 - DNA, 50 bp, Artificial
  Synthetic oligonucleotide
ccgtgttctaacgcggtagcggaactgtccatcgcgccagcactgtagcc

SEQ ID NO: 176676 - DNA, 50 bp, Artificial
  Synthetic oligonucleotide
ggcggtcggaaaagtgagccgctccagtgccactcgccatttaactgagc

SEQ ID NO: 176677 - DNA, 50 bp, Artificial
  Synthetic oligonucleotide
acggtttaaatgagacgcttacattgtctgcagatattcacgggcgggtt

SEQ ID NO: 176678 - DNA, 50 bp, Artificial
  Synthetic oligonucleotide
acaacctggggcactctaccatcatgcagtccgcttggaagcgtgggcag

SEQ ID NO: 176679 - DNA, 50 bp, Artificial
  Synthetic oligonucleotide
taagatgcgccagcactggtgtagtgtcatcttcctgcaacgcatcctgc

SEQ ID NO: 176680 - DNA, 50 bp, Artificial
  Synthetic oligonucleotide
ctgtttgcggtacttgctatcgcgatatttctccaacagcagacccatgt

SEQ ID NO: 176681 - DNA, 50 bp, Artificial
  Synthetic oligonucleotide
tctgcggaactgacaaggttaagcacaatgatatatcggcgcgtattccg

SEQ ID NO: 176682 - DNA, 50 bp, Artificial
  Synthetic oligonucleotide
acaacgactgagcctgtgaggcgtcttccgggtgatagggcagtaccggg

SEQ ID NO: 176683 - DNA, 60 bp, Artificial
  Synthetic oligonucleotide
ccagattatgcagcgccgggttacctgcactgtcacgatccacataacgcgcatagcgcc

SEQ ID NO: 176684 - DNA, 50 bp, Artificial
  Synthetic oligonucleotide
ccgttaccggggacaacttgcgctggcaagtggctgacggctattaccct

SEQ ID NO: 176685 - DNA, 50 bp, Artificial
  Synthetic oligonucleotide
acaacgcactggctggcacactgcgtgcagacttcgcggatagcttcact

SEQ ID NO: 176686 - DNA, 50 bp, Artificial
  Synthetic oligonucleotide
ccgttagacgggtgatcgcccaaggacgcgtgacaaagacaccggctgtt

SEQ ID NO: 176687 - DNA, 50 bp, Artificial
  Synthetic oligonucleotide
tctgatggtacagatgaattatctaaagattatcagcaatcctacgcctg

SEQ ID NO: 176688 - DNA, 50 bp, Artificial
  Synthetic oligonucleotide
acaacgcttggagaagcgctccgaacgcagcttgcccgtttgcctgacat

SEQ ID NO: 176689 - DNA, 50 bp, Artificial
  Synthetic oligonucleotide
acacctgcgctcagggtaatggcactgccccggttttcggcgctgaataa

SEQ ID NO: 176690 - DNA, 50 bp, Artificial
  Synthetic oligonucleotide
acgtcaggcgatccggcagttaaccgcgcttacgggatccctgcttccgg

SEQ ID NO: 176691 - DNA, 50 bp, Artificial
  Synthetic oligonucleotide
agggagccgtactcaataacgccactcaggcggctcagtcacaactggcc

SEQ ID NO: 176692 - DNA, 50 bp, Artificial
  Synthetic oligonucleotide
ccagacagaggtggagtaattgtcgctgctgacatcataaccgttagtgg

SEQ ID NO: 176693 - DNA, 50 bp, Artificial
  Synthetic oligonucleotide
tctagtggcagaacatctttgcgttctaatatcgatgttcatgaaccttg

SEQ ID NO: 176694 - DNA, 52 bp, Artificial
  Synthetic oligonucleotide
ccgtcccttcactgggaggggtgagttgttgccgttccctccaacctttcac

SEQ ID NO: 176695 - DNA, 50 bp, Artificial
  Synthetic oligonucleotide
agggaactgtcaggcgaaccacagatgcctcgcgctttgtcgagaatatc

SEQ ID NO: 176696 - DNA, 50 bp, Artificial
  Synthetic oligonucleotide
cgttccgatagcacgcaacccttatcttttccgcgcacaggcttattgca

SEQ ID NO: 176697 - DNA, 50 bp, Artificial
  Synthetic oligonucleotide
acacggacacggtcagtgcgggccgggatagcgccgtcaccctgattaat

SEQ ID NO: 176698 - DNA, 50 bp, Artificial
  Synthetic oligonucleotide
tctacgggggcagaggtgagacacccggatgccgcattcgccctgctgac

SEQ ID NO: 176699 - DNA, 50 bp, Artificial
  Synthetic oligonucleotide
acacgctccgtgtgtgagtatgcggcctgggttgcagggaagcttgacgc

SEQ ID NO: 176700 - DNA, 50 bp, Artificial
  Synthetic oligonucleotide
acgtatgcctgagcgcccttcgagcgcggaagaaattacccctagcgcct

SEQ ID NO: 176701 - DNA, 50 bp, Artificial
  Synthetic oligonucleotide
acgtaacgcttgatccccgggcgcgaaatcagtcgccacccttcggcaaa

SEQ ID NO: 176702 - DNA, 50 bp, Artificial
  Synthetic oligonucleotide
tcgtttcaacaattcacgcatcatcgattactgaagccctagagcgttac

SEQ ID NO: 176703 - DNA, 50 bp, Artificial
  Synthetic oligonucleotide
acacgcgcccatggtatgcctcaaccgaccctggtgacgaagacatgcca

SEQ ID NO: 176704 - DNA, 50 bp, Artificial
  Synthetic oligonucleotide
acgtatcacctcaggactgccgattttcgccatgtcacgccacgagcgca

SEQ ID NO: 176705 - DNA, 60 bp, Artificial
  Synthetic oligonucleotide
ccgtccacataccggaagagagattgcattaccgcgggccatagcacccacgcgcgcaat

SEQ ID NO: 176706 - DNA, 50 bp, Artificial
  Synthetic oligonucleotide
cagcccgtataattctccctccgtcgcgtaatgcccgtcatctggcgtca

SEQ ID NO: 176707 - DNA, 50 bp, Artificial
  Synthetic oligonucleotide
acacgcccccaattaccgcggtattaacgctaacatagcggcaggccggg

SEQ ID NO: 176708 - DNA, 50 bp, Artificial
  Synthetic oligonucleotide
ccgttctgacgtacccccttcgcaccatgacggtgacgtgccacactgat

SEQ ID NO: 176709 - DNA, 50 bp, Artificial
  Synthetic oligonucleotide
acgtcgcaccaccccggctcgaaccacgcatcgtatgactcgacggtaac

SEQ ID NO: 176710 - DNA, 50 bp, Artificial
  Synthetic oligonucleotide
ggctaaacgtcgccattgggctaaaagcgagtaatacggctcttccttaa

SEQ ID NO: 176711 - DNA, 50 bp, Artificial
  Synthetic oligonucleotide
acactaccagccggagtggacgcaacaccagttgagcgcccgcggttctt

SEQ ID NO: 176712 - DNA, 50 bp, Artificial
  Synthetic oligonucleotide
acacccagtttacgccgctgccgaataaacccagcccccaggcgaaaccg

SEQ ID NO: 176713 - DNA, 50 bp, Artificial
  Synthetic oligonucleotide
tctcgaaatccatgttgctggaagattccccacatttgcagtctgtgtta

SEQ ID NO: 176714 - DNA, 50 bp, Artificial
  Synthetic oligonucleotide
acgtccgtccgccctgcctttacagcatttccgcaatcagtcccccgaga

SEQ ID NO: 176715 - DNA, 50 bp, Artificial
  Synthetic oligonucleotide
atagtgcggcgcgtcaaaggccgggcacataccctggcaactataacgcg

SEQ ID NO: 176716 - DNA, 56 bp, Artificial
  Synthetic oligonucleotide
ccgtcagttccgtcgcctgtctcaccgtcacccacgccattgtctcacctccggtt

SEQ ID NO: 176717 - DNA, 50 bp, Artificial
  Synthetic oligonucleotide
acacggtgcgtccgacgttcagcagtgtgccgaaaccgccggtagccacc

SEQ ID NO: 176718 - DNA, 50 bp, Artificial
  Synthetic oligonucleotide
acgtccgcagggccgctgccagataacgccactttcacgcaacacacgcc

SEQ ID NO: 176719 - DNA, 50 bp, Artificial
  Synthetic oligonucleotide
acgtccccgtgacacgacggtggttgagcgggataaagtgatccaggccg

SEQ ID NO: 176720 - DNA, 50 bp, Artificial
  Synthetic oligonucleotide
acaccgtgatttcacgcgcttcacgcggtacaaccacgccttgccgggca

SEQ ID NO: 176721 - DNA, 50 bp, Artificial
  Synthetic oligonucleotide
gcggctgacaaagaacagttcggctctgttgtcggggctgcgcgtcaaat

SEQ ID NO: 176722 - DNA, 50 bp, Artificial
  Synthetic oligonucleotide
gcggatcactttactgcgctcctgccagtcgttgcgtaccgggaacgtcg

SEQ ID NO: 176723 - DNA, 50 bp, Artificial
  Synthetic oligonucleotide
catgtaaacagcgatttgattagagaattacgtaaacgtactagtgttag

SEQ ID NO: 176724 - DNA, 50 bp, Artificial
  Synthetic oligonucleotide
ccgtttgtcaccagtgaggcgattgcctggcctgataccattggctgggg

SEQ ID NO: 176725 - DNA, 50 bp, Artificial
  Synthetic oligonucleotide
cgcaccgtcccggcggagtatcctaccaagtcacgcgctacccagggagt

SEQ ID NO: 176726 - DNA, 50 bp, Artificial
  Synthetic oligonucleotide
cgcaccggggttccggacgggcaatggcaacatgtcggacccaaactgat

SEQ ID NO: 176727 - DNA, 52 bp, Artificial
  Synthetic oligonucleotide
ccgtcagttccgggtgtcggggggaccctgagcaggtggtaattgtaagacg

SEQ ID NO: 176728 - DNA, 50 bp, Artificial
  Synthetic oligonucleotide
taaaaaattttccacctgaacttgacagaaaaaacgatgacgggtacttt

SEQ ID NO: 176729 - DNA, 50 bp, Artificial
  Synthetic oligonucleotide
aattccggtcgctggggccttaactactgggcctgcacgtcaagcaccag

SEQ ID NO: 176730 - DNA, 50 bp, Artificial
  Synthetic oligonucleotide
aattctccggcaatccatgttttcgggggaaccagtgacgctcgggcgct

SEQ ID NO: 176731 - DNA, 50 bp, Artificial
  Synthetic oligonucleotide
acgtttgacgaccactcgcttagttgccagcgcacgtgctggagccagca

SEQ ID NO: 176732 - DNA, 50 bp, Artificial
  Synthetic oligonucleotide
ggctgggttaccttccgctataggacacactatagaacaagttaggcaga

SEQ ID NO: 176733 - DNA, 50 bp, Artificial
  Synthetic oligonucleotide
aattgccaggccctcgcgagtcagtgaccactgctgccggtatcccaaca

SEQ ID NO: 176734 - DNA, 50 bp, Artificial
  Synthetic oligonucleotide
tgaaacgtaaatcaaaggccgcgttgggtattcttctgaccttatcctcc

SEQ ID NO: 176735 - DNA, 50 bp, Artificial
  Synthetic oligonucleotide
aattggccgtcatgtggcccgctccgccattatggccgcgttacatatgc

SEQ ID NO: 176736 - DNA, 50 bp, Artificial
  Synthetic oligonucleotide
tgaaacatcacgcccaatagcacgaaacgcctgttggtaacgtgagatca

SEQ ID NO: 176737 - DNA, 50 bp, Artificial
  Synthetic oligonucleotide
aattggcctgcgcgccattaccggaattttcgaagcgccagcgttcccga

SEQ ID NO: 176738 - DNA, 56 bp, Artificial
  Synthetic oligonucleotide
ccgtcaatggggatgtgacggtgagttgttccgggaggttgccagatggtaccgga

SEQ ID NO: 176739 - DNA, 50 bp, Artificial
  Synthetic oligonucleotide
cacctaccgacagcattacgccaggcgtgcgacctaaacaccctgcgact

SEQ ID NO: 176740 - DNA, 50 bp, Artificial
  Synthetic oligonucleotide
atagatacctaccttcggacctatgaagttacgcttgggttagaaccgga

SEQ ID NO: 176741 - DNA, 50 bp, Artificial
  Synthetic oligonucleotide
cagcgcaaagccaatactcagggtcatcgttatccgctggccgttatgca

SEQ ID NO: 176742 - DNA, 50 bp, Artificial
  Synthetic oligonucleotide
aggcgtagctgcaactgccaaatatcgcgcaccagtgcggtgatgcgttt

SEQ ID NO: 176743 - DNA, 50 bp, Artificial
  Synthetic oligonucleotide
tcggtggcggatatctcccgcaccattacgctgcaacaattcttcccggc

SEQ ID NO: 176744 - DNA, 50 bp, Artificial
  Synthetic oligonucleotide
ggcttgtgtcaaccacgccactgtccaattagccactcccggagtcgcgc

SEQ ID NO: 176745 - DNA, 50 bp, Artificial
  Synthetic oligonucleotide
aatgtctcgggatgcgggtatatgagagactcgaccagcacacaaactca

SEQ ID NO: 176746 - DNA, 50 bp, Artificial
  Synthetic oligonucleotide
cttcgggggccacgcggagttcacacagggttccaccctcattctgtgta

SEQ ID NO: 176747 - DNA, 50 bp, Artificial
  Synthetic oligonucleotide
cacagcccggggacacggcaacgccgtaaaaacaatcaggcaggacatcg

SEQ ID NO: 176748 - DNA, 50 bp, Artificial
  Synthetic oligonucleotide
cttcgcattgacctactgctggcctcacgaccgctggctgcgttaatgcg

SEQ ID NO: 176749 - DNA, 59 bp, Artificial
  Synthetic oligonucleotide
ccgtattgtgaacatgttatggagaaacggcaatgatgccctaatatagggctaattgt

SEQ ID NO: 176750 - DNA, 50 bp, Artificial
  Synthetic oligonucleotide
acagcccgctgtcactctccggctcgattgtactgatgcttgcggggcag

SEQ ID NO: 176751 - DNA, 50 bp, Artificial
  Synthetic oligonucleotide
aattacccgttcccgacagcccgggtttgcgtcccacaaccgatcgcgtg

SEQ ID NO: 176752 - DNA, 50 bp, Artificial
  Synthetic oligonucleotide
gcgcaatagccgaagtcccggctcgttaatcgcaaagcgtgctgctagcg

SEQ ID NO: 176753 - DNA, 50 bp, Artificial
  Synthetic oligonucleotide
acggtatggggtttccacccagcgatagaccaccatgcgggtacggcgca

SEQ ID NO: 176754 - DNA, 50 bp, Artificial
  Synthetic oligonucleotide
atagacaagttgtcatatcgggtcaaataaaatcgattagaaaagtagtg

SEQ ID NO: 176755 - DNA, 50 bp, Artificial
  Synthetic oligonucleotide
aggcggctaccatcggacccagcatcagagaagtcacatcgccgacaccc

SEQ ID NO: 176756 - DNA, 50 bp, Artificial
  Synthetic oligonucleotide
aggcggctgctttcccacgggttcgtgaagccttgttacggcgtcagcgt

SEQ ID NO: 176757 - DNA, 50 bp, Artificial
  Synthetic oligonucleotide
gcggtgaggccatcccctgtgcgtcctcccgcgcaaggcttgtcgtagca

SEQ ID NO: 176758 - DNA, 50 bp, Artificial
  Synthetic oligonucleotide
aattattcgtttaactttcgttctatctgcttttggaatggcttatatcg

SEQ ID NO: 176759 - DNA, 50 bp, Artificial
  Synthetic oligonucleotide
acggtcactggctggacggagcaagcaccgacaggagcaaaccttctgta

SEQ ID NO: 176760 - DNA, 53 bp, Artificial
  Synthetic oligonucleotide
ccgtaagcctatcctgaataagttcgcgtaaaggtggttgctgtaaccaaacc

SEQ ID NO: 176761 - DNA, 50 bp, Artificial
  Synthetic oligonucleotide
cagcgcaggctggctcacggcgagacggttcgctgtttcggtaaaatggc

SEQ ID NO: 176762 - DNA, 50 bp, Artificial
  Synthetic oligonucleotide
ccgtgaaacacgggggcggcactgcatcagagcagcgtgttacagtccac

SEQ ID NO: 176763 - DNA, 50 bp, Artificial
  Synthetic oligonucleotide
cttacgacgcttcttcgccatatatcgatactcaacgggtttgacaatct

SEQ ID NO: 176764 - DNA, 50 bp, Artificial
  Synthetic oligonucleotide
ggctggatttaccagcgccggttttacccataatccctattactggttcg

SEQ ID NO: 176765 - DNA, 50 bp, Artificial
  Synthetic oligonucleotide
acgttcccagggcacgcgggacttatgctggggtcggacgttctggacct

SEQ ID NO: 176766 - DNA, 50 bp, Artificial
  Synthetic oligonucleotide
acagcacggttatcgggttcgccagggcacgatgcttcataggaacgggc

SEQ ID NO: 176767 - DNA, 50 bp, Artificial
  Synthetic oligonucleotide
cgttgccgatttcccataccgtaggcccatatatttccttctcccgaccc

SEQ ID NO: 176768 - DNA, 50 bp, Artificial
  Synthetic oligonucleotide
atagcgagggacgtagcgcgatcgccttttaccaacagggactgctgcgc

SEQ ID NO: 176769 - DNA, 50 bp, Artificial
  Synthetic oligonucleotide
ccagatgccctcttccgctttcagtttggataacgctttcatcttacatc

SEQ ID NO: 176770 - DNA, 50 bp, Artificial
  Synthetic oligonucleotide
caccgtgcccgatctcgctaaccgaacggtgttttgctgtggtccggccc

SEQ ID NO: 176771 - DNA, 60 bp, Artificial
  Synthetic oligonucleotide
gcgagagtgcgctctgctgcgagggtatgcagcgtatcgagaggcagtccgaagccagtc

SEQ ID NO: 176772 - DNA, 49 bp, Artificial
  Synthetic oligonucleotide
ccgtaaaacgaagtaatgaagtaagaaggcgccgggtagggggactacc

SEQ ID NO: 176773 - DNA, 50 bp, Artificial
  Synthetic oligonucleotide
ggcgggacccagttgtcccccaagggcgatttgccacgcgagagtgaata

SEQ ID NO: 176774 - DNA, 50 bp, Artificial
  Synthetic oligonucleotide
ccgtgcccggttgcataaccgtcgcggccccggcgtgttgcaggagtatc

SEQ ID NO: 176775 - DNA, 50 bp, Artificial
  Synthetic oligonucleotide
acaacaaccgaccagaaactggcgtagcctttatggcccccgccgtgcat

SEQ ID NO: 176776 - DNA, 50 bp, Artificial
  Synthetic oligonucleotide
taagcgaccgagtcggacgtcctctggcagtaagcgtgccagttcacgct

SEQ ID NO: 176777 - DNA, 50 bp, Artificial
  Synthetic oligonucleotide
ccgtgccgttaacgtgcctgcaatcaccggacgtggcttaaggatcgggc

SEQ ID NO: 176778 - DNA, 50 bp, Artificial
  Synthetic oligonucleotide
taaagcccgcattaactaacaaacacgtatatacgaacacggagtctccg

SEQ ID NO: 176779 - DNA, 50 bp, Artificial
  Synthetic oligonucleotide
tcgtcaacagttccgtcagcactgcgacagcgttctttacccggtcaaaa

SEQ ID NO: 176780 - DNA, 50 bp, Artificial
  Synthetic oligonucleotide
cgcagcgtctccgaggttagtgtacaggcggttggcaacacgttgtgcta

SEQ ID NO: 176781 - DNA, 50 bp, Artificial
  Synthetic oligonucleotide
cttcaagttgccttccggcgtttcactgagcgtccttgctcaggtttaag

SEQ ID NO: 176782 - DNA, 50 bp, Artificial
  Synthetic oligonucleotide
cttataatgccgctgacgtactttcgcggtataaaggtgatgactttcgt

SEQ ID NO: 176783 - DNA, 58 bp, Artificial
  Synthetic oligonucleotide
ccggtgtaatttctctcgcaaggtcgctcatctaaccgctatccctctactgtatccc

SEQ ID NO: 176784 - DNA, 50 bp, Artificial
  Synthetic oligonucleotide
acgttgggctgagtccagtccccatgacggtagggtggtctggcgatgcg

SEQ ID NO: 176785 - DNA, 50 bp, Artificial
  Synthetic oligonucleotide
acgttgggccagcgccagtgaggcatgctcatgttccaacaatcccgcta

SEQ ID NO: 176786 - DNA, 50 bp, Artificial
  Synthetic oligonucleotide
atagccagcgaaatcactctgtctttctggctgtaatagggagattctga

SEQ ID NO: 176787 - DNA, 50 bp, Artificial
  Synthetic oligonucleotide
acgttggcctaaccagttatccgccagccaaccaccgggtagtgcggtca

SEQ ID NO: 176788 - DNA, 50 bp, Artificial
  Synthetic oligonucleotide
cctcaggcgagggcggctcagtaatgctctgtccttacccgaccaatcga

SEQ ID NO: 176789 - DNA, 50 bp, Artificial
  Synthetic oligonucleotide
atatggcatcgttcatctacctggacaatatgtcgaagagcctgaaacgt

SEQ ID NO: 176790 - DNA, 50 bp, Artificial
  Synthetic oligonucleotide
gcgccggcgtattggagtgatagcggccgacaccctgccagaaatccccc

SEQ ID NO: 176791 - DNA, 50 bp, Artificial
  Synthetic oligonucleotide
cctcagcccagtaatcgcccccggcgcgtgcgtaagtgggacggatggtg

SEQ ID NO: 176792 - DNA, 50 bp, Artificial
  Synthetic oligonucleotide
tcttgtggcacgccgtttgcttggtactgacaggtcagttcacccgctga

SEQ ID NO: 176793 - DNA, 50 bp, Artificial
  Synthetic oligonucleotide
cctcagcagcccgtcaccccagcgtacgccgttactgtttcaggccggca

SEQ ID NO: 176794 - DNA, 54 bp, Artificial
  Synthetic oligonucleotide
ccggtgcccctggttttgacaacactctggtcagggcgtagccccaacacccca

SEQ ID NO: 176795 - DNA, 50 bp, Artificial
  Synthetic oligonucleotide
atatgcctcaccgcagcgtcaggcaccgctgaccttaggcacactgaagg

SEQ ID NO: 176796 - DNA, 50 bp, Artificial
  Synthetic oligonucleotide
catgctgcagagcgggcgcgatctaccgggcaaggtaacgggcacaggta

SEQ ID NO: 176797 - DNA, 50 bp, Artificial
  Synthetic oligonucleotide
taaaccgggcggatcactttactgcgctcctgccagtcgttgcgtaccgg

SEQ ID NO: 176798 - DNA, 50 bp, Artificial
  Synthetic oligonucleotide
acagcagcgttggtgtgcatctctccaccacggtggcctgtcttgcgaaa

SEQ ID NO: 176799 - DNA, 50 bp, Artificial
  Synthetic oligonucleotide
acagcagatccagtaatgggccgtactgcgttggcccccgataccccata

SEQ ID NO: 176800 - DNA, 50 bp, Artificial
  Synthetic oligonucleotide
aactgcggatcgattccggagccctccagccaggtttctggcgaagcttg

SEQ ID NO: 176801 - DNA, 50 bp, Artificial
  Synthetic oligonucleotide
atcgcggcgagttgtgggtttccctcacgtctgatcataccgaccgccat

SEQ ID NO: 176802 - DNA, 50 bp, Artificial
  Synthetic oligonucleotide
ggccacggcgggacgtcaggaattaaccatggccgtcaccttaaggctca

SEQ ID NO: 176803 - DNA, 50 bp, Artificial
  Synthetic oligonucleotide
ctgcaataaccgccgctgcccgcataccagtcacggtcaaacggttcgtt

SEQ ID NO: 176804 - DNA, 50 bp, Artificial
  Synthetic oligonucleotide
aactggccatatccgtcacatgggctggcgccgccaaagcgtactccttc

SEQ ID NO: 176805 - DNA, 60 bp, Artificial
  Synthetic oligonucleotide
ccggtgatggcatatcgctattcatgtattttctgcccgcaaaggtggttgtacttctga

SEQ ID NO: 176806 - DNA, 50 bp, Artificial
  Synthetic oligonucleotide
tgtcgatggcctcacccgttcgcacctttcacggtgcattcagcccgcga

SEQ ID NO: 176807 - DNA, 50 bp, Artificial
  Synthetic oligonucleotide
acgctgggcgccaggacgattaacccactcgccctcgactttcagccgcg

SEQ ID NO: 176808 - DNA, 50 bp, Artificial
  Synthetic oligonucleotide
ataaccaacctgagccgccaatacgggtcccactaatggccccgcccctg

SEQ ID NO: 176809 - DNA, 50 bp, Artificial
  Synthetic oligonucleotide
tgtccgttaaactcaggctacctcagtcttcgggccagcaaaagtcgttc

SEQ ID NO: 176810 - DNA, 50 bp, Artificial
  Synthetic oligonucleotide
cattgagggccgaagggacaaaaagtccagctttggtcagctgattaagt

SEQ ID NO: 176811 - DNA, 50 bp, Artificial
  Synthetic oligonucleotide
ccacgagaggcggtgctaagctcaatcggtcgtgaacctacggcagcggg

SEQ ID NO: 176812 - DNA, 50 bp, Artificial
  Synthetic oligonucleotide
aacttcagggggtcagccgaagctattgccagggcgacgcgacagtcaac

SEQ ID NO: 176813 - DNA, 50 bp, Artificial
  Synthetic oligonucleotide
accactgcgcgggatccagttgcactgtaagcacgccgttgcgctgacag

SEQ ID NO: 176814 - DNA, 50 bp, Artificial
  Synthetic oligonucleotide
ccgccgccataatctgttcagccatcagagagggcaacacgaccgggcag

SEQ ID NO: 176815 - DNA, 50 bp, Artificial
  Synthetic oligonucleotide
tgtccactccttaaatgggttgcagggtggctgcttattcgtcaagcatt

SEQ ID NO: 176816 - DNA, 60 bp, Artificial
  Synthetic oligonucleotide
ccagcggttactgaaggttgacccgctgaagtgcatcctgtgcggaagtcagatgcgttt

SEQ ID NO: 176817 - DNA, 50 bp, Artificial
  Synthetic oligonucleotide
ggccatcaacctgcctgaagatagcgcacggttacgtcagcgcgccaaac

SEQ ID NO: 176818 - DNA, 50 bp, Artificial
  Synthetic oligonucleotide
aacgtgcttgcccgctttaatctggacgcgctgcttatccactccggcga

SEQ ID NO: 176819 - DNA, 50 bp, Artificial
  Synthetic oligonucleotide
acgctaaaccgcgaggcatcaacgaggaaatgtcctaaggcctccattgc

SEQ ID NO: 176820 - DNA, 50 bp, Artificial
  Synthetic oligonucleotide
aggtaaacaactggccgaactctatggctatgaatggcgcccggataccg

SEQ ID NO: 176821 - DNA, 50 bp, Artificial
  Synthetic oligonucleotide
aacgttgtcgctcaagtctgccgctctgacggaggccgaacgcttgcgct

SEQ ID NO: 176822 - DNA, 50 bp, Artificial
  Synthetic oligonucleotide
ccagtgccgcccacttacggtacatttccgccatttggcgtgagcagcgc

SEQ ID NO: 176823 - DNA, 50 bp, Artificial
  Synthetic oligonucleotide
tccccgtattgggagtaaccaacagaacaccggacttcacattggctggc

SEQ ID NO: 176824 - DNA, 50 bp, Artificial
  Synthetic oligonucleotide
gccagcaccagtacagcggaagttgcccggcgagcaaaagtctcgaagcg

SEQ ID NO: 176825 - DNA, 50 bp, Artificial
  Synthetic oligonucleotide
cctgtcgtatggtaactatagttgcaatcgctggcgtgatatttcacccc

SEQ ID NO: 176826 - DNA, 50 bp, Artificial
  Synthetic oligonucleotide
tgtctggcgagttggagcgcaatcaaggcacaccacgcaagatgtcccga

SEQ ID NO: 176827 - DNA, 58 bp, Artificial
  Synthetic oligonucleotide
ccggtctgacggattatgcccaggagccgtattactcaacggcggtgggattgcttca

SEQ ID NO: 176828 - DNA, 50 bp, Artificial
  Synthetic oligonucleotide
aactcatggcttcccgcaccacaaccgtgtcccaacacccactatgccct

SEQ ID NO: 176829 - DNA, 50 bp, Artificial
  Synthetic oligonucleotide
gccagcatgtgtactggccgctatccatatgagacgacgcggagcccact

SEQ ID NO: 176830 - DNA, 50 bp, Artificial
  Synthetic oligonucleotide
aactgacgcgtttgccactggaaaccgctcgacagattgcgggtcggacc

SEQ ID NO: 176831 - DNA, 50 bp, Artificial
  Synthetic oligonucleotide
aactgagtccaccggcccaatcgaccacatcaaaccccatcggggtcgta

SEQ ID NO: 176832 - DNA, 50 bp, Artificial
  Synthetic oligonucleotide
acgctcttgggcaaagcatcggactacggctggaagacgcccggaaaacc

SEQ ID NO: 176833 - DNA, 50 bp, Artificial
  Synthetic oligonucleotide
agctgcatgcactgtgttggctccgtgacaaaagcactcgaggcccgtgg

SEQ ID NO: 176834 - DNA, 50 bp, Artificial
  Synthetic oligonucleotide
actggtcgtacggactttcgcacgtctctgccggtggccggtaatcgcat

SEQ ID NO: 176835 - DNA, 50 bp, Artificial
  Synthetic oligonucleotide
cgtcaactcgttctatgccagttgcgaaaaggtctttcgccccgatttgc

SEQ ID NO: 176836 - DNA, 50 bp, Artificial
  Synthetic oligonucleotide
gcccatggtgctgaaactggtatgggtcgagatggcgaggccggtagcat

SEQ ID NO: 176837 - DNA, 50 bp, Artificial
  Synthetic oligonucleotide
cacgcttatcgctgcgccgctgacgtctggactgtcggttatggccacac

SEQ ID NO: 176838 - DNA, 56 bp, Artificial
  Synthetic oligonucleotide
ccgggtttatgcaggatgattccggtacgcatctcgccgcgccgtccaaatacccg

SEQ ID NO: 176839 - DNA, 50 bp, Artificial
  Synthetic oligonucleotide
aagcaataccatcaggccccaccagagtggcggtgcgccgagcaagtcca

SEQ ID NO: 176840 - DNA, 50 bp, Artificial
  Synthetic oligonucleotide
aagcacaaccccattcggggagatttgcgtaactgcgcgcatccggtgta

SEQ ID NO: 176841 - DNA, 50 bp, Artificial
  Synthetic oligonucleotide
aagcacacgctgtctgacgataagctggcgaccgttgccgctgcactgtc

SEQ ID NO: 176842 - DNA, 50 bp, Artificial
  Synthetic oligonucleotide
actggcagctggtcagaccggcgcaaatccgatcaacaccctcggagcat

SEQ ID NO: 176843 - DNA, 50 bp, Artificial
  Synthetic oligonucleotide
ggggcggcaacccgagggatgtgaataggttaacggtgcggtcccggtaa

SEQ ID NO: 176844 - DNA, 50 bp, Artificial
  Synthetic oligonucleotide
aagcaccgctatctggtgccgcctgagaggttgaatatgccggtgcgcca

SEQ ID NO: 176845 - DNA, 50 bp, Artificial
  Synthetic oligonucleotide
accacagatccagccaccggagagctaccgtaacggcatcccgcagtgca

SEQ ID NO: 176846 - DNA, 50 bp, Artificial
  Synthetic oligonucleotide
aagcacggcgagtgaccggggaaaaccgatggcctcgagtcttatcgcaa

SEQ ID NO: 176847 - DNA, 50 bp, Artificial
  Synthetic oligonucleotide
tccggctgacatgactactgccgtcaccccacccagtagtaggcggtcga

SEQ ID NO: 176848 - DNA, 50 bp, Artificial
  Synthetic oligonucleotide
aagcatggtggcccggaagttttaaacgccgtcgagtttacccccgcaga

SEQ ID NO: 176849 - DNA, 58 bp, Artificial
  Synthetic oligonucleotide
ccgggttatctgagttgccgacagataccctattactacagccagtcaatatggttgg

SEQ ID NO: 176850 - DNA, 50 bp, Artificial
  Synthetic oligonucleotide
aagccaactttgaccaaaatcttaaagttgtgcaagcgggtagacgagcg

SEQ ID NO: 176851 - DNA, 50 bp, Artificial
  Synthetic oligonucleotide
gtgtattcaattgacgaggcctttctaactgtgccggatagaatacctaa

SEQ ID NO: 176852 - DNA, 50 bp, Artificial
  Synthetic oligonucleotide
agctgctcgcttggggccgtctgccaggctatctcctcttgtgaaacggc

SEQ ID NO: 176853 - DNA, 50 bp, Artificial
  Synthetic oligonucleotide
actgtccggtgcatagaccagacactgcgcgacagggagtggtccggtta

SEQ ID NO: 176854 - DNA, 50 bp, Artificial
  Synthetic oligonucleotide
accaccttcctgattgagccgtgagcgaagcgaacccaatgacacgaaaa

SEQ ID NO: 176855 - DNA, 50 bp, Artificial
  Synthetic oligonucleotide
aacttggggtgtgaaccgcgtttggccgctatgctctgttttgctgccgg

SEQ ID NO: 176856 - DNA, 50 bp, Artificial
  Synthetic oligonucleotide
gccagttgtgcaacattggcatttggtttcgaagccagttcaaccatatg

SEQ ID NO: 176857 - DNA, 50 bp, Artificial
  Synthetic oligonucleotide
cacggcgagacggttcgctgtttcggtaaaatggcgcaactgagcgaggg

SEQ ID NO: 176858 - DNA, 50 bp, Artificial
  Synthetic oligonucleotide
cgcctctctgggggaaccgcgcatggtgcaggtttccatgcaacttagtt

SEQ ID NO: 176859 - DNA, 50 bp, Artificial
  Synthetic oligonucleotide
ataacgctggctatcaccccatgttggcataaccccgcccttttggcgga

SEQ ID NO: 176860 - DNA, 54 bp, Artificial
  Synthetic oligonucleotide
ccgggtacaaacgccgatcctggggttaattgtccggcgttatctggctaatca

SEQ ID NO: 176861 - DNA, 50 bp, Artificial
  Synthetic oligonucleotide
ccgccttgcgggttcttcccggaccactgccagtggcgtactttcggaac

SEQ ID NO: 176862 - DNA, 50 bp, Artificial
  Synthetic oligonucleotide
tccgcaccgtgcgctttatgattgctatctgacgttgggtgtaatccgtt

SEQ ID NO: 176863 - DNA, 50 bp, Artificial
  Synthetic oligonucleotide
accaccaacccaaaccgccgtggggacttcgcagtgaccgacaaaacctc

SEQ ID NO: 176864 - DNA, 50 bp, Artificial
  Synthetic oligonucleotide
gccattaggtctatttcagaataacctactcctatgtcgccagctggtat

SEQ ID NO: 176865 - DNA, 50 bp, Artificial
  Synthetic oligonucleotide
cgatgctgcaacttgcccgcctttcagactggctcaatcctggcgcatcg

SEQ ID NO: 176866 - DNA, 50 bp, Artificial
  Synthetic oligonucleotide
ccgcgcaaagcgggaaagtgacgcacgaagccctttcaacctgcaccaga

SEQ ID NO: 176867 - DNA, 50 bp, Artificial
  Synthetic oligonucleotide
aagataggcggccacagtatgctcctcagcggcgttgcgcaggtaaacgg

SEQ ID NO: 176868 - DNA, 50 bp, Artificial
  Synthetic oligonucleotide
tccggcatcaaacggtctgacatggcctgacggcagctgcacgctcactg

SEQ ID NO: 176869 - DNA, 50 bp, Artificial
  Synthetic oligonucleotide
tccacaccactcgctgatccgtctgccggttccaagccctgccgtatgga

SEQ ID NO: 176870 - DNA, 50 bp, Artificial
  Synthetic oligonucleotide
aacgctttgctgatggtcagagggtcggtctgcaatggaccacgggcgca

SEQ ID NO: 176871 - DNA, 59 bp, Artificial
  Synthetic oligonucleotide
ccggctatagatttacctgaattgcgtagtgtattgcagcagtttgactcgtttggtaa

SEQ ID NO: 176872 - DNA, 50 bp, Artificial
  Synthetic oligonucleotide
ccttaatctgaccattcccgccgcgaatgcctcagcggataccctgcggg

SEQ ID NO: 176873 - DNA, 50 bp, Artificial
  Synthetic oligonucleotide
acccatggaggccgttttgtcgccattatgcccctgtggcagcgctctgg

SEQ ID NO: 176874 - DNA, 50 bp, Artificial
  Synthetic oligonucleotide
aacggatttcacaccccatttctgcggtctgcctggcaaaagacgcccct

SEQ ID NO: 176875 - DNA, 50 bp, Artificial
  Synthetic oligonucleotide
aacggcaaactgcgaccactgggtatccccgcgttgcgggatcgtattgt

SEQ ID NO: 176876 - DNA, 50 bp, Artificial
  Synthetic oligonucleotide
ccaccggagcttccagcgactgcaatgcctgagtgtcttggttggcaacg

SEQ ID NO: 176877 - DNA, 50 bp, Artificial
  Synthetic oligonucleotide
aacggcaggcgtaaagctgaccgacgcgctatccggggtcgatgcggttt

SEQ ID NO: 176878 - DNA, 50 bp, Artificial
  Synthetic oligonucleotide
acgcggtagcggaactgtccatcgcgccagcactgtagcctaccacgcca

SEQ ID NO: 176879 - DNA, 50 bp, Artificial
  Synthetic oligonucleotide
gcattgcgacacgccggtttttcacgggtgccgcagggattcagctggta

SEQ ID NO: 176880 - DNA, 50 bp, Artificial
  Synthetic oligonucleotide
acccatatttgcccgcacgcccctacgcgtgcacatcaccccgtggactt

SEQ ID NO: 176881 - DNA, 50 bp, Artificial
  Synthetic oligonucleotide
aacggccatcatgggtacgtctacgcgtcaaactacggctggggatcccc

SEQ ID NO: 176882 - DNA, 59 bp, Artificial
  Synthetic oligonucleotide
gcgagacgactaccggccactccataacccgactgagcgtgatcgtctcctgtaacagg

SEQ ID NO: 176883 - DNA, 59 bp, Artificial
  Synthetic oligonucleotide
ccaggaacctcagatacacacccatgccgtcgtcattaacgccacgcagaacggggaca

SEQ ID NO: 176884 - DNA, 50 bp, Artificial
  Synthetic oligonucleotide
tgttctctaatgttttagatatttacgtggcgtacactcatagtattgtc

SEQ ID NO: 176885 - DNA, 50 bp, Artificial
  Synthetic oligonucleotide
cgtacgacgtgttgaaattggggcaacgtggtatggggccgaagcgcagc

SEQ ID NO: 176886 - DNA, 50 bp, Artificial
  Synthetic oligonucleotide
aacggcccgctttcctgcgctggcaacagaggggttaacggtgtgagccg

SEQ ID NO: 176887 - DNA, 50 bp, Artificial
  Synthetic oligonucleotide
acccagcccgagtgaccagaagtcgactaccgccgaatccgcatccaggc

SEQ ID NO: 176888 - DNA, 50 bp, Artificial
  Synthetic oligonucleotide
accccatttggccggagcttttacgccaccggagacaacctgcaaggcgc

SEQ ID NO: 176889 - DNA, 50 bp, Artificial
  Synthetic oligonucleotide
tcatgttatcgataacgaaatttactgggatgaaagccgggcctaccgtt

SEQ ID NO: 176890 - DNA, 50 bp, Artificial
  Synthetic oligonucleotide
agcgtgcattatcgcaaccccaaactcatcagtagtcctgtgaaggttcc

SEQ ID NO: 176891 - DNA, 50 bp, Artificial
  Synthetic oligonucleotide
gacaaggcccggtgactatcacagtgtcacccgcgatggatacacggggg

SEQ ID NO: 176892 - DNA, 50 bp, Artificial
  Synthetic oligonucleotide
agaaaggtcagccgctacccgccttgtccgcgtaaagcaagccgtgttcg

SEQ ID NO: 176893 - DNA, 50 bp, Artificial
  Synthetic oligonucleotide
ctgatgaccctctggccaaaacgcaccggggttccggacgggcaatggca

SEQ ID NO: 176894 - DNA, 52 bp, Artificial
  Synthetic oligonucleotide
ccggcggtctggggaatactcgccttttttgcgcctccccgctccggtgatt

SEQ ID NO: 176895 - DNA, 50 bp, Artificial
  Synthetic oligonucleotide
atctagagctaccaactctttcttccgaaggtaactggcttggtggagca

SEQ ID NO: 176896 - DNA, 50 bp, Artificial
  Synthetic oligonucleotide
cgcgcgcgatcactacggtagtcaaggccggtagacaccgcggttaggcg

SEQ ID NO: 176897 - DNA, 50 bp, Artificial
  Synthetic oligonucleotide
accccatcggcgttcgggcaaaataccctgcggaaactaacactgcggga

SEQ ID NO: 176898 - DNA, 50 bp, Artificial
  Synthetic oligonucleotide
cgcgcgaacgcagtttgatcacgctggctacactgacggcgctgggacgg

SEQ ID NO: 176899 - DNA, 50 bp, Artificial
  Synthetic oligonucleotide
atctaccaacccgatcgtaagagtggcaagacacgtaccgtgcaactgtc

SEQ ID NO: 176900 - DNA, 50 bp, Artificial
  Synthetic oligonucleotide
accccagtcagccagggtcagtgtgttgcccgcctgatagcgcctgtcgc

SEQ ID NO: 176901 - DNA, 50 bp, Artificial
  Synthetic oligonucleotide
aacgcgcctgccgggtaaaccgctggtcgatatccagggtaaaccgatgg

SEQ ID NO: 176902 - DNA, 50 bp, Artificial
  Synthetic oligonucleotide
aacgcgtgacgtctgcaacggaactcaccggctgactccaggctcgcgct

SEQ ID NO: 176903 - DNA, 50 bp, Artificial
  Synthetic oligonucleotide
cgtaatacctgggtatctcctcattcaccccatattactcagctcaacaa

SEQ ID NO: 176904 - DNA, 50 bp, Artificial
  Synthetic oligonucleotide
gggttgtaccgggcagacgagcgggtcagtatgctgtgggctctccttgc

SEQ ID NO: 176905 - DNA, 60 bp, Artificial
  Synthetic oligonucleotide
ccatgcacacatcatgctgaccacgagagctgtcggggaaacgggattcgcaggaaaggt

SEQ ID NO: 176906 - DNA, 50 bp, Artificial
  Synthetic oligonucleotide
ataaatcccccggatagacctggcgtagttcgcccgatttcggtttggta

SEQ ID NO: 176907 - DNA, 50 bp, Artificial
  Synthetic oligonucleotide
aacgctgccccaacgcgcgcaaatcgccagctctctcccgcatgtaggta

SEQ ID NO: 176908 - DNA, 50 bp, Artificial
  Synthetic oligonucleotide
cgcgaactaggggcacagccgcaagagtttcccccaccgagactgagtgc

SEQ ID NO: 176909 - DNA, 50 bp, Artificial
  Synthetic oligonucleotide
atcgggctgcttttcagaccattgcggaaatcgatcccctggcaggcaga

SEQ ID NO: 176910 - DNA, 50 bp, Artificial
  Synthetic oligonucleotide
gctccggcatgacattacaaacagttgtgcatggataaatgcggcgtaca

SEQ ID NO: 176911 - DNA, 50 bp, Artificial
  Synthetic oligonucleotide
tcccagattattaaggcacgcacttttcccggtctgtccgtaagtcacct

SEQ ID NO: 176912 - DNA, 50 bp, Artificial
  Synthetic oligonucleotide
ccgcaccacaagggcagatccgcattatcgccggtctctggcgcggacgt

SEQ ID NO: 176913 - DNA, 50 bp, Artificial
  Synthetic oligonucleotide
atcggctattccggtcgaacctgttcagcagccgagcgaattggctcccc

SEQ ID NO: 176914 - DNA, 50 bp, Artificial
  Synthetic oligonucleotide
aacgtcgcccactgtcttgggcaattggcgatcagggtgtgtatcgcgct

SEQ ID NO: 176915 - DNA, 50 bp, Artificial
  Synthetic oligonucleotide
atcggcgggcgaattcccttctcgcaatggtatgacgggcgcaccaacga

SEQ ID NO: 176916 - DNA, 60 bp, Artificial
  Synthetic oligonucleotide
ccatgcatcttctggtcagtcatgccgccagacggcaaatacgctaaagcggcaataatc

SEQ ID NO: 176917 - DNA, 50 bp, Artificial
  Synthetic oligonucleotide
cattggcgaaagtatattgtggggtatcgtcgttgcggccgttttcgcca

SEQ ID NO: 176918 - DNA, 50 bp, Artificial
  Synthetic oligonucleotide
accattgcagcccaaccagggtgccttcatcgaagcgtttcatgcctggc

SEQ ID NO: 176919 - DNA, 50 bp, Artificial
  Synthetic oligonucleotide
gtggtgatgcggagaaaatgcgcacttatgccgaacgtctggacaaactt

SEQ ID NO: 176920 - DNA, 50 bp, Artificial
  Synthetic oligonucleotide
taccggcaaacgttgccagatttcccgcggccttcaccgcacgctgtttt

SEQ ID NO: 176921 - DNA, 50 bp, Artificial
  Synthetic oligonucleotide
tgtgataaatcgccgccacaaatgcaactgccttttgcgctctggggacg

SEQ ID NO: 176922 - DNA, 50 bp, Artificial
  Synthetic oligonucleotide
aacgtctcatgcgagacgcctgcggctttgtgctcctcgctctggtgtta

SEQ ID NO: 176923 - DNA, 50 bp, Artificial
  Synthetic oligonucleotide
gccacgaccgccaaccggatcgctatgcaactcggctaacgtcagtaccg

SEQ ID NO: 176924 - DNA, 50 bp, Artificial
  Synthetic oligonucleotide
aacggccgtcgcgcctgatgtacccccaactacagccggtaaagacagcg

SEQ ID NO: 176925 - DNA, 50 bp, Artificial
  Synthetic oligonucleotide
aacggcgaaacacgcgccattgataaagcacgttccagcggggcggaatt

SEQ ID NO: 176926 - DNA, 50 bp, Artificial
  Synthetic oligonucleotide
gtggctgtgtaagaatccggaaacgctcacttgtttccggattcttttat

SEQ ID NO: 176927 - DNA, 60 bp, Artificial
  Synthetic oligonucleotide
ccatgcttctgatctatataagaggccaacatagccccgtactgtacttccagtgacgat

SEQ ID NO: 176928 - DNA, 50 bp, Artificial
  Synthetic oligonucleotide
ctgatgtgggatagctgtcagtttaagttcttgcttcactctggctgcta

SEQ ID NO: 176929 - DNA, 50 bp, Artificial
  Synthetic oligonucleotide
atcgggggccttgccaccagcactgtcgtcaattctgcgggtactcagga

SEQ ID NO: 176930 - DNA, 50 bp, Artificial
  Synthetic oligonucleotide
cgcgataacacgccgaccggtaacgcccttgtaacagtccttgcacccca

SEQ ID NO: 176931 - DNA, 50 bp, Artificial
  Synthetic oligonucleotide
aacggcggttatagtcaaatgccggacctgagcacgtaccgcggggctat

SEQ ID NO: 176932 - DNA, 50 bp, Artificial
  Synthetic oligonucleotide
tccagcgcgtaccggcagcacctgatacggtcaggatgtcaggactgatg

SEQ ID NO: 176933 - DNA, 50 bp, Artificial
  Synthetic oligonucleotide
acgcgtggcgcactgtaccaagggagacaatcgggtctcgttcggtcggc

SEQ ID NO: 176934 - DNA, 50 bp, Artificial
  Synthetic oligonucleotide
acccacgctgggtgtttccgtcagctggagtgccagaggccgctaagcgt

SEQ ID NO: 176935 - DNA, 50 bp, Artificial
  Synthetic oligonucleotide
aacggctgcggtgccctgtccccataccacgtcctggttagcgctgtcac

SEQ ID NO: 176936 - DNA, 50 bp, Artificial
  Synthetic oligonucleotide
atcgggctggtaaaaccggactgaactgcgatccgtgccattgtgcgccg

SEQ ID NO: 176937 - DNA, 50 bp, Artificial
  Synthetic oligonucleotide
ccagtggcggaacgcacgtcaatatcactggtgctgcagttgcccgcaat

SEQ ID NO: 176938 - DNA, 60 bp, Artificial
  Synthetic oligonucleotide
cccgcgttatcgctgtgggatttatcagtctggggacactcctgaccctcagtcttgcga

SEQ ID NO: 176939 - DNA, 50 bp, Artificial
  Synthetic oligonucleotide
caaccgtgcagcagtcagcgctcggtttggggccaatgttgttgggcggt

SEQ ID NO: 176940 - DNA, 50 bp, Artificial
  Synthetic oligonucleotide
aacgggcaacgcatgctgccgtgtccctactgccgatcgcggatcgctct

SEQ ID NO: 176941 - DNA, 50 bp, Artificial
  Synthetic oligonucleotide
aacgggtagcccgtgacgagcagtatcaacaggtagcgcgagctgcggta

SEQ ID NO: 176942 - DNA, 50 bp, Artificial
  Synthetic oligonucleotide
tgtggtattgactacatacatttagatgagctggccccaacaaaatcaat

SEQ ID NO: 176943 - DNA, 50 bp, Artificial
  Synthetic oligonucleotide
acatcgccatcatcggttggcacaggcccatggctcggccacctagctcc

SEQ ID NO: 176944 - DNA, 50 bp, Artificial
  Synthetic oligonucleotide
aggatcaccaatgggtaaaggcgcccaacctaccgcggcaccactgtcat

SEQ ID NO: 176945 - DNA, 50 bp, Artificial
  Synthetic oligonucleotide
gttatttcgatcttcaacacaatgcaggattcccaagttgtggtcctgtc

SEQ ID NO: 176946 - DNA, 50 bp, Artificial
  Synthetic oligonucleotide
aagggtggtcaattccttcccgcctgagtaccccgggccaggagtacgat

SEQ ID NO: 176947 - DNA, 50 bp, Artificial
  Synthetic oligonucleotide
aaggtcgtttccccacgctatgggtcagggtggtccaacggcgcgcctgt

SEQ ID NO: 176948 - DNA, 50 bp, Artificial
  Synthetic oligonucleotide
tgctttgccaatcagcactgaaacgaatacaagattgcaccagcgcaggg

SEQ ID NO: 176949 - DNA, 60 bp, Artificial
  Synthetic oligonucleotide
cccgcgatccctacaacgttctgactgcaccatcccttcacaggccggcatggcataccc

SEQ ID NO: 176950 - DNA, 50 bp, Artificial
  Synthetic oligonucleotide
aaggtctggttgcaacacagcccgttacggtgacttacacgcagacagac

SEQ ID NO: 176951 - DNA, 50 bp, Artificial
  Synthetic oligonucleotide
gaaccaaaatggggctcgccatccccatgcctcggctaatagcccaccta

SEQ ID NO: 176952 - DNA, 50 bp, Artificial
  Synthetic oligonucleotide
gccgctgtatgcgcaaacggtggacgtacagcaaaaacttgccgaattag

SEQ ID NO: 176953 - DNA, 50 bp, Artificial
  Synthetic oligonucleotide
tcctttccgtcatgtcataacaccgcgtccgtaagggaggatatatctgt

SEQ ID NO: 176954 - DNA, 50 bp, Artificial
  Synthetic oligonucleotide
actgaccgctccgtggctgaagtctgcgtgattgcccactcactgtcccg

SEQ ID NO: 176955 - DNA, 50 bp, Artificial
  Synthetic oligonucleotide
ctaacacaaacatctgctcgtgttgctttagctgtacgtcaagcaattaa

SEQ ID NO: 176956 - DNA, 50 bp, Artificial
  Synthetic oligonucleotide
tgcttaccccacacagtggcaacacattattgatgcgaataaccagcgtc

SEQ ID NO: 176957 - DNA, 50 bp, Artificial
  Synthetic oligonucleotide
catgacgccctgtacgtatattcccgtcagtaaatccgttcttgcccggg

SEQ ID NO: 176958 - DNA, 50 bp, Artificial
  Synthetic oligonucleotide
ccggatctggcggcgtcttctacagtggcccaaccggtcacggtaaatct

SEQ ID NO: 176959 - DNA, 50 bp, Artificial
  Synthetic oligonucleotide
aaggtgttgtgtgtggctttcggggtatgcgcacaagcgacgattggcga

SEQ ID NO: 176960 - DNA, 58 bp, Artificial
  Synthetic oligonucleotide
ccattactgcaacaactcgaagttactttgagaaactcgattgataaagaagcgacaa

SEQ ID NO: 176961 - DNA, 50 bp, Artificial
  Synthetic oligonucleotide
atcccggaagcgaggtttttgattggacgggccaggggactctggctcac

SEQ ID NO: 176962 - DNA, 50 bp, Artificial
  Synthetic oligonucleotide
actgatgcgcaatgcagtgggatggctagcgtcgagaacagcctgcccgg

SEQ ID NO: 176963 - DNA, 50 bp, Artificial
  Synthetic oligonucleotide
aaggcagtgcccttaacgtcggtaagggatgggcggtagcgtctttattc

SEQ ID NO: 176964 - DNA, 50 bp, Artificial
  Synthetic oligonucleotide
gaacgcagcctacgtgcatgcgactccagtgattcggcgactagcacgcg

SEQ ID NO: 176965 - DNA, 50 bp, Artificial
  Synthetic oligonucleotide
aggactcccaggcgcagtaccagtttggcgtgacgatgccgttgcgacat

SEQ ID NO: 176966 - DNA, 50 bp, Artificial
  Synthetic oligonucleotide
ccggaataatacggcgcagcggacggacaaccggctgtgtggctttcacg

SEQ ID NO: 176967 - DNA, 50 bp, Artificial
  Synthetic oligonucleotide
aggagagagtgccgccttacccaacgcgatttttccgtagcgaccgcctg

SEQ ID NO: 176968 - DNA, 50 bp, Artificial
  Synthetic oligonucleotide
ataatccttaccggtgccgggtaacaccatcacatcgggccgggtgggag

SEQ ID NO: 176969 - DNA, 50 bp, Artificial
  Synthetic oligonucleotide
tacatggaacaattcgtgtacacgcagtgaaaggtttcgaagcacgctga

SEQ ID NO: 176970 - DNA, 50 bp, Artificial
  Synthetic oligonucleotide
tacatctggaacgttgtcagtagcaaccttacgcctttccatgaataccg

SEQ ID NO: 176971 - DNA, 56 bp, Artificial
  Synthetic oligonucleotide
cccgccctgtaacgtttctacaggcatcattgccgttccatcccccatagggttgc

SEQ ID NO: 176972 - DNA, 50 bp, Artificial
  Synthetic oligonucleotide
tcctcgcggccgtttctgtgttagctcttgccgggtgtgcctctcaaagc

SEQ ID NO: 176973 - DNA, 50 bp, Artificial
  Synthetic oligonucleotide
cgccctgcggcacggacactgccgaccgccgagttaaatgcggatttggc

SEQ ID NO: 176974 - DNA, 50 bp, Artificial
  Synthetic oligonucleotide
gggctgcccgcccgaaatgtaactctttgcccacggcgacaaaacaacgc

SEQ ID NO: 176975 - DNA, 50 bp, Artificial
  Synthetic oligonucleotide
aaggccgtgtcgctatccagccctgtttcgccagacaccacacgtggttg

SEQ ID NO: 176976 - DNA, 50 bp, Artificial
  Synthetic oligonucleotide
tcctctcgttacctcatacgatctcccactgtatacgcaagatttttgtc

SEQ ID NO: 176977 - DNA, 50 bp, Artificial
  Synthetic oligonucleotide
acatgacgccagcaacccccgtccctagcccctgtaacgcactggcaaca

SEQ ID NO: 176978 - DNA, 50 bp, Artificial
  Synthetic oligonucleotide
tcctgagaaacgccaggtaaacgtttgcctacacacaccctaatcgcaac

SEQ ID NO: 176979 - DNA, 50 bp, Artificial
  Synthetic oligonucleotide
ggccgtgttgttatcgatggagcatggcgacgcgaataaacgcgggcgta

SEQ ID NO: 176980 - DNA, 50 bp, Artificial
  Synthetic oligonucleotide
aagtggccatttcgctacaggcctatcaggcacgtaccggcgagagtcga

SEQ ID NO: 176981 - DNA, 50 bp, Artificial
  Synthetic oligonucleotide
aagtggcctggcttccggtgtaattatgctgacgcttagtcgcttcattg

SEQ ID NO: 176982 - DNA, 52 bp, Artificial
  Synthetic oligonucleotide
cccgccagacaacacaaaaccggccagacgttaccgttttccgggaccatga

SEQ ID NO: 176983 - DNA, 50 bp, Artificial
  Synthetic oligonucleotide
ctgctggcctcacgaccgctggctgcgttaatgcgagcgactggtatcga

SEQ ID NO: 176984 - DNA, 50 bp, Artificial
  Synthetic oligonucleotide
cgtctatactttcaggattacaacctaatcctaataccgattcagttggg

SEQ ID NO: 176985 - DNA, 50 bp, Artificial
  Synthetic oligonucleotide
aagttggctggcgcaatcgtgcggagcatgtgtccccctgctgatatcac

SEQ ID NO: 176986 - DNA, 50 bp, Artificial
  Synthetic oligonucleotide
atccccaatttgcgcggcgaatggcccaaaatattaccttcgttggtgga

SEQ ID NO: 176987 - DNA, 50 bp, Artificial
  Synthetic oligonucleotide
tcgagcgtttggtcgttcattgacgcgggatcttccaacggttccacatg

SEQ ID NO: 176988 - DNA, 50 bp, Artificial
  Synthetic oligonucleotide
ccggcgggacctcagcccagtaatcgcccccggcgcgtgcgtaagtggga

SEQ ID NO: 176989 - DNA, 50 bp, Artificial
  Synthetic oligonucleotide
aataagcgtttatgacgcttaccacttcgcaaaaccagcgccaagtcaat

SEQ ID NO: 176990 - DNA, 50 bp, Artificial
  Synthetic oligonucleotide
ataccgtgcggttgtttactgacggcagttgccagtgccggtcgtgcact

SEQ ID NO: 176991 - DNA, 50 bp, Artificial
  Synthetic oligonucleotide
aatacccgctgctggttgacgctgtgtgccggggcatcacctgattgggg

SEQ ID NO: 176992 - DNA, 50 bp, Artificial
  Synthetic oligonucleotide
actcttgaaacacactcgatcataacgatcgaaataactcgcttccgttt

SEQ ID NO: 176993 - DNA, 60 bp, Artificial
  Synthetic oligonucleotide
gcgacgtaatcagcgtaccagccggatttgtaactgatctcgccaccgtgccatgcatct

SEQ ID NO: 176994 - DNA, 55 bp, Artificial
  Synthetic oligonucleotide
cccgcaccgcctgagacgcactcagagccctttgaagccgtaagccgtaaaaaac

SEQ ID NO: 176995 - DNA, 50 bp, Artificial
  Synthetic oligonucleotide
gaaagccgacactgatgagaataatatccaatggatctgaaaacgtttga

SEQ ID NO: 176996 - DNA, 50 bp, Artificial
  Synthetic oligonucleotide
cagcttgcactcctcttaatcgtaagatatcatgtggtgattctggtcca

SEQ ID NO: 176997 - DNA, 50 bp, Artificial
  Synthetic oligonucleotide
ctgctgtggcggcgtaaatagtttgccactcactgaacgccaggcgggtc

SEQ ID NO: 176998 - DNA, 50 bp, Artificial
  Synthetic oligonucleotide
acggatggcgccgcaacttgatggcagccgcgtcggtatgtgttcgatgg

SEQ ID NO: 176999 - DNA, 50 bp, Artificial
  Synthetic oligonucleotide
atcccgctggcatggttaaccgcacttagagacccccagtggccgggtta

SEQ ID NO: 177000 - DNA, 50 bp, Artificial
  Synthetic oligonucleotide
acatcagggcggacagcacgggtcactgccaacgttcaggtttcagagcg

SEQ ID NO: 177001 - DNA, 50 bp, Artificial
  Synthetic oligonucleotide
caagtcgcccccggataatcaccctccggcccccgacaatagcgtgttga

SEQ ID NO: 177002 - DNA, 50 bp, Artificial
  Synthetic oligonucleotide
caagtgggtttgccgctgggtctaccggggatcccgccgattttgcttgg

SEQ ID NO: 177003 - DNA, 50 bp, Artificial
  Synthetic oligonucleotide
gaaattgtcgcggatccatgctatcgacgctgacattaattgccgtcagg

SEQ ID NO: 177004 - DNA, 50 bp, Artificial
  Synthetic oligonucleotide
caagtgtgcgtgactgactcggtgtcctgcgcatgcacaaggggcgacca

SEQ ID NO: 177005 - DNA, 58 bp, Artificial
  Synthetic oligonucleotide
ccattcacggctgccggacttacggtcgggcgccactctgacaatatcggccacccga

SEQ ID NO: 177006 - DNA, 50 bp, Artificial
  Synthetic oligonucleotide
ccggcatgggggatgacccgtcgctggctgaccttatcggttcggtaaaa

SEQ ID NO: 177007 - DNA, 50 bp, Artificial
  Synthetic oligonucleotide
aagtccgctgctgggaccacgttgccgcttcacaccaacatgctcgcaat

SEQ ID NO: 177008 - DNA, 50 bp, Artificial
  Synthetic oligonucleotide
aggggtatccatgcaggcgctgatacacggcgataaaaccattatcgagg

SEQ ID NO: 177009 - DNA, 50 bp, Artificial
  Synthetic oligonucleotide
cctgccatcaacgataagaagtcagattcaggtgtgaatattccggcagg

SEQ ID NO: 177010 - DNA, 50 bp, Artificial
  Synthetic oligonucleotide
gttcatcctgaccagtgacgctgttcatatttgcggaataagatctgcgc

SEQ ID NO: 177011 - DNA, 50 bp, Artificial
  Synthetic oligonucleotide
aagtctggacaccgcaagagctggcacacatggcggagttgtgtgagcgc

SEQ ID NO: 177012 - DNA, 50 bp, Artificial
  Synthetic oligonucleotide
gggcgctcttgccatgacgacgcgacagccgtaactgaagttgccacata

SEQ ID NO: 177013 - DNA, 50 bp, Artificial
  Synthetic oligonucleotide
acggcaataccacgtaacgcttgatccccgggcgcgaaatcagtcgccac

SEQ ID NO: 177014 - DNA, 50 bp, Artificial
  Synthetic oligonucleotide
cctgcactacagtcaattatttccacaacaccactgaatatcaaggacat

SEQ ID NO: 177015 - DNA, 50 bp, Artificial
  Synthetic oligonucleotide
actgcgtctggagaatggactgcgctggggaaagcaggcgctgtgtcgtt

SEQ ID NO: 177016 - DNA, 59 bp, Artificial
  Synthetic oligonucleotide
cccgaaatcattcttcttaactcgcatgatggatcgtccagttatcaaatgatcccggg

SEQ ID NO: 177017 - DNA, 50 bp, Artificial
  Synthetic oligonucleotide
gctacggttgttctgctcggcgcattgttctatcaccgcgtgagtttatt

SEQ ID NO: 177018 - DNA, 50 bp, Artificial
  Synthetic oligonucleotide
ccgctcacgacgcttagcgctggttcgggttgatcccatggcgccaatat

SEQ ID NO: 177019 - DNA, 50 bp, Artificial
  Synthetic oligonucleotide
aagccgtggctcaccgataaaccatggcactccggcagcacccgtcagtg

SEQ ID NO: 177020 - DNA, 50 bp, Artificial
  Synthetic oligonucleotide
actgcgctgttcaacgactgaatgcggaatggcccagaggcgaccgtggt

SEQ ID NO: 177021 - DNA, 50 bp, Artificial
  Synthetic oligonucleotide
ataagcgtctttccgatatggaaactgcgctagccacctttaaacaggag

SEQ ID NO: 177022 - DNA, 50 bp, Artificial
  Synthetic oligonucleotide
gttaacaccccgaccgcagtgccaatggttttctacattccgtccagcaa

SEQ ID NO: 177023 - DNA, 50 bp, Artificial
  Synthetic oligonucleotide
actgcgagcgccggcaaatagatacggcaacactgcggacttcgcgtagc

SEQ ID NO: 177024 - DNA, 50 bp, Artificial
  Synthetic oligonucleotide
cgccggtagattggtttgcgtattgacttcggtatacatatccagtggcg

SEQ ID NO: 177025 - DNA, 50 bp, Artificial
  Synthetic oligonucleotide
actgcctgcgactttaccgcggttaactctcggcatctcctttgcgcgga

SEQ ID NO: 177026 - DNA, 50 bp, Artificial
  Synthetic oligonucleotide
gcccgcaggtactgtgccgtgacccggtaacctgattgctacagccacat

SEQ ID NO: 177027 - DNA, 55 bp, Artificial
  Synthetic oligonucleotide
cccctgccggcgcgtaccactgaccgcgatatcctccgggcgattatggaggggg

SEQ ID NO: 177028 - DNA, 50 bp, Artificial
  Synthetic oligonucleotide
gaagactctcattaagttgcattcgacgccaacgattacgtaacgcaata

SEQ ID NO: 177029 - DNA, 50 bp, Artificial
  Synthetic oligonucleotide
caagcggctgagcccgcatcctcggcacacactttacgactcgccattgg

SEQ ID NO: 177030 - DNA, 50 bp, Artificial
  Synthetic oligonucleotide
aagcgacaagtgcggcgatataaagcgctgttcggactccgccccttccg

SEQ ID NO: 177031 - DNA, 50 bp, Artificial
  Synthetic oligonucleotide
aagcgacaatctccatactcgcgccccgcaagcgtagctcgcaaagcgtt

SEQ ID NO: 177032 - DNA, 50 bp, Artificial
  Synthetic oligonucleotide
caggcatcattaaggctggccacccaaattaatcgttttcgacagagagc

SEQ ID NO: 177033 - DNA, 50 bp, Artificial
  Synthetic oligonucleotide
tggcttcgcgcgcagttagaccggccaatacctccttggtcgctgacctt

SEQ ID NO: 177034 - DNA, 50 bp, Artificial
  Synthetic oligonucleotide
gaagccttcgcacgccgcattatccgacgagccacccttgcgcgacatgg

SEQ ID NO: 177035 - DNA, 50 bp, Artificial
  Synthetic oligonucleotide
gaagccccaccgtgttgttggcggcgggtgctcgcaaccctcatgcactt

SEQ ID NO: 177036 - DNA, 50 bp, Artificial
  Synthetic oligonucleotide
gaagcatcagctcaagcaatgatcaatgtactaaataacatatggaaagc

SEQ ID NO: 177037 - DNA, 50 bp, Artificial
  Synthetic oligonucleotide
actggacgttgcggcagaattcctgcccgacccgcaaattgccccggtat

SEQ ID NO: 177038 - DNA, 60 bp, Artificial
  Synthetic oligonucleotide
cccctcgtatttcaatctgcaacgctcgccgcaagatgcaaactggttttgcatcgagga

SEQ ID NO: 177039 - DNA, 50 bp, Artificial
  Synthetic oligonucleotide
cgtcaccccaatgcaacaatagatgtgatggcgccggagtggtgccgtgc

SEQ ID NO: 177040 - DNA, 50 bp, Artificial
  Synthetic oligonucleotide
aagcccgcaaggcccgctttcacgctgaagccatcgatcccgataaaggc

SEQ ID NO: 177041 - DNA, 50 bp, Artificial
  Synthetic oligonucleotide
actggacggatgcgctgtttagcctcaccgttcacgcaccggttgcgccg

SEQ ID NO: 177042 - DNA, 50 bp, Artificial
  Synthetic oligonucleotide
accaatgaatattaagtgtgttttgtagggcatcgagtacccggggactg

SEQ ID NO: 177043 - DNA, 50 bp, Artificial
  Synthetic oligonucleotide
tccggggccggatagatatgtctcaaagcaagccgtttgcccacagccac

SEQ ID NO: 177044 - DNA, 50 bp, Artificial
  Synthetic oligonucleotide
atcctggcggtcgcagcaccctgctatctccacaccctgaaagatgcgtc

SEQ ID NO: 177045 - DNA, 50 bp, Artificial
  Synthetic oligonucleotide
aagcccggaacggtatccggagtcagccacgcggcgactcgtgcgagctg

SEQ ID NO: 177046 - DNA, 50 bp, Artificial
  Synthetic oligonucleotide
ccgctaatggccaacgaggacgcacagtcacacccaaccctgcgtttgca

SEQ ID NO: 177047 - DNA, 50 bp, Artificial
  Synthetic oligonucleotide
gctactgacattatcgagaaagcacaaagccaggcgtctgctgtagagcg

SEQ ID NO: 177048 - DNA, 50 bp, Artificial
  Synthetic oligonucleotide
aagccgcgctttaatggcgcacagggcgtaagcgttatacctcgggagct

SEQ ID NO: 177049 - DNA, 51 bp, Artificial
  Synthetic oligonucleotide
ccccgttagggggttttttgttctcgccattttatcccgttgcattcatcc

SEQ ID NO: 177050 - DNA, 50 bp, Artificial
  Synthetic oligonucleotide
aagccggtagttttgccatccgttgctgcggctcctgagtttgtgccgat

SEQ ID NO: 177051 - DNA, 50 bp, Artificial
  Synthetic oligonucleotide
accaacgacgcaccaaaatgggggcggaacacgctggtgtgccagtcacg

SEQ ID NO: 177052 - DNA, 50 bp, Artificial
  Synthetic oligonucleotide
taccaggccggaaacatcgatatgtacgacgtcaaatggagagataccaa

SEQ ID NO: 177053 - DNA, 50 bp, Artificial
  Synthetic oligonucleotide
aggaacacgataatccatcaggataagtggcccggaagaatcgaatacct

SEQ ID NO: 177054 - DNA, 50 bp, Artificial
  Synthetic oligonucleotide
gccctgatgatagtcccgagcccctcatcccggcacggacatacattccc

SEQ ID NO: 177055 - DNA, 50 bp, Artificial
  Synthetic oligonucleotide
aagctcgccccgtatccccgcaggcaaaggtttaccgaagacgtccgcgc

SEQ ID NO: 177056 - DNA, 50 bp, Artificial
  Synthetic oligonucleotide
gccctttctccggcactgaggcgcgctggcatgctaattgctaacagcct

SEQ ID NO: 177057 - DNA, 50 bp, Artificial
  Synthetic oligonucleotide
gccgaaccctcacgatttccgcatagggtagtttcggggcgccgtccgca

SEQ ID NO: 177058 - DNA, 50 bp, Artificial
  Synthetic oligonucleotide
caaggggcgaccactcctgtaactgcgttcgccagaagtccgcgtgttct

SEQ ID NO: 177059 - DNA, 50 bp, Artificial
  Synthetic oligonucleotide
gaacgcctgaggtttcgggccaatttcattcaggccacggcgggacgtca

SEQ ID NO: 177060 - DNA, 54 bp, Artificial
  Synthetic oligonucleotide
ccccgttaggggggggttgttctgtaggtctgcgcaccgatgatacatactggg

SEQ ID NO: 177061 - DNA, 50 bp, Artificial
  Synthetic oligonucleotide
tccgtgggaacgtacaacggtgactcccgcaagcctatggcaacaccccg

SEQ ID NO: 177062 - DNA, 50 bp, Artificial
  Synthetic oligonucleotide
tggcctgtcgctactaatggtacacgccatacatggtaccgatcatcgac

SEQ ID NO: 177063 - DNA, 50 bp, Artificial
  Synthetic oligonucleotide
atccgcgcagtgggcaaatccctcgccatgcaaatggtactaacgggaga

SEQ ID NO: 177064 - DNA, 50 bp, Artificial
  Synthetic oligonucleotide
aagctgcttaccggggaatgtgacgtactggcctacccagcggcgagtca

SEQ ID NO: 177065 - DNA, 50 bp, Artificial
  Synthetic oligonucleotide
atccgactgtctgctgcgctggggagtaatccggcgttttggatgcgctt

SEQ ID NO: 177066 - DNA, 50 bp, Artificial
  Synthetic oligonucleotide
ggcccggcaagggaatctcactgcgctttttgcccttagtgttcggctgc

SEQ ID NO: 177067 - DNA, 50 bp, Artificial
  Synthetic oligonucleotide
ggggatcgggtgtttaggcctcgtattaggcttaatgttactgcccaatg

SEQ ID NO: 177068 - DNA, 50 bp, Artificial
  Synthetic oligonucleotide
agggtgtgctgtgtaatgggccacgggtcattaacctgccggtgacaccg

SEQ ID NO: 177069 - DNA, 50 bp, Artificial
  Synthetic oligonucleotide
acattcagcaaccccgtgagcgaaccactccctgcgccgatagccatgtt

SEQ ID NO: 177070 - DNA, 50 bp, Artificial
  Synthetic oligonucleotide
aaggaaattttcgcggtaaccacaataacgaggaagtctatgcagcgttg

SEQ ID NO: 177071 - DNA, 55 bp, Artificial
  Synthetic oligonucleotide
ccccggattcaccgtacgaatacgtcacgttctgccatacctgccgtcgttttga

SEQ ID NO: 177072 - DNA, 50 bp, Artificial
  Synthetic oligonucleotide
aaggacgtcaacctcccggttgtcgcctgcatagagacgcatgtttcggt

SEQ ID NO: 177073 - DNA, 50 bp, Artificial
  Synthetic oligonucleotide
gctaatcctggcagattatctaaccgaggtaatctggcttcagcagagca

SEQ ID NO: 177074 - DNA, 50 bp, Artificial
  Synthetic oligonucleotide
actgccggtggctactggccggaaggggaacaacaccttccgctggactg

SEQ ID NO: 177075 - DNA, 50 bp, Artificial
  Synthetic oligonucleotide
aagcgaccacatgccgtaaaccatcgcgtaccgcactcaggcgccgaatg

SEQ ID NO: 177076 - DNA, 50 bp, Artificial
  Synthetic oligonucleotide
ccgctgaactgataccggttactgcgcgtggtaccgaggaaaccgctcgc

SEQ ID NO: 177077 - DNA, 50 bp, Artificial
  Synthetic oligonucleotide
acattgcttatccccgccgtcctaagcccgctgtctcgccttacccggat

SEQ ID NO: 177078 - DNA, 50 bp, Artificial
  Synthetic oligonucleotide
actgcccaggttatgcaaaacgactccctcacagcgccgcaacggcccct

SEQ ID NO: 177079 - DNA, 50 bp, Artificial
  Synthetic oligonucleotide
tggctcacttcgcctgcactgcccgaagccaggatctcttgtgcacgtga

SEQ ID NO: 177080 - DNA, 50 bp, Artificial
  Synthetic oligonucleotide
aagcgccatgtcaggcccgtcggcgttactcactgctgcggacgccaccc

SEQ ID NO: 177081 - DNA, 50 bp, Artificial
  Synthetic oligonucleotide
tccgtgacccggacctgattggcccggacgagcgattaggtgcaacaacg

SEQ ID NO: 177082 - DNA, 60 bp, Artificial
  Synthetic oligonucleotide
ccccgcgccatgcagccggatgcatagccattcaccctctcaggattcatctgtgccgtt

SEQ ID NO: 177083 - DNA, 50 bp, Artificial
  Synthetic oligonucleotide
gcccgtccatgtcacaggtattaacccaaatgcgtgccgaaacgcattat

SEQ ID NO: 177084 - DNA, 50 bp, Artificial
  Synthetic oligonucleotide
aggaatcgtgtgaacggggcgaatattacttagcggtaccttgtctgtca

SEQ ID NO: 177085 - DNA, 50 bp, Artificial
  Synthetic oligonucleotide
tggcgtgggcttaccgctatcatggccgtaccagtgacgaaacaatgcta

SEQ ID NO: 177086 - DNA, 50 bp, Artificial
  Synthetic oligonucleotide
aagcgcggggtggtagtggctggacgtatgagcgctgaagagggcgcgat

SEQ ID NO: 177087 - DNA, 50 bp, Artificial
  Synthetic oligonucleotide
aagcggcctgcaagcggatcagtacgccactatgcgccatccctgcccga

SEQ ID NO: 177088 - DNA, 50 bp, Artificial
  Synthetic oligonucleotide
aagcggcggaccagactgcctgcccgaacgtgcaataagcggcggaccag

SEQ ID NO: 177089 - DNA, 50 bp, Artificial
  Synthetic oligonucleotide
aagcgtaatcttcacgccacataagcaaggcaggcgatatagccataatt

SEQ ID NO: 177090 - DNA, 50 bp, Artificial
  Synthetic oligonucleotide
aagctccggcgcggttttcacggagggcgtgcgccttacagaccaaatcg

SEQ ID NO: 177091 - DNA, 47 bp, Artificial
  Synthetic oligonucleotide
tcaccttctgaggtcgttatggacgcattattgcaactcaaagggat

SEQ ID NO: 177092 - DNA, 47 bp, Artificial
  Synthetic oligonucleotide
accgggctgtagcagcctgacgaggcgccaataccctatacgaagct

SEQ ID NO: 177093 - DNA, 57 bp, Artificial
  Synthetic oligonucleotide
ccccgacgattttggaataacgtcacatggcatttattcggatgaataatccagaac

SEQ ID NO: 177094 - DNA, 57 bp, Artificial
  Synthetic oligonucleotide
gcgacagtggtctggcagctaatccgggcggcaaaacgcggaaagagttcccgctgg

SEQ ID NO: 177095 - DNA, 58 bp, Artificial
  Synthetic oligonucleotide
cccccggaaaccacaaattgggagcacgtgcaaactctagcacactcaatcgagcttc

SEQ ID NO: 177096 - DNA, 51 bp, Artificial
  Synthetic oligonucleotide
cccccgacacccggaactgacggagaacaacggaaggtgaacaaataacaa

SEQ ID NO: 177097 - DNA, 58 bp, Artificial
  Synthetic oligonucleotide
ccccccttactgacgaattccggcaccgtaaggatacgtcatgcatattgatatgtcg

SEQ ID NO: 177098 - DNA, 56 bp, Artificial
  Synthetic oligonucleotide
cccatttgagtgcgactgtcggattaaaataagggccgacaataaacatttgacag

SEQ ID NO: 177099 - DNA, 56 bp, Artificial
  Synthetic oligonucleotide
cccagtagataaaacacattgcacccaggaaatcccccataagtcccccatcagta

SEQ ID NO: 177100 - DNA, 60 bp, Artificial
  Synthetic oligonucleotide
cccaggtagcgtgccgtattccgccctccggctgtcttcttcgacatgtacacatgccag

SEQ ID NO: 177101 - DNA, 60 bp, Artificial
  Synthetic oligonucleotide
cccaaggagagatcgtcgcgggccaccgaatggcgcagcgttttgcaatgtgctcaacgt

SEQ ID NO: 177102 - DNA, 55 bp, Artificial
  Synthetic oligonucleotide
cccagggtctgcgccacaatgctcgacgtttcccctccggccacaataaagcggg

SEQ ID NO: 177103 - DNA, 56 bp, Artificial
  Synthetic oligonucleotide
ccgaccggccagaagaagaactgcctccgtcataccgggaatggccggtcagcttc

SEQ ID NO: 177104 - DNA, 57 bp, Artificial
  Synthetic oligonucleotide
ccgaagggaaacgtgggcagtaaaagacctggaacacggcacagcattcctgatcgc

SEQ ID NO: 177105 - DNA, 57 bp, Artificial
  Synthetic oligonucleotide
atctagtatatatataacctaatatgttcggcttgaagactaaaaattgcttcggaa

SEQ ID NO: 177106 - DNA, 55 bp, Artificial
  Synthetic oligonucleotide
gcgaaggttactgaagagaacctgcacgccccggtggattttgggccgcctgtcg

SEQ ID NO: 177107 - DNA, 55 bp, Artificial
  Synthetic oligonucleotide
ccgaaacgggtggtacagccgttttccgctatcgcccagaactgcgttgagctgg

SEQ ID NO: 177108 - DNA, 58 bp, Artificial
  Synthetic oligonucleotide
ccataccagcctcgggcgttgccagtgcctgtcttgatccgatcgggtaacaggttaa

SEQ ID NO: 177109 - DNA, 56 bp, Artificial
  Synthetic oligonucleotide
ccctttcgctcagtgcctccatcacttcgagcccgataaatccccccccgacaagc

SEQ ID NO: 177110 - DNA, 59 bp, Artificial
  Synthetic oligonucleotide
ccctttaagggtgttgtattcctgcacgatattgctgtgaattgtcgcaatatccctgt

SEQ ID NO: 177111 - DNA, 59 bp, Artificial
  Synthetic oligonucleotide
cccttacgcccggaactgttatcagcctagaggcgcttcagtgtgattacagtgctggt

SEQ ID NO: 177112 - DNA, 58 bp, Artificial
  Synthetic oligonucleotide
ccatatagcgttcagcaatagggtgacgtttaatcacatttacgcgataaaactcctg

SEQ ID NO: 177113 - DNA, 56 bp, Artificial
  Synthetic oligonucleotide
ccctgttatccaggcttatggcagattaacttcccggagagaaactgtcgaaaaca

SEQ ID NO: 177114 - DNA, 60 bp, Artificial
  Synthetic oligonucleotide
ccctgttaacgacaattgactgcaaactggctatagcatctcacatgcgtaattgtgatg

SEQ ID NO: 177115 - DNA, 54 bp, Artificial
  Synthetic oligonucleotide
ccctgtggatagcggcacttatccacgtgaaatcggacccccccggtacgtgaa

SEQ ID NO: 177116 - DNA, 55 bp, Artificial
  Synthetic oligonucleotide
ccctgtgacgtcgggacaaaacgccagtgaagtagtgggtcatgtaaatgaaaac

SEQ ID NO: 177117 - DNA, 55 bp, Artificial
  Synthetic oligonucleotide
gcgaagacatggggcgtggagttcgtacaggacgggaacaggaaatttctggtcc

SEQ ID NO: 177118 - DNA, 60 bp, Artificial
  Synthetic oligonucleotide
ccctgctggagagcattaagacgcccatgtgcgtggtatccaacggaccggtcagtaaga

SEQ ID NO: 177119 - DNA, 55 bp, Artificial
  Synthetic oligonucleotide
ccctctttatgaagctcaaactcttccgcagttaattcgatgacggttaattcct

SEQ ID NO: 177120 - DNA, 53 bp, Artificial
  Synthetic oligonucleotide
ccatcccccggtttatggttaccgacaaggtgccctgctcttgtatcgggttc

SEQ ID NO: 177121 - DNA, 57 bp, Artificial
  Synthetic oligonucleotide
ccctatttgtataccggacttagcatgcgttgccgggcaagggctattctggaacac

SEQ ID NO: 177122 - DNA, 60 bp, Artificial
  Synthetic oligonucleotide
ccctacacacatatatgatttggcactgtctaacactcaatccagacgtagcagggcagg

SEQ ID NO: 177123 - DNA, 59 bp, Artificial
  Synthetic oligonucleotide
cccgttacgctttcactttatgacagtgcgatgctaaattctcatcggtttgaggcagg

SEQ ID NO: 177124 - DNA, 60 bp, Artificial
  Synthetic oligonucleotide
cccgtacagtgtcggttcagcgcggacggctgtgatgactggcatctttgcgtgtgcagt

SEQ ID NO: 177125 - DNA, 58 bp, Artificial
  Synthetic oligonucleotide
cccggtcttttgcgggacgtctttcggatcctgcgcgtaggctgcggacacagcgaga

SEQ ID NO: 177126 - DNA, 56 bp, Artificial
  Synthetic oligonucleotide
cccgggtagttcatcacgcgtgaaatacgctgcttccagttcaggcggtccaccgt

SEQ ID NO: 177127 - DNA, 57 bp, Artificial
  Synthetic oligonucleotide
cccggacgggatatacggcagggagggacctttcttcgcggcagcgtcatagctgaa

SEQ ID NO: 177128 - DNA, 60 bp, Artificial
  Synthetic oligonucleotide
gcgaaccttggccgaagcaacaacgcttgcagacagagcggtcttttctgcacttaccgc

SEQ ID NO: 177129 - DNA, 54 bp, Artificial
  Synthetic oligonucleotide
cccggacatacgtccagatacgccctgttttcgcctttttctgacccggtgcca

SEQ ID NO: 177130 - DNA, 60 bp, Artificial
  Synthetic oligonucleotide
cccgctgaaatagtcatcaaagatctggttcggactgactgcggcaactgaaacagtttc

SEQ ID NO: 177131 - DNA, 60 bp, Artificial
  Synthetic oligonucleotide
ccatgatgggctatctccatttcattgcgaatatccccgtcaaaggccagcgctggttat

SEQ ID NO: 177132 - DNA, 51 bp, Artificial
  Synthetic oligonucleotide
cgagaaacaatcgttacttctgcggaaaaccaaaccccgtttagcggagtg

SEQ ID NO: 177133 - DNA, 58 bp, Artificial
  Synthetic oligonucleotide
ccaaacgtgctcagataggcttctgaagccgttctcagagtcgttgacttaccggacc

SEQ ID NO: 177134 - DNA, 60 bp, Artificial
  Synthetic oligonucleotide
cgactggttgcgctactgtttggcgcatggagcggtggcagttccggtttattagacaga

SEQ ID NO: 177135 - DNA, 60 bp, Artificial
  Synthetic oligonucleotide
ccaaagcgggcaccgcatgaagcgaggccagcaatgcaacgatagctagtttcttcatgg

SEQ ID NO: 177136 - DNA, 60 bp, Artificial
  Synthetic oligonucleotide
cgactgcatggctatgcacgcaggtgaatggcaggtgatttcgcagcgtcagcaccacta

SEQ ID NO: 177137 - DNA, 58 bp, Artificial
  Synthetic oligonucleotide
cgactcagacaagaaaaaatacatggtccaacaatatacaggtgacgctaatcgtact

SEQ ID NO: 177138 - DNA, 59 bp, Artificial
  Synthetic oligonucleotide
cgactaccggccattccataacccggctgagcgtgatcgtctcctgtaacaggggatga

SEQ ID NO: 177139 - DNA, 59 bp, Artificial
  Synthetic oligonucleotide
gcgaaactgccacctgttcgaaatgacgcgcaaatgggcttacagggcgattcgtcagg

SEQ ID NO: 177140 - DNA, 60 bp, Artificial
  Synthetic oligonucleotide
ccaacagcccctgttggagccagcttctgatagccacgatctcccgcccattcagcggcg

SEQ ID NO: 177141 - DNA, 53 bp, Artificial
  Synthetic oligonucleotide
cgactaactacgtgttctactgtttgtcggttttagttaaccagcaggttgtc

SEQ ID NO: 177142 - DNA, 60 bp, Artificial
  Synthetic oligonucleotide
cgacgctttctgcgcacgccaggaggcttcaatgttgccaagccgatagttaaagtcatc

SEQ ID NO: 177143 - DNA, 60 bp, Artificial
  Synthetic oligonucleotide
cgaccgtagggaggcgttagcagtcaccgagacatcgacatgccacggctgagcctgtga

SEQ ID NO: 177144 - DNA, 55 bp, Artificial
  Synthetic oligonucleotide
cgaccagaatcgtgtcgccgtcttcgctgttaacgccacccccaagtccaaagaa

SEQ ID NO: 177145 - DNA, 57 bp, Artificial
  Synthetic oligonucleotide
ccaacgtacaagcgacaaatatagggattctctattttttcttggatagtgtgctat

SEQ ID NO: 177146 - DNA, 54 bp, Artificial
  Synthetic oligonucleotide
cgacagcacaaccggctaacaaaccagccacggtaaggacgataacgggagact

SEQ ID NO: 177147 - DNA, 60 bp, Artificial
  Synthetic oligonucleotide
cgacactatatcaaaaccggtaactctcaatctttcaaagctatgtgtcagatcaggtcg

SEQ ID NO: 177148 - DNA, 53 bp, Artificial
  Synthetic oligonucleotide
cgaattcccttcttacgacctgaaacagaaaggtaaggatagatttgaactta

SEQ ID NO: 177149 - DNA, 59 bp, Artificial
  Synthetic oligonucleotide
cgaatgatattgaattttcgtgcgaagatgctggtcgaactacattacaaaacttatat

SEQ ID NO: 177150 - DNA, 59 bp, Artificial
  Synthetic oligonucleotide
gcgaaacgtcagcggccataagttgccagcaacggattgcgtagaacaccttttgtgtc

SEQ ID NO: 177151 - DNA, 57 bp, Artificial
  Synthetic oligonucleotide
cgaatagttcagggattgacggaatccccactatcagtcgtacggtcgttgatactg

SEQ ID NO: 177152 - DNA, 58 bp, Artificial
  Synthetic oligonucleotide
cgaataaattaagtagcgcgttattaagattagatgaacgtagtcgtcatattattca

SEQ ID NO: 177153 - DNA, 56 bp, Artificial
  Synthetic oligonucleotide
cgaagatggccatcacgcaggtttttccagaattcgccgccggtacctaaatactc

SEQ ID NO: 177154 - DNA, 58 bp, Artificial
  Synthetic oligonucleotide
cgaaccgtaaccaggaacctcagatacacacccatgccgtcgtcattaacgccacgca

SEQ ID NO: 177155 - DNA, 60 bp, Artificial
  Synthetic oligonucleotide
cgaaccgcacggaggacgtgagcaatgacatgtggacaacgttgaactgcgtacaggaga

SEQ ID NO: 177156 - DNA, 60 bp, Artificial
  Synthetic oligonucleotide
cgaaatcagtgcctcagacaccgatgcttcagtctcacccggcagtctcaacccgtcccg

SEQ ID NO: 177157 - DNA, 60 bp, Artificial
  Synthetic oligonucleotide
cgaaagcgtaattgagcgtcacgcggtaaggggatgcgttgtgaaagcgcttcatgctgc

SEQ ID NO: 177158 - DNA, 60 bp, Artificial
  Synthetic oligonucleotide
cgaaagcgagcattgacggcggcgaacagcctcatgcacatatcatgatgagtcagcgtg

SEQ ID NO: 177159 - DNA, 60 bp, Artificial
  Synthetic oligonucleotide
cattcgtcgcttcactgattgttatttccggcgctcaggcagggatacctgttgccatcg

SEQ ID NO: 177160 - DNA, 60 bp, Artificial
  Synthetic oligonucleotide
cgattagcaggacctatgcaagtttctccccatgcaacatgttttacataatcgttctga

SEQ ID NO: 177161 - DNA, 60 bp, Artificial
  Synthetic oligonucleotide
gcgaaaaatatcttgaccatcagagagcaggaaaacacgctggcgaaactcgaggcaaaa

SEQ ID NO: 177162 - DNA, 56 bp, Artificial
  Synthetic oligonucleotide
cgatgctactaatcacaagctcttaggtgcccgggaacgtagtgggagaacaaaaa

SEQ ID NO: 177163 - DNA, 60 bp, Artificial
  Synthetic oligonucleotide
cattgaaggaccagcaatccacaaggtccccgagtcatgcgttgcataccgcgaggtatg

SEQ ID NO: 177164 - DNA, 58 bp, Artificial
  Synthetic oligonucleotide
cgatgcccagattgcgctttctaccattggtcgggttaaccagcgttttggcatgggc

SEQ ID NO: 177165 - DNA, 60 bp, Artificial
  Synthetic oligonucleotide
cattgatgccacgccattttcgaagaaatacacgtcaggcgttctgtcgttcgcggagaa

SEQ ID NO: 177166 - DNA, 57 bp, Artificial
  Synthetic oligonucleotide
cgatgaatgtggttataattaagtcaaatggtgagttcttatctgggtggaaaataa

SEQ ID NO: 177167 - DNA, 60 bp, Artificial
  Synthetic oligonucleotide
cgatgaactggctgattatctcgatttgagagcctcagagcgtcgtagcgtcgataaaca

SEQ ID NO: 177168 - DNA, 60 bp, Artificial
  Synthetic oligonucleotide
cgatattaaatgatgcgttgtacatgacattcgaggaaccggcataagccacaccggctt

SEQ ID NO: 177169 - DNA, 58 bp, Artificial
  Synthetic oligonucleotide
catttaccagcggcggggaaagcataaccgcctgggaatagcacttcagctcacaacg

SEQ ID NO: 177170 - DNA, 57 bp, Artificial
  Synthetic oligonucleotide
catttacttcacccagccccaacctaaggcagaaagccgtcgcgatgtattagcgtc

SEQ ID NO: 177171 - DNA, 59 bp, Artificial
  Synthetic oligonucleotide
cgatatccgttttctcgtcgtctgacagaattatgtgactttgctcacataagaaacgg

SEQ ID NO: 177172 - DNA, 60 bp, Artificial
  Synthetic oligonucleotide
atcagacaaatgccacctggtcagggcacagccccgacaccctggacaacaccacagcaa

SEQ ID NO: 177173 - DNA, 57 bp, Artificial
  Synthetic oligonucleotide
cgatagttatcaccctggtcatagttggtgcgaagtgcgccaaaccgggtgttctgt

SEQ ID NO: 177174 - DNA, 59 bp, Artificial
  Synthetic oligonucleotide
cgagttcctgcgccttatgggcatggagaacgagggccgccgctatacgaccctgcgcc

SEQ ID NO: 177175 - DNA, 55 bp, Artificial
  Synthetic oligonucleotide
cgagttcaatttcccgcgcaagttgtgagttcttccggcgttcggccttctcaac

SEQ ID NO: 177176 - DNA, 55 bp, Artificial
  Synthetic oligonucleotide
cgagtaaggcttttccacccccctgcagggcgatataccagggaaatccacgtga

SEQ ID NO: 177177 - DNA, 60 bp, Artificial
  Synthetic oligonucleotide
cgaggtggcaacactcatgctatcagcggagaagtcaggagatatttgtgccgcggcgac

SEQ ID NO: 177178 - DNA, 60 bp, Artificial
  Synthetic oligonucleotide
cgagggtgccatagatgagtctagtctcgagattcctgctgatatatcgatctcagactt

SEQ ID NO: 177179 - DNA, 60 bp, Artificial
  Synthetic oligonucleotide
cgaggcaaactgttcgccgtcactagcgcccgctgattgagtgggtcattcgggtcatgc

SEQ ID NO: 177180 - DNA, 56 bp, Artificial
  Synthetic oligonucleotide
cgaggagtcaaaaaagatgaccaggcaagaaaaaacggcgctgaacatggcgaagt

SEQ ID NO: 177181 - DNA, 58 bp, Artificial
  Synthetic oligonucleotide
cgaggaggcgtcatatcacagtaacccccattttctcccgtacgccctgtagctgcat

SEQ ID NO: 177182 - DNA, 57 bp, Artificial
  Synthetic oligonucleotide
cgagctttctaaacgagtaggactttcgccgacaccttgccttgagcgtgtgcgtcg

SEQ ID NO: 177183 - DNA, 59 bp, Artificial
  Synthetic oligonucleotide
atcagaccgtgggagaacgacgtaccgtcacgcatccccagcaggatacagatcgggaa

SEQ ID NO: 177184 - DNA, 55 bp, Artificial
  Synthetic oligonucleotide
cgagagacacgcaaaacttgttttgtgggtcggggtcgctgttggacaaacgagc

SEQ ID NO: 177185 - DNA, 53 bp, Artificial
  Synthetic oligonucleotide
ccaaacatggcttacctactgttaacggcaacgcagaagaaaggtttacaggg

SEQ ID NO: 177186 - DNA, 60 bp, Artificial
  Synthetic oligonucleotide
cctgctccagagcctgcctgagctgggctatctcattctgtagctgtttccgttctgctt

SEQ ID NO: 177187 - DNA, 60 bp, Artificial
  Synthetic oligonucleotide
cctgcgtttcaacacaggactgtgccagaaaatgcgccacccggagctttgttgtgatgt

SEQ ID NO: 177188 - DNA, 60 bp, Artificial
  Synthetic oligonucleotide
cctgcgcttttgcgtcaggcccgcgaagcagggattaatctgtctgccacgcttgccacc

SEQ ID NO: 177189 - DNA, 60 bp, Artificial
  Synthetic oligonucleotide
cctgcagggagagatatcatcagtggctgctcccttttatttcgcggataagtgtctgta

SEQ ID NO: 177190 - DNA, 56 bp, Artificial
  Synthetic oligonucleotide
cctgatactgaaaaaagtccgccgcacggataaagtctgcggttaccgtcgacata

SEQ ID NO: 177191 - DNA, 59 bp, Artificial
  Synthetic oligonucleotide
cctctgcgggtgaggaatttagctagccatggggtacactttagaatggatgtgtattc

SEQ ID NO: 177192 - DNA, 53 bp, Artificial
  Synthetic oligonucleotide
cctcgcggttaaaccctccggtatgaactttgaacaggccatgacgaagcggg

SEQ ID NO: 177193 - DNA, 57 bp, Artificial
  Synthetic oligonucleotide
ccactaggtccaagtgtagttaattcgctaatagaatatttagctactaacgcacga

SEQ ID NO: 177194 - DNA, 54 bp, Artificial
  Synthetic oligonucleotide
atcagacggaaacttaagcctgcggctgagttaccacgtctttaacgcctttaa

SEQ ID NO: 177195 - DNA, 60 bp, Artificial
  Synthetic oligonucleotide
cctcctgcaatcgctcttgcacaatactttttgactcctgacaggtatggtgctcaggat

SEQ ID NO: 177196 - DNA, 60 bp, Artificial
  Synthetic oligonucleotide
cctcccatagccacggttgaccacaatgcgatccagtactctgatgacggcgctgtgttg

SEQ ID NO: 177197 - DNA, 60 bp, Artificial
  Synthetic oligonucleotide
ccactgaccatgcttattcagacctccacaggttacagacacatgtacatgcggatgcca

SEQ ID NO: 177198 - DNA, 60 bp, Artificial
  Synthetic oligonucleotide
cctatggccgggaaaaattgctgcagtgtaatcgtacgcgtgatttcctgcagcgattca

SEQ ID NO: 177199 - DNA, 60 bp, Artificial
  Synthetic oligonucleotide
cctatcgatcgcagggggagcatgcccctgccgcgttaacacccgcataaaatgagcaag

SEQ ID NO: 177200 - DNA, 60 bp, Artificial
  Synthetic oligonucleotide
ccactgggcaacggggacgtactggacaccacgacatctatgttggggacgctgtgcatc

SEQ ID NO: 177201 - DNA, 60 bp, Artificial
  Synthetic oligonucleotide
cctacgttcaatgcatggcgactggttttccccgatagcgtcgtgtgctagaagcggaga

SEQ ID NO: 177202 - DNA, 55 bp, Artificial
  Synthetic oligonucleotide
cctacggttcctgttattaatccggacaccggtgagatacgccgcgtggcaatct

SEQ ID NO: 177203 - DNA, 60 bp, Artificial
  Synthetic oligonucleotide
cctacactgaccactgacgctctgaggcctcttatgacgaaacaacagaaaacagcgctg

SEQ ID NO: 177204 - DNA, 55 bp, Artificial
  Synthetic oligonucleotide
ccagaaactgcatcagtttagtactgggtaaattttttacgcagaagagccttac

SEQ ID NO: 177205 - DNA, 56 bp, Artificial
  Synthetic oligonucleotide
gcctttctccggttcttcccgtgctgaccgttcactctctgaagtttgttcgtcca

SEQ ID NO: 177206 - DNA, 60 bp, Artificial
  Synthetic oligonucleotide
cctaatctcaagcacgattgccttgccttcattgattgggatcggctgactatggatggt

SEQ ID NO: 177207 - DNA, 59 bp, Artificial
  Synthetic oligonucleotide
ccgtttgccatcacgagataacaacgctctacaaggcattttgcaccagtccttcgaac

SEQ ID NO: 177208 - DNA, 60 bp, Artificial
  Synthetic oligonucleotide
ccgttggcgagtgaagttgtcggcaggtcgctcgatctgggtctcggtcgcgagcatgct

SEQ ID NO: 177209 - DNA, 58 bp, Artificial
  Synthetic oligonucleotide
ccgttgatgtcggttgttggctttgcgattaccacgcattccggccatagcgttcgac

SEQ ID NO: 177210 - DNA, 57 bp, Artificial
  Synthetic oligonucleotide
ccgttccaggtcgcctccatttatgcggctgaaccgagggagagcagctttacgccg

SEQ ID NO: 177211 - DNA, 58 bp, Artificial
  Synthetic oligonucleotide
ccgttccaccctgaacatcccggatatagtttgcctgacatgcgaccagaagaaagcc

SEQ ID NO: 177212 - DNA, 60 bp, Artificial
  Synthetic oligonucleotide
ccgttcacttagccgatctatcgaatcctgcagatggcgttctgcattacccatccccat

SEQ ID NO: 177213 - DNA, 55 bp, Artificial
  Synthetic oligonucleotide
ccgttaaacagggttttatattcggagatgcaaaagtcaggactagacatattaa

SEQ ID NO: 177214 - DNA, 56 bp, Artificial
  Synthetic oligonucleotide
cgaaacggccgtaaccgctaaccagattccgaccacaagccgtatcaatgcgctac

SEQ ID NO: 177215 - DNA, 60 bp, Artificial
  Synthetic oligonucleotide
cgaaacaggcacttgctgagagcgttacacgcggtatagacgcactttaccatgccggag

SEQ ID NO: 177216 - DNA, 59 bp, Artificial
  Synthetic oligonucleotide
atctatatgacacgaagatctcaatagcttcttcaaaaaacacgaaatcaagaagggaa

SEQ ID NO: 177217 - DNA, 58 bp, Artificial
  Synthetic oligonucleotide
gccttgcggcttaaggttgttatcttaaagttgaggtaagcatctaactgaattgata

SEQ ID NO: 177218 - DNA, 59 bp, Artificial
  Synthetic oligonucleotide
ccacactagcgcgtaaagcgtcatcaaaaaaactcaaatagcgctatatacaatcactt

SEQ ID NO: 177219 - DNA, 60 bp, Artificial
  Synthetic oligonucleotide
cgaaacaaatcgtgtgccgtatttgtgcatagctatgcaacatcctgaaaacgcatttca

SEQ ID NO: 177220 - DNA, 60 bp, Artificial
  Synthetic oligonucleotide
ccacagcttatgtgatcgtggttctggagcatgagtggcaaggtttgcagcggtatgggg

SEQ ID NO: 177221 - DNA, 59 bp, Artificial
  Synthetic oligonucleotide
ccttttggggagggatgctctatgtcggatctaattgcctataaatccaatgcgctggt

SEQ ID NO: 177222 - DNA, 50 bp, Artificial
  Synthetic oligonucleotide
cctttggattttaaaatgctggatatttttgtttttattccgttaatttc

SEQ ID NO: 177223 - DNA, 60 bp, Artificial
  Synthetic oligonucleotide
ccacatcaaaggcatcaaagtaatcggccacggttctcgcactatggtctgtagcgcgct

SEQ ID NO: 177224 - DNA, 57 bp, Artificial
  Synthetic oligonucleotide
cctttcggtacgctcacctgcagagacgggagacccggaatagacacactgaatacc

SEQ ID NO: 177225 - DNA, 57 bp, Artificial
  Synthetic oligonucleotide
cctttccgaaagtatgaaaaaaatccgtttcagcagtctctggctggcaattcctgc

SEQ ID NO: 177226 - DNA, 53 bp, Artificial
  Synthetic oligonucleotide
cctttacgtagcatcgaaacgagctctatccccgctaaaatcgtttgggcccg

SEQ ID NO: 177227 - DNA, 59 bp, Artificial
  Synthetic oligonucleotide
ccttgtgacgacgcaacccggcatgactacctgccatctgacgcgggacgtttactcga

SEQ ID NO: 177228 - DNA, 54 bp, Artificial
  Synthetic oligonucleotide
gccttacgttctggtgacatctgggtaaaagggtcgcgccgttaccagaatttc

SEQ ID NO: 177229 - DNA, 55 bp, Artificial
  Synthetic oligonucleotide
ccttcttgtccaatataagaggtaccacccttttgtgatttaaggacatgttgta

SEQ ID NO: 177230 - DNA, 57 bp, Artificial
  Synthetic oligonucleotide
ccttcccgatataccaggccttacgcgccggcgtattggagtgatagcggccgacac

SEQ ID NO: 177231 - DNA, 60 bp, Artificial
  Synthetic oligonucleotide
ccttccacgctggcttaccctacatctcaggaatggagagctgaaccagtaaccgacaca

SEQ ID NO: 177232 - DNA, 60 bp, Artificial
  Synthetic oligonucleotide
ccttatatccggatgttccttgtttcagtgcagctacattatcggtctggacagtggcat

SEQ ID NO: 177233 - DNA, 55 bp, Artificial
  Synthetic oligonucleotide
ccaccgccgacggcgttttatcccgggaatggtgtcacgccaccaccacaggtga

SEQ ID NO: 177234 - DNA, 60 bp, Artificial
  Synthetic oligonucleotide
ccttaatcgctgactgcttatccatcgcagtaaaggacgatgtcacgacatactcaacgg

SEQ ID NO: 177235 - DNA, 56 bp, Artificial
  Synthetic oligonucleotide
cctgtttgggtgtatttttccgcaactgtatccagtgtaatcgttgtcaggttcca

SEQ ID NO: 177236 - DNA, 56 bp, Artificial
  Synthetic oligonucleotide
cctgttacggagcggtttaaccgtaatcaacagtgactggtgtcatgttcggaaga

SEQ ID NO: 177237 - DNA, 60 bp, Artificial
  Synthetic oligonucleotide
cctgtgtatgctcactatgcatgattgtcttgagatctaacgatcctgaaggtagtcttg

SEQ ID NO: 177238 - DNA, 53 bp, Artificial
  Synthetic oligonucleotide
cctggtccaggttcccacggttgttcgcgaatattgaaataaagctcgtttag

SEQ ID NO: 177239 - DNA, 58 bp, Artificial
  Synthetic oligonucleotide
atcagggctgaaaacgtcagaaaatacgccttatgggcatcagacgcgcccaaaccgc

SEQ ID NO: 177240 - DNA, 56 bp, Artificial
  Synthetic oligonucleotide
ccacgatacggtgaagtctttatcgactgtccgttgggtatgggagtggctcgtct

SEQ ID NO: 177241 - DNA, 58 bp, Artificial
  Synthetic oligonucleotide
cctggtcatatccataaaggtcttaccgatagatgataccctgacaggggaattacga

SEQ ID NO: 177242 - DNA, 60 bp, Artificial
  Synthetic oligonucleotide
cctggctgcatggctatgcagccaggtaaaatttatctgtcgcgaacggggcggtttatc

SEQ ID NO: 177243 - DNA, 57 bp, Artificial
  Synthetic oligonucleotide
cctggcgctttgccttcgcgaccatacgcacgtaaataagtctgaaaccaaacttca

SEQ ID NO: 177244 - DNA, 58 bp, Artificial
  Synthetic oligonucleotide
cttgaagtagtcggcctctagaggctaaactatctgtacagatttggtgactgttccc

SEQ ID NO: 177245 - DNA, 60 bp, Artificial
  Synthetic oligonucleotide
cacagcattctcgctgtgtagcaccggtgcggcttatgccatgccagtcgaaattaccag

SEQ ID NO: 177246 - DNA, 58 bp, Artificial
  Synthetic oligonucleotide
cttcgcttctatcacttggccgttactattttgcttaactgtcataatactctggtat

SEQ ID NO: 177247 - DNA, 60 bp, Artificial
  Synthetic oligonucleotide
cacagcgtataaagatctgcatcatgcctcgcaggatattcagagctggctacaaacctg

SEQ ID NO: 177248 - DNA, 56 bp, Artificial
  Synthetic oligonucleotide
cttccgtacatttccttgcgtagatgtacagaattgtacgatttcggacaccaaaa

SEQ ID NO: 177249 - DNA, 59 bp, Artificial
  Synthetic oligonucleotide
cttccgctccatctcttccttccctacttgtgagcaggtaacgcccgccgcagtctcac

SEQ ID NO: 177250 - DNA, 57 bp, Artificial
  Synthetic oligonucleotide
atcagtccttcacttaagcgtatcgcgggtactgtgatctcgttttcccgcacaacg

SEQ ID NO: 177251 - DNA, 57 bp, Artificial
  Synthetic oligonucleotide
cacagtcctgtgtcgaaactcaggactttctatacatgacagaaaaccccgcccacg

SEQ ID NO: 177252 - DNA, 57 bp, Artificial
  Synthetic oligonucleotide
cacagtgaactaaaccggccactttactctcaaattcatggacggcgaatgcaaaac

SEQ ID NO: 177253 - DNA, 57 bp, Artificial
  Synthetic oligonucleotide
cttccgaatcccgttcatcactgcgtgctgattcatcaacgttaaatccgaccccct

SEQ ID NO: 177254 - DNA, 57 bp, Artificial
  Synthetic oligonucleotide
cttcccgttctgtacggtgaaatagcccgtactttcgagattgctgataatcgttgc

SEQ ID NO: 177255 - DNA, 60 bp, Artificial
  Synthetic oligonucleotide
cttcatgcgctggttgcaattctcagaaccggaacacgaggtgccagatggctcggtctg

SEQ ID NO: 177256 - DNA, 60 bp, Artificial
  Synthetic oligonucleotide
cttcactgagggtattactgatagtgacagtgcgctcgtggaaaaatttcagcagtgtat

SEQ ID NO: 177257 - DNA, 59 bp, Artificial
  Synthetic oligonucleotide
cacataggtcccaggttccatggcaatggccagacgttggaccgaatcgcttaattctg

SEQ ID NO: 177258 - DNA, 60 bp, Artificial
  Synthetic oligonucleotide
cacatgaaacactgagaagctatacaggtgtccagccaaaccagattaggttcggcttag

SEQ ID NO: 177259 - DNA, 60 bp, Artificial
  Synthetic oligonucleotide
cttcactcttgctaagaggcactacccatgcactctgatattatctttacacatgccacg

SEQ ID NO: 177260 - DNA, 53 bp, Artificial
  Synthetic oligonucleotide
cttcacaagcgccgttttatctcgaccggtggggcgctaaaaaacgtcctcca

SEQ ID NO: 177261 - DNA, 60 bp, Artificial
  Synthetic oligonucleotide
gccttaatgcatcaggagcaagtactcccggaagcgaaacctctgtggacagttttgtga

SEQ ID NO: 177262 - DNA, 60 bp, Artificial
  Synthetic oligonucleotide
cttattgatgggctggaaaggttttcgcatcacagcgaatctagtaactcactggaatcg

SEQ ID NO: 177263 - DNA, 59 bp, Artificial
  Synthetic oligonucleotide
cacattcctggaatgaaccaccattacgacctactttgctgtgaggaccaacataaata

SEQ ID NO: 177264 - DNA, 51 bp, Artificial
  Synthetic oligonucleotide
caccaaccgcgcctcgtaataccataacccccccgactttagacaaatccc

SEQ ID NO: 177265 - DNA, 59 bp, Artificial
  Synthetic oligonucleotide
cttagttactaatgcacgaagaatagtttgcctggcttctttttcatctaatgctatta

SEQ ID NO: 177266 - DNA, 60 bp, Artificial
  Synthetic oligonucleotide
cttactgaacgccttagagcaattgcagcaggactatacgcagcggctgaaagactggga

SEQ ID NO: 177267 - DNA, 58 bp, Artificial
  Synthetic oligonucleotide
cttacggtcgggcgccactctgacaatatcggccacccgaacctgtggacacagacgc

SEQ ID NO: 177268 - DNA, 55 bp, Artificial
  Synthetic oligonucleotide
cttaccgtacaataattcgctaggccccccttgtcatacaagctcgtaagcggcc

SEQ ID NO: 177269 - DNA, 54 bp, Artificial
  Synthetic oligonucleotide
cttacagggcgttttaggcgattaaaccaaatcgaagcacttcatttagtcgcc

SEQ ID NO: 177270 - DNA, 60 bp, Artificial
  Synthetic oligonucleotide
caccagtacgcttcctgatgctaaagaaaggccgcttcattccatccgatcaacaactac

SEQ ID NO: 177271 - DNA, 56 bp, Artificial
  Synthetic oligonucleotide
caatgcgttgttaaggtcaaagacctgtcccgaaccgaaatgctaagggaatgcca

SEQ ID NO: 177272 - DNA, 55 bp, Artificial
  Synthetic oligonucleotide
gccttaaacgcgattctagatcgtcctcctaggtttctgagccggaaacgccgaa

SEQ ID NO: 177273 - DNA, 60 bp, Artificial
  Synthetic oligonucleotide
cttttagtaggaccgtactctctgacatttccaactttcatcatgtgtgtgatgaatgac

SEQ ID NO: 177274 - DNA, 60 bp, Artificial
  Synthetic oligonucleotide
cttttagcagtatgggcacaacgaaacttgcttaccattgcgatcagctctgctgaatct

SEQ ID NO: 177275 - DNA, 54 bp, Artificial
  Synthetic oligonucleotide
cttttacgtgtctttggtccctttgagcaaccgaagggtgaacaccattctgga

SEQ ID NO: 177276 - DNA, 56 bp, Artificial
  Synthetic oligonucleotide
cttttaaccagtacgactcctggcaagcattgtgaaacgttttctccagtggacga

SEQ ID NO: 177277 - DNA, 58 bp, Artificial
  Synthetic oligonucleotide
ctttgtggtattgaccgcctcgctttccgctatcaactccgatgtgtttggcgtaggc

SEQ ID NO: 177278 - DNA, 59 bp, Artificial
  Synthetic oligonucleotide
ctttgtctttcatccccatatcccggaactgctgaaagaacgggagcatcatacgtatg

SEQ ID NO: 177279 - DNA, 52 bp, Artificial
  Synthetic oligonucleotide
ctttggcccccaccgcgtcaaataaggcccgtccctgctccggtggattaac

SEQ ID NO: 177280 - DNA, 60 bp, Artificial
  Synthetic oligonucleotide
ctttgccagtgcgctattgtgttatccgtggattgtgcagctcagcggggcactggccgt

SEQ ID NO: 177281 - DNA, 58 bp, Artificial
  Synthetic oligonucleotide
ctttctaccgcctcgctttgctcgttgctcaacgcctcacagacacggattaaaatcc

SEQ ID NO: 177282 - DNA, 60 bp, Artificial
  Synthetic oligonucleotide
ctttcgtgttactacatttggtgagtctcatgggatagccatgggatgcatcttagatgg

SEQ ID NO: 177283 - DNA, 51 bp, Artificial
  Synthetic oligonucleotide
atcatacgattcggggaacccctttttcttcattaacccgcgttctttcaa

SEQ ID NO: 177284 - DNA, 49 bp, Artificial
  Synthetic oligonucleotide
ctttcgggaaacgaataacggcctcacgggagttaccaccggccgtaaa

SEQ ID NO: 177285 - DNA, 51 bp, Artificial
  Synthetic oligonucleotide
ctttcctagagttaataaaagatgccgttcgtttttttagtggtacgcctg

SEQ ID NO: 177286 - DNA, 59 bp, Artificial
  Synthetic oligonucleotide
cttgttcatgcgcacttattccgattacgggtgagattcgggatgaaaacgtcagtcag

SEQ ID NO: 177287 - DNA, 59 bp, Artificial
  Synthetic oligonucleotide
cttggcgtttccacatattataagcttcgtcaccagatgaacaaccagtagccgggaga

SEQ ID NO: 177288 - DNA, 60 bp, Artificial
  Synthetic oligonucleotide
cttggcctgtatttctggcgtgtgcgtatcagccacatactgtgcgaaagtttccggcgt

SEQ ID NO: 177289 - DNA, 60 bp, Artificial
  Synthetic oligonucleotide
cttggatcaggctcttttttcgccttacggcgcgtggcttcatactggctctgtgcttcg

SEQ ID NO: 177290 - DNA, 60 bp, Artificial
  Synthetic oligonucleotide
cttgctatcaacacaactaaatcgtaatgtataatacacgtgccacatacataacaaact

SEQ ID NO: 177291 - DNA, 53 bp, Artificial
  Synthetic oligonucleotide
cttgcggaatgaccagaaattttcttcccccgccctgaacaaactccacaccc

SEQ ID NO: 177292 - DNA, 60 bp, Artificial
  Synthetic oligonucleotide
cacaatttcccgctgtagtcctgaagcatatcgctacatatgctatcgggggggggagaa

SEQ ID NO: 177293 - DNA, 54 bp, Artificial
  Synthetic oligonucleotide
cttgccggaattatagggctgcgtttgggaaacgaacaatattgtacggttgcg

SEQ ID NO: 177294 - DNA, 60 bp, Artificial
  Synthetic oligonucleotide
atcatatggccgataagcgcattcgtaagcgccaacgggtactttccactatctgtatac

SEQ ID NO: 177295 - DNA, 60 bp, Artificial
  Synthetic oligonucleotide
cttgccaccacagcacgctcccgcccagacacaacatcaccaacagaccaacccctatcg

SEQ ID NO: 177296 - DNA, 60 bp, Artificial
  Synthetic oligonucleotide
cttgcagctggagttgtgttaactggtggtgcatctatgatagatggattagtggcatgc

SEQ ID NO: 177297 - DNA, 60 bp, Artificial
  Synthetic oligonucleotide
cttgataagggactctggaacatatttctgctacgtccatgtaattcttgaacatctcct

SEQ ID NO: 177298 - DNA, 60 bp, Artificial
  Synthetic oligonucleotide
cacacttatctaagatagccatgttgataaagcataagtttcgatctttattgtcacaat

SEQ ID NO: 177299 - DNA, 56 bp, Artificial
  Synthetic oligonucleotide
cttgacccgtcctgaatagcgttgacacgttcctgacttaaatccggagaacgtga

SEQ ID NO: 177300 - DNA, 59 bp, Artificial
  Synthetic oligonucleotide
ctggtagggttcaggttcagctactcgccaggttctctatggagggtgcgaataagcac

SEQ ID NO: 177301 - DNA, 59 bp, Artificial
  Synthetic oligonucleotide
ctggtacggtaactgacaagacctgagcgcatatcacggtaaaactgtgaacgcgatct

SEQ ID NO: 177302 - DNA, 57 bp, Artificial
  Synthetic oligonucleotide
ctggtaactggcgacctttgtttgtcacgctggagaaaagtgcggtcgatgtaggtg

SEQ ID NO: 177303 - DNA, 55 bp, Artificial
  Synthetic oligonucleotide
ctgggttcgttttggagagtctccggagctgcctggtgttaaacagaaacgcgcg

SEQ ID NO: 177304 - DNA, 60 bp, Artificial
  Synthetic oligonucleotide
cacctctcgccatagcagtccgctgtatatgctggtggtgttggaaggtaacgtcgcgct

SEQ ID NO: 177305 - DNA, 60 bp, Artificial
  Synthetic oligonucleotide
atcatcaatcgacttcatatttttactcaactcaacaattgcacgatgcagttcgagagc

SEQ ID NO: 177306 - DNA, 51 bp, Artificial
  Synthetic oligonucleotide
ctggggtggtggttccggtcatggtaatggcggggggaatggtaattccgg

SEQ ID NO: 177307 - DNA, 60 bp, Artificial
  Synthetic oligonucleotide
ctggctgaatggcgtgaatttccgcgctatgcacttgcgtgcatactcatgcatgccgta

SEQ ID NO: 177308 - DNA, 58 bp, Artificial
  Synthetic oligonucleotide
cacctggattaacaacaatccgcacgcccttacggtcaatatcttcaagagatttgaa

SEQ ID NO: 177309 - DNA, 60 bp, Artificial
  Synthetic oligonucleotide
ctggctatacgggtagcatcgctctcagtcatgataacctctcttacaggttgctatgat

SEQ ID NO: 177310 - DNA, 57 bp, Artificial
  Synthetic oligonucleotide
cacctgtcagttcattacctctcgataaggcaacagtaaacgtaaatgttcgtgttg

SEQ ID NO: 177311 - DNA, 54 bp, Artificial
  Synthetic oligonucleotide
ctggcgtacaattaatggatgattaaggaaactataatggaattaaaaaacgta

SEQ ID NO: 177312 - DNA, 59 bp, Artificial
  Synthetic oligonucleotide
ctggcggaagacatagaaccaggtattcgtaccaaatggatcggacatcagcggtgtac

SEQ ID NO: 177313 - DNA, 60 bp, Artificial
  Synthetic oligonucleotide
cacgaatccaactcgaggcaatatattggatgtgccatgattcattggatgccgctatac

SEQ ID NO: 177314 - DNA, 56 bp, Artificial
  Synthetic oligonucleotide
ctggccgggagccgaaacccagagttggggcgtcaacctgatctatacctcaactg

SEQ ID NO: 177315 - DNA, 60 bp, Artificial
  Synthetic oligonucleotide
ctggcagcaaccagacagtattaaccctgcttaacggtcttgggacagatgcaatgggcc

SEQ ID NO: 177316 - DNA, 60 bp, Artificial
  Synthetic oligonucleotide
atcatcaggatccgcaaggctatgttccgcgtttatcgctgttttccatgcgtccacccg

SEQ ID NO: 177317 - DNA, 60 bp, Artificial
  Synthetic oligonucleotide
ctggattatcgcttcgtctctgaccgagccggtaagctgcgctgtacgatcacaaccgac

SEQ ID NO: 177318 - DNA, 60 bp, Artificial
  Synthetic oligonucleotide
ctggatctaatgtagtaagatttactccagctcttaatatccctctagatgatatatatg

SEQ ID NO: 177319 - DNA, 53 bp, Artificial
  Synthetic oligonucleotide
ctggataaaagcgagtctcgtaccgactggttagcccggcctttaagcgaacg

SEQ ID NO: 177320 - DNA, 60 bp, Artificial
  Synthetic oligonucleotide
cacgatgtgggacatcatgcgtatggcgatcatcctgtcgtttgtggctaacgtcagtgg

SEQ ID NO: 177321 - DNA, 56 bp, Artificial
  Synthetic oligonucleotide
ctggagaaagcgccgggccttcacctcggaaaggctgcctgtgcgatggaaaaacg

SEQ ID NO: 177322 - DNA, 60 bp, Artificial
  Synthetic oligonucleotide
ctggacacagcgcagaaggtcattgtgggtgcagcattgctggcaaaggtcagaaagccg

SEQ ID NO: 177323 - DNA, 60 bp, Artificial
  Synthetic oligonucleotide
ctggaaatttcgaaccccactgctcgccgcaagacaatattagtgagcaacgcgagtctg

SEQ ID NO: 177324 - DNA, 51 bp, Artificial
  Synthetic oligonucleotide
ctggaaagtctataactgcttttagttccgccccagtaggttttgtttccc

SEQ ID NO: 177325 - DNA, 60 bp, Artificial
  Synthetic oligonucleotide
ctgcttcccgcgccatcttgtcttcaagcattagggtaacagtctgctgcagagcgtcca

SEQ ID NO: 177326 - DNA, 60 bp, Artificial
  Synthetic oligonucleotide
ctgctggctttcattacgcagtaacgcccagactcgtctgtagccataggtcggcaattc

SEQ ID NO: 177327 - DNA, 60 bp, Artificial
  Synthetic oligonucleotide
gcatggacagtcagatactggccctgtacgccagaggaatgaccacgcgtgatatcgccg

SEQ ID NO: 177328 - DNA, 60 bp, Artificial
  Synthetic oligonucleotide
gcctggttactcaatctcgcctgcgctatggcgggctgttgtttcgcacggtgcatgtgc

SEQ ID NO: 177329 - DNA, 60 bp, Artificial
  Synthetic oligonucleotide
ctgctgcatccttgaagcaattgtaggtagagtgatgtagatttgcaaccaacattttgg

SEQ ID NO: 177330 - DNA, 56 bp, Artificial
  Synthetic oligonucleotide
caccagtcgagatccagggatacacctgttaacggtggagaaccctgtggaatccc

SEQ ID NO: 177331 - DNA, 60 bp, Artificial
  Synthetic oligonucleotide
cttaaccgacgcatcaggcgcggttctcacggcgatattgagtgcatagagcaggtgagc

SEQ ID NO: 177332 - DNA, 60 bp, Artificial
  Synthetic oligonucleotide
ctgttaacaccggacctgcaggacagctcctggtgatgaataaaggtcagcttggatact

SEQ ID NO: 177333 - DNA, 59 bp, Artificial
  Synthetic oligonucleotide
ctgtggcgttgtattggcagttcgaggttattaggtaaggttgatatgcatatcctttg

SEQ ID NO: 177334 - DNA, 56 bp, Artificial
  Synthetic oligonucleotide
ctgtggcctgagaaccgatagtttgacgaggtatgttttggttagatagtacggtg

SEQ ID NO: 177335 - DNA, 57 bp, Artificial
  Synthetic oligonucleotide
ctgtgccgttttgcgggtttttcgcctggtaagctgcggttttcatctgcttcgcat

SEQ ID NO: 177336 - DNA, 54 bp, Artificial
  Synthetic oligonucleotide
caccctttaccagtggctgccgccagtggcgttaagtcgtgcttttccgggttg

SEQ ID NO: 177337 - DNA, 57 bp, Artificial
  Synthetic oligonucleotide
ctgtgccaataattgccattaccgggtctaatgggaaaagtacagtgactcaattag

SEQ ID NO: 177338 - DNA, 60 bp, Artificial
  Synthetic oligonucleotide
ctgtctgtgaggcgacactgtcaatctggacgatcgatttcgtttcaatgggggtgtctg

SEQ ID NO: 177339 - DNA, 60 bp, Artificial
  Synthetic oligonucleotide
atatacgaagtgtttcgcatgccgttctgcactcgacagatgttgagaacagcccaccaa

SEQ ID NO: 177340 - DNA, 58 bp, Artificial
  Synthetic oligonucleotide
caccgagaccgttctgcttataccgcctctcgcgttacgcctcctcactcaattcacc

SEQ ID NO: 177341 - DNA, 60 bp, Artificial
  Synthetic oligonucleotide
ctgtccgggcttgagagtgtgaaaccgtctcaggtgccacgtcaggagggcgcatgggca

SEQ ID NO: 177342 - DNA, 60 bp, Artificial
  Synthetic oligonucleotide
ctgtccataccaactatcggaattggtgctggtccttccacggatggtcagatacttgtg

SEQ ID NO: 177343 - DNA, 60 bp, Artificial
  Synthetic oligonucleotide
ctgtatgccttaattgcgggtttgatatcggacataacactatctccatatgaattgtat

SEQ ID NO: 177344 - DNA, 60 bp, Artificial
  Synthetic oligonucleotide
ctgtatccggttaggcaccggcacagactggtacatcacctgtggtggtggcgtgacacc

SEQ ID NO: 177345 - DNA, 59 bp, Artificial
  Synthetic oligonucleotide
ctgtaccggttcgctgcccgctgtcggttatcaggacctgtacgttatgacgtgcggca

SEQ ID NO: 177346 - DNA, 55 bp, Artificial
  Synthetic oligonucleotide
caccggattaaactgcacgccggctccccaggcaaaccccgttctgcgctccgaa

SEQ ID NO: 177347 - DNA, 51 bp, Artificial
  Synthetic oligonucleotide
caccggtaaaggtactggcaccgggtcagaaaaaggcgaaaacagggcgta

SEQ ID NO: 177348 - DNA, 60 bp, Artificial
  Synthetic oligonucleotide
ctgtaaatgatcttaatcggatcctctaatcagactaattaacttactgatacgcacacg

SEQ ID NO: 177349 - DNA, 48 bp, Artificial
  Synthetic oligonucleotide
ctgtaaacgaaaaaaccgcctggggaggcggtttagtcgaaggttaag

SEQ ID NO: 177350 - DNA, 60 bp, Artificial
  Synthetic oligonucleotide
atatacgggccaatgcaggtgcactgactcaaggtgtatcaacagataccattgatggct

SEQ ID NO: 177351 - DNA, 51 bp, Artificial
  Synthetic oligonucleotide
ctgtaaacgaaaaaacccgccttgtggcgggtccttccgtccgatcagaag

SEQ ID NO: 177352 - DNA, 59 bp, Artificial
  Synthetic oligonucleotide
ctggtttactggccagcaccagaaaatcatataaccgcgccaaatcagaaagcgcctta

SEQ ID NO: 177353 - DNA, 58 bp, Artificial
  Synthetic oligonucleotide
ctggtgggcccgaagctcatggcttgtaaacaatgttcgttcaaatgagatagggggc

SEQ ID NO: 177354 - DNA, 59 bp, Artificial
  Synthetic oligonucleotide
ctggtctgttcagcgtgatatagcgaattcgtcgctcttcccgtgtggtcgttttaagc

SEQ ID NO: 177355 - DNA, 57 bp, Artificial
  Synthetic oligonucleotide
caccgttaaatcagttactgggaatttgattattttgttgtcacatcctatttatga

SEQ ID NO: 177356 - DNA, 53 bp, Artificial
  Synthetic oligonucleotide
ctggtcatttccccgttaccaggcatgggggcctcgccataccccgttacgac

SEQ ID NO: 177357 - DNA, 58 bp, Artificial
  Synthetic oligonucleotide
gacaatgatgcactttccactgtaccggttaccggagccgtgacactgaacaccagtt

SEQ ID NO: 177358 - DNA, 60 bp, Artificial
  Synthetic oligonucleotide
gacaatcggccaggcaatcagcgcggcttttccgcgcccctggcgctcaattaagcggcc

SEQ ID NO: 177359 - DNA, 55 bp, Artificial
  Synthetic oligonucleotide
gacaaggttcccaatagcgaagatcctacctaccaaaatcctaaggctttcattg

SEQ ID NO: 177360 - DNA, 60 bp, Artificial
  Synthetic oligonucleotide
caacataagaggatgagtccttaataaaacaggtcctcagagcatgcatattctgcagag

SEQ ID NO: 177361 - DNA, 60 bp, Artificial
  Synthetic oligonucleotide
gcgctgcgtaaaaaactggatgctgatacagggtattctggcctgctctgcaagaatccg

SEQ ID NO: 177362 - DNA, 57 bp, Artificial
  Synthetic oligonucleotide
gacaagggggcatattacagtctggcccaaataataggccgcgaatcgaaactcgta

SEQ ID NO: 177363 - DNA, 60 bp, Artificial
  Synthetic oligonucleotide
gaatttacccgaaaggcaattcaggcgggcggtatcacgctggggcatacatatcatgcg

SEQ ID NO: 177364 - DNA, 58 bp, Artificial
  Synthetic oligonucleotide
gaattggagtcggcaggacgaagtatggctaaatcctgagcgggaaactcccgctaca

SEQ ID NO: 177365 - DNA, 60 bp, Artificial
  Synthetic oligonucleotide
gaattaacgcgctgtcgccgagatccaacgaggtgccaagcgccagttgggtcgtcgcgc

SEQ ID NO: 177366 - DNA, 53 bp, Artificial
  Synthetic oligonucleotide
caacccaaccccatgcggttctacgaacctcaaaaccactcaacccagggaca

SEQ ID NO: 177367 - DNA, 59 bp, Artificial
  Synthetic oligonucleotide
caaccctcaccgtagcagagagtttgcacgcggcatgggaataatcacaaaaacggata

SEQ ID NO: 177368 - DNA, 55 bp, Artificial
  Synthetic oligonucleotide
caaccggaccactgccaccgccttttcccctggcatgaaatttaactatcatccc

SEQ ID NO: 177369 - DNA, 60 bp, Artificial
  Synthetic oligonucleotide
gaatgtgacaggctgacgcgcccgtagggcttatccaacccttcgcctcagatgcaagct

SEQ ID NO: 177370 - DNA, 57 bp, Artificial
  Synthetic oligonucleotide
gaatggaaaagcgaaaggagctatcacctgttcaggggtggatcagggctacggagg

SEQ ID NO: 177371 - DNA, 56 bp, Artificial
  Synthetic oligonucleotide
gaatgcgtttaccggtcctggcagcttcgctcccgtcagcgttccattttcgttac

SEQ ID NO: 177372 - DNA, 56 bp, Artificial
  Synthetic oligonucleotide
gcgctgaacgtaaaaccttcggcctgtgcttcccacccggatggttgaactcacaa

SEQ ID NO: 177373 - DNA, 57 bp, Artificial
  Synthetic oligonucleotide
caacgagacaccgttaccaagatctacggagccagaaaacagtacaccggctagaca

SEQ ID NO: 177374 - DNA, 60 bp, Artificial
  Synthetic oligonucleotide
gaatgatattcctgaatccgtagcccgatattttgacatcgtagcctatgcgcgggatct

SEQ ID NO: 177375 - DNA, 60 bp, Artificial
  Synthetic oligonucleotide
gaatgatagtgatcttgttcggaaatatactagtcagactttaagtctcagggatatgaa

SEQ ID NO: 177376 - DNA, 56 bp, Artificial
  Synthetic oligonucleotide
gaatccattgaaagcgacagagcaacacaagcgccgggtcggaaagccccaaaccg

SEQ ID NO: 177377 - DNA, 60 bp, Artificial
  Synthetic oligonucleotide
gaatcatccgatcaatttgattcccaactcccttagctgccatccccaaatgtgtctcta

SEQ ID NO: 177378 - DNA, 60 bp, Artificial
  Synthetic oligonucleotide
gaatatgggcatagaatagtgcttatcactattgcgtatagcatcttatctgacgctagg

SEQ ID NO: 177379 - DNA, 58 bp, Artificial
  Synthetic oligonucleotide
caacggtaaggtgttcgagtgtgattacttcagcgtgcgatattacaaaaagggcagc

SEQ ID NO: 177380 - DNA, 60 bp, Artificial
  Synthetic oligonucleotide
gaatatcacagatgatcttcttgagatcctgtccgttgcgtcgtaatctctttctctgga

SEQ ID NO: 177381 - DNA, 60 bp, Artificial
  Synthetic oligonucleotide
gaatactgatgtaacacggattgaccgtattgggagtttgagatggtgacaaagagagtg

SEQ ID NO: 177382 - DNA, 55 bp, Artificial
  Synthetic oligonucleotide
caacgtcagttgggggtattagggggcactccccctaagcacgtcgattgtatca

SEQ ID NO: 177383 - DNA, 60 bp, Artificial
  Synthetic oligonucleotide
atatcaataccactgcttgatgagaaccgcgcaaatgttgactatgcgcgaaagttaatg

SEQ ID NO: 177384 - DNA, 56 bp, Artificial
  Synthetic oligonucleotide
caacgtcgagctttctaaacgagtaggactttcgccgacaccttgccttgagcgtg

SEQ ID NO: 177385 - DNA, 58 bp, Artificial
  Synthetic oligonucleotide
gacctgcaaacgcttctttcaccggggacggccccattgttctggagcctgatatgtc

SEQ ID NO: 177386 - DNA, 60 bp, Artificial
  Synthetic oligonucleotide
gacctgaaaagtgatcatggcagtaataaccggcaatgtagtaaccatgctaaattacag

SEQ ID NO: 177387 - DNA, 60 bp, Artificial
  Synthetic oligonucleotide
gaccggtatacccgctacaacacaaaatcacgctatgagatgcgcttctcgcaacgtctg

SEQ ID NO: 177388 - DNA, 57 bp, Artificial
  Synthetic oligonucleotide
gaccgctgccaccaaattcgtccttccagtttagccgtagttaggctcagacttcaa

SEQ ID NO: 177389 - DNA, 59 bp, Artificial
  Synthetic oligonucleotide
gaccgcaaaatggacgtcagaaagcaacgtcccgccgtctggccgcaacagagaatgaa

SEQ ID NO: 177390 - DNA, 60 bp, Artificial
  Synthetic oligonucleotide
caaagaacacggcgcagctaacgcacaggatagcgttgaggcgctactggcctatgtggc

SEQ ID NO: 177391 - DNA, 57 bp, Artificial
  Synthetic oligonucleotide
gaccgagtgagcgaggaggcgtcatatcacagtaacccccattttctcccgtacgcc

SEQ ID NO: 177392 - DNA, 60 bp, Artificial
  Synthetic oligonucleotide
gaccgacagcttcgattatgaactgcagataggcttccctgaaaaattgccctatccgac

SEQ ID NO: 177393 - DNA, 60 bp, Artificial
  Synthetic oligonucleotide
caaaggctcaacagacgggcgttgtctgcaggctcaagggtaatttcgcgagtgtctata

SEQ ID NO: 177394 - DNA, 57 bp, Artificial
  Synthetic oligonucleotide
gcgctatgcactccgtatggcctcctgtagcggtttgttacgttttggttggtctac

SEQ ID NO: 177395 - DNA, 53 bp, Artificial
  Synthetic oligonucleotide
gacccggcttaagacccataatcgttatcctttcaatagttaagaggaaagcc

SEQ ID NO: 177396 - DNA, 60 bp, Artificial
  Synthetic oligonucleotide
caaagggagctacgagagttacaggaacaacgcaatgctctgaatgggattcgtggcctg

SEQ ID NO: 177397 - DNA, 54 bp, Artificial
  Synthetic oligonucleotide
gacccggaatcgacacactgaatacccccggacgttttgtcggtttcgcatcca

SEQ ID NO: 177398 - DNA, 60 bp, Artificial
  Synthetic oligonucleotide
gacccgagtgttatagaggctaatgctttgatggcaacagcactggcgacacaaattaaa

SEQ ID NO: 177399 - DNA, 58 bp, Artificial
  Synthetic oligonucleotide
gaccatgactgttaccgccgaagagtatttcgactcattccctgatatggggcggaaa

SEQ ID NO: 177400 - DNA, 60 bp, Artificial
  Synthetic oligonucleotide
gacatgctgataacgcagggaacgcagctcgattgcgtgcttgaaacgcgccttgtgacg

SEQ ID NO: 177401 - DNA, 60 bp, Artificial
  Synthetic oligonucleotide
gacatctgttgctcataaacgatgagcgtaaaagatcatttttcagcgtcatttaccata

SEQ ID NO: 177402 - DNA, 58 bp, Artificial
  Synthetic oligonucleotide
caaatcgttacgcaagatggacaaacagaacgcacgacggattgtggattttatgagt

SEQ ID NO: 177403 - DNA, 56 bp, Artificial
  Synthetic oligonucleotide
gacataatatgagtagttgaaacgggtattccagaacaactagctaaactaaccga

SEQ ID NO: 177404 - DNA, 60 bp, Artificial
  Synthetic oligonucleotide
caaatgccgtctgactcgcgggaatgtcctgtttctccaccttccggtaatgctgtcgca

SEQ ID NO: 177405 - DNA, 60 bp, Artificial
  Synthetic oligonucleotide
gcgctacgtcggctctgttatcgtcaacgagagcaacggacgctattatgaaccggcgcc

SEQ ID NO: 177406 - DNA, 60 bp, Artificial
  Synthetic oligonucleotide
gacagtgtcaggtgagctacagcccgcttacgctcatggggttttatgccgccagtatcc

SEQ ID NO: 177407 - DNA, 56 bp, Artificial
  Synthetic oligonucleotide
gacagctccagcgtttttagtcaccgtggtactaatgagtccgccgagaagtttaa

SEQ ID NO: 177408 - DNA, 59 bp, Artificial
  Synthetic oligonucleotide
gacacggccggagccagcgacattatattcggtctgttctggctactggggtatcagtt

SEQ ID NO: 177409 - DNA, 54 bp, Artificial
  Synthetic oligonucleotide
caacaatttttatttttgctgcccataaaacgctaatcaagccaaaaaggtcaa

SEQ ID NO: 177410 - DNA, 57 bp, Artificial
  Synthetic oligonucleotide
caacacactatcggtgttacgccaaagagccgtgaaccctaccacaatcacttcctc

SEQ ID NO: 177411 - DNA, 58 bp, Artificial
  Synthetic oligonucleotide
gacaccataaatattcagtggcggggtgacatcccgccagaagccttcgcgtttcatt

SEQ ID NO: 177412 - DNA, 55 bp, Artificial
  Synthetic oligonucleotide
caacaccccatctaaataatcaactcctccggtgtctgttacaaaccagtaatag

SEQ ID NO: 177413 - DNA, 57 bp, Artificial
  Synthetic oligonucleotide
gaacataaagcgaaggttataacctgctgtaaaaccaacagcgcgttcaatgacctc

SEQ ID NO: 177414 - DNA, 60 bp, Artificial
  Synthetic oligonucleotide
gaacagagtgttagttcattttcgtgcatggctatgcatacacgcaaaacttatcagcgc

SEQ ID NO: 177415 - DNA, 60 bp, Artificial
  Synthetic oligonucleotide
gaacaaatgacggtggcagacaggccgtccgggaatacatcgtcataactgacgaactgc

SEQ ID NO: 177416 - DNA, 60 bp, Artificial
  Synthetic oligonucleotide
atatcgatgccagagctacacaagactttaaagaggccagcgattactttaccagtcgca

SEQ ID NO: 177417 - DNA, 59 bp, Artificial
  Synthetic oligonucleotide
gaacaaagacgttttatgcgcgggaagcaatactggcgcatctggaagacctggaggat

SEQ ID NO: 177418 - DNA, 60 bp, Artificial
  Synthetic oligonucleotide
gaaattaagctcagcgatccggtcacgaaatactggccagaactgacaggcaaacagtgg

SEQ ID NO: 177419 - DNA, 60 bp, Artificial
  Synthetic oligonucleotide
gaaatctgcgcagatgcttatgtattgcccggaacgggaaacgtctgttgtagcggtagc

SEQ ID NO: 177420 - DNA, 58 bp, Artificial
  Synthetic oligonucleotide
caagtttagctccgttaaaagacagactgccgaataagctggagtccgtatagctatc

SEQ ID NO: 177421 - DNA, 55 bp, Artificial
  Synthetic oligonucleotide
gaaatcggtctgcgttacaacagtcaccgaacaaaacgggaagaatacctgttga

SEQ ID NO: 177422 - DNA, 57 bp, Artificial
  Synthetic oligonucleotide
caataacggcgtagaactggctaccgtccaggtcaatccacagggtagctggaccta

SEQ ID NO: 177423 - DNA, 53 bp, Artificial
  Synthetic oligonucleotide
gaaataaggcgggtgttacccgccttatcttccagggtaatcagcccgtcctc

SEQ ID NO: 177424 - DNA, 56 bp, Artificial
  Synthetic oligonucleotide
gaaaggggcggatgcaaacgccggtgtcattaaccctatccagaactttgctgagg

SEQ ID NO: 177425 - DNA, 60 bp, Artificial
  Synthetic oligonucleotide
gaaaggatttcgcgtcccgttcaccgtttggctgtgatgtatagtgagaatgcaaccgca

SEQ ID NO: 177426 - DNA, 56 bp, Artificial
  Synthetic oligonucleotide
gaaagctaaaaacgaatctctttccgaatggagtagacgaatacatgaagggactc

SEQ ID NO: 177427 - DNA, 60 bp, Artificial
  Synthetic oligonucleotide
gcgcgtgaaatccctgtcacgcggattttccataagcaggtaactatggcgagcaccgaa

SEQ ID NO: 177428 - DNA, 57 bp, Artificial
  Synthetic oligonucleotide
caatcatcttttgctgtaccagggtatgaaaagtctcagggttccaccccagaatac

SEQ ID NO: 177429 - DNA, 60 bp, Artificial
  Synthetic oligonucleotide
caatcattctccatctgactaatatcgtctggcaatgagtattcccggtaatacataaac

SEQ ID NO: 177430 - DNA, 56 bp, Artificial
  Synthetic oligonucleotide
gaaactgaacgcgaagacatggggcgtgcgttatcacgaggggagcaacggacgtt

SEQ ID NO: 177431 - DNA, 60 bp, Artificial
  Synthetic oligonucleotide
gaaaccccatcccttgtcagtgaaaatcgcctgtagcgccattcagttcgcttcgctcac

SEQ ID NO: 177432 - DNA, 59 bp, Artificial
  Synthetic oligonucleotide
caatcgggtgctgagacggtcatgttacctgacggtatccgttcccctgtgtactgcag

SEQ ID NO: 177433 - DNA, 60 bp, Artificial
  Synthetic oligonucleotide
gaaacagcgtcataagatcgataccggaacaccccggcatacacacatcgctcaaaacga

SEQ ID NO: 177434 - DNA, 60 bp, Artificial
  Synthetic oligonucleotide
gaaaatgctaaccgatggtcagcgctatccggttgcttacctgagcgcacaggaagcttt

SEQ ID NO: 177435 - DNA, 60 bp, Artificial
  Synthetic oligonucleotide
gaaaactcgccgtgatgctattgagtcgctgatggaatcgggatatcagcctgactttat

SEQ ID NO: 177436 - DNA, 57 bp, Artificial
  Synthetic oligonucleotide
gaaaaaggcagcgcggtactttgcaagggagcccgactgaagtatcgctttatcaac

SEQ ID NO: 177437 - DNA, 51 bp, Artificial
  Synthetic oligonucleotide
ctttttttcgacgtaataaaaccggccccaaagcgcccgcaagaagcacac

SEQ ID NO: 177438 - DNA, 57 bp, Artificial
  Synthetic oligonucleotide
gcatgccgtaaaaacagagccagcgcgtttctggcggattttcgggtggtttgttgc

SEQ ID NO: 177439 - DNA, 58 bp, Artificial
  Synthetic oligonucleotide
gcgcggtgatccatccttagctttcgtaattttgtaattagcggctattaactgatac

SEQ ID NO: 177440 - DNA, 59 bp, Artificial
  Synthetic oligonucleotide
ctttttgcggtgtttgcggcagaatcgcgttcagcgcgttttagcggtgcgcgtaatgc

SEQ ID NO: 177441 - DNA, 54 bp, Artificial
  Synthetic oligonucleotide
ctttttattagcctgtaacgattaataaccttattctagcaacatccgttacac

SEQ ID NO: 177442 - DNA, 60 bp, Artificial
  Synthetic oligonucleotide
cttttgtcagatggctgttttttgcagcaattcctactcagtcatgggagcgcagcgtca

SEQ ID NO: 177443 - DNA, 55 bp, Artificial
  Synthetic oligonucleotide
gaatacccccggacgttttgtcggtttcgcatccaccacaggaacactcattggc

SEQ ID NO: 177444 - DNA, 57 bp, Artificial
  Synthetic oligonucleotide
gaagtgcctccacagtacctgtcgtacttactgaaagcaccgttatgcccaaactcc

SEQ ID NO: 177445 - DNA, 50 bp, Artificial
  Synthetic oligonucleotide
gaagtcttgacgcttcccgcggagttatttttcttgggttacttcctttt

SEQ ID NO: 177446 - DNA, 60 bp, Artificial
  Synthetic oligonucleotide
gaagtctgacgatggcgtatgtatggatcagctgtttatcttcagtggccgtgcgcagga

SEQ ID NO: 177447 - DNA, 60 bp, Artificial
  Synthetic oligonucleotide
gaagtccacagtcttgacagggaaaatgcagcggcgtagcttttgtgctgtacataaaac

SEQ ID NO: 177448 - DNA, 56 bp, Artificial
  Synthetic oligonucleotide
gaagtagagtgttactgtggtatctatccccattcttgtgttagccacgttttcgt

SEQ ID NO: 177449 - DNA, 53 bp, Artificial
  Synthetic oligonucleotide
gaaggttagaagtttcgcggactatctaacccaaggtaacagggtgtacaaga

SEQ ID NO: 177450 - DNA, 60 bp, Artificial
  Synthetic oligonucleotide
gcgcggcacttgtgacgttcactcgcgagatgaaggatgcaacggtagaagtacgtgctg

SEQ ID NO: 177451 - DNA, 60 bp, Artificial
  Synthetic oligonucleotide
caactgggcgtcagtcggctcactggcatcgcgtcagactagggccgctttctgcattat

SEQ ID NO: 177452 - DNA, 58 bp, Artificial
  Synthetic oligonucleotide
gaaggtgaatccattgaaagcgacagagcaacacaagcgccgggtcggaaagccccaa

SEQ ID NO: 177453 - DNA, 59 bp, Artificial
  Synthetic oligonucleotide
gaagcgatatttctcgccagtagtacgcaccagaaagccacacgcttcgttcgggtagc

SEQ ID NO: 177454 - DNA, 54 bp, Artificial
  Synthetic oligonucleotide
caagaataacgttagttacccctccaaggctattacccattgttgctgttaaga

SEQ ID NO: 177455 - DNA, 57 bp, Artificial
  Synthetic oligonucleotide
gaagatccatttgtaaggcagaggcctccaattcttgggccttcgaccctcccagaa

SEQ ID NO: 177456 - DNA, 60 bp, Artificial
  Synthetic oligonucleotide
caagacataggcaattaaatgaacatagagcggctgcaatgagagttattgtccctgcta

SEQ ID NO: 177457 - DNA, 59 bp, Artificial
  Synthetic oligonucleotide
gaagaggtcgagtgatatattgggcagtgagtttgattggtcgggggatttatacgcaa

SEQ ID NO: 177458 - DNA, 54 bp, Artificial
  Synthetic oligonucleotide
caagattttttaaggtaatggaatccagtttaagtatgccgtggtactgcttac

SEQ ID NO: 177459 - DNA, 60 bp, Artificial
  Synthetic oligonucleotide
gaacttggcgatcgccatgcctaccagtacgcgatccacaatccgccaggtgcaattgac

SEQ ID NO: 177460 - DNA, 59 bp, Artificial
  Synthetic oligonucleotide
gaactgctgaaagaacggaatcatcatccgtgtggtgtcggccttgttggtgtagaagt

SEQ ID NO: 177461 - DNA, 60 bp, Artificial
  Synthetic oligonucleotide
gcgcgatcacgaaacgtcccatagtctggctcgtgaggtgtatgcgagtaacatcctaga

SEQ ID NO: 177462 - DNA, 60 bp, Artificial
  Synthetic oligonucleotide
gaacgctactctccttcctgtaggaagctcaacatccaagcttaatttgcctcccattgc

SEQ ID NO: 177463 - DNA, 55 bp, Artificial
  Synthetic oligonucleotide
gaacgatcaccacacgtgaacagttattagtggacggaaaagtcagggaacggat

SEQ ID NO: 177464 - DNA, 57 bp, Artificial
  Synthetic oligonucleotide
caaggggcgtgtgggtcgtaacacacggagggaatcctaacacatgagcgccgcgct

SEQ ID NO: 177465 - DNA, 60 bp, Artificial
  Synthetic oligonucleotide
gaacgaggaggcgtcatgtcatctgccctgacatagtaccgggtcactcctgagccacat

SEQ ID NO: 177466 - DNA, 58 bp, Artificial
  Synthetic oligonucleotide
gaaccttggtaactgtcttggaggagacgagtcaccaaatctgtccttcagtgtagcc

SEQ ID NO: 177467 - DNA, 60 bp, Artificial
  Synthetic oligonucleotide
gaacctgcggggatattcaacagtgcgatctggcgatgcttctcaaacgcttcggtaaat

SEQ ID NO: 177468 - DNA, 60 bp, Artificial
  Synthetic oligonucleotide
gaacatcagtagggaaaatgcttatggtgtgttagctaaagcaaccagagagctgatgac

SEQ ID NO: 177469 - DNA, 60 bp, Artificial
  Synthetic oligonucleotide
gaacatactggctaaatacggaaggatctgaggttcttatggctcttgtatctatcagtg

SEQ ID NO: 177470 - DNA, 54 bp, Artificial
  Synthetic oligonucleotide
cgtttgattggtctttggctgattttactggttgtgatttaacgggtggggcgc

SEQ ID NO: 177471 - DNA, 54 bp, Artificial
  Synthetic oligonucleotide
cagccacaaaacttttggccgcaggcttcaaaaacttttgcgtctgcccccgga

SEQ ID NO: 177472 - DNA, 60 bp, Artificial
  Synthetic oligonucleotide
gcgcctcaaagaacattttcgtctctgatgatgaatcctgcggggttggcattacttgtt

SEQ ID NO: 177473 - DNA, 60 bp, Artificial
  Synthetic oligonucleotide
cgttgtgaataaagtagctaaaacagcgattgcagttgtgctctcattcgcattctgtag

SEQ ID NO: 177474 - DNA, 54 bp, Artificial
  Synthetic oligonucleotide
cgttgtctattccagatactattgaaccggttatcggtgtcaaagttggggaat

SEQ ID NO: 177475 - DNA, 60 bp, Artificial
  Synthetic oligonucleotide
cgttgtcgcagccgatatcgctatggaactgttagaacgatttcccaacgcgccgcatta

SEQ ID NO: 177476 - DNA, 58 bp, Artificial
  Synthetic oligonucleotide
cgttgcttcacggaggtaccgttttctaccagcgcaaccggcatatcggcctgcatac

SEQ ID NO: 177477 - DNA, 60 bp, Artificial
  Synthetic oligonucleotide
cagccatagctctgtcaaaagagtttgcttttatagtttgcagaaatttcttgtgatgtt

SEQ ID NO: 177478 - DNA, 60 bp, Artificial
  Synthetic oligonucleotide
cgttgaatggtattaagctggtagtgacacggctagccagccctgctaggattagatcgc

SEQ ID NO: 177479 - DNA, 60 bp, Artificial
  Synthetic oligonucleotide
cagccattgcgattgccccttcatggtgtgcgatcataccttttgcaaaggccttatcgg

SEQ ID NO: 177480 - DNA, 58 bp, Artificial
  Synthetic oligonucleotide
cgttctgtctgtcgggcgcgtccagactcccgttcttggcctcattgtgaatcgtacc

SEQ ID NO: 177481 - DNA, 54 bp, Artificial
  Synthetic oligonucleotide
cgttcccccagagcgtatattctccgttccggttgtgaagcagaaggtaacagg

SEQ ID NO: 177482 - DNA, 57 bp, Artificial
  Synthetic oligonucleotide
cgttcacgacatcgctacgggtaccaccattcgagtttgtaggcattcccataccaa

SEQ ID NO: 177483 - DNA, 60 bp, Artificial
  Synthetic oligonucleotide
atatgcatgcttagtctaatgaggggacttgtgagctaaaagtatccccttgagatcctg

SEQ ID NO: 177484 - DNA, 59 bp, Artificial
  Synthetic oligonucleotide
cgttcaattgaaccaatgtaggttctatggattcccactagatcagctaagctttcttg

SEQ ID NO: 177485 - DNA, 55 bp, Artificial
  Synthetic oligonucleotide
cgttagtggcggataaccccctgacaccggcaggcctgctggcacccacctaccg

SEQ ID NO: 177486 - DNA, 55 bp, Artificial
  Synthetic oligonucleotide
cgttagtaattgggaccacggtcccacctggatatccaatgccaacgttggtgat

SEQ ID NO: 177487 - DNA, 55 bp, Artificial
  Synthetic oligonucleotide
cagcctacccgagtattaaaaattgggcgaatactcttatttggccttgctccaa

SEQ ID NO: 177488 - DNA, 54 bp, Artificial
  Synthetic oligonucleotide
cgttacttccgtggtacgaacccagcccaacacatgccgaaattccttacgctc

SEQ ID NO: 177489 - DNA, 59 bp, Artificial
  Synthetic oligonucleotide
cgttaaccctgctggatggtgccgcacgtcataacgtacaggtcctgataaccgacagc

SEQ ID NO: 177490 - DNA, 57 bp, Artificial
  Synthetic oligonucleotide
cgtgttgtgtcggctttctgggtggaaaagttgggatcaaaaccgtcatctgaagca

SEQ ID NO: 177491 - DNA, 60 bp, Artificial
  Synthetic oligonucleotide
cgtgtgttgggaacgtaaaacactgagcatcattgtcatcgtagcatcagtatcgaccat

SEQ ID NO: 177492 - DNA, 56 bp, Artificial
  Synthetic oligonucleotide
cagcgattaatttaaaattatcctttgactcaacaaggtaatactgcctatacaaa

SEQ ID NO: 177493 - DNA, 60 bp, Artificial
  Synthetic oligonucleotide
cgtgtgctgcacgttgttgatattcacactcctgacccggaatcgcctgtgcgaagtccg

SEQ ID NO: 177494 - DNA, 55 bp, Artificial
  Synthetic oligonucleotide
gcgccggttactttccgctactgctacgcgccccttatgggcccgcttacggcaa

SEQ ID NO: 177495 - DNA, 60 bp, Artificial
  Synthetic oligonucleotide
cgtgtcctgctgctggcatatgagtgcgtcgactgcctgatttagatcgtcaagcggaga

SEQ ID NO: 177496 - DNA, 60 bp, Artificial
  Synthetic oligonucleotide
cgtgtcagctattcctggtttcatatgaaacaaaccatgcctgttctcatgccagtaagt

SEQ ID NO: 177497 - DNA, 60 bp, Artificial
  Synthetic oligonucleotide
ctataccatcagaaccgagagccacaggaaaatctgggtcatccttcataatctgaccat

SEQ ID NO: 177498 - DNA, 55 bp, Artificial
  Synthetic oligonucleotide
ctaggtaggtattccggttcttgtcgtcgctgtaaattgtcacgcccgcgccgct

SEQ ID NO: 177499 - DNA, 60 bp, Artificial
  Synthetic oligonucleotide
ctaggcacatcttgagccacaaaatcgaaccgctgggcggctggtatatcgacacggcca

SEQ ID NO: 177500 - DNA, 60 bp, Artificial
  Synthetic oligonucleotide
ctagctcactgaacaactgtacccattgttgatgataacaagcaatcagtacttggatgt

SEQ ID NO: 177501 - DNA, 57 bp, Artificial
  Synthetic oligonucleotide
ctagcggaatggcgctacccgtcataaagacccaacgcagccggcgaatgttgccgt

SEQ ID NO: 177502 - DNA, 60 bp, Artificial
  Synthetic oligonucleotide
ctagcaatgcgggtcgtgcttcacaggcaagcacacggaaggtagacttcggcatagtcc

SEQ ID NO: 177503 - DNA, 56 bp, Artificial
  Synthetic oligonucleotide
ctagatttattctaataagcgtatataaagttaaaacacaacaacttagtatgcga

SEQ ID NO: 177504 - DNA, 55 bp, Artificial
  Synthetic oligonucleotide
ctactcggtcgagtctaggtcgagtctagaagttaactcgaaggagttaggtggc

SEQ ID NO: 177505 - DNA, 60 bp, Artificial
  Synthetic oligonucleotide
atatgtatcggccggattacatctcatataagcctcctccccgcctgacaccacactttg

SEQ ID NO: 177506 - DNA, 60 bp, Artificial
  Synthetic oligonucleotide
ctacgggactacctgccagacgatttagagctacccaagcgcatcacaaaagccgaagca

SEQ ID NO: 177507 - DNA, 60 bp, Artificial
  Synthetic oligonucleotide
cagatgaaggacgaagtgaacagtctcaccaacgcacaggctgtactgggttacgtgttg

SEQ ID NO: 177508 - DNA, 56 bp, Artificial
  Synthetic oligonucleotide
ctacggatatttaaaggaatggcgtttacgccacaataattcggtgctaccagcgc

SEQ ID NO: 177509 - DNA, 57 bp, Artificial
  Synthetic oligonucleotide
ctaccacgcgtttcggttacgcgagtgtgctctgacggccgtaattagcggatgccg

SEQ ID NO: 177510 - DNA, 54 bp, Artificial
  Synthetic oligonucleotide
ctaccaaggtgcgtattgtgtatgcgtattagaaaggattaagggtaaaataac

SEQ ID NO: 177511 - DNA, 60 bp, Artificial
  Synthetic oligonucleotide
ctacattgtggagcttcacaaagaacacggcgcagctaacgcacaggatagcgttgaggc

SEQ ID NO: 177512 - DNA, 60 bp, Artificial
  Synthetic oligonucleotide
ctacagcctgcacattgacccgtcggtagtcattaaccagaaaatcaccgccgcacagac

SEQ ID NO: 177513 - DNA, 60 bp, Artificial
  Synthetic oligonucleotide
ctaattagttgaatctaatgtataatacaggctttcttcgcctgttgcccatgctgatat

SEQ ID NO: 177514 - DNA, 49 bp, Artificial
  Synthetic oligonucleotide
ctaatcccccgtcccgtaaaccgcgttgacttgaaggttatcgttttac

SEQ ID NO: 177515 - DNA, 57 bp, Artificial
  Synthetic oligonucleotide
ctaagcgggattgtctgtaaaagtggcggtctttcactcaccccgatagcacggcgc

SEQ ID NO: 177516 - DNA, 58 bp, Artificial
  Synthetic oligonucleotide
gcgccccggttgagagcgggatatcaactcgcgtaagaatacctatcggttcgcctgc

SEQ ID NO: 177517 - DNA, 50 bp, Artificial
  Synthetic oligonucleotide
ctaactcatagcaaaaaaaaagccccctaagggcttttttttgtacctga

SEQ ID NO: 177518 - DNA, 53 bp, Artificial
  Synthetic oligonucleotide
ctaaaatgtctgaagttgtttgttttagttcttttttgtatacccatcctcta

SEQ ID NO: 177519 - DNA, 60 bp, Artificial
  Synthetic oligonucleotide
cagcacagtctgccagacacagtagaaacgatgaagcgccagcgacggtgaaaggcagtc

SEQ ID NO: 177520 - DNA, 58 bp, Artificial
  Synthetic oligonucleotide
cagcagaaagatcgacagaattaatattcttcgtacctgggacagttatcgggtgtcg

SEQ ID NO: 177521 - DNA, 60 bp, Artificial
  Synthetic oligonucleotide
ctaaaagcgcgcaatgggcatcgaaagaatggtcacagttcggaggcgtgcttgccctga

SEQ ID NO: 177522 - DNA, 60 bp, Artificial
  Synthetic oligonucleotide
cgtttttttcagcggttgccagaacgtggagcagtcgcctgtcagtctcactgagcgaag

SEQ ID NO: 177523 - DNA, 53 bp, Artificial
  Synthetic oligonucleotide
cgtttttacagatttacggcttgctttgcgggtggtttctggttcacacttcg

SEQ ID NO: 177524 - DNA, 59 bp, Artificial
  Synthetic oligonucleotide
cgttttccggacagcgtattcatttctgcatcacgggcatgaatactggagcttaaacg

SEQ ID NO: 177525 - DNA, 54 bp, Artificial
  Synthetic oligonucleotide
cgtccggaataaataaggtagactccgcataaaccgactcagaaaatagggcga

SEQ ID NO: 177526 - DNA, 54 bp, Artificial
  Synthetic oligonucleotide
cgtccctgaagcaggtacacgcgggttcaccgtgaaaggtggcagtcccgtaac

SEQ ID NO: 177527 - DNA, 60 bp, Artificial
  Synthetic oligonucleotide
atatgtggagtcaatttcgtcgctgttcttgactggacttacttcaccagcgtaatcttc

SEQ ID NO: 177528 - DNA, 51 bp, Artificial
  Synthetic oligonucleotide
cgtcccaccggcgaccaaggttataaaatcgggaattccgcttaccggctg

SEQ ID NO: 177529 - DNA, 57 bp, Artificial
  Synthetic oligonucleotide
cgtccaaactgcgtggtaccagtgcggcgagtttcagcctggctgacgcgaaaaacg

SEQ ID NO: 177530 - DNA, 58 bp, Artificial
  Synthetic oligonucleotide
cgtcataaagatatgagtaaactaaaaacacttatgacgcttctgattaacgatgatt

SEQ ID NO: 177531 - DNA, 56 bp, Artificial
  Synthetic oligonucleotide
cgtcagggttcgttgctaacaacagcacgttaataaccgtttataggctcgctgtc

SEQ ID NO: 177532 - DNA, 60 bp, Artificial
  Synthetic oligonucleotide
caggatgtgattcaggcgctcacagaggcggggcttgaagttgtcagggtgacgcgaagc

SEQ ID NO: 177533 - DNA, 60 bp, Artificial
  Synthetic oligonucleotide
cgtcagggaaaccagatatgatgcagaaccaataccaatcagagagattacgatacgagg

SEQ ID NO: 177534 - DNA, 56 bp, Artificial
  Synthetic oligonucleotide
cgtcaggattttgtggtatgacgaaaccagtagcagacgggtccgtcgccggtatc

SEQ ID NO: 177535 - DNA, 57 bp, Artificial
  Synthetic oligonucleotide
cgtcactttatggataccgtaagtccatgccccggtggaaagcatgggctgactaaa

SEQ ID NO: 177536 - DNA, 60 bp, Artificial
  Synthetic oligonucleotide
cgtcactggtggggatatatgccgtcactggtggggatatatgccgcgaagattaaatat

SEQ ID NO: 177537 - DNA, 60 bp, Artificial
  Synthetic oligonucleotide
cgtcacgcgaggtatagatgcactttaccatgccggagagataaaaggccgtcaggatgt

SEQ ID NO: 177538 - DNA, 53 bp, Artificial
  Synthetic oligonucleotide
gcgcccccgttcccgttatgcggtcgctacccgtttaaatcctgcggcgctcc

SEQ ID NO: 177539 - DNA, 59 bp, Artificial
  Synthetic oligonucleotide
cgtcaaatcagttcatgttctaggtggtcgcgcccctggagtggtggaagactcgcagg

SEQ ID NO: 177540 - DNA, 60 bp, Artificial
  Synthetic oligonucleotide
cgtatggcaatgatgcaggctgtaaagggaatcggatctgctctgggatttggtgtgaca

SEQ ID NO: 177541 - DNA, 60 bp, Artificial
  Synthetic oligonucleotide
cgtatccgactgttctgtcatcaactgcgcgttctcccgtatctgtgtcccttgccacca

SEQ ID NO: 177542 - DNA, 59 bp, Artificial
  Synthetic oligonucleotide
caggcgaacattccagaactcctggcgggtttgtccggtagcaacatccctgatggtca

SEQ ID NO: 177543 - DNA, 51 bp, Artificial
  Synthetic oligonucleotide
cgtatcagtgcggacaacgttttttcatccgtcgttgttcggttttttttc

SEQ ID NO: 177544 - DNA, 56 bp, Artificial
  Synthetic oligonucleotide
cgtatattcgttttcgtctgaccatcagggatgttgctaccggacaaacccgccag

SEQ ID NO: 177545 - DNA, 57 bp, Artificial
  Synthetic oligonucleotide
cgtagttgtcaaattcgtcaactccagttgtcaaattcgtcaactgaggttgtcaaa

SEQ ID NO: 177546 - DNA, 60 bp, Artificial
  Synthetic oligonucleotide
cgtagtgcgagtgtccaccttaacgcagggcttcccgtcacaacgcgatatatcagccag

SEQ ID NO: 177547 - DNA, 57 bp, Artificial
  Synthetic oligonucleotide
cgtagctactttaaccagcggcccgcttacgtgttgcgtgaggacagcagtaaaggc

SEQ ID NO: 177548 - DNA, 53 bp, Artificial
  Synthetic oligonucleotide
cgtagcggctttaggaagggtcagtacgaagtccgtaccgtcttgaggtgtta

SEQ ID NO: 177549 - DNA, 60 bp, Artificial
  Synthetic oligonucleotide
atctccagctcgttaatcagcggttgtagtcggttcacatccgcctgtcttgtgacttcc

SEQ ID NO: 177550 - DNA, 60 bp, Artificial
  Synthetic oligonucleotide
gcgccacgacaacgcccctatagcccttgaagcagcccatatcagatggaagcagcatca

SEQ ID NO: 177551 - DNA, 60 bp, Artificial
  Synthetic oligonucleotide
caggcttaatgagctggatctggatcatgaggctgatttctgcgagaaactccatgagga

SEQ ID NO: 177552 - DNA, 59 bp, Artificial
  Synthetic oligonucleotide
cgtacgccggttgtcgtaaagctgaacagtattgaggcacttcgggagcagcacgagaa

SEQ ID NO: 177553 - DNA, 54 bp, Artificial
  Synthetic oligonucleotide
cgtacaaacggccctttcgcgttacgccccagttgatggagataacgggcgcca

SEQ ID NO: 177554 - DNA, 56 bp, Artificial
  Synthetic oligonucleotide
cgtaatggcacacgccgttacccgtcattcgggcgtttcagaggacagacgaccac

SEQ ID NO: 177555 - DNA, 60 bp, Artificial
  Synthetic oligonucleotide
cagcgcattgcacttggcatggaatggggcttacggcctgttaggtggtgactatagcta

SEQ ID NO: 177556 - DNA, 60 bp, Artificial
  Synthetic oligonucleotide
cagcgctgtcgctggcaatccaggttgggagcgtgtgcagcccataggcgtgtaaaatcg

SEQ ID NO: 177557 - DNA, 60 bp, Artificial
  Synthetic oligonucleotide
cagcgcttatcccgcacgttcattgaatatcccccatcgaagcacataacaggcgtcgaa

SEQ ID NO: 177558 - DNA, 60 bp, Artificial
  Synthetic oligonucleotide
cagcgcttcccgtggaatgttctccatgatcatatgttgcaggatacgcgccatgatcca

SEQ ID NO: 177559 - DNA, 60 bp, Artificial
  Synthetic oligonucleotide
cgtgcgaaactgatcgtcattcagtttcgcgcataactatgcatgaggttaaaatttacc

SEQ ID NO: 177560 - DNA, 60 bp, Artificial
  Synthetic oligonucleotide
cagcgtactggacgcttatcagcttcagcgaaatgataatcagcgtgccctgtttcatta

SEQ ID NO: 177561 - DNA, 59 bp, Artificial
  Synthetic oligonucleotide
gcgcagtttatccaccgaggctttctgcccgttaagcgtcagttcaaagaatagcgtga

SEQ ID NO: 177562 - DNA, 60 bp, Artificial
  Synthetic oligonucleotide
cgtgcatcatgaatcatactgttcagtacgcgcctgtcttcattcaggtgcgtgacaatc

SEQ ID NO: 177563 - DNA, 60 bp, Artificial
  Synthetic oligonucleotide
cgtgcaaaaggaacttggcgatcgccatgcctaccagtacgcgatccacaatccgtcagg

SEQ ID NO: 177564 - DNA, 60 bp, Artificial
  Synthetic oligonucleotide
cagcgtgtcaagcggactgcgtgacgtgtgaccacactcacgggtctggacaccgttaag

SEQ ID NO: 177565 - DNA, 60 bp, Artificial
  Synthetic oligonucleotide
cgtgatacagcaacaggactggataaaatcacgttaccagcagtagtaggcgcaccttcc

SEQ ID NO: 177566 - DNA, 56 bp, Artificial
  Synthetic oligonucleotide
cgtgagtacgaagaaggcgtcaacgtctttatggcgaccgccagcggtaccgtgaa

SEQ ID NO: 177567 - DNA, 50 bp, Artificial
  Synthetic oligonucleotide
cagctaaaccccgtaaacgtaaacccgcctctcaaagaagcaaacttccc

SEQ ID NO: 177568 - DNA, 58 bp, Artificial
  Synthetic oligonucleotide
cgtgaatgttgtaactaataggggtttatgcgctcgtagcatcgtgataggaggtatt

SEQ ID NO: 177569 - DNA, 60 bp, Artificial
  Synthetic oligonucleotide
cgtgaagcttagccatgccgctctaaccatcttaattgcttcgcctacgccaataatgag

SEQ ID NO: 177570 - DNA, 60 bp, Artificial
  Synthetic oligonucleotide
cagctccccgtcacggatattcgcggtggtaagtacagggacagtgacctgctgctcact

SEQ ID NO: 177571 - DNA, 53 bp, Artificial
  Synthetic oligonucleotide
cgtgaacattgatccggtcgttctgaaaccttaacggtataaaatgaacgtcc

SEQ ID NO: 177572 - DNA, 60 bp, Artificial
  Synthetic oligonucleotide
gcgcacgttaaagacgcgatcggcgctagcgttgcctctaagtggacagcaatcatccac

SEQ ID NO: 177573 - DNA, 58 bp, Artificial
  Synthetic oligonucleotide
cgtctgatatatcaccctatcggtagggcggtcagcagttgcccccctaggtgatatt

SEQ ID NO: 177574 - DNA, 60 bp, Artificial
  Synthetic oligonucleotide
cgtctcttcagtatgattatgagactgtacagctatatagttcgaatacagtaaaggacg

SEQ ID NO: 177575 - DNA, 55 bp, Artificial
  Synthetic oligonucleotide
cgtctcgcacaagacagttaccaggttaagcagttccccaactgacctaaccttc

SEQ ID NO: 177576 - DNA, 60 bp, Artificial
  Synthetic oligonucleotide
cagcttggattgattaacctgaagttcatgattccaataatcgaagctgaagtgtcctta

SEQ ID NO: 177577 - DNA, 56 bp, Artificial
  Synthetic oligonucleotide
cgtctcgaccgtaccgagccgacgttaaacaccgccattcctggcgatccgcgtga

SEQ ID NO: 177578 - DNA, 60 bp, Artificial
  Synthetic oligonucleotide
cgtctccggcggtgtattagagaatgcattgaagatcacggatgtcgggctggtacaaca

SEQ ID NO: 177579 - DNA, 60 bp, Artificial
  Synthetic oligonucleotide
cgtcgaaacaattctgttgagcagaagtgcgaactaagcgtcacaacgtaggtcacaatg

SEQ ID NO: 177580 - DNA, 60 bp, Artificial
  Synthetic oligonucleotide
caggacaaggggcgtcttgagctgaattttgtcattccgaacatggagctacagaccgga

SEQ ID NO: 177581 - DNA, 60 bp, Artificial
  Synthetic oligonucleotide
cgtcctgaatagcgttgacacgttccagacttaaatccggagaacgtgatgatgactgag

SEQ ID NO: 177582 - DNA, 56 bp, Artificial
  Synthetic oligonucleotide
caggacgatgataataaggaaactcatgtaacgataaaacttgaccgtcaacttaa

SEQ ID NO: 177583 - DNA, 60 bp, Artificial
  Synthetic oligonucleotide
gcgcaatcatgacgacctccccataaacacacggagcagaatgacggaacgcaaactatt

SEQ ID NO: 177584 - DNA, 59 bp, Artificial
  Synthetic oligonucleotide
cactagtagatattatagccttaccgaacgcactacacaatttattaataccattatga

SEQ ID NO: 177585 - DNA, 57 bp, Artificial
  Synthetic oligonucleotide
cactatagtcagtaaaacgttcactatagtcagtaaaacgttcactatagtcagtaa

SEQ ID NO: 177586 - DNA, 59 bp, Artificial
  Synthetic oligonucleotide
cactatgtcctctagggttgcatccttaaggagcaacgtatcagtcgttatgtcggttg

SEQ ID NO: 177587 - DNA, 59 bp, Artificial
  Synthetic oligonucleotide
cactcaaacgtcgctgatatagctcataaacaagaccacaacggggcattagttcttcg

SEQ ID NO: 177588 - DNA, 60 bp, Artificial
  Synthetic oligonucleotide
ctgagcactgacgctctgaggcctcttatgacgaaacaacagaaaacagcgctgaacatg

SEQ ID NO: 177589 - DNA, 60 bp, Artificial
  Synthetic oligonucleotide
ctgagaataacgagatgaaaatccaggtaggcgctaacgatggtgaaactatcacgatta

SEQ ID NO: 177590 - DNA, 60 bp, Artificial
  Synthetic oligonucleotide
ctgactgcgtgtctatcgaaggtgtggatggtctattctgcccaatggatttagttcgcc

SEQ ID NO: 177591 - DNA, 60 bp, Artificial
  Synthetic oligonucleotide
ctgactgatgccataactcacctttagcatgaagattctaggtgatgactctaattagtt

SEQ ID NO: 177592 - DNA, 59 bp, Artificial
  Synthetic oligonucleotide
ctgacgacctccctccatcccaccgcccgcgctctttccagtccatcatcggttggctc

SEQ ID NO: 177593 - DNA, 60 bp, Artificial
  Synthetic oligonucleotide
cactcgttgcgtggtattcatataacggacgatggtctggttgcttcaatcctctgcggg

SEQ ID NO: 177594 - DNA, 58 bp, Artificial
  Synthetic oligonucleotide
gcgattatcaggctgggcgcgaacgttgttcagcccggttgtattaatgcggtagggc

SEQ ID NO: 177595 - DNA, 60 bp, Artificial
  Synthetic oligonucleotide
cactctatatgggacgttcgtacctggacatgattatctgtgttcaatgtccccgcatga

SEQ ID NO: 177596 - DNA, 60 bp, Artificial
  Synthetic oligonucleotide
ctgaccccgatagtgattgccatgttgctcgcactgggcttcagtaaagggactacgctt

SEQ ID NO: 177597 - DNA, 60 bp, Artificial
  Synthetic oligonucleotide
ctgaccaggatcgtttgaaacgatcaggaccgcggatcatagcctaaactgagcaagaga

SEQ ID NO: 177598 - DNA, 60 bp, Artificial
  Synthetic oligonucleotide
ctgacatagtaccgggtcactcctgagccacatatcacgcctgccacatgaagcactttc

SEQ ID NO: 177599 - DNA, 60 bp, Artificial
  Synthetic oligonucleotide
ctgacatacttatactgtacggcgttataaaagcttagcgagcaacctatcagagtcacg

SEQ ID NO: 177600 - DNA, 60 bp, Artificial
  Synthetic oligonucleotide
cactgcagtgcaactacgcttaatgcgttttatgttaaatatcagtcacttagagtcaaa

SEQ ID NO: 177601 - DNA, 60 bp, Artificial
  Synthetic oligonucleotide
cactgccacgcatccgaaagttgaatacacagcggcatcccgccatgacggatagcctgc

SEQ ID NO: 177602 - DNA, 58 bp, Artificial
  Synthetic oligonucleotide
ctgaatcacctgtcagttcattacctctcgataaggcaacagtaaacgtaaatgttcg

SEQ ID NO: 177603 - DNA, 60 bp, Artificial
  Synthetic oligonucleotide
ctgaagcagtcgggctttgagatagccagagtgacaccgaaaaacctctcaatcaaaaca

SEQ ID NO: 177604 - DNA, 60 bp, Artificial
  Synthetic oligonucleotide
ctgaacagccgctctgcattcatgacctcccggtccggtttcggctcaaatacatcgtgg

SEQ ID NO: 177605 - DNA, 60 bp, Artificial
  Synthetic oligonucleotide
gcgatactggccggcatattcggtaataagatggcttaaattgccgtccaccttctgcgc

SEQ ID NO: 177606 - DNA, 60 bp, Artificial
  Synthetic oligonucleotide
ctgaaatgcgtgctgtgcggaagtcagatgcgatttacggggctgaagaggggctaccgt

SEQ ID NO: 177607 - DNA, 52 bp, Artificial
  Synthetic oligonucleotide
ctgaaagcgatcctgacgcatttttccggtttaccccggggaaaacatctct

SEQ ID NO: 177608 - DNA, 60 bp, Artificial
  Synthetic oligonucleotide
ctcttcgctcattccgtcttgtcgtttcagttctgcgtactttcctgtgaccagacagcg

SEQ ID NO: 177609 - DNA, 56 bp, Artificial
  Synthetic oligonucleotide
cactgtcttccttttccgcggtgacgaatggaaataccgtcctcagtaatgtccag

SEQ ID NO: 177610 - DNA, 60 bp, Artificial
  Synthetic oligonucleotide
ctcttcgcggctaaggtgcatgattgggcggggatcgttactcaacatctgcggggtgaa

SEQ ID NO: 177611 - DNA, 60 bp, Artificial
  Synthetic oligonucleotide
ctgcggcgacttctggtacagtgtgcacgggtctttatacagcggctggagcacaatcca

SEQ ID NO: 177612 - DNA, 60 bp, Artificial
  Synthetic oligonucleotide
ctgcgcagtctgtgcaaagtaacttcctctctgcccggcttctggggtcgagcgcatgag

SEQ ID NO: 177613 - DNA, 60 bp, Artificial
  Synthetic oligonucleotide
ctgcgatattatcagtcatgcatgtctaccagaattaagtgttggttttaggacaatttg

SEQ ID NO: 177614 - DNA, 60 bp, Artificial
  Synthetic oligonucleotide
ctgccggtgctcaatgaggcgtttgaccggattgcggatactctggagtgtttttctcac

SEQ ID NO: 177615 - DNA, 60 bp, Artificial
  Synthetic oligonucleotide
cacgcgttatccaggtgccttcgtcacggtgattggcgcatccatcaatgacccgatcga

SEQ ID NO: 177616 - DNA, 59 bp, Artificial
  Synthetic oligonucleotide
gcgaggtcggtcgataacctagaaggaatcgtaacacatgagcgccgcgcttcaatact

SEQ ID NO: 177617 - DNA, 60 bp, Artificial
  Synthetic oligonucleotide
cacgcgttctcgtcattctgaatttagttcattctctgcacaatcctgagtgttgaccgc

SEQ ID NO: 177618 - DNA, 60 bp, Artificial
  Synthetic oligonucleotide
cacgcgttgatgacgtagtgcagtttttacaggacgcgaaggacagcgatgaatatgctg

SEQ ID NO: 177619 - DNA, 60 bp, Artificial
  Synthetic oligonucleotide
cacgctgtcagcgtgactataaaccaacacactccaagcagtatttttcatatgagcata

SEQ ID NO: 177620 - DNA, 59 bp, Artificial
  Synthetic oligonucleotide
ctgccctattgcaaccagcaatggttttcacttattttcaacatctcatttaatacgag

SEQ ID NO: 177621 - DNA, 55 bp, Artificial
  Synthetic oligonucleotide
cacggaataattcccgtgagcgccaaatacgggtaagattctgttctattgacgg

SEQ ID NO: 177622 - DNA, 59 bp, Artificial
  Synthetic oligonucleotide
ctgccagtaccgcctttcgtgcattcatcttaaatgtccttttactgcgaaaatggaca

SEQ ID NO: 177623 - DNA, 59 bp, Artificial
  Synthetic oligonucleotide
ctgccaccgggagagcgtgaaagggtgatggagagctttgagcgggtactgatgcccgg

SEQ ID NO: 177624 - DNA, 56 bp, Artificial
  Synthetic oligonucleotide
ctgcagaattcaccagaacgcgtctccctgttacccattgcgccgggggtggattt

SEQ ID NO: 177625 - DNA, 54 bp, Artificial
  Synthetic oligonucleotide
ctgcagaagaacgggagtgttcgtttccgtgaccgtcggacgggagagtttgtc

SEQ ID NO: 177626 - DNA, 57 bp, Artificial
  Synthetic oligonucleotide
ctgcaatatagtcttaaccccattatttaatcccctgcgttgcttcgccgcagggaa

SEQ ID NO: 177627 - DNA, 60 bp, Artificial
  Synthetic oligonucleotide
gccgcagttgcagaactttgacagcagtcacgacattatggtgcgtatgccgccaaccga

SEQ ID NO: 177628 - DNA, 60 bp, Artificial
  Synthetic oligonucleotide
ctgcaactcaatttgcgcacgcgctctgttcaggacgatgtgccggttaggctgatttag

SEQ ID NO: 177629 - DNA, 60 bp, Artificial
  Synthetic oligonucleotide
ctgatttaccataacatctgttatcagcaccgcctgagaggccctcagggcgtttctgac

SEQ ID NO: 177630 - DNA, 60 bp, Artificial
  Synthetic oligonucleotide
cacgtagtgtgtacgaagttgcgttgtcaggaagcacgatattcagaaggtcagccacac

SEQ ID NO: 177631 - DNA, 60 bp, Artificial
  Synthetic oligonucleotide
ctgatgtaccggctcagctggcaaacctttgtgaacggctgcgtatactggtggtgtacg

SEQ ID NO: 177632 - DNA, 60 bp, Artificial
  Synthetic oligonucleotide
ctgatgattagctgtttaactaagatcagccttagctatttgccgcgccaggtcaatgcg

SEQ ID NO: 177633 - DNA, 60 bp, Artificial
  Synthetic oligonucleotide
ctgatcctgccacccggagccatattcatgaggagggttataagtcacaaaatcatcctt

SEQ ID NO: 177634 - DNA, 54 bp, Artificial
  Synthetic oligonucleotide
cactaaagccagttaccttcggaagaaagtgttggtagctcttaattccggcaa

SEQ ID NO: 177635 - DNA, 58 bp, Artificial
  Synthetic oligonucleotide
ctgagtactgtggattaactaccatatcggcagcgggaaataaatctgttactcgagg

SEQ ID NO: 177636 - DNA, 52 bp, Artificial
  Synthetic oligonucleotide
cactactttgcgggcctaggcctagggtgacggaaaaatctggggttccgga

SEQ ID NO: 177637 - DNA, 52 bp, Artificial
  Synthetic oligonucleotide
cactactttgcgggcctagggtgacggaaaaatctggggttccggagtataa

SEQ ID NO: 177638 - DNA, 60 bp, Artificial
  Synthetic oligonucleotide
gccgatttattgctatgtatgtatctggctaactcagagggaatgtgatgagcactaaag

SEQ ID NO: 177639 - DNA, 59 bp, Artificial
  Synthetic oligonucleotide
ctgagcgcatccagtgacaacccgcacgaagaagggctcataaatttcccgctaaatac

SEQ ID NO: 177640 - DNA, 60 bp, Artificial
  Synthetic oligonucleotide
ctcatgtcctatgggcaatgcagctgcggcgcttaattcgttgccgtttgtggaggttgt

SEQ ID NO: 177641 - DNA, 57 bp, Artificial
  Synthetic oligonucleotide
ctcatagaaaccgccaattaaatgggggtaagcatgatgcttatcgttactttcaac

SEQ ID NO: 177642 - DNA, 60 bp, Artificial
  Synthetic oligonucleotide
cagacacagtatcggactgactcattagggaacacttacggcagtgatgggagtagtgcc

SEQ ID NO: 177643 - DNA, 60 bp, Artificial
  Synthetic oligonucleotide
cagacaggcatcccacctgactttaaattgatgatgcgatatacatcacacgatagtcat

SEQ ID NO: 177644 - DNA, 60 bp, Artificial
  Synthetic oligonucleotide
ctcagtttctgcaccgcatgcagccttaacggtgtccagacccgtgagtatggtcacacg

SEQ ID NO: 177645 - DNA, 59 bp, Artificial
  Synthetic oligonucleotide
cagacaggctcaacgatgccgagttacctcattagcagtacagtaagaaaccgaaggga

SEQ ID NO: 177646 - DNA, 58 bp, Artificial
  Synthetic oligonucleotide
ctcaggtactgggtgcgacgttcagtggttcagatctctccggcggcgagttttcgac

SEQ ID NO: 177647 - DNA, 60 bp, Artificial
  Synthetic oligonucleotide
ctcagcttctgtaccgcgtgcagtcttaacggtgtccagacccgagagtgttgtcacacg

SEQ ID NO: 177648 - DNA, 57 bp, Artificial
  Synthetic oligonucleotide
ctcagctcccctgtttgctgaaagcagctccattgccgaggttcgggtttattaaat

SEQ ID NO: 177649 - DNA, 59 bp, Artificial
  Synthetic oligonucleotide
gccgactatggcttaggccgcaactgcactctgttcgataaaacacggaagtgggctta

SEQ ID NO: 177650 - DNA, 60 bp, Artificial
  Synthetic oligonucleotide
ctcagcgttctctggttatttggaggcctcagacgtgatgaaattctacgtatgcagtgt

SEQ ID NO: 177651 - DNA, 54 bp, Artificial
  Synthetic oligonucleotide
ctcactccggaaatgttacgggcgctaatccgcgaaatgaaaggaggtacccga

SEQ ID NO: 177652 - DNA, 60 bp, Artificial
  Synthetic oligonucleotide
ctcacccagagagcacgttcgcgtggatccgaccagtgccactgatgtcctttcccgtta

SEQ ID NO: 177653 - DNA, 60 bp, Artificial
  Synthetic oligonucleotide
ctcaatggttcgttctcatggctcacgcaaaaacaacgaaccacactagagaacatactg

SEQ ID NO: 177654 - DNA, 57 bp, Artificial
  Synthetic oligonucleotide
cagacgctgttttacctgtgccggagtaagaacatccgtcaccgacacatagaccgg

SEQ ID NO: 177655 - DNA, 56 bp, Artificial
  Synthetic oligonucleotide
ctcaagaaatagtactgttttaataccgtttgagctaattatgtctgaaggtaata

SEQ ID NO: 177656 - DNA, 59 bp, Artificial
  Synthetic oligonucleotide
cagacgtctaaaactcgtcatatttcgacttgcagatgcgttggcttccttgcttaccc

SEQ ID NO: 177657 - DNA, 60 bp, Artificial
  Synthetic oligonucleotide
ctattttacccagccgcaacagaacgcagagagccgccgcgatgtgctggcttcagcggc

SEQ ID NO: 177658 - DNA, 56 bp, Artificial
  Synthetic oligonucleotide
cagagacgccactgcgtgagggtgaacccggaagcgggacggttcggagaggattc

SEQ ID NO: 177659 - DNA, 57 bp, Artificial
  Synthetic oligonucleotide
ctattaaacttcttatgcctctggtttttggggcaacaatcggtgctgacatttcta

SEQ ID NO: 177660 - DNA, 60 bp, Artificial
  Synthetic oligonucleotide
atctccggcaaagggcgcgcgcttcttgcacggtatatccagcagaaccagcctcatgca

SEQ ID NO: 177661 - DNA, 60 bp, Artificial
  Synthetic oligonucleotide
atccgaaagttgaatacacagcggcatcccgccatgacggatagcctgcaaacagtggct

SEQ ID NO: 177662 - DNA, 60 bp, Artificial
  Synthetic oligonucleotide
ctatgttgagcgactataacaaagagcgccctctgatcgaatccataggtgcaaggatat

SEQ ID NO: 177663 - DNA, 60 bp, Artificial
  Synthetic oligonucleotide
cagagccatcttggaatctggtgtctctgcgcctataattctggaacagctactttccga

SEQ ID NO: 177664 - DNA, 60 bp, Artificial
  Synthetic oligonucleotide
ctatgacgcgctgaggcgctcaaatcgagataatcagccagttcatcgagggtataggct

SEQ ID NO: 177665 - DNA, 59 bp, Artificial
  Synthetic oligonucleotide
ctatgacatttgggccacggctgatttagtagacctcgttaagcaacggattgaattga

SEQ ID NO: 177666 - DNA, 58 bp, Artificial
  Synthetic oligonucleotide
ctatgacagttgagttgtcaaaagtggatgtttgttgagaaaccacacccattcccgc

SEQ ID NO: 177667 - DNA, 60 bp, Artificial
  Synthetic oligonucleotide
ctatcgcccgcggcgaaattaagctcagcgatccggtcacgaaatactggccagaactga

SEQ ID NO: 177668 - DNA, 59 bp, Artificial
  Synthetic oligonucleotide
ctatcagtcgttgaaaggtaatgaatcccgccctgtaacgtttctacaggcatcattgc

SEQ ID NO: 177669 - DNA, 55 bp, Artificial
  Synthetic oligonucleotide
ctcttaccgtttacgagcgccgttcatcccactgtgttacgtaatcggctcaaag

SEQ ID NO: 177670 - DNA, 57 bp, Artificial
  Synthetic oligonucleotide
ctctgggattcgcgctcacccgtcctctgctgtcgggtttatgtatccccgtcgccc

SEQ ID NO: 177671 - DNA, 60 bp, Artificial
  Synthetic oligonucleotide
ctctggcagggggaaggtactctacatccaacaatgtgagagagccgttgtgacaggcga

SEQ ID NO: 177672 - DNA, 60 bp, Artificial
  Synthetic oligonucleotide
gccgaccggccaggtgtgactgtccgggcgctgcaacacagtgaagccagcatcaccaag

SEQ ID NO: 177673 - DNA, 59 bp, Artificial
  Synthetic oligonucleotide
ctctcgacctgcggagagcagagacgccgctgcgtgagggtgaacccggaagcgggacg

SEQ ID NO: 177674 - DNA, 54 bp, Artificial
  Synthetic oligonucleotide
ctctccacaatagttcccgggtgattaaccgcgtaggtttgtgcgtaacgtgga

SEQ ID NO: 177675 - DNA, 56 bp, Artificial
  Synthetic oligonucleotide
ctctaggaactttttctgatatagcgtccaacatattccaaccagccttagtaacc

SEQ ID NO: 177676 - DNA, 60 bp, Artificial
  Synthetic oligonucleotide
cacttgtggacctcccgtccagagacatgacgcccacgattatcataaccaggatgataa

SEQ ID NO: 177677 - DNA, 51 bp, Artificial
  Synthetic oligonucleotide
ctctagacccgactccccgtttggttgttttttagacgtggcgactctggg

SEQ ID NO: 177678 - DNA, 55 bp, Artificial
  Synthetic oligonucleotide
ctcgttcgtttcccgctccagttgcagaacgttcttaagcgctccccccgtagca

SEQ ID NO: 177679 - DNA, 56 bp, Artificial
  Synthetic oligonucleotide
cactttatcaggtgcctgttatcgtacggcgagacggggtagagcctaactctttc

SEQ ID NO: 177680 - DNA, 60 bp, Artificial
  Synthetic oligonucleotide
cactttccgcgtgcttggacatttgattgatcaggtggtcgagtccccaatgacgcgccg

SEQ ID NO: 177681 - DNA, 60 bp, Artificial
  Synthetic oligonucleotide
ctcgtgggatagacgcactttaccatgccggagagataaaaggccgtcaggatgtgattc

SEQ ID NO: 177682 - DNA, 59 bp, Artificial
  Synthetic oligonucleotide
cagaaagccggaggaggtgcagttgcgtgcctggttactccagttcctgaaggcagagg

SEQ ID NO: 177683 - DNA, 57 bp, Artificial
  Synthetic oligonucleotide
atccgaccagacgtctcgtgttaactgacacattgtgataccgggataagaggttac

SEQ ID NO: 177684 - DNA, 60 bp, Artificial
  Synthetic oligonucleotide
ctcgtggaattacccgtgttgatgggtaacaaatgatatgtggcgtcatcgagagcagat

SEQ ID NO: 177685 - DNA, 51 bp, Artificial
  Synthetic oligonucleotide
ctcgtgaaccctgttaccgggttaagcagttccccaactgacttaaccttc

SEQ ID NO: 177686 - DNA, 60 bp, Artificial
  Synthetic oligonucleotide
ctcgctgcgacgtggatcttcaatgcaggctagcggatcgtgaaaagagacgacccaggc

SEQ ID NO: 177687 - DNA, 60 bp, Artificial
  Synthetic oligonucleotide
ctcgcgtccgaaaaacgctgtcagacagccggtattcacacgagcggctatggtcgatat

SEQ ID NO: 177688 - DNA, 56 bp, Artificial
  Synthetic oligonucleotide
ctcgcgggaatgtcctgtttctccaccttccggtaatgctgtcgcaatttttccat

SEQ ID NO: 177689 - DNA, 57 bp, Artificial
  Synthetic oligonucleotide
ctcgaaatttccaatcctacgctctgtattgcctccagaacgtcttttctggttcta

SEQ ID NO: 177690 - DNA, 60 bp, Artificial
  Synthetic oligonucleotide
ctcctatccggatcatggcaacagatcacagcaacaaggccgctaaaaagcgttgagcgg

SEQ ID NO: 177691 - DNA, 60 bp, Artificial
  Synthetic oligonucleotide
ctccgaagaaggtgcctgtctgcatgaatatgccacgtactcctgtgagtcaaaaacatc

SEQ ID NO: 177692 - DNA, 57 bp, Artificial
  Synthetic oligonucleotide
ctcccgcgaagtttacacgttactgcgcaatcaaaacaggcggatcaacagtatccc

SEQ ID NO: 177693 - DNA, 55 bp, Artificial
  Synthetic oligonucleotide
ctcccatgaccacctgtttattccctcccataactgaccacaatataaaaggaaa

SEQ ID NO: 177694 - DNA, 60 bp, Artificial
  Synthetic oligonucleotide
gccgacagtctgccgaaggttgaaggtctctcaaaactgcctctcgcttccgatctctca

SEQ ID NO: 177695 - DNA, 60 bp, Artificial
  Synthetic oligonucleotide
cagaattgtggtgccaggcaccataacgccatgtccaatcagcgtggtcgcctgtaggga

SEQ ID NO: 177696 - DNA, 60 bp, Artificial
  Synthetic oligonucleotide
ctccagtgaataattgaggcgtcgaatatctgcattcagctggtttctaatttttatctc

SEQ ID NO: 177697 - DNA, 59 bp, Artificial
  Synthetic oligonucleotide
tgattcgtcatctgaaacaggagattgaacacctgaacaccttacttttgtccaaggat

SEQ ID NO: 177698 - DNA, 60 bp, Artificial
  Synthetic oligonucleotide
tgattccttttcgatatgccccacaacatacagaaggtaatggtgtagtatcaaatgcct

SEQ ID NO: 177699 - DNA, 59 bp, Artificial
  Synthetic oligonucleotide
tgattattccccctctgacgcgccctgggacgcacacagaagcgtttctgacgacgtgg

SEQ ID NO: 177700 - DNA, 57 bp, Artificial
  Synthetic oligonucleotide
aatccgactggcggctgagttagcgaaatactgtcgggttcgtttttctgctgcctg

SEQ ID NO: 177701 - DNA, 54 bp, Artificial
  Synthetic oligonucleotide
aatccgagttcgggaaatgtactattcagtctttgaggaacggttattttgagc

SEQ ID NO: 177702 - DNA, 60 bp, Artificial
  Synthetic oligonucleotide
tgatgttcagggtgggacggtcgcgccatcttcttctgaactaacagggatctcggttca

SEQ ID NO: 177703 - DNA, 54 bp, Artificial
  Synthetic oligonucleotide
tgatgtgccggaaggacttgagcaggggcaacccgtcgccgaaaaaacggcgtt

SEQ ID NO: 177704 - DNA, 60 bp, Artificial
  Synthetic oligonucleotide
tgatctggcttatcatcgactggttacttccaccttcgccattatccgggcattcattaa

SEQ ID NO: 177705 - DNA, 60 bp, Artificial
  Synthetic oligonucleotide
atccgccaggtgcaatcgacggaaaggaacagccacacgcgcatatcatgttttgcgagc

SEQ ID NO: 177706 - DNA, 55 bp, Artificial
  Synthetic oligonucleotide
tgatctaaataataagcaatggtccggtgtcccattttaccttagaactggaaaa

SEQ ID NO: 177707 - DNA, 60 bp, Artificial
  Synthetic oligonucleotide
aatcctggcagattatctaaccaggtaatctggcttaagcagagcgcagaccaccaaaac

SEQ ID NO: 177708 - DNA, 57 bp, Artificial
  Synthetic oligonucleotide
tgatcgcgtgttgttcaacatagataccaaatcgcttaccacttctaaggacgtttt

SEQ ID NO: 177709 - DNA, 56 bp, Artificial
  Synthetic oligonucleotide
aatccttccgaagacgttccgagattttcgtatccttctagcatcactactctttc

SEQ ID NO: 177710 - DNA, 58 bp, Artificial
  Synthetic oligonucleotide
aatcgaggaacatgcgggaaaatgttaaacgctcatcagtggtggtagctaatccgac

SEQ ID NO: 177711 - DNA, 53 bp, Artificial
  Synthetic oligonucleotide
tgatcgccaaaattaccgggtgttttaaaagccctgattacgacgacaggaac

SEQ ID NO: 177712 - DNA, 60 bp, Artificial
  Synthetic oligonucleotide
aatcgatctgaacctgccaacacagcgccgtcatcagagtactggatcgcattgtggtca

SEQ ID NO: 177713 - DNA, 57 bp, Artificial
  Synthetic oligonucleotide
tgatccggctgtttttctggcgtgttgacgatagcaaaaagcggttcgctccaggtt

SEQ ID NO: 177714 - DNA, 59 bp, Artificial
  Synthetic oligonucleotide
aatcgcaacggctaaagaagcgcgtgaaaatgtgcttgaggcgttcgctaagaacggca

SEQ ID NO: 177715 - DNA, 60 bp, Artificial
  Synthetic oligonucleotide
tgatattcctgacaaaacgcgatttgcgagaactatcggcgctgtgacttctaccagcgt

SEQ ID NO: 177716 - DNA, 60 bp, Artificial
  Synthetic oligonucleotide
gccgaatctacagagaaaatgctgaacaacgagttcaggaggctcggcgagtctgtcagc

SEQ ID NO: 177717 - DNA, 60 bp, Artificial
  Synthetic oligonucleotide
tgatattcacactcctgacccggaatcgtctgtgcgaagtccggctgaaggacggataca

SEQ ID NO: 177718 - DNA, 59 bp, Artificial
  Synthetic oligonucleotide
aatcgcccagacaacttcgagcaaacctgcaattaataaaacgatccaggacatatcag

SEQ ID NO: 177719 - DNA, 60 bp, Artificial
  Synthetic oligonucleotide
tgatactgcttcgcgtcaccctgaccacttcaagccccacctctgtgagcgcctgaatca

SEQ ID NO: 177720 - DNA, 60 bp, Artificial
  Synthetic oligonucleotide
aatcgcctgatgcttaatgattttgcctgtgtcgtaaaggaatgtcatgcagtcttcaga

SEQ ID NO: 177721 - DNA, 60 bp, Artificial
  Synthetic oligonucleotide
tgataaagaccagtacagcatcctgtgggtggagcatcgtgacaaggggcggcttgagct

SEQ ID NO: 177722 - DNA, 60 bp, Artificial
  Synthetic oligonucleotide
aatcgctccattccgtgctcgctggattatcgcttcgtctctgaccgagccggtaagctg

SEQ ID NO: 177723 - DNA, 52 bp, Artificial
  Synthetic oligonucleotide
aatcgctctcgcgagctaaaaaaatcccccatatacgggggggaagaaacta

SEQ ID NO: 177724 - DNA, 56 bp, Artificial
  Synthetic oligonucleotide
tgataaaacacgcgaaagaggtgtcaaccagttaaccgtggctaatatccccatac

SEQ ID NO: 177725 - DNA, 59 bp, Artificial
  Synthetic oligonucleotide
tgcctttagctcgcaagggactttattcctctcggctctgcgccatttaggcaaccgcc

SEQ ID NO: 177726 - DNA, 59 bp, Artificial
  Synthetic oligonucleotide
tgcctagagtaaataaaactgtccttgacccacgatattcagacagtcgttgtatctta

SEQ ID NO: 177727 - DNA, 60 bp, Artificial
  Synthetic oligonucleotide
gccctctgcgttgaaagggatgggcggtagcgtgttcagacgaagatattacgctcatgt

SEQ ID NO: 177728 - DNA, 59 bp, Artificial
  Synthetic oligonucleotide
aatatcccttctttcggagcgccagaatgatgttggtctggccggattttcatatggcg

SEQ ID NO: 177729 - DNA, 60 bp, Artificial
  Synthetic oligonucleotide
tgccggtgaggtaattcgcatcttcaatggcggtcttccggtgaatgttacccagtctga

SEQ ID NO: 177730 - DNA, 59 bp, Artificial
  Synthetic oligonucleotide
aatatcggccagtcaatatctggagccaacgaagtatcactcggttaagcaagacacgg

SEQ ID NO: 177731 - DNA, 60 bp, Artificial
  Synthetic oligonucleotide
tgccctgaacagggatattgcgacaattcacagcaatatcgtgcaggaatacaacaccct

SEQ ID NO: 177732 - DNA, 59 bp, Artificial
  Synthetic oligonucleotide
tgcccatgcgccctcctgacggggaacctgagacggtttcacactctcaagcccggaca

SEQ ID NO: 177733 - DNA, 57 bp, Artificial
  Synthetic oligonucleotide
aatatcttagccgcttcccgtgaaagttttgtctctgcattgcgcggggcgaaaata

SEQ ID NO: 177734 - DNA, 60 bp, Artificial
  Synthetic oligonucleotide
tgccagaatctcatgagacgatggcgcggcctgagcgtgtgagaatgtattccggtgcga

SEQ ID NO: 177735 - DNA, 59 bp, Artificial
  Synthetic oligonucleotide
aatattgctttatgtgagggtaaataagctcggctcctccgccagtgagatagattcgg

SEQ ID NO: 177736 - DNA, 52 bp, Artificial
  Synthetic oligonucleotide
aatcaaaacagaggggcaaaatttacgtttaaaaggggcgttctatgagcag

SEQ ID NO: 177737 - DNA, 60 bp, Artificial
  Synthetic oligonucleotide
tgcattgtataactcctgtgacgttgactgacacactaccggaattcgcgacggcagatt

SEQ ID NO: 177738 - DNA, 60 bp, Artificial
  Synthetic oligonucleotide
gccctacgccaccgcagtgtgatcccctcggtttagtctgcacccaccacagcgacagaa

SEQ ID NO: 177739 - DNA, 59 bp, Artificial
  Synthetic oligonucleotide
tgcattcgaactttattcgtaccgcgcgggcaaaaggattaccgatgcgtagaatcatc

SEQ ID NO: 177740 - DNA, 60 bp, Artificial
  Synthetic oligonucleotide
tgcattactgagccatgtgcgtaaagcggatatcgtcggcgtttcctcactacgtcgcgg

SEQ ID NO: 177741 - DNA, 60 bp, Artificial
  Synthetic oligonucleotide
aatcactgcgctggctacaccgtttttgcgggtgtagtcgtgaatcactccggtgcgctc

SEQ ID NO: 177742 - DNA, 59 bp, Artificial
  Synthetic oligonucleotide
aatcacttcctgaaatacaggcacgacggcgatgtatacacggggtgatacagtcgcgt

SEQ ID NO: 177743 - DNA, 60 bp, Artificial
  Synthetic oligonucleotide
tgcagcttgatttaaaggagcgcgcacagaaatttgtctatgagaaagctgtacaatata

SEQ ID NO: 177744 - DNA, 60 bp, Artificial
  Synthetic oligonucleotide
tgcagagagcgtcacacgcgggatagacgctctttatcatgtcggggagataaaaggccg

SEQ ID NO: 177745 - DNA, 60 bp, Artificial
  Synthetic oligonucleotide
tgcacttttcatacaatccgcactgatgcggcatagttaagcccgtatacactccgctgt

SEQ ID NO: 177746 - DNA, 60 bp, Artificial
  Synthetic oligonucleotide
tgcacaatatcccgctcagtatcgtagtaagctgactgtaccagatgggtgatatattcc

SEQ ID NO: 177747 - DNA, 60 bp, Artificial
  Synthetic oligonucleotide
tgcaagctatctcgttagggaaagtgccctatgtggtactcgacaatcatcaacgctatc

SEQ ID NO: 177748 - DNA, 54 bp, Artificial
  Synthetic oligonucleotide
aatcaggttttaacccatatgcaattgcggaaataataccaaaggttaaacgca

SEQ ID NO: 177749 - DNA, 60 bp, Artificial
  Synthetic oligonucleotide
gcccgtctgctgtccgataaagtatcacgcgagctatacccggtcgtgtatattggcgac

SEQ ID NO: 177750 - DNA, 59 bp, Artificial
  Synthetic oligonucleotide
tgcaacctgaaatacagctatttgttgtgtgtatcgccaggaaaaaaggctcccgtcgc

SEQ ID NO: 177751 - DNA, 60 bp, Artificial
  Synthetic oligonucleotide
tgcaaaggttaaagaaaagtgccatgatcaatgtgcagatatttttgctgatacgcctga

SEQ ID NO: 177752 - DNA, 58 bp, Artificial
  Synthetic oligonucleotide
tgattgattgggatgaagggggagacattcccaatggacctggttctttccattctcc

SEQ ID NO: 177753 - DNA, 60 bp, Artificial
  Synthetic oligonucleotide
aatgcgcgcagcgttttgggtgggatgtgccgcgttattattgtcggcttgcagtagcga

SEQ ID NO: 177754 - DNA, 60 bp, Artificial
  Synthetic oligonucleotide
tgacgtggaatggaagcagggagccatcgaggatgtaacgacgctgtttgactatatcgc

SEQ ID NO: 177755 - DNA, 60 bp, Artificial
  Synthetic oligonucleotide
tgacgctacgcacccgcattaagcggttggctcgtaaaacaatctgcttctcacgctcag

SEQ ID NO: 177756 - DNA, 58 bp, Artificial
  Synthetic oligonucleotide
tgacgcgccgcaacccactaacgggggatgatcgcccaatgtggcgggtgaggctcgg

SEQ ID NO: 177757 - DNA, 58 bp, Artificial
  Synthetic oligonucleotide
aatgctctggagaaagtaaccatacccgaagtgagtcccctgcttatgcggatttctc

SEQ ID NO: 177758 - DNA, 56 bp, Artificial
  Synthetic oligonucleotide
tgacgccgccatttgttccgaacccgtccggggcggtgctgataagggatgttatg

SEQ ID NO: 177759 - DNA, 60 bp, Artificial
  Synthetic oligonucleotide
tgacgcaattttacattaagaggaattgaccatcggttcgcagtatgccttaatgtagag

SEQ ID NO: 177760 - DNA, 58 bp, Artificial
  Synthetic oligonucleotide
gcccgcttggtatacagatagtggaaagtacccgttggcgcttacgaatgcgcttatc

SEQ ID NO: 177761 - DNA, 60 bp, Artificial
  Synthetic oligonucleotide
tgacgatgagccaataacgtcgcaaaagcgccgttggcggcgctgagttcggcataactg

SEQ ID NO: 177762 - DNA, 60 bp, Artificial
  Synthetic oligonucleotide
aatggagaccgcgtggggaggaatgtcatgtacaggatggacaacctgtgcattatgacg

SEQ ID NO: 177763 - DNA, 59 bp, Artificial
  Synthetic oligonucleotide
tgacccgtctgaagcgcccggacaacagtgacgtgcagccctagtctgaagattaaccc

SEQ ID NO: 177764 - DNA, 60 bp, Artificial
  Synthetic oligonucleotide
tgaccacgagacgtcacatagtctggcgcgtgaagtgtacgcaagtaacattcttgatgc

SEQ ID NO: 177765 - DNA, 59 bp, Artificial
  Synthetic oligonucleotide
tgacatcatttccggcgatcgcttgcgtactgaaggacacgaagcccgtcaccctggtt

SEQ ID NO: 177766 - DNA, 60 bp, Artificial
  Synthetic oligonucleotide
aatgggcaggggcctggtacgggcaatcatcatattgggcgacatgatgtgcagcaaaaa

SEQ ID NO: 177767 - DNA, 60 bp, Artificial
  Synthetic oligonucleotide
tgacagcggtctgacatgccgcattgaggtctttgaaaccgtaacttcagaagcatgtac

SEQ ID NO: 177768 - DNA, 60 bp, Artificial
  Synthetic oligonucleotide
tgaattgcaaaagaccatgactgttaccgccgaagagtatttcgactcattccctgatat

SEQ ID NO: 177769 - DNA, 56 bp, Artificial
  Synthetic oligonucleotide
tgaattatcccgtgataatcccaaatgggaagaatggaaattgaaggggcaggtat

SEQ ID NO: 177770 - DNA, 55 bp, Artificial
  Synthetic oligonucleotide
tgaatgcggcaagaccgtttctggttttttacgggcggcagctctcggtaagaaa

SEQ ID NO: 177771 - DNA, 57 bp, Artificial
  Synthetic oligonucleotide
gcatcagcccccacaaagcggaatttactgttccctgccaccgccacttcactttcg

SEQ ID NO: 177772 - DNA, 60 bp, Artificial
  Synthetic oligonucleotide
atcctcgccagttggttgatgcacctcagtatctgagagaatacgtctgtgcggaactgg

SEQ ID NO: 177773 - DNA, 54 bp, Artificial
  Synthetic oligonucleotide
tgaatcgtaatctcttgctctgtaaacgaaaaaaccgcctggggaggcggtttg

SEQ ID NO: 177774 - DNA, 60 bp, Artificial
  Synthetic oligonucleotide
tgaatccgtcgccagattgagcacatacgcacggtttttcgggaggtgatatgcgctgaa

SEQ ID NO: 177775 - DNA, 55 bp, Artificial
  Synthetic oligonucleotide
tgaatccatagcccggcccgaaacatgtttagcgcccctacccgtctgacaaaac

SEQ ID NO: 177776 - DNA, 59 bp, Artificial
  Synthetic oligonucleotide
aatgtcgggaaagctgaaccagacgcatgacggcgaaactccagtacgcaagtcggatc

SEQ ID NO: 177777 - DNA, 60 bp, Artificial
  Synthetic oligonucleotide
aatgtctatgaggacgtcagttcggaaagcattcgttctgcatggtatgcctttcgctat

SEQ ID NO: 177778 - DNA, 59 bp, Artificial
  Synthetic oligonucleotide
tgaataactcaccataatcagacggaacacgaatagtcaccttagacaacgcttacgcg

SEQ ID NO: 177779 - DNA, 60 bp, Artificial
  Synthetic oligonucleotide
tgaaggattataacgcatgcaagatataagacaacccctgaccgccataagaccgggaca

SEQ ID NO: 177780 - DNA, 58 bp, Artificial
  Synthetic oligonucleotide
aatgtgattcaagctccccggaagggagcttatcgtgacgcattcttatttttggctg

SEQ ID NO: 177781 - DNA, 59 bp, Artificial
  Synthetic oligonucleotide
tgaagactgggctaagcatttagaacagtttgccaagtacttgaagattacgggacatg

SEQ ID NO: 177782 - DNA, 55 bp, Artificial
  Synthetic oligonucleotide
tgagttttataccccgtggcgggtgttcaactcccatggttgtaacggatgctgg

SEQ ID NO: 177783 - DNA, 60 bp, Artificial
  Synthetic oligonucleotide
gcccgatgggtgctagatacgccccctgtatatcactccttggcatgagctgacgggaac

SEQ ID NO: 177784 - DNA, 57 bp, Artificial
  Synthetic oligonucleotide
tgagttcatagcgtacaaacggccctttcgcgttacgccccagttgatggagataac

SEQ ID NO: 177785 - DNA, 59 bp, Artificial
  Synthetic oligonucleotide
aatcggttctgtcgtcgacttgtacagcaatattgaccgggaactgatactcagtaagc

SEQ ID NO: 177786 - DNA, 60 bp, Artificial
  Synthetic oligonucleotide
aatcgtgatgcacgagtaatagatttatttccagattgagatattgttgatagaccacat

SEQ ID NO: 177787 - DNA, 59 bp, Artificial
  Synthetic oligonucleotide
aatctcgacgcggtgatgaggactgtagccccgagcagggaaaggttctctcgcaacat

SEQ ID NO: 177788 - DNA, 59 bp, Artificial
  Synthetic oligonucleotide
tgaggtggtgaggacaaccaggagcagtatcagtatcgccgacccggagggcgggcgta

SEQ ID NO: 177789 - DNA, 57 bp, Artificial
  Synthetic oligonucleotide
tgaggtggtgaggacaaccaaaagcagcatcagtattgccgacccggagggggggcg

SEQ ID NO: 177790 - DNA, 51 bp, Artificial
  Synthetic oligonucleotide
tgaggtactacggttttttgagtccggcgaaacggcggttactggaagaag

SEQ ID NO: 177791 - DNA, 55 bp, Artificial
  Synthetic oligonucleotide
aatcttaccggctcccgtccgtcgactggtggcatagaaaaaaggacgactctga

SEQ ID NO: 177792 - DNA, 57 bp, Artificial
  Synthetic oligonucleotide
tgagggaacctgggaggcgacactgcatattgaggtttttctcagggcaaaagaacc

SEQ ID NO: 177793 - DNA, 60 bp, Artificial
  Synthetic oligonucleotide
tgagctgaatatttacaggggaaatacagtggtgcaggtaactctggcctacgaagcacg

SEQ ID NO: 177794 - DNA, 60 bp, Artificial
  Synthetic oligonucleotide
gcccctggagcacagaacgcaggaatgactggttgcagtggatatcgctggcgtctgaat

SEQ ID NO: 177795 - DNA, 60 bp, Artificial
  Synthetic oligonucleotide
tgagctaccgcgagcgttaggtatccttgatgcgcatgaagaactgacagaacgtcgtgc

SEQ ID NO: 177796 - DNA, 60 bp, Artificial
  Synthetic oligonucleotide
aatgaccgtcaaccaatatcagactgcaattagctttttgcagtctatggtcgaacgcgc

SEQ ID NO: 177797 - DNA, 60 bp, Artificial
  Synthetic oligonucleotide
tgagctaagagccaaaacctttgacatggcgacagagtcaacctcaagctgtgaggacag

SEQ ID NO: 177798 - DNA, 60 bp, Artificial
  Synthetic oligonucleotide
aatgatgcatcagcacaacttttactcaatcacactcatctttctggcctccatggcatg

SEQ ID NO: 177799 - DNA, 54 bp, Artificial
  Synthetic oligonucleotide
aatgatgtggctttggatagaaggtttacgttgatcttatcaaagtttttttta

SEQ ID NO: 177800 - DNA, 57 bp, Artificial
  Synthetic oligonucleotide
tgagccatacacgcggcttccgttattctgccggattcgtataacacccggtaacca

SEQ ID NO: 177801 - DNA, 60 bp, Artificial
  Synthetic oligonucleotide
tgagatacctatcgtcttgtaaattggctcccatgcccatccatactccctttcataatc

SEQ ID NO: 177802 - DNA, 60 bp, Artificial
  Synthetic oligonucleotide
tgagaccatcaattatcttcgcaaccgccgagtatgtaaagcgtctgcgtgaagagtgcc

SEQ ID NO: 177803 - DNA, 60 bp, Artificial
  Synthetic oligonucleotide
tgagaatgctggccagccctgacgaatcgccctgtaagcccatttgcgcgtcatttcgaa

SEQ ID NO: 177804 - DNA, 60 bp, Artificial
  Synthetic oligonucleotide
tgagaatcagatccgcgctagtgctggtatggcatgttgctttctcgaaaaccactctca

SEQ ID NO: 177805 - DNA, 58 bp, Artificial
  Synthetic oligonucleotide
gcccctaagtctaaggatgatcgtataacgtgattttcggtctacaagtgtggctata

SEQ ID NO: 177806 - DNA, 56 bp, Artificial
  Synthetic oligonucleotide
tgagaaatattcgcacccaaagtgcgaaagtttcgcagtggatgcccggggtttcg

SEQ ID NO: 177807 - DNA, 55 bp, Artificial
  Synthetic oligonucleotide
aatgccgtggtaacaatgagcccaacggtctccggcatatccgggttgggtgaaa

SEQ ID NO: 177808 - DNA, 49 bp, Artificial
  Synthetic oligonucleotide
tgactgaccggaaacgtaactaaaggcggggggaccactccccgccttt

SEQ ID NO: 177809 - DNA, 60 bp, Artificial
  Synthetic oligonucleotide
aatgcgatgcagagccagatgaataaccagcaacgccagattaacgaattatccgttcgt

SEQ ID NO: 177810 - DNA, 55 bp, Artificial
  Synthetic oligonucleotide
aatgcgcgacctacattttcctcgctaaccccaaggcggattacgaggattacac

SEQ ID NO: 177811 - DNA, 60 bp, Artificial
  Synthetic oligonucleotide
tggcgtcgatggcaacaggtatccctgcctgagcgccggaaataacaatcagtgaagcga

SEQ ID NO: 177812 - DNA, 53 bp, Artificial
  Synthetic oligonucleotide
tggcggtctcgtgaaccctgttaccgggttaagcagttccccaactgacttaa

SEQ ID NO: 177813 - DNA, 58 bp, Artificial
  Synthetic oligonucleotide
aagcgggccagtcccctgagccgatatttcataccacaagaatgtggcgctccacggt

SEQ ID NO: 177814 - DNA, 59 bp, Artificial
  Synthetic oligonucleotide
aagcgttatatagtatataccgtgctttttatactgaaaacggcgcatgtcagagcaaa

SEQ ID NO: 177815 - DNA, 55 bp, Artificial
  Synthetic oligonucleotide
aagcgttcccggcaacgttggtagcgttcatccgccacttcgtgaagttgttctg

SEQ ID NO: 177816 - DNA, 60 bp, Artificial
  Synthetic oligonucleotide
atccttcattaactatgacatatgattcgaaatatagtacgcgttcaatgtctcgtaacg

SEQ ID NO: 177817 - DNA, 59 bp, Artificial
  Synthetic oligonucleotide
aagcgtttctatcgtggcaccaccggcgctacaggcaaagtaagaacgagaccacagca

SEQ ID NO: 177818 - DNA, 59 bp, Artificial
  Synthetic oligonucleotide
tggcggggtgatttgctcacatcgttctccgttttttcatgatccaacagttttatatc

SEQ ID NO: 177819 - DNA, 60 bp, Artificial
  Synthetic oligonucleotide
tggcggagtgtccctcaaatcggatcgcgtttgcgacgactggcgattgtgaagtatcgc

SEQ ID NO: 177820 - DNA, 60 bp, Artificial
  Synthetic oligonucleotide
tggcgagcggtgtctgctcactcaaaagcggtgatactgttatccacacaatcaggggat

SEQ ID NO: 177821 - DNA, 60 bp, Artificial
  Synthetic oligonucleotide
tggcctctttaaagtcttgtgtagctctggcatcgatatcatgacgagcatcattgctgg

SEQ ID NO: 177822 - DNA, 59 bp, Artificial
  Synthetic oligonucleotide
tggcctcccggccatacaattacgtaacctggcccgctacgcaggaatgacgtcagcca

SEQ ID NO: 177823 - DNA, 60 bp, Artificial
  Synthetic oligonucleotide
tggccgtttattatcgcgcttatagcgatcggcatactcccgtcgctccttatgactcag

SEQ ID NO: 177824 - DNA, 60 bp, Artificial
  Synthetic oligonucleotide
aagcttgtgcttctgtgggtcaagcctcaagtgctgatctgtggtgtcgtctacctgata

SEQ ID NO: 177825 - DNA, 57 bp, Artificial
  Synthetic oligonucleotide
tggccgtaataccggatctcatagacaggctgggatttaattaaatcccgcattcct

SEQ ID NO: 177826 - DNA, 60 bp, Artificial
  Synthetic oligonucleotide
tggcagtgtgcgctggtaggtcgcggagtccatctggttccgcatatactgcgccagtgc

SEQ ID NO: 177827 - DNA, 60 bp, Artificial
  Synthetic oligonucleotide
gccccggaaagcgcagccttatctctggataaggcatcattcattgcgtttaaagatgcc

SEQ ID NO: 177828 - DNA, 54 bp, Artificial
  Synthetic oligonucleotide
tggcaggtggtttttcgaaggttagctaatcctggcagattacctaaccgggta

SEQ ID NO: 177829 - DNA, 59 bp, Artificial
  Synthetic oligonucleotide
aaggaatccccactatcagtcgtacggtcgttgatactgtcgctcgcgtgggacatggc

SEQ ID NO: 177830 - DNA, 60 bp, Artificial
  Synthetic oligonucleotide
aaggacgccatgaagtgatgggaagccgctcctagagcggtcggggggatcatgccacag

SEQ ID NO: 177831 - DNA, 60 bp, Artificial
  Synthetic oligonucleotide
tggcagactgtttatcagccgctgttactaccgcattatagaggttgaacgggccatctg

SEQ ID NO: 177832 - DNA, 60 bp, Artificial
  Synthetic oligonucleotide
aaggatcagctaatcacatgagaatttcctgggatgaaattaatcaaggaatacaaatct

SEQ ID NO: 177833 - DNA, 60 bp, Artificial
  Synthetic oligonucleotide
tggcagaatccagtatcctcaacatcacactcccaaccggtcgtgttgagaacttctttg

SEQ ID NO: 177834 - DNA, 56 bp, Artificial
  Synthetic oligonucleotide
tggcactccaggatattgtggttctcaccaaccggacggcagttagggaccgtttc

SEQ ID NO: 177835 - DNA, 59 bp, Artificial
  Synthetic oligonucleotide
tggcacgggatagccgtgatacctccgttattcaggcgcgtacggaagctcaaggtcat

SEQ ID NO: 177836 - DNA, 60 bp, Artificial
  Synthetic oligonucleotide
tggatgccaccaggcgcgcacgtcaatttcgcggtagcggcctttatcgtgcagcgtgaa

SEQ ID NO: 177837 - DNA, 60 bp, Artificial
  Synthetic oligonucleotide
tggagctatcgacctatcagttagtctctattatcttggctatgaattcatcgataccga

SEQ ID NO: 177838 - DNA, 60 bp, Artificial
  Synthetic oligonucleotide
gccccagcaattctgcgcgaaaccataatttaaagcgatgtgagtaggatcaatgtgatt

SEQ ID NO: 177839 - DNA, 58 bp, Artificial
  Synthetic oligonucleotide
aagcactttcctgatcccccaacaccgtgacgacatatatatttaagccattatacac

SEQ ID NO: 177840 - DNA, 59 bp, Artificial
  Synthetic oligonucleotide
tggtgttataaaggcgtgaatatgtggagtttgctcgtccaagtgtaaaactgcattaa

SEQ ID NO: 177841 - DNA, 60 bp, Artificial
  Synthetic oligonucleotide
aagcagcggacaggaaatgttttgtgcccacagctatgctggcttattcacaaaacagcg

SEQ ID NO: 177842 - DNA, 60 bp, Artificial
  Synthetic oligonucleotide
aagcagtcgatagtattccagccttcgtatatataacggtacgtgctcatcagtaagatc

SEQ ID NO: 177843 - DNA, 59 bp, Artificial
  Synthetic oligonucleotide
tggtgtggcagagaactaataacagcctccggatacaggttcgaaggcgataaaccgca

SEQ ID NO: 177844 - DNA, 56 bp, Artificial
  Synthetic oligonucleotide
tggtggccagttgtcacaccaggggggacgaataaatggggcgggtattggcggca

SEQ ID NO: 177845 - DNA, 60 bp, Artificial
  Synthetic oligonucleotide
tggtgctccagtcgtggcgacgcaaatgggagaatctgtcagcgtacttccgctatccgg

SEQ ID NO: 177846 - DNA, 60 bp, Artificial
  Synthetic oligonucleotide
aagccacattgagcacttacgcactgatgcggggtgtcggggtgaagccctgaccaagtg

SEQ ID NO: 177847 - DNA, 59 bp, Artificial
  Synthetic oligonucleotide
tggtcggagacaaaaggaatattcagcgatttgcccgagcttgcgagggtgctacttaa

SEQ ID NO: 177848 - DNA, 57 bp, Artificial
  Synthetic oligonucleotide
aagccagtaagagcttacattctttcgccgttgcatattcaagaaggttgtgaccgg

SEQ ID NO: 177849 - DNA, 59 bp, Artificial
  Synthetic oligonucleotide
gcccagcgaatcttacggcaaccgcccgtacctgatatggtatcgccagcggtaggatc

SEQ ID NO: 177850 - DNA, 60 bp, Artificial
  Synthetic oligonucleotide
tggtcgatattgcgcgagtgcatgggcgcagtcatcgaagtcgagacgcccactttccgc

SEQ ID NO: 177851 - DNA, 58 bp, Artificial
  Synthetic oligonucleotide
tggtagttcttcagcgtagagtaacgatagtttctcagaatgttcgcgtcgttcttgt

SEQ ID NO: 177852 - DNA, 60 bp, Artificial
  Synthetic oligonucleotide
aagccgcgacggtaacgtcaatgctacgctgcatgaagacataacccgatacgaggctcg

SEQ ID NO: 177853 - DNA, 58 bp, Artificial
  Synthetic oligonucleotide
tggtaaggtgaacagtacgcttcaggaaaaggtctccggtatgcgggtagtgcagtca

SEQ ID NO: 177854 - DNA, 58 bp, Artificial
  Synthetic oligonucleotide
tgggtgctttaggtgccattggagggtcgagtatctcaaatgttttctcgcgtattgg

SEQ ID NO: 177855 - DNA, 52 bp, Artificial
  Synthetic oligonucleotide
tggggattgttagaattctcggcgcatactttttttacaggggtataaaggg

SEQ ID NO: 177856 - DNA, 59 bp, Artificial
  Synthetic oligonucleotide
tgggcgtattctgataggggaaacaactggcgttaatgcttgtcaagtcggaatgatta

SEQ ID NO: 177857 - DNA, 60 bp, Artificial
  Synthetic oligonucleotide
tgggagagtgtgttcagcgtggtgtgcttggtcaagaccgaatgggctacggattgagag

SEQ ID NO: 177858 - DNA, 57 bp, Artificial
  Synthetic oligonucleotide
aagcctatcatgatttgccggaggctgataaggaaggtaaaacccctgaactgtatc

SEQ ID NO: 177859 - DNA, 60 bp, Artificial
  Synthetic oligonucleotide
aagcctgttgatgcactctgtgaatgggctaaagaaccattgaaagatagggaatataga

SEQ ID NO: 177860 - DNA, 60 bp, Artificial
  Synthetic oligonucleotide
atcgaacaaggagacgcagcagcgggcgctatggccgggcactatggtgctatccgagga

SEQ ID NO: 177861 - DNA, 60 bp, Artificial
  Synthetic oligonucleotide
tgggaacagagatcgatgagagataactttggcaccagctaccctgctgtttggtatagc

SEQ ID NO: 177862 - DNA, 59 bp, Artificial
  Synthetic oligonucleotide
tggctttttcaggtaagagccaaagtacaccgccacatgggtggcattatccatcaccc

SEQ ID NO: 177863 - DNA, 60 bp, Artificial
  Synthetic oligonucleotide
tggcttctgatgaggttgaaacgcttaaatgcaccatcatcgcagacgccattaccggaa

SEQ ID NO: 177864 - DNA, 60 bp, Artificial
  Synthetic oligonucleotide
tggctgagcttagcgcggccgcgctacagtacagcgataacgtggcgatgaataagctga

SEQ ID NO: 177865 - DNA, 59 bp, Artificial
  Synthetic oligonucleotide
tggctcaacccgtgatgtgaggtagctgatttacgtcatacccggttaatccctgatcc

SEQ ID NO: 177866 - DNA, 60 bp, Artificial
  Synthetic oligonucleotide
tggcgtgcatcgtacctgtggtgcatcccgcccgggctccggacatgctgtgccagcaat

SEQ ID NO: 177867 - DNA, 56 bp, Artificial
  Synthetic oligonucleotide
tgcggttcgagcgcactggaactcacgccgatttgttttagttataacggtgaacg

SEQ ID NO: 177868 - DNA, 59 bp, Artificial
  Synthetic oligonucleotide
aagtggaaacggattgagatgtatctggcggtcaggtgatttggcaggggaatgtatgg

SEQ ID NO: 177869 - DNA, 60 bp, Artificial
  Synthetic oligonucleotide
tgcgggcgacggtattacaattgcacatcctgtcctgtttctttaggacgtatcatggca

SEQ ID NO: 177870 - DNA, 55 bp, Artificial
  Synthetic oligonucleotide
aagttagttttgcgtggggtgtgggcatcctgggaatgagaacagactcgcgttt

SEQ ID NO: 177871 - DNA, 59 bp, Artificial
  Synthetic oligonucleotide
gcccacggtggtaaagagtatgagccagacacaagagcggggcgaaatgtaggaaatca

SEQ ID NO: 177872 - DNA, 60 bp, Artificial
  Synthetic oligonucleotide
tgcggctacactgaaaggacagatttggtgactgcgctccgtgagattaagccagttacc

SEQ ID NO: 177873 - DNA, 59 bp, Artificial
  Synthetic oligonucleotide
tgcggccactcttgcaaactccaccagtgaacgatcaggttaagtagtgtgttaaaggc

SEQ ID NO: 177874 - DNA, 60 bp, Artificial
  Synthetic oligonucleotide
tgcggcagtagagagtcttatgactatgcctgtccagttgcgccgaacgtcagcattgct

SEQ ID NO: 177875 - DNA, 51 bp, Artificial
  Synthetic oligonucleotide
aataaaaacaattattaatctaaatttatttaattcaataaagaatttcat

SEQ ID NO: 177876 - DNA, 52 bp, Artificial
  Synthetic oligonucleotide
aataaaagaatacttaaaataagtgaagattacttcaaaattagaaaatcaa

SEQ ID NO: 177877 - DNA, 60 bp, Artificial
  Synthetic oligonucleotide
aataacatctgcatacctgatatgcttgtcaacatagtccagatttgtaccacctggatt

SEQ ID NO: 177878 - DNA, 54 bp, Artificial
  Synthetic oligonucleotide
aataacgaccgcaggagaacgcgggaattatcgaccccgtgacgtgccaacagg

SEQ ID NO: 177879 - DNA, 60 bp, Artificial
  Synthetic oligonucleotide
aataactgaggggggcaccatgaagaaactagctatcgttgcattgctggcctcgcttca

SEQ ID NO: 177880 - DNA, 60 bp, Artificial
  Synthetic oligonucleotide
tgcggatggtgggtcgggttgagtgctatgcggcagggagtgatgttgcccgggtcagcg

SEQ ID NO: 177881 - DNA, 52 bp, Artificial
  Synthetic oligonucleotide
aataatgatttaacactgttgcgtacggtattaccggctaaccccgacctta

SEQ ID NO: 177882 - DNA, 60 bp, Artificial
  Synthetic oligonucleotide
atctcgctgtgaaagctatccctgagaagcaatgtgacgaatataccagatacagaagat

SEQ ID NO: 177883 - DNA, 60 bp, Artificial
  Synthetic oligonucleotide
atcgaccatagtgtttacacgaccaaatccgctcatgcctcgaatattcacactgattgc

SEQ ID NO: 177884 - DNA, 54 bp, Artificial
  Synthetic oligonucleotide
aatacacttcaggcgttctgtcgttcgcggagaaggagttaccgccgggtgaac

SEQ ID NO: 177885 - DNA, 53 bp, Artificial
  Synthetic oligonucleotide
aatacaggaagttatcggcttatgtaactcagtagacgaaaaattaaaatcct

SEQ ID NO: 177886 - DNA, 60 bp, Artificial
  Synthetic oligonucleotide
tgcggacaggccgaggataaatgcctggcagacgctggttaatcatcattacgggctgcg

SEQ ID NO: 177887 - DNA, 56 bp, Artificial
  Synthetic oligonucleotide
aataccgatggcagtattcagtttgttgttaatggacaagttattccggataatta

SEQ ID NO: 177888 - DNA, 60 bp, Artificial
  Synthetic oligonucleotide
tgcgcgcaccgctaaaacgcgctgaacgcgattctgccgcaaacaccgcaaaaagagatg

SEQ ID NO: 177889 - DNA, 59 bp, Artificial
  Synthetic oligonucleotide
aatactcgccgggttgagttacaatgaattacgtcatgtgtgacgttgtgagtgatttg

SEQ ID NO: 177890 - DNA, 60 bp, Artificial
  Synthetic oligonucleotide
aatagagagaatataacttaagggagcatcttgtgctgggtcttttacattagatctgca

SEQ ID NO: 177891 - DNA, 60 bp, Artificial
  Synthetic oligonucleotide
tgcgcattctcccgtatctgtgtaccttgccaccacagcacgctcccgcccagacacaac

SEQ ID NO: 177892 - DNA, 60 bp, Artificial
  Synthetic oligonucleotide
tgcgataaatactgctttgcctaacgcaggaataacttcaaatgacgttgccggattcag

SEQ ID NO: 177893 - DNA, 60 bp, Artificial
  Synthetic oligonucleotide
tgcgacaacaccacttagagctagtccagttagggcacgaagaaagacaataactgtcca

SEQ ID NO: 177894 - DNA, 60 bp, Artificial
  Synthetic oligonucleotide
atcgagtaaaaccgcctcattttgtgtgccatcaggctgtgccacggtgggccgtgatgc

SEQ ID NO: 177895 - DNA, 60 bp, Artificial
  Synthetic oligonucleotide
tgcctttcctgaaccatcgaatgtatgaatacaattggctaagctcaattgaactggttc

SEQ ID NO: 177896 - DNA, 55 bp, Artificial
  Synthetic oligonucleotide
aaggcctgaagccatatcgcggtatagggttcgacgacttttctgtgtcaatttt

SEQ ID NO: 177897 - DNA, 59 bp, Artificial
  Synthetic oligonucleotide
aaggcgcttgcacagaatggtaaacggactcgattattgaatcttagggataagatata

SEQ ID NO: 177898 - DNA, 58 bp, Artificial
  Synthetic oligonucleotide
tggactattatgagacaaatgtaagacattatgggcggtatatggcgaattttaaccc

SEQ ID NO: 177899 - DNA, 57 bp, Artificial
  Synthetic oligonucleotide
aaggcttttggtcgttaccagaccggaacgctgaatcatggacagggcagaatgttc

SEQ ID NO: 177900 - DNA, 58 bp, Artificial
  Synthetic oligonucleotide
aagggcctgttgtaccggctatagatttacctgaattgcgtagtgtattgcagcagtt

SEQ ID NO: 177901 - DNA, 58 bp, Artificial
  Synthetic oligonucleotide
tggaccaacagtgtggtcgtggggcacggtaatgttggggcgggcgtagactggcaga

SEQ ID NO: 177902 - DNA, 60 bp, Artificial
  Synthetic oligonucleotide
tggaaccgcactacccctgatagtggctctggtattatcggtcgctatgctgatggctac

SEQ ID NO: 177903 - DNA, 59 bp, Artificial
  Synthetic oligonucleotide
tggaaattcaattagcgccattgaagctggtgacgtcaaaatcgaagggactattaatg

SEQ ID NO: 177904 - DNA, 60 bp, Artificial
  Synthetic oligonucleotide
tggaaaccaaagactcatgtcctatgggcaatgcagctgcggcgcttaattcgttgccgt

SEQ ID NO: 177905 - DNA, 58 bp, Artificial
  Synthetic oligonucleotide
gccatggatctgtggcttgcaccgaacagaaaggtaccggggataacgagcgaagcgg

SEQ ID NO: 177906 - DNA, 57 bp, Artificial
  Synthetic oligonucleotide
tgcttttaacgcgtcgggccagttatagtctgtttaatccataagtgttatcggcag

SEQ ID NO: 177907 - DNA, 60 bp, Artificial
  Synthetic oligonucleotide
tgctttcagcgcgttttagcggtgcgcgcaatgcgacgttatggtaaatccatatggggg

SEQ ID NO: 177908 - DNA, 60 bp, Artificial
  Synthetic oligonucleotide
tgcttgttcatctttctgttttctccgttctgtctgtcatctgcgtcgtgtgattatatc

SEQ ID NO: 177909 - DNA, 58 bp, Artificial
  Synthetic oligonucleotide
tgcttagtaagttcagtatctttaaacgaaccgccgatggacatttcagggacagcaa

SEQ ID NO: 177910 - DNA, 58 bp, Artificial
  Synthetic oligonucleotide
aaggtgaatccaagtcgtcggcgattcgtgtacgacttgccgacgactcgtcatagag

SEQ ID NO: 177911 - DNA, 54 bp, Artificial
  Synthetic oligonucleotide
tgcttacggtggttaccgggcggtatacgaatccggcagaataacggaagccgc

SEQ ID NO: 177912 - DNA, 60 bp, Artificial
  Synthetic oligonucleotide
tgctgtggagcggtatttcagggagaaggccatcacagccagtgttaacgaccagaccac

SEQ ID NO: 177913 - DNA, 60 bp, Artificial
  Synthetic oligonucleotide
tgctgcggatccagtcctgaatcgctgttgagtgcagtacgctaaccagcgctttaatat

SEQ ID NO: 177914 - DNA, 59 bp, Artificial
  Synthetic oligonucleotide
tgctgagagcgttacacgaggcctggaggtgctttaccatgccggggagataaaaggcc

SEQ ID NO: 177915 - DNA, 60 bp, Artificial
  Synthetic oligonucleotide
tgctctattaatatttcgctaccatctttatagtacctcgcacttatggtattagtatat

SEQ ID NO: 177916 - DNA, 60 bp, Artificial
  Synthetic oligonucleotide
atcatcccaaaggattttgtagactctaccaccagagtagcgatctcgtctgtaggcata

SEQ ID NO: 177917 - DNA, 60 bp, Artificial
  Synthetic oligonucleotide
tgctcgtcttgagcctttcgaccagaagtaaataatgcgactggcgttacgcacggcgaa

SEQ ID NO: 177918 - DNA, 60 bp, Artificial
  Synthetic oligonucleotide
tgctcagtctcagtagttttggttatgtcatttacagtcgcttctgcggagaacattaca

SEQ ID NO: 177919 - DNA, 60 bp, Artificial
  Synthetic oligonucleotide
tgctacaatgccccactaatcatattagatatgattagtggggcatctcttgttactata

SEQ ID NO: 177920 - DNA, 55 bp, Artificial
  Synthetic oligonucleotide
aagtcctgacaccgtcatgcttcagttttcctctccggccattccggggagttcc

SEQ ID NO: 177921 - DNA, 60 bp, Artificial
  Synthetic oligonucleotide
tgcgtttgttatttgaataaagcaaattgcatctattgttacattagcattgtcttttga

SEQ ID NO: 177922 - DNA, 60 bp, Artificial
  Synthetic oligonucleotide
tgcgtcctgaggatgaggcggcgtctccatggcttgagaattggatcctttatgccagaa

SEQ ID NO: 177923 - DNA, 54 bp, Artificial
  Synthetic oligonucleotide
acagtgtatgtaggtctaaacggggagtgctacaaaagaccatacccgaaacga

SEQ ID NO: 177924 - DNA, 60 bp, Artificial
  Synthetic oligonucleotide
acagtgtgttgagtcatcgataaatcaccgacgactcgttgccgagtcatccagtagtcg

SEQ ID NO: 177925 - DNA, 56 bp, Artificial
  Synthetic oligonucleotide
acagtgtttgatatgcctgtcgaaatttgggcaactttggccgaaaactcggctcc

SEQ ID NO: 177926 - DNA, 60 bp, Artificial
  Synthetic oligonucleotide
tcgcacagacagagctgtccggacaaaagccggacgtgcctagtctgcgcttgcggcgag

SEQ ID NO: 177927 - DNA, 59 bp, Artificial
  Synthetic oligonucleotide
gcctggggataccgtgatggtaaagcaatccacgtttcaccgggaatgctggatgccga

SEQ ID NO: 177928 - DNA, 60 bp, Artificial
  Synthetic oligonucleotide
tcgatgggcgagaactacttattctaaggtccatagttgatgaaggagttgtaagagata

SEQ ID NO: 177929 - DNA, 60 bp, Artificial
  Synthetic oligonucleotide
tcgatgcgcggcgtagttcttaagcgtaatttcgacggccatgtgttcactctcaactga

SEQ ID NO: 177930 - DNA, 57 bp, Artificial
  Synthetic oligonucleotide
tcgatcatttcgtgtcgtaaaaagcttaattctgttagttgtcccatcatttttgtc

SEQ ID NO: 177931 - DNA, 60 bp, Artificial
  Synthetic oligonucleotide
tcgactcacgagcgacacagacatcacgtttttactcctgctcacttcgaggtatgccgc

SEQ ID NO: 177932 - DNA, 60 bp, Artificial
  Synthetic oligonucleotide
tcgaccgggtaattaatctggcgcacagactgccgcaaccggcgatccatgacttactac

SEQ ID NO: 177933 - DNA, 60 bp, Artificial
  Synthetic oligonucleotide
tcgaaggtaccgtcacgatcgcacggagtacgcagttccagtggaccgtcgcctgtgata

SEQ ID NO: 177934 - DNA, 60 bp, Artificial
  Synthetic oligonucleotide
acatcaccgttagaatttcatcagtggaggcttgcaacaacagcgtatctgctacttgcc

SEQ ID NO: 177935 - DNA, 58 bp, Artificial
  Synthetic oligonucleotide
tcgaacattaagtctagaatcatccgaaacgatagtagaccctgtggttaaaactgca

SEQ ID NO: 177936 - DNA, 60 bp, Artificial
  Synthetic oligonucleotide
tcctgttagaactgccgcaggatgatttaatctgggagcaggagcgcaaagtggtaagcg

SEQ ID NO: 177937 - DNA, 54 bp, Artificial
  Synthetic oligonucleotide
tcctgtagcggtttgttacgttttggttggtctaccatcatggaaaccggagaa

SEQ ID NO: 177938 - DNA, 60 bp, Artificial
  Synthetic oligonucleotide
gcctggatatggggattactgattattgtgcatatagtccgaatgaggggtatgtcgttc

SEQ ID NO: 177939 - DNA, 59 bp, Artificial
  Synthetic oligonucleotide
acatcgaatctagatttgtgtgatttttcatgtcgctttgttatctttgaggctacggg

SEQ ID NO: 177940 - DNA, 55 bp, Artificial
  Synthetic oligonucleotide
tcctgggttgtgggggataaaaccggcagcggtggctatggtaccaccaacgata

SEQ ID NO: 177941 - DNA, 60 bp, Artificial
  Synthetic oligonucleotide
tcctgcctcaacctggtcacggaaccaggtattatgctgccgttcaacggtctgccgcat

SEQ ID NO: 177942 - DNA, 57 bp, Artificial
  Synthetic oligonucleotide
acatctgttatcagcaccgcctgagaggccctcagggcgtttctgacgggaaaccgg

SEQ ID NO: 177943 - DNA, 53 bp, Artificial
  Synthetic oligonucleotide
acatcttactttgaacgttttaaacatcgtgccaaatatgggcggagtcccgt

SEQ ID NO: 177944 - DNA, 60 bp, Artificial
  Synthetic oligonucleotide
tcctgatagatgtcacaaagctcggaagtatcgtatttcataggcttaacgttcagttgc

SEQ ID NO: 177945 - DNA, 60 bp, Artificial
  Synthetic oligonucleotide
tcctgaacacagcgaatatacgcgacggagagctgcgtcgtctctccacctgggagacac

SEQ ID NO: 177946 - DNA, 57 bp, Artificial
  Synthetic oligonucleotide
acatgcaaacaatgcgttaagtggtttaacccgattgaaatctcttatctctcgtaa

SEQ ID NO: 177947 - DNA, 60 bp, Artificial
  Synthetic oligonucleotide
tcctcgtttttgagcgcgctgagtggaatggggcgcccatcatctgaaatcagctgaggt

SEQ ID NO: 177948 - DNA, 60 bp, Artificial
  Synthetic oligonucleotide
acatggaccggaccaatccccatgcgcacatcatgctgaccacgagagctgtcggggaaa

SEQ ID NO: 177949 - DNA, 60 bp, Artificial
  Synthetic oligonucleotide
gcctgatagatatatgagcgcggcacgaaatacatcggaacgacttaaattagcccggcg

SEQ ID NO: 177950 - DNA, 60 bp, Artificial
  Synthetic oligonucleotide
tcctcctggagcagagtacaccatagactactggattaagcatggatgtattaacaaaaa

SEQ ID NO: 177951 - DNA, 60 bp, Artificial
  Synthetic oligonucleotide
acatggcaatgcgtcgcgtagaagaggacgtgataaatcagggatggatcacactacaag

SEQ ID NO: 177952 - DNA, 58 bp, Artificial
  Synthetic oligonucleotide
tcgggcagatcagggggtgaaaacgaaagtaacactgaggtggcaaggcgtactgcaa

SEQ ID NO: 177953 - DNA, 59 bp, Artificial
  Synthetic oligonucleotide
tcggcgtttgcacttatggaaccggcatcacccggagtgccggtcgtcacacactgaac

SEQ ID NO: 177954 - DNA, 53 bp, Artificial
  Synthetic oligonucleotide
tcggcaataaaggccgcagattttatattaatccccgttcaaccgtcccccta

SEQ ID NO: 177955 - DNA, 59 bp, Artificial
  Synthetic oligonucleotide
tcggagaccgggctaagtccgagtcaatcaagtggtgcatttgagttaatgtcgttgaa

SEQ ID NO: 177956 - DNA, 60 bp, Artificial
  Synthetic oligonucleotide
tcgctttcagcgcgttttagcggtgcgcgcaatgcgacgttatggtaaatagatgagtta

SEQ ID NO: 177957 - DNA, 56 bp, Artificial
  Synthetic oligonucleotide
acagctgattaatcaaggggcggggatctggggaaacgtggcaaccgggcttatca

SEQ ID NO: 177958 - DNA, 60 bp, Artificial
  Synthetic oligonucleotide
tcgctcaacgcgtggcgtcaacaacatattcgatttaacgaatatgtctggcggattagt

SEQ ID NO: 177959 - DNA, 57 bp, Artificial
  Synthetic oligonucleotide
acaggaaaaggaccatccccagtaacatcatgcccgtattccctgccagctttaaca

SEQ ID NO: 177960 - DNA, 57 bp, Artificial
  Synthetic oligonucleotide
atcatttctacaaatgggtccatacgcgcggccgttgtaggaccgttggagccaata

SEQ ID NO: 177961 - DNA, 58 bp, Artificial
  Synthetic oligonucleotide
acaggaagagacattgcggaaactgaacgcgaagacatggggtgtggagtttgttcag

SEQ ID NO: 177962 - DNA, 60 bp, Artificial
  Synthetic oligonucleotide
tcgctaccgcgctcgctcagcaaagatagcgtgaccctattatccggggcgtccttctat

SEQ ID NO: 177963 - DNA, 58 bp, Artificial
  Synthetic oligonucleotide
tcgcggagaaggagttaccgccgggtgaacgcgaaagagtgatgacgagctttgagcg

SEQ ID NO: 177964 - DNA, 59 bp, Artificial
  Synthetic oligonucleotide
acaggagattcatttatctaaaagatgattttggcagtttcaaattttggcgagctctc

SEQ ID NO: 177965 - DNA, 60 bp, Artificial
  Synthetic oligonucleotide
tcgcgcatcgtacactatggaattcctgaagtatgatgatgcgccgaacaacgttgctca

SEQ ID NO: 177966 - DNA, 60 bp, Artificial
  Synthetic oligonucleotide
tcgcgcagtcatcgcactggcgaccgaacagggtttacaaacgcgctttcgccatacgct

SEQ ID NO: 177967 - DNA, 60 bp, Artificial
  Synthetic oligonucleotide
tcgcgcacaatctaaaatgtgctaacgcacttgctattttatacgcaacgggttgccgtc

SEQ ID NO: 177968 - DNA, 54 bp, Artificial
  Synthetic oligonucleotide
acaggcttacgggttgggtcgtaactgccagttattcgaaaaaacgcgcacatg

SEQ ID NO: 177969 - DNA, 58 bp, Artificial
  Synthetic oligonucleotide
tcgcgaccagctcacgctgtgtcagcgtttccgtcgccgtttctcccgttttgtggtc

SEQ ID NO: 177970 - DNA, 60 bp, Artificial
  Synthetic oligonucleotide
tcgccgttctcgatacgctgaaccgtgcgcacgctcatcccggacagttcagcaagctgc

SEQ ID NO: 177971 - DNA, 59 bp, Artificial
  Synthetic oligonucleotide
gcctgaatcacatcctgacggccttttatctccccggcatggtaaagcacctccaggcc

SEQ ID NO: 177972 - DNA, 60 bp, Artificial
  Synthetic oligonucleotide
tcgccctcatccggttcatgacggtcgggcagggaggcaatctgaatatggcgatactgg

SEQ ID NO: 177973 - DNA, 55 bp, Artificial
  Synthetic oligonucleotide
tcgccatatcccgatacagggaacttcgggctttacccgtcagttccgtcgcctg

SEQ ID NO: 177974 - DNA, 60 bp, Artificial
  Synthetic oligonucleotide
acaggtgtttgatgctgtatgccatatgcgcaccacaaaattgccggatcctaaagtgaa

SEQ ID NO: 177975 - DNA, 60 bp, Artificial
  Synthetic oligonucleotide
acaggttagccggctgcagcaggtaataatctgcgtttgcgtagaggtccggacgcagga

SEQ ID NO: 177976 - DNA, 57 bp, Artificial
  Synthetic oligonucleotide
tcgccacaattaacggaattcggggattcgcgcgtaggcgattaagccactcgagag

SEQ ID NO: 177977 - DNA, 60 bp, Artificial
  Synthetic oligonucleotide
acagtacagcgataacgtggcgatgaataagctgattgctcacgttggcggcccggctag

SEQ ID NO: 177978 - DNA, 60 bp, Artificial
  Synthetic oligonucleotide
tcgcaggacagctctccatacgacgaccacggaagcgttctgttggcgtaacctggcgga

SEQ ID NO: 177979 - DNA, 58 bp, Artificial
  Synthetic oligonucleotide
tcccgaacaacataaatatcgtgataaccgacaggcgaagaataaccatgtcgttgtc

SEQ ID NO: 177980 - DNA, 57 bp, Artificial
  Synthetic oligonucleotide
accagtagtaacgttgagttgtagctaataatcactgtattgatgggaattcgttcc

SEQ ID NO: 177981 - DNA, 54 bp, Artificial
  Synthetic oligonucleotide
tccccgttcaaccgtccccctatgacatttgggccacggctgatttagtagacc

SEQ ID NO: 177982 - DNA, 60 bp, Artificial
  Synthetic oligonucleotide
atcattttttcctgtgcgatagctgacaaggcctttagccatgtcacgatataattgcga

SEQ ID NO: 177983 - DNA, 60 bp, Artificial
  Synthetic oligonucleotide
tccccgcaacacgcgggcgtcactgcgctggcgatctttgcccagcaggtaatcaacggg

SEQ ID NO: 177984 - DNA, 60 bp, Artificial
  Synthetic oligonucleotide
accatatctcccaaggagcaaattcagtttcttctacgctttgtcgcgcataagctgcct

SEQ ID NO: 177985 - DNA, 58 bp, Artificial
  Synthetic oligonucleotide
accatcagggatgttgctaccggacaaacccgccaggagttctggaatgttcgcctga

SEQ ID NO: 177986 - DNA, 57 bp, Artificial
  Synthetic oligonucleotide
tccccctcgtcgagtgataaaccgtaaacatggctgtagaagatactcaaccgctta

SEQ ID NO: 177987 - DNA, 60 bp, Artificial
  Synthetic oligonucleotide
tcccatgtctctccggctggcgtaatgattctggttcgtccgacagcaatcacttcaacg

SEQ ID NO: 177988 - DNA, 57 bp, Artificial
  Synthetic oligonucleotide
accattacgggctgcatgaccccaacgccccggagaaccgcagaacgctgatcctcc

SEQ ID NO: 177989 - DNA, 60 bp, Artificial
  Synthetic oligonucleotide
tcccatgccgatgcgattgttccagaccctattatgcctggtcgtaaagtgcgagatttc

SEQ ID NO: 177990 - DNA, 56 bp, Artificial
  Synthetic oligonucleotide
acccaaagcctttaccggctgctgcatttacaagtttcctgcgttggtgtccattc

SEQ ID NO: 177991 - DNA, 60 bp, Artificial
  Synthetic oligonucleotide
acccaaccttggtatcggtacgataaatgttgtatgcgctgctgatgttctgattgtccc

SEQ ID NO: 177992 - DNA, 57 bp, Artificial
  Synthetic oligonucleotide
acccaacggtaaccagtctggaaagcgcgccataaagtcacaggtcatgaacggcga

SEQ ID NO: 177993 - DNA, 60 bp, Artificial
  Synthetic oligonucleotide
gcatacggcggtatacagagtgcaacgcactatcaagctgcattgcttggtttgggggga

SEQ ID NO: 177994 - DNA, 59 bp, Artificial
  Synthetic oligonucleotide
atccaaaagatatccaataggtatcgaatttgtattcagtgggcattcattgaatcccc

SEQ ID NO: 177995 - DNA, 59 bp, Artificial
  Synthetic oligonucleotide
tcccacagcatcccagttattgcccattctgtttacggccagtcggagaaaataggcac

SEQ ID NO: 177996 - DNA, 58 bp, Artificial
  Synthetic oligonucleotide
tccattaaaggtgtcggcctgttacagaatctggttgttcataccctgcctggtgacc

SEQ ID NO: 177997 - DNA, 59 bp, Artificial
  Synthetic oligonucleotide
tccatggggaaatagcggcggtacgctcaaagggaacctgccgcttacgctgaatgaga

SEQ ID NO: 177998 - DNA, 55 bp, Artificial
  Synthetic oligonucleotide
acccagcaccgcggcaatatccaccgtatgcccaattggaccgttaacacgttta

SEQ ID NO: 177999 - DNA, 60 bp, Artificial
  Synthetic oligonucleotide
tccagatcaactgacgctccagatagtcatcaccgatgaatcaggctccagtcgaacgga

SEQ ID NO: 178000 - DNA, 60 bp, Artificial
  Synthetic oligonucleotide
acccatatcaacattggccagagtaatgatgagcggagtacatatggctatgtgttcctt

SEQ ID NO: 178001 - DNA, 57 bp, Artificial
  Synthetic oligonucleotide
tccagaagtggtatgagcggcctagctctataaggggttatactccggaaccccaga

SEQ ID NO: 178002 - DNA, 56 bp, Artificial
  Synthetic oligonucleotide
acccatctttggggaacacatcctgtaacgtggagaaactctcgtgtggatagccc

SEQ ID NO: 178003 - DNA, 58 bp, Artificial
  Synthetic oligonucleotide
tccacctcgacccacaccattgagaggtggctgatcggaaaccaaacgggagacgcga

SEQ ID NO: 178004 - DNA, 60 bp, Artificial
  Synthetic oligonucleotide
tccaaggattcgcacattgacagcctgaaacaggccatgctccttcttgaaaatcaccag

SEQ ID NO: 178005 - DNA, 59 bp, Artificial
  Synthetic oligonucleotide
gcctgaatcacatcctgacggccttttatctccccgacatgattaagaccgtctatccc

SEQ ID NO: 178006 - DNA, 57 bp, Artificial
  Synthetic oligonucleotide
tccaactcttcccgtaatgccagccacaacgttacggcagggatcgcataagtttcc

SEQ ID NO: 178007 - DNA, 59 bp, Artificial
  Synthetic oligonucleotide
tccaaaccacgttatctatcttggctggttctgctataacgcggctttgaagactcgga

SEQ ID NO: 178008 - DNA, 60 bp, Artificial
  Synthetic oligonucleotide
tcatttcgaacaggtggcagtttcgccccatcccgtaatgtttatcgatgctatgacgcg

SEQ ID NO: 178009 - DNA, 58 bp, Artificial
  Synthetic oligonucleotide
acatgttggagacttcggtagcgtagtcggaatcttcgatacggctacgggcagaaga

SEQ ID NO: 178010 - DNA, 55 bp, Artificial
  Synthetic oligonucleotide
acattacatgggttgagcacacggataaaaaccggttagagctgaatttttacat

SEQ ID NO: 178011 - DNA, 58 bp, Artificial
  Synthetic oligonucleotide
tccgttcaggaatttacgggcgagacgaatgcgtcttgcctggtaaatcgcatcgtag

SEQ ID NO: 178012 - DNA, 57 bp, Artificial
  Synthetic oligonucleotide
tccgttatgacgtacaccacttcttccagtaagcgacgcttcaccggactcaggaaa

SEQ ID NO: 178013 - DNA, 58 bp, Artificial
  Synthetic oligonucleotide
acattgcgatcatcccggacatacgtccagatacgccctgttttcgcctttttctgac

SEQ ID NO: 178014 - DNA, 55 bp, Artificial
  Synthetic oligonucleotide
tccgtgtgatagggacggtggggtaaattttcttcgaagtattgaagcgcggcgc

SEQ ID NO: 178015 - DNA, 60 bp, Artificial
  Synthetic oligonucleotide
acattgctccctgcgacttaaacacggcctgggtagagttcaggatccgcagagcgtcag

SEQ ID NO: 178016 - DNA, 58 bp, Artificial
  Synthetic oligonucleotide
gcctgaaacaggccatgctccttcttgaaaatcaccaggcaaaattaactgaatcccc

SEQ ID NO: 178017 - DNA, 58 bp, Artificial
  Synthetic oligonucleotide
tccgtcgggaacatgaaaatcaatgcggacgcgctggacaaggaaatttccattatcc

SEQ ID NO: 178018 - DNA, 56 bp, Artificial
  Synthetic oligonucleotide
acatttacggggggtagccgtgaagattcaccgcgccacaaaatcacgcctgtagc

SEQ ID NO: 178019 - DNA, 60 bp, Artificial
  Synthetic oligonucleotide
tccgtcgacattcatccagtcaccggtctggcagtcgtttgcccggtacgcagctgatag

SEQ ID NO: 178020 - DNA, 60 bp, Artificial
  Synthetic oligonucleotide
tccgtcatgtaaactgaaatccccaataaacagatcccgcgcataggctacgatgtcaaa

SEQ ID NO: 178021 - DNA, 58 bp, Artificial
  Synthetic oligonucleotide
tccgtagcccgatattttgacatcgtagcctatgcgcgggatctgtttattggggatt

SEQ ID NO: 178022 - DNA, 52 bp, Artificial
  Synthetic oligonucleotide
tccgtacagacaaactctcccgtccgacggtcacggaaacgaacactcccgt

SEQ ID NO: 178023 - DNA, 60 bp, Artificial
  Synthetic oligonucleotide
accaacttcaccagcggtaatgtcactacagccatgttgatggggtcacgcgtggtcgcc

SEQ ID NO: 178024 - DNA, 60 bp, Artificial
  Synthetic oligonucleotide
tccgggcttccatgaagcgatatttctcgccagtagtacgcaccagaaagccacacgctt

SEQ ID NO: 178025 - DNA, 58 bp, Artificial
  Synthetic oligonucleotide
accaatttaacctgtaagagaggtcatcatggctgcggtcgatcctagtcaatttttc

SEQ ID NO: 178026 - DNA, 57 bp, Artificial
  Synthetic oligonucleotide
tccgggatttaaagtctctatatattttccaaatctttctatagtccaatgatatcc

SEQ ID NO: 178027 - DNA, 59 bp, Artificial
  Synthetic oligonucleotide
atccactcaaaatgaagcctcgtgcgcttcctaagtctattgtcgcggagtttaagcag

SEQ ID NO: 178028 - DNA, 56 bp, Artificial
  Synthetic oligonucleotide
tccggaaacaaactttgatataccataggataaaaaaccggcacaggagataatgc

SEQ ID NO: 178029 - DNA, 59 bp, Artificial
  Synthetic oligonucleotide
tccgctcaatagcacggtcagtaaccaggttcccgccattactccggtgagatcccagc

SEQ ID NO: 178030 - DNA, 56 bp, Artificial
  Synthetic oligonucleotide
accaccgacggcctaaagttcactgcaaaactgaagggtggccagactgaaggtga

SEQ ID NO: 178031 - DNA, 59 bp, Artificial
  Synthetic oligonucleotide
tccgacataaacctgggcgtactcgtctattaatgcgggccttgcaatccattaatgac

SEQ ID NO: 178032 - DNA, 60 bp, Artificial
  Synthetic oligonucleotide
tccgaaacccgctaacacccctcagctactggatatcacaacatgccatctgagtatgat

SEQ ID NO: 178033 - DNA, 60 bp, Artificial
  Synthetic oligonucleotide
tccctgacctgactcatgaagctatgcgggatctaatcagagcccgtgcagcagctaaac

SEQ ID NO: 178034 - DNA, 60 bp, Artificial
  Synthetic oligonucleotide
tcccgtgagaaaactgcgcaatcgtattgcgcaccatgaacctattctcaaccgcaatct

SEQ ID NO: 178035 - DNA, 58 bp, Artificial
  Synthetic oligonucleotide
tcccgatggttgtttctgacgttaactgtcaggaactgcgagataggtgaacttggaa

SEQ ID NO: 178036 - DNA, 58 bp, Artificial
  Synthetic oligonucleotide
tcttttcggtgcccttcaagacaggacgagccaccccagacatcactgtctaaggtac

SEQ ID NO: 178037 - DNA, 60 bp, Artificial
  Synthetic oligonucleotide
tctttctgttttctccgttctttctgtcatctgcgttgtgtgattatatcgagtaccact

SEQ ID NO: 178038 - DNA, 60 bp, Artificial
  Synthetic oligonucleotide
atccacttcgcttaccggcagaccactggtcagtaaggcgtgatgcaccgcaacgacatt

SEQ ID NO: 178039 - DNA, 56 bp, Artificial
  Synthetic oligonucleotide
aatttgcagctcatatccgtcttaacgcgtaacaatgcatacccttcccccgcccc

SEQ ID NO: 178040 - DNA, 59 bp, Artificial
  Synthetic oligonucleotide
tctttctgactcatcgattgtgagcctctttaagtccttttaaagagaggtttctcatc

SEQ ID NO: 178041 - DNA, 58 bp, Artificial
  Synthetic oligonucleotide
tctttctcctgtttaccgcgagtggtgggacgctctggtatctcggcgggaggataca

SEQ ID NO: 178042 - DNA, 56 bp, Artificial
  Synthetic oligonucleotide
aattttgcgggcaacgtcattttgtacccctaatgctgctaacttagttctggcag

SEQ ID NO: 178043 - DNA, 60 bp, Artificial
  Synthetic oligonucleotide
tcttactattgcctccactaaccttgaaatgttataaccttcattcgcagatacagatat

SEQ ID NO: 178044 - DNA, 60 bp, Artificial
  Synthetic oligonucleotide
acaaaaagatcttgaagtgctcgctgatccctgggtacactattgtatagtaactgatcg

SEQ ID NO: 178045 - DNA, 60 bp, Artificial
  Synthetic oligonucleotide
tcttaatatccgctaatggtgctttcttctgccagacggcctccatatgctgcatttctg

SEQ ID NO: 178046 - DNA, 57 bp, Artificial
  Synthetic oligonucleotide
tcttaaaccgttgtatgtgatgtaccgtagccctcgtaacatgccggggacagccag

SEQ ID NO: 178047 - DNA, 60 bp, Artificial
  Synthetic oligonucleotide
tctgtaattaacagcttaagcaccactatagcaaatcttactcaatcaagatctaacata

SEQ ID NO: 178048 - DNA, 60 bp, Artificial
  Synthetic oligonucleotide
acaaagtctcatctacggacatagcattgacatcaaggttaacgggaagatcagccgatg

SEQ ID NO: 178049 - DNA, 57 bp, Artificial
  Synthetic oligonucleotide
atccagaactattcctgatccagaccaacaatacatagtttgatcttccgttaaaaa

SEQ ID NO: 178050 - DNA, 56 bp, Artificial
  Synthetic oligonucleotide
tctggttacgggagaacggcatcctgatagcgtccggtggacgtaaaaatgtgccg

SEQ ID NO: 178051 - DNA, 57 bp, Artificial
  Synthetic oligonucleotide
acaaataacgggatacgcaggcagtgctcaaatcaggaaggaccggaaaaaggatgc

SEQ ID NO: 178052 - DNA, 56 bp, Artificial
  Synthetic oligonucleotide
acaacaaaacgtcgccggggtgaacattccactaagccaaagtgtgagaatccagc

SEQ ID NO: 178053 - DNA, 58 bp, Artificial
  Synthetic oligonucleotide
tctggtgttgtaaggtcaagcctattgggtaaattagtactagttagctgaacatatc

SEQ ID NO: 178054 - DNA, 60 bp, Artificial
  Synthetic oligonucleotide
tctgggcatgaaattgattggagttctgtagtcgcatccgccgtcacaggagcattgggc

SEQ ID NO: 178055 - DNA, 60 bp, Artificial
  Synthetic oligonucleotide
tctggctgccatcgggaacaatctgaaccagacagcccggaaggtgaacagcggccactg

SEQ ID NO: 178056 - DNA, 58 bp, Artificial
  Synthetic oligonucleotide
tctggattggttacatatttgtaggctacttgtcggaaaccagatttcgacaatgcgt

SEQ ID NO: 178057 - DNA, 60 bp, Artificial
  Synthetic oligonucleotide
tctggacgtacttcagcatcatgagacgaaaaaagagaaccgtcgtcttattcttgatgg

SEQ ID NO: 178058 - DNA, 56 bp, Artificial
  Synthetic oligonucleotide
tctgctgatttcccgtacggaaggaccagaaatttcctgttcccgtcctgcacgaa

SEQ ID NO: 178059 - DNA, 60 bp, Artificial
  Synthetic oligonucleotide
tctgcactcttgttaccaatgctatgccagtgcgtttttacgtgtctgtcagggttggtc

SEQ ID NO: 178060 - DNA, 54 bp, Artificial
  Synthetic oligonucleotide
gcctagaacaactagatctaattgcccgtgagaaggtaaaaaagctacgctttt

SEQ ID NO: 178061 - DNA, 57 bp, Artificial
  Synthetic oligonucleotide
tctgataattgtaagaacgttaagcgagcacatttgtcttttgaacggagaaaggcg

SEQ ID NO: 178062 - DNA, 58 bp, Artificial
  Synthetic oligonucleotide
acaacggacatgggtgcgtttctagtcgtttatcattgtaaccggtctcaatgtgaga

SEQ ID NO: 178063 - DNA, 54 bp, Artificial
  Synthetic oligonucleotide
acaacggagggggttatgaataaaccagcagatctgaaaccccgcaacttatcg

SEQ ID NO: 178064 - DNA, 56 bp, Artificial
  Synthetic oligonucleotide
aatgtgtaactcggttttccataccacaacgtccgtcaaagagccgttctgcatta

SEQ ID NO: 178065 - DNA, 60 bp, Artificial
  Synthetic oligonucleotide
tgaacttgaacgccttcacaattccagtcgtgacgggcgaggcagagtgatcttacccag

SEQ ID NO: 178066 - DNA, 55 bp, Artificial
  Synthetic oligonucleotide
aattaatgacgttgcagaacctctggggaagttttcggccagaatcttacgtgcc

SEQ ID NO: 178067 - DNA, 58 bp, Artificial
  Synthetic oligonucleotide
tgaactgcctattgacggttcacgttttgcaggacaactcccaccagtagttagcggc

SEQ ID NO: 178068 - DNA, 55 bp, Artificial
  Synthetic oligonucleotide
aattacgagccttcattggctcaacataatttgtttcttgtgtaacgataatttt

SEQ ID NO: 178069 - DNA, 60 bp, Artificial
  Synthetic oligonucleotide
tgaacgctcaggaaaaatggacaatgccgatccagagctggaatttgacattgtcgcagt

SEQ ID NO: 178070 - DNA, 58 bp, Artificial
  Synthetic oligonucleotide
tgaaccagacagcccggaaggtgaacagcggccactggtcttcgattgaccgggttca

SEQ ID NO: 178071 - DNA, 60 bp, Artificial
  Synthetic oligonucleotide
gcctacggaattaaagaatgacacgcccttagagccgatcattgcgagttcgcactgaac

SEQ ID NO: 178072 - DNA, 58 bp, Artificial
  Synthetic oligonucleotide
aattatgatgagttatctaagaatttaacgaagatatcaaagtcgcttaaaatcacca

SEQ ID NO: 178073 - DNA, 60 bp, Artificial
  Synthetic oligonucleotide
tgaacatgtttgccaccgaggctctcctagcagacagcaacccggacctaatcaatctgt

SEQ ID NO: 178074 - DNA, 51 bp, Artificial
  Synthetic oligonucleotide
tgaacataaggggggagggtttgggttttacggtatttcaaatttgagcaa

SEQ ID NO: 178075 - DNA, 60 bp, Artificial
  Synthetic oligonucleotide
tgaacacaattctagatcaactatacgcactaactgctgacggaaagctaacgggtgttg

SEQ ID NO: 178076 - DNA, 60 bp, Artificial
  Synthetic oligonucleotide
tgaacaaaatgttttgtagaagctagagatgataaccatagtttgccgatacaaccacat

SEQ ID NO: 178077 - DNA, 60 bp, Artificial
  Synthetic oligonucleotide
aattctgaggtgctcccttcttaggctgggatgaagactcgccgtacagtggaggcgcga

SEQ ID NO: 178078 - DNA, 50 bp, Artificial
  Synthetic oligonucleotide
tgaaatcggaccccccttaccccacttatccacgtgaaatcggacccccc

SEQ ID NO: 178079 - DNA, 58 bp, Artificial
  Synthetic oligonucleotide
aattgaatagagccgcgcttgtaaatttttgccctgaccctgtcaccattgctggtgg

SEQ ID NO: 178080 - DNA, 56 bp, Artificial
  Synthetic oligonucleotide
tgaaatcatgattacgggggcgttgtcttttctgccgcttaacgttacacacccca

SEQ ID NO: 178081 - DNA, 57 bp, Artificial
  Synthetic oligonucleotide
aattgatggcaggcaggtagtaatagtttggattggacgtgataataataaaactac

SEQ ID NO: 178082 - DNA, 54 bp, Artificial
  Synthetic oligonucleotide
gccgtttctcggttttttgagcgtcgcagaccgcacgacaaacgaaacgaagtg

SEQ ID NO: 178083 - DNA, 60 bp, Artificial
  Synthetic oligonucleotide
tgaaatacagcgtctggttaaaaggcacatactgcagcggattcatcacctctccctgac

SEQ ID NO: 178084 - DNA, 60 bp, Artificial
  Synthetic oligonucleotide
tgaaaggcaatactaccggtgcagcgagtattcaggctggactgcctgcttcctgggttg

SEQ ID NO: 178085 - DNA, 59 bp, Artificial
  Synthetic oligonucleotide
tgaaacgcgccagtttcgtattagagggattgtcgcaaaccttacgctgcaataatcca

SEQ ID NO: 178086 - DNA, 59 bp, Artificial
  Synthetic oligonucleotide
tgaaacaggaggccactgaagcgattacacgtctaccatgccggagcaataaaaacgcg

SEQ ID NO: 178087 - DNA, 54 bp, Artificial
  Synthetic oligonucleotide
aattggggttgggcctccatgtatcccatacaaccgacctctttcaaggcaccc

SEQ ID NO: 178088 - DNA, 56 bp, Artificial
  Synthetic oligonucleotide
tgaaaaattcgctcaaaagatcatatttccctggatattttccaccgtttcttatg

SEQ ID NO: 178089 - DNA, 57 bp, Artificial
  Synthetic oligonucleotide
aattgtattctagtctgacagtcgtacgctgtcaagtgtttgcagtcggtttctttt

SEQ ID NO: 178090 - DNA, 58 bp, Artificial
  Synthetic oligonucleotide
aattgtcgcagtctattgcggagagttgcggatttaagaatgcgtacacggtggggtg

SEQ ID NO: 178091 - DNA, 55 bp, Artificial
  Synthetic oligonucleotide
tcttttttatggaagacttgactctttcttgtcataaggaacttttctctctgtt

SEQ ID NO: 178092 - DNA, 60 bp, Artificial
  Synthetic oligonucleotide
tctaatactactggtctagtcgcagaaagagaatctcgtaaatggatctcgtttgagatg

SEQ ID NO: 178093 - DNA, 57 bp, Artificial
  Synthetic oligonucleotide
gccgttacccacgcctgcgctcacgatcccgtcataacccgcgtctaccagcgcttt

SEQ ID NO: 178094 - DNA, 60 bp, Artificial
  Synthetic oligonucleotide
tctaacgtcagcgccacccattttccgctgtctatccactgtcgggcaaaatgcgtcggc

SEQ ID NO: 178095 - DNA, 60 bp, Artificial
  Synthetic oligonucleotide
acacgcgacaaccaggaatgcagccgtaactgcagcaacgacgggcaaaatgcgcatggg

SEQ ID NO: 178096 - DNA, 57 bp, Artificial
  Synthetic oligonucleotide
tcgttttcgtctgaccatcagggatgttgctaccggacaaacccgccaggagttctg

SEQ ID NO: 178097 - DNA, 58 bp, Artificial
  Synthetic oligonucleotide
tcgttgactgtcggatactcaccactcggctccccggaatgggctaacggacttgcga

SEQ ID NO: 178098 - DNA, 60 bp, Artificial
  Synthetic oligonucleotide
tcgttgaccattcataacaagaagacgctgtttcattaggggtgactcctcacaccgata

SEQ ID NO: 178099 - DNA, 60 bp, Artificial
  Synthetic oligonucleotide
tcgttagaatagctgcgggcgcttgaggctgtatgccgaaagcgttttgtggacggtata

SEQ ID NO: 178100 - DNA, 60 bp, Artificial
  Synthetic oligonucleotide
tcgtggaagtgactcaaaagtggtcggttctgcgatagggctagtctcctgctccgctgt

SEQ ID NO: 178101 - DNA, 60 bp, Artificial
  Synthetic oligonucleotide
tcgtgcaatagaacgcataccgtgagctacaagctcgcctccgaaccccattcggatgat

SEQ ID NO: 178102 - DNA, 56 bp, Artificial
  Synthetic oligonucleotide
acactctatttacatcctgaggcggagcttcgcccctttgaaataccttgcttcct

SEQ ID NO: 178103 - DNA, 56 bp, Artificial
  Synthetic oligonucleotide
acactgacgttacttaccgcgtataacgcaccctatctggcagccctgacttttgt

SEQ ID NO: 178104 - DNA, 58 bp, Artificial
  Synthetic oligonucleotide
cattcttctcagggagagcgctgttgcaaaatccacccccgggcgcaatgggtaacag

SEQ ID NO: 178105 - DNA, 57 bp, Artificial
  Synthetic oligonucleotide
atctcgttttcccgtaccgatgagaagcacacccgggaatacatcacccatctggta

SEQ ID NO: 178106 - DNA, 60 bp, Artificial
  Synthetic oligonucleotide
gccgtatagcgcatcgctgtctccggaagcggccagctaaaattgttccgatgtgcttta

SEQ ID NO: 178107 - DNA, 60 bp, Artificial
  Synthetic oligonucleotide
tcgtctctgaccgagccggtaagctgcgctgtacgatcacaaccgacatctggagcgcca

SEQ ID NO: 178108 - DNA, 60 bp, Artificial
  Synthetic oligonucleotide
tcgtcatggctgcaattcaagtcccatctccctgctcgaatgacgttaccgcattggctg

SEQ ID NO: 178109 - DNA, 54 bp, Artificial
  Synthetic oligonucleotide
acagaagtgagttcaatcatcgttctacggaaattagcgccgcccccggttaac

SEQ ID NO: 178110 - DNA, 54 bp, Artificial
  Synthetic oligonucleotide
acagacaacgacttttattgagcagactaaaattttgcacgaaccccctttaca

SEQ ID NO: 178111 - DNA, 55 bp, Artificial
  Synthetic oligonucleotide
tcgtcagttgtcggcagcggtaaaagcccgtcgcggctaagtttagtttctatcc

SEQ ID NO: 178112 - DNA, 60 bp, Artificial
  Synthetic oligonucleotide
acagacgctcagtgactactacatcaaacgtgccgaacagtatcacccggtgataccgat

SEQ ID NO: 178113 - DNA, 58 bp, Artificial
  Synthetic oligonucleotide
tcgtatctgagcaatgacaggttaaaggtgaacaccgacagtaccaagaaaggcccta

SEQ ID NO: 178114 - DNA, 60 bp, Artificial
  Synthetic oligonucleotide
acagagctgtccggacaaaagccggacgtgcctagtctgcgcttgcggcgagcggtgaga

SEQ ID NO: 178115 - DNA, 60 bp, Artificial
  Synthetic oligonucleotide
tcgtagtaggctgactgtaccagatgggtgatgtattcccgggtgtgcttctcatcggta

SEQ ID NO: 178116 - DNA, 59 bp, Artificial
  Synthetic oligonucleotide
tcgtaaggcgtgtgtgagaagttcgtgtctttcgctctgtcttttttcgaatgcctcca

SEQ ID NO: 178117 - DNA, 57 bp, Artificial
  Synthetic oligonucleotide
gccggtgatatgtggcgcgaagcaatgaacggtacggtcgcaatactgggttcgggg

SEQ ID NO: 178118 - DNA, 59 bp, Artificial
  Synthetic oligonucleotide
tcgtaacacatgagcgccgcgcttcaatacttcgaagaaaatttacctcatcgtcccta

SEQ ID NO: 178119 - DNA, 60 bp, Artificial
  Synthetic oligonucleotide
acagcatatagccgtgcttctgaggctgagtaagaacaatcaccgggcgtccattactca

SEQ ID NO: 178120 - DNA, 58 bp, Artificial
  Synthetic oligonucleotide
tcgtaaagaacttacggtggcctggcttgaacttccggacagcgatccgcttgacgca

SEQ ID NO: 178121 - DNA, 60 bp, Artificial
  Synthetic oligonucleotide
tcgggtgtgtgcatcctgttcatccggtgaggccatcccccgtgcgtcctcacgcggagg

SEQ ID NO: 178122 - DNA, 60 bp, Artificial
  Synthetic oligonucleotide
acaactactaatgcaattcagggggataggcccgatgactgcaacagtaatcgttgccag

SEQ ID NO: 178123 - DNA, 60 bp, Artificial
  Synthetic oligonucleotide
tctgagcacgtatgctttaagcgtttctatcgtggcaccaccggcgctacaggcaaagta

SEQ ID NO: 178124 - DNA, 55 bp, Artificial
  Synthetic oligonucleotide
tctgacggacgggtcaaacaaccggctgccgtatttctccgtgcgtcctataccg

SEQ ID NO: 178125 - DNA, 60 bp, Artificial
  Synthetic oligonucleotide
tctgaatggggagcagattgttgcaatccaggaacggaggaatgccgagcgggaactcaa

SEQ ID NO: 178126 - DNA, 60 bp, Artificial
  Synthetic oligonucleotide
tctgaatgatggaaatactatagatactgaacctaagcctcctattaatgtattgctaga

SEQ ID NO: 178127 - DNA, 60 bp, Artificial
  Synthetic oligonucleotide
tctctcaggcaacgcgatccgaaattccgccaggcggtgctacgagcttacaattatcaa

SEQ ID NO: 178128 - DNA, 58 bp, Artificial
  Synthetic oligonucleotide
gccggcaatactgtacgccctgtatacaccaccataaaagcgcgttcccgtgccataa

SEQ ID NO: 178129 - DNA, 60 bp, Artificial
  Synthetic oligonucleotide
tctctcacgtcctgctctggaaggtttaggcgcagccagggataaaggcgtgcatatatt

SEQ ID NO: 178130 - DNA, 52 bp, Artificial
  Synthetic oligonucleotide
acaatttgctcccaaccgtgtggaaaccacattccgtctgtttttaacgtcg

SEQ ID NO: 178131 - DNA, 60 bp, Artificial
  Synthetic oligonucleotide
acacaatctacctgttttctcgtgtgtgtcacaggcgcaatacataaatagtctggccat

SEQ ID NO: 178132 - DNA, 58 bp, Artificial
  Synthetic oligonucleotide
tctctatttatttgccgttgcgggctacgtcatttaccgctaccttagtcacactcta

SEQ ID NO: 178133 - DNA, 56 bp, Artificial
  Synthetic oligonucleotide
acacacgtactcattgtaccttacggaagtgtccagtaatccgacatacgttttgc

SEQ ID NO: 178134 - DNA, 60 bp, Artificial
  Synthetic oligonucleotide
tctctagccgtcagaagtgcttgcgcattctggcagtcaagagggttaaatagactcgct

SEQ ID NO: 178135 - DNA, 60 bp, Artificial
  Synthetic oligonucleotide
tctcggtgagcgataacccggtgcactgtgcggatgccatttgttatagtgttcgaatgc

SEQ ID NO: 178136 - DNA, 60 bp, Artificial
  Synthetic oligonucleotide
tctcggtgacgcctgcgcagtacggtgcgctatccgggcaatcgttgagctaccgaattg

SEQ ID NO: 178137 - DNA, 57 bp, Artificial
  Synthetic oligonucleotide
tctcgacaacctgcccgggacacgttaaaaagacatctgcgcgtttctggagatccc

SEQ ID NO: 178138 - DNA, 60 bp, Artificial
  Synthetic oligonucleotide
tctccgggaaatgcgtgagtatgatgcatggttacagtgtgactgtattccgggagattc

SEQ ID NO: 178139 - DNA, 52 bp, Artificial
  Synthetic oligonucleotide
atcccccggcccgttattcatctccacgggcgacggggatacataaacccga

SEQ ID NO: 178140 - DNA, 58 bp, Artificial
  Synthetic oligonucleotide
acaccgggacggtaagcagacaaaattctgcgtctgaattcagcattcgccgtcaaaa

SEQ ID NO: 178141 - DNA, 58 bp, Artificial
  Synthetic oligonucleotide
tctccctgacgggcaaacacccgaccttcgttatcccagatatcggccgccagtctga

SEQ ID NO: 178142 - DNA, 60 bp, Artificial
  Synthetic oligonucleotide
tctcagcgggggctgtgagcgccacaacctgtatccaagagcggtgcctacgagcagtcc

SEQ ID NO: 178143 - DNA, 60 bp, Artificial
  Synthetic oligonucleotide
tctcagaccgcacatccttgcgaactctgagaaaggtagacaaattttgtcggaggtata

SEQ ID NO: 178144 - DNA, 60 bp, Artificial
  Synthetic oligonucleotide
tctcaatggacatgaacgcgggctatataagagcagcgcgtatccacttacccagtgcgg

SEQ ID NO: 178145 - DNA, 58 bp, Artificial
  Synthetic oligonucleotide
tctagtcgcgttgcactacaggcaaagcgttaccggaagcccacctatggtgggcttc

SEQ ID NO: 178146 - DNA, 53 bp, Artificial
  Synthetic oligonucleotide
tctagcaacctggttttaaacggaactgccaggtacgacatcacaaacgtttt

SEQ ID NO: 178147 - DNA, 59 bp, Artificial
  Synthetic oligonucleotide
tctactgtgtagttttgccctggttttactctatcctgccggtattgatatgtatctgg

SEQ ID NO: 178148 - DNA, 60 bp, Artificial
  Synthetic oligonucleotide
tctaatttatgtggcgttgaagttctggcacgctggaatatgccagatggcagagtgtta

SEQ ID NO: 178149 - DNA, 57 bp, Artificial
  Synthetic oligonucleotide
ttgtaagttgatgggtattaaagcgcatcccgctagattccctgctaagttacccga

SEQ ID NO: 178150 - DNA, 53 bp, Artificial
  Synthetic oligonucleotide
atccccgttcctgactctacaacaatcgctttgttttggccttttttaggatc

SEQ ID NO: 178151 - DNA, 54 bp, Artificial
  Synthetic oligonucleotide
ttgtaactatgaacacccccgtaagacggcaggggtgcgacacgcccccctgac

SEQ ID NO: 178152 - DNA, 60 bp, Artificial
  Synthetic oligonucleotide
ttggtgttcattactcaacgtctgggaaagttgatccacgtccatttcgatgttggcagc

SEQ ID NO: 178153 - DNA, 53 bp, Artificial
  Synthetic oligonucleotide
aaagggagcgcagtcaccaaaactgttcgtttagtttagctttaactggcgta

SEQ ID NO: 178154 - DNA, 58 bp, Artificial
  Synthetic oligonucleotide
ttgggtagggtgtgccgctttattgttgtcggcgtgtagtagtgaacctgttcagcag

SEQ ID NO: 178155 - DNA, 57 bp, Artificial
  Synthetic oligonucleotide
ttgggatctacaaaacctgttattatatctgataatcgtatttgtccagttttaaca

SEQ ID NO: 178156 - DNA, 60 bp, Artificial
  Synthetic oligonucleotide
ttggctatctatggccagcccgagacgacattcttaatgccagtcactgcggtcgataaa

SEQ ID NO: 178157 - DNA, 60 bp, Artificial
  Synthetic oligonucleotide
ttggatagcaaggactatcagtccggcaatgctacatatcattgctaatggatttacgag

SEQ ID NO: 178158 - DNA, 56 bp, Artificial
  Synthetic oligonucleotide
ttgcttgtatccaataattggcttcttctggataataagttattaaataacctttg

SEQ ID NO: 178159 - DNA, 59 bp, Artificial
  Synthetic oligonucleotide
aaagtgattacgttgtaatgatatttaacgtgacgcagaattatgaacgctcttgcgta

SEQ ID NO: 178160 - DNA, 59 bp, Artificial
  Synthetic oligonucleotide
aaagtgcgaactgtgggaaaatcgctggaatggcactgtgataactggcgccgtgtttc

SEQ ID NO: 178161 - DNA, 60 bp, Artificial
  Synthetic oligonucleotide
atcccgcagccgttcatgaagcagcttgggcttagtatcggtgatgttgttaatttccgc

SEQ ID NO: 178162 - DNA, 60 bp, Artificial
  Synthetic oligonucleotide
aaagtggtcggttctgcgatagggctagtctcctgctccgctgtctctagtggcaagccg

SEQ ID NO: 178163 - DNA, 53 bp, Artificial
  Synthetic oligonucleotide
aaagttaagcttcagtaagcgataaacgcgatatacccgttttacattccacg

SEQ ID NO: 178164 - DNA, 60 bp, Artificial
  Synthetic oligonucleotide
aaagttaatgtgaatagttgactatgcgcgatgtgactacagtcaaaagttgactgtagt

SEQ ID NO: 178165 - DNA, 55 bp, Artificial
  Synthetic oligonucleotide
ttgctcttctgcccctttgggaagtttactcattaagtaatctattggggttcca

SEQ ID NO: 178166 - DNA, 53 bp, Artificial
  Synthetic oligonucleotide
aaataccaacataaaaaacgtccttagaagtggtaagcgatttggtatctatg

SEQ ID NO: 178167 - DNA, 60 bp, Artificial
  Synthetic oligonucleotide
ttgctattttttctgccacccttggagcttacctgcttgctgtgggggcatcagctgcag

SEQ ID NO: 178168 - DNA, 59 bp, Artificial
  Synthetic oligonucleotide
aaatagcgattgacactctttcccgattccgatactatagtggtatggtatcacttcgc

SEQ ID NO: 178169 - DNA, 56 bp, Artificial
  Synthetic oligonucleotide
ttgcgtcagaaagcgtctgagagcgttttaaggggggcgcacaacgggagttatgg

SEQ ID NO: 178170 - DNA, 59 bp, Artificial
  Synthetic oligonucleotide
aaatatgtcgcgtcaaaacaccacaaagcgttcatggctgacctgaagccggtgtatcg

SEQ ID NO: 178171 - DNA, 60 bp, Artificial
  Synthetic oligonucleotide
ttgcggttatagctaagcaggaatagcgcagtgagagcccaactaaaattcaacagcgga

SEQ ID NO: 178172 - DNA, 55 bp, Artificial
  Synthetic oligonucleotide
atcccgctataggtcgctccagtggtgtaattcgccggtataccggacattccgt

SEQ ID NO: 178173 - DNA, 60 bp, Artificial
  Synthetic oligonucleotide
ttgcgctttacctggcagtccgtataattctccacccgtcgcgcaatgcccgtcatatgg

SEQ ID NO: 178174 - DNA, 60 bp, Artificial
  Synthetic oligonucleotide
ttgcgctcgatgggaatagatgacgacggttttgtactttatgccgcaaatggagctatc

SEQ ID NO: 178175 - DNA, 60 bp, Artificial
  Synthetic oligonucleotide
ttgcgcatccgcagtgctaaagacattcagttccccaaacgtcatcataatgaaatcgaa

SEQ ID NO: 178176 - DNA, 59 bp, Artificial
  Synthetic oligonucleotide
aaacttcagaatgtcggccggagactggagcccgagagcaatatcgggtgagcaaagcg

SEQ ID NO: 178177 - DNA, 54 bp, Artificial
  Synthetic oligonucleotide
aaactttggggagaaataaattctgtatcagtcataactagggaaattgggtca

SEQ ID NO: 178178 - DNA, 60 bp, Artificial
  Synthetic oligonucleotide
aaagacagtcagtttgctcagcgactgggccggcgattattctcacccggcactgaaata

SEQ ID NO: 178179 - DNA, 60 bp, Artificial
  Synthetic oligonucleotide
ttgttactttgcattggtcgattgaagtcgggttctgatgcagaatccactgaattgcaa

SEQ ID NO: 178180 - DNA, 60 bp, Artificial
  Synthetic oligonucleotide
aaagaggtaatgatttaacggtggatgataaatcctgatatcgctgactggaacgctcga

SEQ ID NO: 178181 - DNA, 60 bp, Artificial
  Synthetic oligonucleotide
ttgtgttccccaagtgctgttcgggtcgtatagcgaatttggagagacatctatgacagt

SEQ ID NO: 178182 - DNA, 60 bp, Artificial
  Synthetic oligonucleotide
ttgtgtccactgcattgcgaggtgaaacgatgataccgttagcgtatcgtatagcacaga

SEQ ID NO: 178183 - DNA, 60 bp, Artificial
  Synthetic oligonucleotide
gccggacgttttcagtcgtggatgtgcctgaacaggcgaagcatatcgaccacagcgacc

SEQ ID NO: 178184 - DNA, 57 bp, Artificial
  Synthetic oligonucleotide
ttgtggtccaggtaacggaagctcaggcttgcccctccgttgtaatgagccagtcgg

SEQ ID NO: 178185 - DNA, 60 bp, Artificial
  Synthetic oligonucleotide
aaagcatcattaatccgccatgatggtttagagatgtttgagggtgtaccgcaaccacta

SEQ ID NO: 178186 - DNA, 58 bp, Artificial
  Synthetic oligonucleotide
aaagccccaccatcggagctattccgcttccaagatcggacagactcgccaaagctac

SEQ ID NO: 178187 - DNA, 60 bp, Artificial
  Synthetic oligonucleotide
aaagcctcgtctctccgtatggccgcgtgcaggtttcgcagactcgccttgagcgctaca

SEQ ID NO: 178188 - DNA, 60 bp, Artificial
  Synthetic oligonucleotide
ttgtggatatgaagcggtggtatctgtgtccgcaggtacgggtcgcagatatcgtccagc

SEQ ID NO: 178189 - DNA, 51 bp, Artificial
  Synthetic oligonucleotide
aaagcgactgagggcgttttaaggggggcgcacaacgggagttatggtaaa

SEQ ID NO: 178190 - DNA, 60 bp, Artificial
  Synthetic oligonucleotide
ttgtcatatcgggagagataagtatcgggcagttaatcgcgtttaatatgcttgcaggtc

SEQ ID NO: 178191 - DNA, 57 bp, Artificial
  Synthetic oligonucleotide
ttgtcaaccttgcaataatagacatagggacaaccatgtataaatttttaccctcag

SEQ ID NO: 178192 - DNA, 55 bp, Artificial
  Synthetic oligonucleotide
aaagcgcttaaggcactccagtccggccaggcattaaccggaaaagatggtatct

SEQ ID NO: 178193 - DNA, 60 bp, Artificial
  Synthetic oligonucleotide
ttgtatgaacagcttattcctcctgactactaataaactacagcgtcactactgatttac

SEQ ID NO: 178194 - DNA, 56 bp, Artificial
  Synthetic oligonucleotide
gccggaaaacgtaaaacgcgttgaagtgattgctgtcggacgaaccagaatcatta

SEQ ID NO: 178195 - DNA, 59 bp, Artificial
  Synthetic oligonucleotide
aaagcggcctgatagacattaggagaatgtattggcgaaggtcactagaatccagggtg

SEQ ID NO: 178196 - DNA, 55 bp, Artificial
  Synthetic oligonucleotide
ttgtatatctctgtcgtttgtccccggggggaagcattactgctaacaagtcccg

SEQ ID NO: 178197 - DNA, 58 bp, Artificial
  Synthetic oligonucleotide
ttgtagatcaatacctgggggaggatttgtataggcagtattaccttgttgagtcaaa

SEQ ID NO: 178198 - DNA, 54 bp, Artificial
  Synthetic oligonucleotide
aaagctaaggggtgatatatggctaaaatttacgatttccctcaaggagccgaa

SEQ ID NO: 178199 - DNA, 57 bp, Artificial
  Synthetic oligonucleotide
aaagctacgcaatggctccctaatccgatcttgcggcgagcggtgggaattaacagg

SEQ ID NO: 178200 - DNA, 60 bp, Artificial
  Synthetic oligonucleotide
ttgtacatgatgtgcagtgcgctgagggcatcagtggcgggtgtttttccgtgggatgga

SEQ ID NO: 178201 - DNA, 60 bp, Artificial
  Synthetic oligonucleotide
aaagctgaagggggtgacaacaagctggctaatctaagattgttacatgctaattgccac

SEQ ID NO: 178202 - DNA, 50 bp, Artificial
  Synthetic oligonucleotide
aaagctgagcggacggctttcggaaaaagaaacggtgaacgggaacggat

SEQ ID NO: 178203 - DNA, 58 bp, Artificial
  Synthetic oligonucleotide
aaaggaaaaggactagtaattatcattgactagcccatctcaattggtatagtgatta

SEQ ID NO: 178204 - DNA, 60 bp, Artificial
  Synthetic oligonucleotide
ttgaacataatgagaactgcgggggggtcaggctactggcatgccagaagcagacaggct

SEQ ID NO: 178205 - DNA, 57 bp, Artificial
  Synthetic oligonucleotide
gaggtggtatgtttacgctctggcgtacgctggtagtcaattttaccgttgtggata

SEQ ID NO: 178206 - DNA, 60 bp, Artificial
  Synthetic oligonucleotide
ttgaaagtcatgtaatgcatgagcactggtctttagttcatgttggggggcgtgtttcag

SEQ ID NO: 178207 - DNA, 51 bp, Artificial
  Synthetic oligonucleotide
aaattcttttttcgtatatctaagcgcggttttctctattaaaaaccgaga

SEQ ID NO: 178208 - DNA, 60 bp, Artificial
  Synthetic oligonucleotide
ttcttgatgggggcgtggacacaacaaatgatataagcctgcgtaatacacaactgtcca

SEQ ID NO: 178209 - DNA, 60 bp, Artificial
  Synthetic oligonucleotide
ttcttgatgcgtcactgccgcgacttgacggattcgaacggtgtggtgagtcgtttgaca

SEQ ID NO: 178210 - DNA, 58 bp, Artificial
  Synthetic oligonucleotide
ttcttccaggttcgtctgtatcctcccgccgagataccagagcgtcccgccactcgcg

SEQ ID NO: 178211 - DNA, 59 bp, Artificial
  Synthetic oligonucleotide
ttctgtttcgatgccccacttttccatcgcacaggccgactttccgaggtgaatgccag

SEQ ID NO: 178212 - DNA, 53 bp, Artificial
  Synthetic oligonucleotide
ttctgtccgctctctttcgggaaacgaataacggcctcacgggagttaccacc

SEQ ID NO: 178213 - DNA, 58 bp, Artificial
  Synthetic oligonucleotide
ttctgtaaaactatcctggatctcacaacgggtacttttcattgtgacagttggtata

SEQ ID NO: 178214 - DNA, 60 bp, Artificial
  Synthetic oligonucleotide
aaattttatgcaacagcggctgcactgcacagggattatttatcagttgatatgctgtgc

SEQ ID NO: 178215 - DNA, 54 bp, Artificial
  Synthetic oligonucleotide
aacaaaagcaacgggacggtgagttcagtcacaacgccgaattacagttttctc

SEQ ID NO: 178216 - DNA, 60 bp, Artificial
  Synthetic oligonucleotide
gcagttagcgcgtaagcttgcgaacggtacgccgtgacggtgtgtagcatctgcgcgtct

SEQ ID NO: 178217 - DNA, 60 bp, Artificial
  Synthetic oligonucleotide
attctgatctcgccatcaccaccgttctggtgattaaacgcgtattccggctgaccctgc

SEQ ID NO: 178218 - DNA, 56 bp, Artificial
  Synthetic oligonucleotide
aacaacacaaggtaaagattcatcgtcttttggtttccgtgacttcaccactctga

SEQ ID NO: 178219 - DNA, 60 bp, Artificial
  Synthetic oligonucleotide
aacaacgtaactactgacatctgcacccatgtaccaggcgatagttaaacccatcactgc

SEQ ID NO: 178220 - DNA, 60 bp, Artificial
  Synthetic oligonucleotide
ttctggtcagcttcagtgatgccggcacacataccgtggggatgagcgtcactcggctgg

SEQ ID NO: 178221 - DNA, 59 bp, Artificial
  Synthetic oligonucleotide
ttctggacaggaatttgatgaatatctaaccaattcattttcgcgagaacaacgaataa

SEQ ID NO: 178222 - DNA, 60 bp, Artificial
  Synthetic oligonucleotide
ttctgctggcatccggcattgccctgctgctcacgcgttatttacacaatggcgttgtgg

SEQ ID NO: 178223 - DNA, 60 bp, Artificial
  Synthetic oligonucleotide
ttctgcggtgtgcgtaacagatgttatggtaaattaacaccgcatgactgattcggacgc

SEQ ID NO: 178224 - DNA, 60 bp, Artificial
  Synthetic oligonucleotide
ttctgagcatgtacatatactccctgcatagagcaacacgttctatgcagtttatgaagg

SEQ ID NO: 178225 - DNA, 57 bp, Artificial
  Synthetic oligonucleotide
ttctgaatcaataatgctttagtgtaatccaaccctttcttaacgccttctgaacgc

SEQ ID NO: 178226 - DNA, 51 bp, Artificial
  Synthetic oligonucleotide
ttctgaacaccgaacggctcaaaacgaaaagttttctccccccggatggaa

SEQ ID NO: 178227 - DNA, 58 bp, Artificial
  Synthetic oligonucleotide
ttctctacagaaaatttacttgtatctgaatgaactcgtgtagataccagaaccaaat

SEQ ID NO: 178228 - DNA, 60 bp, Artificial
  Synthetic oligonucleotide
gaggtcttttcacggaacgtcaggctacgcatatagtgttcgtcattatcgtgtgcccga

SEQ ID NO: 178229 - DNA, 57 bp, Artificial
  Synthetic oligonucleotide
ttctcgtaagaaacgcctttgtcccccatagcattgattgggtcatcaactacaact

SEQ ID NO: 178230 - DNA, 57 bp, Artificial
  Synthetic oligonucleotide
ttctcagcgtatgtaggtatggggatattagccacggttaactggttgacacctctt

SEQ ID NO: 178231 - DNA, 58 bp, Artificial
  Synthetic oligonucleotide
ttctacccgactgattccacaggggcggttcgtcactaacgatccgatgacgctggta

SEQ ID NO: 178232 - DNA, 60 bp, Artificial
  Synthetic oligonucleotide
ttcgtgcgtctgagagcttttgagcgcgtttgaggggctatctggcgactcatccccaaa

SEQ ID NO: 178233 - DNA, 60 bp, Artificial
  Synthetic oligonucleotide
ttcgtcagtcggcaatggtgcttgtcaaaactttgtggcggctactctggatttatctgc

SEQ ID NO: 178234 - DNA, 51 bp, Artificial
  Synthetic oligonucleotide
ttgcctgttttaccggtttcccgtcagaaacgtcctgagtccgttttagcg

SEQ ID NO: 178235 - DNA, 55 bp, Artificial
  Synthetic oligonucleotide
aaatccagttgtaggctcttttgaatgggatatgaccgctccaagttacgtttcc

SEQ ID NO: 178236 - DNA, 53 bp, Artificial
  Synthetic oligonucleotide
ttgcctgttttaccggtttcccgtcagaaacgccctgagggcctctcaggcgg

SEQ ID NO: 178237 - DNA, 60 bp, Artificial
  Synthetic oligonucleotide
aaatccctctccgcttgacgatctaaatcaggcagtcgacgcactcatatgccagcagca

SEQ ID NO: 178238 - DNA, 60 bp, Artificial
  Synthetic oligonucleotide
ttgcctgtatgcatggttatgcagcagaatgcctgactgacgttttcatcccgaatctca

SEQ ID NO: 178239 - DNA, 55 bp, Artificial
  Synthetic oligonucleotide
gaggtcgataacaatctcccgtttttcgcattacgtactcgttcgtgaaatacta

SEQ ID NO: 178240 - DNA, 57 bp, Artificial
  Synthetic oligonucleotide
ttgccggactccttgtgctcaaggtcggagtctttttcacgggcatactttccctca

SEQ ID NO: 178241 - DNA, 60 bp, Artificial
  Synthetic oligonucleotide
ttgcatcatggagaaggatcctgctgttgtagtacagtaaggcggcaagtatgcaaggat

SEQ ID NO: 178242 - DNA, 54 bp, Artificial
  Synthetic oligonucleotide
aaatcggccgctgaattcgaagttcactgcggataaaacgtaaataaacgcaac

SEQ ID NO: 178243 - DNA, 60 bp, Artificial
  Synthetic oligonucleotide
ttgcaggttgtaagctctggcccgctcatagcaggcttgcagccattgctcatactgcgg

SEQ ID NO: 178244 - DNA, 58 bp, Artificial
  Synthetic oligonucleotide
ttgcacccgggcgaaaatatccgcagccgtatgtggcactgccggcttttgaccgtaa

SEQ ID NO: 178245 - DNA, 56 bp, Artificial
  Synthetic oligonucleotide
ttgatccgttgacctatgcggtccataaacgggatcaggaagtgaagaccggggga

SEQ ID NO: 178246 - DNA, 57 bp, Artificial
  Synthetic oligonucleotide
aaatctgtatttccaggttaagtctgttaatcagacgattctgttcgccgcgttctg

SEQ ID NO: 178247 - DNA, 60 bp, Artificial
  Synthetic oligonucleotide
ttgagtgctctgatgttgtgaaagcaaacaagagtcagtttgctgtatcaaggactccga

SEQ ID NO: 178248 - DNA, 59 bp, Artificial
  Synthetic oligonucleotide
aaatgaaacgggaaatgctttctcctgcgtataccaccagatggacagatttgccagta

SEQ ID NO: 178249 - DNA, 58 bp, Artificial
  Synthetic oligonucleotide
ttgagtagactcaaagccgacccgggaagagccagtctggagaatgtcctttccgtca

SEQ ID NO: 178250 - DNA, 55 bp, Artificial
  Synthetic oligonucleotide
attcttacgtacgcagttggtaattcgcacgttcagcgaccctttgataaaatag

SEQ ID NO: 178251 - DNA, 60 bp, Artificial
  Synthetic oligonucleotide
ttgagcctgttcgttctgcccgattaatggatgagtatcgggatgttgcccggaaagtga

SEQ ID NO: 178252 - DNA, 60 bp, Artificial
  Synthetic oligonucleotide
aaatgccttggcccagtagacataagctttctcggtctgtaggctgtaatgcaggtagcg

SEQ ID NO: 178253 - DNA, 60 bp, Artificial
  Synthetic oligonucleotide
ttgagcctgttcgttcagcctgttcaccggagttattgcttcagtaccgcaaggttatga

SEQ ID NO: 178254 - DNA, 56 bp, Artificial
  Synthetic oligonucleotide
ttgagattcattcagtctcgtcgtaatctcactattgtaaaaacgaaaaaaccacc

SEQ ID NO: 178255 - DNA, 55 bp, Artificial
  Synthetic oligonucleotide
ttgacgtgaaggtcaccggatttccgggatggcgtgacgttcagaaaaaactaca

SEQ ID NO: 178256 - DNA, 57 bp, Artificial
  Synthetic oligonucleotide
ttgacctatggcgatcttactcgtctggacccgaaaacggtcaccgcgcaacaggtg

SEQ ID NO: 178257 - DNA, 56 bp, Artificial
  Synthetic oligonucleotide
ttgaatacacgttgccgataagccagttaccagccgtttttgtctcggtataccac

SEQ ID NO: 178258 - DNA, 60 bp, Artificial
  Synthetic oligonucleotide
aaatgttgccgcgcagaccagagagttcagactgaaccttgcgcagcgatgtggtgagct

SEQ ID NO: 178259 - DNA, 56 bp, Artificial
  Synthetic oligonucleotide
ttgaactcgccattccccgtgagatttcccgcgaggccgcacgggagaccgttctc

SEQ ID NO: 178260 - DNA, 55 bp, Artificial
  Synthetic oligonucleotide
aaattaagttttcatttagatttggaataattgaaaatgatctgtaagtcatatt

SEQ ID NO: 178261 - DNA, 59 bp, Artificial
  Synthetic oligonucleotide
gagggtgcaaagcgtacccttattaaggccggtttcctggatgatgacattgacatcat

SEQ ID NO: 178262 - DNA, 54 bp, Artificial
  Synthetic oligonucleotide
ttttaccagcccggaggttaaagctgaccgggctatccagtttgcagttaagtc

SEQ ID NO: 178263 - DNA, 59 bp, Artificial
  Synthetic oligonucleotide
ttttaagagagtcgaagtgtctggtgatctatggggccagtctagccctcttccaagtg

SEQ ID NO: 178264 - DNA, 53 bp, Artificial
  Synthetic oligonucleotide
ttttaaagatacgtttcatgggaaatacaaggtttctgactgggttattcatt

SEQ ID NO: 178265 - DNA, 53 bp, Artificial
  Synthetic oligonucleotide
tttgtttgcacgttgtttttaaatgacaggccccctgagattttttgtctaaa

SEQ ID NO: 178266 - DNA, 58 bp, Artificial
  Synthetic oligonucleotide
aaaacgtctcagagggcttctgacgcgctacgctgatgtcgattaccccagcttttgg

SEQ ID NO: 178267 - DNA, 54 bp, Artificial
  Synthetic oligonucleotide
aaaactaattagaaacccaatagtccataacatagaagaatggaatctaatacg

SEQ ID NO: 178268 - DNA, 59 bp, Artificial
  Synthetic oligonucleotide
tttgtggcacgccctacccggatggcgccaatgttaatgtacgtacattagcattaaca

SEQ ID NO: 178269 - DNA, 60 bp, Artificial
  Synthetic oligonucleotide
tttgtcggaccgcgcacacgcaatcagacaaatgccacctggtcagggcttcaccccgac

SEQ ID NO: 178270 - DNA, 58 bp, Artificial
  Synthetic oligonucleotide
tttggttttattcgaaagccgttgtaaggattgctttaatcctatatctagcatgata

SEQ ID NO: 178271 - DNA, 60 bp, Artificial
  Synthetic oligonucleotide
tttgcggatattcgccggatagcggaagtacgctgacagattctcccatttgcgtcgcca

SEQ ID NO: 178272 - DNA, 60 bp, Artificial
  Synthetic oligonucleotide
attgaccacaggccaacggtaatcgacatcattctgctaccatcgtccgcgagaggatga

SEQ ID NO: 178273 - DNA, 60 bp, Artificial
  Synthetic oligonucleotide
tttgcgcatgcgcaaaattgagagcgcgaatccgctcaaaattgcgctcagaaaatggtg

SEQ ID NO: 178274 - DNA, 60 bp, Artificial
  Synthetic oligonucleotide
tttgccggaatatgtcggatatgtgcgctgtcaccacccggcttcgtgaccagggcgtta

SEQ ID NO: 178275 - DNA, 56 bp, Artificial
  Synthetic oligonucleotide
tttgatgggaacggccgtcaatcttccataccgacaggtattccgcatttttcgtg

SEQ ID NO: 178276 - DNA, 55 bp, Artificial
  Synthetic oligonucleotide
aaaagctacaggtttacggacctgagttacccaggccatatgccgataccgtgaa

SEQ ID NO: 178277 - DNA, 59 bp, Artificial
  Synthetic oligonucleotide
tttgatagtggaatcttgcagtcgccaaaatcacctacgtgggaattgaagccggaata

SEQ ID NO: 178278 - DNA, 55 bp, Artificial
  Synthetic oligonucleotide
aaaaggcaagacgggagattaaacctgatataaccactcacagtttggaaggcaa

SEQ ID NO: 178279 - DNA, 55 bp, Artificial
  Synthetic oligonucleotide
aaaaggccgataccagtgcaaacgtcaggaacggattctctggtccggtctctcc

SEQ ID NO: 178280 - DNA, 59 bp, Artificial
  Synthetic oligonucleotide
aaaaggccgtcaggatgtgattcaggcgctcacagaggcggggcttgaagtggtcaggg

SEQ ID NO: 178281 - DNA, 55 bp, Artificial
  Synthetic oligonucleotide
aaaaggcgcagccccggaggaacaacgagcacgccccagcgtgtgagaggaaaag

SEQ ID NO: 178282 - DNA, 51 bp, Artificial
  Synthetic oligonucleotide
tttgatagatagttggaaaatattagaagaaaaaaaaggaaaacttaacat

SEQ ID NO: 178283 - DNA, 56 bp, Artificial
  Synthetic oligonucleotide
gaggccattcccgcaatcggtcacggataatcgccttatccagagggggcttttaa

SEQ ID NO: 178284 - DNA, 60 bp, Artificial
  Synthetic oligonucleotide
tttgagtcgtgcgatgatgctatcgagtgggggttggttgagtgtgaacttcatgatcgt

SEQ ID NO: 178285 - DNA, 60 bp, Artificial
  Synthetic oligonucleotide
tttgaactcagtcatcatcacgttctccggatttaagtcaggaacgtgtcaacgctattc

SEQ ID NO: 178286 - DNA, 57 bp, Artificial
  Synthetic oligonucleotide
aaaagtgaaagcgaaccgaatctgttaaatcagcgagtcgagatcaaaaaatctgac

SEQ ID NO: 178287 - DNA, 60 bp, Artificial
  Synthetic oligonucleotide
tttctggcacagtcctgtgttgaaacgcaggacttcctgtacatgacagaaaaccctgca

SEQ ID NO: 178288 - DNA, 58 bp, Artificial
  Synthetic oligonucleotide
tttcgttgccagtctaaatatcaagcatattgggttaacatccaggttacagcctttc

SEQ ID NO: 178289 - DNA, 52 bp, Artificial
  Synthetic oligonucleotide
aaaaaaaccgggcggcacgcccggaactcaatcaagttagattagattactc

SEQ ID NO: 178290 - DNA, 51 bp, Artificial
  Synthetic oligonucleotide
aaaaaccaccctggcaggtggtttttcgaaggttaaataatcctggcagat

SEQ ID NO: 178291 - DNA, 51 bp, Artificial
  Synthetic oligonucleotide
ttttttacaaaaaggcgtcattttggattctaagcctaaggacctttgtta

SEQ ID NO: 178292 - DNA, 58 bp, Artificial
  Synthetic oligonucleotide
aaaaacgattcgaatatgtctgcagggacgatagaaatcttcgtgcgggttgtctcgc

SEQ ID NO: 178293 - DNA, 53 bp, Artificial
  Synthetic oligonucleotide
aaaaaggattccggaaacctgacccccactcagcaaaaagagcagttgcggga

SEQ ID NO: 178294 - DNA, 60 bp, Artificial
  Synthetic oligonucleotide
gagctgacacgacaggagaacgggcaactgagggaacagtgcgacgacttgagtcagcag

SEQ ID NO: 178295 - DNA, 56 bp, Artificial
  Synthetic oligonucleotide
aaaaagtcagcggagagtggctgccgttgtggctgtcccggtatttcagtgtaaaa

SEQ ID NO: 178296 - DNA, 57 bp, Artificial
  Synthetic oligonucleotide
tttttacccccaccgctcgccgcagtgttgactagcgtagtctgtcaacgcgaggaa

SEQ ID NO: 178297 - DNA, 55 bp, Artificial
  Synthetic oligonucleotide
ttttgtgtcgcgtcccgtttacgccggcgctaacaatacaggctaaagttgagcc

SEQ ID NO: 178298 - DNA, 53 bp, Artificial
  Synthetic oligonucleotide
ttttgtaagtgcgttttccatttttatcgccgacggctttgataaatacgtta

SEQ ID NO: 178299 - DNA, 60 bp, Artificial
  Synthetic oligonucleotide
ttttggttgtggctcatcgagagaacatgctgtttggtctctagtagactatggattcaa

SEQ ID NO: 178300 - DNA, 55 bp, Artificial
  Synthetic oligonucleotide
ttttggtattctgatttaaaactattgtagctcaggtatcaaaagaacttgggta

SEQ ID NO: 178301 - DNA, 60 bp, Artificial
  Synthetic oligonucleotide
ttttgcttatgacaacgcgatcctgaagcgaaacaatgctgaattatcggggcagcctga

SEQ ID NO: 178302 - DNA, 56 bp, Artificial
  Synthetic oligonucleotide
aaaacatcttcgcaaacttcggagagtaatcaggtccggcgcttcaaactcgacca

SEQ ID NO: 178303 - DNA, 47 bp, Artificial
  Synthetic oligonucleotide
aaaacccacgttattaggcgtgggttttttcgaaggttagaagtttc

SEQ ID NO: 178304 - DNA, 54 bp, Artificial
  Synthetic oligonucleotide
ttttgccgggaccgtctgtaacgtggatgccggtacctgctccccgtggttatc

SEQ ID NO: 178305 - DNA, 53 bp, Artificial
  Synthetic oligonucleotide
gagctataaggggctttcgttcgttcttgtaaggttttagagcctttcgtatg

SEQ ID NO: 178306 - DNA, 54 bp, Artificial
  Synthetic oligonucleotide
aaaaccggccccaaagcgcccgcaagaagcacactcaacacgatttccgttata

SEQ ID NO: 178307 - DNA, 60 bp, Artificial
  Synthetic oligonucleotide
ttttgatagaaacgtagcaggtcagtcgctgacttcacttcatccggcacctgcaatggc

SEQ ID NO: 178308 - DNA, 58 bp, Artificial
  Synthetic oligonucleotide
ttttcgtaaaattggcgactctgtgagtcggctagaccggaaagagccggagatgagc

SEQ ID NO: 178309 - DNA, 60 bp, Artificial
  Synthetic oligonucleotide
ttttcgactttcgactggcgagcagcaaacttcacacattgcgatctgaccaattcggag

SEQ ID NO: 178310 - DNA, 54 bp, Artificial
  Synthetic oligonucleotide
aaaacctaccgcgggccgacactttaaaccatccaggcagctgacaacccgcac

SEQ ID NO: 178311 - DNA, 57 bp, Artificial
  Synthetic oligonucleotide
ttttcacgactgtcgtacctgtttgagaacgagagttaaccggacaagtgtgccata

SEQ ID NO: 178312 - DNA, 57 bp, Artificial
  Synthetic oligonucleotide
ttttatgagtcgctgagtaaattcacgaaaaaatataagttgtgtattgactccgaa

SEQ ID NO: 178313 - DNA, 59 bp, Artificial
  Synthetic oligonucleotide
ttttagtagccaagtcgcttcaattgagttggcggtcttcaaccgagcatcgacgctaa

SEQ ID NO: 178314 - DNA, 54 bp, Artificial
  Synthetic oligonucleotide
aaaaccttgtcttcctggagaaaattcgtcagaaacgccctcaggcgcttttgc

SEQ ID NO: 178315 - DNA, 57 bp, Artificial
  Synthetic oligonucleotide
ttttagcggtgcgcgtaataagggattatgttaaaccacgtatgaggtgttatgtga

SEQ ID NO: 178316 - DNA, 55 bp, Artificial
  Synthetic oligonucleotide
gagctaacacaaaggaaaacgcataaggcaaatatagaaataagtcttaaagact

SEQ ID NO: 178317 - DNA, 60 bp, Artificial
  Synthetic oligonucleotide
ttttacccagagagcagcagcagggtatggggggataaccgcatcacggaagatatgcag

SEQ ID NO: 178318 - DNA, 60 bp, Artificial
  Synthetic oligonucleotide
tttaggacgtctcatggcacagcatatcaactgataaataatccctgtgcagtgcagccg

SEQ ID NO: 178319 - DNA, 53 bp, Artificial
  Synthetic oligonucleotide
aaaccgttaggctcgcgtaaagcgccttccggcgaagggaaggcgatagaatg

SEQ ID NO: 178320 - DNA, 58 bp, Artificial
  Synthetic oligonucleotide
aaacctctctttttgcggtatttgcgtcagaattgcgttcagcgcgtttcagcggtgc

SEQ ID NO: 178321 - DNA, 53 bp, Artificial
  Synthetic oligonucleotide
tttacgctggaattaccgtatgaaccctgaccgcattttattaacggaggttc

SEQ ID NO: 178322 - DNA, 54 bp, Artificial
  Synthetic oligonucleotide
tttacgacctgcttaatcccgggggcgttagcgccaaggcctctgacgtacacc

SEQ ID NO: 178323 - DNA, 58 bp, Artificial
  Synthetic oligonucleotide
tttaccagcatattttacccactggtagttctgggattgatatacctgccggccagat

SEQ ID NO: 178324 - DNA, 56 bp, Artificial
  Synthetic oligonucleotide
tttaacttccccatcccgatatttccgatggtgaaagtatataacttgcggtcaga

SEQ ID NO: 178325 - DNA, 60 bp, Artificial
  Synthetic oligonucleotide
tttaaccctggtccaagaacagccattgcagctgtcagggattccaagaacgatatagaa

SEQ ID NO: 178326 - DNA, 60 bp, Artificial
  Synthetic oligonucleotide
aaacgcgttatcagtacagcgacgttaatgtggttgctattcatcatgcgttgatgcagt

SEQ ID NO: 178327 - DNA, 60 bp, Artificial
  Synthetic oligonucleotide
atctgaccattgctgtatacaggtttttttattccagccgcattagcaacctccagtgaa

SEQ ID NO: 178328 - DNA, 58 bp, Artificial
  Synthetic oligonucleotide
attgcacttgcgatctttcgtcggcgggcgtagaacgaaaacagctcgccaggaaggc

SEQ ID NO: 178329 - DNA, 56 bp, Artificial
  Synthetic oligonucleotide
tttaaatgaaatctatcaaatttagaacatagtatatttgttctttgagaaatttg

SEQ ID NO: 178330 - DNA, 59 bp, Artificial
  Synthetic oligonucleotide
aaacggggctttcggcggacatctgcgctgaaagccggagccattcacccgactgcata

SEQ ID NO: 178331 - DNA, 56 bp, Artificial
  Synthetic oligonucleotide
ttgttttgtgggtcggggtcgctgttggacaaacgagcggagcggagtgcgtcagt

SEQ ID NO: 178332 - DNA, 60 bp, Artificial
  Synthetic oligonucleotide
ttgtttgtcgcgtaatatttatccgataacgcctgctgtcgccatatgcctgatcgcgac

SEQ ID NO: 178333 - DNA, 60 bp, Artificial
  Synthetic oligonucleotide
aaacgtaatctctattagaacagattgtgatcatgatgcattattgatcttagttaaatc

SEQ ID NO: 178334 - DNA, 50 bp, Artificial
  Synthetic oligonucleotide
aaacgtgtttgaaacccagttaagggtacggttaatccagcgatcggaaa

SEQ ID NO: 178335 - DNA, 53 bp, Artificial
  Synthetic oligonucleotide
aaacgttttaacaatagttaagttgctaaaaatcaataacctagatgaggatg

SEQ ID NO: 178336 - DNA, 58 bp, Artificial
  Synthetic oligonucleotide
aaactcagcactcactaactaccgggctgttgtacccaaatcaacttactgatatcaa

SEQ ID NO: 178337 - DNA, 52 bp, Artificial
  Synthetic oligonucleotide
ttgttgtttcaacccgtctttttgggtggaacaacaaggcattttagggata

SEQ ID NO: 178338 - DNA, 53 bp, Artificial
  Synthetic oligonucleotide
aaactccgttgacgccgttaaagtgcgttccgttgtatcctgcgacaccgact

SEQ ID NO: 178339 - DNA, 60 bp, Artificial
  Synthetic oligonucleotide
attgccgctgacggtagagcgttgactctgctacagaagattgccgccgcagaagattat

SEQ ID NO: 178340 - DNA, 51 bp, Artificial
  Synthetic oligonucleotide
ttgttgcctgttttaccggtttcccgtcagaaacgccctgaggccgttttc

SEQ ID NO: 178341 - DNA, 60 bp, Artificial
  Synthetic oligonucleotide
ttgttgcatagtagcggcggaacgataatgcttctctgtatttgggctgccgggctgacg

SEQ ID NO: 178342 - DNA, 60 bp, Artificial
  Synthetic oligonucleotide
ttgttattttggcgccgagcgtagcattgtaggcagcgtgtcatgggcgttttgataacg

SEQ ID NO: 178343 - DNA, 60 bp, Artificial
  Synthetic oligonucleotide
ttgttatggcgtctatatattctgcgctattcattatagcagtgtatttatcgtatgctt

SEQ ID NO: 178344 - DNA, 58 bp, Artificial
  Synthetic oligonucleotide
aaactggctgtcggggaatctcacgaagtgcgcacttatacaatctcaacttcgtttc

SEQ ID NO: 178345 - DNA, 60 bp, Artificial
  Synthetic oligonucleotide
ttgttagatcataaatattgcgaccaccatatcggcgatcactcttcgatgttggtttct

SEQ ID NO: 178346 - DNA, 60 bp, Artificial
  Synthetic oligonucleotide
tttcgtcagttgttctttcatggtgtgtctaaagcggatgcaagctgtatgtgttctgta

SEQ ID NO: 178347 - DNA, 60 bp, Artificial
  Synthetic oligonucleotide
tttcgtcaggatgagcacgaaacagtacagcggcattaacatcacgacattcgcggcgat

SEQ ID NO: 178348 - DNA, 57 bp, Artificial
  Synthetic oligonucleotide
tttcggcgtgagtccagtcattccactcacggactttctccccgaagccgtcaggcg

SEQ ID NO: 178349 - DNA, 58 bp, Artificial
  Synthetic oligonucleotide
tttcgatatgttttttcagtttttggctgacccgcctgagagagcgaggctgccacgg

SEQ ID NO: 178350 - DNA, 60 bp, Artificial
  Synthetic oligonucleotide
gagcgtgatcattaggcgtaattattacagacagtctggatataaaccggagcatacacg

SEQ ID NO: 178351 - DNA, 49 bp, Artificial
  Synthetic oligonucleotide
tttcgaccgtttagaagggcgaacgggtcaaaacggcaaactttcccca

SEQ ID NO: 178352 - DNA, 56 bp, Artificial
  Synthetic oligonucleotide
tttccgcgttccttgaccgcctttccgataccgtctctgcacgcaatacctccgga

SEQ ID NO: 178353 - DNA, 60 bp, Artificial
  Synthetic oligonucleotide
aaaatcggtccgcctcagttgagagcgaagctttacatgtctgcgctgtgcggaaaaatc

SEQ ID NO: 178354 - DNA, 58 bp, Artificial
  Synthetic oligonucleotide
tttccgcagatttaccgcgattcactctggcgttcagagaactttccactcgccttgg

SEQ ID NO: 178355 - DNA, 55 bp, Artificial
  Synthetic oligonucleotide
tttccctcagcgctaggtcaatagttctttgttcaaaccccgttgttaagagaca

SEQ ID NO: 178356 - DNA, 60 bp, Artificial
  Synthetic oligonucleotide
tttcccggatgtttttgactcacaggagtacgtggcatattcatgcagacaggcaccttc

SEQ ID NO: 178357 - DNA, 60 bp, Artificial
  Synthetic oligonucleotide
tttcatctgcttcgcattgaaatcgtcctgagcgggtgtagcgggtgcgcgtaatgagac

SEQ ID NO: 178358 - DNA, 60 bp, Artificial
  Synthetic oligonucleotide
tttcataatctcttcgataccactctgagcagaacaatgtgaaacaggctgcgtaccctt

SEQ ID NO: 178359 - DNA, 59 bp, Artificial
  Synthetic oligonucleotide
tttcagccccgtaaaacgcatctgacttccgcacagaatgcacttcagcgggtcaacct

SEQ ID NO: 178360 - DNA, 60 bp, Artificial
  Synthetic oligonucleotide
tttatcctaatgcatgcctatgcacgcaactgcatagcatatgttttgacgtaaaatgga

SEQ ID NO: 178361 - DNA, 56 bp, Artificial
  Synthetic oligonucleotide
attgcgtccatcagacgtaaaacgcttacagggcgcggacttagtcgtctgggttg

SEQ ID NO: 178362 - DNA, 57 bp, Artificial
  Synthetic oligonucleotide
tttatcagtctgttagaaacgttacgccgtacatacaggcgggcgaaaaccatcaca

SEQ ID NO: 178363 - DNA, 60 bp, Artificial
  Synthetic oligonucleotide
aaacatgtgcaatacacgcgtaagaacccggttccgggcatcatcatgaggtagcgccat

SEQ ID NO: 178364 - DNA, 53 bp, Artificial
  Synthetic oligonucleotide
tttatcaggttcccctgttgaatcggcaattcgtttcggacccggcttaagac

SEQ ID NO: 178365 - DNA, 53 bp, Artificial
  Synthetic oligonucleotide
tttatcaggcgcgattgcggcagtttttcggggggtttgttgccatttttacc

SEQ ID NO: 178366 - DNA, 55 bp, Artificial
  Synthetic oligonucleotide
tttataagagggaaaccgcattgcccaggggccacgtgcttccatacgggccgta

SEQ ID NO: 178367 - DNA, 58 bp, Artificial
  Synthetic oligonucleotide
aaaccctgcacatggcggcaaagaatacgaacccgatacaagagcagggcaccttgtc

SEQ ID NO: 178368 - DNA, 55 bp, Artificial
  Synthetic oligonucleotide
tttataaatggtttaaacgaaagattaacacttgcagatcttaataggtttctga

SEQ ID NO: 178369 - DNA, 59 bp, Artificial
  Synthetic oligonucleotide
aaaccgagatacattgcgccgtatttgaattgcgttatcacgaactgggtgcggagcca

SEQ ID NO: 178370 - DNA, 60 bp, Artificial
  Synthetic oligonucleotide
aaaccgagccagaacatcgcgtgtggctggttgaactggatgtatttcgcaagaattgcg

SEQ ID NO: 178371 - DNA, 54 bp, Artificial
  Synthetic oligonucleotide
aaaccgtgaggaaaaaagatatggtatatcgtcctttttcgctgatgcccattt

SEQ ID NO: 178372 - DNA, 60 bp, Artificial
  Synthetic oligonucleotide
gagcgtagcgactgagtgagcgaggaagcggaaaagagactggtttgacactgagcactg

SEQ ID NO: 178373 - DNA, 60 bp, Artificial
  Synthetic oligonucleotide
tttagtcagaactgactgtaatcgtgtttataggtcgtacagttcactattgtgatgtaa

SEQ ID NO: 178374 - DNA, 60 bp, Artificial
  Synthetic oligonucleotide
tgttaggtggcgataagcgcctgattgatgcacataaccaggccgtggactttgctgttc

SEQ ID NO: 178375 - DNA, 57 bp, Artificial
  Synthetic oligonucleotide
tgttaatacgatatatagaaagagccgtagattctctaaatcgcaaaaggggcccgc

SEQ ID NO: 178376 - DNA, 60 bp, Artificial
  Synthetic oligonucleotide
tgtgttggtttatagtcgtgcgtgacagtgtgacgtactattcttatgcttatgctaaaa

SEQ ID NO: 178377 - DNA, 60 bp, Artificial
  Synthetic oligonucleotide
tgtgtcagtgtgtaaacgtgtttctggatgaggtcacgggctgtccgctcttcgtatccg

SEQ ID NO: 178378 - DNA, 60 bp, Artificial
  Synthetic oligonucleotide
aacgggctttatccgcacgcatcccgctattcgtcagcgagtcgatccactctttgcgcg

SEQ ID NO: 178379 - DNA, 60 bp, Artificial
  Synthetic oligonucleotide
tgtgtcactccttcagatgtacccactctttcccctgaaagggaatcacctctgctgatt

SEQ ID NO: 178380 - DNA, 51 bp, Artificial
  Synthetic oligonucleotide
aacggtagtctttataccggggcgagtaccgaagaggcctttatggacgaa

SEQ ID NO: 178381 - DNA, 58 bp, Artificial
  Synthetic oligonucleotide
aacggtcactcacgggatgttcctctgtccagacgtgcccgtaactttcttcagatga

SEQ ID NO: 178382 - DNA, 56 bp, Artificial
  Synthetic oligonucleotide
aacggtgttattgtccagcttacgcacgctttttacattgtcggcgaactgtaggc

SEQ ID NO: 178383 - DNA, 57 bp, Artificial
  Synthetic oligonucleotide
attgcgttcagctttcaccacggaggccagcctctttccgccccatgcggaaaaggc

SEQ ID NO: 178384 - DNA, 59 bp, Artificial
  Synthetic oligonucleotide
tgtggcaacgtgaccgaaatttatgcacgaatcggtatccgttattaccggatgcgtga

SEQ ID NO: 178385 - DNA, 57 bp, Artificial
  Synthetic oligonucleotide
aacggtttacgggctgaagactggcgcagggaagatggcagtaccgggtcatattgc

SEQ ID NO: 178386 - DNA, 60 bp, Artificial
  Synthetic oligonucleotide
aacgtcataacctttgatgaatacgcagaaattcacacgccaaaagcatggaaaatgcta

SEQ ID NO: 178387 - DNA, 59 bp, Artificial
  Synthetic oligonucleotide
tgtggacaaggagtgtgcggttcggacggaatgaatattaatggacgcaatgggttgtc

SEQ ID NO: 178388 - DNA, 57 bp, Artificial
  Synthetic oligonucleotide
tgtgcgatctctcggagacgggttgtattccggcttcaattcccacgtaggtgattt

SEQ ID NO: 178389 - DNA, 56 bp, Artificial
  Synthetic oligonucleotide
tgtgattggttagttcagcgtttacaccgggagatgcgtttgacgatttactttta

SEQ ID NO: 178390 - DNA, 60 bp, Artificial
  Synthetic oligonucleotide
aacgtcgtgctgcgttacctgacgacgacgtaacaaatgatggcctgactgcacccgcta

SEQ ID NO: 178391 - DNA, 59 bp, Artificial
  Synthetic oligonucleotide
tgtgagtggtacccgggtagttcatcacgcgtgaaatacgctgcttccagttcaggcgg

SEQ ID NO: 178392 - DNA, 59 bp, Artificial
  Synthetic oligonucleotide
aacgtgaatgaagcctccgtactggtgacgcgcgcttccgatcacaatccgctactcgt

SEQ ID NO: 178393 - DNA, 59 bp, Artificial
  Synthetic oligonucleotide
aacgtgacgaattagttgcctctgtcggtcaagttattacacaactcatcctgagcacg

SEQ ID NO: 178394 - DNA, 60 bp, Artificial
  Synthetic oligonucleotide
gagcggacagaacgcttgagccagttatacagcgagaacaggagataagggacgaacggc

SEQ ID NO: 178395 - DNA, 60 bp, Artificial
  Synthetic oligonucleotide
tgtgagtcggctagaccggaaagagccggagatgagcgacaacacacctggcgacctcag

SEQ ID NO: 178396 - DNA, 60 bp, Artificial
  Synthetic oligonucleotide
tgtgaccaatgaggccggggaagcgcagtatcatcgcgtacaatttttcactaccggcga

SEQ ID NO: 178397 - DNA, 60 bp, Artificial
  Synthetic oligonucleotide
tgtgacatacgtgtcccggtatgcccagcagctctggtacatgctgtatgactgaccgtc

SEQ ID NO: 178398 - DNA, 54 bp, Artificial
  Synthetic oligonucleotide
aacgtggtgcgggcaaccaggtaaggttggcgagaccatagacacgtaactccg

SEQ ID NO: 178399 - DNA, 59 bp, Artificial
  Synthetic oligonucleotide
aacgttatcgatgataaatcggctcagcaaccggctttccaggttagctacagctatcc

SEQ ID NO: 178400 - DNA, 60 bp, Artificial
  Synthetic oligonucleotide
tgtcttcggctggcggagattgcgggtatattgcggccatgtctggcaaacctgcgtcag

SEQ ID NO: 178401 - DNA, 55 bp, Artificial
  Synthetic oligonucleotide
aacgccgcatcctttttccggcccttactgatccctcgctattccgtcatcctgt

SEQ ID NO: 178402 - DNA, 60 bp, Artificial
  Synthetic oligonucleotide
ttaagtgtagggtctgatggtgtaccagactcatcaacgtataagagatgcatcgaagat

SEQ ID NO: 178403 - DNA, 58 bp, Artificial
  Synthetic oligonucleotide
ttaaggctgcgccttttgctccggttttaacggtgcaatggtagcttgccatctgcct

SEQ ID NO: 178404 - DNA, 58 bp, Artificial
  Synthetic oligonucleotide
ttaaggccggtgaacttcacccacgcatcccagacggaactgatttcctgctcagtac

SEQ ID NO: 178405 - DNA, 60 bp, Artificial
  Synthetic oligonucleotide
attgctctcgataaaatcgggaagttacagggcgcgcagtttcaacattgcgaaatgaca

SEQ ID NO: 178406 - DNA, 56 bp, Artificial
  Synthetic oligonucleotide
aacgcctcacagaccgcgaaaggatttcgcgtcccgttcaccgtttggctgtgatg

SEQ ID NO: 178407 - DNA, 59 bp, Artificial
  Synthetic oligonucleotide
ttaactttgctctgcaaccggccactaacaccaccgttgaagcaggcagtaaatggcag

SEQ ID NO: 178408 - DNA, 60 bp, Artificial
  Synthetic oligonucleotide
ttaacccatggtgcatttcaagactggcgtcacagcgtaatgagcgatcgcgtccggctg

SEQ ID NO: 178409 - DNA, 60 bp, Artificial
  Synthetic oligonucleotide
ttaaatctttcaccgcatccatcgtgtcagatctggcaaaaatttcagcacgtatggcaa

SEQ ID NO: 178410 - DNA, 51 bp, Artificial
  Synthetic oligonucleotide
ttaaatcacgattgatagtaaaatttttattaaaaatttattttattatta

SEQ ID NO: 178411 - DNA, 58 bp, Artificial
  Synthetic oligonucleotide
ttaaagcggtagcggtcataacggacagaggctgcgaagagaagggccagagcaaagg

SEQ ID NO: 178412 - DNA, 54 bp, Artificial
  Synthetic oligonucleotide
ttaaaccggcaagtttatgaaccgtggtaacagggtgtacaagaccgctgccac

SEQ ID NO: 178413 - DNA, 55 bp, Artificial
  Synthetic oligonucleotide
tgttttaacaggtaaaaatgttcgcgaattcactgaaatactaactcgtactaga

SEQ ID NO: 178414 - DNA, 56 bp, Artificial
  Synthetic oligonucleotide
aacgctggcgatctacggtatagacaaaacggcggcacgtaaaacctggcgcagag

SEQ ID NO: 178415 - DNA, 57 bp, Artificial
  Synthetic oligonucleotide
tgtttgagcaatacccccgttcaacccgactaccgcgctcatccggcaacatactct

SEQ ID NO: 178416 - DNA, 60 bp, Artificial
  Synthetic oligonucleotide
gagcgccacattcttgtggtatgaaatatcggctcaggggactggcccgcttgcaaacat

SEQ ID NO: 178417 - DNA, 55 bp, Artificial
  Synthetic oligonucleotide
tgtttctttagaccactaggacctagtttagttaactcactcagagtgtacttag

SEQ ID NO: 178418 - DNA, 60 bp, Artificial
  Synthetic oligonucleotide
tgtttcgctccggttcagagtaacagtgcaggtgactctgatttaccataacatctgtta

SEQ ID NO: 178419 - DNA, 56 bp, Artificial
  Synthetic oligonucleotide
aacggagttccatgtggctgctctgtaaataaaaaacctaacccctcaagcatagc

SEQ ID NO: 178420 - DNA, 60 bp, Artificial
  Synthetic oligonucleotide
tgtttcattactctcctcatggaagcttgcaggaaagtgaatggctcaacccgtgatgtg

SEQ ID NO: 178421 - DNA, 60 bp, Artificial
  Synthetic oligonucleotide
tgttgttagacaggtgcttgaaatgagcgggccatgcatctcttcggatcttgcagagag

SEQ ID NO: 178422 - DNA, 60 bp, Artificial
  Synthetic oligonucleotide
tgttggtatcactcatttcctgtctccgaatggaagatggtcagcacacagtgttgaccg

SEQ ID NO: 178423 - DNA, 60 bp, Artificial
  Synthetic oligonucleotide
tgttctgctcatttcgtgactccgtgcgcggtgaaaaatcgcattttagcgcgtcactgg

SEQ ID NO: 178424 - DNA, 60 bp, Artificial
  Synthetic oligonucleotide
tgttcgccgtcactagcgcccgctgattgagtgggtcattcgggtcatgcaaccctaatt

SEQ ID NO: 178425 - DNA, 55 bp, Artificial
  Synthetic oligonucleotide
tgttcacaacaaaaggcgtcgtgattttaccgtcaactgaattgaccaaaccaaa

SEQ ID NO: 178426 - DNA, 60 bp, Artificial
  Synthetic oligonucleotide
tgttatgaatacattatcatcggattactatattgcaggcatatatagagaaaaagcctc

SEQ ID NO: 178427 - DNA, 52 bp, Artificial
  Synthetic oligonucleotide
gagcgattttgaggcgttttcagggggtaagacgtaggatttaatgggttac

SEQ ID NO: 178428 - DNA, 57 bp, Artificial
  Synthetic oligonucleotide
tgttagttgaccagttgtcaacttcactctccgctacaatgggtgttccctgtttta

SEQ ID NO: 178429 - DNA, 60 bp, Artificial
  Synthetic oligonucleotide
tgttagtgggctagatgttgagcttatagatgtttcttgcgagagtgaatgggaagaaca

SEQ ID NO: 178430 - DNA, 58 bp, Artificial
  Synthetic oligonucleotide
aacttgtagttcgagtggcaagagctattgactggaaagtcaccccacacgaactgcg

SEQ ID NO: 178431 - DNA, 60 bp, Artificial
  Synthetic oligonucleotide
aacttgttcagctactgatggacccattgtatctaggtagtcaactagctttgttagatc

SEQ ID NO: 178432 - DNA, 60 bp, Artificial
  Synthetic oligonucleotide
tgtattgctgcttgtgtagcgatacagatgtttagtttagaaattagctttcaacaggga

SEQ ID NO: 178433 - DNA, 60 bp, Artificial
  Synthetic oligonucleotide
tgtattatgagctgcttcacaaccccggccattcttgaaatgcctggccactacctttgg

SEQ ID NO: 178434 - DNA, 58 bp, Artificial
  Synthetic oligonucleotide
aagaaaagtccagatgaccaagtcttctcgagcgagtcagaggataatgtttgttatt

SEQ ID NO: 178435 - DNA, 55 bp, Artificial
  Synthetic oligonucleotide
aagaaacggtggaaaatatccagggaaatatgatcttttgagcgaatttttcaga

SEQ ID NO: 178436 - DNA, 60 bp, Artificial
  Synthetic oligonucleotide
tgtatgcatgagtctaaatgactcgactttaaatcggtcttgtcagcctcataagcacgc

SEQ ID NO: 178437 - DNA, 56 bp, Artificial
  Synthetic oligonucleotide
aagaacatgccctgatataaatctataagcgctatcctcttttagtcctttacggt

SEQ ID NO: 178438 - DNA, 60 bp, Artificial
  Synthetic oligonucleotide
gcagtccggctacctcttcccgcagcgctttaatctccgaaatcagtgcctcagacaccg

SEQ ID NO: 178439 - DNA, 56 bp, Artificial
  Synthetic oligonucleotide
gagcgagcgtgcgcggtccgacattcccacatcctgtcccgaaaattcccgccgtt

SEQ ID NO: 178440 - DNA, 59 bp, Artificial
  Synthetic oligonucleotide
tgtataaaacagaatgtccagatcgatatttgttgttaagtgtgctctggaaaatttgg

SEQ ID NO: 178441 - DNA, 57 bp, Artificial
  Synthetic oligonucleotide
aagaagaactggtttactcccgaaagtgcaaagaccgacagtgagttgatggattgc

SEQ ID NO: 178442 - DNA, 60 bp, Artificial
  Synthetic oligonucleotide
aagaattggtcgaaatctgtgactgtcaatactggaatgtatctcagaaaataagtcaaa

SEQ ID NO: 178443 - DNA, 60 bp, Artificial
  Synthetic oligonucleotide
aagaccaatgcggagcatatacgcccggagccgcggcgatcctgcaagctccggatgcct

SEQ ID NO: 178444 - DNA, 57 bp, Artificial
  Synthetic oligonucleotide
tgtagggtttgatcacaacgctggataaaattctggatagacggtttatccacccag

SEQ ID NO: 178445 - DNA, 55 bp, Artificial
  Synthetic oligonucleotide
tgtaggccggataagacgtttacgtcgcctccggcattaacgccgtgttattgcc

SEQ ID NO: 178446 - DNA, 60 bp, Artificial
  Synthetic oligonucleotide
tgtaggcatatctcactgcactggatactttacatcctactgacgatgtagagtatccgc

SEQ ID NO: 178447 - DNA, 60 bp, Artificial
  Synthetic oligonucleotide
tgtaggaagctaagcaatcaagggtttcatgttatacgttatgataatcgggatgtaggc

SEQ ID NO: 178448 - DNA, 60 bp, Artificial
  Synthetic oligonucleotide
tgtagctgtccatttcgctcaggcgtgaggtgatgatcgtgccttgaaaccaaattatcc

SEQ ID NO: 178449 - DNA, 56 bp, Artificial
  Synthetic oligonucleotide
aagatagccccggccttccgaccggggcattatctttaatactgattgaacatcga

SEQ ID NO: 178450 - DNA, 60 bp, Artificial
  Synthetic oligonucleotide
gagcgaagatgcagcgctacagacgcgacgttcgcacagtcccccacaaccgctatcatc

SEQ ID NO: 178451 - DNA, 57 bp, Artificial
  Synthetic oligonucleotide
tgtagccgcaacgttaaagctgccgtcagggtcgctcagggtaaaggtgccgtgggc

SEQ ID NO: 178452 - DNA, 60 bp, Artificial
  Synthetic oligonucleotide
aagatgagtagatcttatgtttgaacgcgttcaagcaagaatgacttccgatcttttcat

SEQ ID NO: 178453 - DNA, 57 bp, Artificial
  Synthetic oligonucleotide
aagattaagctccggtcttcaggctatcgccttgtataccaggttatagacgagaaa

SEQ ID NO: 178454 - DNA, 60 bp, Artificial
  Synthetic oligonucleotide
tgtaaaccgtgcacaggcgtgttcttacggagcggcactttcatttatctgcacgcgaac

SEQ ID NO: 178455 - DNA, 58 bp, Artificial
  Synthetic oligonucleotide
tgtaaaacattcaaaccttcaagaatcaatatatcaggctgagcgacggttttatccc

SEQ ID NO: 178456 - DNA, 54 bp, Artificial
  Synthetic oligonucleotide
tgtaaaaaacccccatccgtgctatcggccgcccaaagaggacgtgaagccgcc

SEQ ID NO: 178457 - DNA, 60 bp, Artificial
  Synthetic oligonucleotide
tggttgacagtaccttcaaacgtattctcctgctcactgcgacaggcagtgtaaatataa

SEQ ID NO: 178458 - DNA, 57 bp, Artificial
  Synthetic oligonucleotide
tggttacacgcttaagactgagaacgtcatttatcgtatattctatttcgttgcggg

SEQ ID NO: 178459 - DNA, 59 bp, Artificial
  Synthetic oligonucleotide
tgtcttcaccctatctcaccagacgtaacggcaaactgtctggcgtgggtgaagataag

SEQ ID NO: 178460 - DNA, 57 bp, Artificial
  Synthetic oligonucleotide
aactacgaggtattgccggtgcgagtcttgttggtcccgtggtggcaactgctgtag

SEQ ID NO: 178461 - DNA, 60 bp, Artificial
  Synthetic oligonucleotide
gagccgtcacgctgtatatcctgtacgtgggctattctactcttggggggaagctacaga

SEQ ID NO: 178462 - DNA, 60 bp, Artificial
  Synthetic oligonucleotide
aactagtccgcagatatgcattggatatcttgagtggattctctgtgcgcacttggtgga

SEQ ID NO: 178463 - DNA, 58 bp, Artificial
  Synthetic oligonucleotide
aactatagttgtgcgtcgcggtaagtagtgtcgctgtaagtattgagtaacacgctcg

SEQ ID NO: 178464 - DNA, 60 bp, Artificial
  Synthetic oligonucleotide
tgtctgctgatcatgaggtttttctgagtgtccttgagtgtgcctttctggtgtctcatt

SEQ ID NO: 178465 - DNA, 60 bp, Artificial
  Synthetic oligonucleotide
aactccccgggattatcaatagctctgcggagacgttcagcatgtatctggagcagcaga

SEQ ID NO: 178466 - DNA, 60 bp, Artificial
  Synthetic oligonucleotide
aactctagcgcatgagatggttcatgtatggcagttccatatgcctgacgtgaagaaatg

SEQ ID NO: 178467 - DNA, 55 bp, Artificial
  Synthetic oligonucleotide
aactctcaggcttaaaggtaaactgacgccggcgttattacagacacttatccgc

SEQ ID NO: 178468 - DNA, 60 bp, Artificial
  Synthetic oligonucleotide
tgtctcgtttagctgctgcacgggctctgattagatcccgcatagcttcatgagtcaggt

SEQ ID NO: 178469 - DNA, 60 bp, Artificial
  Synthetic oligonucleotide
tgtctcgctgtagccggctctggagagcgactcgggggaggagtagtatcttccggccac

SEQ ID NO: 178470 - DNA, 60 bp, Artificial
  Synthetic oligonucleotide
aactgagagatcggaatagattaagcatccggggagagcctccttctctaaagagcgtga

SEQ ID NO: 178471 - DNA, 60 bp, Artificial
  Synthetic oligonucleotide
tgtctccttcactggtcgccccaactggtgcatataatacactaccttcggcaatagtag

SEQ ID NO: 178472 - DNA, 57 bp, Artificial
  Synthetic oligonucleotide
gagcatgccagcgcgaaggacacaaaccgcccggggttacaggaactcctggggcaa

SEQ ID NO: 178473 - DNA, 58 bp, Artificial
  Synthetic oligonucleotide
tgtctattggatatcaaaaagggtttaagttatccagaactgctcccacagtatggaa

SEQ ID NO: 178474 - DNA, 60 bp, Artificial
  Synthetic oligonucleotide
aactgccgtgcctttgtcggtaattcgagcttgctgacaggacaggatgtgcaattgtta

SEQ ID NO: 178475 - DNA, 56 bp, Artificial
  Synthetic oligonucleotide
tgtcggcagggaagcgttataacttttttcgctggtcagcgtacgtgtaatacgcc

SEQ ID NO: 178476 - DNA, 60 bp, Artificial
  Synthetic oligonucleotide
tgtcgattactttctgaccgtcatagccgttagctgccaagctagcttgaacgggagcac

SEQ ID NO: 178477 - DNA, 57 bp, Artificial
  Synthetic oligonucleotide
tgtcctgaccttcgcacgcttcaacgtaggtatagttggacgcccccattacggcca

SEQ ID NO: 178478 - DNA, 60 bp, Artificial
  Synthetic oligonucleotide
tgtccggacgaggaagctgaatagtccacaatggttgtggctttagcgcattctcacggt

SEQ ID NO: 178479 - DNA, 60 bp, Artificial
  Synthetic oligonucleotide
tgtccgcagagcagggcgataagttcagcgataccagtaagcagaacaaaagtcagggct

SEQ ID NO: 178480 - DNA, 60 bp, Artificial
  Synthetic oligonucleotide
tgtccctgcatggacagttgtgtattacgcaggcttatatcatttgttgtgtccacgccc

SEQ ID NO: 178481 - DNA, 60 bp, Artificial
  Synthetic oligonucleotide
tgtcatagttcatttggattgtgttgtagtcgtaggcttcgcgattgagtacgtactgat

SEQ ID NO: 178482 - DNA, 60 bp, Artificial
  Synthetic oligonucleotide
tgtcaggcaaactatatccgcgatgttcagggcgggactgtatccccgtcatcctcagct

SEQ ID NO: 178483 - DNA, 60 bp, Artificial
  Synthetic oligonucleotide
gagttttatctctgataaaacatcaactctgaccagagtgaggttctctacatccaacat

SEQ ID NO: 178484 - DNA, 56 bp, Artificial
  Synthetic oligonucleotide
tgtcaggagctaaccacgtacatattatggcaaaacattataacgttcccgtaatt

SEQ ID NO: 178485 - DNA, 53 bp, Artificial
  Synthetic oligonucleotide
tgtcaaacgaaatgaggacgggacgttactcttcccccgtcactccgataaac

SEQ ID NO: 178486 - DNA, 58 bp, Artificial
  Synthetic oligonucleotide
ttccggcagtacgttgtcacacagacggttccaccacaccgatacatcctcgttactc

SEQ ID NO: 178487 - DNA, 60 bp, Artificial
  Synthetic oligonucleotide
ttccctgagccaacacctattgatgcaatcaataccggtgcagtacctgtgtttactgcg

SEQ ID NO: 178488 - DNA, 58 bp, Artificial
  Synthetic oligonucleotide
ttccctccagttcttcccgcttactgagtatcagttcccggtcaatattgctgtacaa

SEQ ID NO: 178489 - DNA, 55 bp, Artificial
  Synthetic oligonucleotide
ttcccggtaagagtacttatgactctgttaggcgcggtacttcttatttccgcga

SEQ ID NO: 178490 - DNA, 54 bp, Artificial
  Synthetic oligonucleotide
ttcccggagagaaaactgtcgaaaactgacggtatgaacaccgtaagctcccaa

SEQ ID NO: 178491 - DNA, 56 bp, Artificial
  Synthetic oligonucleotide
ttccccgctgccagggactctatcgcagaagtaaactttaactccggttctgccag

SEQ ID NO: 178492 - DNA, 57 bp, Artificial
  Synthetic oligonucleotide
aaccaggtaactgtcttgtgcgagacgagtcaccaaaactgtcctttcagtgtagcc

SEQ ID NO: 178493 - DNA, 56 bp, Artificial
  Synthetic oligonucleotide
ttccaggcaaccgagttatcctctgttagaaggactccacttttgttatatacacg

SEQ ID NO: 178494 - DNA, 57 bp, Artificial
  Synthetic oligonucleotide
gagttgcttaaaagcgggagagaggtaatgcgaattaaacctgacgataactggcgc

SEQ ID NO: 178495 - DNA, 57 bp, Artificial
  Synthetic oligonucleotide
ttccagaactcctggcgggtttgtccggtagcaacatccctgatggtcagacgaaaa

SEQ ID NO: 178496 - DNA, 56 bp, Artificial
  Synthetic oligonucleotide
ttccacgcccaccaaatcaggaaaaaacacccgtttcagttacatcaggcaggcaa

SEQ ID NO: 178497 - DNA, 59 bp, Artificial
  Synthetic oligonucleotide
ttccaagtgtagggagatatagtcaaagtttgcttctccgccgatgagtccgccctgcg

SEQ ID NO: 178498 - DNA, 57 bp, Artificial
  Synthetic oligonucleotide
aacccatcttttcgtttctctactaaagctatgagtcctatcccgctcaggtaggca

SEQ ID NO: 178499 - DNA, 60 bp, Artificial
  Synthetic oligonucleotide
ttcattttccgaatataggctagtgcttcagcgtaacgaacctctattgcgtcactggcg

SEQ ID NO: 178500 - DNA, 60 bp, Artificial
  Synthetic oligonucleotide
ttcatttaggcgcaatctgacagcagccgataagttgcggggtttcagatctgctggttt

SEQ ID NO: 178501 - DNA, 58 bp, Artificial
  Synthetic oligonucleotide
aacccctgtcagaatgtttatgtcggggcttatgttttagcaaataacatatctagca

SEQ ID NO: 178502 - DNA, 60 bp, Artificial
  Synthetic oligonucleotide
ttcattgcagacgcattagaacgatcgcaaaaggctatatttatctgtacagttggaaat

SEQ ID NO: 178503 - DNA, 60 bp, Artificial
  Synthetic oligonucleotide
ttcatcttttcgttttctccgttctgtctgtcatctgcgttgtgtgattatatcgcgtac

SEQ ID NO: 178504 - DNA, 60 bp, Artificial
  Synthetic oligonucleotide
ttcagtggacgaaccagcatcgcgactaaatagcggtcggttaacagcaaaatagcgatc

SEQ ID NO: 178505 - DNA, 60 bp, Artificial
  Synthetic oligonucleotide
attcagaatgaaggtgttaacaacattgtctttcattcccaaatctgctaattctgaaga

SEQ ID NO: 178506 - DNA, 54 bp, Artificial
  Synthetic oligonucleotide
aacccgcgactttttgtttatgaccgtgaccgcggtatggagccgttcattcga

SEQ ID NO: 178507 - DNA, 55 bp, Artificial
  Synthetic oligonucleotide
aacccggaacgatcttcactatgttaagggatactggcggcataaaaccccatga

SEQ ID NO: 178508 - DNA, 60 bp, Artificial
  Synthetic oligonucleotide
ttcaggctgaaatctgccaccagtcagtctggtgcataacgattcatgcccgtaaaacgc

SEQ ID NO: 178509 - DNA, 56 bp, Artificial
  Synthetic oligonucleotide
aaccctgtttatggcgctcagccggattacattacgttgtatagccgtgaaaaaca

SEQ ID NO: 178510 - DNA, 56 bp, Artificial
  Synthetic oligonucleotide
aacccttaccttgtcaatatgacggccaagcttatcgacttcctttataatcagag

SEQ ID NO: 178511 - DNA, 60 bp, Artificial
  Synthetic oligonucleotide
ttcagcgatttcgcatcgttttacttgtcagtttgaatgatgttaaaaacgcactcagaa

SEQ ID NO: 178512 - DNA, 60 bp, Artificial
  Synthetic oligonucleotide
ttcacgcactattactggcagggatcgctcactctgcatatgcgtcggaaaaattaacct

SEQ ID NO: 178513 - DNA, 60 bp, Artificial
  Synthetic oligonucleotide
aacactgaatggactcctgggtttatcagtgcttgctacaggagatgccagtgcactcga

SEQ ID NO: 178514 - DNA, 48 bp, Artificial
  Synthetic oligonucleotide
aacacttcacggaaccggattaaaatccgttcccgttcaccgtttctt

SEQ ID NO: 178515 - DNA, 60 bp, Artificial
  Synthetic oligonucleotide
aacagaatgccgtaaggctgctacaggagtaacagagcatgacggagctggaaagacatt

SEQ ID NO: 178516 - DNA, 60 bp, Artificial
  Synthetic oligonucleotide
gagttcagccagttgactgagcatccagatggttgggatcttatttatcatcctcaagca

SEQ ID NO: 178517 - DNA, 52 bp, Artificial
  Synthetic oligonucleotide
aacagcatcgcgaaacgggccggagtgaattttcggttttttacgatacacg

SEQ ID NO: 178518 - DNA, 60 bp, Artificial
  Synthetic oligonucleotide
ttcgtattctttgccgccatgtgcagggttttctgtcatgtacaggaagtcctgcgtttc

SEQ ID NO: 178519 - DNA, 54 bp, Artificial
  Synthetic oligonucleotide
aacagggtgtacaagaccgctgccaccaaattcgtccttccagtttagccgtag

SEQ ID NO: 178520 - DNA, 59 bp, Artificial
  Synthetic oligonucleotide
ttcgtatcgcgatagttgtagtaacctagccgacgctggttattcaatgcctcaaggta

SEQ ID NO: 178521 - DNA, 60 bp, Artificial
  Synthetic oligonucleotide
ttcggtcacaccggtcgatcagacgctgatgctctgagtcggtcaggcggattttgatct

SEQ ID NO: 178522 - DNA, 59 bp, Artificial
  Synthetic oligonucleotide
ttcggtacgcccgacttgaggtcagaaacgaatttcaccagtcggtgcatatcatacga

SEQ ID NO: 178523 - DNA, 52 bp, Artificial
  Synthetic oligonucleotide
ttcgggccactccttgaaaattgagttactttatttacgggagttaaatggc

SEQ ID NO: 178524 - DNA, 60 bp, Artificial
  Synthetic oligonucleotide
aacagtgcaaccagtgagttaatgactcgaaccgtagagatcatttatccgactggagac

SEQ ID NO: 178525 - DNA, 56 bp, Artificial
  Synthetic oligonucleotide
ttcgcttccgaaagtatgaaaaaaatccgtttcagcggtctctgactggcaattcc

SEQ ID NO: 178526 - DNA, 60 bp, Artificial
  Synthetic oligonucleotide
ttcgcggtgcgcaacaaagagcgagaaattcccattggtgacagtgcggccgagttcctg

SEQ ID NO: 178527 - DNA, 60 bp, Artificial
  Synthetic oligonucleotide
gagttagtgacgtatctgacgtgggggcactcaggtttatcgcagatgtattccttcact

SEQ ID NO: 178528 - DNA, 60 bp, Artificial
  Synthetic oligonucleotide
aacatcacgttctggtcgagctgcaataaaacatcgaatgaaagaattaggatatttaga

SEQ ID NO: 178529 - DNA, 60 bp, Artificial
  Synthetic oligonucleotide
ttcgagcctcataaggactgtgagcactatgacttggcccggaggacttacataggcttt

SEQ ID NO: 178530 - DNA, 59 bp, Artificial
  Synthetic oligonucleotide
aacatcatgttttatatgggaaaacaagcagccaccaaatattgctttatctagattta

SEQ ID NO: 178531 - DNA, 55 bp, Artificial
  Synthetic oligonucleotide
ttcgaagaaatacacgtcaggcgttctgtcgttcgcggagaaggagttaccgccg

SEQ ID NO: 178532 - DNA, 53 bp, Artificial
  Synthetic oligonucleotide
ttccttagcgtttgttatcgcagaaattcccacggaccccattttgtccgaac

SEQ ID NO: 178533 - DNA, 59 bp, Artificial
  Synthetic oligonucleotide
ttcctggatacccgcaccgctgatacgcacaaactccgctttagtacgcagttcgtcga

SEQ ID NO: 178534 - DNA, 57 bp, Artificial
  Synthetic oligonucleotide
ttccggtaaccctctaccaactcgagctgttctgctcccgttttgcgtatggccgca

SEQ ID NO: 178535 - DNA, 60 bp, Artificial
  Synthetic oligonucleotide
ttccgggcgctcaagacgggtgccggattcattctcaatatagtagctgcaaatgatcag

SEQ ID NO: 178536 - DNA, 51 bp, Artificial
  Synthetic oligonucleotide
ttccgggaggttgccagatggtaccggaacgcgttaaaaacgaatccgggc

SEQ ID NO: 178537 - DNA, 52 bp, Artificial
  Synthetic oligonucleotide
ttccggcggtttttcatttaaggccgcgtttatctccggtatcgaatgtaaa

SEQ ID NO: 178538 - DNA, 60 bp, Artificial
  Synthetic oligonucleotide
gagtgggaatcaaaagatcgccagagagcgaaacatgacagcgagggaagccgcgaaaaa

SEQ ID NO: 178539 - DNA, 55 bp, Artificial
  Synthetic oligonucleotide
aaccaaaaccttatacagcctgacttttaaacatcgatatggctgggtaaggtca

SEQ ID NO: 178540 - DNA, 60 bp, Artificial
  Synthetic oligonucleotide
aaccaacatcgaccctattccaccctcgacagatacatatgttgatttgtccatagcgta

SEQ ID NO: 178541 - DNA, 56 bp, Artificial
  Synthetic oligonucleotide
aaccacatgcttcggataccagtagcggttaaaactgtcccactggacaccctctg

SEQ ID NO: 178542 - DNA, 60 bp, Artificial
  Synthetic oligonucleotide
ttagcacctaaatagtcgctaatgttcttcgcaccattttcactggtcgcagtcccgata

SEQ ID NO: 178543 - DNA, 60 bp, Artificial
  Synthetic oligonucleotide
ttacttttgtccaaggattcgcacattgacagcctgaaacaggccatgctccttcttgaa

SEQ ID NO: 178544 - DNA, 58 bp, Artificial
  Synthetic oligonucleotide
ttacggtggcctggcttgaacttccggacagcgatccgcttgacgcaccggataacaa

SEQ ID NO: 178545 - DNA, 57 bp, Artificial
  Synthetic oligonucleotide
aaccttcgctaacccgcgcagataaaccctgtgcaaggctctcaatccgctctttaa

SEQ ID NO: 178546 - DNA, 56 bp, Artificial
  Synthetic oligonucleotide
ttacggaacgccgcaggcgttttgtaaacatcggtgacgtgcctcggtctattcac

SEQ ID NO: 178547 - DNA, 59 bp, Artificial
  Synthetic oligonucleotide
ttacgagatacagtgctggttgaaggcaggctctcagcaatactttacccgggaattgg

SEQ ID NO: 178548 - DNA, 58 bp, Artificial
  Synthetic oligonucleotide
aacgaataaccactcccgaatcatgaagccatgtcttaacgaaaatatggctaactca

SEQ ID NO: 178549 - DNA, 60 bp, Artificial
  Synthetic oligonucleotide
atctgatgctacgcaaaccatccccatggtcagttgacagccggaaacacgcgggtgtcg

SEQ ID NO: 178550 - DNA, 53 bp, Artificial
  Synthetic oligonucleotide
gagtggaaaaccgaggtcagaaagtaccgtcgctcaccgacgaaagataaaac

SEQ ID NO: 178551 - DNA, 56 bp, Artificial
  Synthetic oligonucleotide
aacgaatatacccgtcagctggatgaaaccactcagaacgccttttatgagcggtt

SEQ ID NO: 178552 - DNA, 60 bp, Artificial
  Synthetic oligonucleotide
ttacctgtcgccaggcggggctgtgatggtctcggatatacgtgagggaatgccagaatc

SEQ ID NO: 178553 - DNA, 60 bp, Artificial
  Synthetic oligonucleotide
aacgacaacacgccggaggtatatttcttcgcatacgggctactatcaatgagagctata

SEQ ID NO: 178554 - DNA, 58 bp, Artificial
  Synthetic oligonucleotide
ttacctggaccacaaaacgggagaaacggcgatggaaacgctgacacagcgtgagctg

SEQ ID NO: 178555 - DNA, 58 bp, Artificial
  Synthetic oligonucleotide
ttaccgcgtgaactgacacgcgaacaacggatagaacttgttgaagatttcgtgcaaa

SEQ ID NO: 178556 - DNA, 57 bp, Artificial
  Synthetic oligonucleotide
aacgatatttcctgagtttattctcgtctcccgacatggtcttatttcctgtcagag

SEQ ID NO: 178557 - DNA, 60 bp, Artificial
  Synthetic oligonucleotide
ttaccgcgccatagcggaagaaggtatgaagcacgggcaagggcgggcattcatcattgc

SEQ ID NO: 178558 - DNA, 59 bp, Artificial
  Synthetic oligonucleotide
ttacccgctggcacttatcgtgttgactggcgcgcggtttcttcagatacgcaccctat

SEQ ID NO: 178559 - DNA, 60 bp, Artificial
  Synthetic oligonucleotide
ttacccgccattgcactaaataccgataatgtggtcttaactgcgatcgctaacgatcgc

SEQ ID NO: 178560 - DNA, 58 bp, Artificial
  Synthetic oligonucleotide
ttaccataactcctgttgtatgcaccccttaaaacgccctcagacgctttctgacgca

SEQ ID NO: 178561 - DNA, 59 bp, Artificial
  Synthetic oligonucleotide
attcagttaacgctaatccaagatagaccgttatgctatctgctcgaacaactacttct

SEQ ID NO: 178562 - DNA, 57 bp, Artificial
  Synthetic oligonucleotide
ttacacgggggatagacgctctttatcatgtcggggagataaaaggccgtcaggatg

SEQ ID NO: 178563 - DNA, 59 bp, Artificial
  Synthetic oligonucleotide
aacgcaggagtcgttcggaaagtagctgttccagaattataggcgcagagacactagat

SEQ ID NO: 178564 - DNA, 57 bp, Artificial
  Synthetic oligonucleotide
ttacacgaggcctagaggtgctttaccatgccggggagataaaaggccgtcaggatg

SEQ ID NO: 178565 - DNA, 59 bp, Artificial
  Synthetic oligonucleotide
ttacaatgaatgacacagctagactttattgggtaatgagaaggtactaaaacatctaa

SEQ ID NO: 178566 - DNA, 52 bp, Artificial
  Synthetic oligonucleotide
ttaattgttttaacgcttaaaagagggacttttatgagcggtggggatggac

SEQ ID NO: 178567 - DNA, 58 bp, Artificial
  Synthetic oligonucleotide
ttaatctgcggtagaccgttaccactccaggcatgttgtgaggtcaacccggcgataa

SEQ ID NO: 178568 - DNA, 54 bp, Artificial
  Synthetic oligonucleotide
ttaatactaattctttcgcaacgtctaccagatttactcccataccggtagaaa

SEQ ID NO: 178569 - DNA, 58 bp, Artificial
  Synthetic oligonucleotide
ttaagttggttttgagcttcgactttagccgcgtcgatttgaagagatagcgtctgat

SEQ ID NO: 178570 - DNA, 60 bp, Artificial
  Synthetic oligonucleotide
ttcaattgagtcacttccgccattaatgacctaccacacgtcgaccaaagcgactttgca

SEQ ID NO: 178571 - DNA, 60 bp, Artificial
  Synthetic oligonucleotide
ttcaatcgcccattcagggttggcgtcgatggcaacaggtatccctgcctgagcgccgga

SEQ ID NO: 178572 - DNA, 60 bp, Artificial
  Synthetic oligonucleotide
attcatcgccacgttatcgctgtactgtagcgcggccgcgctaagctcagccagtgacat

SEQ ID NO: 178573 - DNA, 57 bp, Artificial
  Synthetic oligonucleotide
ttcaaagctcgccatcagctttttcgcgctgcccgggcggtaaatccttttcggcaa

SEQ ID NO: 178574 - DNA, 60 bp, Artificial
  Synthetic oligonucleotide
ttattgccggagatcctctatgttgccgcgctacgcccgctatcggcgctcaaggatagc

SEQ ID NO: 178575 - DNA, 56 bp, Artificial
  Synthetic oligonucleotide
aaccggcgccgggccgtaactatggcgttgggctatcggtcagctatcagtttgat

SEQ ID NO: 178576 - DNA, 51 bp, Artificial
  Synthetic oligonucleotide
aaccggcggtgccgagtaaaaaacgggattgcggcacaaagtcgtaaaaca

SEQ ID NO: 178577 - DNA, 60 bp, Artificial
  Synthetic oligonucleotide
ttattaccaactttagacaatgtagataagccgcattcatcagataattgttctactgat

SEQ ID NO: 178578 - DNA, 60 bp, Artificial
  Synthetic oligonucleotide
ttatgtcccggctcaagctgcgcggtaagtgcagaaaagaccgctctgtctgcaagcgtt

SEQ ID NO: 178579 - DNA, 55 bp, Artificial
  Synthetic oligonucleotide
ttatgtaatcctgtatcttcgccgtgttcttacctaccgtatcgacgtagtaccc

SEQ ID NO: 178580 - DNA, 60 bp, Artificial
  Synthetic oligonucleotide
ttatgattggctggctaaaagatatcaccggtagcttcaatagcggactctggtttgtcg

SEQ ID NO: 178581 - DNA, 60 bp, Artificial
  Synthetic oligonucleotide
ttatgaggcggcagagcagatggtgagagaacagcgacatatgaggtgtgaaatgctgca

SEQ ID NO: 178582 - DNA, 60 bp, Artificial
  Synthetic oligonucleotide
ttatcttcgcaaccgccgagtatgtaaagcgtctgcgtgaagagtgcctgcgggagaata

SEQ ID NO: 178583 - DNA, 56 bp, Artificial
  Synthetic oligonucleotide
gagtgcttccacccgtagtgaccagttcctttggcctaatgacccatacccattaa

SEQ ID NO: 178584 - DNA, 60 bp, Artificial
  Synthetic oligonucleotide
ttatctcagcgtgtcggggaactcgagacacagaacagtcagttagccatgcaatacagg

SEQ ID NO: 178585 - DNA, 56 bp, Artificial
  Synthetic oligonucleotide
ttatcggacggccggaacatttcgtacagcctttacgttcagtgagttagctggcc

SEQ ID NO: 178586 - DNA, 57 bp, Artificial
  Synthetic oligonucleotide
aaccgtttgtcagccacagtcaaatccaacagactactgaggtctgacgggcccgga

SEQ ID NO: 178587 - DNA, 60 bp, Artificial
  Synthetic oligonucleotide
ttatccgcacgcatcccgctattcgtcagcgagtcgatccactctttgcgcgtcagagtt

SEQ ID NO: 178588 - DNA, 60 bp, Artificial
  Synthetic oligonucleotide
ttatcaaatccctcagcacgggccagggaaagacgtgtcagctcttccgtggcatcagta

SEQ ID NO: 178589 - DNA, 53 bp, Artificial
  Synthetic oligonucleotide
aacctgactagcacctcattagtttttgttctcccactacgttcccgggcacc

SEQ ID NO: 178590 - DNA, 51 bp, Artificial
  Synthetic oligonucleotide
ttatatttcaaaacccggcccgttaccggagaacaccaccacacaggcccc

SEQ ID NO: 178591 - DNA, 57 bp, Artificial
  Synthetic oligonucleotide
ttatatccggtggtatatacccgattccatttgacgccgttagctgggatgtttgaa

SEQ ID NO: 178592 - DNA, 59 bp, Artificial
  Synthetic oligonucleotide
ttaggccgcaactgcactctgttcgataaaacacggaagtgggcttatcgcgctatccg

SEQ ID NO: 178593 - DNA, 56 bp, Artificial
  Synthetic oligonucleotide
aacctggaaggaatcgtaacacatgagcgccgcgcttcaatacttcgaagaaaatt

SEQ ID NO: 178594 - DNA, 60 bp, Artificial
  Synthetic oligonucleotide
gagtgacatgcaaagtaagcatgatctcaatggttcgttctcatggctcacgcaaaaaca

SEQ ID NO: 178595 - DNA, 59 bp, Artificial
  Synthetic oligonucleotide
aacctggacaggaggtcgttattaaagtagatgcatatccatatacacgtcatggttac

SEQ ID NO: 178596 - DNA, 60 bp, Artificial
  Synthetic oligonucleotide
ttagccctgataagacggttattcgtatcttcatcgagatacactgagacagttcgactt

SEQ ID NO: 178597 - DNA, 55 bp, Artificial
  Synthetic oligonucleotide
ttagcagagtttccgggacgacttctgaaagcatgggtaaaatatcgtttgggta

SEQ ID NO: 178598 - DNA, 60 bp, Artificial
  Synthetic oligonucleotide
gttaacgccggtggcggcagcgcacacgaccgcgtgcagatagtctccgcgctgatggcc

SEQ ID NO: 178599 - DNA, 51 bp, Artificial
  Synthetic oligonucleotide
gttaaaggccactgaagttagctttttctcgttttgtataaaaaacaatac

SEQ ID NO: 178600 - DNA, 56 bp, Artificial
  Synthetic oligonucleotide
gttaaaactacctcccgaacttccagagccgctatgaccatcattgtaggggtcat

SEQ ID NO: 178601 - DNA, 51 bp, Artificial
  Synthetic oligonucleotide
actgcgttaaatcaccccccctggctacgttaaatcgcccccctcaactac

SEQ ID NO: 178602 - DNA, 58 bp, Artificial
  Synthetic oligonucleotide
gtgttgaccgcgtaatcctgcgcgaccacgatcttaacccgacagtaacgtgacagcg

SEQ ID NO: 178603 - DNA, 60 bp, Artificial
  Synthetic oligonucleotide
actgctcgtccgggggcgctgcattgtacaaattctggcgtaaggatgccacgtttgcac

SEQ ID NO: 178604 - DNA, 60 bp, Artificial
  Synthetic oligonucleotide
actgctgctgtgtaccgaaacgcatcagccttctcgtgaaatcatggagcgttatccgtc

SEQ ID NO: 178605 - DNA, 57 bp, Artificial
  Synthetic oligonucleotide
attccccaaatgaaacgcgaaggcttctggcgggatgtcactccgccactgaatatt

SEQ ID NO: 178606 - DNA, 59 bp, Artificial
  Synthetic oligonucleotide
gtgttatagcctgtcagtgaccatgttattttgtcatcggtttccctggttgtaatgac

SEQ ID NO: 178607 - DNA, 60 bp, Artificial
  Synthetic oligonucleotide
gtgttacccgtcagcaaggtaaacgatatatcgatgtgtccgagctaatcagacattacg

SEQ ID NO: 178608 - DNA, 60 bp, Artificial
  Synthetic oligonucleotide
gtgtggcctcggaacagatgccactcgtgcgggtatcattgaagggctgttaagcaataa

SEQ ID NO: 178609 - DNA, 59 bp, Artificial
  Synthetic oligonucleotide
gtgtggcattactaaatccaacagtggaaaaccctacaagagcagaccgtactgtctca

SEQ ID NO: 178610 - DNA, 59 bp, Artificial
  Synthetic oligonucleotide
gtgtgccggttcgcagggaagtatgtacccgttcaatggctgggtgagtaatgagtcca

SEQ ID NO: 178611 - DNA, 60 bp, Artificial
  Synthetic oligonucleotide
gtgtgcaatcttggcggatgtcacgataacgagggcgcaggcgtaaaccttgagaggata

SEQ ID NO: 178612 - DNA, 56 bp, Artificial
  Synthetic oligonucleotide
actggctcgttatggaataaaaccggaacaacttgtctccgatccctgcctgaata

SEQ ID NO: 178613 - DNA, 60 bp, Artificial
  Synthetic oligonucleotide
actgggcgaatcaatgcgcgaatggatacccgatcaggagctgagcattatagagtcatg

SEQ ID NO: 178614 - DNA, 57 bp, Artificial
  Synthetic oligonucleotide
gtgtgaccccggtcttttgcgggacgtctttcggatcctgcgcgtaggctgcggaca

SEQ ID NO: 178615 - DNA, 55 bp, Artificial
  Synthetic oligonucleotide
actggtatgtcacctgtggcggaggcgtgacgccattccccggataaaaagcggt

SEQ ID NO: 178616 - DNA, 60 bp, Artificial
  Synthetic oligonucleotide
gagtgacaggggaatatgcaggctcaggtgatatgacgcctcctcgttcattcgctcact

SEQ ID NO: 178617 - DNA, 58 bp, Artificial
  Synthetic oligonucleotide
gtgtctggcctcagtatggtcgtgtggaaatccgtggaattcggaaaacatggattgg

SEQ ID NO: 178618 - DNA, 60 bp, Artificial
  Synthetic oligonucleotide
gtgtcccggtatgcccagcagctctggtacatgctgtatgactgaccgtctttcaccagc

SEQ ID NO: 178619 - DNA, 60 bp, Artificial
  Synthetic oligonucleotide
actggtgtggcttctggagtaacgaggatgtatcggtgtggtggaaccgtctgtgtgaca

SEQ ID NO: 178620 - DNA, 60 bp, Artificial
  Synthetic oligonucleotide
actgtacgttctgatggttttccgcttcctcgctcattcgctcactccgttcggtcatga

SEQ ID NO: 178621 - DNA, 60 bp, Artificial
  Synthetic oligonucleotide
gttccagtgcggaagtatccccctatcatcgcagtaactttatgctatcgatcgccgaac

SEQ ID NO: 178622 - DNA, 57 bp, Artificial
  Synthetic oligonucleotide
gttccagtctattgacatacatctactccgaaaaaaaagggtagcagcgctaccctc

SEQ ID NO: 178623 - DNA, 60 bp, Artificial
  Synthetic oligonucleotide
gttccagagttgcgtggcagcagctttgaccacgttagcgtactcaatgtgggcacgcat

SEQ ID NO: 178624 - DNA, 60 bp, Artificial
  Synthetic oligonucleotide
gttccacgctgccctttggggtacaggctgtgagagctactgttgctgttatcatggcga

SEQ ID NO: 178625 - DNA, 58 bp, Artificial
  Synthetic oligonucleotide
gttccaatgggaatgtgtggtgccagccggaacgagcaggctgtcaccgggtttcagg

SEQ ID NO: 178626 - DNA, 59 bp, Artificial
  Synthetic oligonucleotide
actgaaaagtggatttagatacgcagaactcttgaagttgaagccttatcgcggctaca

SEQ ID NO: 178627 - DNA, 60 bp, Artificial
  Synthetic oligonucleotide
gagtctgtcagcgcatgccgataccgcactgataagcagtgccctgcggatggcctatga

SEQ ID NO: 178628 - DNA, 57 bp, Artificial
  Synthetic oligonucleotide
actgaaagtgaacctgataatctctggttaataagatcacttagactcattttggtt

SEQ ID NO: 178629 - DNA, 57 bp, Artificial
  Synthetic oligonucleotide
actgaaggacagcgttattggtcatagaaagcgtttgcggagaaaaacgctattgtg

SEQ ID NO: 178630 - DNA, 56 bp, Artificial
  Synthetic oligonucleotide
gttcatttttccgttcgtcccgatttgacatatttctatccgagttccagatagtc

SEQ ID NO: 178631 - DNA, 56 bp, Artificial
  Synthetic oligonucleotide
gttcattcattaccaccaccggaacggtttcaaggtgctggggtgtatgctcttta

SEQ ID NO: 178632 - DNA, 54 bp, Artificial
  Synthetic oligonucleotide
gttcagaaaacggaggtacttggttcaccgaaactattggcgctttgggagcta

SEQ ID NO: 178633 - DNA, 54 bp, Artificial
  Synthetic oligonucleotide
gttcaagggaaatggttcgaagacaccatgtctcttaacaacggggtttgaaca

SEQ ID NO: 178634 - DNA, 55 bp, Artificial
  Synthetic oligonucleotide
gttatgaaacagttctaagaaatctactttcggcaaaaatacttagagccgtgta

SEQ ID NO: 178635 - DNA, 60 bp, Artificial
  Synthetic oligonucleotide
gttatgaaaatcgaaatagaactacatgacagcgtagcggcagagttggcctacattgtg

SEQ ID NO: 178636 - DNA, 60 bp, Artificial
  Synthetic oligonucleotide
actgagtgagcgaggaagcggaaaagagaacatccttacactgagcactgacgctctgag

SEQ ID NO: 178637 - DNA, 60 bp, Artificial
  Synthetic oligonucleotide
actgagtgagcgaggaagcggaaaagagactggttttacactgagcactgacgctctgag

SEQ ID NO: 178638 - DNA, 60 bp, Artificial
  Synthetic oligonucleotide
gagtcaaacatctatgaaataatcggcctatgaggaaatgcatttaccataacgtcgcat

SEQ ID NO: 178639 - DNA, 52 bp, Artificial
  Synthetic oligonucleotide
gttatcgtacggcgagacggggtagagcctaactctttcgcggttaagttac

SEQ ID NO: 178640 - DNA, 55 bp, Artificial
  Synthetic oligonucleotide
gttaggagacagtgtacaacgttcaatggtgcaaaccgaagggggccgttgggca

SEQ ID NO: 178641 - DNA, 57 bp, Artificial
  Synthetic oligonucleotide
gttagcgccagaacactcgctgataaaacacgcgaaagaggtgtcaaccagttaacc

SEQ ID NO: 178642 - DNA, 56 bp, Artificial
  Synthetic oligonucleotide
gttagagtaggtaaccggtagcgcgttttcgcacgcctgaccggagctacagccag

SEQ ID NO: 178643 - DNA, 60 bp, Artificial
  Synthetic oligonucleotide
gttactgttctgccaatcgtaatcatgcatatggcctgatcatgaaaccagtaacgtcca

SEQ ID NO: 178644 - DNA, 56 bp, Artificial
  Synthetic oligonucleotide
gttactggggatagtctttctcctgtttaccgcgagtggcgggacgctctggtatc

SEQ ID NO: 178645 - DNA, 59 bp, Artificial
  Synthetic oligonucleotide
gttacgccattagcttcaactatggctacaaccttctttgcaacacctagaatcttatc

SEQ ID NO: 178646 - DNA, 57 bp, Artificial
  Synthetic oligonucleotide
gttacatctaggccagctaactcactgaacgtaaaggctgtacgaaatgttccggcc

SEQ ID NO: 178647 - DNA, 59 bp, Artificial
  Synthetic oligonucleotide
gttaactcacttccgttatcacactctggtctcagtcaatacaacgaacctgaggtgaa

SEQ ID NO: 178648 - DNA, 60 bp, Artificial
  Synthetic oligonucleotide
actttagtgctgaccacgtgctctgtatgatacagaatctatctactataaacgaaaata

SEQ ID NO: 178649 - DNA, 60 bp, Artificial
  Synthetic oligonucleotide
attccgttgtgctccgtcagtgatatgtggagtgtgagtaaatcaggattgttttacagg

SEQ ID NO: 178650 - DNA, 60 bp, Artificial
  Synthetic oligonucleotide
gtgggaggcattggggatcagtcgccggacgtactaccgacacaagaagcgccaatctga

SEQ ID NO: 178651 - DNA, 56 bp, Artificial
  Synthetic oligonucleotide
gtgggacacggggggcaggccggtcgtctcactgaaactaacccactcacagagaa

SEQ ID NO: 178652 - DNA, 60 bp, Artificial
  Synthetic oligonucleotide
gtggctgcatagccatgcagccacgtgaattgctcatgcttcaatgtatatcctcgtcca

SEQ ID NO: 178653 - DNA, 60 bp, Artificial
  Synthetic oligonucleotide
gtggctgatattgcgtgattatttatccggcagtcagagtgccgggtcgggagttaacca

SEQ ID NO: 178654 - DNA, 54 bp, Artificial
  Synthetic oligonucleotide
gtggcccgtcaatggggatgtgaccggggtaccccctgaaatcgagccagtttg

SEQ ID NO: 178655 - DNA, 57 bp, Artificial
  Synthetic oligonucleotide
acttttcgaaactggtacgcagctatcctaatagccagtacaccaccgacgccacta

SEQ ID NO: 178656 - DNA, 51 bp, Artificial
  Synthetic oligonucleotide
agaaaaaaaaccgaacaacgacggatgaaaaaacgttgtccgcactgatac

SEQ ID NO: 178657 - DNA, 55 bp, Artificial
  Synthetic oligonucleotide
gtggataaccgcacccacgatcgtttttgtgaaattcgcgccgcggcgggatacc

SEQ ID NO: 178658 - DNA, 58 bp, Artificial
  Synthetic oligonucleotide
agaaaaacattaggcatgtgtattcgcacagaatattacaatgtaaaataacccatcg

SEQ ID NO: 178659 - DNA, 56 bp, Artificial
  Synthetic oligonucleotide
agaaaatcatttgcggactattttgaatacataattcttcgtttgacttatccttg

SEQ ID NO: 178660 - DNA, 60 bp, Artificial
  Synthetic oligonucleotide
atctgcctgttcatctgcgtccagttcgttaagtttctccagcagcgttaatgtctggcc

SEQ ID NO: 178661 - DNA, 57 bp, Artificial
  Synthetic oligonucleotide
attcgaccacgatatcccggggctcgtgtcagcggggcgtgaaatgttccgcctaga

SEQ ID NO: 178662 - DNA, 58 bp, Artificial
  Synthetic oligonucleotide
agaaacgcaagcggcttattatcgaagtagctgaaaacccctgtcgccgcacacaggc

SEQ ID NO: 178663 - DNA, 53 bp, Artificial
  Synthetic oligonucleotide
agaaacgccctgaagccgttttagcggtgcacgtaatagggctttatgttaaa

SEQ ID NO: 178664 - DNA, 55 bp, Artificial
  Synthetic oligonucleotide
agaaacgttggagcgggctatagcaaagcctaccggagtgatatttctaaccggc

SEQ ID NO: 178665 - DNA, 60 bp, Artificial
  Synthetic oligonucleotide
gtgcttgaatcatatattcaatagaatcagcaattaactctcgagaaggtaaagaatata

SEQ ID NO: 178666 - DNA, 60 bp, Artificial
  Synthetic oligonucleotide
gtgctgtttgtctggctattgaatagcgtcggacaaggcgaatttggcggcgctccattc

SEQ ID NO: 178667 - DNA, 60 bp, Artificial
  Synthetic oligonucleotide
gtgctgctgtgataatttgagcgtcaaataaccgcccaatattgttagcgcagagccaag

SEQ ID NO: 178668 - DNA, 60 bp, Artificial
  Synthetic oligonucleotide
agaaatgatcttgcacgtatttgtgagccgggatctagatatgtttccgatctagttaag

SEQ ID NO: 178669 - DNA, 60 bp, Artificial
  Synthetic oligonucleotide
gtgctgaagtcctcgaccgtaacgccgctcagttccttatatgatgtgcgtaacagcccg

SEQ ID NO: 178670 - DNA, 49 bp, Artificial
  Synthetic oligonucleotide
agaacaaaatgggcggaaggggctaatttccccccagacgaccggttta

SEQ ID NO: 178671 - DNA, 58 bp, Artificial
  Synthetic oligonucleotide
gtgcggcattttgactatgcacgttcccctgcacttagggtcggcaggggggattgac

SEQ ID NO: 178672 - DNA, 55 bp, Artificial
  Synthetic oligonucleotide
gagtataacttagcctttgttaacgctattagaagtggtgttgatagcgttaacg

SEQ ID NO: 178673 - DNA, 52 bp, Artificial
  Synthetic oligonucleotide
gtgcgaaagtttcgcagtggatgcccggggtttcggggggcggcgagccccc

SEQ ID NO: 178674 - DNA, 60 bp, Artificial
  Synthetic oligonucleotide
gtgccatgcgtaaagacacatgatatcccaattctccaaaaccacagattactccaatag

SEQ ID NO: 178675 - DNA, 55 bp, Artificial
  Synthetic oligonucleotide
agaaccctacgagcaacaacacaaggactatccagccagccttaaacgttgccgg

SEQ ID NO: 178676 - DNA, 58 bp, Artificial
  Synthetic oligonucleotide
actgtagaaattcacctcataggatggctggagtatgagccggttagtcagtaaaacg

SEQ ID NO: 178677 - DNA, 60 bp, Artificial
  Synthetic oligonucleotide
gtgtccatgccgtcgcagagcctgtctggcaggtagtgataaacagtcctgctcagcgct

SEQ ID NO: 178678 - DNA, 60 bp, Artificial
  Synthetic oligonucleotide
gtgtcacctcagcggcaaactctggtgacatgtactggctcgcaatgcacaggtacgtga

SEQ ID NO: 178679 - DNA, 60 bp, Artificial
  Synthetic oligonucleotide
gtgtatattgatggagttggtgattgcgtactgataaataacaacatagccaacgatgtt

SEQ ID NO: 178680 - DNA, 57 bp, Artificial
  Synthetic oligonucleotide
actgtggccccaatcaccaacgttagcattggatatccaggtgggaccgtggtccca

SEQ ID NO: 178681 - DNA, 51 bp, Artificial
  Synthetic oligonucleotide
actgtgtgtcggtttaaaaagaccgttccgtggacaagtccggctggttta

SEQ ID NO: 178682 - DNA, 56 bp, Artificial
  Synthetic oligonucleotide
gtggtgacgcctggtgtgaaaaaatggtaaggggagagcggtgattccaatagaac

SEQ ID NO: 178683 - DNA, 57 bp, Artificial
  Synthetic oligonucleotide
attcgccttggcagtatggaagttcctcgctccagttcgggccggtatccacctcga

SEQ ID NO: 178684 - DNA, 52 bp, Artificial
  Synthetic oligonucleotide
acttaacagcaaccctttcttcacgttatcgctcctttaaccggaaacaggc

SEQ ID NO: 178685 - DNA, 60 bp, Artificial
  Synthetic oligonucleotide
gtggtgaatatgctgattgctgcgagaaaaatgaatcctgaagcaaaaatgattctggga

SEQ ID NO: 178686 - DNA, 55 bp, Artificial
  Synthetic oligonucleotide
acttaatggtaacagattaactataggtttacctttagcatgtctactagattcc

SEQ ID NO: 178687 - DNA, 60 bp, Artificial
  Synthetic oligonucleotide
gtggtccgtgtactcgacaggattacagcaaccgcggttatctggccatgctgcgtatgg

SEQ ID NO: 178688 - DNA, 51 bp, Artificial
  Synthetic oligonucleotide
gtgggtttgtcccgttcccattgcggattttcaccggtgaaaaagtacgtg

SEQ ID NO: 178689 - DNA, 59 bp, Artificial
  Synthetic oligonucleotide
acttatggttcccgcattacgacatcacaacaaagctccgggtggcgcattttctggca

SEQ ID NO: 178690 - DNA, 60 bp, Artificial
  Synthetic oligonucleotide
acttcaagagttctgcgtatctaaatccactatccagttaccaatggctgctccagtggc

SEQ ID NO: 178691 - DNA, 53 bp, Artificial
  Synthetic oligonucleotide
gtgggggcactggataaacttcgtgtttttcccgcaaagatagtattggaaag

SEQ ID NO: 178692 - DNA, 59 bp, Artificial
  Synthetic oligonucleotide
acttcatacaccccacgcgatacggctcgcactcggctctttaccgctggagacactac

SEQ ID NO: 178693 - DNA, 60 bp, Artificial
  Synthetic oligonucleotide
gtgggcttgccgcgagccaaggtcgagggccgcgaattcatgcggcagtcgggggcagca

SEQ ID NO: 178694 - DNA, 58 bp, Artificial
  Synthetic oligonucleotide
gagtacacgcgtgacaggctgcaccgggaagtgttgcggcggttcggcccggacactc

SEQ ID NO: 178695 - DNA, 57 bp, Artificial
  Synthetic oligonucleotide
acttctgagacaccaaaaaggcacaaggagggacactccaaatctgtcgttagccag

SEQ ID NO: 178696 - DNA, 58 bp, Artificial
  Synthetic oligonucleotide
acttctgtaaagcgcgatgtatacgtgtttctggtctccgtcctcatatagggattac

SEQ ID NO: 178697 - DNA, 60 bp, Artificial
  Synthetic oligonucleotide
acttgaagactcacgcagcataacgctacactgagagaacaaatttggtgactgtttccc

SEQ ID NO: 178698 - DNA, 57 bp, Artificial
  Synthetic oligonucleotide
acttgaagtccattccaagagatattcaccaaaacattcacggcaatggacctaccc

SEQ ID NO: 178699 - DNA, 60 bp, Artificial
  Synthetic oligonucleotide
gtgggatgtgccgcgttattattgtcggcttgcagtagcgaacctgttcagcaggcaacc

SEQ ID NO: 178700 - DNA, 57 bp, Artificial
  Synthetic oligonucleotide
acttggaacagtccttacagcaatgaatgcggcgtttaagcgaatggaaaagcgaaa

SEQ ID NO: 178701 - DNA, 60 bp, Artificial
  Synthetic oligonucleotide
actttacggagggggacatgagtcagtcatcattacctgctgtatatacgcaggcaccac

SEQ ID NO: 178702 - DNA, 60 bp, Artificial
  Synthetic oligonucleotide
taacgcgcggtccccattacattaccgccttgtgcagcgaacgcttttgatgccgaggca

SEQ ID NO: 178703 - DNA, 56 bp, Artificial
  Synthetic oligonucleotide
taaccgtcagcaaaagatcgaccggggaatataaatgctaggaacgcaattaacca

SEQ ID NO: 178704 - DNA, 53 bp, Artificial
  Synthetic oligonucleotide
taaccggttcagataacccgtttcagggtgtacccggttaacagccacatgga

SEQ ID NO: 178705 - DNA, 60 bp, Artificial
  Synthetic oligonucleotide
gagtaaacagcgcggataagcatgtgacatatccactatggtgagtgatactctcactgg

SEQ ID NO: 178706 - DNA, 60 bp, Artificial
  Synthetic oligonucleotide
acgtcaggcggctatggcaatgctggaagagtacgacacagatatcaacgcacgtgaaag

SEQ ID NO: 178707 - DNA, 54 bp, Artificial
  Synthetic oligonucleotide
acgtcaggcgttctgtcgttcgcggagaaggagttaccgccgggcgaacgtgaa

SEQ ID NO: 178708 - DNA, 55 bp, Artificial
  Synthetic oligonucleotide
acgtcatttcattccttcaaacggttactcgtagctacccctgccggtggctctc

SEQ ID NO: 178709 - DNA, 56 bp, Artificial
  Synthetic oligonucleotide
taaccctaacggcaatactccaggtagcagtaatcctgtagatactaccccgcctc

SEQ ID NO: 178710 - DNA, 57 bp, Artificial
  Synthetic oligonucleotide
taacccggaagaagtgcgggaactcattgattccacgccattctcgaagaaatacac

SEQ ID NO: 178711 - DNA, 60 bp, Artificial
  Synthetic oligonucleotide
acgtcccgaagtgcatctgggttttgaagctgccggacgacttgatgatgcccagcgtca

SEQ ID NO: 178712 - DNA, 60 bp, Artificial
  Synthetic oligonucleotide
taacccgctacatgatgctgagtaacagagccggagaattcacggtatggggtgatgagc

SEQ ID NO: 178713 - DNA, 57 bp, Artificial
  Synthetic oligonucleotide
taaccatccaggcctttagggataattttccccatttccgaggaagatgctgagata

SEQ ID NO: 178714 - DNA, 60 bp, Artificial
  Synthetic oligonucleotide
taaccagctcgggaaagaagctggctctgccccgtctcgcagtacgcaactagcacctga

SEQ ID NO: 178715 - DNA, 57 bp, Artificial
  Synthetic oligonucleotide
taacataaaacataaggaaatttatcgcactagtcaaattattagtcaaatctgtaa

SEQ ID NO: 178716 - DNA, 54 bp, Artificial
  Synthetic oligonucleotide
attcggcacacgttggacttgcgaaatagcgagggggtatctcccctttactac

SEQ ID NO: 178717 - DNA, 60 bp, Artificial
  Synthetic oligonucleotide
taacagggagataatacacaggcgaatataacgcataaccacaatacatccttgagtgag

SEQ ID NO: 178718 - DNA, 52 bp, Artificial
  Synthetic oligonucleotide
taaattcccgccactttaatggccggaacggtaattcgtctcgcgccgattt

SEQ ID NO: 178719 - DNA, 60 bp, Artificial
  Synthetic oligonucleotide
taaagttacagtgtcccataggtgtctcatctcatggtttcagtaaaacataatgaggtc

SEQ ID NO: 178720 - DNA, 56 bp, Artificial
  Synthetic oligonucleotide
taaagtcccaccggaaaaagtccaggctacgtatggtcgatatcgtatacaggcat

SEQ ID NO: 178721 - DNA, 60 bp, Artificial
  Synthetic oligonucleotide
acgtgattgccgtttatgtattaccgggaatactcattgccagacgatattagtcagatg

SEQ ID NO: 178722 - DNA, 58 bp, Artificial
  Synthetic oligonucleotide
taaagcgcacgactttgcggtcaatgaggccagtggtatccagttttacgttgcccca

SEQ ID NO: 178723 - DNA, 58 bp, Artificial
  Synthetic oligonucleotide
taaagaccttccggaggttttgcgtgcaatatgcctacatcagggtaagctcggccga

SEQ ID NO: 178724 - DNA, 60 bp, Artificial
  Synthetic oligonucleotide
acgtggctgaccatcgtcctagtatccgcgctgctgatagcctcgagcgcgggcattctg

SEQ ID NO: 178725 - DNA, 55 bp, Artificial
  Synthetic oligonucleotide
acgtggttgcgcagtccctctgcgacaaaaaacgcaacggggaattcagaacgag

SEQ ID NO: 178726 - DNA, 57 bp, Artificial
  Synthetic oligonucleotide
acgggccgttgtgagctgaagtgctattcccaggcggttatgctttccccgccgctg

SEQ ID NO: 178727 - DNA, 60 bp, Artificial
  Synthetic oligonucleotide
gaggtttgtgcgcgactggactggctaccaaccggcaactcgcaaaacaccatatgagcc

SEQ ID NO: 178728 - DNA, 60 bp, Artificial
  Synthetic oligonucleotide
taattgtgcctgagttcataagccacatattagccgtcagtcgtgagtctttttccagag

SEQ ID NO: 178729 - DNA, 57 bp, Artificial
  Synthetic oligonucleotide
acgggctgcgtgacccgaacgcaccggagaacagacggacgcttgtcacaccgaata

SEQ ID NO: 178730 - DNA, 59 bp, Artificial
  Synthetic oligonucleotide
taatgctgaatcccggactttttaccgtctcggtcagtgaatcgttatagctgctgacg

SEQ ID NO: 178731 - DNA, 60 bp, Artificial
  Synthetic oligonucleotide
taatacgcttatcgccacgttaaagaatctctattgtccataaggaggcacgatgtccat

SEQ ID NO: 178732 - DNA, 55 bp, Artificial
  Synthetic oligonucleotide
taataccggccccagaatcggacctaccagccccggcatagtgacaaagttaaga

SEQ ID NO: 178733 - DNA, 59 bp, Artificial
  Synthetic oligonucleotide
taagtaccagcatatgaccataacaccaagtaacaacgttgttatttgcgcattcccaa

SEQ ID NO: 178734 - DNA, 53 bp, Artificial
  Synthetic oligonucleotide
acggtacaaataacggatggttgcgaagagaagtgccggaaaaagccgccctc

SEQ ID NO: 178735 - DNA, 56 bp, Artificial
  Synthetic oligonucleotide
taaggcgaagaataagccgctttcggatgagacggtacgtgagttaaccggcctga

SEQ ID NO: 178736 - DNA, 56 bp, Artificial
  Synthetic oligonucleotide
taaggcactgttgcaaaaatgtggaggtgataggggtactacgccggaaccccaga

SEQ ID NO: 178737 - DNA, 60 bp, Artificial
  Synthetic oligonucleotide
taaggaccgtcagggcagacagattgccggggatgtgacggacgaatggctgcaaccggc

SEQ ID NO: 178738 - DNA, 53 bp, Artificial
  Synthetic oligonucleotide
gaggttcgcggtgcggaagcctgggacttccttaaaataacaggttccggcca

SEQ ID NO: 178739 - DNA, 55 bp, Artificial
  Synthetic oligonucleotide
taagctgtctactgtacggtttaaaaagacaattcgaaatttcagaacaggacag

SEQ ID NO: 178740 - DNA, 60 bp, Artificial
  Synthetic oligonucleotide
taagcgctccaagccaactctttaacaggctggccctcaatcgccggctgtgttcttgga

SEQ ID NO: 178741 - DNA, 58 bp, Artificial
  Synthetic oligonucleotide
taagcgactgtacgaaggcgacacctacgttgatctggccgaaatggtcaaagactac

SEQ ID NO: 178742 - DNA, 53 bp, Artificial
  Synthetic oligonucleotide
acggtggttcgtttgccggaattcagagctaccaactctttcttccgaaggta

SEQ ID NO: 178743 - DNA, 60 bp, Artificial
  Synthetic oligonucleotide
taagcatctgaccggcaaaatattcacccaacgcattgagcgtaataatctgacgctacg

SEQ ID NO: 178744 - DNA, 53 bp, Artificial
  Synthetic oligonucleotide
acggttacctctctgccgggaggggatttgaaacgccgaccattaacgagctg

SEQ ID NO: 178745 - DNA, 55 bp, Artificial
  Synthetic oligonucleotide
taagcagtggggaggatcgtcttattcctctgttgactacaaacgtaagggttta

SEQ ID NO: 178746 - DNA, 55 bp, Artificial
  Synthetic oligonucleotide
acggtttctgttacgacaaaggagattgcgtatcatacgaaaatggttcgtagag

SEQ ID NO: 178747 - DNA, 56 bp, Artificial
  Synthetic oligonucleotide
taagaacatccgtcaccgacacatagaccggtttctgtccgctctctttcgggaaa

SEQ ID NO: 178748 - DNA, 60 bp, Artificial
  Synthetic oligonucleotide
taactgtctgaccgggtctctgaataggcggtgcctcactcaacgtgtcgcccgatgtgt

SEQ ID NO: 178749 - DNA, 57 bp, Artificial
  Synthetic oligonucleotide
gaggttacatcacctcaagcctttgattcattacgagataaaaatcgaaaggttaga

SEQ ID NO: 178750 - DNA, 54 bp, Artificial
  Synthetic oligonucleotide
taacgtgggcaaaccttccgtggcggaagaacgcagcgaaattacgccggccac

SEQ ID NO: 178751 - DNA, 58 bp, Artificial
  Synthetic oligonucleotide
gtttcgggcatggggtcggagatgaggtgcttgtttctttggctcatattattaattc

SEQ ID NO: 178752 - DNA, 56 bp, Artificial
  Synthetic oligonucleotide
gtttcaggtcgtcccgtagctgctaggacgaaggctaagaatcttaaggccatacc

SEQ ID NO: 178753 - DNA, 54 bp, Artificial
  Synthetic oligonucleotide
gtttcacagccaggaatttttaaactcactccggggcacaactcaatttgcggg

SEQ ID NO: 178754 - DNA, 56 bp, Artificial
  Synthetic oligonucleotide
gtttcaatacgactgtcgcacttaaataagtttgcactgtcgggttaagtaatgct

SEQ ID NO: 178755 - DNA, 58 bp, Artificial
  Synthetic oligonucleotide
actcacagttccggttcagtatgaacgggctgaaactggtgttcagtgtcacggctcc

SEQ ID NO: 178756 - DNA, 56 bp, Artificial
  Synthetic oligonucleotide
gtttatcgggtaactttcaatagcatcagcgaagcaatacgtaacgtcagtaaagg

SEQ ID NO: 178757 - DNA, 54 bp, Artificial
  Synthetic oligonucleotide
gtttagaattatcgtcgagattgtaaaggttatggaatacggaaatctaattaa

SEQ ID NO: 178758 - DNA, 54 bp, Artificial
  Synthetic oligonucleotide
gttgtgggttaaatcgcgatgggggctggcctggcagtaaaaaacagggttcgc

SEQ ID NO: 178759 - DNA, 59 bp, Artificial
  Synthetic oligonucleotide
gttgggatcaaaaccgtcatcagaagcatatacgtaatgccgggtatgttgttccacgc

SEQ ID NO: 178760 - DNA, 51 bp, Artificial
  Synthetic oligonucleotide
attctcttctttctaaggaagaacgtttagttgcctttcgtttaaattcca

SEQ ID NO: 178761 - DNA, 56 bp, Artificial
  Synthetic oligonucleotide
gttggattttatcaatatataaccgaacaatatggagaaaaatacgcaaaaattgc

SEQ ID NO: 178762 - DNA, 60 bp, Artificial
  Synthetic oligonucleotide
gttgcttaaccggtgtatccagccattccctgatgtcatgcccgaccattcgcgcctgtt

SEQ ID NO: 178763 - DNA, 60 bp, Artificial
  Synthetic oligonucleotide
gttgctaatcattagtttttgtcttgtggttgaaaactgagcgctatggctatgacctag

SEQ ID NO: 178764 - DNA, 55 bp, Artificial
  Synthetic oligonucleotide
gttgctaactagtttaacgtctaatgaaaaaattcagatagctttagctttagaa

SEQ ID NO: 178765 - DNA, 60 bp, Artificial
  Synthetic oligonucleotide
gttgcactgtatattatcattaatagcaagcccctcattattatgaggggctcatggtta

SEQ ID NO: 178766 - DNA, 60 bp, Artificial
  Synthetic oligonucleotide
gttgcaaaactgaactggcataatgcacgacacatcacgaagtgcgcacttatacaatct

SEQ ID NO: 178767 - DNA, 57 bp, Artificial
  Synthetic oligonucleotide
actcgaggtacgagaactttagctatgctacgcgatttagggttcattacttatcga

SEQ ID NO: 178768 - DNA, 60 bp, Artificial
  Synthetic oligonucleotide
actcgagtccctttgtctgccagtcaatccattccacgcggcgttcactgcggatgtagg

SEQ ID NO: 178769 - DNA, 60 bp, Artificial
  Synthetic oligonucleotide
gttctggcggccgaccaatctgctgcatccacggcaattccatgcccagcacctgccgat

SEQ ID NO: 178770 - DNA, 54 bp, Artificial
  Synthetic oligonucleotide
actcgggggttgctgtccctggcctcatccggggggctcaaaacgcgcgaggac

SEQ ID NO: 178771 - DNA, 57 bp, Artificial
  Synthetic oligonucleotide
atctgcgacttgacggcagaccacaaggtaaaatacaactagtccctgtcaggggag

SEQ ID NO: 178772 - DNA, 59 bp, Artificial
  Synthetic oligonucleotide
gactggggtgcatttgagccgccccatttaaccttcgccctcacagatacgccattcgc

SEQ ID NO: 178773 - DNA, 60 bp, Artificial
  Synthetic oligonucleotide
gttctgacttcgcggcaatgctggatgcgcacgctaacttcctgcgtagcaacccgtctt

SEQ ID NO: 178774 - DNA, 60 bp, Artificial
  Synthetic oligonucleotide
gttctgaatgtagggcgtgtacagagcgccacgttagggttgatcaacgatagaacactc

SEQ ID NO: 178775 - DNA, 60 bp, Artificial
  Synthetic oligonucleotide
gttcggtgataacgtgctggcaaaatattcacccaacgcattgagcgtaataatctgacg

SEQ ID NO: 178776 - DNA, 55 bp, Artificial
  Synthetic oligonucleotide
gttcgcctgaaagggctaaccaataaacgcgacattcgggtcagtaccgcgaatg

SEQ ID NO: 178777 - DNA, 60 bp, Artificial
  Synthetic oligonucleotide
gttccggtctatcgccaaagcgtttttctatcgctcctgacatgacatcctgcaccgttg

SEQ ID NO: 178778 - DNA, 51 bp, Artificial
  Synthetic oligonucleotide
acgttaaaggtcgttgaaattaacttcctgttacgatgagttgtttcaacg

SEQ ID NO: 178779 - DNA, 60 bp, Artificial
  Synthetic oligonucleotide
acgttatgaaagtcatatggactgtcactcctgtggggtatcagcgcatagcgaaacgtt

SEQ ID NO: 178780 - DNA, 58 bp, Artificial
  Synthetic oligonucleotide
taaactctgcggtacagaagttgcaaagtaaagtaatcagagcggttacacaagtcga

SEQ ID NO: 178781 - DNA, 55 bp, Artificial
  Synthetic oligonucleotide
taaacggcccactgacttaagagtatcccaatcacaaataacaggttggttaaca

SEQ ID NO: 178782 - DNA, 59 bp, Artificial
  Synthetic oligonucleotide
taaaccgcctgcgtcgtttgggcatggtatggtttatgggccacgacagcagcaaattc

SEQ ID NO: 178783 - DNA, 60 bp, Artificial
  Synthetic oligonucleotide
gactggcaccagatagccagcaatatactttgtctcgaaaggcgtacacagcaccgctaa

SEQ ID NO: 178784 - DNA, 57 bp, Artificial
  Synthetic oligonucleotide
taaaccacgacggatgggtttccattgcgtcagaaatgaaatcgtcagggaagaggc

SEQ ID NO: 178785 - DNA, 60 bp, Artificial
  Synthetic oligonucleotide
taaacagaggacataacgatgcaggaagagaaacatccgcccgcagggtcggacagtgaa

SEQ ID NO: 178786 - DNA, 55 bp, Artificial
  Synthetic oligonucleotide
taaaatccgcatccgttcaccgttttttaaagtccgttaaaagcatgatgccatc

SEQ ID NO: 178787 - DNA, 57 bp, Artificial
  Synthetic oligonucleotide
acgttgtgagggaaaacaacttgcgtcatggatgcgtaaggtctgcctgggggcacc

SEQ ID NO: 178788 - DNA, 60 bp, Artificial
  Synthetic oligonucleotide
acgtttatacatttgaagtggatgggcacatccaagtactgattgcttgttatcatcaac

SEQ ID NO: 178789 - DNA, 60 bp, Artificial
  Synthetic oligonucleotide
taaaactgtgaacgcgatcttccagtcattttcagtgcgtcccggagtgtgtgccatgcc

SEQ ID NO: 178790 - DNA, 60 bp, Artificial
  Synthetic oligonucleotide
taaaaatcctgtgaacggacacgctcacctgctctatgcactcaatatcgccgtgagaac

SEQ ID NO: 178791 - DNA, 59 bp, Artificial
  Synthetic oligonucleotide
actaaacttcatgttaactatatcctcacggcgttgaccagtaaccagcgcgagatcca

SEQ ID NO: 178792 - DNA, 60 bp, Artificial
  Synthetic oligonucleotide
gtttttaccttccgcgatccatgactccggatactcagcaatatgccgcgtggtcacctc

SEQ ID NO: 178793 - DNA, 56 bp, Artificial
  Synthetic oligonucleotide
gtttttaatcggcgttggggagtgcgtcaacactccccaacatttcgaatgtgtca

SEQ ID NO: 178794 - DNA, 56 bp, Artificial
  Synthetic oligonucleotide
atttgtaaggtgccgatataaatggttttttagcctcaatcgccaacttactggca

SEQ ID NO: 178795 - DNA, 55 bp, Artificial
  Synthetic oligonucleotide
actaaggccactgtgttgcggccagaggcgttgcgttaagttaaaggtacacgcc

SEQ ID NO: 178796 - DNA, 60 bp, Artificial
  Synthetic oligonucleotide
gttttctgctgaagtcagttcgcttaaatcgataccgtcttccagtaacatctgacgata

SEQ ID NO: 178797 - DNA, 53 bp, Artificial
  Synthetic oligonucleotide
actaatactaatctaagctacgccaatttttcgaaagtcgtgttggaaaagtg

SEQ ID NO: 178798 - DNA, 59 bp, Artificial
  Synthetic oligonucleotide
actacagcgccttacgccgtcgcagtgccgggagctgttgacggcggccaatcaacagg

SEQ ID NO: 178799 - DNA, 54 bp, Artificial
  Synthetic oligonucleotide
gttttactccatctaattatccactggtggaaaccctacgattggccacacccc

SEQ ID NO: 178800 - DNA, 60 bp, Artificial
  Synthetic oligonucleotide
gtttgttgccatttttacctgtctgctgccgtgatcgcaccgaacgcgtttctgcggtgc

SEQ ID NO: 178801 - DNA, 58 bp, Artificial
  Synthetic oligonucleotide
actaccgtaccaacaataagtagtactacacctatctcctcatagtctgaagatacaa

SEQ ID NO: 178802 - DNA, 54 bp, Artificial
  Synthetic oligonucleotide
gtttgaacttatcgcgccggaaggaatttctacccgactgattccacaggggcg

SEQ ID NO: 178803 - DNA, 60 bp, Artificial
  Synthetic oligonucleotide
gtttctacgatacaatatggactccagcagtattttacgcagtcgcccattcaacacgaa

SEQ ID NO: 178804 - DNA, 60 bp, Artificial
  Synthetic oligonucleotide
gtatagatgacctttcagattaagcgcgaatattgcctgcgatagcagcaagtgcggatg

SEQ ID NO: 178805 - DNA, 58 bp, Artificial
  Synthetic oligonucleotide
gactggatgtctctaacacccacctggccaaccttccggaaatcatcgccaatttatc

SEQ ID NO: 178806 - DNA, 60 bp, Artificial
  Synthetic oligonucleotide
agcagtcgtggctcacctgctgtctgtactgcttcaggcgttgtatcatcccagaataca

SEQ ID NO: 178807 - DNA, 55 bp, Artificial
  Synthetic oligonucleotide
agcagttacagtttaattcctcctaacgggaactgaatgagctttatttcaatat

SEQ ID NO: 178808 - DNA, 58 bp, Artificial
  Synthetic oligonucleotide
agcataagctacttgtagtataaacttcgcgcaatagtaaaaagtctctcttcatagg

SEQ ID NO: 178809 - DNA, 60 bp, Artificial
  Synthetic oligonucleotide
gtagtgtagcagtcgtcatggctgcaattcaagtcccatctccctgctcgaatgacgtta

SEQ ID NO: 178810 - DNA, 60 bp, Artificial
  Synthetic oligonucleotide
gtaggcccgataagcttgcgtcatcgggcatgtagcggcatatcgttagaacggaataaa

SEQ ID NO: 178811 - DNA, 60 bp, Artificial
  Synthetic oligonucleotide
agcatgacagtccttacggccggttcggtttcagacaaaatctgccggtatgcatccagc

SEQ ID NO: 178812 - DNA, 60 bp, Artificial
  Synthetic oligonucleotide
gtaggcatgcgtcctaggtatgtccgcttctggaatagaagtctgcaagtttattctttc

SEQ ID NO: 178813 - DNA, 59 bp, Artificial
  Synthetic oligonucleotide
gtagctaaagtaatattaactacagtaccaccattaggcatataccgtatatcaggatc

SEQ ID NO: 178814 - DNA, 60 bp, Artificial
  Synthetic oligonucleotide
agcattcgtgcgatagctactgcgctgaatcgcagtccttcgacgatctcacgtgaagtt

SEQ ID NO: 178815 - DNA, 60 bp, Artificial
  Synthetic oligonucleotide
agcattgcgaaatacacgcacaggaacttcacgccggaaagtttcgcacagtatgtggct

SEQ ID NO: 178816 - DNA, 55 bp, Artificial
  Synthetic oligonucleotide
gactgacatcgcaaaatagtggtaagtccgtcgggggcggccttactcctttatc

SEQ ID NO: 178817 - DNA, 60 bp, Artificial
  Synthetic oligonucleotide
agccaaaaaggatattagcaacgcaacagggattgatagctcagccataacaataagcat

SEQ ID NO: 178818 - DNA, 59 bp, Artificial
  Synthetic oligonucleotide
agccaaagtgtgagaatccagcctggttccgtcccgacagctataaggcgctgggcgga

SEQ ID NO: 178819 - DNA, 60 bp, Artificial
  Synthetic oligonucleotide
gtagcgccgcacagctgcttagcgcgttaagtgagttcgctacgcttaaccctggcgatg

SEQ ID NO: 178820 - DNA, 60 bp, Artificial
  Synthetic oligonucleotide
gtagcgaccgagtgagcgaggaggcgtcatatctcctgaaccggcattcagcactgacgc

SEQ ID NO: 178821 - DNA, 60 bp, Artificial
  Synthetic oligonucleotide
gtagaagtcgctagggtcacgcacaaggttcagagtgataccatcccgcgcactgacagc

SEQ ID NO: 178822 - DNA, 55 bp, Artificial
  Synthetic oligonucleotide
gtactttacgattcttttttgtatgttatcaaagccttctgggcctaatggataa

SEQ ID NO: 178823 - DNA, 60 bp, Artificial
  Synthetic oligonucleotide
gtactgtcaggacttactgcaggccagcgggatgccacacggacggtactggagaacact

SEQ ID NO: 178824 - DNA, 59 bp, Artificial
  Synthetic oligonucleotide
gtactgataaacaggatcttaaacgacaggaaatggttgttatgaatacattatcatcg

SEQ ID NO: 178825 - DNA, 59 bp, Artificial
  Synthetic oligonucleotide
gtactgacactctgacggtctcctgcatccgcgtttgataattcgggtcaaaatcactt

SEQ ID NO: 178826 - DNA, 57 bp, Artificial
  Synthetic oligonucleotide
gtactctggtgcgtacccgtgtgtccgagatcagcgtagtgggacgtaatacccagg

SEQ ID NO: 178827 - DNA, 60 bp, Artificial
  Synthetic oligonucleotide
attttatacagatacggcgaatgagtggcgctggcgtagaacggcaagcaatggtcggat

SEQ ID NO: 178828 - DNA, 56 bp, Artificial
  Synthetic oligonucleotide
gtactcgtaggtgttccaatatggggtgtaggtattctgtaggtatctaaaatcac

SEQ ID NO: 178829 - DNA, 60 bp, Artificial
  Synthetic oligonucleotide
gtacgtggcgtactcatgcagacaggttccctcatcggaataaaacgcgcactgacgtga

SEQ ID NO: 178830 - DNA, 59 bp, Artificial
  Synthetic oligonucleotide
gtacgtgaactgtccgttcaggcaactaacggtaccaactctgacagcgatctgtcttc

SEQ ID NO: 178831 - DNA, 54 bp, Artificial
  Synthetic oligonucleotide
agcaagccgcgtgtcctgtacccacgtctgagaacgaaaagttaacggcgcgtt

SEQ ID NO: 178832 - DNA, 60 bp, Artificial
  Synthetic oligonucleotide
agcaagctgctcctgggaccaggcacgcgcaagacgcagcgacctgaatttgttggtatc

SEQ ID NO: 178833 - DNA, 60 bp, Artificial
  Synthetic oligonucleotide
gtcacaaccaatatcgcatggcaatacagcgacgttaatgtcgttgcggtgcatcacgcc

SEQ ID NO: 178834 - DNA, 60 bp, Artificial
  Synthetic oligonucleotide
gtcaatggcgagcaacggaggaaggcaccccacagggtgcggtcatctcaccgctgctgg

SEQ ID NO: 178835 - DNA, 60 bp, Artificial
  Synthetic oligonucleotide
gtcaacgtcaaaaaccagccagaactgtgcatgaggctggttctgctggatataccgtgc

SEQ ID NO: 178836 - DNA, 60 bp, Artificial
  Synthetic oligonucleotide
agcacataacccgtgcatcaaaaaccagtatcacggctgaggaagcctatcagaaagcga

SEQ ID NO: 178837 - DNA, 59 bp, Artificial
  Synthetic oligonucleotide
gtcaacctatatcaggactagtcaatacgccgtcaggcgcaaacgctattcgaccgaaa

SEQ ID NO: 178838 - DNA, 57 bp, Artificial
  Synthetic oligonucleotide
gactctttggttagttaatgcaagctccgttgaccaaactctaaggagcacagggat

SEQ ID NO: 178839 - DNA, 57 bp, Artificial
  Synthetic oligonucleotide
gtcaaaagggttgtcagctttcacactaactctctctttattaagtcggcgacgaga

SEQ ID NO: 178840 - DNA, 53 bp, Artificial
  Synthetic oligonucleotide
agcaccgtacaggtttcccccaatatcgcccgatgggtgacggtaccccgatc

SEQ ID NO: 178841 - DNA, 57 bp, Artificial
  Synthetic oligonucleotide
agcacggagacacacgacgggcacattctccggtctcatataaggtatttccggtaa

SEQ ID NO: 178842 - DNA, 60 bp, Artificial
  Synthetic oligonucleotide
gtattttagtctgatagtcgcacgctgtcaaatgtttattgtcggcttctgtttcaatac

SEQ ID NO: 178843 - DNA, 60 bp, Artificial
  Synthetic oligonucleotide
gtatttatgtgtatctgcggcatgtgatttggttcctactcagggtaacgaccctcacca

SEQ ID NO: 178844 - DNA, 60 bp, Artificial
  Synthetic oligonucleotide
gtatttatgctgttctttttgtatagtgcgattgcagtcagggcatagtttagaatattt

SEQ ID NO: 178845 - DNA, 60 bp, Artificial
  Synthetic oligonucleotide
gtattgggtgttatcgttgtgttagatattatcgagattatgcagacggtactgatttag

SEQ ID NO: 178846 - DNA, 55 bp, Artificial
  Synthetic oligonucleotide
agcagacccgccataaaacgccctgagaagcccgtgacgggcttttcttgtatta

SEQ ID NO: 178847 - DNA, 60 bp, Artificial
  Synthetic oligonucleotide
gtattaatcgtgtgctgcacgttgttgatattcacactcctgacccggaatcgcctgtgc

SEQ ID NO: 178848 - DNA, 60 bp, Artificial
  Synthetic oligonucleotide
agcagcatcatggtccttgtgaagtacctaatggcctggcgttgtgcgcaattcatcata

SEQ ID NO: 178849 - DNA, 60 bp, Artificial
  Synthetic oligonucleotide
gactatctgatactaatgctagttcattatatcagttgatcaggaaatatattagtgctg

SEQ ID NO: 178850 - DNA, 60 bp, Artificial
  Synthetic oligonucleotide
gtattaagcgtattcaccgctgtttcccacaaggcactttcacgtgcgttgatatctgtg

SEQ ID NO: 178851 - DNA, 55 bp, Artificial
  Synthetic oligonucleotide
gtattaaacatagttcccaagactacctcttattttaagagagtcgaagtgtctg

SEQ ID NO: 178852 - DNA, 60 bp, Artificial
  Synthetic oligonucleotide
gtatctccccgttgagtatgtcgtgacatcgtcctttactgcgatggataagcagtcagc

SEQ ID NO: 178853 - DNA, 59 bp, Artificial
  Synthetic oligonucleotide
gtatctagcccctctgacatccccaaaaaagtggcataataatgttaaagagtcatctc

SEQ ID NO: 178854 - DNA, 60 bp, Artificial
  Synthetic oligonucleotide
gtatctaccagactgctgctgaattcgagcgctatgcactccgtatggcctcctgtagcg

SEQ ID NO: 178855 - DNA, 60 bp, Artificial
  Synthetic oligonucleotide
agcagcgtattacagtgacagttgacagcgacagctatcagttgctcaaggcatatgatg

SEQ ID NO: 178856 - DNA, 57 bp, Artificial
  Synthetic oligonucleotide
gtatcccgcccaccacctcaaggagcataaatccggcagtgacgataaaggcgaaaa

SEQ ID NO: 178857 - DNA, 60 bp, Artificial
  Synthetic oligonucleotide
gtatatacatatccgattatccaatgggcgatatattggtcaaatggataaacaatattt

SEQ ID NO: 178858 - DNA, 55 bp, Artificial
  Synthetic oligonucleotide
agccggcagcgatcgataaccgttcccggacgtaaccctggcgcctcaagggtca

SEQ ID NO: 178859 - DNA, 56 bp, Artificial
  Synthetic oligonucleotide
ggtttttatggctcaggacgtaaaaccgccctgagcgcgtttcagcggtgcgcgta

SEQ ID NO: 178860 - DNA, 57 bp, Artificial
  Synthetic oligonucleotide
attttgttctggtttatgaggtcgacagccagtggggaaaagtgtatgtcctgcgcg

SEQ ID NO: 178861 - DNA, 57 bp, Artificial
  Synthetic oligonucleotide
agccggcggtttggctaaaggtctagagttggcaggatttcagcatgtaggatttgt

SEQ ID NO: 178862 - DNA, 60 bp, Artificial
  Synthetic oligonucleotide
ggttttgagcgatgcttttcatacacaatcaagatctgaagcatcaagagccttatggcc

SEQ ID NO: 178863 - DNA, 57 bp, Artificial
  Synthetic oligonucleotide
ggtttgatggacatcgtggggctcctgtctaacgagcccgtcaatcccacctcgtct

SEQ ID NO: 178864 - DNA, 60 bp, Artificial
  Synthetic oligonucleotide
agccgtatagagtgcgtgaatgagaaagcggattccgcattgtggtcattatatgacagc

SEQ ID NO: 178865 - DNA, 52 bp, Artificial
  Synthetic oligonucleotide
ggtttcgaacaaggggtgatacaggttggtactctgaaaagtggggcggcgg

SEQ ID NO: 178866 - DNA, 50 bp, Artificial
  Synthetic oligonucleotide
ggtttactgcgtttcgggtggtctaccctcaaggaaaccggagaaacgcg

SEQ ID NO: 178867 - DNA, 56 bp, Artificial
  Synthetic oligonucleotide
ggttgttgaggttataggtgttaatacatggtttttctggtctggtgttgcgttga

SEQ ID NO: 178868 - DNA, 60 bp, Artificial
  Synthetic oligonucleotide
ggttgttaatacaagcatcgtgcatgtgtaatgcaacgatgatgcaattatgatgcaaag

SEQ ID NO: 178869 - DNA, 60 bp, Artificial
  Synthetic oligonucleotide
ggttgtagggcttacgtcgcaggatcgcgttgagcatcctgaaatcagggctccgtacat

SEQ ID NO: 178870 - DNA, 55 bp, Artificial
  Synthetic oligonucleotide
ggttgggcttctttcgacacttcgcaatccaagaaatccctagtccgttgattgg

SEQ ID NO: 178871 - DNA, 60 bp, Artificial
  Synthetic oligonucleotide
gactagaaagctcgggaggtgtaattcatggatacggcctagcagcatctcagttaaata

SEQ ID NO: 178872 - DNA, 56 bp, Artificial
  Synthetic oligonucleotide
ggttggcccgtccggtcaggacggttttacagcaaaatcctccatagcgaagcaga

SEQ ID NO: 178873 - DNA, 56 bp, Artificial
  Synthetic oligonucleotide
ggttggcagcgttatcatcgggtacctcctttcatttcgcggattagcgcccgtaa

SEQ ID NO: 178874 - DNA, 60 bp, Artificial
  Synthetic oligonucleotide
agcctataacaggcctccctgaggcattggctagcatctgtgcattggaaaaacaggctc

SEQ ID NO: 178875 - DNA, 60 bp, Artificial
  Synthetic oligonucleotide
ggttgattacacttccccccattcaggcgtatgactcaattgaagtctacgatgtctatg

SEQ ID NO: 178876 - DNA, 52 bp, Artificial
  Synthetic oligonucleotide
ggttgatccgtcaaaatttacgtttactccgccgcaaggggtaacgatagac

SEQ ID NO: 178877 - DNA, 58 bp, Artificial
  Synthetic oligonucleotide
ggttgacaggacgatacagattaacggggatgcatccgggcgctatggtcttaaacgc

SEQ ID NO: 178878 - DNA, 60 bp, Artificial
  Synthetic oligonucleotide
ggttctgtgttaccaagttctgccgcgcatgtcacatatgttgccaagtatgtcgaaata

SEQ ID NO: 178879 - DNA, 60 bp, Artificial
  Synthetic oligonucleotide
ggttatttatcgcgaacaacagctaagggatgaacaggagcgtgcccggtacagacatga

SEQ ID NO: 178880 - DNA, 56 bp, Artificial
  Synthetic oligonucleotide
ggttattcacctcgctagttaggcttcccagcagaaacgttaaagggcagagagtg

SEQ ID NO: 178881 - DNA, 56 bp, Artificial
  Synthetic oligonucleotide
ggttatcagggagggtcagcgttctgcggttctccggggcgttggggtcatgtagc

SEQ ID NO: 178882 - DNA, 60 bp, Artificial
  Synthetic oligonucleotide
gcagtacattatctaacaccacaagaagcagcaggagtgatacataatatggaaactatg

SEQ ID NO: 178883 - DNA, 60 bp, Artificial
  Synthetic oligonucleotide
atttttcctcgcgactctctggcgactcgccttctctgaacaccagagcgacagtgtgtt

SEQ ID NO: 178884 - DNA, 56 bp, Artificial
  Synthetic oligonucleotide
agcctttcctgcgtacggaggcattacattaccttttgcgtatcggggctgtagtg

SEQ ID NO: 178885 - DNA, 58 bp, Artificial
  Synthetic oligonucleotide
agcgaaaggagctatcacctgttcaggggtggatcagggctacggaggtgacgcgagg

SEQ ID NO: 178886 - DNA, 55 bp, Artificial
  Synthetic oligonucleotide
ggttatattgtcctaatcccgcctgattatttgtttggcgaggctcgtaacgaaa

SEQ ID NO: 178887 - DNA, 60 bp, Artificial
  Synthetic oligonucleotide
agccatagctgaaatccactttcgtgtagggattacggctgagaacataacattgctttg

SEQ ID NO: 178888 - DNA, 57 bp, Artificial
  Synthetic oligonucleotide
agccatcaaaggtacaaatcccgcaccaggcgtatattgatgcgggattttataacc

SEQ ID NO: 178889 - DNA, 60 bp, Artificial
  Synthetic oligonucleotide
gtacggcttgtcgcccgcgacagccttattggtcattttatctggctatcgctggcagtg

SEQ ID NO: 178890 - DNA, 60 bp, Artificial
  Synthetic oligonucleotide
agccattgcgcaatttacaccggtggtcacgattacgcatggtggcgcggtgcactgatt

SEQ ID NO: 178891 - DNA, 59 bp, Artificial
  Synthetic oligonucleotide
gtacggaagtatccccctatcatcgcagtaactttatgctatcgatcgtcgaaccttca

SEQ ID NO: 178892 - DNA, 60 bp, Artificial
  Synthetic oligonucleotide
gtacgctgacagattctcccatttgcgtcgccacgactggagcaccaccggatactgctg

SEQ ID NO: 178893 - DNA, 54 bp, Artificial
  Synthetic oligonucleotide
gtacgcgggcaagcgaaaaagctataacgcttcccggccgacaggcgacccaaa

SEQ ID NO: 178894 - DNA, 54 bp, Artificial
  Synthetic oligonucleotide
caaaacagcgggacaagatgtgtttttggagtaccgccggcccgctaaagactc

SEQ ID NO: 178895 - DNA, 60 bp, Artificial
  Synthetic oligonucleotide
gtacgcgattattccaacacggaagatacgatcagcttattgcttaccgttggcctgcca

SEQ ID NO: 178896 - DNA, 55 bp, Artificial
  Synthetic oligonucleotide
gtacgcatttcatcttggaaatacaaagcctacgagggaggaaaagcaaaggtgg

SEQ ID NO: 178897 - DNA, 55 bp, Artificial
  Synthetic oligonucleotide
gtacccttcaagctcaccgtgctgggaatcccattcataaattttacgcttttta

SEQ ID NO: 178898 - DNA, 60 bp, Artificial
  Synthetic oligonucleotide
gtacagtcctctgactatttccaagtgcacgggcaattgtccgacctacagctgcgccaa

SEQ ID NO: 178899 - DNA, 59 bp, Artificial
  Synthetic oligonucleotide
gtacaaagcaatgcggcaggctttcgattcccttccactggcaaaacagggagaggctg

SEQ ID NO: 178900 - DNA, 58 bp, Artificial
  Synthetic oligonucleotide
agcccgctcaagattaaccattgccaaacgcgtaccacgatagacccgtgaaagcgca

SEQ ID NO: 178901 - DNA, 55 bp, Artificial
  Synthetic oligonucleotide
gtaattgggaccacggtcccacctggatatccaatgccaacgttggtaattggga

SEQ ID NO: 178902 - DNA, 60 bp, Artificial
  Synthetic oligonucleotide
agcccgtccgcctctgggcagtatggccaagtcatcaatgtctttcacgacgtccaggac

SEQ ID NO: 178903 - DNA, 59 bp, Artificial
  Synthetic oligonucleotide
agccctacttgatctggttgggagctggaccatattgctcctaactgaagttgtgttcc

SEQ ID NO: 178904 - DNA, 59 bp, Artificial
  Synthetic oligonucleotide
agccctgcacggtttattgcaccgggacgtaaatatccgcagccgtatgtggcactgcc

SEQ ID NO: 178905 - DNA, 60 bp, Artificial
  Synthetic oligonucleotide
gacgtcggtaattacagctgcacgcccgaatgcgcgtgaggtcagggcattcttatcgac

SEQ ID NO: 178906 - DNA, 56 bp, Artificial
  Synthetic oligonucleotide
gtaagtatccctgcaaaacgaaccattcacttttagagatcctccgacatactaat

SEQ ID NO: 178907 - DNA, 60 bp, Artificial
  Synthetic oligonucleotide
gtaagaaagttaattcactgactgatgaccgagtgctgaaagaagtcatgcgactggggg

SEQ ID NO: 178908 - DNA, 57 bp, Artificial
  Synthetic oligonucleotide
gtaactctgcgtaatccattaatagctcgtgccattcttcaaatgttacggtttgtt

SEQ ID NO: 178909 - DNA, 60 bp, Artificial
  Synthetic oligonucleotide
gtaaagctgtcaggggatatatttggtattaactgagatgatgctgcattagcactcccg

SEQ ID NO: 178910 - DNA, 59 bp, Artificial
  Synthetic oligonucleotide
gtaaaagcgcccactctggcgaaacgactacagcatgagaaaagtcgatttgtgatccc

SEQ ID NO: 178911 - DNA, 60 bp, Artificial
  Synthetic oligonucleotide
gtaaaacgcatctgacctccgcacaggatgcacttcagcgggtcaaccttcagtaaccgc

SEQ ID NO: 178912 - DNA, 55 bp, Artificial
  Synthetic oligonucleotide
ggttttttcacccttttgagtcctttcgccggggctgagacaagcacagtcgctg

SEQ ID NO: 178913 - DNA, 57 bp, Artificial
  Synthetic oligonucleotide
gtgaaaatagttacccatcgggtcctgataaaccagacgtagcgacattcctggatg

SEQ ID NO: 178914 - DNA, 53 bp, Artificial
  Synthetic oligonucleotide
gtcttaacgataatgtagccgttatttttaactaataaggtcatattgttaac

SEQ ID NO: 178915 - DNA, 58 bp, Artificial
  Synthetic oligonucleotide
gtctgtctatgtgttttcgtgcatttataaatccttcgtcaggatcttaaatttagtg

SEQ ID NO: 178916 - DNA, 57 bp, Artificial
  Synthetic oligonucleotide
gacggtcagcacggtcaaagtacggttggagacgcttaccgcgctgtaattcgatgt

SEQ ID NO: 178917 - DNA, 60 bp, Artificial
  Synthetic oligonucleotide
agaccgcaagggtgcacatcctcaagggcacctagcggaataccgtggcgtactgcaggc

SEQ ID NO: 178918 - DNA, 60 bp, Artificial
  Synthetic oligonucleotide
gtctggctgttgaagcactagtgcagccgttcctcaatatgttcagattattagatcatc

SEQ ID NO: 178919 - DNA, 54 bp, Artificial
  Synthetic oligonucleotide
agacgaaaaaagagaaccgtcgtcttattcttgatgggggcgtggacacaacaa

SEQ ID NO: 178920 - DNA, 60 bp, Artificial
  Synthetic oligonucleotide
agacgcgatgcgtactggcggtgtagtgctgtcgcttcggcggatgaagatgagctaccg

SEQ ID NO: 178921 - DNA, 60 bp, Artificial
  Synthetic oligonucleotide
agacgctgattcgcaacggcgtagttacgctcatggtatcggtccggccaatattgctcc

SEQ ID NO: 178922 - DNA, 55 bp, Artificial
  Synthetic oligonucleotide
agacggacgttgagctgtataccgtggataaccatacaggacgggtggaacacgt

SEQ ID NO: 178923 - DNA, 57 bp, Artificial
  Synthetic oligonucleotide
gtctcaatacagccctccttgataccgggtcggcctacggtctcgccctgagttgcc

SEQ ID NO: 178924 - DNA, 60 bp, Artificial
  Synthetic oligonucleotide
agactcagtggctcgatcggcgtccaaaccgctgcgatgttatacagcgtcttgttgaag

SEQ ID NO: 178925 - DNA, 58 bp, Artificial
  Synthetic oligonucleotide
gtcgttgaatggttttaaggaagtagtgacaagctagcttcccattgctaagattgga

SEQ ID NO: 178926 - DNA, 60 bp, Artificial
  Synthetic oligonucleotide
agactctgcagctaataacgcatttataataacatctgagcgtactggaatatccttgtt

SEQ ID NO: 178927 - DNA, 60 bp, Artificial
  Synthetic oligonucleotide
gacgcttactctgatgtaagtgcccacctctctgggacatcagtaacttcccgccttcgc

SEQ ID NO: 178928 - DNA, 60 bp, Artificial
  Synthetic oligonucleotide
gtcgtgtgcattacgaaacttagtctgtagccataatgaaaggatgcgaaacatacggtc

SEQ ID NO: 178929 - DNA, 59 bp, Artificial
  Synthetic oligonucleotide
gtcgtgtctgtcagggttggattcaagagagtgttacctggtatggcgtggtagtcgga

SEQ ID NO: 178930 - DNA, 58 bp, Artificial
  Synthetic oligonucleotide
gtcgtcggcctctgacaggaaataagaccatgtcgggagacgagaataaactcaggaa

SEQ ID NO: 178931 - DNA, 57 bp, Artificial
  Synthetic oligonucleotide
agagaaacagctgtctgacgtggtggaacgtaccgttacccccctgatgaaagcgca

SEQ ID NO: 178932 - DNA, 57 bp, Artificial
  Synthetic oligonucleotide
gtcgggatttttctggcgtcatgggggttgattcagtggcaggaaagccgtattgcg

SEQ ID NO: 178933 - DNA, 55 bp, Artificial
  Synthetic oligonucleotide
gtcgggagtaggagcgattaatattaaaagagcgcttaatgaaattaaagatggg

SEQ ID NO: 178934 - DNA, 59 bp, Artificial
  Synthetic oligonucleotide
agagacggattgaaacagggcaaataagtggcgtcacgatgaaaatgcttaaatcgcga

SEQ ID NO: 178935 - DNA, 52 bp, Artificial
  Synthetic oligonucleotide
gtcggaagtggtcgcgttaaaagcgacccccgcaacgagggcaatcgttcgg

SEQ ID NO: 178936 - DNA, 59 bp, Artificial
  Synthetic oligonucleotide
agagagattacgacgagagtaaaacgatcacaaggagatctctgaccgtttaccagtga

SEQ ID NO: 178937 - DNA, 60 bp, Artificial
  Synthetic oligonucleotide
gtgccatgccataaagttacagtgtcccataggtgtctcatctcatggtttcagtaaaac

SEQ ID NO: 178938 - DNA, 60 bp, Artificial
  Synthetic oligonucleotide
caaaataaacatgatgacgatacaatcttggctatgcagcgggagctggtccgagcttga

SEQ ID NO: 178939 - DNA, 60 bp, Artificial
  Synthetic oligonucleotide
gtgccacagcgccgcgagaatctctacgcgatcgccataactccactgacctgaattgat

SEQ ID NO: 178940 - DNA, 56 bp, Artificial
  Synthetic oligonucleotide
agaactacagcgcgtctgcgactacgttgactgcgttgaactggaaacgggaaaac

SEQ ID NO: 178941 - DNA, 59 bp, Artificial
  Synthetic oligonucleotide
gtgccaacagcaaatcaccagagcggggaggcgcaaaaaaagcgagtattccccagaca

SEQ ID NO: 178942 - DNA, 60 bp, Artificial
  Synthetic oligonucleotide
gtgcatggtctgataccatgattaaccttgaagcacggaaactcgttaataccgcaaata

SEQ ID NO: 178943 - DNA, 60 bp, Artificial
  Synthetic oligonucleotide
gtgcagatttatacgtcactgtcagaagaagacgcacatgcgcgtcttgcccgttctcca

SEQ ID NO: 178944 - DNA, 60 bp, Artificial
  Synthetic oligonucleotide
agaagaaccacggcgtgcagctgtcgctctgcggggagaagaaactgtcctgcgtcaaag

SEQ ID NO: 178945 - DNA, 60 bp, Artificial
  Synthetic oligonucleotide
gtgcaagcctggcggaagacggtaattggtcattcaataacttatcgcaggataacgtca

SEQ ID NO: 178946 - DNA, 55 bp, Artificial
  Synthetic oligonucleotide
gtgattttattgtacgtcgagagtttaaaagccccctctggataaggcgattatc

SEQ ID NO: 178947 - DNA, 60 bp, Artificial
  Synthetic oligonucleotide
agaagcacacccgggaatacatcacccatctggtacagtcagcctactacgatactgaac

SEQ ID NO: 178948 - DNA, 56 bp, Artificial
  Synthetic oligonucleotide
agaagcgattacacggggtcttgaggctctttaccatgccggagcaataaaaacgc

SEQ ID NO: 178949 - DNA, 60 bp, Artificial
  Synthetic oligonucleotide
gacgctctggaataccggagcacgactgaacgaagctctggcactgaaacctgccgattt

SEQ ID NO: 178950 - DNA, 60 bp, Artificial
  Synthetic oligonucleotide
agaagctatctgatgggacttggatagatagagagtctccactctgggttgactgggtta

SEQ ID NO: 178951 - DNA, 60 bp, Artificial
  Synthetic oligonucleotide
gtgatgatgggaatgtgatctttaataacgataaaagtgctgttgatcggcctatggtta

SEQ ID NO: 178952 - DNA, 60 bp, Artificial
  Synthetic oligonucleotide
gtgatagataagttccgtggttggatcttcttgagatcctgaccagtgagatgtaacctc

SEQ ID NO: 178953 - DNA, 60 bp, Artificial
  Synthetic oligonucleotide
gtgagcgcctgaatcacatcctgacggccttttatctccccgacatgataaagagcgtct

SEQ ID NO: 178954 - DNA, 51 bp, Artificial
  Synthetic oligonucleotide
agaattctcggtgcatactttttttacaggggtattaaggggttgaaagac

SEQ ID NO: 178955 - DNA, 60 bp, Artificial
  Synthetic oligonucleotide
gtgagagttccgctaccggcgcagagagtttcatcgacagcggacacctgatgagttgcc

SEQ ID NO: 178956 - DNA, 53 bp, Artificial
  Synthetic oligonucleotide
gtgacgcccttcttattaaaacgggcgagacattgatgacgaaaaaacgacct

SEQ ID NO: 178957 - DNA, 57 bp, Artificial
  Synthetic oligonucleotide
agaatttgagaaagctgcgtcgggtcactcccttacgacgcatggcttgataaaagg

SEQ ID NO: 178958 - DNA, 56 bp, Artificial
  Synthetic oligonucleotide
gtgaatagcgtctaaattaaagtaagaatacgaccaggtactcttcagaaaagaga

SEQ ID NO: 178959 - DNA, 58 bp, Artificial
  Synthetic oligonucleotide
agacaactcagcctctgaatgctctaaacggctcttaaacccgtttagacgagctata

SEQ ID NO: 178960 - DNA, 58 bp, Artificial
  Synthetic oligonucleotide
gacgcggattgtcgagtgaagcccgtcatccctgacgggggcgctggagtcaggcggg

SEQ ID NO: 178961 - DNA, 60 bp, Artificial
  Synthetic oligonucleotide
agacaatgaccattacagctgcggaatatttcgattcattccctgacatggggcggaaaa

SEQ ID NO: 178962 - DNA, 53 bp, Artificial
  Synthetic oligonucleotide
agacaattttttccctgacaggtataagggattttgcccccggacattgttca

SEQ ID NO: 178963 - DNA, 60 bp, Artificial
  Synthetic oligonucleotide
agacacgatatatttcacttggttgatcgcctccataatccgcgtcatggttgcacctgt

SEQ ID NO: 178964 - DNA, 56 bp, Artificial
  Synthetic oligonucleotide
gtccatagattagaaggtcgtactggtccaatacgagtattagttgtaggaggtag

SEQ ID NO: 178965 - DNA, 59 bp, Artificial
  Synthetic oligonucleotide
gtccacgcccccatcaagaataagacgacggttctcttttttcgtctcatgatgctgaa

SEQ ID NO: 178966 - DNA, 60 bp, Artificial
  Synthetic oligonucleotide
agatcatttgaccggtcagctgaccgcatttggcgagtatattcagcgcgttaaagcgta

SEQ ID NO: 178967 - DNA, 55 bp, Artificial
  Synthetic oligonucleotide
gtcatttccccgttaccaggcatgggggcctcgccataccccgtaacgactgcgc

SEQ ID NO: 178968 - DNA, 60 bp, Artificial
  Synthetic oligonucleotide
agatctaatacgcatttgcaggtgtcatactggcgggtttgacgcataacgtcataaggt

SEQ ID NO: 178969 - DNA, 57 bp, Artificial
  Synthetic oligonucleotide
gtcatggtcttaaggctccttgtatgggggatttgttagggggaatgataccgatga

SEQ ID NO: 178970 - DNA, 60 bp, Artificial
  Synthetic oligonucleotide
agatgaacctgaagcaggatgaacggctgtccggtgagctgataaccggacgtcgtcagc

SEQ ID NO: 178971 - DNA, 60 bp, Artificial
  Synthetic oligonucleotide
gacgcgccagacgcattctcaacgtaccatccggctacccggtgattatgcgtaagcgca

SEQ ID NO: 178972 - DNA, 60 bp, Artificial
  Synthetic oligonucleotide
agatgagcgacaacacacctggcgacctcagagatacaactacgcctattgctatggcac

SEQ ID NO: 178973 - DNA, 60 bp, Artificial
  Synthetic oligonucleotide
gtcatctcaatgtctctgtcagatcagtaactacaggaaggatgactgtacaaactgtct

SEQ ID NO: 178974 - DNA, 60 bp, Artificial
  Synthetic oligonucleotide
gtcagtcaggcattctgctgcataaccatgcatacaggcaaaagcgcctgagggcgtttc

SEQ ID NO: 178975 - DNA, 60 bp, Artificial
  Synthetic oligonucleotide
gtcagtatggctgccggactcactgaccttgcgactggtaaagtaatcgctggcctcttt

SEQ ID NO: 178976 - DNA, 60 bp, Artificial
  Synthetic oligonucleotide
gtcagtaccgtctcttcatcacgcgataccgcattgaccagcagtgctgcatagagcgag

SEQ ID NO: 178977 - DNA, 60 bp, Artificial
  Synthetic oligonucleotide
gtcaggggcgactctgtgtttaatggagtgaagtccatatccagcttgtaccccatcttg

SEQ ID NO: 178978 - DNA, 60 bp, Artificial
  Synthetic oligonucleotide
gtcagggcaagcacgcctccgaactgtgaccattctttcgatgcccattgcgcgctttta

SEQ ID NO: 178979 - DNA, 60 bp, Artificial
  Synthetic oligonucleotide
agatgtgtataagcatatcatgctgtacgagtaatggtcatcctaagattaggggtatgt

SEQ ID NO: 178980 - DNA, 60 bp, Artificial
  Synthetic oligonucleotide
agatgttggcgtcaggatttgaagcggagtctcgggccctgtttgcacgaggtgatttgc

SEQ ID NO: 178981 - DNA, 60 bp, Artificial
  Synthetic oligonucleotide
gtcagctgttgttcagctctggttaatgcattacgggccgtcttaagcgattccgtcacc

SEQ ID NO: 178982 - DNA, 51 bp, Artificial
  Synthetic oligonucleotide
gacgcgacgaaaaaaggtggcgcgaaaacgaaaggccgtggacgtaaggcc

SEQ ID NO: 178983 - DNA, 57 bp, Artificial
  Synthetic oligonucleotide
agattatctggcagcagccgtaagcttccggctgtgaacgaaaaaaaccgccttggc

SEQ ID NO: 178984 - DNA, 57 bp, Artificial
  Synthetic oligonucleotide
gtcagagtcgggttcgtgatttgggacgccgcgaatacagtaaacatatgttacgtc

SEQ ID NO: 178985 - DNA, 57 bp, Artificial
  Synthetic oligonucleotide
gtcacgtcatcgtcgtccgttaccggcacatcttccccgtgaaatacaccgcctgga

SEQ ID NO: 178986 - DNA, 60 bp, Artificial
  Synthetic oligonucleotide
agcaaacgacaacacgcctgaggtatatttcttcgcatacgggctactatcaatgagtga

SEQ ID NO: 178987 - DNA, 54 bp, Artificial
  Synthetic oligonucleotide
gtcacgggactttatcgattataacgaacgcccggccaacggttatgacctgcg

SEQ ID NO: 178988 - DNA, 58 bp, Artificial
  Synthetic oligonucleotide
gtcacggcaggtgtaagcaaatccagtgagaaataatatatcgccgaccttaagagtt

SEQ ID NO: 178989 - DNA, 55 bp, Artificial
  Synthetic oligonucleotide
gtcacgctggcgtttatcaggttcccctgttgaatcggcaattcgtttcggaccc

SEQ ID NO: 178990 - DNA, 60 bp, Artificial
  Synthetic oligonucleotide
gtcacacgcgtgacctacagcggcgtgaacggaggcgaagaaattgccatgcgatacggc

SEQ ID NO: 178991 - DNA, 60 bp, Artificial
  Synthetic oligonucleotide
gtcgcgtccgtccatgacggtatcattcattaccaccagcacgccgcggttggcagactg

SEQ ID NO: 178992 - DNA, 60 bp, Artificial
  Synthetic oligonucleotide
gtcgcgccttttatcaccgatagcgccggacgcgctaacatcacattgcaagcctacccg

SEQ ID NO: 178993 - DNA, 57 bp, Artificial
  Synthetic oligonucleotide
gcagtaacggcggtgccagtgtcggcagcttcccggaacgggcaaccggctcaccca

SEQ ID NO: 178994 - DNA, 58 bp, Artificial
  Synthetic oligonucleotide
gacgcctggctctttgttctggtaataagtaccttcgagcaagtcggtaaacatgaca

SEQ ID NO: 178995 - DNA, 55 bp, Artificial
  Synthetic oligonucleotide
gtcgcctggcaaccgggtttcgtgctggaaacaggcaacggttactctacctata

SEQ ID NO: 178996 - DNA, 54 bp, Artificial
  Synthetic oligonucleotide
agagccggtttacacgttactgggaggaagagtaccgctggcacagtttcttcc

SEQ ID NO: 178997 - DNA, 56 bp, Artificial
  Synthetic oligonucleotide
agagcgcccggcagttacgtaacgcggaagcattaacgcttaaatcgcccgcgcaa

SEQ ID NO: 178998 - DNA, 60 bp, Artificial
  Synthetic oligonucleotide
gtcgccgtatagctccagactttgcatatgataacggcgtatttacttatctcggcttta

SEQ ID NO: 178999 - DNA, 60 bp, Artificial
  Synthetic oligonucleotide
agagcgtccagtttctgctgaatgacgtctagctgagcattttccgcctggctaacgaca

SEQ ID NO: 179000 - DNA, 59 bp, Artificial
  Synthetic oligonucleotide
agagctacacaagactttaaagaggccagcgattactttaccagtcgcaaggtcagtga

SEQ ID NO: 179001 - DNA, 60 bp, Artificial
  Synthetic oligonucleotide
gtcgccggacgtactaccgacacaagaagcgccaatctgagattgagtgacaccagataa

SEQ ID NO: 179002 - DNA, 60 bp, Artificial
  Synthetic oligonucleotide
gtcgccaggctaaaggccagcgagaaaccaacggtacgcacatagactggcatcacttcg

SEQ ID NO: 179003 - DNA, 55 bp, Artificial
  Synthetic oligonucleotide
gtcctggcctcgctaaaaagctcttacgacacgaaaaaagagctgcttaacgatt

SEQ ID NO: 179004 - DNA, 52 bp, Artificial
  Synthetic oligonucleotide
gtcctaggtttgttagaaattttctaagtgaatctgggggtgattttcggaa

SEQ ID NO: 179005 - DNA, 60 bp, Artificial
  Synthetic oligonucleotide
gacgacttaatatactgcgacagagcgtacgttctgtgtaaatcgcaatgaaatggttta

SEQ ID NO: 179006 - DNA, 55 bp, Artificial
  Synthetic oligonucleotide
gtccgtgggtggaattttagtgatcctgtttatattaaatacgcaaaggagaaga

SEQ ID NO: 179007 - DNA, 53 bp, Artificial
  Synthetic oligonucleotide
agaggttccgtaaaaactctgggtaataccatcgaccatagtgtttacacgac

SEQ ID NO: 179008 - DNA, 59 bp, Artificial
  Synthetic oligonucleotide
agagtatgaagatcaggttcgcgccaaagtgaccgccgcccgtgctgacacgcgtccgg

SEQ ID NO: 179009 - DNA, 60 bp, Artificial
  Synthetic oligonucleotide
agagtccatgatacatacaatgatgacttgtcgtttttcttactggcattatcatcaatc

SEQ ID NO: 179010 - DNA, 58 bp, Artificial
  Synthetic oligonucleotide
gtccgtcctggctggtacggtaactgacaagacctgagcgcatatcacggtaaaactg

SEQ ID NO: 179011 - DNA, 58 bp, Artificial
  Synthetic oligonucleotide
gtccgggagacaacgttccgacatttaactcgagcgagcatgaaacgcgtctgcttcg

SEQ ID NO: 179012 - DNA, 54 bp, Artificial
  Synthetic oligonucleotide
agataaacaatttgaccgaaaagggcagtttggcataccgaaatacggtgcctc

SEQ ID NO: 179013 - DNA, 55 bp, Artificial
  Synthetic oligonucleotide
gtccgaaaaaaacagatccccgatggtagaggcgctaattacaaatatagccaag

SEQ ID NO: 179014 - DNA, 60 bp, Artificial
  Synthetic oligonucleotide
gtcccgttttatcgtcatcacgaagctttctgctatgccattgctttccgggcttcgcac

SEQ ID NO: 179015 - DNA, 60 bp, Artificial
  Synthetic oligonucleotide
agatatggcgtgctcaggatgccggtaaaatgtagtacaaccacaaattcaccagactta

SEQ ID NO: 179016 - DNA, 56 bp, Artificial
  Synthetic oligonucleotide
gacgacgacagccgtaattactgatcggtaaaaacggccttcctcagctattttgc

SEQ ID NO: 179017 - DNA, 59 bp, Artificial
  Synthetic oligonucleotide
gtccatcgtgacgctcctggtaaatgtttggctatctcagcgaagggagtgaaagtccc

SEQ ID NO: 179018 - DNA, 60 bp, Artificial
  Synthetic oligonucleotide
tatctcagaggcctgtaacagcgccacaaaccggagggctcagcgttcccgttgacgcta

SEQ ID NO: 179019 - DNA, 59 bp, Artificial
  Synthetic oligonucleotide
acctgaaccactgaattagagtaatgtggcgctattcatagcgtaattttttctgttgc

SEQ ID NO: 179020 - DNA, 60 bp, Artificial
  Synthetic oligonucleotide
tatctatcacggtaacataaacgggaatctggacgtacttcagcatcatgagacgaaaaa

SEQ ID NO: 179021 - DNA, 60 bp, Artificial
  Synthetic oligonucleotide
acctgatgtccgagtatggtgatctatcacacctgaattggtagtataatcgttcacgac

SEQ ID NO: 179022 - DNA, 57 bp, Artificial
  Synthetic oligonucleotide
acctgccggtcactcggatttaccataacacctgttcaccgcaccgccccagagcca

SEQ ID NO: 179023 - DNA, 52 bp, Artificial
  Synthetic oligonucleotide
tatcgcggaaggtaagaggctttatgagggggtaactaattttaaggttcag

SEQ ID NO: 179024 - DNA, 60 bp, Artificial
  Synthetic oligonucleotide
tatcgcaaggcgatgcagagagtgagcttctacgccctggacaatctgcaacgattcttc

SEQ ID NO: 179025 - DNA, 58 bp, Artificial
  Synthetic oligonucleotide
acctggtcctccaccataaggtggactatctacactacgataattatcacttgtgaaa

SEQ ID NO: 179026 - DNA, 54 bp, Artificial
  Synthetic oligonucleotide
acctgtcaccccgcaaaccctgtttgagctgggctctataagtaaaaccttcac

SEQ ID NO: 179027 - DNA, 53 bp, Artificial
  Synthetic oligonucleotide
gacgaaaaaacgaccttcgcttaaaactctatggcactcttttattactgaac

SEQ ID NO: 179028 - DNA, 60 bp, Artificial
  Synthetic oligonucleotide
acctgtctgctgctgtgatcgcgctgaacgcgttttggcggtgcgtacaattaagggatt

SEQ ID NO: 179029 - DNA, 60 bp, Artificial
  Synthetic oligonucleotide
tatccctcttttgttcatcctctcgcggacgatggtagcagaatgatgtcgattaccgtt

SEQ ID NO: 179030 - DNA, 60 bp, Artificial
  Synthetic oligonucleotide
acctgtttgcaaccatgccatttcccagtcgtccgctgtgttcggacgatctgagccacg

SEQ ID NO: 179031 - DNA, 60 bp, Artificial
  Synthetic oligonucleotide
tatcattattgtgactaaaaagcgctcaattctctgagagtgtggctgtatgcctgctgt

SEQ ID NO: 179032 - DNA, 59 bp, Artificial
  Synthetic oligonucleotide
accttaggttgagggatttacaatgtcggatctgattgcctacaaatccaatgcactgg

SEQ ID NO: 179033 - DNA, 60 bp, Artificial
  Synthetic oligonucleotide
tatcatggcacagcatatcaactgataaataatccctgtgcagtgcagccgctgttgcat

SEQ ID NO: 179034 - DNA, 60 bp, Artificial
  Synthetic oligonucleotide
tatcaagcgtagccattaacgtgctccctcgttcttcgccagacgcataatcatgaactt

SEQ ID NO: 179035 - DNA, 55 bp, Artificial
  Synthetic oligonucleotide
tatatcgaggataaatcgggttctaagccgaacggccttaactcttccgtctaca

SEQ ID NO: 179036 - DNA, 60 bp, Artificial
  Synthetic oligonucleotide
tatagtcctgttgcagctgctctaaggcgttcagtaaatgtgtttccagctctgtcattc

SEQ ID NO: 179037 - DNA, 60 bp, Artificial
  Synthetic oligonucleotide
tatacaccctatcggtagggcggtcagcagttgccccctagtgatatttgctaagcgaca

SEQ ID NO: 179038 - DNA, 56 bp, Artificial
  Synthetic oligonucleotide
caaacgcgaatattacagacataaatacgctcatgtaaataataaccggagtttaa

SEQ ID NO: 179039 - DNA, 60 bp, Artificial
  Synthetic oligonucleotide
acgaagtgagcgaatgaacgaggaggcgtcatgtcatctgccctgacatagtaccgggtc

SEQ ID NO: 179040 - DNA, 60 bp, Artificial
  Synthetic oligonucleotide
tattagcacatggatatgtccacacaacagcccgccataagtgcaggcaggtttgactag

SEQ ID NO: 179041 - DNA, 60 bp, Artificial
  Synthetic oligonucleotide
tattaagcagaaagataccgccgggcttcagacgctccgccatctgatatttatcgataa

SEQ ID NO: 179042 - DNA, 60 bp, Artificial
  Synthetic oligonucleotide
tatgtttgccagcagcggtgagatgaccgcaccctgtggggtgccttcctccgttgctcg

SEQ ID NO: 179043 - DNA, 60 bp, Artificial
  Synthetic oligonucleotide
tatgtcaactggtcgcattatctctatattgcagacgaataatgtgacgccatacgatta

SEQ ID NO: 179044 - DNA, 51 bp, Artificial
  Synthetic oligonucleotide
accgtgccgaccgggaaacatttcccgcccgtcccggtgttctcaggaggc

SEQ ID NO: 179045 - DNA, 60 bp, Artificial
  Synthetic oligonucleotide
tatggccgaaactctgacgcgcaaagagtggatcgactcgctgacgaatagcgggatgcg

SEQ ID NO: 179046 - DNA, 60 bp, Artificial
  Synthetic oligonucleotide
tatgctgtgccatgatacgtcctaaagaaacaggacaggatgtgcaattgtaataccgtc

SEQ ID NO: 179047 - DNA, 59 bp, Artificial
  Synthetic oligonucleotide
tatgcccttccctgcgaagacgtaacatatgtttactgtattcgcggcgtcccaaatca

SEQ ID NO: 179048 - DNA, 60 bp, Artificial
  Synthetic oligonucleotide
tatgcccctaatgggccaagaacagttaacgttattggtccagcatcttatcagatctct

SEQ ID NO: 179049 - DNA, 59 bp, Artificial
  Synthetic oligonucleotide
attgggggttatcgagttacctgcggctgcggcaatccgcacgagctgatccactgttt

SEQ ID NO: 179050 - DNA, 58 bp, Artificial
  Synthetic oligonucleotide
accgttaaaaatgaccatgctcgatacatatgtccggcacggtaagaatcgacagttc

SEQ ID NO: 179051 - DNA, 60 bp, Artificial
  Synthetic oligonucleotide
tatgccatacacaccaatgacggtcgcactattgtcagcgacggcaaacctaaagaatca

SEQ ID NO: 179052 - DNA, 60 bp, Artificial
  Synthetic oligonucleotide
tatgaggcaggtgcgtactgagtctgtggagtggggaacgcggcttgttaacacgctcta

SEQ ID NO: 179053 - DNA, 56 bp, Artificial
  Synthetic oligonucleotide
acctaagcattcaggacacttaaattccgcccgggcgacatagctagataaatggt

SEQ ID NO: 179054 - DNA, 53 bp, Artificial
  Synthetic oligonucleotide
acctaagggaacagttagaaccggagagctaaccaccgcgcgaacacgctaaa

SEQ ID NO: 179055 - DNA, 55 bp, Artificial
  Synthetic oligonucleotide
acctaatagaacaggtgaaaccagtaaaacaaagcaactagaacatgaaattgaa

SEQ ID NO: 179056 - DNA, 58 bp, Artificial
  Synthetic oligonucleotide
tatgagcagttcaggagcgttacggaaggtaacgacaaattgggcaactttctgagta

SEQ ID NO: 179057 - DNA, 59 bp, Artificial
  Synthetic oligonucleotide
tatgaccaatgaagcagttctcccccagtgttacgttctcacaaataaacgtgtgcgac

SEQ ID NO: 179058 - DNA, 59 bp, Artificial
  Synthetic oligonucleotide
tatgaatacgattagtataacggaaatcgtgttgagtgtgcttcttgcgggcgctttgg

SEQ ID NO: 179059 - DNA, 59 bp, Artificial
  Synthetic oligonucleotide
acctcccagtcgttctcaactgagtaggagaaatcatccatattgaattgtacggctgt

SEQ ID NO: 179060 - DNA, 60 bp, Artificial
  Synthetic oligonucleotide
attggtcgcgcattatacggccttagtgatgtaatgcctatcctgcccgcacctgcgagg

SEQ ID NO: 179061 - DNA, 60 bp, Artificial
  Synthetic oligonucleotide
tatctgccggtacgtttccggactgactgcccccaatgacagcttgatgcggcagccatt

SEQ ID NO: 179062 - DNA, 59 bp, Artificial
  Synthetic oligonucleotide
acctcgcacatttctgtttaccgtattggctgttgccattagcggcactttgccgtgtc

SEQ ID NO: 179063 - DNA, 60 bp, Artificial
  Synthetic oligonucleotide
tatctcgatggctatgaaggcagacagtaagtggatttaccataacgcgtcattacgcgc

SEQ ID NO: 179064 - DNA, 60 bp, Artificial
  Synthetic oligonucleotide
acgcaaaagcagccctgtcaaagctccctaagctgacacgtgccaacgtagactacgcag

SEQ ID NO: 179065 - DNA, 59 bp, Artificial
  Synthetic oligonucleotide
tagctcaaataactccgtgctgaatgctcaatttaatttgtggggtgacggaaatcgac

SEQ ID NO: 179066 - DNA, 60 bp, Artificial
  Synthetic oligonucleotide
tagcgtcatatcatcccgatacgttaattctttgctcagcgcgttatagagcgtccagct

SEQ ID NO: 179067 - DNA, 60 bp, Artificial
  Synthetic oligonucleotide
tagcgtacacgacgcgtgtgaattgtgctgagacgacaataacgctttgcgctgacaaac

SEQ ID NO: 179068 - DNA, 60 bp, Artificial
  Synthetic oligonucleotide
tagcggtgtatcggtattcgatatggacagatttgaccgatataaacctgctatatgctt

SEQ ID NO: 179069 - DNA, 60 bp, Artificial
  Synthetic oligonucleotide
tagcgccgactctacgacctaactcagattgggtgatcccagtctcattaagcactcttt

SEQ ID NO: 179070 - DNA, 60 bp, Artificial
  Synthetic oligonucleotide
acgcagactatcatccggattcgtcacgctaaacagataagcggccggatcagtcacacg

SEQ ID NO: 179071 - DNA, 55 bp, Artificial
  Synthetic oligonucleotide
attgtaataccgtcgcccgcaacgtcttacaattaccagctgctcagggtccccc

SEQ ID NO: 179072 - DNA, 60 bp, Artificial
  Synthetic oligonucleotide
tagccgcttcattgcacggctcactctgcttacgacacgcgtctaaagccggttgataga

SEQ ID NO: 179073 - DNA, 54 bp, Artificial
  Synthetic oligonucleotide
tagccctatccttacccagaaggtaatcaaccggtcctgagccctttcctgtcc

SEQ ID NO: 179074 - DNA, 60 bp, Artificial
  Synthetic oligonucleotide
tagccaggcggaaaatgctcagctagacgtcattcagcagaaactggacgctctgcagca

SEQ ID NO: 179075 - DNA, 60 bp, Artificial
  Synthetic oligonucleotide
tagcagtccgctgtatatgctggtggtgttggaaggtaacgtcgcgctggctgtcaatga

SEQ ID NO: 179076 - DNA, 60 bp, Artificial
  Synthetic oligonucleotide
acgcagggagaaagcccgtcgcgtgaaggaacgcatgctgatgtccaggaacaataacta

SEQ ID NO: 179077 - DNA, 57 bp, Artificial
  Synthetic oligonucleotide
acgcaggtagtgaaagcggacacttttactacctgctaatcacaacaacctgttaga

SEQ ID NO: 179078 - DNA, 56 bp, Artificial
  Synthetic oligonucleotide
acgcagtattttcgtaaaattggcgactctgtgagtcggctagaccggaaagagcc

SEQ ID NO: 179079 - DNA, 58 bp, Artificial
  Synthetic oligonucleotide
tagcaagataatagtgttggttgtgcgagaggtcttccaaagatagccccggccttcc

SEQ ID NO: 179080 - DNA, 50 bp, Artificial
  Synthetic oligonucleotide
acgcattcgtctcgcccgtaaatacctgagcggaaaaaaaccggaagggg

SEQ ID NO: 179081 - DNA, 57 bp, Artificial
  Synthetic oligonucleotide
tagcaaattcgggcagatcagggggtgaaaacgaaagtaacactgaggtggcaaggc

SEQ ID NO: 179082 - DNA, 54 bp, Artificial
  Synthetic oligonucleotide
attgtcgggctttgcttaacgcgttcatttgtccgtcgcactcaacccggtagt

SEQ ID NO: 179083 - DNA, 54 bp, Artificial
  Synthetic oligonucleotide
tagagggctctatatcggtattaccgggtgggtttgcgacgaacgacgcgggct

SEQ ID NO: 179084 - DNA, 60 bp, Artificial
  Synthetic oligonucleotide
acgccaacggatgggatttgcgcttgaggccaggattaagcaggccactcagcgccaaca

SEQ ID NO: 179085 - DNA, 60 bp, Artificial
  Synthetic oligonucleotide
acgccactgtcagcagccactggtaactgatttagaggaggagagtcttgaagttcctaa

SEQ ID NO: 179086 - DNA, 60 bp, Artificial
  Synthetic oligonucleotide
tagactcgctgacgatgataattttatggcaataacctaccgcgtgaatggaggctataa

SEQ ID NO: 179087 - DNA, 58 bp, Artificial
  Synthetic oligonucleotide
tagaatatttacaagtctcaccatcaataagcttatagtttcctccgtgtatacctac

SEQ ID NO: 179088 - DNA, 60 bp, Artificial
  Synthetic oligonucleotide
tatacacagcacgacagcaaaggcgtagttgacaaaaatcgctacaccattactatgagg

SEQ ID NO: 179089 - DNA, 59 bp, Artificial
  Synthetic oligonucleotide
tataaccactgtaagcggtgatgttacttgtggagatgtttctggtgacgtaaccactg

SEQ ID NO: 179090 - DNA, 57 bp, Artificial
  Synthetic oligonucleotide
tataaaggcgatggccattacacgactggtacttaaacgggcaccgtgttccatata

SEQ ID NO: 179091 - DNA, 59 bp, Artificial
  Synthetic oligonucleotide
tagttcgcgcctgaaacgcgctcaatcctcgccacttagctgacgtttatctttcgccc

SEQ ID NO: 179092 - DNA, 60 bp, Artificial
  Synthetic oligonucleotide
tagttattgttcctggacatcagcatgcgttccttcacgcgacgggctttctccctgcgt

SEQ ID NO: 179093 - DNA, 60 bp, Artificial
  Synthetic oligonucleotide
gagcacctatggttgggctttagcgcgttcgcacggtgttcccgtgatcagctgatcagt

SEQ ID NO: 179094 - DNA, 60 bp, Artificial
  Synthetic oligonucleotide
tagtgtgttagtgctgctgcgtatccccgcctggtggaacgattttattgctggcctggt

SEQ ID NO: 179095 - DNA, 57 bp, Artificial
  Synthetic oligonucleotide
tagtggtccgccacgtgcccggtctcactcaggttaaacccggcaaccagcagattc

SEQ ID NO: 179096 - DNA, 58 bp, Artificial
  Synthetic oligonucleotide
acgacgcttctacgtcggttaacagtgattttttacagtcattacagcatcaggtgac

SEQ ID NO: 179097 - DNA, 56 bp, Artificial
  Synthetic oligonucleotide
acgacgggatcggaagggccggatcaattattaaacgctatccttgatactcatgg

SEQ ID NO: 179098 - DNA, 56 bp, Artificial
  Synthetic oligonucleotide
tagtgctttaagaggagtaatcggaaaatatactatggatcgtattttaacagagg

SEQ ID NO: 179099 - DNA, 58 bp, Artificial
  Synthetic oligonucleotide
tagtgaacgtcgccaaacaatcgactaactccgccttctggtcaacacatcactacct

SEQ ID NO: 179100 - DNA, 58 bp, Artificial
  Synthetic oligonucleotide
tagtctctaagacgatatattcccgccttgagccgtgttaatttgttgcatactttta

SEQ ID NO: 179101 - DNA, 60 bp, Artificial
  Synthetic oligonucleotide
acgagattaagcactatgtcgggaataagctgaccacgtcgaaggaagagatcattcagt

SEQ ID NO: 179102 - DNA, 58 bp, Artificial
  Synthetic oligonucleotide
tagtcgtattcgtcgttatcagtctttcggagattttagcattactccgagtcctcat

SEQ ID NO: 179103 - DNA, 59 bp, Artificial
  Synthetic oligonucleotide
tagggtgcgtatctgaagaaaccgcgcgccagtcaacacgataagtgccagcgggtaaa

SEQ ID NO: 179104 - DNA, 60 bp, Artificial
  Synthetic oligonucleotide
atcgatcatgcgatatctgccattctcgttgtttgggtaaggtggtgtgtctggaaagtc

SEQ ID NO: 179105 - DNA, 56 bp, Artificial
  Synthetic oligonucleotide
attgtgcaggttacgccgtcacgttttattccgtcataacggaataaaaatgagca

SEQ ID NO: 179106 - DNA, 58 bp, Artificial
  Synthetic oligonucleotide
tagggcgcaatgcataacgccgcactcggactttttaacgaccgactcccgcacaagc

SEQ ID NO: 179107 - DNA, 58 bp, Artificial
  Synthetic oligonucleotide
acgagtgcctaagtgttttggttatcaaccaggtaagctatgagaaagcccagccata

SEQ ID NO: 179108 - DNA, 58 bp, Artificial
  Synthetic oligonucleotide
acgatcgccccgcgttgtcggatgagagatgacaataaattcgacgggtaattggctg

SEQ ID NO: 179109 - DNA, 60 bp, Artificial
  Synthetic oligonucleotide
tagggcaaggacacacatcgttatctctgcgcgatttcctcgtgaccttgcaatgggctt

SEQ ID NO: 179110 - DNA, 58 bp, Artificial
  Synthetic oligonucleotide
taggctcttagtcagaatacgttgcctgccacattacgccacgcgaatttgttttacg

SEQ ID NO: 179111 - DNA, 60 bp, Artificial
  Synthetic oligonucleotide
taggccgccacttcaagaactctcgttacatctctcgcacatcctgcttaccagtggccg

SEQ ID NO: 179112 - DNA, 57 bp, Artificial
  Synthetic oligonucleotide
tcagcgattttagttcagggtaaatccctttaatagcgcgatgtgtttccagctccc

SEQ ID NO: 179113 - DNA, 60 bp, Artificial
  Synthetic oligonucleotide
tcagccgtgcaatatgagagtggttttcgagaaagcaacatgccataccagcactagcgc

SEQ ID NO: 179114 - DNA, 60 bp, Artificial
  Synthetic oligonucleotide
tcagccacacggcgggcaggctctgtcagcccgctgtttctgagttcggtacgggaaatc

SEQ ID NO: 179115 - DNA, 60 bp, Artificial
  Synthetic oligonucleotide
tcagcagtatccggtggtgctccagtcgtggcgacgcaaatgggagaatctgtcagcgta

SEQ ID NO: 179116 - DNA, 60 bp, Artificial
  Synthetic oligonucleotide
gagattcaggatgttctaaacggggacgcctgcgaagggcagcagacagaaactctccag

SEQ ID NO: 179117 - DNA, 60 bp, Artificial
  Synthetic oligonucleotide
tcagcaggtacagcacttgagcgagcggacagaacacttgagccagttatacagcgagaa

SEQ ID NO: 179118 - DNA, 56 bp, Artificial
  Synthetic oligonucleotide
tcagagcttttacgtgtctttggtccctttgagcaaccgaagggtgaacaccattc

SEQ ID NO: 179119 - DNA, 56 bp, Artificial
  Synthetic oligonucleotide
accctacaccgttatgtggaaggtactgaacgtgggtgacgaagcacgcagaagaa

SEQ ID NO: 179120 - DNA, 60 bp, Artificial
  Synthetic oligonucleotide
tcagacttcttcgcaatcacactgttccgcttactgctgccttagtcgctcactttatca

SEQ ID NO: 179121 - DNA, 60 bp, Artificial
  Synthetic oligonucleotide
accctattgatggatctgttaattgactaatctggcagaatatagtaaacatctgactgt

SEQ ID NO: 179122 - DNA, 60 bp, Artificial
  Synthetic oligonucleotide
tcagacgattctgttcgccgcgttctgtttcgataccgcgtgtttccatcgcacaggcag

SEQ ID NO: 179123 - DNA, 58 bp, Artificial
  Synthetic oligonucleotide
tcagaccagaacctcacggagaaaagcgaaaataatcgcttgactctgaagcgggaaa

SEQ ID NO: 179124 - DNA, 52 bp, Artificial
  Synthetic oligonucleotide
accctgaagcaccgttgccccttcccggttacgctcccttcccagcaggtaa

SEQ ID NO: 179125 - DNA, 60 bp, Artificial
  Synthetic oligonucleotide
tcagaacgaaattgaatggatcaggcagcgactggagggcctgacggatgaataacccca

SEQ ID NO: 179126 - DNA, 53 bp, Artificial
  Synthetic oligonucleotide
acccttacgctgcctgttacagcggttctttccgttgttagtaggagaacacc

SEQ ID NO: 179127 - DNA, 59 bp, Artificial
  Synthetic oligonucleotide
gagattaacgggcatcatctgaagaaagttacgggcacgtctggacagaggaacatccc

SEQ ID NO: 179128 - DNA, 55 bp, Artificial
  Synthetic oligonucleotide
tcagaaagcgactgagggcgttttaaggggtgcgtacaacaggagttatggtaaa

SEQ ID NO: 179129 - DNA, 59 bp, Artificial
  Synthetic oligonucleotide
tcactttgcagttgaagcaacttcctatcaacacctgcaactaaactagttaatgattt

SEQ ID NO: 179130 - DNA, 56 bp, Artificial
  Synthetic oligonucleotide
tcacggttaagtatattcgttgcgatatcctggtctttaattctcaaaaaggctgt

SEQ ID NO: 179131 - DNA, 59 bp, Artificial
  Synthetic oligonucleotide
tcacgccggtaaacagcgttagctctgagccgtccttttctgagccggtattcaggcgc

SEQ ID NO: 179132 - DNA, 60 bp, Artificial
  Synthetic oligonucleotide
tcacgccgccggtcgttgtcgacaggtgaatgtgcggatgccactcctggtcacgtcccc

SEQ ID NO: 179133 - DNA, 57 bp, Artificial
  Synthetic oligonucleotide
accgactaaaaacgcattgacctggcgtggcaaatagctaaggttgatcttagttca

SEQ ID NO: 179134 - DNA, 56 bp, Artificial
  Synthetic oligonucleotide
tcatgtggcaagcccgtttttatcaggctctaccgaaaattgttgtggattacccg

SEQ ID NO: 179135 - DNA, 60 bp, Artificial
  Synthetic oligonucleotide
tcatggttttgctcatcctcggtgttaaaaccgctcagacgcgattcagggcgttctgac

SEQ ID NO: 179136 - DNA, 60 bp, Artificial
  Synthetic oligonucleotide
tcatgcaatagacataatccccgcccaaactggcgcggggaggcaaattagcgctgtgaa

SEQ ID NO: 179137 - DNA, 60 bp, Artificial
  Synthetic oligonucleotide
tcatgatatcgatgccagagctacacaagactttaaagaggccagcgattattttaccag

SEQ ID NO: 179138 - DNA, 60 bp, Artificial
  Synthetic oligonucleotide
attgtggtactgttgctatacatgtatagcaaatggtgttcgggaggtttatatgcttgc

SEQ ID NO: 179139 - DNA, 59 bp, Artificial
  Synthetic oligonucleotide
acccccttagcaataaatccttccatgcctgacggcctggccaacacctcacggcagca

SEQ ID NO: 179140 - DNA, 60 bp, Artificial
  Synthetic oligonucleotide
tcatctgccctgacatagtaccgggtcactcctgagccacatatcacgcctgccacatga

SEQ ID NO: 179141 - DNA, 60 bp, Artificial
  Synthetic oligonucleotide
tcatccccgcgtagctatccgtattcaggttcagacggcgaaccacaatcggtgattggc

SEQ ID NO: 179142 - DNA, 56 bp, Artificial
  Synthetic oligonucleotide
tcataaacgctaggtgtagaacgtagtttaacctggtcaagactgttttgaattga

SEQ ID NO: 179143 - DNA, 54 bp, Artificial
  Synthetic oligonucleotide
acccctatgatatcgcgccgctaaccgccgttattcgtaatggcggttaccagt

SEQ ID NO: 179144 - DNA, 54 bp, Artificial
  Synthetic oligonucleotide
acccctcgatgtctagtcaccttccgccaagttgatagctagaaatcggggggt

SEQ ID NO: 179145 - DNA, 60 bp, Artificial
  Synthetic oligonucleotide
tcagttgactaatattgtcaaagttaatgacagtgttgtccgctaggacgatgcgatttc

SEQ ID NO: 179146 - DNA, 60 bp, Artificial
  Synthetic oligonucleotide
tcagtacccgacacatcgtcatcacaccccatacagttcggtgctcattgataaagcggt

SEQ ID NO: 179147 - DNA, 56 bp, Artificial
  Synthetic oligonucleotide
tcagtaaaacataatgaggtctgagaacggtaatgtttgcgccggtttttgtggta

SEQ ID NO: 179148 - DNA, 55 bp, Artificial
  Synthetic oligonucleotide
tcaggtacagattaaccaatggtgcggtacggaataactggttatcgggtacagt

SEQ ID NO: 179149 - DNA, 60 bp, Artificial
  Synthetic oligonucleotide
gagaggctgtcagacagattgttgcagcctggagtctggcatatcaggatttcccggtaa

SEQ ID NO: 179150 - DNA, 60 bp, Artificial
  Synthetic oligonucleotide
tcagggtctattccacccgcgcctgagataaggtactccaccacacactctggctccaga

SEQ ID NO: 179151 - DNA, 58 bp, Artificial
  Synthetic oligonucleotide
tcagggagagcgctgttgcaaaatcccacccccggcgcaatgggtaacagggagacgc

SEQ ID NO: 179152 - DNA, 60 bp, Artificial
  Synthetic oligonucleotide
tcaggctctggctttttatgaatcccgccatgttgagtacagtttgctgctgcttgttca

SEQ ID NO: 179153 - DNA, 60 bp, Artificial
  Synthetic oligonucleotide
tcaggcgcgcaatcgtatccaccggatgcgtcgtatgcagcgtggttaacacatagtggc

SEQ ID NO: 179154 - DNA, 60 bp, Artificial
  Synthetic oligonucleotide
tcagctcgttttagccatgacaacaaccgagaatgttctcatgtttaacggcataaccac

SEQ ID NO: 179155 - DNA, 56 bp, Artificial
  Synthetic oligonucleotide
acccgtaatacatcaccgctccttgtttttatattccgcgattactggccgctcaa

SEQ ID NO: 179156 - DNA, 56 bp, Artificial
  Synthetic oligonucleotide
tcaagttgtcccggagaaacgtgtacgggcttcccttcgcgatagccccaggcata

SEQ ID NO: 179157 - DNA, 60 bp, Artificial
  Synthetic oligonucleotide
accggacatgaaatgtctgtgtatacatcgccgtcgtgcctgtaggttgcatctgatatc

SEQ ID NO: 179158 - DNA, 59 bp, Artificial
  Synthetic oligonucleotide
tcaagggtcaccttggcgtgcgtcgaactcacttgctcgatatcaaccaggcgcggttt

SEQ ID NO: 179159 - DNA, 60 bp, Artificial
  Synthetic oligonucleotide
accggagatatccttcaggaaccatggcagggacgcccggtgtgtcagcgagtcactcac

SEQ ID NO: 179160 - DNA, 60 bp, Artificial
  Synthetic oligonucleotide
gagagctataacctcctcagaagcccctctaagcaattttgcatcaactctagccctatc

SEQ ID NO: 179161 - DNA, 60 bp, Artificial
  Synthetic oligonucleotide
tcaacttcgcttgactggatttccccatcctaaaaaggctatcagtcacaagccaatata

SEQ ID NO: 179162 - DNA, 59 bp, Artificial
  Synthetic oligonucleotide
tcaaatcagggcctccgatgtcggtcgggagccgtatgggcattcgaaacggcctgtca

SEQ ID NO: 179163 - DNA, 60 bp, Artificial
  Synthetic oligonucleotide
tcaaagcgaatgcaacggtgcagtgagtcaatttggccgacacgattttgacccgtggaa

SEQ ID NO: 179164 - DNA, 59 bp, Artificial
  Synthetic oligonucleotide
tcaaaatagttactggtaacccccatacgcgctgtctccatatctggccgtagataggc

SEQ ID NO: 179165 - DNA, 60 bp, Artificial
  Synthetic oligonucleotide
tatttgtcgccaatgcgcattatccatacctccgagatggagtccggtcagatctatatc

SEQ ID NO: 179166 - DNA, 59 bp, Artificial
  Synthetic oligonucleotide
accgggaaacgcccttatctggtgcgtattaatcgtgtgctgcacgttgttgatattca

SEQ ID NO: 179167 - DNA, 57 bp, Artificial
  Synthetic oligonucleotide
tatttccttccgaatcaattcctacaatgactctatagcggtcaaaatataacttct

SEQ ID NO: 179168 - DNA, 56 bp, Artificial
  Synthetic oligonucleotide
tatttccccgccagtatcatccagctcgaatcctctccgaaccgtcccgcttccgg

SEQ ID NO: 179169 - DNA, 56 bp, Artificial
  Synthetic oligonucleotide
tatttagctttacctcctgaacggtgccgacgtatatataaatcgcgtaggaaagc

SEQ ID NO: 179170 - DNA, 55 bp, Artificial
  Synthetic oligonucleotide
tatttacgtgtaagtactgataaacaggatcttaaacgacaggaaatggttgtta

SEQ ID NO: 179171 - DNA, 55 bp, Artificial
  Synthetic oligonucleotide
atttaaaaaagcggtgtcggcgcggtgttgtagctgcgccgacaccgctttgtag

SEQ ID NO: 179172 - DNA, 60 bp, Artificial
  Synthetic oligonucleotide
tatttaattctcatagtgcatcacccctgctctgagtcatgattagagtactttaaggaa

SEQ ID NO: 179173 - DNA, 60 bp, Artificial
  Synthetic oligonucleotide
tattgtggtagtggttaatctgtggtctgactttcaccgactcagccaggaatatcttca

SEQ ID NO: 179174 - DNA, 59 bp, Artificial
  Synthetic oligonucleotide
tattgatagccggtcactgaaagcacagggtatagaccggaaaccggaacagcatctcg

SEQ ID NO: 179175 - DNA, 58 bp, Artificial
  Synthetic oligonucleotide
tattctcaaacggaagggctatccacacgagagtttctccacgttacaggatgtgttc

SEQ ID NO: 179176 - DNA, 52 bp, Artificial
  Synthetic oligonucleotide
accggtgtcccggaaagtacatagaaggttaccgccgccggatggtaatggc

SEQ ID NO: 179177 - DNA, 59 bp, Artificial
  Synthetic oligonucleotide
accggtttccagcgagacggcgttagcggttgaatcataagattcagatcccgcatcac

SEQ ID NO: 179178 - DNA, 58 bp, Artificial
  Synthetic oligonucleotide
tattcaacgcattagccgcaggactgaggacttaggtgttgaggtattctgcccccgt

SEQ ID NO: 179179 - DNA, 60 bp, Artificial
  Synthetic oligonucleotide
accgtattatggatctgcgagcaattcaggtacggcatactctacattgagggctgaacc

SEQ ID NO: 179180 - DNA, 57 bp, Artificial
  Synthetic oligonucleotide
tattagccggacaagtcgaccgcttgagtcggttatttatcacgaacaacagataag

SEQ ID NO: 179181 - DNA, 60 bp, Artificial
  Synthetic oligonucleotide
accgagatcgagaatccgcgtgcctggcttcatgcgtaacgcatggcccagtgtggcgta

SEQ ID NO: 179182 - DNA, 54 bp, Artificial
  Synthetic oligonucleotide
atttaaaatcgcgtttatcgtagccggtatacagctgacgaggacgggcgattt

SEQ ID NO: 179183 - DNA, 58 bp, Artificial
  Synthetic oligonucleotide
tcacgccatcgtaatattttgtctcgtccggattcgcgttatagccggggatactctc

SEQ ID NO: 179184 - DNA, 60 bp, Artificial
  Synthetic oligonucleotide
tcacctgcagcgaactctgcaatcttatggctgggagaacggaaaaaggcacgggtgttc

SEQ ID NO: 179185 - DNA, 54 bp, Artificial
  Synthetic oligonucleotide
tcaccgttttcagtcgggtttggtgcgggtttcgagtcgtctggcctaaattca

SEQ ID NO: 179186 - DNA, 52 bp, Artificial
  Synthetic oligonucleotide
tcaccctcaatttattggtaaaccaaccgcctttctccgttcaaaagacaaa

SEQ ID NO: 179187 - DNA, 59 bp, Artificial
  Synthetic oligonucleotide
accgcatcccctttgctcagctggcttagggagcttaggctgtatatgcccaccgcccc

SEQ ID NO: 179188 - DNA, 60 bp, Artificial
  Synthetic oligonucleotide
accgcatgcagccttaacggtgtccagacccgtgagtatggtcacacgtcacgcagtccg

SEQ ID NO: 179189 - DNA, 60 bp, Artificial
  Synthetic oligonucleotide
tcacatcggctatggtgcacttttcatacaatccgcactgatgcggcatagttaagcccg

SEQ ID NO: 179190 - DNA, 58 bp, Artificial
  Synthetic oligonucleotide
tcacatagaacctgactggttattaatctacaaaatcaccgatgaacttttgcggttc

SEQ ID NO: 179191 - DNA, 47 bp, Artificial
  Synthetic oligonucleotide
accgccattaccaccgggtttactcccgccgttaccaaactcccccg

SEQ ID NO: 179192 - DNA, 60 bp, Artificial
  Synthetic oligonucleotide
tcacagaatgtggcaaatggccgggcttaaagctcagcgggcgcagacggatgtaaataa

SEQ ID NO: 179193 - DNA, 60 bp, Artificial
  Synthetic oligonucleotide
gagagcaatgtacgatcataagcctgagtggcggcctgtagcgcattgacataactgtta

SEQ ID NO: 179194 - DNA, 60 bp, Artificial
  Synthetic oligonucleotide
tcacacggaggtgtgaccatgtatgaagcagcccgtgtggatgaccctatctaccacacc

SEQ ID NO: 179195 - DNA, 60 bp, Artificial
  Synthetic oligonucleotide
tcacaccgatgtttccagatcacagcgtacccgtttcagcgcggtcagtaatttttcaga

SEQ ID NO: 179196 - DNA, 60 bp, Artificial
  Synthetic oligonucleotide
tcacaatacactccagcacctggctgaataacgtcacacacgaaacgggccacatcattc

SEQ ID NO: 179197 - DNA, 59 bp, Artificial
  Synthetic oligonucleotide
tcaatcaggctaccgtctcggttataagtctatcgagtagtagggacgtagtatgacga

SEQ ID NO: 179198 - DNA, 60 bp, Artificial
  Synthetic oligonucleotide
tcaatcaagttagattagattactctcactcgtccataacagcatcatggaacgacgacc

SEQ ID NO: 179199 - DNA, 60 bp, Artificial
  Synthetic oligonucleotide
tcaatactaagatactgaaaagcattaaatgtcagggttttcagtatcttacaatgataa

SEQ ID NO: 179200 - DNA, 56 bp, Artificial
  Synthetic oligonucleotide
accgctattttcttatccagggcagagagttgttcttcaagaccggggatcgacgc

SEQ ID NO: 179201 - DNA, 60 bp, Artificial
  Synthetic oligonucleotide
tcaatacgtcgcagcaaaccatgtgtaatcgcctctgcggccgcctgtttctctcgaggc

SEQ ID NO: 179202 - DNA, 56 bp, Artificial
  Synthetic oligonucleotide
tcaatacggagttccaccgtattgcgtcggataaaacccacttttgcgatgactct

SEQ ID NO: 179203 - DNA, 60 bp, Artificial
  Synthetic oligonucleotide
tcaagtttggtaattgatcttggtggtactactcttgatgttgcaagtattactgggcaa

SEQ ID NO: 179204 - DNA, 60 bp, Artificial
  Synthetic oligonucleotide
gagagagaagtgcagttatgggtactttgggtaatggagttttgagtgatatcaatccat

SEQ ID NO: 179205 - DNA, 56 bp, Artificial
  Synthetic oligonucleotide
tacccgtcttcccgatggttgtttctgacgttaactgtcaggaactgcgagatagg

SEQ ID NO: 179206 - DNA, 60 bp, Artificial
  Synthetic oligonucleotide
tacgacttgccggcgacttgtcatagagtcatcgacaagtcactccagactatcagtaac

SEQ ID NO: 179207 - DNA, 60 bp, Artificial
  Synthetic oligonucleotide
tacgcaaaggcaggctgtatgctgaacgatttcacgccaaccggggtatcgcagcttaat

SEQ ID NO: 179208 - DNA, 55 bp, Artificial
  Synthetic oligonucleotide
tacgctaaggatgttttttataccgattgaagtgcgatgtccgttccccccacag

SEQ ID NO: 179209 - DNA, 54 bp, Artificial
  Synthetic oligonucleotide
acgcgccatattttctcccggttgtttgtctgaaatagaaacatccccggaata

SEQ ID NO: 179210 - DNA, 60 bp, Artificial
  Synthetic oligonucleotide
acgcgatcttccagtcattttcagtgcgtcccggagtgtgtgccatgccataaagttaca

SEQ ID NO: 179211 - DNA, 60 bp, Artificial
  Synthetic oligonucleotide
acgctggtgaaagatggtcagtcatacagcatgtaccagagctgctgggcataccgggac

SEQ ID NO: 179212 - DNA, 59 bp, Artificial
  Synthetic oligonucleotide
tacggcgtataatccaaacgctcaggctatgtacgataaactggaaggcttagggatga

SEQ ID NO: 179213 - DNA, 60 bp, Artificial
  Synthetic oligonucleotide
tacagaagattgctttctatcgacggagcgttgaaatgccgcgtcgtatcctggtcagac

SEQ ID NO: 179214 - DNA, 54 bp, Artificial
  Synthetic oligonucleotide
acgcctttatcaccaggtttgcgtttaacctttggtattatttccgcaattgca

SEQ ID NO: 179215 - DNA, 61 bp, Artificial
  Synthetic oligonucleotide
tctttgcgctggcgtcactttctgaggccagctatggacgcattactgcaactcaaaggga

SEQ ID NO: 179216 - DNA, 60 bp, Artificial
  Synthetic oligonucleotide
atcgatgtgtttatggcggctatcgatctgcaatcatccatctatggtcgcatctgggtt

SEQ ID NO: 179217 - DNA, 56 bp, Artificial
  Synthetic oligonucleotide
gagacgctagtatgctttgtatatgaccctgaaggttgggtgactaaccctaaagg

SEQ ID NO: 179218 - DNA, 60 bp, Artificial
  Synthetic oligonucleotide
tacgggcgcgattctggtgtgtctttcatagtcgtgtttttgcctctattgccagatcgc

SEQ ID NO: 179219 - DNA, 60 bp, Artificial
  Synthetic oligonucleotide
tacggtgtgacatttgcgtatcgaccgttgcaaatgtgggtgggtaatggctggcgtaca

SEQ ID NO: 179220 - DNA, 60 bp, Artificial
  Synthetic oligonucleotide
tacagacgtgaccaggccgctgctttctggaatagcgcgtcatccgggcgaatcccggta

SEQ ID NO: 179221 - DNA, 60 bp, Artificial
  Synthetic oligonucleotide
tacgtgtcgctcaagcggcagatttggtcggtgtcagaggattaattgttcatgcgatct

SEQ ID NO: 179222 - DNA, 60 bp, Artificial
  Synthetic oligonucleotide
acgctgtactgactatcggcccgggaaaactcagcatggatagcagtgagatgcctctac

SEQ ID NO: 179223 - DNA, 54 bp, Artificial
  Synthetic oligonucleotide
tacaaacctggtacaaccagattaggccacataaatataacggagggttatccc

SEQ ID NO: 179224 - DNA, 57 bp, Artificial
  Synthetic oligonucleotide
tacgtgtcttttctgcgcattacgatgttaaaagcgtcccgttgaataccccatgta

SEQ ID NO: 179225 - DNA, 60 bp, Artificial
  Synthetic oligonucleotide
tacccacaacaccgaatattggtcagcatccagaccaggcaaaagcgcacgctcaaaact

SEQ ID NO: 179226 - DNA, 60 bp, Artificial
  Synthetic oligonucleotide
acgccgtaccatagcgtgcccagcgcataaatgagcagcggctcccagacgggcatgtac

SEQ ID NO: 179227 - DNA, 60 bp, Artificial
  Synthetic oligonucleotide
tacagcatgtagacaacatgtccgaaagtaagcaaaaccattaacggacagccggatcat

SEQ ID NO: 179228 - DNA, 60 bp, Artificial
  Synthetic oligonucleotide
gagacatggtcatctgataactcttatcggaactcgcactagctgattgatttcgatatg

SEQ ID NO: 179229 - DNA, 60 bp, Artificial
  Synthetic oligonucleotide
taccatatcgattcgtttattatcaggcgtccgcaactgctcccacataacgaacattct

SEQ ID NO: 179230 - DNA, 60 bp, Artificial
  Synthetic oligonucleotide
taccagatacagaagattgctttctatcgacggagcgttgaaatgccgcgtcgtatcctg

SEQ ID NO: 179231 - DNA, 60 bp, Artificial
  Synthetic oligonucleotide
tacaggaacgcacactggatggtccttcgctgggatggtgaaactatgaaaaatggcagg

SEQ ID NO: 179232 - DNA, 57 bp, Artificial
  Synthetic oligonucleotide
acgcgtctttctccttgttctattttagatatgtaggattgtggctttccaagtgcc

SEQ ID NO: 179233 - DNA, 54 bp, Artificial
  Synthetic oligonucleotide
taccggcggctggtttcgaacaaggggtgatacaggttggtactctgaaaagtg

SEQ ID NO: 179234 - DNA, 56 bp, Artificial
  Synthetic oligonucleotide
taccgctgggccaacgttaaggaaccctttgtgagtcaggccaacagtatgcgaaa

SEQ ID NO: 179235 - DNA, 60 bp, Artificial
  Synthetic oligonucleotide
acgctagagaaaattctggctaaatacgggcggatatgaggtatctatggcactggtatc

SEQ ID NO: 179236 - DNA, 58 bp, Artificial
  Synthetic oligonucleotide
tacacctcgggggttctgtcttttgcagagcagaccctgccaccgggagagcgtgaaa

SEQ ID NO: 179237 - DNA, 53 bp, Artificial
  Synthetic oligonucleotide
taccggcgtattaccacgtacgcgggcaagcgaaaaagctataacgcttcccg

SEQ ID NO: 179238 - DNA, 59 bp, Artificial
  Synthetic oligonucleotide
acgctcaaagctcgccatcagcttttcacgctggcctggggctaagtccttttcggcaa

SEQ ID NO: 179239 - DNA, 59 bp, Artificial
  Synthetic oligonucleotide
gagaatattcaggagtttttctgctcaacacataagtcagaggcccttaactgcctttg

SEQ ID NO: 179240 - DNA, 60 bp, Artificial
  Synthetic oligonucleotide
acgctcaatacccgtttaagctccagtattcatgcccgtgatgcagaaacgaatacgctg

SEQ ID NO: 179241 - DNA, 60 bp, Artificial
  Synthetic oligonucleotide
acgctctgaggcctcttatgacgaaacaacagaaaacagcgctgaacatggctaaattca

SEQ ID NO: 179242 - DNA, 56 bp, Artificial
  Synthetic oligonucleotide
tacaattctgtacatctacgcaagggaatgtacggaagtaagccaaacggttatcg

SEQ ID NO: 179243 - DNA, 57 bp, Artificial
  Synthetic oligonucleotide
tacaagttttccagcaaaggtctagcagaatttacagatacccacaactcaaaggaa

SEQ ID NO: 179244 - DNA, 58 bp, Artificial
  Synthetic oligonucleotide
acggccacgctgtaaggtgattaacaagtcaggcaaggatcggtcaaagagcgttgcg

SEQ ID NO: 179245 - DNA, 57 bp, Artificial
  Synthetic oligonucleotide
acgcgtaattcgctctgtgaattacgactgaaggacgggcaaagggagttcgctgcg

SEQ ID NO: 179246 - DNA, 53 bp, Artificial
  Synthetic oligonucleotide
taccgggtgcgatcgcggcagttttccgggtggtttgttgccatttttacctg

SEQ ID NO: 179247 - DNA, 57 bp, Artificial
  Synthetic oligonucleotide
tacctggattacggttccgcagaacgaacaaaaagattatgcctggggctatcgcga

SEQ ID NO: 179248 - DNA, 59 bp, Artificial
  Synthetic oligonucleotide
taccgacaccgccgacactacgacaaccatccggcatggtttatcgcctgtattcacca

SEQ ID NO: 179249 - DNA, 55 bp, Artificial
  Synthetic oligonucleotide
taccgaattgttagccaaaccattgacgatgaacgctatttttttggcgttttca

SEQ ID NO: 179250 - DNA, 59 bp, Artificial
  Synthetic oligonucleotide
atttccagcggctgacaccgaaccatataaagcttttagagcttggataccatgaccca

SEQ ID NO: 179251 - DNA, 60 bp, Artificial
  Synthetic oligonucleotide
tacgaaacaacacatgcaaacatgtttgcgtatacacatgcaaataacgtttcgtatgat

SEQ ID NO: 179252 - DNA, 58 bp, Artificial
  Synthetic oligonucleotide
acggcatcattactttaccgcgccatagcggaagaaggtatgaagcacgggcaagggc

SEQ ID NO: 179253 - DNA, 60 bp, Artificial
  Synthetic oligonucleotide
tacccttgagtttcaagcatgtttgaatattttcgcacagtcacaggctctataccaaga

SEQ ID NO: 179254 - DNA, 60 bp, Artificial
  Synthetic oligonucleotide
tacgaacattcaggatggcagcgttcttcacgtaacccacaagtctccatccaatccaca

SEQ ID NO: 179255 - DNA, 54 bp, Artificial
  Synthetic oligonucleotide
acggctaacaggcaagctgttatccctcgtcggattccggtttaactgccccgc

SEQ ID NO: 179256 - DNA, 57 bp, Artificial
  Synthetic oligonucleotide
acggctctggtctttattctggggtttgctgttacctggctggcggtgactaacaga

SEQ ID NO: 179257 - DNA, 60 bp, Artificial
  Synthetic oligonucleotide
taccagacggaatatgacccgcttatcgggtgctacattccgaccgatatcacgttcaca

SEQ ID NO: 179258 - DNA, 56 bp, Artificial
  Synthetic oligonucleotide
acggctgccgggccagcagtacgatgaggagtcggggctgtattataaccggtacc

SEQ ID NO: 179259 - DNA, 59 bp, Artificial
  Synthetic oligonucleotide
tacaaaagcgggtcgtcggcgactactggatgactcggcaacgagtcgtcggtgattca

SEQ ID NO: 179260 - DNA, 60 bp, Artificial
  Synthetic oligonucleotide
tacgtttgttgtgcggcatatagttcgccatgatacggtggatatgctgagtgcgctgca

SEQ ID NO: 179261 - DNA, 60 bp, Artificial
  Synthetic oligonucleotide
gagaactccgatgagtgccaaatgcgggaactacgccgctaattatgcttaattcttgct

SEQ ID NO: 179262 - DNA, 60 bp, Artificial
  Synthetic oligonucleotide
tactatcgagggctatcatgaactatggtgccctctgagcatagctacccattacttctt

SEQ ID NO: 179263 - DNA, 60 bp, Artificial
  Synthetic oligonucleotide
tacatctcaaaaccgcccgcttaacaccatcagaaatcctcagcgcgattttaagcacca

SEQ ID NO: 179264 - DNA, 58 bp, Artificial
  Synthetic oligonucleotide
tacaggtttcccgcacaaggctggcagtcatccaggtacaggagaacgtgcggaaacg

SEQ ID NO: 179265 - DNA, 57 bp, Artificial
  Synthetic oligonucleotide
acggaggttcggggtataacgttggatcatttgagcaagcggctatcagtgaactgg

SEQ ID NO: 179266 - DNA, 60 bp, Artificial
  Synthetic oligonucleotide
tactgactctccctgataacctgccgaaaacgaaacaggcgcttgcagagagcgtcacgc

SEQ ID NO: 179267 - DNA, 58 bp, Artificial
  Synthetic oligonucleotide
tactggatgcttaagattatggtaagttattagccattaattaaatatcgctcgaaaa

SEQ ID NO: 179268 - DNA, 56 bp, Artificial
  Synthetic oligonucleotide
taattttatgctgtgtggcactactcaaccccacgattgaaaaccctacaaggaaa

SEQ ID NO: 179269 - DNA, 60 bp, Artificial
  Synthetic oligonucleotide
tacaggaacggacactggatggcccttcgctgggatggtaatcagagacaggctaaaatg

SEQ ID NO: 179270 - DNA, 52 bp, Artificial
  Synthetic oligonucleotide
acgcccttcggtaacactaaaaagcgaccgctcgtatcctcttgaaaccgaa

SEQ ID NO: 179271 - DNA, 60 bp, Artificial
  Synthetic oligonucleotide
tagaaaaatcaatatcctttgtgtatctatcactaccatgcttaacaccaagaagagtcc

SEQ ID NO: 179272 - DNA, 58 bp, Artificial
  Synthetic oligonucleotide
gacttgccgttacggtcaaacgccggcagtgccacatacggctgcggatatttacgtc

SEQ ID NO: 179273 - DNA, 59 bp, Artificial
  Synthetic oligonucleotide
tagaacagcatgagtatgtggattggtttttgtcatttgctaaagtggttaataagaaa

SEQ ID NO: 179274 - DNA, 59 bp, Artificial
  Synthetic oligonucleotide
acgccggctaccaggaagagatagaccatcgttcatacgagcgtcagggactggagaaa

SEQ ID NO: 179275 - DNA, 60 bp, Artificial
  Synthetic oligonucleotide
tacgttagcagttgtcatactcacacgttttaatctttgcgaattgtcagccccctctga

SEQ ID NO: 179276 - DNA, 56 bp, Artificial
  Synthetic oligonucleotide
agactattgtgcttaacgccgttcgtcgtatcagcgtcgctggggcagggtttttc

SEQ ID NO: 179277 - DNA, 58 bp, Artificial
  Synthetic oligonucleotide
cctgtccggattcatacgaaaacaggaacgcagaagactcgctgaggtaataatctta

SEQ ID NO: 179278 - DNA, 59 bp, Artificial
  Synthetic oligonucleotide
gcaaggatatgtatgaatgtgaacggggtccctgtttatggcatttctcaaggaacagt

SEQ ID NO: 179279 - DNA, 59 bp, Artificial
  Synthetic oligonucleotide
gtctaacacttgatcgctaacgttcattaggctagtatccttcttgaatacatcgctga

SEQ ID NO: 179280 - DNA, 52 bp, Artificial
  Synthetic oligonucleotide
tggtaattaaatcatacgaaaacaaacctccgaaaaacatagattttggggc

SEQ ID NO: 179281 - DNA, 59 bp, Artificial
  Synthetic oligonucleotide
taaacagcacgcttatctgacccgaacatcccactcagagccgtccaaatccatcatcg

SEQ ID NO: 179282 - DNA, 57 bp, Artificial
  Synthetic oligonucleotide
atagcgtcccgcaagatgcggggaacaaaacgggttcaccagataagccagtcgcta

SEQ ID NO: 179283 - DNA, 53 bp, Artificial
  Synthetic oligonucleotide
gacttccggggggataccacccctagtatgaaatggtatacccgcatctgttt

SEQ ID NO: 179284 - DNA, 59 bp, Artificial
  Synthetic oligonucleotide
tatggtcgtattctcgggcaggtttatgcaccagacggaatgaatgttaatcagtttat

SEQ ID NO: 179285 - DNA, 59 bp, Artificial
  Synthetic oligonucleotide
ctgcaggcatggaaagctttaggctgcacgggatgggggcgtattgacgtcatgctgga

SEQ ID NO: 179286 - DNA, 59 bp, Artificial
  Synthetic oligonucleotide
tttatctgagctaccgacagataccctgttactccagccagtcaatatggttggtgttt

SEQ ID NO: 179287 - DNA, 56 bp, Artificial
  Synthetic oligonucleotide
tggcaggctaatttagcgaaggaagcagccgtcggccttttggtggtatgaccccg

SEQ ID NO: 179288 - DNA, 58 bp, Artificial
  Synthetic oligonucleotide
agggccatactgggagttacaccgtcatctggagtgcattaaccaaccgataatctta

SEQ ID NO: 179289 - DNA, 59 bp, Artificial
  Synthetic oligonucleotide
gcaaacaggtcgagagcaatagcgaggtatgcccagcgttttcctgtccagtataggtt

SEQ ID NO: 179290 - DNA, 59 bp, Artificial
  Synthetic oligonucleotide
gatgtcaatacagcgcgccttactgcaacgcagagtattcagtctaacggcacgattaa

SEQ ID NO: 179291 - DNA, 56 bp, Artificial
  Synthetic oligonucleotide
gacgttagcgcttcttcgataagatacatattcaaccttttcggtttagtctctaa

SEQ ID NO: 179292 - DNA, 59 bp, Artificial
  Synthetic oligonucleotide
acatttcaccgacaggttttaagccctcctcactcagtatcacagacatcacctcttta

SEQ ID NO: 179293 - DNA, 59 bp, Artificial
  Synthetic oligonucleotide
tcgtgtttaacacctgctgaagtgcgtggacgggctcgtaggttgttccgtgaacatga

SEQ ID NO: 179294 - DNA, 55 bp, Artificial
  Synthetic oligonucleotide
gacttcccgatctgtctggtaactggttaccgtaaaaccgagaggattaagctca

SEQ ID NO: 179295 - DNA, 59 bp, Artificial
  Synthetic oligonucleotide
gacctattgcgtcaccggatctcgaaccagaccatgcatcctgacccgaatcggaatgc

SEQ ID NO: 179296 - DNA, 56 bp, Artificial
  Synthetic oligonucleotide
gaatcgtaatttgcgaggtacttttcataatcttggggcgtatattgactctttac

SEQ ID NO: 179297 - DNA, 59 bp, Artificial
  Synthetic oligonucleotide
agcttctgtactggttacgcgcgcttccgatcacaatccgctactcgttgaattcagtc

SEQ ID NO: 179298 - DNA, 59 bp, Artificial
  Synthetic oligonucleotide
ccggattattgcgggaagacatgcgtctgaaaactcctgtggtgcacgacactcaactt

SEQ ID NO: 179299 - DNA, 58 bp, Artificial
  Synthetic oligonucleotide
gtattccataaatcaccagcaaggttaataccactgcgacttaaattataatcaacag

SEQ ID NO: 179300 - DNA, 59 bp, Artificial
  Synthetic oligonucleotide
ctaacattaaactggcgaagataattgatgaggcgataattgcatttcgtgacttattc

SEQ ID NO: 179301 - DNA, 59 bp, Artificial
  Synthetic oligonucleotide
gcggtacgctcaaagggaacccgccgcttacgctgaatgagagttcgtatggcacgctg

SEQ ID NO: 179302 - DNA, 52 bp, Artificial
  Synthetic oligonucleotide
ccgtctggcgcggtcaaatggaggccgtcgtgtaagggagagggggtaaaac

SEQ ID NO: 179303 - DNA, 59 bp, Artificial
  Synthetic oligonucleotide
ccagattacctgagcttgttagcatcatcgaatcgtcaggatgtgaatgtcgcctgcgg

SEQ ID NO: 179304 - DNA, 59 bp, Artificial
  Synthetic oligonucleotide
tgccagatgcgccggtaaccaaaacgccttcgttcgagtgccagttctgtgatacgccc

SEQ ID NO: 179305 - DNA, 57 bp, Artificial
  Synthetic oligonucleotide
gactgttcccgcaaaagtccagttaccgttcgaatccgcgagttgcaagctcaacga

SEQ ID NO: 179306 - DNA, 56 bp, Artificial
  Synthetic oligonucleotide
agcgtatccgctttcattgacagggtttccagatacccaaggagcgacgttaatgg

SEQ ID NO: 179307 - DNA, 59 bp, Artificial
  Synthetic oligonucleotide
ctgccgcttagacgctgattcgcaacggcgtagttacgctcatggtatcggtccggcca

SEQ ID NO: 179308 - DNA, 59 bp, Artificial
  Synthetic oligonucleotide
gccttttaatccgataatatagacggcatgaaactgacgattactgaataatcataagg

SEQ ID NO: 179309 - DNA, 58 bp, Artificial
  Synthetic oligonucleotide
gtgaataccgggtttcggttgtatacgtaattttctctagatgacatgttgcaatgct

SEQ ID NO: 179310 - DNA, 59 bp, Artificial
  Synthetic oligonucleotide
agctggagcgatgtcgggatctggcagggcgtaagcagtatttctgacgcctatctgca

SEQ ID NO: 179311 - DNA, 59 bp, Artificial
  Synthetic oligonucleotide
taccgcaataacggcaacagccgggcttatccctatctgctcgatgtacagagcgatat

SEQ ID NO: 179312 - DNA, 56 bp, Artificial
  Synthetic oligonucleotide
atgcccaggagccgtattactcaacggcggtgggattgcttcactacgggaaagag

SEQ ID NO: 179313 - DNA, 59 bp, Artificial
  Synthetic oligonucleotide
tgcgataaacctgagtgcccccacgtcagatacgtcactaactcatgcggcagccgtgc

SEQ ID NO: 179314 - DNA, 59 bp, Artificial
  Synthetic oligonucleotide
accgattgccagaatgcacgctccgcccttcaccgtgaaaaagctaaacctgatgttgc

SEQ ID NO: 179315 - DNA, 59 bp, Artificial
  Synthetic oligonucleotide
tgcatgttccgagaaaatcaattgacccgcagagttcgggggaccttgcagcagacacc

SEQ ID NO: 179316 - DNA, 60 bp, Artificial
  Synthetic oligonucleotide
atttgattttgtgattgtggcctttgctatctttgttgccattaagcttatcaacagact

SEQ ID NO: 179317 - DNA, 54 bp, Artificial
  Synthetic oligonucleotide
accgagatttacacccgcgttttttcgctggacgtcctgacaggaagtggcctg

SEQ ID NO: 179318 - DNA, 59 bp, Artificial
  Synthetic oligonucleotide
gaagatggctaatttcagatcaggcgttgcgattgtgaaggcaggtaatgttaggtatg

SEQ ID NO: 179319 - DNA, 59 bp, Artificial
  Synthetic oligonucleotide
caactttcgagttaaaaccgacagcgacaccagtatctgaagtgaatgctctcgcaccg

SEQ ID NO: 179320 - DNA, 59 bp, Artificial
  Synthetic oligonucleotide
atgcctgtactgcaaccggacgctttcccgttctgggactcttgcatgatggtgctgtc

SEQ ID NO: 179321 - DNA, 59 bp, Artificial
  Synthetic oligonucleotide
gcaaggttatgcaatgccgttcttacattcggtttcagcatgaacgtgatgtagacttc

SEQ ID NO: 179322 - DNA, 56 bp, Artificial
  Synthetic oligonucleotide
agacgtgcagacccgtagcggcccccatggcagatacaggttttgaaccggcaaaa

SEQ ID NO: 179323 - DNA, 56 bp, Artificial
  Synthetic oligonucleotide
cattaggatcgaactcggctcttgcctcgtcaaaaaattcctttccgatgataccc

SEQ ID NO: 179324 - DNA, 59 bp, Artificial
  Synthetic oligonucleotide
ggcgccgagcgtagcattgtaggcagcgtgtcatgggcgttttgataacgcttatcgtc

SEQ ID NO: 179325 - DNA, 56 bp, Artificial
  Synthetic oligonucleotide
atggttagccgtttcgacgcgcataaacggagtgggtgtacggaattacagcttga

SEQ ID NO: 179326 - DNA, 53 bp, Artificial
  Synthetic oligonucleotide
atagcatatgttttgacgtaaaatggatgccgtaagccctttttttaccgact

SEQ ID NO: 179327 - DNA, 60 bp, Artificial
  Synthetic oligonucleotide
atcgcatcaccagaaatcagagaattatacgtaggcaagctaatcaaaaaatcgcgtagt

SEQ ID NO: 179328 - DNA, 54 bp, Artificial
  Synthetic oligonucleotide
atttggatcgtcgtaatctcttgctctgtaaacgaaaaaaccgccttggcgggc

SEQ ID NO: 179329 - DNA, 58 bp, Artificial
  Synthetic oligonucleotide
accgggaggacgtgaaaaggtgatggcgagctttgagcgtgtactgatgcccggtctc

SEQ ID NO: 179330 - DNA, 59 bp, Artificial
  Synthetic oligonucleotide
caacacgctgatatcgtgctgcccgttaccaccgcgtttgaagagtggaacgtggatgc

SEQ ID NO: 179331 - DNA, 57 bp, Artificial
  Synthetic oligonucleotide
cctcatgaccggataaaccgatggccccgagtcttctagctaagccgtcaacctcac

SEQ ID NO: 179332 - DNA, 59 bp, Artificial
  Synthetic oligonucleotide
taagaagatcggtgcctttgactatctccagcgtatacatccccgaatagaacaccagt

SEQ ID NO: 179333 - DNA, 57 bp, Artificial
  Synthetic oligonucleotide
taccactccaggcatgttgtgaggtcaacccggcgataataaccaacgcccccgcca

SEQ ID NO: 179334 - DNA, 58 bp, Artificial
  Synthetic oligonucleotide
aggaatcccatggttaaaaaatcactgcgccagttcacgctgatggcgacggcaaccg

SEQ ID NO: 179335 - DNA, 58 bp, Artificial
  Synthetic oligonucleotide
ccagcaattattaagaccctgcattgacgaactgaacaaaaaaagcgacctggctgta

SEQ ID NO: 179336 - DNA, 59 bp, Artificial
  Synthetic oligonucleotide
ttgtgcatccgccgattcagccgcgcaaaatccgtcaaatatcccagcgcgcgtagcgt

SEQ ID NO: 179337 - DNA, 59 bp, Artificial
  Synthetic oligonucleotide
ttgcgggaagacatgcgtctgaaaactcctgtggtgcgggacacgcaacttttgaggcg

SEQ ID NO: 179338 - DNA, 59 bp, Artificial
  Synthetic oligonucleotide
cacgtttggtaataacctgtctgatagggagtgctacgggatatatatatggagccaga

SEQ ID NO: 179339 - DNA, 60 bp, Artificial
  Synthetic oligonucleotide
gattccgttacagtgacgtaagctgcaccttctgtcattaagtcattgacacggatatca

SEQ ID NO: 179340 - DNA, 59 bp, Artificial
  Synthetic oligonucleotide
cgaataatcaatatctagccctgcctaagcacgctattttttgactcaaggccgtgatg

SEQ ID NO: 179341 - DNA, 57 bp, Artificial
  Synthetic oligonucleotide
cagcataaaccgaaaagtgagaaacctatgctttcaccgcaggcggagttggattta

SEQ ID NO: 179342 - DNA, 55 bp, Artificial
  Synthetic oligonucleotide
ggggatggtattagcgccgggatgcgacagaaacgcgcttaaaacacccctgaac

SEQ ID NO: 179343 - DNA, 56 bp, Artificial
  Synthetic oligonucleotide
atggcggatatgaaatagtggtttagcccagtaatgacgaggctttgagtgggttt

SEQ ID NO: 179344 - DNA, 57 bp, Artificial
  Synthetic oligonucleotide
tcgctgtaacttccgcggggcacgctcttctccggatggacggtcacccggttctgc

SEQ ID NO: 179345 - DNA, 57 bp, Artificial
  Synthetic oligonucleotide
tccgtttaacaggcagacttcccttcctttatttgcgagagcaatagccaggtttga

SEQ ID NO: 179346 - DNA, 59 bp, Artificial
  Synthetic oligonucleotide
tggcgggtgccactgccttatccaacggtgatgtcgctaaatccggtgagcggatggtg

SEQ ID NO: 179347 - DNA, 58 bp, Artificial
  Synthetic oligonucleotide
cgtttttggggggcacctggctagcagccacctagcagctagacgaccgtcgccagga

SEQ ID NO: 179348 - DNA, 59 bp, Artificial
  Synthetic oligonucleotide
aagcgtgacatcagacgcagcaaaagaccaggtgctgcaccctaaaagaagagcgcctg

SEQ ID NO: 179349 - DNA, 58 bp, Artificial
  Synthetic oligonucleotide
cctttatatgcagaattgaatcgctggatcctaaaaccagttacaaatgacttaaaca

SEQ ID NO: 179350 - DNA, 58 bp, Artificial
  Synthetic oligonucleotide
atgggaccaaatgacccctacaatgatggtcatagcggctctggaagttcgggaggta

SEQ ID NO: 179351 - DNA, 59 bp, Artificial
  Synthetic oligonucleotide
cctgacgtaacaggggatgcctacagtacaggcatcccctgacgcttagtgagacaagc

SEQ ID NO: 179352 - DNA, 59 bp, Artificial
  Synthetic oligonucleotide
cagcacttacgagggccgggatagagctgcctaaaggtcaacgcacccatgtgcttagg

SEQ ID NO: 179353 - DNA, 57 bp, Artificial
  Synthetic oligonucleotide
cctgataatctctggttaataagatcacttagactcattttggttttattcgaaagc

SEQ ID NO: 179354 - DNA, 59 bp, Artificial
  Synthetic oligonucleotide
ccggtgtctgcgtgcagtttgttaccgttaacagctaccgcgataattattgcagcgaa

SEQ ID NO: 179355 - DNA, 58 bp, Artificial
  Synthetic oligonucleotide
aaatggcaggtgggcaccgggatggcgagcctgagcgtcttcaatacggacacgaaaa

SEQ ID NO: 179356 - DNA, 59 bp, Artificial
  Synthetic oligonucleotide
aaggtctcagtagctgaaagcgcgaatgacgcgctacgctgtttagccgaaggcgagcc

SEQ ID NO: 179357 - DNA, 59 bp, Artificial
  Synthetic oligonucleotide
ctgattccacaggggcggttcgtcactaacgatccgatgacgctggtacgctggctgac

SEQ ID NO: 179358 - DNA, 59 bp, Artificial
  Synthetic oligonucleotide
tcgcgattcaacgagagacagtttacgattcgggctgcaaacatgcgtcagggggtgta

SEQ ID NO: 179359 - DNA, 59 bp, Artificial
  Synthetic oligonucleotide
gcgtatgataaggactgaatcgatggttaatatgtctagtcctgacttttgcatctccg

SEQ ID NO: 179360 - DNA, 59 bp, Artificial
  Synthetic oligonucleotide
aaatgcagttccgatacctccatttgcacattatccctgacatatggtaccggaaccgc

SEQ ID NO: 179361 - DNA, 54 bp, Artificial
  Synthetic oligonucleotide
atgggcctgtaagcgtggtggccggaacagcgttgttagcgttttttttcagaa

SEQ ID NO: 179362 - DNA, 54 bp, Artificial
  Synthetic oligonucleotide
gacgtaatctattcagcctatcccccgaaagttaacacgataaaacgctctctt

SEQ ID NO: 179363 - DNA, 58 bp, Artificial
  Synthetic oligonucleotide
gcctggctaacgacagatttggagtgtccctccttgtgcctttttggtgtctcagaag

SEQ ID NO: 179364 - DNA, 59 bp, Artificial
  Synthetic oligonucleotide
gcggtgaacgtgaatagaaaagcgccggtgctaccatctgtaggagcggaacgcacctg

SEQ ID NO: 179365 - DNA, 59 bp, Artificial
  Synthetic oligonucleotide
ctgattatcccgtgtcctgtccacgacaaagcgtggaaaagacgcggataatcatgcta

SEQ ID NO: 179366 - DNA, 59 bp, Artificial
  Synthetic oligonucleotide
agagggatgtatcagcggttactgaaggttgacccgctgaagtgcatcctgtgcggaag

SEQ ID NO: 179367 - DNA, 58 bp, Artificial
  Synthetic oligonucleotide
cgagaaacgtgaggagttccgctggatccagtatcgggcacagtacgctaaaggcgag

SEQ ID NO: 179368 - DNA, 59 bp, Artificial
  Synthetic oligonucleotide
gtcctggattcgctaccgcgctcgctcagcaaagatagcgtgaccctattatccggggc

SEQ ID NO: 179369 - DNA, 59 bp, Artificial
  Synthetic oligonucleotide
tacacgcaaggtttcaagctgactgactcggaatttgagcttgttcggggccttggtga

SEQ ID NO: 179370 - DNA, 52 bp, Artificial
  Synthetic oligonucleotide
gaattggggaagaaagaattctttatggccgtataattttggtttatcttgt

SEQ ID NO: 179371 - DNA, 59 bp, Artificial
  Synthetic oligonucleotide
ctaccagtgaagggggtaaatcgcataaggagcttatttcattgcgggatgcatcgaga

SEQ ID NO: 179372 - DNA, 59 bp, Artificial
  Synthetic oligonucleotide
gattcatcattcgttggtatacacgcccctgtgctaaagcagttaccttcaaaccatct

SEQ ID NO: 179373 - DNA, 59 bp, Artificial
  Synthetic oligonucleotide
tttagtgttcgattctcaatagacgctgctgcataaatctgtgtgctcaagccaatagg

SEQ ID NO: 179374 - DNA, 56 bp, Artificial
  Synthetic oligonucleotide
gggctaattttcgcatgaaccctgaccggatattgctaacagaagtcagggggccg

SEQ ID NO: 179375 - DNA, 59 bp, Artificial
  Synthetic oligonucleotide
tcgtagtggaaacacataccctgcagtaatgcatcgatagcacgccgacgtagtaacgg

SEQ ID NO: 179376 - DNA, 56 bp, Artificial
  Synthetic oligonucleotide
accgggcgttatacgaatccggcagaataacggaagccgcgtgtatggcccatgcc

SEQ ID NO: 179377 - DNA, 57 bp, Artificial
  Synthetic oligonucleotide
atggcaaggtcagaataacggggctgacctcccggagacacacgtgccgccgccttc

SEQ ID NO: 179378 - DNA, 52 bp, Artificial
  Synthetic oligonucleotide
aggaagcttttttacgtattgaggtaacaccggaacaactggaatggaagaa

SEQ ID NO: 179379 - DNA, 55 bp, Artificial
  Synthetic oligonucleotide
tcgtaactttgtttaatgtgtaacttgaaaacttctcgccattaaatgacgtata

SEQ ID NO: 179380 - DNA, 52 bp, Artificial
  Synthetic oligonucleotide
cgtttcgttgtagtcagctacggtttaacggtttttaacgctgctcaacgct

SEQ ID NO: 179381 - DNA, 56 bp, Artificial
  Synthetic oligonucleotide
cccgccccgccatgtaacctgcggcggaacctaaactgaaacctcatgagcgatag

SEQ ID NO: 179382 - DNA, 56 bp, Artificial
  Synthetic oligonucleotide
gcatgggcatccaacagcgcgggtaaaaaagaccgcaatacggactatacggaaaa

SEQ ID NO: 179383 - DNA, 55 bp, Artificial
  Synthetic oligonucleotide
atggggcgtgcgttatcacgaggggagcaacggacgttttctggtgttgcccgag

SEQ ID NO: 179384 - DNA, 55 bp, Artificial
  Synthetic oligonucleotide
acggtaaatgaccctgagtttagacgcgaaatacaggaagttatcggcttatgta

SEQ ID NO: 179385 - DNA, 59 bp, Artificial
  Synthetic oligonucleotide
gaggtgggcgaaatacacatgaatcacaggcagctaaagggcggaagtcaaaacgcgga

SEQ ID NO: 179386 - DNA, 58 bp, Artificial
  Synthetic oligonucleotide
tgtcgggcgcgtccagactcccgttcttggcctcattgtgaatcgtacccgtgctaac

SEQ ID NO: 179387 - DNA, 59 bp, Artificial
  Synthetic oligonucleotide
cggcccgggaaaactcagcatggatagcagtgagatgcctctacagcttaccggcgagg

SEQ ID NO: 179388 - DNA, 59 bp, Artificial
  Synthetic oligonucleotide
tgcgtacactgcgacgttatggtaaatgagcattgagatgacgtaaggcacaaaaaagc

SEQ ID NO: 179389 - DNA, 57 bp, Artificial
  Synthetic oligonucleotide
gcatactaaggcctgaatgggaatataagcgcatgtggtcgaccccctattttaccg

SEQ ID NO: 179390 - DNA, 59 bp, Artificial
  Synthetic oligonucleotide
gttctgtcgctgtggtaggtgcagactaaaccgaggggatcacactgcggtggcgtagg

SEQ ID NO: 179391 - DNA, 59 bp, Artificial
  Synthetic oligonucleotide
attatggtcctttagatatagcattctgtctaaataagggctaattgtgagtttgctat

SEQ ID NO: 179392 - DNA, 56 bp, Artificial
  Synthetic oligonucleotide
agtcgttcaagattattgacataaagacaggaaggtttataacaagtaccagatac

SEQ ID NO: 179393 - DNA, 57 bp, Artificial
  Synthetic oligonucleotide
cggactcaccccactcggtcactttaccgtgaaccctgagatacaacctggcgcgca

SEQ ID NO: 179394 - DNA, 58 bp, Artificial
  Synthetic oligonucleotide
gattatttccgacctctccaatagaagcacggcatccgaatcgaatctttcgtatttc

SEQ ID NO: 179395 - DNA, 54 bp, Artificial
  Synthetic oligonucleotide
cttcggcccgctacgtaaaaatgtcggtggataactggcgtaaatgtcgtcaat

SEQ ID NO: 179396 - DNA, 59 bp, Artificial
  Synthetic oligonucleotide
cccgggcataattcatcgtcacggaaacactccatggataacagatatacagaacgaaa

SEQ ID NO: 179397 - DNA, 59 bp, Artificial
  Synthetic oligonucleotide
atctgaagaaaccgcgcgccagtcaacacgataagtgccagcgggtaaaggctctcgcg

SEQ ID NO: 179398 - DNA, 59 bp, Artificial
  Synthetic oligonucleotide
ttacagctgcacgcccgaatgcgcgtgaggtcagggcattcttatcgacgtcggtaatt

SEQ ID NO: 179399 - DNA, 58 bp, Artificial
  Synthetic oligonucleotide
ctggagtcacctggcgttttcagtttgaggtcggagatgcaatctgattttttacagt

SEQ ID NO: 179400 - DNA, 57 bp, Artificial
  Synthetic oligonucleotide
tacgctctggcgtacgctggtagtcaattttaccgttgtggatataacccagcgggc

SEQ ID NO: 179401 - DNA, 59 bp, Artificial
  Synthetic oligonucleotide
ggacagctaactgcatagtcacatcggcaagcatataaatcacagcagctacggccata

SEQ ID NO: 179402 - DNA, 59 bp, Artificial
  Synthetic oligonucleotide
acttccacagtcgcagtagctttgtggctgccatcctgcgaaaccacttcaatagttgc

SEQ ID NO: 179403 - DNA, 58 bp, Artificial
  Synthetic oligonucleotide
ttacgcttttaataacacgcctatcggtacattgcgtatcggctgttcttcaaccatg

SEQ ID NO: 179404 - DNA, 59 bp, Artificial
  Synthetic oligonucleotide
ttacgagcgtgtactcaatacttccagcgagaagactgacagcgatgacggagtatagt

SEQ ID NO: 179405 - DNA, 60 bp, Artificial
  Synthetic oligonucleotide
gattagtgactatgcatggattggtggtatcgctgtcatagctatcctgcttttagtctg

SEQ ID NO: 179406 - DNA, 56 bp, Artificial
  Synthetic oligonucleotide
cgctggacggcagatccggcgtttaacctctactaacagaaggcgggcgctggtaa

SEQ ID NO: 179407 - DNA, 52 bp, Artificial
  Synthetic oligonucleotide
tacggcccccgagtttacgttgtatccgaccaaagatgagacgtaacttggg

SEQ ID NO: 179408 - DNA, 55 bp, Artificial
  Synthetic oligonucleotide
ggaatgctaaaggagagcgacgtgctgtagtccggtttgtccaggtacgggcgtt

SEQ ID NO: 179409 - DNA, 59 bp, Artificial
  Synthetic oligonucleotide
gttgctgcatggtgtgcgtatcggtgcggcatcccgtgccatgctggcgcgttacatcc

SEQ ID NO: 179410 - DNA, 56 bp, Artificial
  Synthetic oligonucleotide
acttatccgctcaatccagtgcaactctcggatccgttagggctaatagtcgtttt

SEQ ID NO: 179411 - DNA, 58 bp, Artificial
  Synthetic oligonucleotide
cttgattacccggtaagtaaagtggtctgcgtgggcagtaattacgcaaatcacatca

SEQ ID NO: 179412 - DNA, 57 bp, Artificial
  Synthetic oligonucleotide
cttgatgtccctttgtatacttttgaatcggcaaaatagtagtaatgcgttcattta

SEQ ID NO: 179413 - DNA, 58 bp, Artificial
  Synthetic oligonucleotide
ggtcgcagagcgaatatccagaaaactgaccggcgatgatttaggccgtttccttatg

SEQ ID NO: 179414 - DNA, 57 bp, Artificial
  Synthetic oligonucleotide
cggggaccggagcgggaaaacagaagttcaggggaatgagcgcgatctggcaataga

SEQ ID NO: 179415 - DNA, 56 bp, Artificial
  Synthetic oligonucleotide
tactctggagtgtttttctcacgggcagttccgtgagcgggtgaaagtcggtgcgg

SEQ ID NO: 179416 - DNA, 58 bp, Artificial
  Synthetic oligonucleotide
gattactatcaattaatcttccgaacatgacaccagtcactgttgattacggttaaac

SEQ ID NO: 179417 - DNA, 59 bp, Artificial
  Synthetic oligonucleotide
ctcggtatattgttgttgtcatatcaatggcttaattcgtatcgactattcttaggata

SEQ ID NO: 179418 - DNA, 59 bp, Artificial
  Synthetic oligonucleotide
cggggtcttgaggctctttaccatgccggagcaataaaaacgcgtcaggatgtcacaga

SEQ ID NO: 179419 - DNA, 54 bp, Artificial
  Synthetic oligonucleotide
aacgggtcaggccgaccgtggaataacgagccgacagtcttcaccgtcggtgag

SEQ ID NO: 179420 - DNA, 59 bp, Artificial
  Synthetic oligonucleotide
ctcggttacgctgaagttccagagcgagaccaaaggatggaccacccatctggtgcagt

SEQ ID NO: 179421 - DNA, 59 bp, Artificial
  Synthetic oligonucleotide
tagcacccgataagcgggtcatattccgtctggtaggtaatcaaccccagctctgacag

SEQ ID NO: 179422 - DNA, 57 bp, Artificial
  Synthetic oligonucleotide
tgagcgctcctccgttcgcaagaaacgtccgcgccttggccgtttactcctgtcgct

SEQ ID NO: 179423 - DNA, 55 bp, Artificial
  Synthetic oligonucleotide
tactggcaccgggtcagaaaaaggcgaaaacagggcgtatctggacgtatgtccg

SEQ ID NO: 179424 - DNA, 58 bp, Artificial
  Synthetic oligonucleotide
caggttaactcagtcgccatctcgctctcctgcgaatttccagttcccttagcttaac

SEQ ID NO: 179425 - DNA, 53 bp, Artificial
  Synthetic oligonucleotide
gttatctccgttaacggacggaaattgagcttatattcgcccctaaccctgaa

SEQ ID NO: 179426 - DNA, 54 bp, Artificial
  Synthetic oligonucleotide
cggtcgttttcttgccttacgaaatcctacttttttgcgctctacttgtctaga

SEQ ID NO: 179427 - DNA, 57 bp, Artificial
  Synthetic oligonucleotide
gattaccacgccccagcgggcgtggttccaaccgtctatcacggcggcgatctcttc

SEQ ID NO: 179428 - DNA, 56 bp, Artificial
  Synthetic oligonucleotide
acgccaggaatggggtcctgaccgaatgtataaggcgttgggacaattacattatg

SEQ ID NO: 179429 - DNA, 59 bp, Artificial
  Synthetic oligonucleotide
tgcggatgtcacacatgcggatagtcagatcgctgatggtagtcgccataacggtcagt

SEQ ID NO: 179430 - DNA, 59 bp, Artificial
  Synthetic oligonucleotide
aacgtgctccctcgttcttcgccagacgcataatcatgaacttagacgccgccaggacg

SEQ ID NO: 179431 - DNA, 59 bp, Artificial
  Synthetic oligonucleotide
aactgatggccagagtgtctattagtgaggctgcccgactgacgggtaagagtagaaca

SEQ ID NO: 179432 - DNA, 59 bp, Artificial
  Synthetic oligonucleotide
accccttatgctgtagcatgttcaatacatcctacaagctttgacgcactccgcgccta

SEQ ID NO: 179433 - DNA, 59 bp, Artificial
  Synthetic oligonucleotide
gcttcctgaatgcgagcgtcatagctcgtcggctgcggcacattcaaggcgttcgcaac

SEQ ID NO: 179434 - DNA, 57 bp, Artificial
  Synthetic oligonucleotide
ctcctatgtcttcggaagctacggtagtacgaggatatattgattgggtattgtcgg

SEQ ID NO: 179435 - DNA, 59 bp, Artificial
  Synthetic oligonucleotide
actggcagtgcagtgatatggcaaggatagtaatcgacatgcacgcctaacgccgtaat

SEQ ID NO: 179436 - DNA, 59 bp, Artificial
  Synthetic oligonucleotide
aacggaaatcccacgctctgacagcatatcgctgacattggcataactcatcgggggca

SEQ ID NO: 179437 - DNA, 58 bp, Artificial
  Synthetic oligonucleotide
aacggaagttgcatataaggcccataccccacgccataatggcccagcgtactgccaa

SEQ ID NO: 179438 - DNA, 55 bp, Artificial
  Synthetic oligonucleotide
gccatcgcgacccgggaagggtttgaggtgaataaactgatttgggtgaaacagc

SEQ ID NO: 179439 - DNA, 60 bp, Artificial
  Synthetic oligonucleotide
gattaagggtaggatctgatggtgtaccagactcatcaacgtataaaagatgcatctaag

SEQ ID NO: 179440 - DNA, 53 bp, Artificial
  Synthetic oligonucleotide
cgtaatgccgaccagagtcttccggtatcccaaacgtcgtaaaacctgcgtta

SEQ ID NO: 179441 - DNA, 58 bp, Artificial
  Synthetic oligonucleotide
tgtttatccgggacaatacggtggtatcgtcagaacggggctgccgtctgcgatcctg

SEQ ID NO: 179442 - DNA, 59 bp, Artificial
  Synthetic oligonucleotide
gtgtgtacgaagttgcgttgtcaggaagcccgatattcagaaggtcagccatacggcgg

SEQ ID NO: 179443 - DNA, 59 bp, Artificial
  Synthetic oligonucleotide
agcgagtcgatccactctttgcgcgtcagagtttcggccataactgaagcaccgacctt

SEQ ID NO: 179444 - DNA, 59 bp, Artificial
  Synthetic oligonucleotide
attcgcgtcacgataccgtcactaacatgcgcccgaatatcgcatttgcccccgcagtc

SEQ ID NO: 179445 - DNA, 58 bp, Artificial
  Synthetic oligonucleotide
aatggcgcagtccggttattatcgcgcttatacgatcggccatactcccgtcgctcct

SEQ ID NO: 179446 - DNA, 59 bp, Artificial
  Synthetic oligonucleotide
gttaaaccatatataacatgaatatgctgcttgtgctactaacattcctaagccatcag

SEQ ID NO: 179447 - DNA, 59 bp, Artificial
  Synthetic oligonucleotide
tacaccccctgacgcatgtttgcagcccgaatcgtaaactgtctctcgttgaatcgcga

SEQ ID NO: 179448 - DNA, 59 bp, Artificial
  Synthetic oligonucleotide
gtgctgtttatcgggtgcgctgtttttacatctgtgcggctttttactcctgacatggt

SEQ ID NO: 179449 - DNA, 53 bp, Artificial
  Synthetic oligonucleotide
cgcatccgttactttgttacgtaacagacgcatggttttaccttccgactggg

SEQ ID NO: 179450 - DNA, 60 bp, Artificial
  Synthetic oligonucleotide
gatgtcctgtaataaatataacaccttgtgaatacttacgatgtgttaatggtatgccag

SEQ ID NO: 179451 - DNA, 53 bp, Artificial
  Synthetic oligonucleotide
gtttctgagtttacctttccatcccgtgatcgtgtccccggctgcgtccgggg

SEQ ID NO: 179452 - DNA, 58 bp, Artificial
  Synthetic oligonucleotide
gctaaaagcaagaattaagcataattagcggcgtagttcccgcagattaaattatgac

SEQ ID NO: 179453 - DNA, 59 bp, Artificial
  Synthetic oligonucleotide
catgcaaacgcatctattggaaaaatcacagccagtgcagaacacgttattaacgacac

SEQ ID NO: 179454 - DNA, 59 bp, Artificial
  Synthetic oligonucleotide
gtgattcattgctacagatgattgataccacttacaggcggagtagttcactttattgc

SEQ ID NO: 179455 - DNA, 59 bp, Artificial
  Synthetic oligonucleotide
ttcagcgcgtgctctctggtgaagtgctgtgtgaaactaactgcttttcacttgattcc

SEQ ID NO: 179456 - DNA, 58 bp, Artificial
  Synthetic oligonucleotide
cgccttaatgcaacgttacgttgctaaagaggttattcatcgcctggcgctaatacag

SEQ ID NO: 179457 - DNA, 58 bp, Artificial
  Synthetic oligonucleotide
ggcacattatactgtcctgataacccgtctaaaagatgtggtaacaatctgtaccgaa

SEQ ID NO: 179458 - DNA, 55 bp, Artificial
  Synthetic oligonucleotide
agtaaggtgcgtccggtgtacgacttagcaacagtggaaattacgcttcctcgac

SEQ ID NO: 179459 - DNA, 59 bp, Artificial
  Synthetic oligonucleotide
atacacttactcaggccattgaccggtacaggctgacgattgaggccaaagacaatgcc

SEQ ID NO: 179460 - DNA, 59 bp, Artificial
  Synthetic oligonucleotide
atgagggccagctcttagttgatgaagtgctaacctactgcgataacaccagccccgtg

SEQ ID NO: 179461 - DNA, 60 bp, Artificial
  Synthetic oligonucleotide
atggttatcacttatccaattacttgcattatctatctctttatatatattcatttttta

SEQ ID NO: 179462 - DNA, 59 bp, Artificial
  Synthetic oligonucleotide
acggctaaagttatcatggtagacaatccgcagttcgcattatctttggcaattgctga

SEQ ID NO: 179463 - DNA, 55 bp, Artificial
  Synthetic oligonucleotide
gaaagccattttagcgccaggattgcggtattttactacggtgcccagggaaata

SEQ ID NO: 179464 - DNA, 59 bp, Artificial
  Synthetic oligonucleotide
tttctgtgccgtcaaggcatgatggagcgctgctgagagcgaaatcagccgtattcccc

SEQ ID NO: 179465 - DNA, 59 bp, Artificial
  Synthetic oligonucleotide
tctgcctgggataacgacgtacagatggagctacaggcgggaatcgggcatatcgtcgc

SEQ ID NO: 179466 - DNA, 58 bp, Artificial
  Synthetic oligonucleotide
catgagagacggagtgagcagacagaaccgaactgaacctgaacgggttaaatcaccg

SEQ ID NO: 179467 - DNA, 52 bp, Artificial
  Synthetic oligonucleotide
acccggttacaggaagagtacgaccttaaaagccgccagcggctgtatacct

SEQ ID NO: 179468 - DNA, 59 bp, Artificial
  Synthetic oligonucleotide
atgattccggtacgcatctcgccgcgccgtccaaatacccgtatctgcgctgcacgcgt

SEQ ID NO: 179469 - DNA, 57 bp, Artificial
  Synthetic oligonucleotide
aatcgcacgcagggtatgaacaccgtagtaagcctctgcggggacttctcgtgtacc

SEQ ID NO: 179470 - DNA, 55 bp, Artificial
  Synthetic oligonucleotide
ataatagtgttggttgtgcgagaggtcttccaaagatagccccggccttccgacc

SEQ ID NO: 179471 - DNA, 59 bp, Artificial
  Synthetic oligonucleotide
gcagatgaattctgggcgcgtgaatagctatgcacctaaaccgtcgccgcacggttagc

SEQ ID NO: 179472 - DNA, 60 bp, Artificial
  Synthetic oligonucleotide
gatgtcatgacgctgggcatcatcaagtcgtccggcagcttcaaaacccagatgcacttc

SEQ ID NO: 179473 - DNA, 59 bp, Artificial
  Synthetic oligonucleotide
tatacggtcaatcctctcttaatatgcctcctatgtcagtcccgcatatggatgctcgt

SEQ ID NO: 179474 - DNA, 59 bp, Artificial
  Synthetic oligonucleotide
tgtagttacgactgaatccggcgctgtttatcagctcccgcacctgttcagggtcaccg

SEQ ID NO: 179475 - DNA, 53 bp, Artificial
  Synthetic oligonucleotide
cgctaaagaccataatacttaaaccttttatgcgtaaactatttccgagacaa

SEQ ID NO: 179476 - DNA, 51 bp, Artificial
  Synthetic oligonucleotide
ggagactatcggctaaccggctgaaaactttacccctttaaacgggcagac

SEQ ID NO: 179477 - DNA, 57 bp, Artificial
  Synthetic oligonucleotide
ggtcgatccatcccacaacgtgggatcggcattacccccataaccggcatacacctg

SEQ ID NO: 179478 - DNA, 59 bp, Artificial
  Synthetic oligonucleotide
atgaccagctggctgttatcggctgagggaacggcaaacgcgggatacagcgtaccatt

SEQ ID NO: 179479 - DNA, 59 bp, Artificial
  Synthetic oligonucleotide
atgaccaggttttttagctacttgaaatgctgcagatcgtgctagttgattagattgtc

SEQ ID NO: 179480 - DNA, 59 bp, Artificial
  Synthetic oligonucleotide
aaaatcatgaagttgttgcgtatcagtctgtacccatttgcaatgcgtgccgggcatga

SEQ ID NO: 179481 - DNA, 59 bp, Artificial
  Synthetic oligonucleotide
aagactacgagcagaatggcatggaagaacatgaccttcacacttacttcacttaccgt

SEQ ID NO: 179482 - DNA, 59 bp, Artificial
  Synthetic oligonucleotide
cacgcggagtggggcgtatcgaccgcaggggctgaatcctctgggttgtcaccagcaac

SEQ ID NO: 179483 - DNA, 53 bp, Artificial
  Synthetic oligonucleotide
gatgtcagtcggtacaaaaaatcaccctaacgtacaatattttccgtttccca

SEQ ID NO: 179484 - DNA, 59 bp, Artificial
  Synthetic oligonucleotide
gatatgcgacgtaacgaacgtaacctgatgtggaacctcgatccctacattcaaacgca

SEQ ID NO: 179485 - DNA, 59 bp, Artificial
  Synthetic oligonucleotide
gtgaggaatttagctagccatggggtacactttagaatggatgtgtattcggactgact

SEQ ID NO: 179486 - DNA, 59 bp, Artificial
  Synthetic oligonucleotide
cgcagggctttccgtcacagcgcgatatgtcagccagcggggctttcttttgccagacc

SEQ ID NO: 179487 - DNA, 59 bp, Artificial
  Synthetic oligonucleotide
attgacgaggcttcgctctcgcgtaatccctttcgcatgttcacttcgctattacgcct

SEQ ID NO: 179488 - DNA, 58 bp, Artificial
  Synthetic oligonucleotide
gcgactggactggctaccaaccggcaactcgcaaaacaccatatgagcctgctcgatt

SEQ ID NO: 179489 - DNA, 54 bp, Artificial
  Synthetic oligonucleotide
gatcacccatcataactggggataaaaccacttaatatgttgtaaccccacggt

SEQ ID NO: 179490 - DNA, 58 bp, Artificial
  Synthetic oligonucleotide
ctataccagctgggtaagtccatcaaatccccagggggcgacagtcacctgcgatcag

SEQ ID NO: 179491 - DNA, 58 bp, Artificial
  Synthetic oligonucleotide
gtaccttgtcagcacccatgaatcctattgacgccccaacgaaggtaacggcattgga

SEQ ID NO: 179492 - DNA, 53 bp, Artificial
  Synthetic oligonucleotide
gataaaaaacgtaatgaagtgttaactctcccttgaagcctaacaattgggag

SEQ ID NO: 179493 - DNA, 58 bp, Artificial
  Synthetic oligonucleotide
ctcagggaatgtgctagcatagccgtctagattaacgagggatgagcgatttatggcg

SEQ ID NO: 179494 - DNA, 60 bp, Artificial
  Synthetic oligonucleotide
atgtacacatcggcccaatgctggcgaagtttatggcgcgttatcctgatgtttcgctac

SEQ ID NO: 179495 - DNA, 58 bp, Artificial
  Synthetic oligonucleotide
tttccctatgaatactattccgtgcagttcagcacattctccggtggtcatttcgcag

SEQ ID NO: 179496 - DNA, 54 bp, Artificial
  Synthetic oligonucleotide
gcgaagtcattatttggtatacctaccgttattgactttgttaaaagtcaggaa

SEQ ID NO: 179497 - DNA, 57 bp, Artificial
  Synthetic oligonucleotide
tccgatacgctggattcccctgtgaagcgttcaggcgcgaaataaccaaaggtgtta

SEQ ID NO: 179498 - DNA, 58 bp, Artificial
  Synthetic oligonucleotide
tcatcgcgttaccttgactaccgagctacccgagtgggtcgtagctgagaacgcagta

SEQ ID NO: 179499 - DNA, 58 bp, Artificial
  Synthetic oligonucleotide
cccccgtccgcagggtgaagtttatcgtcgttacgatccacgcattcgcaggatgctg

SEQ ID NO: 179500 - DNA, 55 bp, Artificial
  Synthetic oligonucleotide
tccggctctgtcatacccgatgaccgtaccggattaacccacgattacacccgta

SEQ ID NO: 179501 - DNA, 56 bp, Artificial
  Synthetic oligonucleotide
ggtcgcaatactgggttcggggtcatttgaccgactcatccgtatcgcgggcgtct

SEQ ID NO: 179502 - DNA, 54 bp, Artificial
  Synthetic oligonucleotide
ggtaaaacagaacgggggggtatccatccgtggtcagatcagatttatacgggc

SEQ ID NO: 179503 - DNA, 58 bp, Artificial
  Synthetic oligonucleotide
taagcaaaccttagtcagtgttagcgagtcggagtactcgctaaagcttgagcagacg

SEQ ID NO: 179504 - DNA, 54 bp, Artificial
  Synthetic oligonucleotide
ggtttttttctggaacgaaggctacgtagctgccaaatccaccagtggagcccg

SEQ ID NO: 179505 - DNA, 60 bp, Artificial
  Synthetic oligonucleotide
gatgtagcatggcagtaacacatagcattaatgccacataagacaggcgcagaaagtgaa

SEQ ID NO: 179506 - DNA, 58 bp, Artificial
  Synthetic oligonucleotide
ccgggtcatggtcgggtattcgatataagttttatcgaccgcagtgactggcatcaag

SEQ ID NO: 179507 - DNA, 58 bp, Artificial
  Synthetic oligonucleotide
tcagacgccagcgatatccactgcaaccagtcattcctgcgttctgtgctccaggggc

SEQ ID NO: 179508 - DNA, 58 bp, Artificial
  Synthetic oligonucleotide
ggtaaccgcccagccatcagtgcctgattaagcgcaaccagcatcgactcatagggca

SEQ ID NO: 179509 - DNA, 58 bp, Artificial
  Synthetic oligonucleotide
taactcacgctgaatgatatgcgtctctccatcatttcccgtcacggctattaggccc

SEQ ID NO: 179510 - DNA, 58 bp, Artificial
  Synthetic oligonucleotide
gggtgacaacatgtaagaggtgtgtcataacatgttttgtggtgtgtcgtagcatgta

SEQ ID NO: 179511 - DNA, 58 bp, Artificial
  Synthetic oligonucleotide
gatacgataaatgtatcgagtaaacttgtaagattagtgacaggcactaagattcgag

SEQ ID NO: 179512 - DNA, 58 bp, Artificial
  Synthetic oligonucleotide
ggtcctggtgagaaggggtgtaagatgcgacttgtctgtccgtatttgatacaaagtc

SEQ ID NO: 179513 - DNA, 58 bp, Artificial
  Synthetic oligonucleotide
gagggcagtttcaactagcctgataggatcagtgatggctggggggagccataggtat

SEQ ID NO: 179514 - DNA, 56 bp, Artificial
  Synthetic oligonucleotide
gcgcttagtattcgcctgggtccagtggggggagaaccccggagctgctgacgact

SEQ ID NO: 179515 - DNA, 58 bp, Artificial
  Synthetic oligonucleotide
tacagactggcgttaacctcattttttagctcaaacgcatcgctggtcgatacgccgc

SEQ ID NO: 179516 - DNA, 60 bp, Artificial
  Synthetic oligonucleotide
gatggtgccgccctcaatgctatctggtgacgggtacgtaaaacatgctcgctgggttga

SEQ ID NO: 179517 - DNA, 53 bp, Artificial
  Synthetic oligonucleotide
taaggggttctacgccggtgtagtccctccggttgtcaacgccaagattgttg

SEQ ID NO: 179518 - DNA, 57 bp, Artificial
  Synthetic oligonucleotide
ccggtgcgagtcttgttggtcccgtggtggcaactgctgtagggctgttttggtcac

SEQ ID NO: 179519 - DNA, 58 bp, Artificial
  Synthetic oligonucleotide
tggagagatctcattggcataaagcgaagtgaacccagcctctctcaagccctcggac

SEQ ID NO: 179520 - DNA, 58 bp, Artificial
  Synthetic oligonucleotide
ggtctgattaccaagactcccaatcatgaacgctggcgtacaaacatatggcggcctg

SEQ ID NO: 179521 - DNA, 56 bp, Artificial
  Synthetic oligonucleotide
ggtccattccgttagagccgcgtacgtatttcgccaggtactggtcgatttgcgga

SEQ ID NO: 179522 - DNA, 58 bp, Artificial
  Synthetic oligonucleotide
ggtctggtactctgcgcgattgttaacgttgggctgggattcagtagcgcattctgga

SEQ ID NO: 179523 - DNA, 57 bp, Artificial
  Synthetic oligonucleotide
tttacacaggtatccccaaaaggttgggaacgtgttcgagagctgctgaaggatagc

SEQ ID NO: 179524 - DNA, 58 bp, Artificial
  Synthetic oligonucleotide
gcgctttccccgtgccgctcactcaccacgtcaatcatcgcgttaatctgctccggtg

SEQ ID NO: 179525 - DNA, 57 bp, Artificial
  Synthetic oligonucleotide
tgcgctggttgaagccagttataaattgaccctacaggaacagcgatttttgttact

SEQ ID NO: 179526 - DNA, 58 bp, Artificial
  Synthetic oligonucleotide
tcagtcttgcgaccaatattatccagggcataaataattaccgtctgcagacggaaca

SEQ ID NO: 179527 - DNA, 52 bp, Artificial
  Synthetic oligonucleotide
gatggtgcaaccttcttggtttaaagggaagaactacgttaagcacgaacgt

SEQ ID NO: 179528 - DNA, 58 bp, Artificial
  Synthetic oligonucleotide
taagtccgaccaggtatggataagctcggaactgctgtacttacgatcgacatcctgt

SEQ ID NO: 179529 - DNA, 58 bp, Artificial
  Synthetic oligonucleotide
gcgccgaattatcggttcagccctctcattaaccgccgatgcggatttggtgtgcagg

SEQ ID NO: 179530 - DNA, 57 bp, Artificial
  Synthetic oligonucleotide
gcgcgtgtaccggctttatcacctcagtggcctgggcgtaaaacgcagaagacgtcg

SEQ ID NO: 179531 - DNA, 57 bp, Artificial
  Synthetic oligonucleotide
tcagcgtcaaccctccaatatatgtccctctcgcttcgccggactcccgtttcgtcg

SEQ ID NO: 179532 - DNA, 58 bp, Artificial
  Synthetic oligonucleotide
tgcgggtgcttcatcatattgatcgcttgtaagataacgacaatccgagcggttatag

SEQ ID NO: 179533 - DNA, 58 bp, Artificial
  Synthetic oligonucleotide
cggcatcaatggccatcagcgcagcgacaatctgtacgcgatcatgtccggtaccacc

SEQ ID NO: 179534 - DNA, 58 bp, Artificial
  Synthetic oligonucleotide
tgtcggatcgtttgtcggacagtgccagcatatgcttgatagcataccgctctccatt

SEQ ID NO: 179535 - DNA, 57 bp, Artificial
  Synthetic oligonucleotide
ggaaatttatcgcactagtcaaattattagtcaaatctgtaatttgccaataccgcc

SEQ ID NO: 179536 - DNA, 58 bp, Artificial
  Synthetic oligonucleotide
cggaggcagaggcaccggctatcccaataatgacgcactggtgtgctttgtcagtcat

SEQ ID NO: 179537 - DNA, 58 bp, Artificial
  Synthetic oligonucleotide
gcataaagcgtggacagccatccggacacagctgaatgctcagtgaaacggccatcag

SEQ ID NO: 179538 - DNA, 60 bp, Artificial
  Synthetic oligonucleotide
atgtatgagtaaatctcattttcgattggttcaagcaaggatgtcatttcttgaatgatc

SEQ ID NO: 179539 - DNA, 56 bp, Artificial
  Synthetic oligonucleotide
cttcgtttgacttatccttgtttatcgttaagtaatgtaagtgattggagaataca

SEQ ID NO: 179540 - DNA, 58 bp, Artificial
  Synthetic oligonucleotide
cgtatcggcagcctgattcagcgcttctgtcgccggtttctgctgtgctaatccggct

SEQ ID NO: 179541 - DNA, 56 bp, Artificial
  Synthetic oligonucleotide
ttacggatggatcagaaatttcctgggggatgccaggaagatacttaacgaagaaa

SEQ ID NO: 179542 - DNA, 58 bp, Artificial
  Synthetic oligonucleotide
ggacgcgtataatttagagatatagcacgttcagataaatttactaacacatctaatt

SEQ ID NO: 179543 - DNA, 51 bp, Artificial
  Synthetic oligonucleotide
ggacggggttagggatagaacatttcaaaatttcgattaataaaagaacaa

SEQ ID NO: 179544 - DNA, 58 bp, Artificial
  Synthetic oligonucleotide
tatcacgttcactggtacaaatacccgctgacgtactggcttaacatcatcacatcgc

SEQ ID NO: 179545 - DNA, 58 bp, Artificial
  Synthetic oligonucleotide
tatcagccgggaaataatgcgggcaacggtgtttaattatatcgaatgtgattacaat

SEQ ID NO: 179546 - DNA, 55 bp, Artificial
  Synthetic oligonucleotide
cgcgggtgatgtttttagtcagcggaatctcgttaaagcgttggtcggggatgcc

SEQ ID NO: 179547 - DNA, 56 bp, Artificial
  Synthetic oligonucleotide
gcacgtcccagttttttaagacgtcatcaggaggcattaagccttccggtccgctc

SEQ ID NO: 179548 - DNA, 56 bp, Artificial
  Synthetic oligonucleotide
ttatttaacacccacgtcatgcgggataatccttaaccgtaagctggaaatgaggc

SEQ ID NO: 179549 - DNA, 54 bp, Artificial
  Synthetic oligonucleotide
gccagttaccacggttaatgaatctgccaggatttattaaccttcgaaaaacca

SEQ ID NO: 179550 - DNA, 60 bp, Artificial
  Synthetic oligonucleotide
gatggaaatactatagatactgaacctaagcctcctattaatgtattgctagagaatgtc

SEQ ID NO: 179551 - DNA, 52 bp, Artificial
  Synthetic oligonucleotide
ggaggggcttcctcaagcgaaaggcagctttccccgttcagttcccgtaccg

SEQ ID NO: 179552 - DNA, 56 bp, Artificial
  Synthetic oligonucleotide
gaaaacgtcatttcagatgttttcaaagagacgcgagttaaaattagtaaggatga

SEQ ID NO: 179553 - DNA, 58 bp, Artificial
  Synthetic oligonucleotide
gaaaccatcagcgccccaaatgcattatctggcgtgcattcgccaccaaacagcgggc

SEQ ID NO: 179554 - DNA, 50 bp, Artificial
  Synthetic oligonucleotide
gttttaatggtatgattaggtttaatagtaaaggagggtttaatgttcct

SEQ ID NO: 179555 - DNA, 56 bp, Artificial
  Synthetic oligonucleotide
ggatttccccaacctaggacacgggccgatgttcaatgcctcctttcgccaggcac

SEQ ID NO: 179556 - DNA, 58 bp, Artificial
  Synthetic oligonucleotide
cgccgggacgatgtaatgcctctgcccgtaactacaggcaatgccatcgctgcctacc

SEQ ID NO: 179557 - DNA, 58 bp, Artificial
  Synthetic oligonucleotide
gcgtttgcggagaaaaacgctattgtggcagaggtgaaaacggggcacaagatgcgcc

SEQ ID NO: 179558 - DNA, 56 bp, Artificial
  Synthetic oligonucleotide
tctgcacgtccatgtggctgttaaccgggtacaccctgaaacgggttatctgaacc

SEQ ID NO: 179559 - DNA, 57 bp, Artificial
  Synthetic oligonucleotide
gaaatccctaaccgccgtttaagtggtccttattcgtccacgtatgcactggctgca

SEQ ID NO: 179560 - DNA, 55 bp, Artificial
  Synthetic oligonucleotide
tgtaaccgttcttacgtagctccccgattgggagcattgttaaatagccaaatcg

SEQ ID NO: 179561 - DNA, 58 bp, Artificial
  Synthetic oligonucleotide
gatgcttcattccgtgacgcccttcttattaaaacgggcgagacattgatgacgaaaa

SEQ ID NO: 179562 - DNA, 58 bp, Artificial
  Synthetic oligonucleotide
tgtgaccacactcacgggtctggacaccgttaagactgcacgcggtacagaaactgag

SEQ ID NO: 179563 - DNA, 58 bp, Artificial
  Synthetic oligonucleotide
gctgcgggcatagttaccctggacgagtatcaaccgatggccccgtgacttagtgcaa

SEQ ID NO: 179564 - DNA, 54 bp, Artificial
  Synthetic oligonucleotide
gccaggatatcgtgcgacggaaagttttcgttacctccggggatatttcagccg

SEQ ID NO: 179565 - DNA, 54 bp, Artificial
  Synthetic oligonucleotide
gttcaggtgattttccaaggtcggatcactgttttcgaatagggtctggaaagg

SEQ ID NO: 179566 - DNA, 58 bp, Artificial
  Synthetic oligonucleotide
cggtcacgggcagacaaaactcccgccttttgacatagtgagtgagatcagcaggctt

SEQ ID NO: 179567 - DNA, 55 bp, Artificial
  Synthetic oligonucleotide
gttagtaagcggaacacattacctgataataatgagtccgtttcgggtctggaac

SEQ ID NO: 179568 - DNA, 58 bp, Artificial
  Synthetic oligonucleotide
gccacgcgtagttgttggatatgttaagtacccatgtatcgtatagcttgagtatgag

SEQ ID NO: 179569 - DNA, 57 bp, Artificial
  Synthetic oligonucleotide
tgtggcgcgaagcaatgaacggtacggtcgcaatactgggttcggggtcatttgacc

SEQ ID NO: 179570 - DNA, 54 bp, Artificial
  Synthetic oligonucleotide
tgtctgttgaccgtttagatcgaattagaagccgggatccgagaacgggtaaaa

SEQ ID NO: 179571 - DNA, 58 bp, Artificial
  Synthetic oligonucleotide
tgagcgggaaggtgaacgacatcgaacgtgaggggaatgcgctgctgaaagagcaggc

SEQ ID NO: 179572 - DNA, 60 bp, Artificial
  Synthetic oligonucleotide
gatgctgacttagatggcgcggctttagcggatccgatttttaactggcgacagcttagt

SEQ ID NO: 179573 - DNA, 58 bp, Artificial
  Synthetic oligonucleotide
ctgttacgcagcgcgttagccgcctcgtcaaacacggattgccgggctgcctccagta

SEQ ID NO: 179574 - DNA, 58 bp, Artificial
  Synthetic oligonucleotide
tgttaccccttacgccacgccgctaccgctcttctcaccgccattaattcatgcggat

SEQ ID NO: 179575 - DNA, 54 bp, Artificial
  Synthetic oligonucleotide
gttcccccatgggagcccaaaaggggacgacttctccggcctgctagctcccca

SEQ ID NO: 179576 - DNA, 57 bp, Artificial
  Synthetic oligonucleotide
cgggcagtcattttcatgttcccggtatcctcagcttgcccgtgcttatcccgggtg

SEQ ID NO: 179577 - DNA, 55 bp, Artificial
  Synthetic oligonucleotide
cgggcagggtagccattgacagataaaaccgcatccgtatccccggaaaacacca

SEQ ID NO: 179578 - DNA, 57 bp, Artificial
  Synthetic oligonucleotide
tacgttccagtacggactttccagaacatagttgagacaggttttatgagtcacctg

SEQ ID NO: 179579 - DNA, 57 bp, Artificial
  Synthetic oligonucleotide
gctcttcagcaaagtttaccgctgtattggatgtgaaaccggtcgacgtgcccccta

SEQ ID NO: 179580 - DNA, 58 bp, Artificial
  Synthetic oligonucleotide
cgggaatggtgtcacgccaccaccacaggtgacgtaccagtctgtgccggtgcctaac

SEQ ID NO: 179581 - DNA, 58 bp, Artificial
  Synthetic oligonucleotide
cgtaatgccagccacaacgttacggcagggatcgcataagtttccgccagcgtatcga

SEQ ID NO: 179582 - DNA, 57 bp, Artificial
  Synthetic oligonucleotide
gctgttgatacccaccgccgcgaaatcttcacgcttcgccactttactgtccgggcc

SEQ ID NO: 179583 - DNA, 60 bp, Artificial
  Synthetic oligonucleotide
atgtcggatctaattgcctataaatccaatgcgctggttgaagccagttataaattgacc

SEQ ID NO: 179584 - DNA, 58 bp, Artificial
  Synthetic oligonucleotide
tagcttcaggtaattggtatactttcatccaatataagattcctttgctagagaaaca

SEQ ID NO: 179585 - DNA, 58 bp, Artificial
  Synthetic oligonucleotide
tgtttgagtgttccaatcctgaatattgatgttatttgagtataaaggaaacataata

SEQ ID NO: 179586 - DNA, 58 bp, Artificial
  Synthetic oligonucleotide
tgttttacgacccaaccgcttaatgcgggtgcgtagcgtcagattattacgctcaatg

SEQ ID NO: 179587 - DNA, 55 bp, Artificial
  Synthetic oligonucleotide
gctttctacaggctggtattttacgggataaagacgcaaagggagtgtttcaatc

SEQ ID NO: 179588 - DNA, 58 bp, Artificial
  Synthetic oligonucleotide
gcccagagggaatatgatgatgcccgaaataaatatgctttactggccagtgatatta

SEQ ID NO: 179589 - DNA, 57 bp, Artificial
  Synthetic oligonucleotide
tattccgactttaatacactacgtaatgtcctcggtttcagtaagaacgcacacagc

SEQ ID NO: 179590 - DNA, 58 bp, Artificial
  Synthetic oligonucleotide
tggctcttcctatcataagcagtaatgatgctgtagtacgggtcttcgccgtttggtt

SEQ ID NO: 179591 - DNA, 58 bp, Artificial
  Synthetic oligonucleotide
ggctgttgatgcacaggctgattatcgcggacgtctgacgcaggataaccattccgtg

SEQ ID NO: 179592 - DNA, 56 bp, Artificial
  Synthetic oligonucleotide
gattgcccccgagtggtagatgaaaagggaactactttcgccagcttatacgacac

SEQ ID NO: 179593 - DNA, 58 bp, Artificial
  Synthetic oligonucleotide
ttgccagacaggacaaccatcacaagacgtcacagacggagcgcttacaaaccagacg

SEQ ID NO: 179594 - DNA, 60 bp, Artificial
  Synthetic oligonucleotide
gatgctgaccgtatacatagccaactggatagcggaaacgtggcggtattgcccgttatc

SEQ ID NO: 179595 - DNA, 57 bp, Artificial
  Synthetic oligonucleotide
cgtttctttaccactggacgagatataagtgacctgtggtaagtcagcattttccgc

SEQ ID NO: 179596 - DNA, 58 bp, Artificial
  Synthetic oligonucleotide
tcgggtccgagacttccccagccaaacagcgtagggttagcgtgcatatggcgctcta

SEQ ID NO: 179597 - DNA, 57 bp, Artificial
  Synthetic oligonucleotide
gggcaactttggccgaaaactcggctcctttagcagcaagacttgcggtgttagcac

SEQ ID NO: 179598 - DNA, 58 bp, Artificial
  Synthetic oligonucleotide
gacagtatatgcacagtcacctgccacactcagctttccgcagggggggcagttccgg

SEQ ID NO: 179599 - DNA, 58 bp, Artificial
  Synthetic oligonucleotide
tattttggctacacacttacggttctaacccagcgagttatccatttgatgcgcggca

SEQ ID NO: 179600 - DNA, 58 bp, Artificial
  Synthetic oligonucleotide
cgaacagcaaagtccacggcctggttatgtgcatcaatcaggcgcttatcgccaccta

SEQ ID NO: 179601 - DNA, 57 bp, Artificial
  Synthetic oligonucleotide
gggcacccacggctcgctttccgggcgaatcaggataagcaattcaccgacctgtat

SEQ ID NO: 179602 - DNA, 54 bp, Artificial
  Synthetic oligonucleotide
tcgctggtataccaccggtcctgttgggctaatcacccgccctttcgttaagta

SEQ ID NO: 179603 - DNA, 58 bp, Artificial
  Synthetic oligonucleotide
gtcatacatgttcttttaataggatgacgcataatgggttgattaatagttccacctg

SEQ ID NO: 179604 - DNA, 58 bp, Artificial
  Synthetic oligonucleotide
tcaacaccccttgtgcaccatatgagcggaaacgactattaaacaggatgacactgat

SEQ ID NO: 179605 - DNA, 60 bp, Artificial
  Synthetic oligonucleotide
gatgcgcaccagtgccatgcattcggaagcacaactcagttgtggggtagttatcataat

SEQ ID NO: 179606 - DNA, 56 bp, Artificial
  Synthetic oligonucleotide
tcgcgggacgccttacgaaatctttaacgtgtcactgacccagacgctacaccgta

SEQ ID NO: 179607 - DNA, 57 bp, Artificial
  Synthetic oligonucleotide
cctttcgtatgtaacgattaacctcagctcctgtgtagtgcttaggcactacctccg

SEQ ID NO: 179608 - DNA, 58 bp, Artificial
  Synthetic oligonucleotide
gattcagacgattaaataaacatcgagcatgtgctatgagagctatagtacctgctat

SEQ ID NO: 179609 - DNA, 58 bp, Artificial
  Synthetic oligonucleotide
taccattgcttctggcctgatctggtgtatcaccgaataccgttaatgcgcagtgtag

SEQ ID NO: 179610 - DNA, 58 bp, Artificial
  Synthetic oligonucleotide
gattattagcattatttcaaaatagacatggacctaatcgagttggttggatgggaag

SEQ ID NO: 179611 - DNA, 58 bp, Artificial
  Synthetic oligonucleotide
tgcagtgatggagataaagtgtcaatgccactttctctctcatcagcatctaacaaag

SEQ ID NO: 179612 - DNA, 56 bp, Artificial
  Synthetic oligonucleotide
ttgtattcctaatagatgacaaaagttgtcttcttcaaatcttagtctaactaagg

SEQ ID NO: 179613 - DNA, 58 bp, Artificial
  Synthetic oligonucleotide
gatgctgtcaggatctaccggccagtccagcatttcccagcccaggccctgatacata

SEQ ID NO: 179614 - DNA, 58 bp, Artificial
  Synthetic oligonucleotide
ctgacgcagtaatgccttatttgacacaactacaagggcaatttactagagttgtaat

SEQ ID NO: 179615 - DNA, 57 bp, Artificial
  Synthetic oligonucleotide
gcggaggcttccgggtcaaggctgaggaaggtactgccagaggtctgacggatccct

SEQ ID NO: 179616 - DNA, 58 bp, Artificial
  Synthetic oligonucleotide
atgcggaaaaggcgcagcccggaggaacaacgagcacgccccagcgtgtgagaggaaa

SEQ ID NO: 179617 - DNA, 57 bp, Artificial
  Synthetic oligonucleotide
gttttatcccgggaatggtgtcacgccaccaccacaggtgacgtaccagtctgtgcc

SEQ ID NO: 179618 - DNA, 58 bp, Artificial
  Synthetic oligonucleotide
cgccagcattaacattgaacggttgccaagagcgatgactctgcatgtacaaggggaa

SEQ ID NO: 179619 - DNA, 53 bp, Artificial
  Synthetic oligonucleotide
tatcgttaagcgtttatacgataaaaaaggaacgacaaccgggcagacaagaa

SEQ ID NO: 179620 - DNA, 58 bp, Artificial
  Synthetic oligonucleotide
gtgatggttgcgtcagataaccaggttcccagcatgttattcgcccccacggtgtatg

SEQ ID NO: 179621 - DNA, 58 bp, Artificial
  Synthetic oligonucleotide
ctgcgaccggaaacccaatcaatgcggtaaggacagtgccgtcaggttcgctccgcga

SEQ ID NO: 179622 - DNA, 56 bp, Artificial
  Synthetic oligonucleotide
ctgcctttgggaaatttgtcatcctccagtcggaactacacgggacgctgtagcgg

SEQ ID NO: 179623 - DNA, 57 bp, Artificial
  Synthetic oligonucleotide
gtgatagtcgggtaaacgggagtcgtgcaaatagcccagcttgagcggaaccaccta

SEQ ID NO: 179624 - DNA, 58 bp, Artificial
  Synthetic oligonucleotide
gtgagtcagtccggtacgctcatcaagcatcagtgaaccggaacgataggcagcagaa

SEQ ID NO: 179625 - DNA, 58 bp, Artificial
  Synthetic oligonucleotide
cgcataccgtgagctacaagctcgcctccgaaccccattcggatgatagctgcgttgg

SEQ ID NO: 179626 - DNA, 58 bp, Artificial
  Synthetic oligonucleotide
tctctgtaagtagcccgatattgttggcttttgcttagcttgctgacgggatttgtcg

SEQ ID NO: 179627 - DNA, 57 bp, Artificial
  Synthetic oligonucleotide
gcaaccactacctgttgctcgataccattccttaatttgcaacaaaattccggagaa

SEQ ID NO: 179628 - DNA, 58 bp, Artificial
  Synthetic oligonucleotide
ggcatgtgtacatgtcgaagaagacagccggagggcggaatacggcacgctacctggg

SEQ ID NO: 179629 - DNA, 58 bp, Artificial
  Synthetic oligonucleotide
cgtggcagcaacctgtgcctgtcgcttccgcgccgcaatacgccgcgacgccagcgac

SEQ ID NO: 179630 - DNA, 58 bp, Artificial
  Synthetic oligonucleotide
gaacgtcaccatgaatgccctgaaagagggtatcaccagtaatgcagcccgtaacggt

SEQ ID NO: 179631 - DNA, 53 bp, Artificial
  Synthetic oligonucleotide
taaaagcggacaacatgaggacggattaacccccggtatcctgtagccgggta

SEQ ID NO: 179632 - DNA, 58 bp, Artificial
  Synthetic oligonucleotide
gtgaataacccacttgaggccgtcactcaggcggttaactccctcgtcacagcactga

SEQ ID NO: 179633 - DNA, 58 bp, Artificial
  Synthetic oligonucleotide
gtctgtcattttggctaattcgcaggaaatggcttgatggagagctttaggcgacaca

SEQ ID NO: 179634 - DNA, 54 bp, Artificial
  Synthetic oligonucleotide
tggtactggcggaaaacgatggcacgttatggtgggtagaaaatccgcaaaccg

SEQ ID NO: 179635 - DNA, 56 bp, Artificial
  Synthetic oligonucleotide
ttctcgtcctggtagtactgttaatcctgtaattagaaggacttgaagcaactttc

SEQ ID NO: 179636 - DNA, 57 bp, Artificial
  Synthetic oligonucleotide
cgcaaggctatgttccgcgtttatcgctgttttccatgcgtccacccgtggtcggtc

SEQ ID NO: 179637 - DNA, 58 bp, Artificial
  Synthetic oligonucleotide
gcgtctgtcttatgacactgaagcgtctatcgccaaagcaaaacgtatcattaaactc

SEQ ID NO: 179638 - DNA, 58 bp, Artificial
  Synthetic oligonucleotide
gcaacaaacgcagaaaccgcgcgttttatctccggcgctaccagagcgcctgtagtgg

SEQ ID NO: 179639 - DNA, 58 bp, Artificial
  Synthetic oligonucleotide
cgttatgtcgtctataccagttgatggtatatgcgaaacatataattacgaaagagcg

SEQ ID NO: 179640 - DNA, 58 bp, Artificial
  Synthetic oligonucleotide
cgatgcaaatcaggtggagaggtatgtatcagaggttagtgaaggttgacccgctgaa

SEQ ID NO: 179641 - DNA, 58 bp, Artificial
  Synthetic oligonucleotide
tgattggcagataaacgcagcaaaatgcttacgatgtgggtgactgaggatgagcacc

SEQ ID NO: 179642 - DNA, 58 bp, Artificial
  Synthetic oligonucleotide
ggcgtcgtgtcgataatgtgcttccgctcatatgaatgcgacatgaggtatttattgc

SEQ ID NO: 179643 - DNA, 58 bp, Artificial
  Synthetic oligonucleotide
gatttacgagcaaaatgccgaatgttgtcgcagataatccgcgaacaatgatattggc

SEQ ID NO: 179644 - DNA, 58 bp, Artificial
  Synthetic oligonucleotide
acttaaccactcttcacgatttgtcattcttacctctgcacttttgccgttaatgtga

SEQ ID NO: 179645 - DNA, 58 bp, Artificial
  Synthetic oligonucleotide
caggtgaaatgtcacacaccgctggatgatgcggggaggccgaccgtatgagccagaa

SEQ ID NO: 179646 - DNA, 57 bp, Artificial
  Synthetic oligonucleotide
actttgggtgtttcccacaatatcctttaaatcaggtgcgtacgagcattatgtgac

SEQ ID NO: 179647 - DNA, 58 bp, Artificial
  Synthetic oligonucleotide
caccgaacctctgaccaaatgttataccttcactatgcatagctatgcttcctgacat

SEQ ID NO: 179648 - DNA, 58 bp, Artificial
  Synthetic oligonucleotide
ccattaaactattgccagcacgcaattgtacggttatactttcatcacataaagattg

SEQ ID NO: 179649 - DNA, 60 bp, Artificial
  Synthetic oligonucleotide
gcaaatcattaagagatggcggagacagcaatgctgaatacatcgttaccgtacctaaac

SEQ ID NO: 179650 - DNA, 55 bp, Artificial
  Synthetic oligonucleotide
acgctggcgaaactcgaggcaaaaacctggggggtgacgttcgtcaatggcgaga

SEQ ID NO: 179651 - DNA, 56 bp, Artificial
  Synthetic oligonucleotide
acgacgtcttctgcgttttacgcccaggccactgaggtgataaagccggtacacgc

SEQ ID NO: 179652 - DNA, 58 bp, Artificial
  Synthetic oligonucleotide
catgacaacgtcactcaccacagcttatataagctgtggtgagtaaatcttcccagag

SEQ ID NO: 179653 - DNA, 55 bp, Artificial
  Synthetic oligonucleotide
acgagccttccccagacgtaaggtgggtattatggaagccagccttggtctggaa

SEQ ID NO: 179654 - DNA, 58 bp, Artificial
  Synthetic oligonucleotide
cacctgctgtcgtctaggttaatcacccgatctgccgacgcaatggttgattctcgat

SEQ ID NO: 179655 - DNA, 57 bp, Artificial
  Synthetic oligonucleotide
aaacattgtgtttaatgtggctccagttagtgctccaataacgggaacgacttgagc

SEQ ID NO: 179656 - DNA, 58 bp, Artificial
  Synthetic oligonucleotide
ataccaggggagatctcgtgctgccagcagaactggacggaataacctgaacgtccat

SEQ ID NO: 179657 - DNA, 58 bp, Artificial
  Synthetic oligonucleotide
ccagatcgcgctcattcctcagcctcatcccgcgatgtctgcgtatgtcatcaactga

SEQ ID NO: 179658 - DNA, 58 bp, Artificial
  Synthetic oligonucleotide
aggtacgtgatgaatataccacatcaaatcacagcctgcccagatcggagcaggctta

SEQ ID NO: 179659 - DNA, 57 bp, Artificial
  Synthetic oligonucleotide
aacgagctttagcactcgaaacattggagtaggaatggataaaagatagataacttc

SEQ ID NO: 179660 - DNA, 58 bp, Artificial
  Synthetic oligonucleotide
gccagtaagtgtagcattcacacaaaacttccgctatttcaccatttatagtttcttg

SEQ ID NO: 179661 - DNA, 59 bp, Artificial
  Synthetic oligonucleotide
atgcgtaatgtactctttggtgtgcttctccgttgtgcgggaaaacgagatcacagtac

SEQ ID NO: 179662 - DNA, 56 bp, Artificial
  Synthetic oligonucleotide
cacgcaacaccgcgcttattcatccgtccgggttgaaggggagtatgtgaccgtta

SEQ ID NO: 179663 - DNA, 58 bp, Artificial
  Synthetic oligonucleotide
acgggaaaggacatcagtggcactggtcggatccacgcgaacgtgctctctgggtgag

SEQ ID NO: 179664 - DNA, 58 bp, Artificial
  Synthetic oligonucleotide
acaacatattgacgatttcgcaactccccactcaattccgaaacatccttgattgatt

SEQ ID NO: 179665 - DNA, 58 bp, Artificial
  Synthetic oligonucleotide
aacgaacacattcggtctttacatgacgcaccgggatgtttatagtgcgcctcattcc

SEQ ID NO: 179666 - DNA, 58 bp, Artificial
  Synthetic oligonucleotide
aacatgcttctggtgaagtcatcgcggactgcgttggtcagggccatatggctggttg

SEQ ID NO: 179667 - DNA, 58 bp, Artificial
  Synthetic oligonucleotide
aacctgtccgccccctgtaccatccgggagccttatgtgtgcatcgccacacaatcca

SEQ ID NO: 179668 - DNA, 58 bp, Artificial
  Synthetic oligonucleotide
cagtgggcggggagtaaaaccggataacatgaggacggatgtaagcgtgcagcaagaa

SEQ ID NO: 179669 - DNA, 56 bp, Artificial
  Synthetic oligonucleotide
caggaattcacgtttatcactcgtactagactctccggaggaccagggggaatgac

SEQ ID NO: 179670 - DNA, 58 bp, Artificial
  Synthetic oligonucleotide
aacctgtaagcgttactcgctatagtggttatcagaaaatgtatgccggaaatgcgtc

SEQ ID NO: 179671 - DNA, 58 bp, Artificial
  Synthetic oligonucleotide
ccatacagaaggaatagaatatgtacgtaacgcgatatctatagctaaattagtaccc

SEQ ID NO: 179672 - DNA, 60 bp, Artificial
  Synthetic oligonucleotide
gcaaaaagcttttgactcaaggatggagtgtaattccttggctgcagcccgataggcgta

SEQ ID NO: 179673 - DNA, 53 bp, Artificial
  Synthetic oligonucleotide
ataccggacaataatccctaccctattaggggtaatactgatttcgaatgaag

SEQ ID NO: 179674 - DNA, 56 bp, Artificial
  Synthetic oligonucleotide
agacgaactgattaaactcgaagccgctatgcaacaaaacatggtactggtgggtt

SEQ ID NO: 179675 - DNA, 55 bp, Artificial
  Synthetic oligonucleotide
actgtatcgatacttttgcgggtcaacataaggggatgagtccttaataaaacag

SEQ ID NO: 179676 - DNA, 58 bp, Artificial
  Synthetic oligonucleotide
aacctgccaacacagcgccgtcatcagagtactggatcgcattgtggtcaaccgtggc

SEQ ID NO: 179677 - DNA, 55 bp, Artificial
  Synthetic oligonucleotide
aatcagggccgacagcacaaccggctaacaaaccagccacggtaaggacgataac

SEQ ID NO: 179678 - DNA, 58 bp, Artificial
  Synthetic oligonucleotide
aaaaacccactgcatgactattggggcgtcactgaatggcgtagtgaaccgtacacgc

SEQ ID NO: 179679 - DNA, 58 bp, Artificial
  Synthetic oligonucleotide
agagttgtgcaccacaggagttttaagacgcatgtcttcccgcaataatccggcgcgt

SEQ ID NO: 179680 - DNA, 58 bp, Artificial
  Synthetic oligonucleotide
attcggagcagactattgtgcttaacgccgttcgtcgtatcagcgtcgctggggcagg

SEQ ID NO: 179681 - DNA, 58 bp, Artificial
  Synthetic oligonucleotide
ccaggagaactcacgcagcccgtattcaatcctgtcaccaaccatctgactggacatc

SEQ ID NO: 179682 - DNA, 54 bp, Artificial
  Synthetic oligonucleotide
aataaaaccggaacaacttgtctccgatccctgcctgaatatttacaccggagc

SEQ ID NO: 179683 - DNA, 60 bp, Artificial
  Synthetic oligonucleotide
gatttcgctaatcatttatgtgtattagctcagatttgacctgacatagctatggcacag

SEQ ID NO: 179684 - DNA, 58 bp, Artificial
  Synthetic oligonucleotide
aaatgctacctctcccttcttgcaataaatgaccaaggcacgttagcgatgtatacat

SEQ ID NO: 179685 - DNA, 58 bp, Artificial
  Synthetic oligonucleotide
agaactgccaaccagaaacagcccgtctgcatggatccggatggatattaggtccgtt

SEQ ID NO: 179686 - DNA, 58 bp, Artificial
  Synthetic oligonucleotide
aaggaaacaagcgactagcgactttggcaagataggtgagagacagtacaatcgactt

SEQ ID NO: 179687 - DNA, 58 bp, Artificial
  Synthetic oligonucleotide
ataaacttgcgtgcccgattaccgcagaagataccagtggctcactgtataataagtt

SEQ ID NO: 179688 - DNA, 58 bp, Artificial
  Synthetic oligonucleotide
acacctagcaaagctgtacgggattcaacactgcaaactaccatgtcgatagggttat

SEQ ID NO: 179689 - DNA, 58 bp, Artificial
  Synthetic oligonucleotide
agccgttctttatctgtgagttcgccaaatcaccgatacagaacgtactagagtctgc

SEQ ID NO: 179690 - DNA, 54 bp, Artificial
  Synthetic oligonucleotide
agcctaatgcccccgtggtgggtacaccagaaaacggggagcggagcgaccagc

SEQ ID NO: 179691 - DNA, 58 bp, Artificial
  Synthetic oligonucleotide
ataaaggcacatagaatgcctgtaacaatagcaatcccccagatacctaatgtagttc

SEQ ID NO: 179692 - DNA, 56 bp, Artificial
  Synthetic oligonucleotide
aacggcgggggctcagttgccatccaagaatataacacgagtaaatatcctaacac

SEQ ID NO: 179693 - DNA, 58 bp, Artificial
  Synthetic oligonucleotide
aaatttcccgcgactgcatagccatgcagccgagtgaatggctcaggctttcagcacg

SEQ ID NO: 179694 - DNA, 60 bp, Artificial
  Synthetic oligonucleotide
atgctgatatggcgcttatctgcgagcttgatgagcaatggagctacattggcagtaaag

SEQ ID NO: 179695 - DNA, 53 bp, Artificial
  Synthetic oligonucleotide
acctctttatgttgtctccgtcggcggattctacttaactttaccggctttca

SEQ ID NO: 179696 - DNA, 58 bp, Artificial
  Synthetic oligonucleotide
agtagaagaattatttcacgcattgtcaagaggggctaatatatatgcagagataact

SEQ ID NO: 179697 - DNA, 58 bp, Artificial
  Synthetic oligonucleotide
atttattgccctccgtctgaatgtctcaccggaaatcgtcgatgcttcacatcaggcg

SEQ ID NO: 179698 - DNA, 58 bp, Artificial
  Synthetic oligonucleotide
actgacacactgggatatatcggccgatctgagggtattgcgtgtatagcagtcgtgt

SEQ ID NO: 179699 - DNA, 58 bp, Artificial
  Synthetic oligonucleotide
caactgtcgtggcgccagatgctctgacttacgtttactgttaggtgttctttttgcc

SEQ ID NO: 179700 - DNA, 57 bp, Artificial
  Synthetic oligonucleotide
tcggttttccacaactggctacttgagatcgcatgtgagaattacttcgtctacatc

SEQ ID NO: 179701 - DNA, 56 bp, Artificial
  Synthetic oligonucleotide
atcgtcaaaattcagcaccacgaaacgaccccttaatggcaacagtagctcgaagg

SEQ ID NO: 179702 - DNA, 57 bp, Artificial
  Synthetic oligonucleotide
acgccgatcctggggttaattgtccggcgttatctggctaatcaggctcacacggcg

SEQ ID NO: 179703 - DNA, 57 bp, Artificial
  Synthetic oligonucleotide
caatgcccagatataacaacgcccgactaacatcgtgagtttgcgccataaaatatt

SEQ ID NO: 179704 - DNA, 57 bp, Artificial
  Synthetic oligonucleotide
gcggttaaacagatacccggacaccacctcctgatagcgctgcggctcttcacggtg

SEQ ID NO: 179705 - DNA, 60 bp, Artificial
  Synthetic oligonucleotide
atgcttgttgcagttgtattcatgactgtaatgagttgtttttgtaccctaataatataa

SEQ ID NO: 179706 - DNA, 57 bp, Artificial
  Synthetic oligonucleotide
gtcctcccaaggaaaacacctctaagcaggccagtttggtatcaatattatctagct

SEQ ID NO: 179707 - DNA, 57 bp, Artificial
  Synthetic oligonucleotide
ttcattaaggcgccaaacgatcgattggtcaccagtaatgtccgattctggaaagat

SEQ ID NO: 179708 - DNA, 57 bp, Artificial
  Synthetic oligonucleotide
cctcatgacgtcgttttgtctatgcatagcctgtaggccataccatcacagaggtct

SEQ ID NO: 179709 - DNA, 57 bp, Artificial
  Synthetic oligonucleotide
tagaacgacatcagcgtattttagccctggtggagcagcgtggggcggtaagcatta

SEQ ID NO: 179710 - DNA, 57 bp, Artificial
  Synthetic oligonucleotide
ggtgaagtcatcgcggactgcgttggtcagggccatatggctggttgggagatcaag

SEQ ID NO: 179711 - DNA, 57 bp, Artificial
  Synthetic oligonucleotide
tagaactgtgcgatgaccaggctgtaaagcctgacgaggcgccgataccccatacga

SEQ ID NO: 179712 - DNA, 55 bp, Artificial
  Synthetic oligonucleotide
tacgacgacaagtaaagccggtacatttacgccagcaaatccattatttggtggt

SEQ ID NO: 179713 - DNA, 57 bp, Artificial
  Synthetic oligonucleotide
tcttaacactgttattaataataccgctgaaacgacattgaatactgctaataacta

SEQ ID NO: 179714 - DNA, 57 bp, Artificial
  Synthetic oligonucleotide
gtagcttgccgcatacccgcctttcgggatgctcactgacccaggattaaagtgata

SEQ ID NO: 179715 - DNA, 56 bp, Artificial
  Synthetic oligonucleotide
cccggtaagcttactgctcgtccgggggcgctgcattgtacaaattctggcgtaag

SEQ ID NO: 179716 - DNA, 60 bp, Artificial
  Synthetic oligonucleotide
atgctttaccgcagaaagttgcaacaatctttccgtgagctgaatggtactatccagcgt

SEQ ID NO: 179717 - DNA, 56 bp, Artificial
  Synthetic oligonucleotide
acgcgccattattgtagctgtaagaacccccagttgcagtccaactaaagcgcgtt

SEQ ID NO: 179718 - DNA, 57 bp, Artificial
  Synthetic oligonucleotide
tgctcctgacgtttatgatagtgtacgcagtaagtcggaaaatactccagacgccgt

SEQ ID NO: 179719 - DNA, 57 bp, Artificial
  Synthetic oligonucleotide
ccggatttggtatgcttgcgtcctgacaaaaaggagagggcgcatgtcgcaacgcac

SEQ ID NO: 179720 - DNA, 57 bp, Artificial
  Synthetic oligonucleotide
tgctctgtaccagtctgccggattgcttatcctggcgggtctggttgacagtaagac

SEQ ID NO: 179721 - DNA, 56 bp, Artificial
  Synthetic oligonucleotide
accggagagctaaccaccgcgcgaacacgctaaagccccaccatcggagctattcc

SEQ ID NO: 179722 - DNA, 57 bp, Artificial
  Synthetic oligonucleotide
gactgcgtatctccggcattcttgttattcaggcgtgaacacgtgaattcatcaggg

SEQ ID NO: 179723 - DNA, 57 bp, Artificial
  Synthetic oligonucleotide
ccatcggcgaattatccaggcaattccctctgcgactcatactttgcattaccccat

SEQ ID NO: 179724 - DNA, 57 bp, Artificial
  Synthetic oligonucleotide
gcaaaatccacccccggcgcaatgggtaacagggagacgcgttctggtgaattctgc

SEQ ID NO: 179725 - DNA, 57 bp, Artificial
  Synthetic oligonucleotide
aacagtatgttgagagcctgcgcacgctacgccatgagcacctgaactggatgtcga

SEQ ID NO: 179726 - DNA, 57 bp, Artificial
  Synthetic oligonucleotide
cttttcgacacaatgcttcgcgctgtaacacttggcctttatatattaattgcggca

SEQ ID NO: 179727 - DNA, 60 bp, Artificial
  Synthetic oligonucleotide
gatttaagcgaactgacttcagcagaaaacacatcgggtaagcctcgtgccaagcgtgct

SEQ ID NO: 179728 - DNA, 56 bp, Artificial
  Synthetic oligonucleotide
cagcaacggattgcgtagaacaccttttgtgtcgcgtcccgtttacgccggcgcta

SEQ ID NO: 179729 - DNA, 56 bp, Artificial
  Synthetic oligonucleotide
ggcccaacaaacatcgtaatgcgctgtggttagccttttttcccaccgtactgcgc

SEQ ID NO: 179730 - DNA, 51 bp, Artificial
  Synthetic oligonucleotide
ccctaatgcccccgtggtgggtatacaaaaaacacggggagcggagcgacc

SEQ ID NO: 179731 - DNA, 57 bp, Artificial
  Synthetic oligonucleotide
tcaacagggaggtgttgtcattttctcgaaatgtgatgctgaacaccttttgtacag

SEQ ID NO: 179732 - DNA, 57 bp, Artificial
  Synthetic oligonucleotide
gtgccgctcacccaacctgagctggatatccaacggttacctggcgaaatctggcct

SEQ ID NO: 179733 - DNA, 57 bp, Artificial
  Synthetic oligonucleotide
aggcggccagaggtgggcgaaatacacatgaatcacaggcagctaaagggcggaagt

SEQ ID NO: 179734 - DNA, 57 bp, Artificial
  Synthetic oligonucleotide
tactcctccgcactcagtccccattcctgcgcctcatactgcaatgactgagtctga

SEQ ID NO: 179735 - DNA, 57 bp, Artificial
  Synthetic oligonucleotide
aaccaccgcgcgaacacgctaaagccccaccatcggagctattccgcttccaagatc

SEQ ID NO: 179736 - DNA, 57 bp, Artificial
  Synthetic oligonucleotide
ggcttacaagtgcttacagttatgatacgtaatcatatgagtctatatgagctaagc

SEQ ID NO: 179737 - DNA, 56 bp, Artificial
  Synthetic oligonucleotide
aacgccattgagcactataatgaaattaaaccgcaattactgacgacgggcggtac

SEQ ID NO: 179738 - DNA, 58 bp, Artificial
  Synthetic oligonucleotide
gatttaaataatcccaaacagggcatagttcatgttataggtccagaacagggtctga

SEQ ID NO: 179739 - DNA, 54 bp, Artificial
  Synthetic oligonucleotide
cgccctgcgtcggatagtccgattttttaccggcgaagcacggctctcctaacc

SEQ ID NO: 179740 - DNA, 57 bp, Artificial
  Synthetic oligonucleotide
atgacagagcagaagcgaccggtagtgacactgaagcggaagacagagggaacagcg

SEQ ID NO: 179741 - DNA, 57 bp, Artificial
  Synthetic oligonucleotide
gaaacccaatagtccataacatagaagaatggaatctaatacgtccacgaaacatag

SEQ ID NO: 179742 - DNA, 57 bp, Artificial
  Synthetic oligonucleotide
gtgatttcgggtcatgatacgcagatattgactacggaatgcgggtttaatgggggt

SEQ ID NO: 179743 - DNA, 52 bp, Artificial
  Synthetic oligonucleotide
tgttcttgcccccttatttccagacaggggttgtatcttaagttaacgttac

SEQ ID NO: 179744 - DNA, 57 bp, Artificial
  Synthetic oligonucleotide
gtaacgctggccagacgcctaatcctgtcgcccacatctgactgttctctgaatcgt

SEQ ID NO: 179745 - DNA, 57 bp, Artificial
  Synthetic oligonucleotide
gcagaaatcgcggaatgcagttcccacagccgttatggcgtcggaaaagataccgtc

SEQ ID NO: 179746 - DNA, 57 bp, Artificial
  Synthetic oligonucleotide
tgttaatcccacgcggtcgcaacgggatgacttaatgaccgatccgggaggacagct

SEQ ID NO: 179747 - DNA, 57 bp, Artificial
  Synthetic oligonucleotide
gccgtggtatgacacgccggataaacagtcgagcgtggcttatcagggcatggcgct

SEQ ID NO: 179748 - DNA, 52 bp, Artificial
  Synthetic oligonucleotide
cctaagagaaaaccccgtacaggacggggcttcgattacaggatacggctaa

SEQ ID NO: 179749 - DNA, 60 bp, Artificial
  Synthetic oligonucleotide
gattgttcctccggcttgtgagcgcgatacggtgtctattaccatccgtaagccatcaaa

SEQ ID NO: 179750 - DNA, 57 bp, Artificial
  Synthetic oligonucleotide
ccgcgcaataggcgaatctggattacaggagacggcaacagtggtacaaccggactg

SEQ ID NO: 179751 - DNA, 57 bp, Artificial
  Synthetic oligonucleotide
cgggactttctgtgcgttgcgggctgacaattgccctcgtttcttgtcacaataggc

SEQ ID NO: 179752 - DNA, 57 bp, Artificial
  Synthetic oligonucleotide
ccgcacaacttgcagtgtcatagccacttgatcatagtcattgaggattttacgtac

SEQ ID NO: 179753 - DNA, 57 bp, Artificial
  Synthetic oligonucleotide
ccgcacagcacgcacttcagcgggtcaaccttcagtaaacgctgatacatccctctc

SEQ ID NO: 179754 - DNA, 57 bp, Artificial
  Synthetic oligonucleotide
aacgtcgcattacgcgcaccgctaaaacgcactgaacgcgattctgacgcagatacc

SEQ ID NO: 179755 - DNA, 57 bp, Artificial
  Synthetic oligonucleotide
tctccggcagcggggtttcccgttcaggcggggtcattctgtcatgctcctggccgg

SEQ ID NO: 179756 - DNA, 57 bp, Artificial
  Synthetic oligonucleotide
gtcgcattactgacgtgaaacgtgcttaaacgcatactggcctatgcaatttccagg

SEQ ID NO: 179757 - DNA, 57 bp, Artificial
  Synthetic oligonucleotide
tatattcctgttggtgtttccaaagagtatgttgccagagagcttaatcagactgac

SEQ ID NO: 179758 - DNA, 51 bp, Artificial
  Synthetic oligonucleotide
gtgtttttttccgtgccgtcgtcaatcacaaaatcggaaccccggaggggc

SEQ ID NO: 179759 - DNA, 57 bp, Artificial
  Synthetic oligonucleotide
gttactcctccgtaacatatttagcccgtgtacactctgctagtgttacatgactga

SEQ ID NO: 179760 - DNA, 52 bp, Artificial
  Synthetic oligonucleotide
gattgtggcgtttattacgctttcattcggttttttcgttaagtcagaaaaa

SEQ ID NO: 179761 - DNA, 57 bp, Artificial
  Synthetic oligonucleotide
cgctggcgtacgttccattacgcaccgattgtcggaaacgatactggcaccatccga

SEQ ID NO: 179762 - DNA, 57 bp, Artificial
  Synthetic oligonucleotide
ccgccgctgggttgcaccgctaccggtcgttggtcagctgcgtaacgttggcgcacc

SEQ ID NO: 179763 - DNA, 57 bp, Artificial
  Synthetic oligonucleotide
agtgtaagaacgatagatacgcatttaaatagcgcaatgcataagtacgaacttaac

SEQ ID NO: 179764 - DNA, 57 bp, Artificial
  Synthetic oligonucleotide
ctcaaatgattgagctactaattgaacgggaaatggccaaaagagcctgagataaga

SEQ ID NO: 179765 - DNA, 57 bp, Artificial
  Synthetic oligonucleotide
cgccaggttacgccaacagaacgcttccgtggtcgtcgtatggagagctgtcctgcg

SEQ ID NO: 179766 - DNA, 50 bp, Artificial
  Synthetic oligonucleotide
tagagggggtacagcccccttgtttgtgtttacttagccctaaataaggt

SEQ ID NO: 179767 - DNA, 55 bp, Artificial
  Synthetic oligonucleotide
cgttaaactattgccagtacgcaattgtacgatttgccgattaaataccggtgaa

SEQ ID NO: 179768 - DNA, 57 bp, Artificial
  Synthetic oligonucleotide
gctgatactgacgctaatcgtatggctgggtgcgggcagtaataaacaccgaaatct

SEQ ID NO: 179769 - DNA, 57 bp, Artificial
  Synthetic oligonucleotide
tggcgactctgtgagtcggctagaccggaaagagccggagatgagcgacaacacacc

SEQ ID NO: 179770 - DNA, 57 bp, Artificial
  Synthetic oligonucleotide
acccattcgttaatcttgtcgacagttgaacgggcacgcagcatatatgaagcataa

SEQ ID NO: 179771 - DNA, 60 bp, Artificial
  Synthetic oligonucleotide
gccagggctgatgtctccggttgaacataacggttactggctggtagatggcgcagtcgt

SEQ ID NO: 179772 - DNA, 60 bp, Artificial
  Synthetic oligonucleotide
gattggcatgacattatcgtaagggccagcattcgtttgggttttaatcgcaatgcccac

SEQ ID NO: 179773 - DNA, 57 bp, Artificial
  Synthetic oligonucleotide
gcctctgccggttaccgcagctggtgacgtcaacgcaaagacaactattttcgcccc

SEQ ID NO: 179774 - DNA, 57 bp, Artificial
  Synthetic oligonucleotide
tggctcgtgtatccattagtgaagcagcacgacttgctaatgttagccgcccgacta

SEQ ID NO: 179775 - DNA, 57 bp, Artificial
  Synthetic oligonucleotide
gtacatccaagctttagcagtgtccgctttgtgccagaaacggacattgcaaacata

SEQ ID NO: 179776 - DNA, 57 bp, Artificial
  Synthetic oligonucleotide
gcaattgaacgtgcgctgtgtgagaaacttgacgcagatgtgaactacagcggactg

SEQ ID NO: 179777 - DNA, 54 bp, Artificial
  Synthetic oligonucleotide
gcatgccattaatttcgaagtgagtttagttaatttcggaaggtacagttagtt

SEQ ID NO: 179778 - DNA, 55 bp, Artificial
  Synthetic oligonucleotide
cacaccaggggggacgaataaatggggcgggtattggcggcagtccactggaggc

SEQ ID NO: 179779 - DNA, 57 bp, Artificial
  Synthetic oligonucleotide
ggtgtagcatattccatcgttcgcaatcttggccatttcgtgctagttctgtaaatg

SEQ ID NO: 179780 - DNA, 57 bp, Artificial
  Synthetic oligonucleotide
gtacagacgctgcagctggatctgagcaatagaagcgatgtgttgctcacctaacgg

SEQ ID NO: 179781 - DNA, 57 bp, Artificial
  Synthetic oligonucleotide
actgtcatgtgtacgggcgcggtgttctatcagtgaggtggctgaaccacggggaaa

SEQ ID NO: 179782 - DNA, 57 bp, Artificial
  Synthetic oligonucleotide
cgttagacgtagatcagcattatcctcccttaaagataatctgtactccgatctcgc

SEQ ID NO: 179783 - DNA, 55 bp, Artificial
  Synthetic oligonucleotide
gattgcatccggggagttaatcccgtgtcctttaaaaactcctgtcgatacacta

SEQ ID NO: 179784 - DNA, 57 bp, Artificial
  Synthetic oligonucleotide
gcacagacgcccgcagtattcactggctgagctactagcgcagtgcgatccgaatgc

SEQ ID NO: 179785 - DNA, 56 bp, Artificial
  Synthetic oligonucleotide
ttagcgtctcctggcagcaaagtcggtcggccggaactggtaaactgtattccacc

SEQ ID NO: 179786 - DNA, 55 bp, Artificial
  Synthetic oligonucleotide
ggccttcactggaaatgaaagtcgtcaggaacgtttattcgtcgaagaaccagta

SEQ ID NO: 179787 - DNA, 57 bp, Artificial
  Synthetic oligonucleotide
gtcggacgatactcattagcaacttgggacagccatagcatctgctcatcattcaag

SEQ ID NO: 179788 - DNA, 57 bp, Artificial
  Synthetic oligonucleotide
ttactctaactggaggtagaattgacgttggcaactcttgcgtatatataccgtgac

SEQ ID NO: 179789 - DNA, 57 bp, Artificial
  Synthetic oligonucleotide
aacgaacaacaactactgagcgcctggcagcaagcaactcgtgagggactgccggtt

SEQ ID NO: 179790 - DNA, 57 bp, Artificial
  Synthetic oligonucleotide
ctgacgctggttatcgtccgggaggatctgttaggcaaggcgcatgagagctgcccg

SEQ ID NO: 179791 - DNA, 57 bp, Artificial
  Synthetic oligonucleotide
acgagtcgcttacgattagacaggccccctgaatctccagacaaccaatatcactta

SEQ ID NO: 179792 - DNA, 57 bp, Artificial
  Synthetic oligonucleotide
ttacatcacgccaactgtaactatcggcagattgaatgtattcgtacccaccacaaa

SEQ ID NO: 179793 - DNA, 57 bp, Artificial
  Synthetic oligonucleotide
cacttacatcctataaagcgcaaggtaaaacatgtgatcgtgtgtatgcattattag

SEQ ID NO: 179794 - DNA, 60 bp, Artificial
  Synthetic oligonucleotide
gattgaggtggtagcgctcgccgcagtctcatgaccgagcgtagcgagcgaggaagcgca

SEQ ID NO: 179795 - DNA, 57 bp, Artificial
  Synthetic oligonucleotide
ccgagacgataagttcgcttaccggctcgaataaagagagtttctctcgatattcag

SEQ ID NO: 179796 - DNA, 57 bp, Artificial
  Synthetic oligonucleotide
taggtacacgagaagtccccgcagaggcttactacggtgttcataccctgcgtgcga

SEQ ID NO: 179797 - DNA, 57 bp, Artificial
  Synthetic oligonucleotide
ggacagatactggagcggtatgatgcagaacgtcggacgtctgagcgttacaccatt

SEQ ID NO: 179798 - DNA, 56 bp, Artificial
  Synthetic oligonucleotide
ggaagcgggaataacatcaacgcccgggataattgacgacacgatgaaatcggaaa

SEQ ID NO: 179799 - DNA, 48 bp, Artificial
  Synthetic oligonucleotide
aatcggccactaacccccgatttttacccctcagcgttacccggtaac

SEQ ID NO: 179800 - DNA, 57 bp, Artificial
  Synthetic oligonucleotide
tcctcaacatcacactcccaaccggtcgtgttgagaacttctttgcgaccaggcgct

SEQ ID NO: 179801 - DNA, 57 bp, Artificial
  Synthetic oligonucleotide
ccggtcttcgctctggctggcgtagtgaagcccccagcactttctacaggctaaatc

SEQ ID NO: 179802 - DNA, 51 bp, Artificial
  Synthetic oligonucleotide
cccaacgtgtattatccctctgtgcgtaacgggaaaggatttccgggcggg

SEQ ID NO: 179803 - DNA, 56 bp, Artificial
  Synthetic oligonucleotide
attataaatctagacgatgtatatattcggcgattaattaaagtatttccgttata

SEQ ID NO: 179804 - DNA, 57 bp, Artificial
  Synthetic oligonucleotide
tccgtttgcagggagcacgcatgatgcctgaagcgcacattgttcatgacggttacg

SEQ ID NO: 179805 - DNA, 60 bp, Artificial
  Synthetic oligonucleotide
gattgaacacctgaacaccttacttttgtccaaggattcgcacattgacagcctgaaaca

SEQ ID NO: 179806 - DNA, 57 bp, Artificial
  Synthetic oligonucleotide
aaaatgatccatttctgtcacactcagaacgatttgataacaacaagaggtcatagg

SEQ ID NO: 179807 - DNA, 57 bp, Artificial
  Synthetic oligonucleotide
cttcctgggttggatggacaaggtcgttgaagacgtattgcggacatatatctagct

SEQ ID NO: 179808 - DNA, 57 bp, Artificial
  Synthetic oligonucleotide
gtcaagccggccatatttacgcagccagacaagtacggtggagcgcccctgaatgcc

SEQ ID NO: 179809 - DNA, 57 bp, Artificial
  Synthetic oligonucleotide
gcgttattattgtcggcttgcagtagcgaacctgttcagcaggcaaccgcggcacat

SEQ ID NO: 179810 - DNA, 57 bp, Artificial
  Synthetic oligonucleotide
gatatgaccattgctggttaattgaatagctcattacactccattaacacgatgttg

SEQ ID NO: 179811 - DNA, 55 bp, Artificial
  Synthetic oligonucleotide
tttcaccaaaggaagttgcttaccatgctcttggtaaggagttagttgaaactcc

SEQ ID NO: 179812 - DNA, 56 bp, Artificial
  Synthetic oligonucleotide
gtcaaatgggtttgtatggtcgcctagaaattatgatcgtcaatttcgaggtaaag

SEQ ID NO: 179813 - DNA, 57 bp, Artificial
  Synthetic oligonucleotide
cgcaaaacgaatggtctgggctgctgtagcggaaaggctaaagcctgcaattagcgc

SEQ ID NO: 179814 - DNA, 57 bp, Artificial
  Synthetic oligonucleotide
attacgctacaggaggtatcggagtttactgatgatatgcgaaactttacagcggac

SEQ ID NO: 179815 - DNA, 57 bp, Artificial
  Synthetic oligonucleotide
gccttagagcagctgcaacaggactatatgcagcggctgagcgaatgggagagctcc

SEQ ID NO: 179816 - DNA, 58 bp, Artificial
  Synthetic oligonucleotide
gattctgggaagtattgctccttctggtgttatgcaggtcaccattgagggggtaacc

SEQ ID NO: 179817 - DNA, 57 bp, Artificial
  Synthetic oligonucleotide
tacaatgcgacgttatggtaaatgcgtatgggttggggtattagctttatgatcgta

SEQ ID NO: 179818 - DNA, 57 bp, Artificial
  Synthetic oligonucleotide
ccgtctcgctccatgcgcgtcaatattccggtcagacttggacgcaaaatgcaggta

SEQ ID NO: 179819 - DNA, 56 bp, Artificial
  Synthetic oligonucleotide
acggcagcacagtaaactgcgcacccgttcaccgtttcaggtaaggcgaaagatac

SEQ ID NO: 179820 - DNA, 57 bp, Artificial
  Synthetic oligonucleotide
gtggcctttatccgccatcacgactggtgtcgaaaccccgaccttattgcgcttcgc

SEQ ID NO: 179821 - DNA, 57 bp, Artificial
  Synthetic oligonucleotide
tcgctacaccattatgattcatgtagcgatttaaattactacataatggtgattagc

SEQ ID NO: 179822 - DNA, 57 bp, Artificial
  Synthetic oligonucleotide
cacgcagataacgcgtgaatcgcaggcgggcttgtaccctgtgatcctgttacgtgt

SEQ ID NO: 179823 - DNA, 57 bp, Artificial
  Synthetic oligonucleotide
gtggcgtctggcgtggtttctagctctttgcgggtctcttgtagtccgctcttgtag

SEQ ID NO: 179824 - DNA, 55 bp, Artificial
  Synthetic oligonucleotide
aaagatttaggtgtgtaattattgttttcactttgcaattgtctcgataatggtt

SEQ ID NO: 179825 - DNA, 57 bp, Artificial
  Synthetic oligonucleotide
gagtattgaagcgatcagtattgcccgggtaagccagtgagaaataccatcgcagga

SEQ ID NO: 179826 - DNA, 57 bp, Artificial
  Synthetic oligonucleotide
ggggcgagcaaagcccccgttccaattgattctctattccacacaaatggcgatata

SEQ ID NO: 179827 - DNA, 60 bp, Artificial
  Synthetic oligonucleotide
atggcataagccaggtcaatatgttgctctgcccgctcctgacctgggcgaatcacccgg

SEQ ID NO: 179828 - DNA, 55 bp, Artificial
  Synthetic oligonucleotide
taaccggttactattgggccagtttgcgggcagtccctgcatagggtggcttaag

SEQ ID NO: 179829 - DNA, 57 bp, Artificial
  Synthetic oligonucleotide
gccgaatagctatgtcataggagatcgagatactgacatacaattcgctcacaatat

SEQ ID NO: 179830 - DNA, 57 bp, Artificial
  Synthetic oligonucleotide
tgacatcgctagccacgcgcctgctaggattttgatgtgtcgaagtctggtcctagc

SEQ ID NO: 179831 - DNA, 57 bp, Artificial
  Synthetic oligonucleotide
cataccgcattatttccatcacccgtcatacaccacaggagtggaatttccgtgtgg

SEQ ID NO: 179832 - DNA, 57 bp, Artificial
  Synthetic oligonucleotide
gcgaacatcaccgttacggatgccactcaatgaactgggggggcagtaaaggactcg

SEQ ID NO: 179833 - DNA, 57 bp, Artificial
  Synthetic oligonucleotide
ctgccgcgacgcagattacaggcaactgcttacgcattgcgcaccccttatacgctt

SEQ ID NO: 179834 - DNA, 57 bp, Artificial
  Synthetic oligonucleotide
cgcacttacctgctcccaccggtaagatctttgtttcggtatataacattcaggatg

SEQ ID NO: 179835 - DNA, 57 bp, Artificial
  Synthetic oligonucleotide
agtatcaccaacgggcggaatcgctggattggtctgatagagatgctgtcgtcgcgt

SEQ ID NO: 179836 - DNA, 57 bp, Artificial
  Synthetic oligonucleotide
taaagcgattaaccctgagtgtagcttgcgtgggcgctatcttgcttcgcttcgcgc

SEQ ID NO: 179837 - DNA, 57 bp, Artificial
  Synthetic oligonucleotide
atcaacacactatgctccttagatatagaagtcataggtaatcgaagggtatcatat

SEQ ID NO: 179838 - DNA, 55 bp, Artificial
  Synthetic oligonucleotide
atggccaataacctctttcagtttacccgcttcagtacggaagtgtcgcagttgg

SEQ ID NO: 179839 - DNA, 56 bp, Artificial
  Synthetic oligonucleotide
acccggatgtttgcccagcaattgccttttacctgctttatcgcgtgaccagttta

SEQ ID NO: 179840 - DNA, 57 bp, Artificial
  Synthetic oligonucleotide
tcagcgcctcaaaacgggcatactcctccgcactcagtccccattcctgcgcctcat

SEQ ID NO: 179841 - DNA, 57 bp, Artificial
  Synthetic oligonucleotide
ggaaatgtaggttttatgtccaaaatcctgaacaagtctgatcacaaaatttgccat

SEQ ID NO: 179842 - DNA, 57 bp, Artificial
  Synthetic oligonucleotide
aattgggtttcatgattcattgcgcggacttcctgtctgatgtggtcctcatattct

SEQ ID NO: 179843 - DNA, 56 bp, Artificial
  Synthetic oligonucleotide
agtgaaaaagacgcgtcgcccggaagtcatgggtggactaggcggcttcggtgcgc

SEQ ID NO: 179844 - DNA, 55 bp, Artificial
  Synthetic oligonucleotide
gtctggttaaaacccgcagcgttggagcgaactgtctaagtcgagccgagaactt

SEQ ID NO: 179845 - DNA, 56 bp, Artificial
  Synthetic oligonucleotide
attgatacggtctacgacggtacgggccccattaccggcaatctgagttcaggaca

SEQ ID NO: 179846 - DNA, 55 bp, Artificial
  Synthetic oligonucleotide
gatacgcggcggcttcacgtcctctttgggcggccgatagcacggatgggggttt

SEQ ID NO: 179847 - DNA, 57 bp, Artificial
  Synthetic oligonucleotide
gggcagttgtacgctggcgggaagtgtgctgttggcaatggtgttcatacgtggctc

SEQ ID NO: 179848 - DNA, 57 bp, Artificial
  Synthetic oligonucleotide
gaatacggagtatcagaacgagtaacggaagttagcgttgactgcattatcaacgtt

SEQ ID NO: 179849 - DNA, 55 bp, Artificial
  Synthetic oligonucleotide
atggccccctgatatctgacgattccgccaagtttctgacagatttcggggggtt

SEQ ID NO: 179850 - DNA, 57 bp, Artificial
  Synthetic oligonucleotide
gccatacgctcacgtcgctcgttgcgcaggagtcgcgctggcaactgcgctttacgt

SEQ ID NO: 179851 - DNA, 55 bp, Artificial
  Synthetic oligonucleotide
gggaggtgttcgaccgtgctgattaaattctttggtaacaaaggcggtggcagtc

SEQ ID NO: 179852 - DNA, 55 bp, Artificial
  Synthetic oligonucleotide
gtatacatagaatataatttgttcgttcagtagtagataacgtttttttacagtc

SEQ ID NO: 179853 - DNA, 57 bp, Artificial
  Synthetic oligonucleotide
ctgattataccgttacggataatgcgtaataaggtggtacaagaggcttcatagaac

SEQ ID NO: 179854 - DNA, 57 bp, Artificial
  Synthetic oligonucleotide
gcgtcattaagccgttctgcttttgctagccaataacctgaacctccctcagctctc

SEQ ID NO: 179855 - DNA, 57 bp, Artificial
  Synthetic oligonucleotide
gcttgctaccgagcgcattccggcttctgacagggactgaccgccattactacaggt

SEQ ID NO: 179856 - DNA, 57 bp, Artificial
  Synthetic oligonucleotide
gctcgctgcgttcataacaagcggctactttcataagatcgcctgacttcaggcacc

SEQ ID NO: 179857 - DNA, 53 bp, Artificial
  Synthetic oligonucleotide
ccgggagtgccttttccgccaaacggattaacagtaccaatcgggacgctgac

SEQ ID NO: 179858 - DNA, 53 bp, Artificial
  Synthetic oligonucleotide
atcgccataacgcctttaccttaaagttcgtagaacttcctgaacggtgcaac

SEQ ID NO: 179859 - DNA, 57 bp, Artificial
  Synthetic oligonucleotide
atacggtcggcctccccgcatcatccagcggtgtgtgacatttcacctgacgaccgg

SEQ ID NO: 179860 - DNA, 54 bp, Artificial
  Synthetic oligonucleotide
gattctctctccttgcttcctatttcttcggatagtcgaaaggtaattttttta

SEQ ID NO: 179861 - DNA, 57 bp, Artificial
  Synthetic oligonucleotide
ggaaggtcgcagtgagaacgagatagccctgataacgcttcacagtatggctgtcgc

SEQ ID NO: 179862 - DNA, 57 bp, Artificial
  Synthetic oligonucleotide
ttgggacgttgtgctcatctctaacaggtggagtaggtattaatggattgactgcct

SEQ ID NO: 179863 - DNA, 57 bp, Artificial
  Synthetic oligonucleotide
ctgatggtctataccctttgtttccttgtgaataatattttccactgttccaagatg

SEQ ID NO: 179864 - DNA, 57 bp, Artificial
  Synthetic oligonucleotide
agcaggagcctggacacagcgcagaaggtcattgtgggagcggcattgctggcaaag

SEQ ID NO: 179865 - DNA, 57 bp, Artificial
  Synthetic oligonucleotide
gtatatcataagcgatccatacactccatccagctctacgcattaaagcagcctcta

SEQ ID NO: 179866 - DNA, 57 bp, Artificial
  Synthetic oligonucleotide
cgtgacccgaacgcaccggagaacagacggacgcttgtcacgccaaataatctgcca

SEQ ID NO: 179867 - DNA, 57 bp, Artificial
  Synthetic oligonucleotide
ttgcgccgcgccgctgtaaatcctccggcgcgttagtcgtcaacgaaagatcggaac

SEQ ID NO: 179868 - DNA, 57 bp, Artificial
  Synthetic oligonucleotide
gagacctcatattatagtaagtactccaggtagactaatagatcatttaaaccgtgg

SEQ ID NO: 179869 - DNA, 57 bp, Artificial
  Synthetic oligonucleotide
aaatggcaggttaagtggattaagacaggctaatgtggtctgtaccatctggttgca

SEQ ID NO: 179870 - DNA, 54 bp, Artificial
  Synthetic oligonucleotide
cactaaaagaaataaaagcggaagatcttacgaagagcttagaaaagctttgtc

SEQ ID NO: 179871 - DNA, 55 bp, Artificial
  Synthetic oligonucleotide
atggcggaaggggagtatacctttggcactgccgaacccgaagagatgacggttg

SEQ ID NO: 179872 - DNA, 57 bp, Artificial
  Synthetic oligonucleotide
ggcattcaggggcgctccaccgtacttgtctggctgcgtaaatatggccggcttgac

SEQ ID NO: 179873 - DNA, 57 bp, Artificial
  Synthetic oligonucleotide
gcgatttggatcgtgagttgcatgatgctgtcctcccggggctatcgctgtggtata

SEQ ID NO: 179874 - DNA, 57 bp, Artificial
  Synthetic oligonucleotide
tcacagattaccgctctgtttacggacgagtatcccggtccggcattacagaattta

SEQ ID NO: 179875 - DNA, 57 bp, Artificial
  Synthetic oligonucleotide
ttgtgaacggctgcgtatactggtggtgtacgacgctgggtccgatgcgcgatatta

SEQ ID NO: 179876 - DNA, 57 bp, Artificial
  Synthetic oligonucleotide
agtgatgtatatggcgcttgctcccattgatagcaaagaacctcttgaacgagggcg

SEQ ID NO: 179877 - DNA, 57 bp, Artificial
  Synthetic oligonucleotide
tgcgataccgggaaagactgccggagtggcaaggtccagtaccgagtaaggctcgcg

SEQ ID NO: 179878 - DNA, 56 bp, Artificial
  Synthetic oligonucleotide
gtaagaggcattctgtaagtctcgcttcacttccgcttcctcgcttttgctgttcg

SEQ ID NO: 179879 - DNA, 56 bp, Artificial
  Synthetic oligonucleotide
agggggatggccaacggaacggcaccgtagaatcggcagtcagggattagatgctc

SEQ ID NO: 179880 - DNA, 56 bp, Artificial
  Synthetic oligonucleotide
cagcatcagaaacgcgtcttaaccagattagctctgagataaatggaatccaagag

SEQ ID NO: 179881 - DNA, 53 bp, Artificial
  Synthetic oligonucleotide
ccttctcttgccccgctatcacaaacgccacgctttacccccgttgcgggagg

SEQ ID NO: 179882 - DNA, 59 bp, Artificial
  Synthetic oligonucleotide
atcgcgctctgacagcgacttaactgcaaactggatagcccggtcagctttaacctccg

SEQ ID NO: 179883 - DNA, 57 bp, Artificial
  Synthetic oligonucleotide
atggcgtcaagatatcgcattaaggttttttagggatgtacgcttacacatatttgt

SEQ ID NO: 179884 - DNA, 56 bp, Artificial
  Synthetic oligonucleotide
cgcgcgttgttgggtaactcgtcgcatgattccaaccccgatacgcacaaaacatc

SEQ ID NO: 179885 - DNA, 55 bp, Artificial
  Synthetic oligonucleotide
cgttttcccctcatgctaaaaaaaagcgcttatgcacggttgtcctcgataagga

SEQ ID NO: 179886 - DNA, 56 bp, Artificial
  Synthetic oligonucleotide
cgctgtcagacagccggtattcacacgagcggctatggtcgatattgcgcgagtgc

SEQ ID NO: 179887 - DNA, 55 bp, Artificial
  Synthetic oligonucleotide
gaatacccagggctttcagtgacctcagaaccggggaagtcttcgttactgcgcg

SEQ ID NO: 179888 - DNA, 56 bp, Artificial
  Synthetic oligonucleotide
gtagcgcgctggtggagtcacacctgtagtcaagcgacgcgtagagcgccagatga

SEQ ID NO: 179889 - DNA, 56 bp, Artificial
  Synthetic oligonucleotide
ctagaattaaatacctttggcaattcattgtctcatggcatctatgggaaacagac

SEQ ID NO: 179890 - DNA, 56 bp, Artificial
  Synthetic oligonucleotide
agccaccccagacattactgtctaaggtactcggccttgctccggactatcggcgg

SEQ ID NO: 179891 - DNA, 56 bp, Artificial
  Synthetic oligonucleotide
aattagagtaaagcgcacttatatgtttctccctgcgggcagaaacacgtgcgtaa

SEQ ID NO: 179892 - DNA, 56 bp, Artificial
  Synthetic oligonucleotide
tgaacgttacggcctgaatatctcactggttgcgtttgataaggctctttacagat

SEQ ID NO: 179893 - DNA, 56 bp, Artificial
  Synthetic oligonucleotide
gaccatcggttcgcagtatgccttaatgtagagtgaacgcaggcttgttacgttct

SEQ ID NO: 179894 - DNA, 60 bp, Artificial
  Synthetic oligonucleotide
gattcctgacagcaaaaaggcattatcctcagagccacctagacccagtttccaaacatc

SEQ ID NO: 179895 - DNA, 56 bp, Artificial
  Synthetic oligonucleotide
cgtttcatgtggcgtccctcggtggctcaaataggtttaggtatttgagcccattc

SEQ ID NO: 179896 - DNA, 56 bp, Artificial
  Synthetic oligonucleotide
tcagtaaatcagcgattcttcaacgttcgcgtttttacgccctattacaatccaga

SEQ ID NO: 179897 - DNA, 56 bp, Artificial
  Synthetic oligonucleotide
tcaggttcgttacatttttgatgtagggcaacggcgtgatcagtgtattaatctgg

SEQ ID NO: 179898 - DNA, 56 bp, Artificial
  Synthetic oligonucleotide
acccgctccttatccctgtcactggctttatccctgacgctgtcggattgccctcc

SEQ ID NO: 179899 - DNA, 54 bp, Artificial
  Synthetic oligonucleotide
ctgtcggctctccctccttcacccggtaataagatccccccattgcccgtatac

SEQ ID NO: 179900 - DNA, 56 bp, Artificial
  Synthetic oligonucleotide
cgggaggccagcaaacgcattgcagagcccgtgtttttaacaagcacacgccatcc

SEQ ID NO: 179901 - DNA, 56 bp, Artificial
  Synthetic oligonucleotide
aagagattagatgaatgagtaacagcatttcggtgttactcaattctagaaccatc

SEQ ID NO: 179902 - DNA, 56 bp, Artificial
  Synthetic oligonucleotide
tctgtttcggtagcgtgacaaaacacggctagcaggcggataaatccctgcgtcgt

SEQ ID NO: 179903 - DNA, 56 bp, Artificial
  Synthetic oligonucleotide
gtgtgtagcgattcgctacgtctatttaaagatatgccctcctgtgaagagtgcaa

SEQ ID NO: 179904 - DNA, 56 bp, Artificial
  Synthetic oligonucleotide
gcagtattatcgccaatcccgaagtgttacatgcgctgaatcctgtctgggcggta

SEQ ID NO: 179905 - DNA, 57 bp, Artificial
  Synthetic oligonucleotide
attaccccggacaaccaggtggcatggcgtgcggagtatgatgaatgggggaacctg

SEQ ID NO: 179906 - DNA, 56 bp, Artificial
  Synthetic oligonucleotide
gtaggccggataagacgcgttagcatcgccatccggcattctgctatttaccctgc

SEQ ID NO: 179907 - DNA, 56 bp, Artificial
  Synthetic oligonucleotide
ccttgctcatgccaattacatcacgcgggaagataagttcagtcagcgaaaagatc

SEQ ID NO: 179908 - DNA, 56 bp, Artificial
  Synthetic oligonucleotide
ccgtatattggcctgaccggtcagtatcgttatcaggactttgaagtgaacgcgca

SEQ ID NO: 179909 - DNA, 56 bp, Artificial
  Synthetic oligonucleotide
gccacttcggggctttaaccattgctacattcaaaccagtgcttagaccgctcggg

SEQ ID NO: 179910 - DNA, 56 bp, Artificial
  Synthetic oligonucleotide
tgcgcgctatgaccggatgcagcaaacggcgagcaaacttcgcggtggtggcacaa

SEQ ID NO: 179911 - DNA, 56 bp, Artificial
  Synthetic oligonucleotide
accgcgcagactcactgccgcttgacgctaaccacgttaataccgaagaggcgcgt

SEQ ID NO: 179912 - DNA, 56 bp, Artificial
  Synthetic oligonucleotide
tgacggcaaatggtgttagaagggcatctaaggagcgagctgatgttataaaaaca

SEQ ID NO: 179913 - DNA, 53 bp, Artificial
  Synthetic oligonucleotide
tgacgggaacgctaataggtggccgaaattttttcgggcgccggacagcgttc

SEQ ID NO: 179914 - DNA, 56 bp, Artificial
  Synthetic oligonucleotide
cgcttggcagggtcaagttgtcgggtggtactgcacaaaactgacccctgaaggct

SEQ ID NO: 179915 - DNA, 56 bp, Artificial
  Synthetic oligonucleotide
gcttttaatcataaaccatataatttaggatggggacatcatcacctgcaatgtgg

SEQ ID NO: 179916 - DNA, 57 bp, Artificial
  Synthetic oligonucleotide
attaccggaaataccttatatgagaccggagaatgtgcccgtcgtgtgtctccgtgc

SEQ ID NO: 179917 - DNA, 56 bp, Artificial
  Synthetic oligonucleotide
gtcaaatgttcgcctggttgactggatacccatgggtgtcttcctcaacggcgcag

SEQ ID NO: 179918 - DNA, 56 bp, Artificial
  Synthetic oligonucleotide
gtacagattcgatgaaagctcccacctgctcgtaaacaacctgactaccacacttc

SEQ ID NO: 179919 - DNA, 56 bp, Artificial
  Synthetic oligonucleotide
gtacgggcatccaggtgttatcagctccggcttccggtgttccgctcagggagagt

SEQ ID NO: 179920 - DNA, 54 bp, Artificial
  Synthetic oligonucleotide
gcgctggttgaaagcaaatcccaagttcagggtaatttaccagccggtttactc

SEQ ID NO: 179921 - DNA, 56 bp, Artificial
  Synthetic oligonucleotide
tattaactaccaccagtcagggttatcgagccagcatgtggcacagtaaccttcat

SEQ ID NO: 179922 - DNA, 56 bp, Artificial
  Synthetic oligonucleotide
agtaagtcgggcgagggggcatactcaatgcctcgatggttttcatctgaaagcga

SEQ ID NO: 179923 - DNA, 56 bp, Artificial
  Synthetic oligonucleotide
ctattacggagtatcaccgtgccctgttatccaggcttatggcagattaacttccc

SEQ ID NO: 179924 - DNA, 56 bp, Artificial
  Synthetic oligonucleotide
gtgtatatcaccgacatgaaaatcacggaaattccacagaaataaggtatatcccc

SEQ ID NO: 179925 - DNA, 56 bp, Artificial
  Synthetic oligonucleotide
tcacgcagttcgtcagttatgacgatgtattcccggacggcctgtctgccaccgtc

SEQ ID NO: 179926 - DNA, 56 bp, Artificial
  Synthetic oligonucleotide
tattgaaggacggctcgggcaacgtcacgccgatgttgtggagtcgattctgtatt

SEQ ID NO: 179927 - DNA, 60 bp, Artificial
  Synthetic oligonucleotide
gatcaattcacaggagtaattatggcaaacactgccgaagtaatcaattttcctgtgcct

SEQ ID NO: 179928 - DNA, 56 bp, Artificial
  Synthetic oligonucleotide
gaattgtatcgcatgcagtgaaacgagcatttatttctcgcgttaacatcagatag

SEQ ID NO: 179929 - DNA, 55 bp, Artificial
  Synthetic oligonucleotide
cagtttgataagtaataagccctagttcggctagaaatttcaacgctcgggtggc

SEQ ID NO: 179930 - DNA, 56 bp, Artificial
  Synthetic oligonucleotide
tcacgaagagtgaccgggagcgcggttatgtggccaacagcgtctggacggtgaca

SEQ ID NO: 179931 - DNA, 56 bp, Artificial
  Synthetic oligonucleotide
agaggtaggttgaaatcgtgtcaaatcgaatcagcccgtagagctataactcgtgc

SEQ ID NO: 179932 - DNA, 56 bp, Artificial
  Synthetic oligonucleotide
gtattacagccctcaattaacactggttatattattgtcactaccttgttatgtta

SEQ ID NO: 179933 - DNA, 56 bp, Artificial
  Synthetic oligonucleotide
aatttgcagtacgatgcctatctccatgcgaagcgtcgtgaggattgccacagcgg

SEQ ID NO: 179934 - DNA, 56 bp, Artificial
  Synthetic oligonucleotide
cgaagacgggtcacggggtgtgtcgggaattaacgcacgtgaggcgtaatgagagc

SEQ ID NO: 179935 - DNA, 56 bp, Artificial
  Synthetic oligonucleotide
gtacgcagaccgcaaccgtgccgttgctaatcagcggctgagcggaagcaatgcac

SEQ ID NO: 179936 - DNA, 56 bp, Artificial
  Synthetic oligonucleotide
cactgtgaccaaccgcgatcatgtctcctctcggtggcgtgtgttcgggcatattc

SEQ ID NO: 179937 - DNA, 56 bp, Artificial
  Synthetic oligonucleotide
gtcacattaagtgactatgatccagtgaatactctcttagctatacagtgtttcag

SEQ ID NO: 179938 - DNA, 60 bp, Artificial
  Synthetic oligonucleotide
gatcaaaaccgtcatctgaagcatatacgtaatgccgggtatgttgttccacgctgccct

SEQ ID NO: 179939 - DNA, 56 bp, Artificial
  Synthetic oligonucleotide
ccagcgaaaaatcccctcgagtaagcgccagtgcctcgttaatgcgggcgcccgta

SEQ ID NO: 179940 - DNA, 56 bp, Artificial
  Synthetic oligonucleotide
tccagccggcgacaactatgaacagaatcgctacgcttaaagcattcagggcattg

SEQ ID NO: 179941 - DNA, 56 bp, Artificial
  Synthetic oligonucleotide
tctgccggactatcgccagccgaatgggtttcatgctaataatctcctggccgcgt

SEQ ID NO: 179942 - DNA, 56 bp, Artificial
  Synthetic oligonucleotide
ggaatgattgctagaaaatccgttaggtagaatttcatctctatgttcaactcctg

SEQ ID NO: 179943 - DNA, 56 bp, Artificial
  Synthetic oligonucleotide
catcgactggatctgttttggatctttagtctgggttaacgccagttgcagtaaga

SEQ ID NO: 179944 - DNA, 53 bp, Artificial
  Synthetic oligonucleotide
gcgccagtcttcagcccgtaaaccgttaccggcttcacttccccgtgaaacgc

SEQ ID NO: 179945 - DNA, 56 bp, Artificial
  Synthetic oligonucleotide
gtagccgcgccagaccgcttaactccggcgaccagttattcggcatatcgccatac

SEQ ID NO: 179946 - DNA, 56 bp, Artificial
  Synthetic oligonucleotide
gcatattctcgaactgtctccccccgaggcacataatccagcgtatgcgaaatgga

SEQ ID NO: 179947 - DNA, 56 bp, Artificial
  Synthetic oligonucleotide
gccacctaattcgtccttccagtttagccgtagttggactgatacttcaagaactc

SEQ ID NO: 179948 - DNA, 56 bp, Artificial
  Synthetic oligonucleotide
ctatcttctccagttaatgggctgatagcggagacgtaactaaggccggaggctaa

SEQ ID NO: 179949 - DNA, 60 bp, Artificial
  Synthetic oligonucleotide
gatattcctattcttgagtcggattctctattgcagctaagatagacttgtaccttagct

SEQ ID NO: 179950 - DNA, 56 bp, Artificial
  Synthetic oligonucleotide
ctattgtcttgtcagcttgacatcgttattgtgttgtaaggtgagttgcgtttttg

SEQ ID NO: 179951 - DNA, 56 bp, Artificial
  Synthetic oligonucleotide
gtggattaagtaatcattattccgggatgagtatatggaacacggcgcccgtttaa

SEQ ID NO: 179952 - DNA, 56 bp, Artificial
  Synthetic oligonucleotide
cggctgttgccatcaggcatatggcgacagtcggtgttatcggataaatagtacac

SEQ ID NO: 179953 - DNA, 56 bp, Artificial
  Synthetic oligonucleotide
tcagaacgctgccttgatcatataaagtataatgatgactctccgaaatcagaacg

SEQ ID NO: 179954 - DNA, 56 bp, Artificial
  Synthetic oligonucleotide
tggaatcgatgacatcgatcgttgaacgaaatagagatcgagcgtcgatctctgag

SEQ ID NO: 179955 - DNA, 53 bp, Artificial
  Synthetic oligonucleotide
acccttcatggtcgccccttcacccgaccctgtacccgtatttgattccgcac

SEQ ID NO: 179956 - DNA, 56 bp, Artificial
  Synthetic oligonucleotide
cgaccagtaggtgatttagaacggatattagctcgtttagcactatatactgctcg

SEQ ID NO: 179957 - DNA, 56 bp, Artificial
  Synthetic oligonucleotide
gacaccggtctgcgcagaaatgcgcgggtacgacagtgactcgtcaaatctcagtt

SEQ ID NO: 179958 - DNA, 56 bp, Artificial
  Synthetic oligonucleotide
actttcagctccgcacggttagccggaagatcctgtttcaccgtggcatcatcaaa

SEQ ID NO: 179959 - DNA, 56 bp, Artificial
  Synthetic oligonucleotide
caacacagggcacggcagggatctgggattacacctggccgaaagatgtgaccgac

SEQ ID NO: 179960 - DNA, 60 bp, Artificial
  Synthetic oligonucleotide
gatataccaggccttacgcgccggcgtgttggagtgatagcggccgacaccctgccagaa

SEQ ID NO: 179961 - DNA, 56 bp, Artificial
  Synthetic oligonucleotide
catgatgaacgacttactacaattgaagctaaatcagttatctttcaaaaaggtgg

SEQ ID NO: 179962 - DNA, 56 bp, Artificial
  Synthetic oligonucleotide
gatgcggttcagcagttcaccttgctgataacgcgccagacccgcgggggagagcg

SEQ ID NO: 179963 - DNA, 56 bp, Artificial
  Synthetic oligonucleotide
gcctgggaaggcagtgacggacactggttcactaccgcgcggatcttcacagtctc

SEQ ID NO: 179964 - DNA, 55 bp, Artificial
  Synthetic oligonucleotide
atacgagcccagcaagagtaaaaaactggctaatccacccaagtacgaagccgga

SEQ ID NO: 179965 - DNA, 56 bp, Artificial
  Synthetic oligonucleotide
agtcacagcggagttttgcgttacgacactgacgctgccttgtgacgacagggctt

SEQ ID NO: 179966 - DNA, 56 bp, Artificial
  Synthetic oligonucleotide
aaagcgtgtctgtatgctgttctggagttcttctgcgagttcgtgcagcttctcac

SEQ ID NO: 179967 - DNA, 56 bp, Artificial
  Synthetic oligonucleotide
gagatcaacgttcggggaaacgcaaaggaatcagtgctgacacttgataaagctcc

SEQ ID NO: 179968 - DNA, 56 bp, Artificial
  Synthetic oligonucleotide
tccgtatgcaaatcacctcgtgcaaacagggcccgagactccgcttcaaatcctga

SEQ ID NO: 179969 - DNA, 56 bp, Artificial
  Synthetic oligonucleotide
gcgtgcaacatgtatttgacatcatcactagataaaaggttaagcaaagtagtgtc

SEQ ID NO: 179970 - DNA, 56 bp, Artificial
  Synthetic oligonucleotide
tcgctatcagcgctaaacggtcacgtaactcacagttaacaatgactaatcgcgca

SEQ ID NO: 179971 - DNA, 60 bp, Artificial
  Synthetic oligonucleotide
attactgggtctgacttatcatcagctacgtgccttgctgaagaaacaccagatctaata

SEQ ID NO: 179972 - DNA, 55 bp, Artificial
  Synthetic oligonucleotide
gatctgcgtcggtttattacgctgaaaacggtagtggaagagggctcgtttctac

SEQ ID NO: 179973 - DNA, 56 bp, Artificial
  Synthetic oligonucleotide
gatcctcccatggcaatatctaaagccatagcattttcgaaagattctttatttgc

SEQ ID NO: 179974 - DNA, 55 bp, Artificial
  Synthetic oligonucleotide
ttgttgggttcaagggtaaaagtcaccgcccaacgtatgcgctactgaataaagc

SEQ ID NO: 179975 - DNA, 56 bp, Artificial
  Synthetic oligonucleotide
ggtaaacggtaatgtcgttgtcactcagccccacccggtgacggcccacagacaga

SEQ ID NO: 179976 - DNA, 56 bp, Artificial
  Synthetic oligonucleotide
gtttgctttggcagttatcgaacatataccaggcgggtttaccaggcatatatttc

SEQ ID NO: 179977 - DNA, 56 bp, Artificial
  Synthetic oligonucleotide
gtctgcagggacgatagaaatcttcgtgcgggttgtctcgctgtagccggctctgg

SEQ ID NO: 179978 - DNA, 55 bp, Artificial
  Synthetic oligonucleotide
tttaccggcgggctggggactgttgtatgtgattaacgggcgggtcagaaagata

SEQ ID NO: 179979 - DNA, 56 bp, Artificial
  Synthetic oligonucleotide
cgatttaacttactccggcacggcatcgactatagcaacaaaacatgccgaactgg

SEQ ID NO: 179980 - DNA, 56 bp, Artificial
  Synthetic oligonucleotide
aacaatattatatgtttggactagaagatcttaatagtaatcaaattgtaggaatt

SEQ ID NO: 179981 - DNA, 56 bp, Artificial
  Synthetic oligonucleotide
ttcttaggctgggatgaagactcgccgtacagtggaggcgcgagcgtcgctctcct

SEQ ID NO: 179982 - DNA, 56 bp, Artificial
  Synthetic oligonucleotide
attagacgggaaagagctagggggatacatattttgtggccagttagcattttgcg

SEQ ID NO: 179983 - DNA, 56 bp, Artificial
  Synthetic oligonucleotide
catatcatgatgagccagcgtgttgatgacggtattaagcgcagcccagagcagta

SEQ ID NO: 179984 - DNA, 56 bp, Artificial
  Synthetic oligonucleotide
gactggtgtacttaacaacactagacacagtgaatgctatcaacaaaagcagagca

SEQ ID NO: 179985 - DNA, 56 bp, Artificial
  Synthetic oligonucleotide
tcggagtcctgatgctcgcataaaaccagatgcaaccttacccccaaagccattag

SEQ ID NO: 179986 - DNA, 56 bp, Artificial
  Synthetic oligonucleotide
ctgatcattcgccaaaactcccacaccgcggatgctcaccatgaatgtaaaagcta

SEQ ID NO: 179987 - DNA, 56 bp, Artificial
  Synthetic oligonucleotide
cggtggaatggattgcgagccgggcaggataaatgcgagcccattatcacctaatg

SEQ ID NO: 179988 - DNA, 56 bp, Artificial
  Synthetic oligonucleotide
atggtacaaacgccagcaatgacaccgtcactaagtcgcttctcgcacttttcgtc

SEQ ID NO: 179989 - DNA, 55 bp, Artificial
  Synthetic oligonucleotide
acagcgacagtatccaggcagggtttgcgccaaaaacgcggttacggttgcgcgg

SEQ ID NO: 179990 - DNA, 56 bp, Artificial
  Synthetic oligonucleotide
cccggatgatttcccaccaatggatgatgaagcgcccttttaaaccacgatgaaga

SEQ ID NO: 179991 - DNA, 56 bp, Artificial
  Synthetic oligonucleotide
ttgatttcacgtaaacctgacgttgtgtaatagctgtacgaaatgctttaacaccg

SEQ ID NO: 179992 - DNA, 56 bp, Artificial
  Synthetic oligonucleotide
ttgcaagcgggccagtcccctgagccgatatttaataccatcagagtctgacgctc

SEQ ID NO: 179993 - DNA, 60 bp, Artificial
  Synthetic oligonucleotide
gccagcggtaaacatctagacaggatggaagtatcagtgtgcaaagcgggcggtagccag

SEQ ID NO: 179994 - DNA, 60 bp, Artificial
  Synthetic oligonucleotide
attagagggggaagtcctgtttgatatggttcatccaacacttagctatctgctacaagc

SEQ ID NO: 179995 - DNA, 56 bp, Artificial
  Synthetic oligonucleotide
cagcgttgagaccacagacccaacctaatcatgcaaccgtctatggcgtggagcaa

SEQ ID NO: 179996 - DNA, 56 bp, Artificial
  Synthetic oligonucleotide
atgtacgttcaggattatccaccggcaaacctgacatcgctgtgtacgccgatgag

SEQ ID NO: 179997 - DNA, 56 bp, Artificial
  Synthetic oligonucleotide
ataaatccatcgatagcgttgtggattgtctggcagacgccggactgattacgcca

SEQ ID NO: 179998 - DNA, 56 bp, Artificial
  Synthetic oligonucleotide
gcgtcctcccattcgctcagccgctgcatatagtcctgttgcagcggctctaagac

SEQ ID NO: 179999 - DNA, 56 bp, Artificial
  Synthetic oligonucleotide
agactgccggagtggcaaggtccagtaccgagtaaggctcgcggagatcgataccc

SEQ ID NO: 180000 - DNA, 53 bp, Artificial
  Synthetic oligonucleotide
taagctccctgtgactgcccgactattttcggaccggtaagtttggcgacccc

SEQ ID NO: 180001 - DNA, 56 bp, Artificial
  Synthetic oligonucleotide
atacacacccatgccgtcgtcattaacgccacgcagaacggggacaaatggcagtc

SEQ ID NO: 180002 - DNA, 56 bp, Artificial
  Synthetic oligonucleotide
gagttgtgttgttcgtgcatcgacaggcatggccacaaaactgggggatgaaactt

SEQ ID NO: 180003 - DNA, 56 bp, Artificial
  Synthetic oligonucleotide
gctatagcgcgaagccgaaaattattgttcgtatgctcccgctggtccagaatggg

SEQ ID NO: 180004 - DNA, 56 bp, Artificial
  Synthetic oligonucleotide
tcgataaaacgctgtccctgaagatacggcgcaacgactatgctgtcgagaatatg

SEQ ID NO: 180005 - DNA, 60 bp, Artificial
  Synthetic oligonucleotide
gatagtccgccaaatacaattgattgatatacaagcggagttactgcgatgagtgggaat

SEQ ID NO: 180006 - DNA, 56 bp, Artificial
  Synthetic oligonucleotide
gtctggttgtttgataccgtcatcccgctctgaattcacagtcttcagaaaaggta

SEQ ID NO: 180007 - DNA, 56 bp, Artificial
  Synthetic oligonucleotide
agcttccgccaccaacagaccccatgccggcgccaagcgtaccgctgctggactga

SEQ ID NO: 180008 - DNA, 56 bp, Artificial
  Synthetic oligonucleotide
aaaacgccgccgtagggagcgacatcgaccatacctaatggcccttcatggactgg

SEQ ID NO: 180009 - DNA, 56 bp, Artificial
  Synthetic oligonucleotide
attcagggttatagccagattgttacgtcatccacttatcaaacgttatccagtga

SEQ ID NO: 180010 - DNA, 56 bp, Artificial
  Synthetic oligonucleotide
ggggctacagcgtttctgtgtccgaaatcgagcgattacgtacaccatgccgcctg

SEQ ID NO: 180011 - DNA, 56 bp, Artificial
  Synthetic oligonucleotide
ttttccgctgtctatccactgtcgggcaaaatgcgtcggcaccattcccacgcata

SEQ ID NO: 180012 - DNA, 56 bp, Artificial
  Synthetic oligonucleotide
cccagcttcccacaagtggtaactttggcgttcggcaacttgtccagctccgcata

SEQ ID NO: 180013 - DNA, 56 bp, Artificial
  Synthetic oligonucleotide
acgtcgagctgacctcacagaaacgcttacagccgtactatgacaaagccgacaga

SEQ ID NO: 180014 - DNA, 56 bp, Artificial
  Synthetic oligonucleotide
ggactctcacttgccagtagaacagagaaatgaacatatagtatatagtcaagaac

SEQ ID NO: 180015 - DNA, 55 bp, Artificial
  Synthetic oligonucleotide
attctgaagaacaacttgcaatattattcgtgttaaaacaagttgttagtattat

SEQ ID NO: 180016 - DNA, 59 bp, Artificial
  Synthetic oligonucleotide
gataggtgaacttggaacagtccttacagcaatgaatgcggcgtttaagcgaatggaaa

SEQ ID NO: 180017 - DNA, 56 bp, Artificial
  Synthetic oligonucleotide
ggggcaggccggtcgtctcacggaaactaacccactcacagagaatagccatcaga

SEQ ID NO: 180018 - DNA, 55 bp, Artificial
  Synthetic oligonucleotide
ttttggcgtctttttgagcagtgacctttcttgcgattttctccgttctgccccg

SEQ ID NO: 180019 - DNA, 54 bp, Artificial
  Synthetic oligonucleotide
ttttttttgtcacgatctccccttaacctgcgtaaatcacccgccatggttgat

SEQ ID NO: 180020 - DNA, 56 bp, Artificial
  Synthetic oligonucleotide
tcgcgcctgccagtcagcaaaattaaccgcgatctttatggccgactgatggcgaa

SEQ ID NO: 180021 - DNA, 56 bp, Artificial
  Synthetic oligonucleotide
actaccgcattatagaggttgaacgggccatctgcgctcattgacgtggaaggacg

SEQ ID NO: 180022 - DNA, 54 bp, Artificial
  Synthetic oligonucleotide
aaaattctcgtgcagaactttccatccagggggagaaaacttgtcgttttgagc

SEQ ID NO: 180023 - DNA, 56 bp, Artificial
  Synthetic oligonucleotide
gcgttaacggcgaatcgggatcagaaattcgcagcgcaggttgatagggcgatcgc

SEQ ID NO: 180024 - DNA, 56 bp, Artificial
  Synthetic oligonucleotide
tcgccttttcttatcccctatgggagcgcggtgccttccaggcatttatttacgaa

SEQ ID NO: 180025 - DNA, 53 bp, Artificial
  Synthetic oligonucleotide
taatgccgtcggtattaatccggttacgggatatggctcggggttaatacagg

SEQ ID NO: 180026 - DNA, 56 bp, Artificial
  Synthetic oligonucleotide
gagcggaaacaggaacttgcactggagcgtgaagggcagaatatcagcgcaggacg

SEQ ID NO: 180027 - DNA, 59 bp, Artificial
  Synthetic oligonucleotide
gatagctcgctccaggtctttggcccagagtcgaagaaacgccggcagacagatgtttt

SEQ ID NO: 180028 - DNA, 56 bp, Artificial
  Synthetic oligonucleotide
taatcgtgtcttcccagcttttcagtcgggtatctttcccggtatcgagtacagga

SEQ ID NO: 180029 - DNA, 56 bp, Artificial
  Synthetic oligonucleotide
gatacttgcatcacaatacgttcagcttatgtggaatcaggtgtcgcaacaattca

SEQ ID NO: 180030 - DNA, 56 bp, Artificial
  Synthetic oligonucleotide
cgtactaaagtacgaccttctgttagtactcgatccatagttgaatgaccaattac

SEQ ID NO: 180031 - DNA, 53 bp, Artificial
  Synthetic oligonucleotide
tcgccccctgaaaagccaacctcccttttagacttccgaaacagggaatcgca

SEQ ID NO: 180032 - DNA, 56 bp, Artificial
  Synthetic oligonucleotide
acagggtttacaaacgcgctttcgccatacgctcacgtcgctcgttgcgcaggagt

SEQ ID NO: 180033 - DNA, 56 bp, Artificial
  Synthetic oligonucleotide
tttcgcctggttgtccgtaataacggtgcaatggtctggcgtacctggaattttga

SEQ ID NO: 180034 - DNA, 56 bp, Artificial
  Synthetic oligonucleotide
aaaatagacgaggttgcgagctacaagccgctaagtccattctggtactggcctgt

SEQ ID NO: 180035 - DNA, 55 bp, Artificial
  Synthetic oligonucleotide
acagtaaaacccactgggtaaagtcgggatacatcttcgctaatgctacgaataa

SEQ ID NO: 180036 - DNA, 56 bp, Artificial
  Synthetic oligonucleotide
gggcttagtgtcccattcgcattaacatttccaactatcggtacggtgtaactgat

SEQ ID NO: 180037 - DNA, 56 bp, Artificial
  Synthetic oligonucleotide
acgttgcaaaaggtacggggtttctctgatgagggaaatagctttgctcacacttc

SEQ ID NO: 180038 - DNA, 60 bp, Artificial
  Synthetic oligonucleotide
gatagagttgtattctgtatgtgtagaagggcttggtatgtaacctgaactctggattgg

SEQ ID NO: 180039 - DNA, 56 bp, Artificial
  Synthetic oligonucleotide
gcctttaccctatggcgctatgccgcgactcacgttcgcctggatttcatcgtatg

SEQ ID NO: 180040 - DNA, 56 bp, Artificial
  Synthetic oligonucleotide
tcccgctattcgtcagcgagtcgatccactctttgcgcgtcagagtttcggccata

SEQ ID NO: 180041 - DNA, 56 bp, Artificial
  Synthetic oligonucleotide
aacgcaggccacgttcataagcactcgtcggccgataatcgttacccagtcgggac

SEQ ID NO: 180042 - DNA, 56 bp, Artificial
  Synthetic oligonucleotide
atgactcgcgtctggacggtattaaagtcgacagctatgagctcggctggcgttac

SEQ ID NO: 180043 - DNA, 56 bp, Artificial
  Synthetic oligonucleotide
tctaaaaccgcgcctggttgatatcgagcaagtgagttcgacgcacgccaaggtga

SEQ ID NO: 180044 - DNA, 54 bp, Artificial
  Synthetic oligonucleotide
catgacgatactaaaacacttagacgtaaaacgaagaaggatcgtagttatacg

SEQ ID NO: 180045 - DNA, 56 bp, Artificial
  Synthetic oligonucleotide
gcaccagtccttattcagtgcgtgatacacagtatgccaatcaggcaaccgaaaaa

SEQ ID NO: 180046 - DNA, 56 bp, Artificial
  Synthetic oligonucleotide
accagaaacgaaaggaggcgaagagcatcgtgactatctctactcgctggcgattc

SEQ ID NO: 180047 - DNA, 56 bp, Artificial
  Synthetic oligonucleotide
ttagggatttaatttctctttagagtgtaatatatgaaacttggcaatcctactgg

SEQ ID NO: 180048 - DNA, 53 bp, Artificial
  Synthetic oligonucleotide
ttataaactttcaggatggatttgggtgttatggggggtgtttggtgcttaaa

SEQ ID NO: 180049 - DNA, 60 bp, Artificial
  Synthetic oligonucleotide
gatacttgtgatgcatgatatttttggaattgatactggactttctgttcgtcctaggtt

SEQ ID NO: 180050 - DNA, 56 bp, Artificial
  Synthetic oligonucleotide
ttatattctgacacccatctttccgtgatttcccgcacttcattcagcgttctgaa

SEQ ID NO: 180051 - DNA, 56 bp, Artificial
  Synthetic oligonucleotide
tcgtcttacgcagttccaccagctcaactatcactgggcttaaagccagagattgg

SEQ ID NO: 180052 - DNA, 56 bp, Artificial
  Synthetic oligonucleotide
gaaaatgagggaagcgatacctctataccatctgaaagcccactttcttcaggtgc

SEQ ID NO: 180053 - DNA, 56 bp, Artificial
  Synthetic oligonucleotide
aaccgtcgtgggaaaacataacgtcggtcatgcagcagacgtctacgaatttcttc

SEQ ID NO: 180054 - DNA, 56 bp, Artificial
  Synthetic oligonucleotide
ccatataagagagggcaattatactatctttctctcctgaactgatgggattgcag

SEQ ID NO: 180055 - DNA, 55 bp, Artificial
  Synthetic oligonucleotide
ttatggtcccaatggcactttattttaccggtgttatcgatgctaaggatatttt

SEQ ID NO: 180056 - DNA, 56 bp, Artificial
  Synthetic oligonucleotide
atccacgacagcccgactacgatggatgcacggcacagcccgcacacgacacagga

SEQ ID NO: 180057 - DNA, 56 bp, Artificial
  Synthetic oligonucleotide
ctggtcgagctgcaataaaacatcgaatgaaagaattaggatatttagagactgac

SEQ ID NO: 180058 - DNA, 56 bp, Artificial
  Synthetic oligonucleotide
gctgcacaaacagggaatgtaaatcttgtatctacaggtgctatgggctttatggc

SEQ ID NO: 180059 - DNA, 56 bp, Artificial
  Synthetic oligonucleotide
cctcaactaacgggcgaataatgtggtattgatgtaaatccatctctgagtcgggc

SEQ ID NO: 180060 - DNA, 52 bp, Artificial
  Synthetic oligonucleotide
gatacgtgcaacgggaaaacgtttatcggagtgacgggggaagagtaacgtc

SEQ ID NO: 180061 - DNA, 55 bp, Artificial
  Synthetic oligonucleotide
ccacgaccacccggaacagttgcgtaagccaggtttcagcgtccagcccggagcg

SEQ ID NO: 180062 - DNA, 56 bp, Artificial
  Synthetic oligonucleotide
gcgagagcctttacccgctggcacttatcgtgttgactggcgcgcggtttcttcag

SEQ ID NO: 180063 - DNA, 56 bp, Artificial
  Synthetic oligonucleotide
ggcgctgataattatatcaacacattctatatccaagtacgctatgcgaacaaaac

SEQ ID NO: 180064 - DNA, 56 bp, Artificial
  Synthetic oligonucleotide
cgggcagtcggggaccagactcagcagatactgtatccactgtgtgccggccttca

SEQ ID NO: 180065 - DNA, 56 bp, Artificial
  Synthetic oligonucleotide
ccgccaccagacactataacgtgaccggtgaattcagctagcctgtccatggcctc

SEQ ID NO: 180066 - DNA, 56 bp, Artificial
  Synthetic oligonucleotide
cgggcatagaatgcatctatgccgttattgaacaccagattcgcgtacattagcag

SEQ ID NO: 180067 - DNA, 56 bp, Artificial
  Synthetic oligonucleotide
actgccacgggtgtactggcaacgcaatgtggctctcggcaatccccagactgcgc

SEQ ID NO: 180068 - DNA, 56 bp, Artificial
  Synthetic oligonucleotide
ccaaatcaggtatggtgcggcgacgtgacgtacatctggacggggaaacgttgggc

SEQ ID NO: 180069 - DNA, 55 bp, Artificial
  Synthetic oligonucleotide
aacgtggccactggttttaaacccaacttctgaggattctgtaatgctgacactt

SEQ ID NO: 180070 - DNA, 56 bp, Artificial
  Synthetic oligonucleotide
tgtggtaagggtcgaatcaggatttaacccctacgccattgcagagatagtcccca

SEQ ID NO: 180071 - DNA, 60 bp, Artificial
  Synthetic oligonucleotide
gataccacctcagcggttgatgctgttacggaagcggagattaataccgcgctgggtcgc

SEQ ID NO: 180072 - DNA, 56 bp, Artificial
  Synthetic oligonucleotide
accataaagaatacgtgagccaatgcgatcaagaacatagccgacaggaatttgac

SEQ ID NO: 180073 - DNA, 56 bp, Artificial
  Synthetic oligonucleotide
accagtgaagcttaccatagcgcggacatctgaattgagccacaggcggacattac

SEQ ID NO: 180074 - DNA, 56 bp, Artificial
  Synthetic oligonucleotide
cgttgcagcggtcagcttatggtgatctgtcaacctgtagagtttacagattaatt

SEQ ID NO: 180075 - DNA, 56 bp, Artificial
  Synthetic oligonucleotide
tgttgctgcgtcgcgtaactctgttgtaacacttcgaaggcgctcaataactcctg

SEQ ID NO: 180076 - DNA, 56 bp, Artificial
  Synthetic oligonucleotide
tataagggttttccgtatcataaccaatattactggccgcctccattatcacctta

SEQ ID NO: 180077 - DNA, 56 bp, Artificial
  Synthetic oligonucleotide
ggttgacgaagccacattaatgacagatgtatcaactgacggaggtacattctcat

SEQ ID NO: 180078 - DNA, 56 bp, Artificial
  Synthetic oligonucleotide
tataaccaagacctgcggctacaaccaaaagacaccagcctgcatacgtagcaggg

SEQ ID NO: 180079 - DNA, 56 bp, Artificial
  Synthetic oligonucleotide
tctaatgggacaggccctacggtgcagtataccagctggtgtaaggttcgcctcat

SEQ ID NO: 180080 - DNA, 56 bp, Artificial
  Synthetic oligonucleotide
ccgagcttgaggaagctcatcgagaagcaacaattgttgcttgaggataaacagga

SEQ ID NO: 180081 - DNA, 56 bp, Artificial
  Synthetic oligonucleotide
cgagtcattgacaggcggggtcatttctgtggacgtgatctcaaccatagcaccag

SEQ ID NO: 180082 - DNA, 60 bp, Artificial
  Synthetic oligonucleotide
attatggctatcgctgattgccatccatgacggaacgctaccgtatccgcctgtttaggt

SEQ ID NO: 180083 - DNA, 56 bp, Artificial
  Synthetic oligonucleotide
gcaacgaatggcgctggataacgtgccggtagcgtttttgggggaagtggcgctac

SEQ ID NO: 180084 - DNA, 56 bp, Artificial
  Synthetic oligonucleotide
atttttattccattgacctcagaatttcttggaaatctaggcatgaattgtttggc

SEQ ID NO: 180085 - DNA, 56 bp, Artificial
  Synthetic oligonucleotide
cacaatagcgtacacttgtacgccgaacaagtccgatcagccatttagtacggaaa

SEQ ID NO: 180086 - DNA, 56 bp, Artificial
  Synthetic oligonucleotide
gctgacgaaactaaccgtcgaaacagcactgaatgctgaactgacagagcaccccg

SEQ ID NO: 180087 - DNA, 56 bp, Artificial
  Synthetic oligonucleotide
ttcgaattagtgacacgacaacacaggtgatatggcaatgataacacgtcagatga

SEQ ID NO: 180088 - DNA, 56 bp, Artificial
  Synthetic oligonucleotide
atttttaaatctggctattctatcactatcacttgctttactaactattcgttctg

SEQ ID NO: 180089 - DNA, 56 bp, Artificial
  Synthetic oligonucleotide
tcgggttgttcggtcactgaacacggtcagaaactgatgataagatagcctgcgga

SEQ ID NO: 180090 - DNA, 56 bp, Artificial
  Synthetic oligonucleotide
agttggattgttatcgctaagtagctgtaacaacgacataaatcaatcatcctatt

SEQ ID NO: 180091 - DNA, 56 bp, Artificial
  Synthetic oligonucleotide
ctgagttaattggtggatctgctgatcttgctccaagcaatttaactatgtggtcg

SEQ ID NO: 180092 - DNA, 53 bp, Artificial
  Synthetic oligonucleotide
cgtggaaacggaacaatatctcgtatatttgtaactccggtaatataagaaat

SEQ ID NO: 180093 - DNA, 56 bp, Artificial
  Synthetic oligonucleotide
gataccaagattgttatatggaacacggtgcccgtttaagtaccagtcgtgtaatg

SEQ ID NO: 180094 - DNA, 56 bp, Artificial
  Synthetic oligonucleotide
gatttgcagctctcagttgaaacactgtatgaccggcgaaggattgttctgacccg

SEQ ID NO: 180095 - DNA, 56 bp, Artificial
  Synthetic oligonucleotide
gatttccagacagcgggtcactgatggccatgtcagagttacccgacaggtcaccg

SEQ ID NO: 180096 - DNA, 55 bp, Artificial
  Synthetic oligonucleotide
gcgtaccaggccgagtttaaccgcctctggaatgaatcggcggtactaactaatc

SEQ ID NO: 180097 - DNA, 56 bp, Artificial
  Synthetic oligonucleotide
gactggatcgtataggccaagcggtgtatcttgctgtacacgtttacataagctcg

SEQ ID NO: 180098 - DNA, 56 bp, Artificial
  Synthetic oligonucleotide
gcctgaatggtgataaccagtctggcgggaaataaacggatcttgttggggtggag

SEQ ID NO: 180099 - DNA, 55 bp, Artificial
  Synthetic oligonucleotide
tagaagcgttggtgaaggataccaacaccctagcgaacgggttaacaaatgcagg

SEQ ID NO: 180100 - DNA, 56 bp, Artificial
  Synthetic oligonucleotide
gcaagctgcggtgcagcttagcgacaatggggctactaacctcttactgagagaaa

SEQ ID NO: 180101 - DNA, 56 bp, Artificial
  Synthetic oligonucleotide
cagcgacgtcaaaggccctgaacaaggccactggtgaggcaatcgtctctgccaac

SEQ ID NO: 180102 - DNA, 56 bp, Artificial
  Synthetic oligonucleotide
ctccggagggagcagtaacgctgctcggcgattagggagtgtcacgcaagctgggg

SEQ ID NO: 180103 - DNA, 56 bp, Artificial
  Synthetic oligonucleotide
actctcggaacaagtgattccgggagtcttcagtagaacgtttaggagcattgatg

SEQ ID NO: 180104 - DNA, 60 bp, Artificial
  Synthetic oligonucleotide
gccactcgtctgaatcatttcccaggtcaggatcagataatcttgcacgtatccacgctt

SEQ ID NO: 180105 - DNA, 58 bp, Artificial
  Synthetic oligonucleotide
attattcagaggaggtcactttcagggggaagctgtggccaggcggctgtaattgcgg

SEQ ID NO: 180106 - DNA, 55 bp, Artificial
  Synthetic oligonucleotide
ggaattacctcggcgagcaacaaaaggccctgtcgtcgaatcaattccgccgtct

SEQ ID NO: 180107 - DNA, 55 bp, Artificial
  Synthetic oligonucleotide
agtcaaagaatacgctgacatcatgccgggtacaggtctgatagcctacctgacc

SEQ ID NO: 180108 - DNA, 55 bp, Artificial
  Synthetic oligonucleotide
ggactcctcgcggattgcacgattataagcaaggtacagcatacgttcctgaggg

SEQ ID NO: 180109 - DNA, 55 bp, Artificial
  Synthetic oligonucleotide
ggacagtggtacaggacggtagcattctgtttcgcgccagtgcggttggcagcca

SEQ ID NO: 180110 - DNA, 55 bp, Artificial
  Synthetic oligonucleotide
ggaagcactgctcattttgagcatctagctagtgaagttagtaaaggaatcagcg

SEQ ID NO: 180111 - DNA, 55 bp, Artificial
  Synthetic oligonucleotide
ggaagctgcattccgctctgtattccctattgcgagctacagcggcaactctgag

SEQ ID NO: 180112 - DNA, 55 bp, Artificial
  Synthetic oligonucleotide
ggaatccgatggattacgttagccgcgacgcgctacagcgtcagacggacttacg

SEQ ID NO: 180113 - DNA, 55 bp, Artificial
  Synthetic oligonucleotide
ggacaacgttgatgcctgattatacctggaatagcgtgggcagacccagtccacg

SEQ ID NO: 180114 - DNA, 55 bp, Artificial
  Synthetic oligonucleotide
agtattcgatcgctatgcttttattcaactctctaaggatcggcaatccttccag

SEQ ID NO: 180115 - DNA, 55 bp, Artificial
  Synthetic oligonucleotide
ggacacattcatggtctggatagattacgccatcattgcagtagtgggtttctcg

SEQ ID NO: 180116 - DNA, 57 bp, Artificial
  Synthetic oligonucleotide
attattccccccccatcaatgagtaaaatcacgactctcattatttgcagcaaaccc

SEQ ID NO: 180117 - DNA, 55 bp, Artificial
  Synthetic oligonucleotide
agtcgataatgttcctattggtcttgccattcctgcgtcgctgacaacgagggtg

SEQ ID NO: 180118 - DNA, 55 bp, Artificial
  Synthetic oligonucleotide
ggacacatccggatcacgaccaagccgcgtcgcaagctcccgcagacgctgtata

SEQ ID NO: 180119 - DNA, 55 bp, Artificial
  Synthetic oligonucleotide
ggaagatactctacatccaacatccacaatattatggcactagacaccagttgtc

SEQ ID NO: 180120 - DNA, 55 bp, Artificial
  Synthetic oligonucleotide
ggacgctgcagcaatatttgtgacgacagatttggtggcaattttactggtgcga

SEQ ID NO: 180121 - DNA, 55 bp, Artificial
  Synthetic oligonucleotide
ggacaagaagtaatggtcaaagtcctagaagtagatcgtcaaaatcgcatacgtc

SEQ ID NO: 180122 - DNA, 55 bp, Artificial
  Synthetic oligonucleotide
agtatggtaaaatacgggctaacttcagcgtcgcgagcatatgtttattaccgcc

SEQ ID NO: 180123 - DNA, 55 bp, Artificial
  Synthetic oligonucleotide
ggacagcccctcaaatgtcaataggtgcgcccctcatctgtcagcactctgcccc

SEQ ID NO: 180124 - DNA, 55 bp, Artificial
  Synthetic oligonucleotide
ggaaggtatcctgtccagataccagttccaatgcagcacggactcgattgcctgc

SEQ ID NO: 180125 - DNA, 55 bp, Artificial
  Synthetic oligonucleotide
ggacaggttgcgattcgaaaagcgagtaacgcgataataacgattatttcagtag

SEQ ID NO: 180126 - DNA, 55 bp, Artificial
  Synthetic oligonucleotide
ggacccagactgatggctttatgactggccgtactactggcgttgcaacctaccg

SEQ ID NO: 180127 - DNA, 60 bp, Artificial
  Synthetic oligonucleotide
gataatttctgtatttaatatacgactcatactccctccagtgctatgttgcattgtttt

SEQ ID NO: 180128 - DNA, 55 bp, Artificial
  Synthetic oligonucleotide
ggaccacactagtattaccgttaggcctgtaattggcatgtcgatagttgcacgc

SEQ ID NO: 180129 - DNA, 55 bp, Artificial
  Synthetic oligonucleotide
ggaagtcagatgcgatttacggggctgaagaggggctaccgtctggcagagctgg

SEQ ID NO: 180130 - DNA, 55 bp, Artificial
  Synthetic oligonucleotide
ggactcaggattattacacattattgtcgtcagacacaggtatctcgatcgctga

SEQ ID NO: 180131 - DNA, 55 bp, Artificial
  Synthetic oligonucleotide
agtccggcgaaacggcggttactggaagaagtggtgtacatcataacggagacag

SEQ ID NO: 180132 - DNA, 55 bp, Artificial
  Synthetic oligonucleotide
ggaagcgacgaatgcggctgtcgaggaaaccagttggttgcgcgtctagttcacg

SEQ ID NO: 180133 - DNA, 55 bp, Artificial
  Synthetic oligonucleotide
agtcagatggcctgctaccatgttaacaatcgtcgacgggacaaagaacgggcta

SEQ ID NO: 180134 - DNA, 55 bp, Artificial
  Synthetic oligonucleotide
ggactccagcagtattttacgcagtcgcccattcaacacgaattgtcgtcactgc

SEQ ID NO: 180135 - DNA, 55 bp, Artificial
  Synthetic oligonucleotide
agtattgtgcttgagtaaactgtgtgaagccatctaactaaacctgactgaccgg

SEQ ID NO: 180136 - DNA, 55 bp, Artificial
  Synthetic oligonucleotide
ggacagatataggaaatcggaggaggctgcaatttctgggtagtgtgctggccag

SEQ ID NO: 180137 - DNA, 55 bp, Artificial
  Synthetic oligonucleotide
ggacaccctattcctccatgcctgattagagctaacgggagaagtcttcactacg

SEQ ID NO: 180138 - DNA, 57 bp, Artificial
  Synthetic oligonucleotide
gataagtcaggcgaacattccagaactcctggcgggtttgtccggtagcaacatccc

SEQ ID NO: 180139 - DNA, 55 bp, Artificial
  Synthetic oligonucleotide
agtccgggagccgtgaatggtggcaactgttccgcctggtatcgcagtggcactg

SEQ ID NO: 180140 - DNA, 55 bp, Artificial
  Synthetic oligonucleotide
ggaatgcggcagtcacccacgacacctgttgcagatcaataccgcgatggttaag

SEQ ID NO: 180141 - DNA, 55 bp, Artificial
  Synthetic oligonucleotide
ggacagtcacagggtagccgatagggaacgggtaagtcagccggactgtcggctg

SEQ ID NO: 180142 - DNA, 55 bp, Artificial
  Synthetic oligonucleotide
ggaatattacaaaatcgatatggtcctaatagagtaggttggcaaggttgtatgc

SEQ ID NO: 180143 - DNA, 55 bp, Artificial
  Synthetic oligonucleotide
ggacgagaagctttagccaccgcctcactttctaatagcgcgcgaatttcatagt

SEQ ID NO: 180144 - DNA, 55 bp, Artificial
  Synthetic oligonucleotide
ggaaggtgaacagcggccactggtcttcgattgaccgggttcatgtggtggccgc

SEQ ID NO: 180145 - DNA, 55 bp, Artificial
  Synthetic oligonucleotide
gctcggtcgtgagaacaatctgatgttgctcgaatatgccggggagcgaatgctc

SEQ ID NO: 180146 - DNA, 55 bp, Artificial
  Synthetic oligonucleotide
gctcgtgatagcaagtcgttgggaaggtttcgcgatggttacgttagaggcgatg

SEQ ID NO: 180147 - DNA, 55 bp, Artificial
  Synthetic oligonucleotide
gctctcgctaaagaaagcccggaaccggtcagacaactggagcgatggatggtac

SEQ ID NO: 180148 - DNA, 55 bp, Artificial
  Synthetic oligonucleotide
ataaactgctgcccaagtaatatggcggtctcccctaaatatgcaggctcagtaa

SEQ ID NO: 180149 - DNA, 60 bp, Artificial
  Synthetic oligonucleotide
gataactcatgttcgcgctcctgtatcagccgttcgtcccttatctcctgttctcgctgt

SEQ ID NO: 180150 - DNA, 55 bp, Artificial
  Synthetic oligonucleotide
gctctggaccgacagcaggaaaatctaaaccggcagaaattgaccaagaatcact

SEQ ID NO: 180151 - DNA, 55 bp, Artificial
  Synthetic oligonucleotide
gctctgtattgcctccagaacgtcttttctggttctaatcaacccttcccctacc

SEQ ID NO: 180152 - DNA, 55 bp, Artificial
  Synthetic oligonucleotide
gctctgtgtaaatcgcaacgaaatggtttaagcgtgatagcaacaggtattgcgg

SEQ ID NO: 180153 - DNA, 55 bp, Artificial
  Synthetic oligonucleotide
ataaactatatgcagaggaagcatctatgccacggagacaaatactcagcagtga

SEQ ID NO: 180154 - DNA, 55 bp, Artificial
  Synthetic oligonucleotide
gctgaacagaattgcccgtattccggtaaggagaacggcttgcgttcagcagtag

SEQ ID NO: 180155 - DNA, 55 bp, Artificial
  Synthetic oligonucleotide
gctgaaggaaatgatgggtctcttgggtaaggaagcatgtcactctccggtaagg

SEQ ID NO: 180156 - DNA, 55 bp, Artificial
  Synthetic oligonucleotide
gctgacacatctttcgcagcacctgaactatcagcactgcgtacgtgaggaagcg

SEQ ID NO: 180157 - DNA, 55 bp, Artificial
  Synthetic oligonucleotide
gctgaccacccgcaaaatcagaggcagctttgctgcgtcgtcaggtgcgtccagc

SEQ ID NO: 180158 - DNA, 55 bp, Artificial
  Synthetic oligonucleotide
agttgcgacacaagcgacggctgatttgccgtgcacagtgaccttccagagacag

SEQ ID NO: 180159 - DNA, 52 bp, Artificial
  Synthetic oligonucleotide
agttgccggaggtaacaaatgaaacgtgctccgaacttaaaataccaaccgc

SEQ ID NO: 180160 - DNA, 59 bp, Artificial
  Synthetic oligonucleotide
attcacaaaggccgccagagtggtgagtcttagccagccaaaagtgtggcgaacagtcg

SEQ ID NO: 180161 - DNA, 55 bp, Artificial
  Synthetic oligonucleotide
gctgacgttgtctggcaccgtgtgcaagacgccgacgcgtaaagtgagcccgtca

SEQ ID NO: 180162 - DNA, 55 bp, Artificial
  Synthetic oligonucleotide
agttccaagtatccagtcgatgcatgcctgataggccacgcccggaaacatactc

SEQ ID NO: 180163 - DNA, 55 bp, Artificial
  Synthetic oligonucleotide
gctgcgagtgcatttgcaggacaggatatactcatcctccagatagccggtccgc

SEQ ID NO: 180164 - DNA, 55 bp, Artificial
  Synthetic oligonucleotide
gctgccttccgatcatccaggaaatactgaaggccaaatatggcaaagagcgctt

SEQ ID NO: 180165 - DNA, 55 bp, Artificial
  Synthetic oligonucleotide
gctgccggtgatatacgtgctttagaaacgcgattttcacccgacaatctcccgc

SEQ ID NO: 180166 - DNA, 55 bp, Artificial
  Synthetic oligonucleotide
gctgccgcgcaaagttttctgtcgtgcgggttgcgtggtgtaacctgatgccatc

SEQ ID NO: 180167 - DNA, 55 bp, Artificial
  Synthetic oligonucleotide
gctgccagagttagcaatgccagagtgatcggtcgggtatacagaaagtccagtg

SEQ ID NO: 180168 - DNA, 55 bp, Artificial
  Synthetic oligonucleotide
gctgcatgtagcaaatgagtagcggaatgattcgcagatatacgattacgacgag

SEQ ID NO: 180169 - DNA, 55 bp, Artificial
  Synthetic oligonucleotide
gctgcatagcctgacgaagggaatcaatatgctcatctcgagccttaacagcccc

SEQ ID NO: 180170 - DNA, 55 bp, Artificial
  Synthetic oligonucleotide
gctgcagtctcatcctgccgggctaaacctgcaatacacaggggaacggataccg

SEQ ID NO: 180171 - DNA, 60 bp, Artificial
  Synthetic oligonucleotide
gataaatcaactgaagtactctgttggttgttacaggcgctcactccagttgtgtcgaat

SEQ ID NO: 180172 - DNA, 55 bp, Artificial
  Synthetic oligonucleotide
gctgcagagcgttctggtcgcagtaagaccaaagaggctttattccgtctcactg

SEQ ID NO: 180173 - DNA, 55 bp, Artificial
  Synthetic oligonucleotide
gctgcaacgcgctgtagctttccgaccacgcttgttgctgcatcacgtaactctg

SEQ ID NO: 180174 - DNA, 55 bp, Artificial
  Synthetic oligonucleotide
gctgcaaacatgcgtcagacgatgtaaaactacgtaaagtcatggaatagcagcg

SEQ ID NO: 180175 - DNA, 53 bp, Artificial
  Synthetic oligonucleotide
agttccggtttgagtaaatccgccgggcggcaggtcaccggggcagcaccttc

SEQ ID NO: 180176 - DNA, 55 bp, Artificial
  Synthetic oligonucleotide
gctgaggtatatcccggggtgatgcaggataagtgcgcccgggaaccggggtaag

SEQ ID NO: 180177 - DNA, 55 bp, Artificial
  Synthetic oligonucleotide
agttctcggaccgtttgcgttctgagattggtcgcctggacgtaaaagacatcgt

SEQ ID NO: 180178 - DNA, 55 bp, Artificial
  Synthetic oligonucleotide
gctgagattatgtatgccgcgtatcagcttcatgtctggctcaaaacagtgaaaa

SEQ ID NO: 180179 - DNA, 55 bp, Artificial
  Synthetic oligonucleotide
gctgacttatgaacgagaaaatattctccctgcctgtgcataaccagttgacccc

SEQ ID NO: 180180 - DNA, 55 bp, Artificial
  Synthetic oligonucleotide
gctcaatgataaacgattcgcgatttgacagtgccagcctgactttacgtctggc

SEQ ID NO: 180181 - DNA, 55 bp, Artificial
  Synthetic oligonucleotide
gctcaaccacgatactgtccatgatgtgacggacaagcatttgctgtggatcgcg

SEQ ID NO: 180182 - DNA, 50 bp, Artificial
  Synthetic oligonucleotide
attcacctaactcctgggaaaggttaagactgggactaaaattactcccg

SEQ ID NO: 180183 - DNA, 55 bp, Artificial
  Synthetic oligonucleotide
ataacccggtttaagattatgcgactcattcgcgtttattgcatcctgaccgcac

SEQ ID NO: 180184 - DNA, 55 bp, Artificial
  Synthetic oligonucleotide
gctatctggtgacgggtacgtaaaacatgctcgctgggttgaactctggcgggag

SEQ ID NO: 180185 - DNA, 55 bp, Artificial
  Synthetic oligonucleotide
gctatccggtatgccgatttgagcggtggggctgagaatgttaccgctgtggtgg

SEQ ID NO: 180186 - DNA, 55 bp, Artificial
  Synthetic oligonucleotide
gctatcagccccgcacggagagcagtttttatcgcctagagtactgggtgggcaa

SEQ ID NO: 180187 - DNA, 55 bp, Artificial
  Synthetic oligonucleotide
gctatcacgcttaaaccatttcattgcgatttacacagaacacacgctctgtcgc

SEQ ID NO: 180188 - DNA, 55 bp, Artificial
  Synthetic oligonucleotide
gctatatcgaagaatggagttatcgggaatggccctgatattccatggagtgcca

SEQ ID NO: 180189 - DNA, 55 bp, Artificial
  Synthetic oligonucleotide
ataacgcctcacagatcggacaatagtcccgcgtgtcattaaaccctgcggagcc

SEQ ID NO: 180190 - DNA, 55 bp, Artificial
  Synthetic oligonucleotide
gctatacaggtgtccagccaaaccagattaggttcggcttagatgtactgtactg

SEQ ID NO: 180191 - DNA, 55 bp, Artificial
  Synthetic oligonucleotide
gctataacgcttcccggccgacaggcgacccaaaatccacaggggcatgcaggtt

SEQ ID NO: 180192 - DNA, 55 bp, Artificial
  Synthetic oligonucleotide
gctagcggttatgcggattccgtctacagcgttcagcaacaagcaacggacacgt

SEQ ID NO: 180193 - DNA, 58 bp, Artificial
  Synthetic oligonucleotide
atgtctgagctggtagtttttaaagctaacgaattagctatgagtcgctacgatttaa

SEQ ID NO: 180194 - DNA, 55 bp, Artificial
  Synthetic oligonucleotide
gctactgttctgggtcgagttaatctggattgccgtctaatctcgtcaaagcccg

SEQ ID NO: 180195 - DNA, 55 bp, Artificial
  Synthetic oligonucleotide
gctacgttcccctaacgtgacagtaatcttctccatgtcgcgctctgtaaccttc

SEQ ID NO: 180196 - DNA, 55 bp, Artificial
  Synthetic oligonucleotide
gctacgcgcgctgggatatttgacggattttgcgcggcttaatcggcggatgcac

SEQ ID NO: 180197 - DNA, 55 bp, Artificial
  Synthetic oligonucleotide
gctaccgttagaatgtagcgctccgcaacgatctctctccgttgtgttaacgacg

SEQ ID NO: 180198 - DNA, 55 bp, Artificial
  Synthetic oligonucleotide
gctcgcgtgttccgggcgacgtttatgcagcgaccccacaccatccagttggctt

SEQ ID NO: 180199 - DNA, 55 bp, Artificial
  Synthetic oligonucleotide
gctcgcgcataacaattcaccgttttatatgggcatcccgcgtttgaagtttccg

SEQ ID NO: 180200 - DNA, 55 bp, Artificial
  Synthetic oligonucleotide
gctcgccgccggttcatagcctgcggtgacatctggggtaaagtgataagcgggt

SEQ ID NO: 180201 - DNA, 55 bp, Artificial
  Synthetic oligonucleotide
gctcgcagattttaaacactggcacaccacgctcgcttgtggctttgcggtccag

SEQ ID NO: 180202 - DNA, 55 bp, Artificial
  Synthetic oligonucleotide
gctcgcagatttgagctgggctgaaacctagaagcattccagtggatcacgtctc

SEQ ID NO: 180203 - DNA, 55 bp, Artificial
  Synthetic oligonucleotide
gctcctggtaaatgtttggctatctcagcgaagggagtgaaagtccccgtgtcgg

SEQ ID NO: 180204 - DNA, 60 bp, Artificial
  Synthetic oligonucleotide
gatgccgcggccagaatctcacgttctctgtacctgtccagatccccaacgtacttatat

SEQ ID NO: 180205 - DNA, 55 bp, Artificial
  Synthetic oligonucleotide
gctcctgattaataagtgtaggctgcataaggtcattaagcgtgccaatctggcg

SEQ ID NO: 180206 - DNA, 55 bp, Artificial
  Synthetic oligonucleotide
gctccgagggtgttgatcggatttgcgccggtctgaccagctgccagtttaacaa

SEQ ID NO: 180207 - DNA, 55 bp, Artificial
  Synthetic oligonucleotide
gctcccgaatgctcttcaattttgatcaggccagtcagcaactaaatatcaccat

SEQ ID NO: 180208 - DNA, 55 bp, Artificial
  Synthetic oligonucleotide
ataacagatatcggcggttcagcacaggggatacctttccgtctgcgtactgact

SEQ ID NO: 180209 - DNA, 55 bp, Artificial
  Synthetic oligonucleotide
gctccagaatagcgaaatattaagtgcgccgaggatgaagatgcgcatccaccag

SEQ ID NO: 180210 - DNA, 55 bp, Artificial
  Synthetic oligonucleotide
gctcatgaatgagtgttctgttagtcaccgccagccaggtaacagcaaaccccag

SEQ ID NO: 180211 - DNA, 55 bp, Artificial
  Synthetic oligonucleotide
gctcagctagacgtcattcagcagaaactggacgctctgcagcagactgttaccc

SEQ ID NO: 180212 - DNA, 55 bp, Artificial
  Synthetic oligonucleotide
gctcactattcatcgggttatctggaccatctttccccgtcaatccgctttgcgc

SEQ ID NO: 180213 - DNA, 55 bp, Artificial
  Synthetic oligonucleotide
gctcaccggatttagcgacatcaccgttggataaggcagtggcacccgccactgc

SEQ ID NO: 180214 - DNA, 53 bp, Artificial
  Synthetic oligonucleotide
gctcacccggcgtggttataatacctcccgtaccaggcgagaagcggtaaaac

SEQ ID NO: 180215 - DNA, 60 bp, Artificial
  Synthetic oligonucleotide
gccacggttctcgcactatggtctgtagcgcgctggtggagtcacacctgtagtcaagcg

SEQ ID NO: 180216 - DNA, 56 bp, Artificial
  Synthetic oligonucleotide
atgtgacgtccctgaggagagttataccttacctttcgggaaggcacgtattgcac

SEQ ID NO: 180217 - DNA, 55 bp, Artificial
  Synthetic oligonucleotide
gctcacagatataaccactcctgtcacgcattaaatcaacactctcaaaaattct

SEQ ID NO: 180218 - DNA, 55 bp, Artificial
  Synthetic oligonucleotide
gcttatggacaagtcaatgagaggtgatgtttctggcgaggcttatgtaggagcc

SEQ ID NO: 180219 - DNA, 55 bp, Artificial
  Synthetic oligonucleotide
gcttattcctcctgactactaataaactacagcgtcactactgatttactactga

SEQ ID NO: 180220 - DNA, 54 bp, Artificial
  Synthetic oligonucleotide
gcttattgccggaaagccgaacatcccaccaaaaccatataacgaaacggcagt

SEQ ID NO: 180221 - DNA, 55 bp, Artificial
  Synthetic oligonucleotide
gcttcaactatggctacaaccttctttgcaacacctagaatcttatcgctaacgt

SEQ ID NO: 180222 - DNA, 55 bp, Artificial
  Synthetic oligonucleotide
gcttcagacaaatacctacgattattatacaagactagaccgtgacggttgggga

SEQ ID NO: 180223 - DNA, 55 bp, Artificial
  Synthetic oligonucleotide
gcttcattctcacgcctggcaagtatagttaagcagtcatgcgtgggtatgactg

SEQ ID NO: 180224 - DNA, 55 bp, Artificial
  Synthetic oligonucleotide
gcttcccggcaacaattaatagactggatggaggcggataaagttgcaggaccac

SEQ ID NO: 180225 - DNA, 54 bp, Artificial
  Synthetic oligonucleotide
gcttcctggttcggagaaggaattggagttaagtggatgtctaaaattccttat

SEQ ID NO: 180226 - DNA, 55 bp, Artificial
  Synthetic oligonucleotide
gcttcgtatggggtatcggcgcctcgtcaggctttacagcccggtcatcgcatag

SEQ ID NO: 180227 - DNA, 60 bp, Artificial
  Synthetic oligonucleotide
gatgccaggccgttctgtccgtttgggatgttgccacgcgatcccctccagtagcatgga

SEQ ID NO: 180228 - DNA, 55 bp, Artificial
  Synthetic oligonucleotide
gcttctttcaccggggacggccccattgttctggagcctgatatgtcctggatcg

SEQ ID NO: 180229 - DNA, 55 bp, Artificial
  Synthetic oligonucleotide
gcttgctggtaacactagcgaaacctacatcgaagataacggtgcgagtattaac

SEQ ID NO: 180230 - DNA, 55 bp, Artificial
  Synthetic oligonucleotide
gcttggcctgacctatttagcggtgttagtggtgcaaatagtggcacccgccgtg

SEQ ID NO: 180231 - DNA, 55 bp, Artificial
  Synthetic oligonucleotide
gcttgtctattggctggatattattggcacagccgtatttgctatctccggcgta

SEQ ID NO: 180232 - DNA, 55 bp, Artificial
  Synthetic oligonucleotide
gctttacttgcccgggcctctgcctgtgactgctcttccgattttgctgccacgg

SEQ ID NO: 180233 - DNA, 55 bp, Artificial
  Synthetic oligonucleotide
ggaactgaagtgcgataaactttagcctgactgtcaaaattcaacgtggaaatca

SEQ ID NO: 180234 - DNA, 55 bp, Artificial
  Synthetic oligonucleotide
ggaacgcagctcgattgcgtgcttgaaacgcgccttgtgacgacgcaacccggca

SEQ ID NO: 180235 - DNA, 55 bp, Artificial
  Synthetic oligonucleotide
agtcgtggttcgtgcgtatataaaccgtgtgctgttcctatagctaccgcaaggg

SEQ ID NO: 180236 - DNA, 55 bp, Artificial
  Synthetic oligonucleotide
ggaacctgtatcagtatccattaaacccaattcataaagctgacccgctgggtct

SEQ ID NO: 180237 - DNA, 55 bp, Artificial
  Synthetic oligonucleotide
ggaacatacccgggatcatttgataactggacgatccatcatgcgagttaagaag

SEQ ID NO: 180238 - DNA, 55 bp, Artificial
  Synthetic oligonucleotide
gatgccaaaactaacctgtccaggatcgttcaagaggtagcccggacgggggagc

SEQ ID NO: 180239 - DNA, 55 bp, Artificial
  Synthetic oligonucleotide
agtctgggaagttatgacagccgacagtttaccgcagctggtgatatcacacctg

SEQ ID NO: 180240 - DNA, 55 bp, Artificial
  Synthetic oligonucleotide
ggaaagatactagatctttgttcaggatccggaatattaagcgtagcattatcac

SEQ ID NO: 180241 - DNA, 50 bp, Artificial
  Synthetic oligonucleotide
ggaaaccgtactttcgcgggaaataaattaaggttgaccatgtccgaaac

SEQ ID NO: 180242 - DNA, 55 bp, Artificial
  Synthetic oligonucleotide
ggaaaataagatggcgatagacacaccttccggcgtacagctacgcattcggggc

SEQ ID NO: 180243 - DNA, 55 bp, Artificial
  Synthetic oligonucleotide
ggaaaagacattgtacccggcaagcattacaccgatgcggaatgtgatgcactac

SEQ ID NO: 180244 - DNA, 54 bp, Artificial
  Synthetic oligonucleotide
gcttttcagggacggggttacgggatagtcagtgtgactttatccgtaggctgg

SEQ ID NO: 180245 - DNA, 55 bp, Artificial
  Synthetic oligonucleotide
gctttgttcagtacacatcgagttaaacagggcatttactagttgccgaccgttc

SEQ ID NO: 180246 - DNA, 55 bp, Artificial
  Synthetic oligonucleotide
gctttgcgtgctcaacgtttcattgcatcaacagtgttaaaagggcctgattgtg

SEQ ID NO: 180247 - DNA, 55 bp, Artificial
  Synthetic oligonucleotide
gctttctgactactatttcgagcatttgagtaggctaatgctaatccccgcagag

SEQ ID NO: 180248 - DNA, 55 bp, Artificial
  Synthetic oligonucleotide
gctttctcagtcggcgttgtcgcacgcgcaaacccgccaatcagccactggctgt

SEQ ID NO: 180249 - DNA, 57 bp, Artificial
  Synthetic oligonucleotide
atgtgtacgttaacagggattattcggagcagactattgtgcttaacgccgttcgtc

SEQ ID NO: 180250 - DNA, 55 bp, Artificial
  Synthetic oligonucleotide
gctttcgctcgaatcgaaccttagtcgaaggtcctcacccttccccgatgagtgc

SEQ ID NO: 180251 - DNA, 55 bp, Artificial
  Synthetic oligonucleotide
gctgtaagtggcccacggcagagatccccagtggaacaagctgtaagccagcccc

SEQ ID NO: 180252 - DNA, 55 bp, Artificial
  Synthetic oligonucleotide
gctggtttgtgaaaacggaactacaggacaattacaacgcgtctgctgccgtcta

SEQ ID NO: 180253 - DNA, 55 bp, Artificial
  Synthetic oligonucleotide
agtgtcgcccgctcagggagtgggtacctcatgccggctggcaatttgatagcgc

SEQ ID NO: 180254 - DNA, 55 bp, Artificial
  Synthetic oligonucleotide
agtgtgcgacctcttgaagcgatcaatctgattcgaaatctgctgaaagtggacg

SEQ ID NO: 180255 - DNA, 55 bp, Artificial
  Synthetic oligonucleotide
gctgggtgccggaagagggatggtacgctggcgctgaagtccgctatatgagcga

SEQ ID NO: 180256 - DNA, 55 bp, Artificial
  Synthetic oligonucleotide
gctgggctatctaatctttcatcgggtaacgctatgttagggtgttgtgttcagg

SEQ ID NO: 180257 - DNA, 55 bp, Artificial
  Synthetic oligonucleotide
agtgtgtaatcaaacgcggcacccgccagggataacagcagcaccggtctgcgcc

SEQ ID NO: 180258 - DNA, 55 bp, Artificial
  Synthetic oligonucleotide
gctggcttccatatcagaaagcgactgcggtgacttaaccagccacgtttcattc

SEQ ID NO: 180259 - DNA, 55 bp, Artificial
  Synthetic oligonucleotide
gctggcttaagtggagcacagataccaaatgctgtcctttcagtgtagccgcgat

SEQ ID NO: 180260 - DNA, 60 bp, Artificial
  Synthetic oligonucleotide
gatgagctgcgccggttgcgtctggccgtcagggaacaggggacgcgggatgatagttaa

SEQ ID NO: 180261 - DNA, 55 bp, Artificial
  Synthetic oligonucleotide
agttacaacgagcaaagatagccacagctcagattaggttatgagcccgtcacgc

SEQ ID NO: 180262 - DNA, 55 bp, Artificial
  Synthetic oligonucleotide
agttagcgaaacaagctagctttaaagagagggttagagacgcctttactgtctc

SEQ ID NO: 180263 - DNA, 55 bp, Artificial
  Synthetic oligonucleotide
gctggccgtcctggccgccacatgaggcatgttccgcgtccttgcaatactgtgt

SEQ ID NO: 180264 - DNA, 55 bp, Artificial
  Synthetic oligonucleotide
gctggaagtgatatattccggggcgggtttaatcaatgatagatatcatcgtaaa

SEQ ID NO: 180265 - DNA, 55 bp, Artificial
  Synthetic oligonucleotide
gctgcgtcgggtcactcccttacgacgcatggcttgataaaaggtctcctcgtta

SEQ ID NO: 180266 - DNA, 55 bp, Artificial
  Synthetic oligonucleotide
gctgcggtgatacgcgcttgtcacttgtgttcatcgtggcgcgatttatctccgg

SEQ ID NO: 180267 - DNA, 55 bp, Artificial
  Synthetic oligonucleotide
gctgcgcgtaaggtcaactacagccagatcgatccggtgttatgtcgtgaactct

SEQ ID NO: 180268 - DNA, 55 bp, Artificial
  Synthetic oligonucleotide
gcttagttctgcctgcaagggacgtatccacatactaaattcagtggcaggtaac

SEQ ID NO: 180269 - DNA, 54 bp, Artificial
  Synthetic oligonucleotide
gcttaccggtacgtccgaccgcttaaaccgccatacaaccactcactgatttac

SEQ ID NO: 180270 - DNA, 53 bp, Artificial
  Synthetic oligonucleotide
gctgtttgttgacggctggaaaaccccgacccgggaatttatgcagaaagggc

SEQ ID NO: 180271 - DNA, 60 bp, Artificial
  Synthetic oligonucleotide
gatgagagctgcttcaaattaatgtgccatgttcacggggaggtggtgcgacgtttgcat

SEQ ID NO: 180272 - DNA, 55 bp, Artificial
  Synthetic oligonucleotide
agtgcggcttttattgagtccctgcgtgaccagagtgatatgttgcgccggcagg

SEQ ID NO: 180273 - DNA, 55 bp, Artificial
  Synthetic oligonucleotide
agtgcgggtttctggacgctacttgctggcatctttccggaaaaccaggccagtg

SEQ ID NO: 180274 - DNA, 55 bp, Artificial
  Synthetic oligonucleotide
gctgttgagaaccaacaaccggtagacaacggatcattaatccaaccacctccac

SEQ ID NO: 180275 - DNA, 53 bp, Artificial
  Synthetic oligonucleotide
gctgttatccctcgtcggattccggtttaactgccccgcgctttagcgtgggg

SEQ ID NO: 180276 - DNA, 55 bp, Artificial
  Synthetic oligonucleotide
gctgtgttataatttgcgacctttgaatccgggatacagtagagggatagcggtt

SEQ ID NO: 180277 - DNA, 55 bp, Artificial
  Synthetic oligonucleotide
gctgtgctctgcgaaagccagttaccacggttaagcagttccccaactgacttaa

SEQ ID NO: 180278 - DNA, 55 bp, Artificial
  Synthetic oligonucleotide
gctgtctttggatcaaagcgttagccattacgttccagagttgcgtggcagcagc

SEQ ID NO: 180279 - DNA, 55 bp, Artificial
  Synthetic oligonucleotide
gctgtctccaccagccggagtgatgcgatccacccagaaggtgtcaccgagaatg

SEQ ID NO: 180280 - DNA, 55 bp, Artificial
  Synthetic oligonucleotide
agtggttagaattcagagcctcgaaatcacccgtctgaagcagaccaaccaatcg

SEQ ID NO: 180281 - DNA, 55 bp, Artificial
  Synthetic oligonucleotide
gctgtcaatcaggtggggatttgtctagaatagaggtaataatcttttcaactcc

SEQ ID NO: 180282 - DNA, 59 bp, Artificial
  Synthetic oligonucleotide
gatgacatgggctgaaccggaataccgcaaaagacaactccgcttctggaaactcgaga

SEQ ID NO: 180283 - DNA, 55 bp, Artificial
  Synthetic oligonucleotide
gctgtattcgccgcccgtattcgtcaggaggtgtgccatgtgcaataaaaccaca

SEQ ID NO: 180284 - DNA, 55 bp, Artificial
  Synthetic oligonucleotide
ggctgggtgaatgtgttcagcatgggtaatggcctagcggggactgtgggctgga

SEQ ID NO: 180285 - DNA, 55 bp, Artificial
  Synthetic oligonucleotide
aggcgtcaacgtctttatggcgaccgccagcggtaccgtgaagaaaacggcgctg

SEQ ID NO: 180286 - DNA, 55 bp, Artificial
  Synthetic oligonucleotide
ggctggacttgcaatcgtaattatcccgcttctacttgtcatcatgcctgagaac

SEQ ID NO: 180287 - DNA, 55 bp, Artificial
  Synthetic oligonucleotide
ggctggaataaggagcatcgctcatgcagtggcaaactaatctccctctcatcgc

SEQ ID NO: 180288 - DNA, 55 bp, Artificial
  Synthetic oligonucleotide
ggctgctttaaggtcaccctgtgaccgtttatcaggaggcaataatgaaacgttc

SEQ ID NO: 180289 - DNA, 55 bp, Artificial
  Synthetic oligonucleotide
ggctgagcgtaaatctcacggccgtaagcgggatactgcacggcgggatgcatca

SEQ ID NO: 180290 - DNA, 55 bp, Artificial
  Synthetic oligonucleotide
ggctgacatccggtgatgaagagtactggtcctcctcccagggatcaactgccac

SEQ ID NO: 180291 - DNA, 55 bp, Artificial
  Synthetic oligonucleotide
ggctcttccacatcaatcgacccttcggtgctgttagtgtgcggcgtatcttctt

SEQ ID NO: 180292 - DNA, 55 bp, Artificial
  Synthetic oligonucleotide
ggctctctggtaccatttcacgtaacagattttgccgcgaattctccgtcggcgc

SEQ ID NO: 180293 - DNA, 59 bp, Artificial
  Synthetic oligonucleotide
gatgaagcctatgcgctttttaagccattcgacgttactgatccgcatcgtttaacttc

SEQ ID NO: 180294 - DNA, 55 bp, Artificial
  Synthetic oligonucleotide
ggctcgtttatcggaacgtcctctgtgaccgcctatatcgaatcttcgtccggcg

SEQ ID NO: 180295 - DNA, 55 bp, Artificial
  Synthetic oligonucleotide
ggctcggtaacagcaaactggcgatccagataattagggatctcaatgtgctcct

SEQ ID NO: 180296 - DNA, 54 bp, Artificial
  Synthetic oligonucleotide
ggctcccttctgccacggtaatgtttaacgcgttaccatctttacgaccggcgc

SEQ ID NO: 180297 - DNA, 55 bp, Artificial
  Synthetic oligonucleotide
ggctatgcagccaggtaaaatttatctgtcgcgaacggggcggtttatcgggtgg

SEQ ID NO: 180298 - DNA, 55 bp, Artificial
  Synthetic oligonucleotide
ggctagtgcttcagcgtaacgaacctctattgcgtcactggcgttcagtgagggt

SEQ ID NO: 180299 - DNA, 55 bp, Artificial
  Synthetic oligonucleotide
ggctactacgatttcgatttgaaaagagaggttccgcttgagtttgataccgagc

SEQ ID NO: 180300 - DNA, 55 bp, Artificial
  Synthetic oligonucleotide
ggctacgcaacgagcatcagggctactgcagcgtttagcgcaaggcagtctggtt

SEQ ID NO: 180301 - DNA, 55 bp, Artificial
  Synthetic oligonucleotide
ggctaaaatttacgatttccctcaaggagccgaacgccgcaggatgcaccgcaaa

SEQ ID NO: 180302 - DNA, 55 bp, Artificial
  Synthetic oligonucleotide
ggcgtttagaagacaggtcaattgcgatctgctggctgggatttcgtcgcgccac

SEQ ID NO: 180303 - DNA, 55 bp, Artificial
  Synthetic oligonucleotide
ggcgtttacgccacaataattcggtgctaccagcgctgttatagggctgtctggc

SEQ ID NO: 180304 - DNA, 55 bp, Artificial
  Synthetic oligonucleotide
gatcgttttcgtagtaacgctcaatcccctgtttaccgatgttatggtccgccgc

SEQ ID NO: 180305 - DNA, 55 bp, Artificial
  Synthetic oligonucleotide
agggaactgaacttaaacgggcagaaaatcagagacgctatcagcgcacacacag

SEQ ID NO: 180306 - DNA, 55 bp, Artificial
  Synthetic oligonucleotide
gggaatgcgggctgacaagtcgacagccggttaaacatcactaccgggtaaacga

SEQ ID NO: 180307 - DNA, 55 bp, Artificial
  Synthetic oligonucleotide
aggcggcaagaaaacaaatcccgatgagcttaggaagagtacgcagccaacacgg

SEQ ID NO: 180308 - DNA, 55 bp, Artificial
  Synthetic oligonucleotide
gggaaccacacttttgataggcacaagccgtaaggcagggctacagagatgtgcc

SEQ ID NO: 180309 - DNA, 55 bp, Artificial
  Synthetic oligonucleotide
gggaaaatgcttatggtgtgttagctaaagcaaccagagagctgatgacgagaac

SEQ ID NO: 180310 - DNA, 55 bp, Artificial
  Synthetic oligonucleotide
gggaaaatcaacagcgtacgcccgcttctcaacagtcgactcaacacgtcacgcc

SEQ ID NO: 180311 - DNA, 52 bp, Artificial
  Synthetic oligonucleotide
ggctttaaccgccgttgcccctttccttgcgggtattactgacaaacggcaa

SEQ ID NO: 180312 - DNA, 55 bp, Artificial
  Synthetic oligonucleotide
ggcttgtgggtcaaacattacgctcatcgtggcttctcgttttactgacttaacg

SEQ ID NO: 180313 - DNA, 55 bp, Artificial
  Synthetic oligonucleotide
ggcttgtcattcgatattaatcgactgatccagtctccgatgggtgttagggatg

SEQ ID NO: 180314 - DNA, 55 bp, Artificial
  Synthetic oligonucleotide
ggcttgcgattgccctgtctgagttactacatttgcggtgtctgaccttgctgtt

SEQ ID NO: 180315 - DNA, 60 bp, Artificial
  Synthetic oligonucleotide
gatcgtaaagctacggtggctatgaaagctcatagataagccgctacgctgtttttaata

SEQ ID NO: 180316 - DNA, 55 bp, Artificial
  Synthetic oligonucleotide
ggcttctgaagccgttctcagagtcgttgacttaccggaccctgtagggccggat

SEQ ID NO: 180317 - DNA, 55 bp, Artificial
  Synthetic oligonucleotide
ggcttctctcaatgcttctgggccgtggttctcgatcaggttttccatccagtga

SEQ ID NO: 180318 - DNA, 55 bp, Artificial
  Synthetic oligonucleotide
ggcttcatttcaatacacagccgggatagcttacaaccagatcatattagtccgc

SEQ ID NO: 180319 - DNA, 55 bp, Artificial
  Synthetic oligonucleotide
ggcttcagcgcgtgttcggactttaccattcaggggattttgctcacgaaggcac

SEQ ID NO: 180320 - DNA, 55 bp, Artificial
  Synthetic oligonucleotide
ggcttcaaggcgaatcactttgccaggaaccagttcaccagacaggatttgctgc

SEQ ID NO: 180321 - DNA, 54 bp, Artificial
  Synthetic oligonucleotide
ggcttataaagacgtgaccgtcaggcaagacggttaccaggaataaaccattcc

SEQ ID NO: 180322 - DNA, 55 bp, Artificial
  Synthetic oligonucleotide
ggctgttcagattccggatcgcattttcaagccctttcatcagaatgcctccggg

SEQ ID NO: 180323 - DNA, 55 bp, Artificial
  Synthetic oligonucleotide
ggctgttaagtccgcccatctttacacccggcacatctgccgccaacgtatggcc

SEQ ID NO: 180324 - DNA, 55 bp, Artificial
  Synthetic oligonucleotide
ggctgtccccatgctcaagtctccccgggagctgaaggtgcggataacagaaggc

SEQ ID NO: 180325 - DNA, 55 bp, Artificial
  Synthetic oligonucleotide
ggctgtatagccggtcccgaagagataccactgtgtcactaccgcctgcaaggct

SEQ ID NO: 180326 - DNA, 61 bp, Artificial
  Synthetic oligonucleotide
gcaatccaggttgggagcgtgtgcagcccataggcgtgtaaaatacggctgtacttcatgg

SEQ ID NO: 180327 - DNA, 58 bp, Artificial
  Synthetic oligonucleotide
atcggacctaccagccccggcatagtgacaaagttaagaacgggcagcagctcactac

SEQ ID NO: 180328 - DNA, 60 bp, Artificial
  Synthetic oligonucleotide
gatcggtttggtatccggtcgccaatggctgctccagaagctatctgatgggacttggat

SEQ ID NO: 180329 - DNA, 55 bp, Artificial
  Synthetic oligonucleotide
ggctgtaccgacatcggcagcccctggatagcgaacggtttgatgtccactttcc

SEQ ID NO: 180330 - DNA, 55 bp, Artificial
  Synthetic oligonucleotide
ggctggtacaggagtaacagagcatgacggagctggaaagacatttgctgaacgc

SEQ ID NO: 180331 - DNA, 52 bp, Artificial
  Synthetic oligonucleotide
ggcggggtgaggttattataaaccgttataaccatcccaataagcgcccgtg

SEQ ID NO: 180332 - DNA, 55 bp, Artificial
  Synthetic oligonucleotide
agggcaagtcacgaaggaagtcagaaagtagtcgtaagaacggtgatcactgtcc

SEQ ID NO: 180333 - DNA, 55 bp, Artificial
  Synthetic oligonucleotide
ggcgggaatccttgtgcacagcaggcggatgacaggatggttatcccaatgtttg

SEQ ID NO: 180334 - DNA, 54 bp, Artificial
  Synthetic oligonucleotide
ggcggctggggaaatcgcgagacgatcggtttcttcgaacgttacgcgcgtacc

SEQ ID NO: 180335 - DNA, 55 bp, Artificial
  Synthetic oligonucleotide
ggcggctagcgcagtttgtggcgtgtggctgtcgaccgctccacttgataccaga

SEQ ID NO: 180336 - DNA, 55 bp, Artificial
  Synthetic oligonucleotide
ggcggcactttctggtttgtcaccgggctatttattctgtttgccctgaccgtgg

SEQ ID NO: 180337 - DNA, 55 bp, Artificial
  Synthetic oligonucleotide
ggcggcactaagctggtctgatcactgcattattcgtctgtaaacgtcgacggga

SEQ ID NO: 180338 - DNA, 55 bp, Artificial
  Synthetic oligonucleotide
ggcggatcgcatgattaccagggctaggtcgaaaccttgaaaggatattagcaca

SEQ ID NO: 180339 - DNA, 60 bp, Artificial
  Synthetic oligonucleotide
atgttctgctgttacaatacggtacacacaggagacactgtcacttttatggcatggcac

SEQ ID NO: 180340 - DNA, 55 bp, Artificial
  Synthetic oligonucleotide
ggcggagtcgttgctattgccaagcccgtttgattacagtcgccaggcgttactc

SEQ ID NO: 180341 - DNA, 55 bp, Artificial
  Synthetic oligonucleotide
ggcggagacagcaatgctgaatacatcgttaccgtacctaaacgcggctataagc

SEQ ID NO: 180342 - DNA, 55 bp, Artificial
  Synthetic oligonucleotide
ggcggactgggctccaatggcggacatcagcgaggatgagaacgcattcttcctc

SEQ ID NO: 180343 - DNA, 55 bp, Artificial
  Synthetic oligonucleotide
ggcggaaagtcagtatgcggtcctgaaagagctgccacgaaacggcagttatctg

SEQ ID NO: 180344 - DNA, 55 bp, Artificial
  Synthetic oligonucleotide
ggcgcttccatccagcgtcgacagtacaggatgacccatttaggcatcccaacag

SEQ ID NO: 180345 - DNA, 55 bp, Artificial
  Synthetic oligonucleotide
agggctgaacgtgacaactgatcctctgggaaagctaatacctgaacttgtagtc

SEQ ID NO: 180346 - DNA, 55 bp, Artificial
  Synthetic oligonucleotide
ggcgcgctgaagtgtctggtgaagaatgaacgggctattgcgttttaccagcgac

SEQ ID NO: 180347 - DNA, 55 bp, Artificial
  Synthetic oligonucleotide
ggcgcgcataccataaaagctgaagtactcccaaatttgcagggcgacaacgtag

SEQ ID NO: 180348 - DNA, 55 bp, Artificial
  Synthetic oligonucleotide
agggctttattgctgacgccaccattaatacaccgaacggacatctggtcgccag

SEQ ID NO: 180349 - DNA, 55 bp, Artificial
  Synthetic oligonucleotide
ggcgcccctgttttatagtggcaacgcgctgaatcttcacttaccgcgacgcaac

SEQ ID NO: 180350 - DNA, 52 bp, Artificial
  Synthetic oligonucleotide
gatcgcgttgcccccggttaaagaaaattatccgggcgagcggtttgtggaa

SEQ ID NO: 180351 - DNA, 55 bp, Artificial
  Synthetic oligonucleotide
ggcgccaaacgatcgattggtcaccagtaatgtccgattctggaaagatagcggt

SEQ ID NO: 180352 - DNA, 55 bp, Artificial
  Synthetic oligonucleotide
aggggattgagcgtcagatgaccgaaggggaattaaaacggcttgcagaacggca

SEQ ID NO: 180353 - DNA, 55 bp, Artificial
  Synthetic oligonucleotide
ggcgttatgcctgacaggcgtttccccggtattgtctctggccgctagttcctcg

SEQ ID NO: 180354 - DNA, 55 bp, Artificial
  Synthetic oligonucleotide
ggcgttaggtcagaagccaaagcgtcagccgaaaagtgtagatcctgcactgttg

SEQ ID NO: 180355 - DNA, 55 bp, Artificial
  Synthetic oligonucleotide
ggcgttacactctcgggtagctgaatttactcacttatggaactggaacacgcga

SEQ ID NO: 180356 - DNA, 55 bp, Artificial
  Synthetic oligonucleotide
ggcgtggggaaaatcagctatccgctgttgaattttagttgggctctcactgcgc

SEQ ID NO: 180357 - DNA, 55 bp, Artificial
  Synthetic oligonucleotide
ggcgtgcctgattcggccagtcgggaaaatcgactgcgatctcatccatcgcgag

SEQ ID NO: 180358 - DNA, 55 bp, Artificial
  Synthetic oligonucleotide
ggcgtgaagggtaccgctatatgaaggcaggagtcatgctggctgatttcgcacc

SEQ ID NO: 180359 - DNA, 55 bp, Artificial
  Synthetic oligonucleotide
ggcgtctaaggaacacattgagatccctaattatctggatcgccagtttgctgtt

SEQ ID NO: 180360 - DNA, 55 bp, Artificial
  Synthetic oligonucleotide
agggacagtatcaggtactggcgcgctgggacacaccgcgagtcgttaagggcgt

SEQ ID NO: 180361 - DNA, 56 bp, Artificial
  Synthetic oligonucleotide
atgtttatgtcaaacgacgaaaatgaatacacgttcaaacctgttaatgcccaggc

SEQ ID NO: 180362 - DNA, 55 bp, Artificial
  Synthetic oligonucleotide
ggcgtcatgtccggcaaacggtcagagactatattactcatctgcgttgcgctag

SEQ ID NO: 180363 - DNA, 55 bp, Artificial
  Synthetic oligonucleotide
ggcgtattataaccgaccggagaagtcaactattgagcagatgccatgatccgta

SEQ ID NO: 180364 - DNA, 55 bp, Artificial
  Synthetic oligonucleotide
ggcgtaggccctaaacgcgtatttggttgcggtttcatgcatctggcggggcagt

SEQ ID NO: 180365 - DNA, 55 bp, Artificial
  Synthetic oligonucleotide
ggcgtaagacgtattgatctttcagacagttagcgggctgcgggttgcagtcctt

SEQ ID NO: 180366 - DNA, 55 bp, Artificial
  Synthetic oligonucleotide
ggcggtgtagtgctgtcgcttcggcggatgaagatgagctaccgcgagcgttagg

SEQ ID NO: 180367 - DNA, 55 bp, Artificial
  Synthetic oligonucleotide
ggcggtcgtataattgcggttggtactactactttgcgtgcattagaaagtgctt

SEQ ID NO: 180368 - DNA, 55 bp, Artificial
  Synthetic oligonucleotide
ggcggtcctctcaagctctcggaccattggtggccgtcattagacgacttgtaac

SEQ ID NO: 180369 - DNA, 55 bp, Artificial
  Synthetic oligonucleotide
ggcggtatccctgagaccgggcccatgttaaggcatgatcgagtaaggcttttcc

SEQ ID NO: 180370 - DNA, 52 bp, Artificial
  Synthetic oligonucleotide
ggcggtaccaacgtttctattagcgaggaaccgtttgaaccgcgacaattgt

SEQ ID NO: 180371 - DNA, 55 bp, Artificial
  Synthetic oligonucleotide
agggatccgtcagacctctggcagtaccttcctcagccttgacccggaagcctcc

SEQ ID NO: 180372 - DNA, 55 bp, Artificial
  Synthetic oligonucleotide
gatcgaaatttaatcaaacgattaattcgagaaacttttcgttcgttgcaatata

SEQ ID NO: 180373 - DNA, 55 bp, Artificial
  Synthetic oligonucleotide
ggcgggtcattttcagatctacgataccattatccaacaagcagaaggacaatcg

SEQ ID NO: 180374 - DNA, 55 bp, Artificial
  Synthetic oligonucleotide
gggcttaccattatcactctcatcttgccggcttgagtatgcgcatgatgacgga

SEQ ID NO: 180375 - DNA, 55 bp, Artificial
  Synthetic oligonucleotide
aggagcgcgcacagaaatttgtctatgagaaagctgtacaatataagcgcctgca

SEQ ID NO: 180376 - DNA, 55 bp, Artificial
  Synthetic oligonucleotide
gggctggtagcagttggaggatggttaggtgataacgtacttggtacaaaacgcg

SEQ ID NO: 180377 - DNA, 55 bp, Artificial
  Synthetic oligonucleotide
gggctgagtcggccttgatgggccagtcacgcgatccggggattgtgtcgtatag

SEQ ID NO: 180378 - DNA, 55 bp, Artificial
  Synthetic oligonucleotide
gggctgaatgcaccgttaacgttgagaatgggcgagtatccggcaacgcgcaccc

SEQ ID NO: 180379 - DNA, 55 bp, Artificial
  Synthetic oligonucleotide
aggatagtagccagcaacgattgcaatataacgcgtgttctctgtacggtcgatg

SEQ ID NO: 180380 - DNA, 55 bp, Artificial
  Synthetic oligonucleotide
gggctcggggtcactccaaactatagggcagatttgtctacgggctcggggtcac

SEQ ID NO: 180381 - DNA, 55 bp, Artificial
  Synthetic oligonucleotide
gggctatagcaggcgtccaccaacagacgaccaatcgggcgctcatcttcttccg

SEQ ID NO: 180382 - DNA, 55 bp, Artificial
  Synthetic oligonucleotide
gggctataacagcttcaacgaggctcagagcgcgataatccgctacatcacaggc

SEQ ID NO: 180383 - DNA, 60 bp, Artificial
  Synthetic oligonucleotide
attaaacatgatcgctaattcgccaagcatgattattaactgtgggtctgacttttattg

SEQ ID NO: 180384 - DNA, 55 bp, Artificial
  Synthetic oligonucleotide
gggctaaaccaggcattgtgacctacgttgtgacgcttagttcgcacttctgctc

SEQ ID NO: 180385 - DNA, 55 bp, Artificial
  Synthetic oligonucleotide
gggcgttttcgcgacgtatcgtcagcatggctctacccacgttacgctgtatggg

SEQ ID NO: 180386 - DNA, 55 bp, Artificial
  Synthetic oligonucleotide
aggatcccagataacgttaccttgttcacctttgataacgtctgtcggcagagcc

SEQ ID NO: 180387 - DNA, 55 bp, Artificial
  Synthetic oligonucleotide
gggcgttcattcctgtcaacttaatccttgaaggggtaagcctgctgtccaaacc

SEQ ID NO: 180388 - DNA, 55 bp, Artificial
  Synthetic oligonucleotide
gggcgtggttcaacgttaacacggcccatatcaacgcaatccggtccagtgaacc

SEQ ID NO: 180389 - DNA, 55 bp, Artificial
  Synthetic oligonucleotide
gggcgtattatagccgacaagagtagtcaactattgagcagatgccatgatcaca

SEQ ID NO: 180390 - DNA, 55 bp, Artificial
  Synthetic oligonucleotide
gggcgtaaagtatcgctgatccccgtagtgataaataatcagtcaatgtggcgtg

SEQ ID NO: 180391 - DNA, 55 bp, Artificial
  Synthetic oligonucleotide
gggcggttttcacgcattgacaaggctccggcggattttaaactcgtgatcggta

SEQ ID NO: 180392 - DNA, 55 bp, Artificial
  Synthetic oligonucleotide
gggcggtacgtattgttccactctagtgcgtttagcactaaacgacatccaaaga

SEQ ID NO: 180393 - DNA, 55 bp, Artificial
  Synthetic oligonucleotide
ggggccatcgacatggataagcgttaactgttgcggcagcgacaatgtaatcgga

SEQ ID NO: 180394 - DNA, 56 bp, Artificial
  Synthetic oligonucleotide
gatccggctgtttttctggtgtgttgacggcagcaaaaagcggtgcctcacgggtt

SEQ ID NO: 180395 - DNA, 55 bp, Artificial
  Synthetic oligonucleotide
aggaatacgtccagagatcaccctgcctaagctcacgcgaccgttagctgtcccg

SEQ ID NO: 180396 - DNA, 55 bp, Artificial
  Synthetic oligonucleotide
ggggatgagtcgccagatagcccctcaaacgcgctcaaaagctctcagacgcacg

SEQ ID NO: 180397 - DNA, 55 bp, Artificial
  Synthetic oligonucleotide
ggggatccgtcagccgccattaggcacgcttcgtaagttggcgggtatctatcgc

SEQ ID NO: 180398 - DNA, 55 bp, Artificial
  Synthetic oligonucleotide
ggggagtcaggcaactatggatgaacgaaatagacagatcgctgagataggtgcc

SEQ ID NO: 180399 - DNA, 55 bp, Artificial
  Synthetic oligonucleotide
ggggagtactggattcaacctctcgaaacaccccagactcgacaatcataaagtg

SEQ ID NO: 180400 - DNA, 55 bp, Artificial
  Synthetic oligonucleotide
ggggagggcatgtccactcgctgaatttattgctgggctccgctcaggctgcgag

SEQ ID NO: 180401 - DNA, 55 bp, Artificial
  Synthetic oligonucleotide
ggggagcgtcgctggcgagcatgtgtattaaatgatgagcctgtatgggcgcaaa

SEQ ID NO: 180402 - DNA, 54 bp, Artificial
  Synthetic oligonucleotide
ggggaattaaccgtggaacactacttaccagtaatggcggggcatacagcccca

SEQ ID NO: 180403 - DNA, 55 bp, Artificial
  Synthetic oligonucleotide
ggggaatagcgattgaagaaccgttctgcgcgggaataaaacagtacgcacagaa

SEQ ID NO: 180404 - DNA, 52 bp, Artificial
  Synthetic oligonucleotide
ggggaagtttgcttctttgaggtgcgagttttcgtttacggggtttagctga

SEQ ID NO: 180405 - DNA, 50 bp, Artificial
  Synthetic oligonucleotide
attaactttattagcgtaagaatatattctcgttttgtaaaaatttcttt

SEQ ID NO: 180406 - DNA, 55 bp, Artificial
  Synthetic oligonucleotide
ggggaacccatagcgctttgaagattactgtaggccgtggtgcaacttacggttg

SEQ ID NO: 180407 - DNA, 55 bp, Artificial
  Synthetic oligonucleotide
ggggaaatttacaatctctgtattcgacgcggtacgcttaccgaagaagatcgct

SEQ ID NO: 180408 - DNA, 52 bp, Artificial
  Synthetic oligonucleotide
ggggaaagtttcggacggtgcgtaaatgaaatattcgttgacttaacctgac

SEQ ID NO: 180409 - DNA, 55 bp, Artificial
  Synthetic oligonucleotide
ggggaaaggcagcacgaggtatctcccgtacactattgagtaaactcacatgact

SEQ ID NO: 180410 - DNA, 55 bp, Artificial
  Synthetic oligonucleotide
gggctttgggtggtcactgcggtagtcaccgtagtcattctgtatgttgccctgt

SEQ ID NO: 180411 - DNA, 55 bp, Artificial
  Synthetic oligonucleotide
gggcttgtacgaagatcgcatggagcagttggatcgctacagcgtatcggatgtg

SEQ ID NO: 180412 - DNA, 53 bp, Artificial
  Synthetic oligonucleotide
gggcttgcggaatatacccttaatacgggttttcgggctggaccgctggtgaa

SEQ ID NO: 180413 - DNA, 55 bp, Artificial
  Synthetic oligonucleotide
gggcttatcagcgaggaaattcccgatgggacttattacacgtactacgtgcctg

SEQ ID NO: 180414 - DNA, 55 bp, Artificial
  Synthetic oligonucleotide
gggcttaccgtatttctcgatatagccacgggtcgcttcaaaatagctaaaggtg

SEQ ID NO: 180415 - DNA, 55 bp, Artificial
  Synthetic oligonucleotide
gggcaatactatcgggcaattttgagcagtgagtggggaagtactcacctacagc

SEQ ID NO: 180416 - DNA, 60 bp, Artificial
  Synthetic oligonucleotide
gatccgactctatgacgactcgtcatagagtccccggcgagtcgtcatggagtcggtaac

SEQ ID NO: 180417 - DNA, 55 bp, Artificial
  Synthetic oligonucleotide
gggcaacagataccagtcctactaagagtgttttacgcaattgcatgggaatacc

SEQ ID NO: 180418 - DNA, 55 bp, Artificial
  Synthetic oligonucleotide
gggcaaatcgataatagtcagtccctacaggcgaccacgctgattggacatggcg

SEQ ID NO: 180419 - DNA, 55 bp, Artificial
  Synthetic oligonucleotide
gggatttacaatgtcggatctgattgcctacaaatccaatgcactggttgaggcc

SEQ ID NO: 180420 - DNA, 55 bp, Artificial
  Synthetic oligonucleotide
gggatgttggagagcagcccgccgaagccaatcggcagcagcaacaacggctcga

SEQ ID NO: 180421 - DNA, 55 bp, Artificial
  Synthetic oligonucleotide
gggatctcaccggagtaatggcgggaacctggttactgaccgtgctattgagcgg

SEQ ID NO: 180422 - DNA, 55 bp, Artificial
  Synthetic oligonucleotide
gggatcggcgctatcaaaggcataggtgcaggacctattgaagcaattatcgcgg

SEQ ID NO: 180423 - DNA, 55 bp, Artificial
  Synthetic oligonucleotide
gggatatgcctcgtttggtgactggcgtagtttcgatggttttcgccataccgtg

SEQ ID NO: 180424 - DNA, 55 bp, Artificial
  Synthetic oligonucleotide
gggataaagagcatcgtgtaactaatatccttaaggtgaccagtggatctacacc

SEQ ID NO: 180425 - DNA, 55 bp, Artificial
  Synthetic oligonucleotide
gggagttgttacccctcatgcaagatattatgcagttcgcaggcaatcacaccat

SEQ ID NO: 180426 - DNA, 55 bp, Artificial
  Synthetic oligonucleotide
gggagtgtctttagacactgtttattctcaccaagcttggagatctactagtact

SEQ ID NO: 180427 - DNA, 60 bp, Artificial
  Synthetic oligonucleotide
gatccctgattcgcagaacgagattgtagccgagcaggctactggctccgaacaaatggt

SEQ ID NO: 180428 - DNA, 55 bp, Artificial
  Synthetic oligonucleotide
gggagtgcgtcaacactccccaacatttcgaatgtgtcacctcagcggcaaactc

SEQ ID NO: 180429 - DNA, 55 bp, Artificial
  Synthetic oligonucleotide
gggagtcggcccgaaaagagtggcagcttgaccatatctataaaacggcgcggcc

SEQ ID NO: 180430 - DNA, 55 bp, Artificial
  Synthetic oligonucleotide
gggaggcttaacgatacagaggagtgagagtgttacccattacaggcgcggcacg

SEQ ID NO: 180431 - DNA, 55 bp, Artificial
  Synthetic oligonucleotide
gggactgctggctgagcctctgatggagctgctcaacaaaactatgccctggcac

SEQ ID NO: 180432 - DNA, 55 bp, Artificial
  Synthetic oligonucleotide
gggactatgcggtgaaatctctcctgcaaaaccaccaataataggccccgctatt

SEQ ID NO: 180433 - DNA, 55 bp, Artificial
  Synthetic oligonucleotide
gggacggcacgttcaagcctgcatacagcaataatccggcgtggtgtctctggga

SEQ ID NO: 180434 - DNA, 55 bp, Artificial
  Synthetic oligonucleotide
gggacccaagcctggctcgcggaatgttgataccacgggttatacgatgaacggc

SEQ ID NO: 180435 - DNA, 55 bp, Artificial
  Synthetic oligonucleotide
gggacactatttagaatcgccgccatgaaaacagagaatcccggcgtacaatttg

SEQ ID NO: 180436 - DNA, 55 bp, Artificial
  Synthetic oligonucleotide
gggaatttatgccatgtcgttccgagtccatttatcgcttggctagaaacgcacc

SEQ ID NO: 180437 - DNA, 55 bp, Artificial
  Synthetic oligonucleotide
aggcaaccgacactctgcgcctcttaagcgagcgacaaccgtgaggttggcgacg

SEQ ID NO: 180438 - DNA, 56 bp, Artificial
  Synthetic oligonucleotide
gccaccaacgcttcgaatgaacggctccataccgcggtcacggtcataaacaaaaa

SEQ ID NO: 180439 - DNA, 52 bp, Artificial
  Synthetic oligonucleotide
attaatataaatggtacaatatttaaagaaaatcaaactaagacctttagaa

SEQ ID NO: 180440 - DNA, 55 bp, Artificial
  Synthetic oligonucleotide
aggcaagggctttaccggagcgtctcttcagtgcgcctggcgtgcgtagtgtgct

SEQ ID NO: 180441 - DNA, 55 bp, Artificial
  Synthetic oligonucleotide
gggcgcatagctgaacgtcattccctgggtcgcgtcatcccacaaaatggcgcgc

SEQ ID NO: 180442 - DNA, 55 bp, Artificial
  Synthetic oligonucleotide
gggcgaactatccatgtttgattgggagccagcataccatcaacgtcaagctaca

SEQ ID NO: 180443 - DNA, 55 bp, Artificial
  Synthetic oligonucleotide
gggccgttacgccatgtacagttcctacaagcgattccagataatgagcccatac

SEQ ID NO: 180444 - DNA, 55 bp, Artificial
  Synthetic oligonucleotide
gggccggtacatactgccctaaactacacagaaacgcaccgtaattattcagtac

SEQ ID NO: 180445 - DNA, 55 bp, Artificial
  Synthetic oligonucleotide
gggccgggagcgtccagattcagacggcaatacgtttgcttatattaacggcatt

SEQ ID NO: 180446 - DNA, 55 bp, Artificial
  Synthetic oligonucleotide
gggccgccgtaggttggcaccattcccttagttggatgcgcaatccacatgaaga

SEQ ID NO: 180447 - DNA, 55 bp, Artificial
  Synthetic oligonucleotide
gggccacggctgatttagtagacctcgttaagcaacggattgaattgacggacgg

SEQ ID NO: 180448 - DNA, 55 bp, Artificial
  Synthetic oligonucleotide
gggccacggccttatccgtgcttatgaacattctatcgttcgatactcatgcgcg

SEQ ID NO: 180449 - DNA, 55 bp, Artificial
  Synthetic oligonucleotide
gggccaaccgtgcatataggcagtgagggcgtaaatacgctaaccatgatgctgg

SEQ ID NO: 180450 - DNA, 60 bp, Artificial
  Synthetic oligonucleotide
attacactttaggtgcaactgaaacagcgcttactgcatatgtcgctgcttatggggttg

SEQ ID NO: 180451 - DNA, 55 bp, Artificial
  Synthetic oligonucleotide
gggcattgtagataatggattgtagtgtagcgctgtattaaggtgatccggtgca

SEQ ID NO: 180452 - DNA, 55 bp, Artificial
  Synthetic oligonucleotide
gggcattaactcattgtcgaatctgcaccagtatcactaggttgttgagcgggcg

SEQ ID NO: 180453 - DNA, 55 bp, Artificial
  Synthetic oligonucleotide
gggcatgatttactggagccgccactcggacaaacatcaggagcgtaaacatcac

SEQ ID NO: 180454 - DNA, 55 bp, Artificial
  Synthetic oligonucleotide
gggcagctccggcagactggtcagtgacgtgttagagatattcagactccgcagt

SEQ ID NO: 180455 - DNA, 55 bp, Artificial
  Synthetic oligonucleotide
aggcaggataacaaaagccggtgattcgtatctgcgaacgcttctggtacagggg

SEQ ID NO: 180456 - DNA, 55 bp, Artificial
  Synthetic oligonucleotide
gggcacgagtgacacgaagggtgcgcatggcgagtaaacgcttatgccagtgcgg

SEQ ID NO: 180457 - DNA, 55 bp, Artificial
  Synthetic oligonucleotide
gggcaccaatcattaatgtagccacataggactgacgccgggtgacaacttcgac

SEQ ID NO: 180458 - DNA, 55 bp, Artificial
  Synthetic oligonucleotide
gggcacatcgatccatggggaaatagcggcggtacgctcaaagggaacctgccgc

SEQ ID NO: 180459 - DNA, 55 bp, Artificial
  Synthetic oligonucleotide
gggcacaacgaaacttgcttaccattgcgatcagctctgctgaatctccgacctt

SEQ ID NO: 180460 - DNA, 55 bp, Artificial
  Synthetic oligonucleotide
aggcccaggcagttagcaacctacccaggccttttcctcacaatcaccgttggca

SEQ ID NO: 180461 - DNA, 59 bp, Artificial
  Synthetic oligonucleotide
gatccacagcaattttttaaacgtgccaacagcaaatcaccagagcggggaggcgcaaa

SEQ ID NO: 180462 - DNA, 55 bp, Artificial
  Synthetic oligonucleotide
ggattatctgtccctgaaggagacagaaccgcagtggaatatgttactcaggggc

SEQ ID NO: 180463 - DNA, 53 bp, Artificial
  Synthetic oligonucleotide
ggattataccttgtacagcggttaaggttaacccgcgattggcacctttaatc

SEQ ID NO: 180464 - DNA, 55 bp, Artificial
  Synthetic oligonucleotide
ggatgtgagccgccagccatcaaccttgtcccttccgggtgccacaaccactagc

SEQ ID NO: 180465 - DNA, 55 bp, Artificial
  Synthetic oligonucleotide
ggatgtaaaccgggatcgtactccagaaaagcgtccatagcgccctgccccagcg

SEQ ID NO: 180466 - DNA, 55 bp, Artificial
  Synthetic oligonucleotide
ggatgggcacatccaagtactgattgcttgttatcatcaacaatgggtacagttg

SEQ ID NO: 180467 - DNA, 55 bp, Artificial
  Synthetic oligonucleotide
ggatggactcattggctttcctgaagtagtcagtgtgcggaagtggatttccgtg

SEQ ID NO: 180468 - DNA, 55 bp, Artificial
  Synthetic oligonucleotide
ggatggacggacatactgtcttttgaatgggatgtatctcagccagcccttgcac

SEQ ID NO: 180469 - DNA, 55 bp, Artificial
  Synthetic oligonucleotide
ggatggacaatggctaacagattacgactctgaagaaagctgctaccgaccataa

SEQ ID NO: 180470 - DNA, 55 bp, Artificial
  Synthetic oligonucleotide
ggatgcgcttagtcggctattgacgcttaacgcccctcagggctcaatcgacaag

SEQ ID NO: 180471 - DNA, 55 bp, Artificial
  Synthetic oligonucleotide
ggatgccggtaaaatgtagtacaaccacaaattcaccagacttatatcgcggggt

SEQ ID NO: 180472 - DNA, 60 bp, Artificial
  Synthetic oligonucleotide
gatcagcaatctatcacgcacaccagaaacaggcaagaatgtgatgtcgctacatttcag

SEQ ID NO: 180473 - DNA, 55 bp, Artificial
  Synthetic oligonucleotide
ggatgagatccttaacgggcgtctaatacagggtccggtcataacgaaatctccg

SEQ ID NO: 180474 - DNA, 55 bp, Artificial
  Synthetic oligonucleotide
ggatctggactcctatgctgatttcgcaatgtcagtggtacgcagattgccaggc

SEQ ID NO: 180475 - DNA, 55 bp, Artificial
  Synthetic oligonucleotide
ggatcgcattctgaccgaaggtcgtaccgttattcgtagcgatacccaacgcgag

SEQ ID NO: 180476 - DNA, 55 bp, Artificial
  Synthetic oligonucleotide
ggatcgcaaccacgaagtaccactaataatgcgcgtagcgatgagaaatagcgcg

SEQ ID NO: 180477 - DNA, 55 bp, Artificial
  Synthetic oligonucleotide
agtaccgacgactgcagcgggctggactcattactgacctggccgttaaacgggt

SEQ ID NO: 180478 - DNA, 55 bp, Artificial
  Synthetic oligonucleotide
ggatcgacctgggtatgcccaatctctaccagactgctactacccgcatgaagca

SEQ ID NO: 180479 - DNA, 55 bp, Artificial
  Synthetic oligonucleotide
ggatcctgctgttgtagtacagtaaggcggcaagtatgcaaggatgcgaccgtgt

SEQ ID NO: 180480 - DNA, 55 bp, Artificial
  Synthetic oligonucleotide
agtaccgctaaagctcgcacagctgcgtgaacgctgggagcgttacgtggtactc

SEQ ID NO: 180481 - DNA, 55 bp, Artificial
  Synthetic oligonucleotide
agtacctgggctgcgcctaaggtttgtcgtgcgcctatatcacgcaacaccagcc

SEQ ID NO: 180482 - DNA, 55 bp, Artificial
  Synthetic oligonucleotide
ggcaattatctaaacgtaacacttgacaagcctgtgaggaaaagcgtatttgcgc

SEQ ID NO: 180483 - DNA, 60 bp, Artificial
  Synthetic oligonucleotide
gggaggaatatcaggctgaaaggagcattttatgagcaatcttttacagacgggcgcgga

SEQ ID NO: 180484 - DNA, 55 bp, Artificial
  Synthetic oligonucleotide
aggtgtcagccgcagagatgcactcaggcaggctaaacgtgatgcgggcatacct

SEQ ID NO: 180485 - DNA, 55 bp, Artificial
  Synthetic oligonucleotide
ggcaatatgctcaggcaaatcgcacatgctgagagcgggctgtcacaggttcgtc

SEQ ID NO: 180486 - DNA, 55 bp, Artificial
  Synthetic oligonucleotide
ggcaatacagcgacgttaatgtcgttgcggtgcatcacgccttactgaccagtgg

SEQ ID NO: 180487 - DNA, 55 bp, Artificial
  Synthetic oligonucleotide
ggcaagcttacgcttaagtagccagtattcatcttctctttatcaacttatcagg

SEQ ID NO: 180488 - DNA, 55 bp, Artificial
  Synthetic oligonucleotide
ggcaagattccagtgccgcattaacgcgatcgctgagctcctacattgactcgcc

SEQ ID NO: 180489 - DNA, 55 bp, Artificial
  Synthetic oligonucleotide
ggcaagatcctggtatcggtctgcgattccgactcgtccaacatcaatacaacct

SEQ ID NO: 180490 - DNA, 55 bp, Artificial
  Synthetic oligonucleotide
ggcaaccgtgcgacgcagccggaatatgatgaatatgatccgctgttaaacggct

SEQ ID NO: 180491 - DNA, 55 bp, Artificial
  Synthetic oligonucleotide
agtaaactttgacgaccaatacgcgcttgctcactccaattccatgcgctttctc

SEQ ID NO: 180492 - DNA, 55 bp, Artificial
  Synthetic oligonucleotide
ggcaaaatattcacccaacgcattgagcgtaataatctgacgctacgcacccgca

SEQ ID NO: 180493 - DNA, 55 bp, Artificial
  Synthetic oligonucleotide
ggattttcacgatctggcctttcgcgcctgtatcctgcgccctagcctgaccggt

SEQ ID NO: 180494 - DNA, 60 bp, Artificial
  Synthetic oligonucleotide
gggactgactggtacagacatgacatcaggttatgagcagcgttcgttcctcactcccgg

SEQ ID NO: 180495 - DNA, 55 bp, Artificial
  Synthetic oligonucleotide
ggattttatcggcgtggtcttctgaccacagcttaaggcaactggtgtgccatgc

SEQ ID NO: 180496 - DNA, 55 bp, Artificial
  Synthetic oligonucleotide
ggatttctgcataagtaagatagccctgttcttttccgtgagagacaagtatttt

SEQ ID NO: 180497 - DNA, 55 bp, Artificial
  Synthetic oligonucleotide
ggatttcccgacttaaatggcgctgtaaggcattaatatccagtgaaaccggcgc

SEQ ID NO: 180498 - DNA, 55 bp, Artificial
  Synthetic oligonucleotide
ggattggcgagccgtattgccccgtttcttcgttatggctggccccgatggaacc

SEQ ID NO: 180499 - DNA, 55 bp, Artificial
  Synthetic oligonucleotide
ggattgaaccgttagcatagggtaacgcacaggttaccagtagtttattcgcgac

SEQ ID NO: 180500 - DNA, 54 bp, Artificial
  Synthetic oligonucleotide
ggattcgactaccctttctggccgcgaggacgctaacttttatctaagaaggat

SEQ ID NO: 180501 - DNA, 54 bp, Artificial
  Synthetic oligonucleotide
ggattcaggtaaacggcgttacaaacgcgcccctgagaaggataaatcggatta

SEQ ID NO: 180502 - DNA, 55 bp, Artificial
  Synthetic oligonucleotide
ggattcaccatgtctgtaattaagatgaccgatttagatctggcgggtaagcgag

SEQ ID NO: 180503 - DNA, 55 bp, Artificial
  Synthetic oligonucleotide
ggattatcttggtgttctggaaggtctggaaataccttgctgtcatgaggatggg

SEQ ID NO: 180504 - DNA, 55 bp, Artificial
  Synthetic oligonucleotide
ggaggatcgtttgttgtgagtgaccggtgatcgtattgcgtataagctgggatct

SEQ ID NO: 180505 - DNA, 56 bp, Artificial
  Synthetic oligonucleotide
gggacgcaccgctagcagcgcccctagcggtatcctataaaaaaacacaccgcgcc

SEQ ID NO: 180506 - DNA, 55 bp, Artificial
  Synthetic oligonucleotide
ggagcttatcctgatgggccaataggaggagcagccctaaccctatggatcagca

SEQ ID NO: 180507 - DNA, 55 bp, Artificial
  Synthetic oligonucleotide
ggagctggaccatattgctcctaactgaagttgtgttccccaagtgctgttcggg

SEQ ID NO: 180508 - DNA, 55 bp, Artificial
  Synthetic oligonucleotide
ggagctatcaaaggagttcttgaagtggatgccagactgcggctacactgaaagg

SEQ ID NO: 180509 - DNA, 55 bp, Artificial
  Synthetic oligonucleotide
ggagctacgtgtctatggtctcgccaaccttacctggctgcccgcaccacgttcc

SEQ ID NO: 180510 - DNA, 55 bp, Artificial
  Synthetic oligonucleotide
ggagcgtccgccagcgcacgtaacaaacccgcgacattaagcaccggtctggtga

SEQ ID NO: 180511 - DNA, 55 bp, Artificial
  Synthetic oligonucleotide
ggagcggactacttgcgccatcctcggttgcccggcagtgatatactcgtcaagc

SEQ ID NO: 180512 - DNA, 55 bp, Artificial
  Synthetic oligonucleotide
ggagcgatggcgattccggtttgttagcgtcgtgaaacctaaggacaccatttgg

SEQ ID NO: 180513 - DNA, 55 bp, Artificial
  Synthetic oligonucleotide
ggagcctggcacaacagctccgatatccgcatgaaaacggatatcacacaaattg

SEQ ID NO: 180514 - DNA, 55 bp, Artificial
  Synthetic oligonucleotide
ggagcagtttctaaacgaattttcaattggacggaatacgctgagttcaatagag

SEQ ID NO: 180515 - DNA, 55 bp, Artificial
  Synthetic oligonucleotide
ggagcagtatcagtatcgccgacccggagggcgggcgtaatctcaggctgaaagg

SEQ ID NO: 180516 - DNA, 54 bp, Artificial
  Synthetic oligonucleotide
gggacgaaccagttacacgggctaatccgctcattcgaaggtatgcccgttact

SEQ ID NO: 180517 - DNA, 55 bp, Artificial
  Synthetic oligonucleotide
ggagcaggctggcattcagtcagacgttgccttgtggatgtactggcttgcggcg

SEQ ID NO: 180518 - DNA, 55 bp, Artificial
  Synthetic oligonucleotide
ggagattgcgtatcatacgaaaatggttcgtagaggagctccaatggcttggttg

SEQ ID NO: 180519 - DNA, 55 bp, Artificial
  Synthetic oligonucleotide
ggagattactctgcgcaaacttcctctggcggttgccgtcgcagcgggcgtaatg

SEQ ID NO: 180520 - DNA, 55 bp, Artificial
  Synthetic oligonucleotide
ggagagcatgccggtttctttatccctgacgggtttaccctgcgtcgttatcatg

SEQ ID NO: 180521 - DNA, 55 bp, Artificial
  Synthetic oligonucleotide
ggagagcatatcgatcttagtctgccccacatggaggggaatcttgcctgtcacc

SEQ ID NO: 180522 - DNA, 55 bp, Artificial
  Synthetic oligonucleotide
agtatcgacatccagccacaccacatagctgtaacgcgagccgtcacgggagacg

SEQ ID NO: 180523 - DNA, 55 bp, Artificial
  Synthetic oligonucleotide
ggactttaatattcacttctggcggcgttcttattaaccgtggaagtgcgtccag

SEQ ID NO: 180524 - DNA, 53 bp, Artificial
  Synthetic oligonucleotide
ggactgggttgagcgaggggaacgttatcccttcccaccggtatcaattcgtg

SEQ ID NO: 180525 - DNA, 55 bp, Artificial
  Synthetic oligonucleotide
ggactggcggggttatgcggtaatgccctacgccacggtatatcgctataaccgc

SEQ ID NO: 180526 - DNA, 55 bp, Artificial
  Synthetic oligonucleotide
ggactgcataatgacgcgttgagtaaacgtcttgaggcgagttttcatcagttcg

SEQ ID NO: 180527 - DNA, 58 bp, Artificial
  Synthetic oligonucleotide
aggcgagtaatagttcatttcccatactgaagatcgtaatagtacgatcggtgaacac

SEQ ID NO: 180528 - DNA, 55 bp, Artificial
  Synthetic oligonucleotide
ggatagcgtatgcgtactgaatattgcgggcagttgaatctgtcccacgtgggcc

SEQ ID NO: 180529 - DNA, 55 bp, Artificial
  Synthetic oligonucleotide
ggataccgtcttatggagcaaaacccgcagtcacagctgaagctacttgttacga

SEQ ID NO: 180530 - DNA, 55 bp, Artificial
  Synthetic oligonucleotide
ggataccgtcgaatatggcgaatggtgtaccggtgtacgtattgaggggctcacc

SEQ ID NO: 180531 - DNA, 55 bp, Artificial
  Synthetic oligonucleotide
ggataataatcgagctaagatgaatgtcgagttcgactcatggatttgcaccaga

SEQ ID NO: 180532 - DNA, 55 bp, Artificial
  Synthetic oligonucleotide
ggataaggtggttaactgccgtactgacgaccgtatgattgatgagattatgcgt

SEQ ID NO: 180533 - DNA, 55 bp, Artificial
  Synthetic oligonucleotide
ggataacgccgcaattttaccattcaggaggcctaatgagccacgtagacgacgg

SEQ ID NO: 180534 - DNA, 55 bp, Artificial
  Synthetic oligonucleotide
ggagtttctactaccacgcgacataatagatcgcctcgacttctactttgtactg

SEQ ID NO: 180535 - DNA, 55 bp, Artificial
  Synthetic oligonucleotide
ggagttgcatctacccgctgagctacgcgctatctgcgacctcagcacgctaaag

SEQ ID NO: 180536 - DNA, 54 bp, Artificial
  Synthetic oligonucleotide
ggagttatcgacacatccggaaaacctgtcgttgtagcccaggacaaacttaaa

SEQ ID NO: 180537 - DNA, 55 bp, Artificial
  Synthetic oligonucleotide
ggagttataaaagcttagcgagcaacctatcagagtcacgaagatcgttaacccc

SEQ ID NO: 180538 - DNA, 60 bp, Artificial
  Synthetic oligonucleotide
aggcgcctgtagtgccatttacccccattcactgccagagccgtgagcgcagcgaactga

SEQ ID NO: 180539 - DNA, 55 bp, Artificial
  Synthetic oligonucleotide
ggagttaggtatacagatttcaggagttaggtatacagatttcagggtggataac

SEQ ID NO: 180540 - DNA, 55 bp, Artificial
  Synthetic oligonucleotide
ggagtgttttcagacgatgtagattcgtcatagtatccctcgcaacaatgtggtt

SEQ ID NO: 180541 - DNA, 55 bp, Artificial
  Synthetic oligonucleotide
ggagtgtgaacacgctggcgataatgctggtagtccgtatcatccgtgcagaggg

SEQ ID NO: 180542 - DNA, 55 bp, Artificial
  Synthetic oligonucleotide
ggagtgatgttcaatgcgctaatatttcgcacacaagatctgtttatgcgttttc

SEQ ID NO: 180543 - DNA, 55 bp, Artificial
  Synthetic oligonucleotide
agtacgatatccacttcactggcgatggaatcggtcagtgttttcagtgcgatgt

SEQ ID NO: 180544 - DNA, 55 bp, Artificial
  Synthetic oligonucleotide
ggagtaacggcatggcgaagacaccgaagtcagccggcagcgagaagctgctgtt

SEQ ID NO: 180545 - DNA, 55 bp, Artificial
  Synthetic oligonucleotide
ggaggttgctgttttcacggcttacgaatccgagtaagtgcaacggcggggagtg

SEQ ID NO: 180546 - DNA, 55 bp, Artificial
  Synthetic oligonucleotide
ggaggttattcgtcgtctggccaactatgcccgtcagcgcggtgatatggtggtg

SEQ ID NO: 180547 - DNA, 55 bp, Artificial
  Synthetic oligonucleotide
ggagggtgcgggtaaaggactcacccatcagtcgatacttttcgtggacagaggc

SEQ ID NO: 180548 - DNA, 55 bp, Artificial
  Synthetic oligonucleotide
agtagaacccaggattaccgcgcccagtaccagtttagtagcttcataatcgtgc

SEQ ID NO: 180549 - DNA, 60 bp, Artificial
  Synthetic oligonucleotide
gccacatcgttcggccacggaataggggcacctactggatatgactcaggcggtggtaga

SEQ ID NO: 180550 - DNA, 55 bp, Artificial
  Synthetic oligonucleotide
aggcgcgttcgatacctttaccgatgtgagctttaacaagccctcggccgaagaa

SEQ ID NO: 180551 - DNA, 55 bp, Artificial
  Synthetic oligonucleotide
ggagggctatactacccgctctgtcccgttcagggacgcaggtattctccccggc

SEQ ID NO: 180552 - DNA, 55 bp, Artificial
  Synthetic oligonucleotide
ggcctgacttcctcagataaggccaggggaaatgtttaccttcacaccctgtggc

SEQ ID NO: 180553 - DNA, 55 bp, Artificial
  Synthetic oligonucleotide
ggcctctttggggacgatccagtatcgatctttattcggtagctatagtctgacc

SEQ ID NO: 180554 - DNA, 55 bp, Artificial
  Synthetic oligonucleotide
ggcctcacggccaaatgcgccaccagggagaaaccacttttgcccctcaggcaca

SEQ ID NO: 180555 - DNA, 55 bp, Artificial
  Synthetic oligonucleotide
ggcctatattattggcggggtcgcggcatatatcattatgcgcgcattggggaaa

SEQ ID NO: 180556 - DNA, 55 bp, Artificial
  Synthetic oligonucleotide
ggcctaatcatcccacaacttttcgtcggactccactctgtgacggaaataggcc

SEQ ID NO: 180557 - DNA, 55 bp, Artificial
  Synthetic oligonucleotide
ggccgttagctcggcaatcatcgtatcatccgtcaccggatcgttaccgataaac

SEQ ID NO: 180558 - DNA, 55 bp, Artificial
  Synthetic oligonucleotide
ggccgtcgtaccatgctccagcacgtacttctaccgttgcatccttcatctcgcg

SEQ ID NO: 180559 - DNA, 55 bp, Artificial
  Synthetic oligonucleotide
ggccgtcatttatgaggtggcagcgctttatcactcacgatggaaaatcgaggtc

SEQ ID NO: 180560 - DNA, 55 bp, Artificial
  Synthetic oligonucleotide
ggccggtaagaaactctatgatccgattttggatggcttgcgctctgcggttcgc

SEQ ID NO: 180561 - DNA, 60 bp, Artificial
  Synthetic oligonucleotide
aggcgctatcggcttcgattctcatacggatggcttgttgcatactttttgtagcccttc

SEQ ID NO: 180562 - DNA, 55 bp, Artificial
  Synthetic oligonucleotide
ggccgcgtcagtaacgaacaccctgtcagcgtcattgctaacaaacagagcggta

SEQ ID NO: 180563 - DNA, 53 bp, Artificial
  Synthetic oligonucleotide
ggccgaaatcggcaaaatcccttataaatcaaaagaatagcccgagatagggt

SEQ ID NO: 180564 - DNA, 55 bp, Artificial
  Synthetic oligonucleotide
ggccctcaatttggacacactcggcttatcggcaacggtaaccgctgaggggatc

SEQ ID NO: 180565 - DNA, 55 bp, Artificial
  Synthetic oligonucleotide
ggcccgcttattgccacaccgccagtacagcgcctagaacccgactcaaagagca

SEQ ID NO: 180566 - DNA, 55 bp, Artificial
  Synthetic oligonucleotide
ggcccatatccatcaatggacgcaggtcaatctatacgctaattgttttgcgctt

SEQ ID NO: 180567 - DNA, 55 bp, Artificial
  Synthetic oligonucleotide
ggcccagtctttcgactgagcctttcgttttatttgatgcctggcagttccctac

SEQ ID NO: 180568 - DNA, 55 bp, Artificial
  Synthetic oligonucleotide
ggcccagggtagactgaatgccggagagcggcagcttaagcgacgacatcatgcg

SEQ ID NO: 180569 - DNA, 55 bp, Artificial
  Synthetic oligonucleotide
ggcccaagaatatggcctaattgtgttactattttcatcgcatcgggagaggcga

SEQ ID NO: 180570 - DNA, 55 bp, Artificial
  Synthetic oligonucleotide
ggccatgccagtgtcacgaccacgcagaagtatgatcgccggggagatgagcgct

SEQ ID NO: 180571 - DNA, 55 bp, Artificial
  Synthetic oligonucleotide
ggccagttgcctcagtacatgactgaaggggctaatactccgtttatcgcgttga

SEQ ID NO: 180572 - DNA, 56 bp, Artificial
  Synthetic oligonucleotide
gggaatattaacgtcagcgggtaacgtcaacttaagatacaacgactgtctgaata

SEQ ID NO: 180573 - DNA, 55 bp, Artificial
  Synthetic oligonucleotide
ggccagcgtaatgccagccccttcttttctacaagctttcggatgttgcgaaagc

SEQ ID NO: 180574 - DNA, 55 bp, Artificial
  Synthetic oligonucleotide
ggcgattccagtaacgcgctgtcgcatcctgaatcgcgaatgggcgtaattccgg

SEQ ID NO: 180575 - DNA, 54 bp, Artificial
  Synthetic oligonucleotide
aggggcggggatctggggaaacgtggcaaccgggcttatcactggcctgcttac

SEQ ID NO: 180576 - DNA, 55 bp, Artificial
  Synthetic oligonucleotide
ggcgatgattgaaaagaccattggccggtcaggatgcacttccgaacattagcga

SEQ ID NO: 180577 - DNA, 53 bp, Artificial
  Synthetic oligonucleotide
ggcgatgaaacgtaaagctaacggagagttcgactcggttaacgccaaccaac

SEQ ID NO: 180578 - DNA, 55 bp, Artificial
  Synthetic oligonucleotide
ggcgatcgtacttacccatctcgaccattttcaccacgtgatcatacaacttcgg

SEQ ID NO: 180579 - DNA, 55 bp, Artificial
  Synthetic oligonucleotide
ggcgatcaggttataaaccgcaagatgggagaacgaatgcccagtgacccgcccc

SEQ ID NO: 180580 - DNA, 55 bp, Artificial
  Synthetic oligonucleotide
ggcgatatcgacactatcactgccggtgactttagctcagtagcggatttcactc

SEQ ID NO: 180581 - DNA, 55 bp, Artificial
  Synthetic oligonucleotide
ggcgagtagattagcaaatatccacgctttcgcgagttcaggttcctttgcacgc

SEQ ID NO: 180582 - DNA, 55 bp, Artificial
  Synthetic oligonucleotide
ggcgaggcttgatagcgagattgaagcgcattcacgcttcagatcagtggattcg

SEQ ID NO: 180583 - DNA, 60 bp, Artificial
  Synthetic oligonucleotide
gggaatatctgctattgtcgagtccaacaaacatgtcgcggcggctaaatgcgttgaatg

SEQ ID NO: 180584 - DNA, 55 bp, Artificial
  Synthetic oligonucleotide
aggggtaacgatagacgaccaacgtaagtagaggcgatgagtgagcaatctgtcg

SEQ ID NO: 180585 - DNA, 55 bp, Artificial
  Synthetic oligonucleotide
ggcgactgttgagggaaacgaaggcgagtccccggcttagaacgcttatggtctc

SEQ ID NO: 180586 - DNA, 55 bp, Artificial
  Synthetic oligonucleotide
ggcgacattttccacgcactccgtttccagaaatgcgtctgtggttcgcgtggca

SEQ ID NO: 180587 - DNA, 55 bp, Artificial
  Synthetic oligonucleotide
ggcgacacctacgttgatctggccgaaatggtcaaagactacgagcagaatggca

SEQ ID NO: 180588 - DNA, 55 bp, Artificial
  Synthetic oligonucleotide
ggcgaatcctgttatttccctcgccggcaaccgctatttacgctgtcgcctgccg

SEQ ID NO: 180589 - DNA, 55 bp, Artificial
  Synthetic oligonucleotide
ggcgaatatacggcgcctctcgtaactgtttcaggtaatcgctaaggcgcatccc

SEQ ID NO: 180590 - DNA, 55 bp, Artificial
  Synthetic oligonucleotide
ggcgaatataacgcataaccacaatacatccttgagtgagggccgataaaggcga

SEQ ID NO: 180591 - DNA, 55 bp, Artificial
  Synthetic oligonucleotide
ggcgaacggttacgcagtttgcaagataagttcgatctacgcgtagttcaggggc

SEQ ID NO: 180592 - DNA, 55 bp, Artificial
  Synthetic oligonucleotide
ggcgaaaaccgtagctattgtagtccgctactgactcggatgcaggttccaacgc

SEQ ID NO: 180593 - DNA, 53 bp, Artificial
  Synthetic oligonucleotide
ggcctttccagctaacgatttcgaaagaaccccagtttgcgccataaacggta

SEQ ID NO: 180594 - DNA, 60 bp, Artificial
  Synthetic oligonucleotide
ggcttcaccgtatagcggcgatttcagatcgcagcattggcgttttgcggggtgtcaacg

SEQ ID NO: 180595 - DNA, 55 bp, Artificial
  Synthetic oligonucleotide
ggcctgcgttccactatcgtctggacttggtacagtttcagcgtcctgcatggga

SEQ ID NO: 180596 - DNA, 55 bp, Artificial
  Synthetic oligonucleotide
ggcctgagcgtagacaatgaaacgtcgtacagcaccgatatgtttatggagatgc

SEQ ID NO: 180597 - DNA, 55 bp, Artificial
  Synthetic oligonucleotide
ggcagcagctttgaccacgttagcgtactcaatgtgggcacgcatacctcaggcc

SEQ ID NO: 180598 - DNA, 55 bp, Artificial
  Synthetic oligonucleotide
ggcagcactgcataattctcttactgtcatgccatccgtaagatgcttttctgtg

SEQ ID NO: 180599 - DNA, 55 bp, Artificial
  Synthetic oligonucleotide
ggcagcacctgatacggtcaggatgtcaggactgatgctcccggacggtacggca

SEQ ID NO: 180600 - DNA, 55 bp, Artificial
  Synthetic oligonucleotide
ggcagattaacttcccggagagaaactgtcgaaaacagacggtatgaacgccgta

SEQ ID NO: 180601 - DNA, 52 bp, Artificial
  Synthetic oligonucleotide
ggcagatccctggcttgttgtccacaaccgttaaaccttaaaagctttaaaa

SEQ ID NO: 180602 - DNA, 55 bp, Artificial
  Synthetic oligonucleotide
ggcagataagctgaccgacgacgcaggtgggaccgtggtcccagggagataacct

SEQ ID NO: 180603 - DNA, 55 bp, Artificial
  Synthetic oligonucleotide
ggcagagagttgttcttcaagaccggggatcgacgctttctgcgcacgccaggag

SEQ ID NO: 180604 - DNA, 55 bp, Artificial
  Synthetic oligonucleotide
ggcagacgaacctgaagtaacccggcagcatctggtagctggaggtaccgtcatg

SEQ ID NO: 180605 - DNA, 58 bp, Artificial
  Synthetic oligonucleotide
ggcttacccgatgtgttttctgctgaagtcagttcgcttaaatcgataccgtcttcca

SEQ ID NO: 180606 - DNA, 55 bp, Artificial
  Synthetic oligonucleotide
ggcactttagtcgacctaaaacggctgataatggctacgcgattgtgcgccagtt

SEQ ID NO: 180607 - DNA, 55 bp, Artificial
  Synthetic oligonucleotide
ggcacttcactaccggcgtaagaaaggggctgaacgtaagcgtgccaatcgtctt

SEQ ID NO: 180608 - DNA, 55 bp, Artificial
  Synthetic oligonucleotide
ggcactccagtccggccaggcattaaccggaaaagatggtatcttaacgccatta

SEQ ID NO: 180609 - DNA, 55 bp, Artificial
  Synthetic oligonucleotide
ggcactatgcgtaatgtcgctcacgctcacgtgtcgtgctgtctcggatacagcg

SEQ ID NO: 180610 - DNA, 52 bp, Artificial
  Synthetic oligonucleotide
ggcactactcaaccccacgattgaaaaccctacaaggaaagaacggacggta

SEQ ID NO: 180611 - DNA, 55 bp, Artificial
  Synthetic oligonucleotide
ggcacgttactgggcgatgtggtatccgttgaagcagcggaccatttccgtctgc

SEQ ID NO: 180612 - DNA, 53 bp, Artificial
  Synthetic oligonucleotide
ggcacggtaactacgaataatcgaaatctcggtacgtaatagtttaccgagta

SEQ ID NO: 180613 - DNA, 55 bp, Artificial
  Synthetic oligonucleotide
ggcacgggaagccagaccaggaatacccgtcccgccggcacaatttggcggtgcc

SEQ ID NO: 180614 - DNA, 55 bp, Artificial
  Synthetic oligonucleotide
aggtgagcactttgtcttttatcttgatggtgttcctaagcacctacaatcaaaa

SEQ ID NO: 180615 - DNA, 55 bp, Artificial
  Synthetic oligonucleotide
ggcacaccatcggaacgagacgggcgtattcagaccgtagattataacgagcagg

SEQ ID NO: 180616 - DNA, 60 bp, Artificial
  Synthetic oligonucleotide
ggctgtggaactcacacgggagctgcgttcagcctaccgcttgtcacctccttccattga

SEQ ID NO: 180617 - DNA, 55 bp, Artificial
  Synthetic oligonucleotide
ggcacaaggagggacactccaaatctgtcgttagccaggcggaaaatgctcagct

SEQ ID NO: 180618 - DNA, 55 bp, Artificial
  Synthetic oligonucleotide
ggcacaactcacttcgcttacctgatggtgaatcattatcgaatgaccaatgggt

SEQ ID NO: 180619 - DNA, 55 bp, Artificial
  Synthetic oligonucleotide
ggcaatttattgcgttgcatcggcatcacgttttaattagcgagtatagtcttcg

SEQ ID NO: 180620 - DNA, 55 bp, Artificial
  Synthetic oligonucleotide
ggccagccggaaaagcttctggcgcatccggggactcccgtcagtataatcagtg

SEQ ID NO: 180621 - DNA, 55 bp, Artificial
  Synthetic oligonucleotide
ggccagcaggtcgccggtctgcttgtccttttggtctttcatatcagtcaccgag

SEQ ID NO: 180622 - DNA, 55 bp, Artificial
  Synthetic oligonucleotide
ggccagagtaatgatgagcggagtacatatggttatgtgttccttatcgatgtaa

SEQ ID NO: 180623 - DNA, 55 bp, Artificial
  Synthetic oligonucleotide
ggccactgctttatgccaagttgagccgcccgattagcatatctggatacaacgg

SEQ ID NO: 180624 - DNA, 52 bp, Artificial
  Synthetic oligonucleotide
aggtaaccaccggtgtggttaacagctacgcgacttacgaaattacttacca

SEQ ID NO: 180625 - DNA, 55 bp, Artificial
  Synthetic oligonucleotide
ggcatttaaccctttaatcgccaggacatggggtcattctggtcaggtaccgtgg

SEQ ID NO: 180626 - DNA, 55 bp, Artificial
  Synthetic oligonucleotide
ggcatttaaacgggtttgatgtgagtaataacacgcaactcggcctgacattcac

SEQ ID NO: 180627 - DNA, 53 bp, Artificial
  Synthetic oligonucleotide
ggctggggcgaaactgctatctgttcgaaaagggccgtaaatgggcttaccgg

SEQ ID NO: 180628 - DNA, 55 bp, Artificial
  Synthetic oligonucleotide
ggcattcatcataggtatcatcatcaatttcgatatcagggtccattcctcctgg

SEQ ID NO: 180629 - DNA, 55 bp, Artificial
  Synthetic oligonucleotide
ggcattacacacctcgattttaccggcccgcatcagatgttaagtctcgttccgg

SEQ ID NO: 180630 - DNA, 55 bp, Artificial
  Synthetic oligonucleotide
ggcatgagcgattatcccgcgagcttacacaggtaagtgattcgggtaagtcagc

SEQ ID NO: 180631 - DNA, 55 bp, Artificial
  Synthetic oligonucleotide
ggcatcctgaccgataaggtttctgtcacggttagtcatgaaagcgatgcggtac

SEQ ID NO: 180632 - DNA, 55 bp, Artificial
  Synthetic oligonucleotide
ggcatacgggcgcgactggcgtacccacaggctttcataacccggtttccacgta

SEQ ID NO: 180633 - DNA, 55 bp, Artificial
  Synthetic oligonucleotide
ggcagttaacgctattgagacgcgtcaggatggcgtccgctgtgtcatcgtcccg

SEQ ID NO: 180634 - DNA, 55 bp, Artificial
  Synthetic oligonucleotide
aggtatccggtaagcggcagggtcggaacaggagagcgcacgagggagcttccag

SEQ ID NO: 180635 - DNA, 55 bp, Artificial
  Synthetic oligonucleotide
aggtcagatgaaaagagaggctaatgatgagaagaatataccgaaggataatcgg

SEQ ID NO: 180636 - DNA, 55 bp, Artificial
  Synthetic oligonucleotide
ggcagtcttatacgacacgcgacatacccctaaaggggcaggagagtatcagcgt

SEQ ID NO: 180637 - DNA, 54 bp, Artificial
  Synthetic oligonucleotide
ggcagtagagtacggtacgcaaagaaaaccagctacgtaaagaaaacctgccac

SEQ ID NO: 180638 - DNA, 60 bp, Artificial
  Synthetic oligonucleotide
aggcgtcaagtttgtcagtctggccataacgttctccagtcagaataaatcagcacagtc

SEQ ID NO: 180639 - DNA, 55 bp, Artificial
  Synthetic oligonucleotide
ggcagcgttcttcacgtaacccacaagtctccatccaatccacacggcaacccat

SEQ ID NO: 180640 - DNA, 55 bp, Artificial
  Synthetic oligonucleotide
ggcagcgacttagttgaatgaaatagccatgtattgcgttgaaacctacttgcag

SEQ ID NO: 180641 - DNA, 55 bp, Artificial
  Synthetic oligonucleotide
ggcagcgacaatgtaatcggatgcaataaacccggctctaacatctgtaacgcgc

SEQ ID NO: 180642 - DNA, 55 bp, Artificial
  Synthetic oligonucleotide
atctcctcttctttacgtctgtcagctcttgacgccgaagtttactcaggcgatc

SEQ ID NO: 180643 - DNA, 55 bp, Artificial
  Synthetic oligonucleotide
gcatcaacgcggaaccgacattcaccgcaggaaaacacggtatccaaatcggtgc

SEQ ID NO: 180644 - DNA, 55 bp, Artificial
  Synthetic oligonucleotide
gcatattgcgcgtatccgcatttaaaccgtcaatgttgaccgtacactcattctg

SEQ ID NO: 180645 - DNA, 55 bp, Artificial
  Synthetic oligonucleotide
gcatatccgaagccggccgccacaaggtaggttgccagccaccagtcgaaagagg

SEQ ID NO: 180646 - DNA, 55 bp, Artificial
  Synthetic oligonucleotide
gcatagcgccgtgaaaccgaggccagtacgccgtaggtagaggccacgcagttac

SEQ ID NO: 180647 - DNA, 55 bp, Artificial
  Synthetic oligonucleotide
gcatagcaaaggggagtaacttcttctgtcggattatcgtcattacggtgcacac

SEQ ID NO: 180648 - DNA, 55 bp, Artificial
  Synthetic oligonucleotide
gcatactgtcgtaagactggccatcgatacgcatgtcgttgcttaactgatagtc

SEQ ID NO: 180649 - DNA, 59 bp, Artificial
  Synthetic oligonucleotide
aggctacctggtgatgaacgggcagtcattttcatgttcccggtatcctcagcttgccc

SEQ ID NO: 180650 - DNA, 55 bp, Artificial
  Synthetic oligonucleotide
gcatacgccgtttaatgccacgggcgttatcacacagcttaataccgatgccaac

SEQ ID NO: 180651 - DNA, 55 bp, Artificial
  Synthetic oligonucleotide
atctctggtgcgcattttaaccccgcggtgaccttgggtctgtgggccggtggac

SEQ ID NO: 180652 - DNA, 55 bp, Artificial
  Synthetic oligonucleotide
gcagttttaccgccgacgcagtcgattcgctacagtaaaagctaagctgggcgga

SEQ ID NO: 180653 - DNA, 55 bp, Artificial
  Synthetic oligonucleotide
gcagtttggggagagcgaagtcaatttgttagcgatgctaatttgacgcaacttc

SEQ ID NO: 180654 - DNA, 55 bp, Artificial
  Synthetic oligonucleotide
gcagttaatgaaacataagcgtagcatggtggtatttaagcagtcaaaggcagcg

SEQ ID NO: 180655 - DNA, 55 bp, Artificial
  Synthetic oligonucleotide
gcagtggtggacgttgaccgatttcgcttcgctcacagatataaccactcctgtc

SEQ ID NO: 180656 - DNA, 55 bp, Artificial
  Synthetic oligonucleotide
gcagtggcaagtagttaccaggctcaaccttgtactgcatacgccagtatgcccc

SEQ ID NO: 180657 - DNA, 55 bp, Artificial
  Synthetic oligonucleotide
gcagtggatagtaaattcctgatcgtgagcttccccacgcacctgcactaccagg

SEQ ID NO: 180658 - DNA, 55 bp, Artificial
  Synthetic oligonucleotide
gcagtcgccaaaatcacctacgtgggaattgaagccggaatacaacccgtctccg

SEQ ID NO: 180659 - DNA, 55 bp, Artificial
  Synthetic oligonucleotide
atctgagccagtcgccggaagtatccgggacgcaggaaggggcgattcgtatgcc

SEQ ID NO: 180660 - DNA, 52 bp, Artificial
  Synthetic oligonucleotide
gccaatgttacctcctgataacgccgtgacgggcgggaaattgtttcccggt

SEQ ID NO: 180661 - DNA, 60 bp, Artificial
  Synthetic oligonucleotide
ggctgacacacctgtacaggatgcgtgatgcgcagttgtggagccacatcgaatttcacc

SEQ ID NO: 180662 - DNA, 55 bp, Artificial
  Synthetic oligonucleotide
gcagtcagcgctaagctccctgaaagcatcagaacggccgccagaggcgttagcc

SEQ ID NO: 180663 - DNA, 55 bp, Artificial
  Synthetic oligonucleotide
gcagtcacagtatggtcatttcttaactcatgcgcatcggacaataccagcttag

SEQ ID NO: 180664 - DNA, 55 bp, Artificial
  Synthetic oligonucleotide
gcaggttgatagggcgatcgccggttttggtatcttctgacgggtagtatcgctc

SEQ ID NO: 180665 - DNA, 55 bp, Artificial
  Synthetic oligonucleotide
gcattttagaatgccatattcttcaagcgtccaaacggcacgactagctcgcgtg

SEQ ID NO: 180666 - DNA, 55 bp, Artificial
  Synthetic oligonucleotide
gcatttgattgagatatatgtaattccgcgggatttcgcaagcaccaagcgatgc

SEQ ID NO: 180667 - DNA, 55 bp, Artificial
  Synthetic oligonucleotide
gcattgtttgattctcagtctatgacttctaaccctgttattgcaattgtcagca

SEQ ID NO: 180668 - DNA, 55 bp, Artificial
  Synthetic oligonucleotide
gcattgtcgtcacagccagtatcaaaagcgacctggaagactctctacgcgaagg

SEQ ID NO: 180669 - DNA, 55 bp, Artificial
  Synthetic oligonucleotide
gcattgggaaagtgagacaaggccgtagagcgacaataaagcagtaacttaggcg

SEQ ID NO: 180670 - DNA, 55 bp, Artificial
  Synthetic oligonucleotide
gcattggcgaaatctctacaccgggtaggctgaagccgattaggttaatagcaac

SEQ ID NO: 180671 - DNA, 55 bp, Artificial
  Synthetic oligonucleotide
gcattccgatggttttcttgcccgatccgatgaatctcacctcattagagagtaa

SEQ ID NO: 180672 - DNA, 57 bp, Artificial
  Synthetic oligonucleotide
aggctcctaggccaccgtagctaaacatacgagaaaaaccgcttcttgagcgctctc

SEQ ID NO: 180673 - DNA, 55 bp, Artificial
  Synthetic oligonucleotide
gcattatcaggtgaaactaacgccaatttgagatgatcgggagccggttagggca

SEQ ID NO: 180674 - DNA, 55 bp, Artificial
  Synthetic oligonucleotide
atcgtcgtgtctgtcatattgtcctcgtcattattgtaatgtgtagggtattgag

SEQ ID NO: 180675 - DNA, 55 bp, Artificial
  Synthetic oligonucleotide
gcattaacagcacttacatgtttatgcgtgcgactgaaatctttggtcctatcgg

SEQ ID NO: 180676 - DNA, 55 bp, Artificial
  Synthetic oligonucleotide
atcgtctggggtccggcttatactgtgccgacacaagtgacgggagaacaacgga

SEQ ID NO: 180677 - DNA, 55 bp, Artificial
  Synthetic oligonucleotide
gcatggtaataaaagccaaccgatcatttcgtggtgaaatatcaagcgcgataac

SEQ ID NO: 180678 - DNA, 55 bp, Artificial
  Synthetic oligonucleotide
gcatggcagcgataccgccatacgagccagcgtcattggtgtgcccttgctggtc

SEQ ID NO: 180679 - DNA, 55 bp, Artificial
  Synthetic oligonucleotide
atctcagccagtgtattacctctaactaatgtagctctcattctactcattccac

SEQ ID NO: 180680 - DNA, 55 bp, Artificial
  Synthetic oligonucleotide
gcatgctccgctgtttaatcacctgcgcggtgcctatgatcgcctacggggtaag

SEQ ID NO: 180681 - DNA, 55 bp, Artificial
  Synthetic oligonucleotide
atctcatcaatcatacggtcgtcagtacggcagttaaccaccttatccagtgaag

SEQ ID NO: 180682 - DNA, 55 bp, Artificial
  Synthetic oligonucleotide
gcatgccagcccgccacttgcagcactatgccaccgctccatggtgccagaattg

SEQ ID NO: 180683 - DNA, 60 bp, Artificial
  Synthetic oligonucleotide
ggctatagacaacgatcgtatcagccggcacgtcggtcgctcatggattaccgaagctct

SEQ ID NO: 180684 - DNA, 55 bp, Artificial
  Synthetic oligonucleotide
gcatgcaagatataagacaacccctgaccgccataagaccgggacagggtgaatg

SEQ ID NO: 180685 - DNA, 55 bp, Artificial
  Synthetic oligonucleotide
gcatgacaggcgacgacaggtctgctccgcacgcggcgacttacagcgcagcata

SEQ ID NO: 180686 - DNA, 55 bp, Artificial
  Synthetic oligonucleotide
gcatctggctgcgacttcacgtggctctgctgacccagctacaccaagcgggtca

SEQ ID NO: 180687 - DNA, 55 bp, Artificial
  Synthetic oligonucleotide
gcatcctgtaccaatgcgtccacgtgattgtatctacaccgtccgcagttgcatc

SEQ ID NO: 180688 - DNA, 55 bp, Artificial
  Synthetic oligonucleotide
gcagcacgacatagccggttctcgcaaggacgagaatttccctgcggtgcccctc

SEQ ID NO: 180689 - DNA, 55 bp, Artificial
  Synthetic oligonucleotide
gcagcacaagtctatggtaacggactcacactgataagcaaataacgcgcaatgg

SEQ ID NO: 180690 - DNA, 55 bp, Artificial
  Synthetic oligonucleotide
gcagcaatcagctcgtccacatcgtgttgcgaaatacgcgccgggtttcccgcca

SEQ ID NO: 180691 - DNA, 55 bp, Artificial
  Synthetic oligonucleotide
gcagcaagtctttcggtaccacaacagcaggtacagtttgatgctcccggaatgc

SEQ ID NO: 180692 - DNA, 55 bp, Artificial
  Synthetic oligonucleotide
gcagatttgacgctggccagtataaaagataacagtccggcagacggtatcacgg

SEQ ID NO: 180693 - DNA, 55 bp, Artificial
  Synthetic oligonucleotide
gcagatacaggtgtcgagcatataggtcttgttcacaggttaaatcgtccttcgt

SEQ ID NO: 180694 - DNA, 60 bp, Artificial
  Synthetic oligonucleotide
aggctcggtatggcgcttgtgatgctgctagagcgcgatctgagcctgtactacgaccca

SEQ ID NO: 180695 - DNA, 55 bp, Artificial
  Synthetic oligonucleotide
gcagagcgtagcgcgtaaatcaatccacggctcataaaccggcgcagttaataaa

SEQ ID NO: 180696 - DNA, 55 bp, Artificial
  Synthetic oligonucleotide
gcagagaagtaagctagctcttggttcggagcggcttgaggctgtaagagtaatc

SEQ ID NO: 180697 - DNA, 55 bp, Artificial
  Synthetic oligonucleotide
gcagacgtccacggaactggtggaagacacggtcgccatcagtcactacggacgc

SEQ ID NO: 180698 - DNA, 55 bp, Artificial
  Synthetic oligonucleotide
gcagaatttgatccccatcgcacttttattcacggtaatcagaaatcacggtatg

SEQ ID NO: 180699 - DNA, 55 bp, Artificial
  Synthetic oligonucleotide
gcagaatttacatattcactgtcgtttgctcatgcaatagacataatccccgccc

SEQ ID NO: 180700 - DNA, 55 bp, Artificial
  Synthetic oligonucleotide
gcagaaagacgtaagcgagccgaaccgacggagtcgatcccggattcaaacggcg

SEQ ID NO: 180701 - DNA, 55 bp, Artificial
  Synthetic oligonucleotide
gcacttgttggttgttccggctcaaatgacgcggtaccggacaacccgccttctg

SEQ ID NO: 180702 - DNA, 55 bp, Artificial
  Synthetic oligonucleotide
gcacttaaataagtttgcactgtcgggttaagtaatgcttgacagtctgccgtgc

SEQ ID NO: 180703 - DNA, 55 bp, Artificial
  Synthetic oligonucleotide
gcactggcgaccgaacagggtttacaaacgcgctttcgccatacgctcacgtcgc

SEQ ID NO: 180704 - DNA, 55 bp, Artificial
  Synthetic oligonucleotide
gcactgatgcggggtgtcggggtgaagccctgaccaagtggtaatcgtatcggcg

SEQ ID NO: 180705 - DNA, 54 bp, Artificial
  Synthetic oligonucleotide
ggctaaattaaataaaccatctattgagccgggcaataactaattatggccggg

SEQ ID NO: 180706 - DNA, 55 bp, Artificial
  Synthetic oligonucleotide
gcactgatgcggcatagttaagcccgtatacactccgctgtcgctacttgactgg

SEQ ID NO: 180707 - DNA, 55 bp, Artificial
  Synthetic oligonucleotide
gcactgagatgctttccgttccggtagaaggagacgcagccgttaacgaaacggg

SEQ ID NO: 180708 - DNA, 55 bp, Artificial
  Synthetic oligonucleotide
gcactctgttcgataaaacacggaagtgggcttatcgcgctatccgtcagggctg

SEQ ID NO: 180709 - DNA, 55 bp, Artificial
  Synthetic oligonucleotide
gcactctcaggcgcagcagataaatcacggtggccggcagaattttaccggcgag

SEQ ID NO: 180710 - DNA, 54 bp, Artificial
  Synthetic oligonucleotide
atgaccgccctcattaagagtgattaaggtggttaaccacaaaccccgcagcgg

SEQ ID NO: 180711 - DNA, 55 bp, Artificial
  Synthetic oligonucleotide
gcaggtctcctgctatctatgctgaacgggaaggtaatgggtcgcctgtgagact

SEQ ID NO: 180712 - DNA, 55 bp, Artificial
  Synthetic oligonucleotide
gcaggtcagtgttagcgtcaggatttcccgttcttttcaggtcagcctgctgtcg

SEQ ID NO: 180713 - DNA, 55 bp, Artificial
  Synthetic oligonucleotide
gcaggtatttcaaggagtgatagcgatcacactgcggccctgatccaactctagt

SEQ ID NO: 180714 - DNA, 53 bp, Artificial
  Synthetic oligonucleotide
gcaggtattgcattgtaccttttaaccggtatgcgtgacccttttaaaccgcc

SEQ ID NO: 180715 - DNA, 55 bp, Artificial
  Synthetic oligonucleotide
gcaggtatgctgggtcggtatcccaatttcatacagttaaggacaggccatgagt

SEQ ID NO: 180716 - DNA, 58 bp, Artificial
  Synthetic oligonucleotide
ggcgttgagcaacgagcaaagcgaggcggtaggcttttaaagcgagcagggcgttgaa

SEQ ID NO: 180717 - DNA, 55 bp, Artificial
  Synthetic oligonucleotide
gcagggtgtctggaaggcggagacatggatatagcctatctgtccgagattgacc

SEQ ID NO: 180718 - DNA, 55 bp, Artificial
  Synthetic oligonucleotide
gcaggggagcagctgactatctcaacggcaggattacacgggcaaccttaccgct

SEQ ID NO: 180719 - DNA, 55 bp, Artificial
  Synthetic oligonucleotide
gcagggcatccccactatcatcggaggggagagcgcaggaaacaatgccttccct

SEQ ID NO: 180720 - DNA, 55 bp, Artificial
  Synthetic oligonucleotide
gcaggctgtaaagggaatcggatctgctctgggatttggtgtgacagccaatgcg

SEQ ID NO: 180721 - DNA, 55 bp, Artificial
  Synthetic oligonucleotide
gcaggctcaggtgatatgacgcctcctcgttcattcgctcactacgttcggtcat

SEQ ID NO: 180722 - DNA, 55 bp, Artificial
  Synthetic oligonucleotide
gcaggcggttaatcatgttgtggcgttcgtcgccataaacgaagtcgtgaacctg

SEQ ID NO: 180723 - DNA, 55 bp, Artificial
  Synthetic oligonucleotide
gcaggagtactgcttacgacgcttcttcgccatatatcgacaatcaacgggttcg

SEQ ID NO: 180724 - DNA, 55 bp, Artificial
  Synthetic oligonucleotide
gcagctgaaacgggaagctcaacacccactgacgcatgggttgttcaggcagtac

SEQ ID NO: 180725 - DNA, 55 bp, Artificial
  Synthetic oligonucleotide
gcagctacgtgagcgaaaacttcaccccgcagatgttgagtaacgatccccgccc

SEQ ID NO: 180726 - DNA, 55 bp, Artificial
  Synthetic oligonucleotide
gcagcggtagcgtatcgggcattacgcgaccagttaaaccctggcgagtatggct

SEQ ID NO: 180727 - DNA, 54 bp, Artificial
  Synthetic oligonucleotide
aggctttccaattgtccgagataaggaaggtttggcgtatagttctcggaattc

SEQ ID NO: 180728 - DNA, 55 bp, Artificial
  Synthetic oligonucleotide
gcagcgccacggctaccaccgtgaattctggcggtgtgcagttcgtagaaagcgg

SEQ ID NO: 180729 - DNA, 55 bp, Artificial
  Synthetic oligonucleotide
atcttactctttcgccagccatagatattgaggggcttccgctcagtgcgatgtg

SEQ ID NO: 180730 - DNA, 55 bp, Artificial
  Synthetic oligonucleotide
gcagccagactccaccagttaatggcatatggttggtagatatcgacggaataaa

SEQ ID NO: 180731 - DNA, 55 bp, Artificial
  Synthetic oligonucleotide
atctttaaacgaaccgccgatggacatttcagggacagcaacaatagctttgcgt

SEQ ID NO: 180732 - DNA, 55 bp, Artificial
  Synthetic oligonucleotide
gcagcagcgggcgctatggccgggcactatggtgctatccgaggactattacgga

SEQ ID NO: 180733 - DNA, 53 bp, Artificial
  Synthetic oligonucleotide
gcccgcacggggtaaagccgaaatttcatctcaaaccggtaatcttacggcga

SEQ ID NO: 180734 - DNA, 55 bp, Artificial
  Synthetic oligonucleotide
gcccgacgtcacaccaccggcagttgtcgataaatggatatgcggatgccactgc

SEQ ID NO: 180735 - DNA, 55 bp, Artificial
  Synthetic oligonucleotide
gcccgaaacatgtttagcgcccctacccgtctgacaaaacggctgttgataatcg

SEQ ID NO: 180736 - DNA, 55 bp, Artificial
  Synthetic oligonucleotide
gccccttgtggagcaccgacattcagggaagccgtgcgctggggtagtgaagtat

SEQ ID NO: 180737 - DNA, 51 bp, Artificial
  Synthetic oligonucleotide
gcccctgtcgttattaacgttagcggtcttgaaagcccggtaaactggccg

SEQ ID NO: 180738 - DNA, 56 bp, Artificial
  Synthetic oligonucleotide
agggaaaccctgaaaggctaccgggaaatatcagacagtgtggcacagcaggtacg

SEQ ID NO: 180739 - DNA, 55 bp, Artificial
  Synthetic oligonucleotide
gcccctgcagagtacggataacatcggtcatttacacacccgccttttcggtcag

SEQ ID NO: 180740 - DNA, 55 bp, Artificial
  Synthetic oligonucleotide
gcccctaactccagactacaaacccgctttactcagtacttctgtgatcccaacc

SEQ ID NO: 180741 - DNA, 55 bp, Artificial
  Synthetic oligonucleotide
gccccgttttacgcgggtgtggtagtagcgctcaggagcatggcgacgcatcatc

SEQ ID NO: 180742 - DNA, 55 bp, Artificial
  Synthetic oligonucleotide
gccccgtctgctgctccagaagcccttccagcacaaagatagagtcacgcaacgt

SEQ ID NO: 180743 - DNA, 55 bp, Artificial
  Synthetic oligonucleotide
gccccggcatagtgacaaagttaagaacgggcagcagctcactacgcggataggc

SEQ ID NO: 180744 - DNA, 55 bp, Artificial
  Synthetic oligonucleotide
atccttcgaccattgtgcggcctgaatgacattcgctggataagtggatgccatg

SEQ ID NO: 180745 - DNA, 55 bp, Artificial
  Synthetic oligonucleotide
gccccaccatcaaacgaaacgcctgcttcatcttatctcccttatccgaccctct

SEQ ID NO: 180746 - DNA, 55 bp, Artificial
  Synthetic oligonucleotide
gcccagtagacataagctttctcggtctgtaggatgtaatgcaggtagcgaaccc

SEQ ID NO: 180747 - DNA, 55 bp, Artificial
  Synthetic oligonucleotide
gcccaggttatctgggaagcctgccgtaatgccattcttaacggagacaaagggt

SEQ ID NO: 180748 - DNA, 55 bp, Artificial
  Synthetic oligonucleotide
gcccaggagaccttcgatcggacggtcgatacacacatcaaaaccctgcacgcta

SEQ ID NO: 180749 - DNA, 60 bp, Artificial
  Synthetic oligonucleotide
ggcgttcatcctgattctggcctgaaatcagaccgtatgcatctggctgcatgaccatgc

SEQ ID NO: 180750 - DNA, 55 bp, Artificial
  Synthetic oligonucleotide
atccttgccgatcacgacacgatggcggtggtcaccgcgacgaaagacacggcca

SEQ ID NO: 180751 - DNA, 55 bp, Artificial
  Synthetic oligonucleotide
gcccagagcaaccgtaattccgccctgtgctgaaacggtatgtgaacgggttggg

SEQ ID NO: 180752 - DNA, 55 bp, Artificial
  Synthetic oligonucleotide
atcgaacgctaacagcggtacgcagaacaataccgcgaccaacaatagcgacact

SEQ ID NO: 180753 - DNA, 55 bp, Artificial
  Synthetic oligonucleotide
gcccaagctgtccagttcgcctaaacttcccggcatataacgcgctaccgaccac

SEQ ID NO: 180754 - DNA, 55 bp, Artificial
  Synthetic oligonucleotide
gccgatcgttagccagttcgtgccgtgtatggcgcaatagcgtggactgacgcgc

SEQ ID NO: 180755 - DNA, 55 bp, Artificial
  Synthetic oligonucleotide
gccgaacttaatgtgtttataagagggaaaccgcattgcccaggggccacgtgct

SEQ ID NO: 180756 - DNA, 55 bp, Artificial
  Synthetic oligonucleotide
gccctttaacctgcacgactattctcaatccgtcgcgtcacgatgctctgagcct

SEQ ID NO: 180757 - DNA, 55 bp, Artificial
  Synthetic oligonucleotide
gccctggttagaaaactgagtactctcaacgctgatgtgctgactatacgcagga

SEQ ID NO: 180758 - DNA, 55 bp, Artificial
  Synthetic oligonucleotide
gccctgctgatagcacctgtcgttatcattactgatagtgcaccaatgtgcctgc

SEQ ID NO: 180759 - DNA, 55 bp, Artificial
  Synthetic oligonucleotide
gccctgattggtcgcatcattggttagcgtcatatcatcgaccacgcagttacgt

SEQ ID NO: 180760 - DNA, 60 bp, Artificial
  Synthetic oligonucleotide
gggctttgttgtacagctttgtttatgcctgcttgagtgattttcagagactctacaccg

SEQ ID NO: 180761 - DNA, 55 bp, Artificial
  Synthetic oligonucleotide
gccctgaagccgttgatcatcggtaaagatccccgtaataccgaagtgctgtggc

SEQ ID NO: 180762 - DNA, 55 bp, Artificial
  Synthetic oligonucleotide
gccctgaagcagggcgttcagactttccatttcagttctccgttacgccagcgtc

SEQ ID NO: 180763 - DNA, 55 bp, Artificial
  Synthetic oligonucleotide
atccgctgcgcggatgcaagctcgtctttctcagatgcagacgcgggagatgacg

SEQ ID NO: 180764 - DNA, 55 bp, Artificial
  Synthetic oligonucleotide
gccctcaagctagatatattgaccgcgttacggattatcaagaggggctaacaag

SEQ ID NO: 180765 - DNA, 55 bp, Artificial
  Synthetic oligonucleotide
atccggtccacgccaaagtgacgaaagcgatacgtgagcccgtagataagactcc

SEQ ID NO: 180766 - DNA, 55 bp, Artificial
  Synthetic oligonucleotide
gcccgtgacactctcatttacgcaggtggtgaccagtcggtacacggaagggctc

SEQ ID NO: 180767 - DNA, 55 bp, Artificial
  Synthetic oligonucleotide
gcccggtcacctggattggggtgttatgcacggagctactcattggggtgggatg

SEQ ID NO: 180768 - DNA, 55 bp, Artificial
  Synthetic oligonucleotide
gcccggtagcctttgctaccggacgataagcgttatcaaaacgcccatgacacgc

SEQ ID NO: 180769 - DNA, 55 bp, Artificial
  Synthetic oligonucleotide
gcccggagccgcctgtaagcagatcgcgtcttttcccgaaaatttctcatggcaa

SEQ ID NO: 180770 - DNA, 55 bp, Artificial
  Synthetic oligonucleotide
gcccggaagataaacagcggacagtggtcggggcatgaccgggttcatgtggtgg

SEQ ID NO: 180771 - DNA, 59 bp, Artificial
  Synthetic oligonucleotide
gccaatgcaagagcgataggcgctctacgcgccaatttgaccacttaaaacaggtaaat

SEQ ID NO: 180772 - DNA, 58 bp, Artificial
  Synthetic oligonucleotide
gggctggtatggaacctgtttatgtgatacttaatgatcctctggattccgggcgatt

SEQ ID NO: 180773 - DNA, 55 bp, Artificial
  Synthetic oligonucleotide
atccgtggtctacagggaccacagatgttgcgtaatagcccgagtttgctatact

SEQ ID NO: 180774 - DNA, 55 bp, Artificial
  Synthetic oligonucleotide
gcccgcgtataaacatttggtctgctaactgcgtcataaggagttcggctccacc

SEQ ID NO: 180775 - DNA, 55 bp, Artificial
  Synthetic oligonucleotide
gcccgccagggctaagccggttaaaatgataaatcaccgggcatcgatttattct

SEQ ID NO: 180776 - DNA, 55 bp, Artificial
  Synthetic oligonucleotide
gccagcaccagaaaatcatataaccgcgacaaatcagaaagcgccttactggtcc

SEQ ID NO: 180777 - DNA, 55 bp, Artificial
  Synthetic oligonucleotide
gccagcaatatactttgtctcgaaaggcgtacacagcaccgctaatagcgtcgcc

SEQ ID NO: 180778 - DNA, 55 bp, Artificial
  Synthetic oligonucleotide
gccagagtgtgtggtggagtaccttatctcaggcgcgggtggaatagaccctgat

SEQ ID NO: 180779 - DNA, 55 bp, Artificial
  Synthetic oligonucleotide
gccagagaccgagggttagatcatgcctagcattcaccttccggccgcccgctag

SEQ ID NO: 180780 - DNA, 55 bp, Artificial
  Synthetic oligonucleotide
gccagaatatccatgcctgctccgccgtgtccaactacatagagtttatgttggt

SEQ ID NO: 180781 - DNA, 55 bp, Artificial
  Synthetic oligonucleotide
atcgctatgacggagtaaactgtgcagctcaccgagtttgcgtagttgctcttcg

SEQ ID NO: 180782 - DNA, 55 bp, Artificial
  Synthetic oligonucleotide
gccacgttaaagaatctctattgtccataaggaggcacgatgtccattgggatag

SEQ ID NO: 180783 - DNA, 60 bp, Artificial
  Synthetic oligonucleotide
gggctgggcagctagggcgccggatacatcagtgaaatgagtaaggcctcagctctactg

SEQ ID NO: 180784 - DNA, 55 bp, Artificial
  Synthetic oligonucleotide
atcgctccctgagcaattcgatcggatactgttgggatccccagaatgcgttcct

SEQ ID NO: 180785 - DNA, 55 bp, Artificial
  Synthetic oligonucleotide
gccacgcccctcatagtacacctgtccactatccacggagcgaccacagatgtgc

SEQ ID NO: 180786 - DNA, 55 bp, Artificial
  Synthetic oligonucleotide
gccacgccatttgcgaagaaatacacgtccggtgttctgtcgttcgcagagaagg

SEQ ID NO: 180787 - DNA, 55 bp, Artificial
  Synthetic oligonucleotide
gccacgaaattgcagacggcaagatctatcggtggagttgttttcgacggttctg

SEQ ID NO: 180788 - DNA, 55 bp, Artificial
  Synthetic oligonucleotide
gccacctagtaacctgttatggtgtgtattaatagtgtgtctcacactactggca

SEQ ID NO: 180789 - DNA, 55 bp, Artificial
  Synthetic oligonucleotide
gccaccgcccttataagtcaacagggactggcagccgacttcgcctcacagtgca

SEQ ID NO: 180790 - DNA, 55 bp, Artificial
  Synthetic oligonucleotide
gccaccattctccaggttaccgccgacagtggttttggcgacacgcagtgtcccc

SEQ ID NO: 180791 - DNA, 55 bp, Artificial
  Synthetic oligonucleotide
gccaccagtcagtctggtgcataacgattcatgcccgtaaaacgccctggagcga

SEQ ID NO: 180792 - DNA, 55 bp, Artificial
  Synthetic oligonucleotide
gccacaccctggagcgaagcttttgttcgacacggttcacaactgacattgggcc

SEQ ID NO: 180793 - DNA, 55 bp, Artificial
  Synthetic oligonucleotide
gccaagaccagctacatctgctaaccgatgccgaaccctaaccagaccatgaatg

SEQ ID NO: 180794 - DNA, 59 bp, Artificial
  Synthetic oligonucleotide
gggctgctgtggtctcgttcttactttgcctgtagcgccggtggtgccacgatagaaac

SEQ ID NO: 180795 - DNA, 55 bp, Artificial
  Synthetic oligonucleotide
gccaactcggtactggccttaccttgcgctttatttcgctgccgctcatacggtg

SEQ ID NO: 180796 - DNA, 55 bp, Artificial
  Synthetic oligonucleotide
gccaaccgcttaatgtgggtgcgtagcgtcagattattacgctcaatgcgttggg

SEQ ID NO: 180797 - DNA, 54 bp, Artificial
  Synthetic oligonucleotide
gccaaaccaagtttgggtaggtgacgtaacgtatatttggtcaggtaatcgctg

SEQ ID NO: 180798 - DNA, 55 bp, Artificial
  Synthetic oligonucleotide
gccattgaaaccggtttcccccgaagcagtgcactacagctggttcttaaagtcg

SEQ ID NO: 180799 - DNA, 55 bp, Artificial
  Synthetic oligonucleotide
atcgatcacgaattctagattcccgtctacgagcacacatcatagatgcttcgca

SEQ ID NO: 180800 - DNA, 55 bp, Artificial
  Synthetic oligonucleotide
gccatgccgctctaaccatcttaattgcttcgcctacgccaataatgagcgtagc

SEQ ID NO: 180801 - DNA, 55 bp, Artificial
  Synthetic oligonucleotide
gccatgcagccacgtgaattgctcatgcttcaatgtatatcctcgtccaagcccc

SEQ ID NO: 180802 - DNA, 55 bp, Artificial
  Synthetic oligonucleotide
gccatgatggtttagagatgtttgagggtgtaccgcaaccactacctgttgctcg

SEQ ID NO: 180803 - DNA, 55 bp, Artificial
  Synthetic oligonucleotide
gccatgatcctgctcgtccatcagtagcgttttgatctccagatcttttggcccg

SEQ ID NO: 180804 - DNA, 55 bp, Artificial
  Synthetic oligonucleotide
atcgccacccttacagttcaataataagtcctgcagcaatcagctcgtccacatc

SEQ ID NO: 180805 - DNA, 58 bp, Artificial
  Synthetic oligonucleotide
aggatacagacgaacctggaagaaatcagggtacaggaagagacattgcggaaactga

SEQ ID NO: 180806 - DNA, 55 bp, Artificial
  Synthetic oligonucleotide
gccatcactgactcatccaagttcggtgtgatccatccctaccccagttcaccgg

SEQ ID NO: 180807 - DNA, 55 bp, Artificial
  Synthetic oligonucleotide
gccatatgggaaataccagccatgatctgatggcctgccgttggttttgagggcc

SEQ ID NO: 180808 - DNA, 55 bp, Artificial
  Synthetic oligonucleotide
gccagtttcatgccagaaaagttacgacacgcgagttctctgttatcagagaggc

SEQ ID NO: 180809 - DNA, 55 bp, Artificial
  Synthetic oligonucleotide
gccagttccttgtgcgtcgggctgaccagtaacccctcctgtaaagcgtcttcgc

SEQ ID NO: 180810 - DNA, 55 bp, Artificial
  Synthetic oligonucleotide
gccagtgtctatggactgctgacctgaactggttactgtgttgtagcatcgtggg

SEQ ID NO: 180811 - DNA, 55 bp, Artificial
  Synthetic oligonucleotide
gccagtgtatccgttacaggtaagcttggatctcgcgcccagttgcggcgacggc

SEQ ID NO: 180812 - DNA, 55 bp, Artificial
  Synthetic oligonucleotide
gccagtcatatagatctgcaccttgcgaaatgggtcgcccgcaaatataagcggg

SEQ ID NO: 180813 - DNA, 55 bp, Artificial
  Synthetic oligonucleotide
gccagtaccagacccgtacagaggactatctgccgttgggtgaatactgggaatc

SEQ ID NO: 180814 - DNA, 55 bp, Artificial
  Synthetic oligonucleotide
atcgccatacagccattcacggtcaaaggtgagggtcagagtgcgctcatggcta

SEQ ID NO: 180815 - DNA, 55 bp, Artificial
  Synthetic oligonucleotide
gccaggtgggcgttatccgtaaacaggcgttaattcttaatctgcctggacagcc

SEQ ID NO: 180816 - DNA, 60 bp, Artificial
  Synthetic oligonucleotide
gggctctggagagcgactcgggggaggagtagtatcttccggccacggatatgatcgagc

SEQ ID NO: 180817 - DNA, 55 bp, Artificial
  Synthetic oligonucleotide
gccagcgagactgacaatgaacgcgctaacggtgattcttccacataaagcgccg

SEQ ID NO: 180818 - DNA, 55 bp, Artificial
  Synthetic oligonucleotide
gccagcctgccagctatcactgagatgagtaaacctgacagatgcgcgagaattg

SEQ ID NO: 180819 - DNA, 55 bp, Artificial
  Synthetic oligonucleotide
gccagccgctaacagcataacagcgagccagcacacgtttaacgtttccatcaag

SEQ ID NO: 180820 - DNA, 55 bp, Artificial
  Synthetic oligonucleotide
gccagcatgactcctgccttcatatagcggtacccttcacgccagacatggttta

SEQ ID NO: 180821 - DNA, 55 bp, Artificial
  Synthetic oligonucleotide
gatcttggacactatattaaagttccggtagggcaagctacgttaggtcgcataa

SEQ ID NO: 180822 - DNA, 55 bp, Artificial
  Synthetic oligonucleotide
gatctggatcatgaggctgatttctgcgagaaactccatgaggatgcggaacgcc

SEQ ID NO: 180823 - DNA, 55 bp, Artificial
  Synthetic oligonucleotide
gatcggcggtagtgtggcaaatgaagccgaatcgtgctgttccgactccgcaacg

SEQ ID NO: 180824 - DNA, 55 bp, Artificial
  Synthetic oligonucleotide
atgttgactgaacacgatgcactgatgcctcgcgttgctctgttgtctaaccccg

SEQ ID NO: 180825 - DNA, 55 bp, Artificial
  Synthetic oligonucleotide
gatcgattagctctccaactaatctagataaatcgatttcactcgcatcgttcac

SEQ ID NO: 180826 - DNA, 55 bp, Artificial
  Synthetic oligonucleotide
gatcctacccacggaacgtggacacagtcccaagcgaggctctggtctgcaaact

SEQ ID NO: 180827 - DNA, 54 bp, Artificial
  Synthetic oligonucleotide
gggcgttggtcaacgaatcaacttaaaggtctggttgcaacacagcccgttacg

SEQ ID NO: 180828 - DNA, 55 bp, Artificial
  Synthetic oligonucleotide
gatccgtggtgtgacttattccgcaccgctgcgcgttaagctgcgtctggttatc

SEQ ID NO: 180829 - DNA, 55 bp, Artificial
  Synthetic oligonucleotide
attaaccttcagatttagtttaccgcacagattgacacgattccgcttgacgctt

SEQ ID NO: 180830 - DNA, 55 bp, Artificial
  Synthetic oligonucleotide
gatccccgcgcaagactccacctgaaagcgcattcaatgcaacgcagggaggaca

SEQ ID NO: 180831 - DNA, 55 bp, Artificial
  Synthetic oligonucleotide
gatccccacacgcagactcagcggtatattcgctatcatccagtagcgcacacgg

SEQ ID NO: 180832 - DNA, 55 bp, Artificial
  Synthetic oligonucleotide
gatcagttagcgcgtttatttacacaggaaacagggttacataccgtgttataga

SEQ ID NO: 180833 - DNA, 55 bp, Artificial
  Synthetic oligonucleotide
gatcagcggcgctaaatggtcggctatcgccacgatagtgattatcggtctgggg

SEQ ID NO: 180834 - DNA, 55 bp, Artificial
  Synthetic oligonucleotide
gatcacgggtttatgaaaggttgtgtcatcagtgcaacacagttgattagccagg

SEQ ID NO: 180835 - DNA, 55 bp, Artificial
  Synthetic oligonucleotide
attaccgccgggagcagatggcagagcttgagcgttcagcccggtcacattttgc

SEQ ID NO: 180836 - DNA, 55 bp, Artificial
  Synthetic oligonucleotide
gatcaacgggcagttgtcaacttagcgtttacgactcaactcatcggtatgactg

SEQ ID NO: 180837 - DNA, 55 bp, Artificial
  Synthetic oligonucleotide
gatattcaccaaaacattcacggcaatggacctaccccatatagcgcatttggtc

SEQ ID NO: 180838 - DNA, 60 bp, Artificial
  Synthetic oligonucleotide
aggatgataattagcaagataatagtgttggttgtgcgagaggtcttccaaagatagccc

SEQ ID NO: 180839 - DNA, 55 bp, Artificial
  Synthetic oligonucleotide
gatatgtcgcgtgcgttaacctggttgcttgagtatctcggcgatagtgagacgc

SEQ ID NO: 180840 - DNA, 55 bp, Artificial
  Synthetic oligonucleotide
gatatgtccacacaacagcccgccataagtgcaggcaggtttgactagccccgcc

SEQ ID NO: 180841 - DNA, 55 bp, Artificial
  Synthetic oligonucleotide
gatatgccccagataaatcggtctgcgttagtgccattcagcgccgagcagatgt

SEQ ID NO: 180842 - DNA, 55 bp, Artificial
  Synthetic oligonucleotide
gatggtgacagacaggttggatagcactcagctaaccagctgaccacactttagc

SEQ ID NO: 180843 - DNA, 55 bp, Artificial
  Synthetic oligonucleotide
gatggggtgaatatcgtgtaacggggcaatattcagtggctgaaaacctgtgcgg

SEQ ID NO: 180844 - DNA, 55 bp, Artificial
  Synthetic oligonucleotide
gatggggcgaaactgccacctgttcgaaatgacgcgcaaatgggcttacagggcg

SEQ ID NO: 180845 - DNA, 55 bp, Artificial
  Synthetic oligonucleotide
gatggcgcggcctgagcgtgtgagaatgtattccggtgcgacggtccggcatgta

SEQ ID NO: 180846 - DNA, 55 bp, Artificial
  Synthetic oligonucleotide
gatggcgcacatcttttagcgactgccggctagttattttctgacgcaccaatag

SEQ ID NO: 180847 - DNA, 55 bp, Artificial
  Synthetic oligonucleotide
gatggaatcgtcagccactggagtatcaaccctcctggcaaaagttgttttccgt

SEQ ID NO: 180848 - DNA, 55 bp, Artificial
  Synthetic oligonucleotide
atgtcgcagcatatgaggatgtggcgctatcgttaattcggccaaccgccctgcc

SEQ ID NO: 180849 - DNA, 60 bp, Artificial
  Synthetic oligonucleotide
gggcgtggagcacgcttggcacgaggcttacccgatgtgttttctgctgaagtcagttcg

SEQ ID NO: 180850 - DNA, 55 bp, Artificial
  Synthetic oligonucleotide
gatgctgctagagcgcgatctgagcctgtactacgacccagcaccgattgcccgg

SEQ ID NO: 180851 - DNA, 55 bp, Artificial
  Synthetic oligonucleotide
atgtcgcatcgtggatcacgctacatgcttcaggattgaggtaaacgcgatcggt

SEQ ID NO: 180852 - DNA, 55 bp, Artificial
  Synthetic oligonucleotide
atgtcgtacttgcccgccgcgaactcggttaccgtccagcccagcgcgaccagct

SEQ ID NO: 180853 - DNA, 55 bp, Artificial
  Synthetic oligonucleotide
gatgcgaccacgctcagtaataatgcggtcgcgatatcaacttcaattcctagtg

SEQ ID NO: 180854 - DNA, 55 bp, Artificial
  Synthetic oligonucleotide
gatgccggtatgcgccagcgctctctttcttcccttcggtcgccgcttgcgatgc

SEQ ID NO: 180855 - DNA, 55 bp, Artificial
  Synthetic oligonucleotide
gatgccgcgtaagcgtgactgaccgtcctgtatgacgtttgtcgcaggtggggtt

SEQ ID NO: 180856 - DNA, 55 bp, Artificial
  Synthetic oligonucleotide
gatgcatttagcgtacggctgacatcgcaggaaaatgccgtgtagtacgtaacgg

SEQ ID NO: 180857 - DNA, 55 bp, Artificial
  Synthetic oligonucleotide
gatgcagatctggcatcccgataacgcgtttcataccggttaacttagccgtcgt

SEQ ID NO: 180858 - DNA, 55 bp, Artificial
  Synthetic oligonucleotide
gatgatgccacttgttctgtgtcataagtaattctagataataaggctcctgttg

SEQ ID NO: 180859 - DNA, 55 bp, Artificial
  Synthetic oligonucleotide
gatgatcaaacaaaggactcttaaacgtatcgttcaggcgactggcgtcggtttg

SEQ ID NO: 180860 - DNA, 59 bp, Artificial
  Synthetic oligonucleotide
gggcggtaagatagatatgtgttgaatcgctatggtcgtcttgttttgcgacctttcat

SEQ ID NO: 180861 - DNA, 55 bp, Artificial
  Synthetic oligonucleotide
atgttaagggatactggcggcataaaaccccatgagcataagcgggctgtagctc

SEQ ID NO: 180862 - DNA, 55 bp, Artificial
  Synthetic oligonucleotide
atgttattgacacacaaaagcgttgaggaacagtgagaagcgcagtgcccagcca

SEQ ID NO: 180863 - DNA, 55 bp, Artificial
  Synthetic oligonucleotide
gatgaaacgttcagtgctgaaccctgacacaccgcttgttgatagcagccaggac

SEQ ID NO: 180864 - DNA, 55 bp, Artificial
  Synthetic oligonucleotide
gatcttggtggtactactcttgatgttgcaagtattactgggcaattagaacaga

SEQ ID NO: 180865 - DNA, 55 bp, Artificial
  Synthetic oligonucleotide
attcactgaagaacacccaaacccacatgggccccaatacgatgtcagcttgtgc

SEQ ID NO: 180866 - DNA, 55 bp, Artificial
  Synthetic oligonucleotide
gagtttcagcgggtagatcagcgcagtccagcaagcatagctgatatctcccgtg

SEQ ID NO: 180867 - DNA, 55 bp, Artificial
  Synthetic oligonucleotide
gagttcgagcaacgcgagttacagcgcgggtgcgtctggtttaccgacgacttca

SEQ ID NO: 180868 - DNA, 55 bp, Artificial
  Synthetic oligonucleotide
attcagagctaccaactctttcttccgaaggtaactggctttcacggagcgcagg

SEQ ID NO: 180869 - DNA, 55 bp, Artificial
  Synthetic oligonucleotide
gagtgtagggatcaatgcgaactgcttcgcaaacaacgcccgcgacaacaagttc

SEQ ID NO: 180870 - DNA, 55 bp, Artificial
  Synthetic oligonucleotide
gagtgtaattcggctactcctaattcatatacacgttccgcttctttagatcctg

SEQ ID NO: 180871 - DNA, 60 bp, Artificial
  Synthetic oligonucleotide
aggcaagccagtgcgataaaaatcacatacaccgctatgggcagcgaactgacttaacat

SEQ ID NO: 180872 - DNA, 55 bp, Artificial
  Synthetic oligonucleotide
gagtggttaaagcggttgctcaatagtgcgttctgcggttagatctatagcaggc

SEQ ID NO: 180873 - DNA, 55 bp, Artificial
  Synthetic oligonucleotide
gagtgggctgtacgtggagagggtaatgaacgggtaacatctacccatcgtacac

SEQ ID NO: 180874 - DNA, 55 bp, Artificial
  Synthetic oligonucleotide
gagtgcatgggcgcagtcatcgaagtcgagacgcccactttccgcgtgcttggac

SEQ ID NO: 180875 - DNA, 55 bp, Artificial
  Synthetic oligonucleotide
gagtgatctaaccgtatctatggaggttaggatggatgggctagggaagttaggt

SEQ ID NO: 180876 - DNA, 55 bp, Artificial
  Synthetic oligonucleotide
gagtgacgcatgagccagcgcggattggaagcactgttacgccctaagtctattg

SEQ ID NO: 180877 - DNA, 55 bp, Artificial
  Synthetic oligonucleotide
attccagtcgtgacgggcgaggcagagtgatcttacccagaatagtggacacgcg

SEQ ID NO: 180878 - DNA, 53 bp, Artificial
  Synthetic oligonucleotide
attccccgaacaggaaacaagttgggcaatcaccgaccagtattgttttggtc

SEQ ID NO: 180879 - DNA, 55 bp, Artificial
  Synthetic oligonucleotide
gagtgaacgacgcacgcgcaggattcttgttaacccgccactggcgcgatacccc

SEQ ID NO: 180880 - DNA, 54 bp, Artificial
  Synthetic oligonucleotide
attccccgtgagatttcccgcgaggccgcacgggagaccgttctcgcttttgtc

SEQ ID NO: 180881 - DNA, 55 bp, Artificial
  Synthetic oligonucleotide
gagtctgcgtgctgtaaatcagttttacggaagccaacatacgctatggaacgtg

SEQ ID NO: 180882 - DNA, 56 bp, Artificial
  Synthetic oligonucleotide
gccaaggcggttttttcgtttaacactctacaactatccatacgtgtatggcaaca

SEQ ID NO: 180883 - DNA, 54 bp, Artificial
  Synthetic oligonucleotide
gggcgctctccgtaggttaagggctatttggctaaaaagcgtcctattctttga

SEQ ID NO: 180884 - DNA, 55 bp, Artificial
  Synthetic oligonucleotide
gagtcctttcgccggggctgagacaagcacagtcgctgtcagctgtctagggtaa

SEQ ID NO: 180885 - DNA, 55 bp, Artificial
  Synthetic oligonucleotide
gagtcatagacatgtctgcagtacgctggtagctgttaagccaggggcggtagca

SEQ ID NO: 180886 - DNA, 55 bp, Artificial
  Synthetic oligonucleotide
gagtcaggccaacagtatgcgaaaacgacatcgatttaacagtcgcatgacccgt

SEQ ID NO: 180887 - DNA, 55 bp, Artificial
  Synthetic oligonucleotide
gagtatcgggcaaaattcccagacgatccactctctgtattacgggagattctcg

SEQ ID NO: 180888 - DNA, 55 bp, Artificial
  Synthetic oligonucleotide
gatatcgtcttatggagcaaaacccgcagtcacagctcaagctacttgtcactcg

SEQ ID NO: 180889 - DNA, 55 bp, Artificial
  Synthetic oligonucleotide
gatataccgtggcgtagggcattaccgcataaccccgccagtccgttttcacgcc

SEQ ID NO: 180890 - DNA, 55 bp, Artificial
  Synthetic oligonucleotide
attagcatgctgacgctacaaacatctctttctcgatatatgactcctgcggtgg

SEQ ID NO: 180891 - DNA, 55 bp, Artificial
  Synthetic oligonucleotide
attagcattgaattgctacaaggagctggtttgtatgccgatccctgaacgtccc

SEQ ID NO: 180892 - DNA, 55 bp, Artificial
  Synthetic oligonucleotide
attagcccgccagtttgccgcttcgcaacagcagcgctattccggcgagcaaccc

SEQ ID NO: 180893 - DNA, 55 bp, Artificial
  Synthetic oligonucleotide
gatagcggtgtaatccgggttcgactgcacggtcggaaacgtcagttgcataaag

SEQ ID NO: 180894 - DNA, 56 bp, Artificial
  Synthetic oligonucleotide
aggcaatagtaaacagcaagggatggacgtttgaagcattggcggtacgttgggaa

SEQ ID NO: 180895 - DNA, 55 bp, Artificial
  Synthetic oligonucleotide
attagctactcgtaggtgttggtccacctgagagtagcgattaattagtcataac

SEQ ID NO: 180896 - DNA, 55 bp, Artificial
  Synthetic oligonucleotide
gatactgatgcgccattcttgcagagatctgatcgcgagtaacacggctgcattc

SEQ ID NO: 180897 - DNA, 55 bp, Artificial
  Synthetic oligonucleotide
gatactgagtgatcacgccgatacggcgaatcccggagttcagacaattagataa

SEQ ID NO: 180898 - DNA, 55 bp, Artificial
  Synthetic oligonucleotide
attatattgcttatcagcgagcgatcttgataacgtccgccggcatggtaatcaa

SEQ ID NO: 180899 - DNA, 55 bp, Artificial
  Synthetic oligonucleotide
gatacggttgaggaacggctttgactggactggttataattcatagcgacagacg

SEQ ID NO: 180900 - DNA, 55 bp, Artificial
  Synthetic oligonucleotide
gatacgcagaactcttgaagttgaagccttatcgcggctacactgaaaggacagc

SEQ ID NO: 180901 - DNA, 55 bp, Artificial
  Synthetic oligonucleotide
gatacgactctacaactgagcagtgtacttaaccaggagtgtacgcgtagtggcg

SEQ ID NO: 180902 - DNA, 55 bp, Artificial
  Synthetic oligonucleotide
attattgagagtaggacttccccgctctcatgacaggttttgttcaagtcaccgc

SEQ ID NO: 180903 - DNA, 55 bp, Artificial
  Synthetic oligonucleotide
gataatcctaaggtgcgtgaggcgttgaattacgctatcaatcgtcaggcgctgg

SEQ ID NO: 180904 - DNA, 55 bp, Artificial
  Synthetic oligonucleotide
attatttatgccctggataatattggtcgcaagactgagggtcaggagtgtcccc

SEQ ID NO: 180905 - DNA, 60 bp, Artificial
  Synthetic oligonucleotide
aggcacctgctgtaatgaacaacttgttagttatctatcatgaagacttcctttgctatg

SEQ ID NO: 180906 - DNA, 55 bp, Artificial
  Synthetic oligonucleotide
attcaaacaaacaggagaactgtccggcaggtctgttcgcacggtatcaattttc

SEQ ID NO: 180907 - DNA, 55 bp, Artificial
  Synthetic oligonucleotide
gataacgttaccgtattattcacgttcataattcgagatacaccccgagtcaaag

SEQ ID NO: 180908 - DNA, 55 bp, Artificial
  Synthetic oligonucleotide
gataacccggtgcactgtgcggatgccatttgttatagtgttcgaatgcctccgc

SEQ ID NO: 180909 - DNA, 55 bp, Artificial
  Synthetic oligonucleotide
gataaacagatcgaccttgtttcagaacttgcgaaggaatccattcctagatcga

SEQ ID NO: 180910 - DNA, 55 bp, Artificial
  Synthetic oligonucleotide
attcacctgtgaaagcgcattacagagttgttttgcggcgaggataatacgcggg

SEQ ID NO: 180911 - DNA, 55 bp, Artificial
  Synthetic oligonucleotide
gcaatgaatgcggcgtttaagcgaatggaaaagcgaaaggagctatcacctgttc

SEQ ID NO: 180912 - DNA, 55 bp, Artificial
  Synthetic oligonucleotide
atgcattgctagaacctctgccggaaggtttgcgcggctattttgactttgaggc

SEQ ID NO: 180913 - DNA, 55 bp, Artificial
  Synthetic oligonucleotide
gcaatctccccttccgttgtatccagatatgctaatcgggcggctcaacttggca

SEQ ID NO: 180914 - DNA, 55 bp, Artificial
  Synthetic oligonucleotide
gcaatcgagccattgggtgctgtagggatagggcgatgtagtgccgtggtagaac

SEQ ID NO: 180915 - DNA, 55 bp, Artificial
  Synthetic oligonucleotide
atgccacgaacaacactattacgaagaagtcggctatttagccggcttttttcat

SEQ ID NO: 180916 - DNA, 60 bp, Artificial
  Synthetic oligonucleotide
aggcagaggtgacacgacaggctgatgtgacgcgcatactgccgctgattaacgagctgg

SEQ ID NO: 180917 - DNA, 55 bp, Artificial
  Synthetic oligonucleotide
atgcccgcacgacgtcatgtgcagggtgacgccactcaacccggaacaaggataa

SEQ ID NO: 180918 - DNA, 54 bp, Artificial
  Synthetic oligonucleotide
gcaatagcggaacggtagagtaaggcaccgtgtaacgttgttggctaccgtctt

SEQ ID NO: 180919 - DNA, 55 bp, Artificial
  Synthetic oligonucleotide
atgcctggcagacgctggttaatcatcattacgggctgcgtgacccgaacgcacc

SEQ ID NO: 180920 - DNA, 55 bp, Artificial
  Synthetic oligonucleotide
gcaagttgattgatttctaactcggagagtaattttccctcaaacgctgctcctg

SEQ ID NO: 180921 - DNA, 55 bp, Artificial
  Synthetic oligonucleotide
gcaagtgcatagcgcggaaattcacgccattcagccggggtaagtcctgtttccg

SEQ ID NO: 180922 - DNA, 52 bp, Artificial
  Synthetic oligonucleotide
gcaagggaatgtacggaagtaagccaaacggttatcggacggccggaacatt

SEQ ID NO: 180923 - DNA, 55 bp, Artificial
  Synthetic oligonucleotide
gcaagctgtcgaaagcgtaaatgctggcccatcgacctgtagccagcggctgaga

SEQ ID NO: 180924 - DNA, 55 bp, Artificial
  Synthetic oligonucleotide
gcaagctgggccggatcgagcgcacgctgttcatcctggactggctgcaaagtgt

SEQ ID NO: 180925 - DNA, 55 bp, Artificial
  Synthetic oligonucleotide
gcaagccgaatccgagtgggacaaagaaaacgctgcttttaagcgtaccgaggga

SEQ ID NO: 180926 - DNA, 55 bp, Artificial
  Synthetic oligonucleotide
gcaagccccagctctaaatgtctcccgattaatcacgatggcaggtagggcaaac

SEQ ID NO: 180927 - DNA, 57 bp, Artificial
  Synthetic oligonucleotide
gggcagtaatcatgccgggtctggctggctaacaccccattataaggggtacgaata

SEQ ID NO: 180928 - DNA, 55 bp, Artificial
  Synthetic oligonucleotide
gcaagcattatgattacaggttgcgatgcctgaactacaaccggacgctttcccg

SEQ ID NO: 180929 - DNA, 55 bp, Artificial
  Synthetic oligonucleotide
gcaagatgaacacccgcaaggcacagaatactgaaaacaacagtaacgccgcggc

SEQ ID NO: 180930 - DNA, 55 bp, Artificial
  Synthetic oligonucleotide
atgcgctgaacccgcatgaatactggatttccacagggttgagcggggttttgct

SEQ ID NO: 180931 - DNA, 55 bp, Artificial
  Synthetic oligonucleotide
gcaactacgcaaactcggtgagctgcacagtttactccgtcacagcgatatcggc

SEQ ID NO: 180932 - DNA, 55 bp, Artificial
  Synthetic oligonucleotide
gcaacgcatttcattatcgggctgatcctcagaacaggcgatcaacaattggtag

SEQ ID NO: 180933 - DNA, 55 bp, Artificial
  Synthetic oligonucleotide
gcacgtaaaggtatagtgagaagactcacgacgctaatctgagcaggctcagact

SEQ ID NO: 180934 - DNA, 55 bp, Artificial
  Synthetic oligonucleotide
gcacggtgtttggtgacttcgatatctataacacggcgatcaccaatgtgcagga

SEQ ID NO: 180935 - DNA, 55 bp, Artificial
  Synthetic oligonucleotide
gcacgccagccaccgttggacgagtgccaatgttcgctacgccgggtaacggctt

SEQ ID NO: 180936 - DNA, 55 bp, Artificial
  Synthetic oligonucleotide
gcacgcactgttatattgctgttaatagggttaggatatgcgccgttttggcacc

SEQ ID NO: 180937 - DNA, 55 bp, Artificial
  Synthetic oligonucleotide
gcacgataggtatctagcttaaacccgaggttatcagataggatcgacttgggca

SEQ ID NO: 180938 - DNA, 60 bp, Artificial
  Synthetic oligonucleotide
gggcagagaagccgaaataattgaaatatcaatcatcgactgtaccggtgctattctgct

SEQ ID NO: 180939 - DNA, 55 bp, Artificial
  Synthetic oligonucleotide
gcacctcagtatctgagagaatacgtctgtgcggaactgggcgaaccgggaccat

SEQ ID NO: 180940 - DNA, 55 bp, Artificial
  Synthetic oligonucleotide
gcaccgtctggtacattatgtgcgcacacagcacggagaaacgcaggcggaggga

SEQ ID NO: 180941 - DNA, 55 bp, Artificial
  Synthetic oligonucleotide
gcaccgctgtctcaaacacttaccgatggggcaggttgtcgttcaacgctaacag

SEQ ID NO: 180942 - DNA, 55 bp, Artificial
  Synthetic oligonucleotide
atgaggtaacgaagatggctaaacagaagtgtacctggttatttgcggcgatcaa

SEQ ID NO: 180943 - DNA, 55 bp, Artificial
  Synthetic oligonucleotide
gcacccagcggtgtattccaaccatttcccagagttatagcagtatagttatcgg

SEQ ID NO: 180944 - DNA, 55 bp, Artificial
  Synthetic oligonucleotide
atgagtactggaagttgcatgtcggagcaggtgagaactggcatcagctggttaa

SEQ ID NO: 180945 - DNA, 55 bp, Artificial
  Synthetic oligonucleotide
gcacattctcatcgttgcctttgtctgccagaagaattttgtttatggcaatggc

SEQ ID NO: 180946 - DNA, 55 bp, Artificial
  Synthetic oligonucleotide
atgattaattagctgggccgctagttcattacgattaatctgaatacccgctgca

SEQ ID NO: 180947 - DNA, 55 bp, Artificial
  Synthetic oligonucleotide
gcacacgcaatcagacaaatgccacctggtcagggcttcaccccgacaccccgca

SEQ ID NO: 180948 - DNA, 55 bp, Artificial
  Synthetic oligonucleotide
gcacaagccattatggggagtagcagacacgatatcgccagaattttacgtaggg

SEQ ID NO: 180949 - DNA, 60 bp, Artificial
  Synthetic oligonucleotide
gggcacgcgcacctgctatacgcactggaaacctcgatacgtactgcgccggacggcaga

SEQ ID NO: 180950 - DNA, 55 bp, Artificial
  Synthetic oligonucleotide
gcacaaccgttggcattcgccgggctgagattgatctggccgcataacccaccgc

SEQ ID NO: 180951 - DNA, 55 bp, Artificial
  Synthetic oligonucleotide
gcacaaacagatctggggcttgcttatgggagtggtaacagtatgccacaggatt

SEQ ID NO: 180952 - DNA, 55 bp, Artificial
  Synthetic oligonucleotide
gcaattgcgtaaaacactcttagtaggactggtatctgttgccctattgagcggt

SEQ ID NO: 180953 - DNA, 55 bp, Artificial
  Synthetic oligonucleotide
atgcagggtgaagtttggggcgtgcatctggcctggagcggtaaccatcgcctgc

SEQ ID NO: 180954 - DNA, 55 bp, Artificial
  Synthetic oligonucleotide
gcaatgatagtacgcgcagaacacttgcagttctgatacggaggctaatcagggc

SEQ ID NO: 180955 - DNA, 55 bp, Artificial
  Synthetic oligonucleotide
atggacgtggacgactggacgggcttcagccgccacttcacccacttgaaggacg

SEQ ID NO: 180956 - DNA, 55 bp, Artificial
  Synthetic oligonucleotide
gattgttctcacgaccgagcaaccggactgctcccctcccattgcgccataccag

SEQ ID NO: 180957 - DNA, 54 bp, Artificial
  Synthetic oligonucleotide
atggattgaaaacggacaagcgttatggttactgtttggggcgctatttaccgc

SEQ ID NO: 180958 - DNA, 55 bp, Artificial
  Synthetic oligonucleotide
gattgatcaactccgcccggagactgttctcgcacgtccgaatccgcagttggat

SEQ ID NO: 180959 - DNA, 55 bp, Artificial
  Synthetic oligonucleotide
atggcagtgaccggctggtaagcagcgcaggaacgccggatacgcagtaccggtt

SEQ ID NO: 180960 - DNA, 57 bp, Artificial
  Synthetic oligonucleotide
gggcacccttatctaatgccttccggtaaccctctaccaactcgagctgttctgctc

SEQ ID NO: 180961 - DNA, 55 bp, Artificial
  Synthetic oligonucleotide
gattctgcggcattacatgttccaactactattccagatgtcattccagcgacac

SEQ ID NO: 180962 - DNA, 55 bp, Artificial
  Synthetic oligonucleotide
gattctctgttttcatggcggcgattctaaatagtgtcccctgatagcgccaccc

SEQ ID NO: 180963 - DNA, 55 bp, Artificial
  Synthetic oligonucleotide
atggccgtacgtcctatcagaacgcgggcaagacgcgccgccgcggggtcgaact

SEQ ID NO: 180964 - DNA, 55 bp, Artificial
  Synthetic oligonucleotide
atggcttaagtcagagaaataaccctaagccagctcaagtgaacggcatcctatc

SEQ ID NO: 180965 - DNA, 55 bp, Artificial
  Synthetic oligonucleotide
gattcccttattccttagcgatggctcagccttcccatcccgctaccaattggtc

SEQ ID NO: 180966 - DNA, 55 bp, Artificial
  Synthetic oligonucleotide
atggggtgtaggtattctgtaggtatctaaaatcacttcctgaaatacaggcacg

SEQ ID NO: 180967 - DNA, 55 bp, Artificial
  Synthetic oligonucleotide
gattattctaaccagaggacggctgcatcggagtgccggatgtgaagtcgccgcg

SEQ ID NO: 180968 - DNA, 55 bp, Artificial
  Synthetic oligonucleotide
atggtatggctcttgatggcgcattacctcgcatctttgcttacctgcatccacg

SEQ ID NO: 180969 - DNA, 55 bp, Artificial
  Synthetic oligonucleotide
gattacctcgcatcagatgcagccctctttgggttaacacagtgagcgtgacgcc

SEQ ID NO: 180970 - DNA, 55 bp, Artificial
  Synthetic oligonucleotide
atggtctgtagcgcgctggtggagtcacacctgtagtcaggcgacgcgtagagcg

SEQ ID NO: 180971 - DNA, 60 bp, Artificial
  Synthetic oligonucleotide
aggcattctggcgatatacttggctgacgtcattcctgcgtagcgggccaggttacgtaa

SEQ ID NO: 180972 - DNA, 55 bp, Artificial
  Synthetic oligonucleotide
gattaacctgttaatcatcgttctcagggctgtggtcgccgttgcaaacgcgctg

SEQ ID NO: 180973 - DNA, 55 bp, Artificial
  Synthetic oligonucleotide
atggttacggagcaagctggatcacgccttagccgttcttgctgtagaggcgcag

SEQ ID NO: 180974 - DNA, 55 bp, Artificial
  Synthetic oligonucleotide
gatgtcaattcatcgcgcaaaattgagataggtatcgcctggggatattccgcgc

SEQ ID NO: 180975 - DNA, 55 bp, Artificial
  Synthetic oligonucleotide
gatggttcatgtatggcagttccatatgcctgacgtgaagaaatgccgtggcggg

SEQ ID NO: 180976 - DNA, 55 bp, Artificial
  Synthetic oligonucleotide
gatggttactctgaaagctcgtattctgccacaccccgatttgcagcctccaggc

SEQ ID NO: 180977 - DNA, 55 bp, Artificial
  Synthetic oligonucleotide
gcaaccgcgcgccccacacctggatttgctcaaggaaccactgatacgcttccgg

SEQ ID NO: 180978 - DNA, 55 bp, Artificial
  Synthetic oligonucleotide
atgcggggcctggctgagattatgtatgcctcgtatcagcttcatgtctggctca

SEQ ID NO: 180979 - DNA, 55 bp, Artificial
  Synthetic oligonucleotide
gcaacatggcatcaggcccgccagccttactgactaacgattgcaaacgctggtc

SEQ ID NO: 180980 - DNA, 55 bp, Artificial
  Synthetic oligonucleotide
gcaacatccgcattaaaatctagcgagggctttactaagcttgccccttccgccg

SEQ ID NO: 180981 - DNA, 55 bp, Artificial
  Synthetic oligonucleotide
gcaacaatgccttacccggttaaagatattcgcgtgttgagccgtattaccaccg

SEQ ID NO: 180982 - DNA, 60 bp, Artificial
  Synthetic oligonucleotide
aggcatttgctattcgctcaatgttgtctatcgatatattcctttccgctcgttcaattg

SEQ ID NO: 180983 - DNA, 55 bp, Artificial
  Synthetic oligonucleotide
gcaacaaccttactacgctcctgcgccggaacagtctgcgcaacagccgtattac

SEQ ID NO: 180984 - DNA, 55 bp, Artificial
  Synthetic oligonucleotide
atgcgggtggtagccgcgaaacacactgtgttatgtcaacagcagaagtatacgc

SEQ ID NO: 180985 - DNA, 54 bp, Artificial
  Synthetic oligonucleotide
gcaaatggaaccgttgcgtaggaactgacaacgtgacttagtcggaactttccc

SEQ ID NO: 180986 - DNA, 55 bp, Artificial
  Synthetic oligonucleotide
atgcggtgtacaaattgagcgtttcaatcttgcgcaacaaccgatgagctttgta

SEQ ID NO: 180987 - DNA, 55 bp, Artificial
  Synthetic oligonucleotide
gcaaataccgctgggaacgttaccatcaaggtaacccggcatcagtggatggtga

SEQ ID NO: 180988 - DNA, 55 bp, Artificial
  Synthetic oligonucleotide
gcaaaggggtgttcaagtgtgttctgcctgctgaagagtatgccgaaattcactg

SEQ ID NO: 180989 - DNA, 55 bp, Artificial
  Synthetic oligonucleotide
gcaaagcgcatttcctgcgtcctcacaccagtcaacatgactatcttagtcgcat

SEQ ID NO: 180990 - DNA, 55 bp, Artificial
  Synthetic oligonucleotide
gcaaagaggagttacgcaccattgtgtatgaatcgcgtagcctgatgtcacgccg

SEQ ID NO: 180991 - DNA, 55 bp, Artificial
  Synthetic oligonucleotide
gcaaacttcacaggcaaggcgattaccatcgattttgtacgagacgctttacgtg

SEQ ID NO: 180992 - DNA, 55 bp, Artificial
  Synthetic oligonucleotide
gcaaactgtaattcgttacccgtcataaaggcaattagcgtgacgacaggtacgg

SEQ ID NO: 180993 - DNA, 60 bp, Artificial
  Synthetic oligonucleotide
gccaactcgacaccaatgcaggatagacaatccgatgtcaaatgttaacactctgcgagt

SEQ ID NO: 180994 - DNA, 59 bp, Artificial
  Synthetic oligonucleotide
aggccagtattttgtgacgtgatcgcttaggttgatttcccctcgtgcaatggcgtcgc

SEQ ID NO: 180995 - DNA, 55 bp, Artificial
  Synthetic oligonucleotide
gcaaacctgcaattaataaaacgatccaggacatatcaggctccagaacaatggg

SEQ ID NO: 180996 - DNA, 55 bp, Artificial
  Synthetic oligonucleotide
gcaaaccgaagcccaattacagtcatttattacccaccgcgcagtagcgtaaagc

SEQ ID NO: 180997 - DNA, 55 bp, Artificial
  Synthetic oligonucleotide
atgcggtgtcgaaccgctaattccgcgaaataacgatccggggcaatacgtctgg

SEQ ID NO: 180998 - DNA, 55 bp, Artificial
  Synthetic oligonucleotide
gcaaaatacgcgatgggattatacggtgatgggatttgccatgaccggcgtcgtt

SEQ ID NO: 180999 - DNA, 54 bp, Artificial
  Synthetic oligonucleotide
gatttagttacttcctgccgtaacctagcaagggaaaatggcggtgacattacc

SEQ ID NO: 181000 - DNA, 55 bp, Artificial
  Synthetic oligonucleotide
atgcgttgtatgccggtgtggaacgggcagaggctgaccttcgtgcaggacaggc

SEQ ID NO: 181001 - DNA, 55 bp, Artificial
  Synthetic oligonucleotide
gcggctgccgaccgttatactgtgagtaatggcctggttttcgtgtccgctgaca

SEQ ID NO: 181002 - DNA, 55 bp, Artificial
  Synthetic oligonucleotide
gcggctcactcagaaacagcgcctgtaccggagggaagttatctgcggaaaccag

SEQ ID NO: 181003 - DNA, 55 bp, Artificial
  Synthetic oligonucleotide
gcggctacactaaaaggacagctttggtgactgagctcctctaagccagttacct

SEQ ID NO: 181004 - DNA, 55 bp, Artificial
  Synthetic oligonucleotide
atagcgtccaacatattccaaccagccttagtaacctgcgaccagtctggaggat

SEQ ID NO: 181005 - DNA, 60 bp, Artificial
  Synthetic oligonucleotide
aggccagttcgttattttataatgctgggttgcatgataacgatctggccgtattgctta

SEQ ID NO: 181006 - DNA, 55 bp, Artificial
  Synthetic oligonucleotide
gcggcgctgaaagaaaccgcaagaattcgttaactgcacattcgggatatttctc

SEQ ID NO: 181007 - DNA, 55 bp, Artificial
  Synthetic oligonucleotide
gcggcgcgtcaaaggccgggcacataccctggcaactataacgcgggtgaatttc

SEQ ID NO: 181008 - DNA, 54 bp, Artificial
  Synthetic oligonucleotide
gcggcctttcgccatatcccgatacagggaacttcgggctttacccgtcagttc

SEQ ID NO: 181009 - DNA, 55 bp, Artificial
  Synthetic oligonucleotide
gcggcctagatgtcgaaatcgcggcagttattggtaaccacgatactttacgttc

SEQ ID NO: 181010 - DNA, 55 bp, Artificial
  Synthetic oligonucleotide
gcggccggtaacataggcacgtaactgtcggatcaaggaagctatgccatcagcc

SEQ ID NO: 181011 - DNA, 55 bp, Artificial
  Synthetic oligonucleotide
gcggccactttggtgcacggaatttccacaagctggcatagcttcagcaatagtg

SEQ ID NO: 181012 - DNA, 55 bp, Artificial
  Synthetic oligonucleotide
gcggcatgcaccgaagagagtgctgagggaatggctatcagcgcggtatgccgca

SEQ ID NO: 181013 - DNA, 55 bp, Artificial
  Synthetic oligonucleotide
gcggcaggtgtatccagttcggatacggtttgcggcgttgcggtgactatcatgg

SEQ ID NO: 181014 - DNA, 55 bp, Artificial
  Synthetic oligonucleotide
gcggcactgtgctacatcctcggccagttaggttttatctcctgggtgccggagt

SEQ ID NO: 181015 - DNA, 55 bp, Artificial
  Synthetic oligonucleotide
gcggcactggattggtaccaaaatgcaccgcgcaaatcagaggagagccccgcac

SEQ ID NO: 181016 - DNA, 60 bp, Artificial
  Synthetic oligonucleotide
gggcaattcttgtcgattgagccctgaggggcgttaagcgtcaatagccgactaagcgca

SEQ ID NO: 181017 - DNA, 55 bp, Artificial
  Synthetic oligonucleotide
gcggcaagattttctacggtactgatatctgtgattcggtggccgatagtctggc

SEQ ID NO: 181018 - DNA, 55 bp, Artificial
  Synthetic oligonucleotide
gcggatggcacaggccgggtcaataaccatcagttttacctcgctgagcgcagat

SEQ ID NO: 181019 - DNA, 55 bp, Artificial
  Synthetic oligonucleotide
gcggatagcggcaactgagcgaggctatcgttagaatctccggggtcgccataac

SEQ ID NO: 181020 - DNA, 55 bp, Artificial
  Synthetic oligonucleotide
gcggagtgttgttacaccatgatggacagcttacgcacggctgcaaacagtctcg

SEQ ID NO: 181021 - DNA, 55 bp, Artificial
  Synthetic oligonucleotide
ataggccacaccacgcgacaaggcataggcttgcgtcgcgggttgataactgtcg

SEQ ID NO: 181022 - DNA, 55 bp, Artificial
  Synthetic oligonucleotide
gcggacacttttactacctgctaatcacaacaacctgttagagaggttatcatga

SEQ ID NO: 181023 - DNA, 55 bp, Artificial
  Synthetic oligonucleotide
gcggtagaggtgaactggatcgaccctgataatggctggcagacatccacggaac

SEQ ID NO: 181024 - DNA, 55 bp, Artificial
  Synthetic oligonucleotide
gcggtactgaatatctgtggtgttcgtcgcacgggcgtttatattctggttggcg

SEQ ID NO: 181025 - DNA, 55 bp, Artificial
  Synthetic oligonucleotide
gcggtacggtactgactccgttctgggacgaacggttgaacggctatcatcaggg

SEQ ID NO: 181026 - DNA, 55 bp, Artificial
  Synthetic oligonucleotide
gcgggtttgatatcggacataacactatctccatatgaattgtattgcacaatac

SEQ ID NO: 181027 - DNA, 60 bp, Artificial
  Synthetic oligonucleotide
gggcaaatccgtgtcggtgagcgcctaattgatgccgcgtcgcttagtgattatcgtcgc

SEQ ID NO: 181028 - DNA, 51 bp, Artificial
  Synthetic oligonucleotide
gcgggttataaaggaccaaaaggcgtccgtaccgtaatgtggccggattta

SEQ ID NO: 181029 - DNA, 55 bp, Artificial
  Synthetic oligonucleotide
gcgggtcaacataaggggatgagtccttaataaaacaggtcctcagagcatacat

SEQ ID NO: 181030 - DNA, 55 bp, Artificial
  Synthetic oligonucleotide
gcgggtatggcattccaccacagtcgcttcgtgcagggcgttaagccataaggcg

SEQ ID NO: 181031 - DNA, 55 bp, Artificial
  Synthetic oligonucleotide
gcgggtaacgtcaacttaagatacaacgactgtctgaatatcgtgggtcaaggac

SEQ ID NO: 181032 - DNA, 55 bp, Artificial
  Synthetic oligonucleotide
gcggggctatgcggtaatgccctacgccacggtatatcgctataaccgcgtcgcg

SEQ ID NO: 181033 - DNA, 55 bp, Artificial
  Synthetic oligonucleotide
gcggggcagcgtggcctataaacgctatatcacgggagttctggtagccgacctg

SEQ ID NO: 181034 - DNA, 55 bp, Artificial
  Synthetic oligonucleotide
atagcgccttaaacactatctggcgcagcaaacgcacacggccaaaagtgtactc

SEQ ID NO: 181035 - DNA, 55 bp, Artificial
  Synthetic oligonucleotide
gcggggagacgaacctgtaaacgcaaggcttcatggcgcactagtggaacatagc

SEQ ID NO: 181036 - DNA, 55 bp, Artificial
  Synthetic oligonucleotide
gcggggaaatggcgtcagacgcaaaagcactatgtgcgatataatattgcgtaca

SEQ ID NO: 181037 - DNA, 55 bp, Artificial
  Synthetic oligonucleotide
atagcggcaggtcgacagggacggacagacctgctagcctgtagcacgacgttgc

SEQ ID NO: 181038 - DNA, 58 bp, Artificial
  Synthetic oligonucleotide
gggatgtggaaagggcactgtccgggcttgagagtgtgaaaccgtctcaggtgccacg

SEQ ID NO: 181039 - DNA, 55 bp, Artificial
  Synthetic oligonucleotide
gcgggctatgcgggctcccttgctttgaccgtaaaagtcgtgcaattcccgcaca

SEQ ID NO: 181040 - DNA, 55 bp, Artificial
  Synthetic oligonucleotide
gcgggcaaagcactccgccgcgtagcgcagattatcgataagcacggcctcgcag

SEQ ID NO: 181041 - DNA, 55 bp, Artificial
  Synthetic oligonucleotide
gcgggaggattaaaacctccgctctccgattcatcactacagagtattaacattc

SEQ ID NO: 181042 - DNA, 55 bp, Artificial
  Synthetic oligonucleotide
gcgggagcattatcggcagctattgctgatattatggctgccctgaaaggaccgt

SEQ ID NO: 181043 - DNA, 55 bp, Artificial
  Synthetic oligonucleotide
gcgggaactcattgattccacgccattctcgaagaaatacacttcaggcgttctg

SEQ ID NO: 181044 - DNA, 55 bp, Artificial
  Synthetic oligonucleotide
gcgggaaatgtcagaagatatacttttgcacttgaagaagtcggcctctagaggc

SEQ ID NO: 181045 - DNA, 55 bp, Artificial
  Synthetic oligonucleotide
gcgctattcatgaaccgcactgatgattccataacgcaactatctacactttatg

SEQ ID NO: 181046 - DNA, 55 bp, Artificial
  Synthetic oligonucleotide
gcgctatccaccgtttctggacacgaattaaccagacggcactgacacgtggcgg

SEQ ID NO: 181047 - DNA, 55 bp, Artificial
  Synthetic oligonucleotide
gcgctatactgagccccggactgactggaggaatgatggaacccgaccttggaca

SEQ ID NO: 181048 - DNA, 55 bp, Artificial
  Synthetic oligonucleotide
atatccgagccatagagaaccggcaatcgcgaagcaaagtccccgacggtacccc

SEQ ID NO: 181049 - DNA, 55 bp, Artificial
  Synthetic oligonucleotide
ggcgagaacggtttcccgtgcggcatcctgcggtagttcgcgggggatggcgagt

SEQ ID NO: 181050 - DNA, 55 bp, Artificial
  Synthetic oligonucleotide
gcgctacgcatatttcgcacaatattcaacgcggttcccataattgggtattatg

SEQ ID NO: 181051 - DNA, 55 bp, Artificial
  Synthetic oligonucleotide
gcgctaattttcccctatgcgcgctaacatatctcgtgttacggcatcaataagc

SEQ ID NO: 181052 - DNA, 55 bp, Artificial
  Synthetic oligonucleotide
gcgctaataacggattaatggtcaatgccaacggctatacccagcaccttccggc

SEQ ID NO: 181053 - DNA, 55 bp, Artificial
  Synthetic oligonucleotide
gcgctaagaacggattagtatggcgctcgtggccaatagtggacattggaccatg

SEQ ID NO: 181054 - DNA, 55 bp, Artificial
  Synthetic oligonucleotide
gcgcgttacgctgcaattccgtgttctggtcatttgtcgacacgcgtacatagcc

SEQ ID NO: 181055 - DNA, 55 bp, Artificial
  Synthetic oligonucleotide
atatcgcgatatggcagcgggccgcttgtcttggcgaagtaatgccgctgggcgg

SEQ ID NO: 181056 - DNA, 55 bp, Artificial
  Synthetic oligonucleotide
gcgcgtactcatggtaccggcgaaccagtcaataaaaccagaacgagtcaggccg

SEQ ID NO: 181057 - DNA, 55 bp, Artificial
  Synthetic oligonucleotide
gcgcggaaatggttttgaatcggatactccagaccatcccgataatgaccacaat

SEQ ID NO: 181058 - DNA, 55 bp, Artificial
  Synthetic oligonucleotide
gcgcgccttcccgccatttcaattcaccgttatccagccacggctcctgtgtata

SEQ ID NO: 181059 - DNA, 55 bp, Artificial
  Synthetic oligonucleotide
gcgcgcattgaaatacgcgattggcgtctgactgattatggggataccgcccact

SEQ ID NO: 181060 - DNA, 60 bp, Artificial
  Synthetic oligonucleotide
ggcctgtctgcgcggtcatagtacggctggaggcgttttccgctctgtagctccatgttc

SEQ ID NO: 181061 - DNA, 55 bp, Artificial
  Synthetic oligonucleotide
gcgcgcacaaatcagcgcgtgaagaagcgtcagaagacgaacaagggcgtgttgg

SEQ ID NO: 181062 - DNA, 55 bp, Artificial
  Synthetic oligonucleotide
gcgcgatgtgccttccaggatgcacgagaagttaatcctgcccagatcgtcgtgt

SEQ ID NO: 181063 - DNA, 55 bp, Artificial
  Synthetic oligonucleotide
atatgaccctgaaggttgggtgactaaccctaaaggtgtgatagacgatcttgag

SEQ ID NO: 181064 - DNA, 55 bp, Artificial
  Synthetic oligonucleotide
gcgcgaatattgcctgcgatagcagcgagtgcggatgctttcgactggttaatgc

SEQ ID NO: 181065 - DNA, 55 bp, Artificial
  Synthetic oligonucleotide
gcgcgaatattgaacgcgtgaaaggcgaataaccttctgtacgctgaataacccc

SEQ ID NO: 181066 - DNA, 55 bp, Artificial
  Synthetic oligonucleotide
gcggaatgagaacattaggtcaacgtattgctgctcatggcaaatcagctttggc

SEQ ID NO: 181067 - DNA, 55 bp, Artificial
  Synthetic oligonucleotide
gcggaagtgcccgcagaagtggctttccagaccgccattctcagccatctggcga

SEQ ID NO: 181068 - DNA, 54 bp, Artificial
  Synthetic oligonucleotide
gcggaagcttcaacgttcaggtttaccgttcacgtacggagggtagtctcagcc

SEQ ID NO: 181069 - DNA, 55 bp, Artificial
  Synthetic oligonucleotide
gcggaagacacgccactgacactcactaatctggctcagccaaggttcagcgggg

SEQ ID NO: 181070 - DNA, 55 bp, Artificial
  Synthetic oligonucleotide
gcggaacaatttatgtgataaggcatttaggtggcacggatattcaagcgggaaa

SEQ ID NO: 181071 - DNA, 60 bp, Artificial
  Synthetic oligonucleotide
ggcctagacgctctttatcatgtcggggagataaaaggccgtcaggatgtgattcaggcg

SEQ ID NO: 181072 - DNA, 55 bp, Artificial
  Synthetic oligonucleotide
gcggaaaaccaccctcttacctggcgcttgcgtgacgacaaacagccggtgtggt

SEQ ID NO: 181073 - DNA, 55 bp, Artificial
  Synthetic oligonucleotide
gcgcttttgctcatgaaccctgcccacggtaaacgtcaatcccaaatcgagcaaa

SEQ ID NO: 181074 - DNA, 55 bp, Artificial
  Synthetic oligonucleotide
atagtggcgccgcaatgacgatggttacccttcaggcgaacgctaatgtgacgac

SEQ ID NO: 181075 - DNA, 55 bp, Artificial
  Synthetic oligonucleotide
gcgcttctttgttaggtaacttaaccagagttgctgagcggcattttgtttctca

SEQ ID NO: 181076 - DNA, 55 bp, Artificial
  Synthetic oligonucleotide
gcgcttcttgcgcggtacatccagcagaaccagcctcatgcgcagttctggctgg

SEQ ID NO: 181077 - DNA, 55 bp, Artificial
  Synthetic oligonucleotide
gcgcttcgcaacctttcagttgcgtaattaataaactggtacgctgagttaatat

SEQ ID NO: 181078 - DNA, 55 bp, Artificial
  Synthetic oligonucleotide
gcgcttcagggtcggtctacctgatcaaaagtgacaagggctattggttgcccgg

SEQ ID NO: 181079 - DNA, 55 bp, Artificial
  Synthetic oligonucleotide
gcgcttactactgaccataacggggcctcgatactcttaccccattcggctacag

SEQ ID NO: 181080 - DNA, 55 bp, Artificial
  Synthetic oligonucleotide
gcgctgttgtgcgtcctgcctgcacaaatatagtagcgacaggccctgatgagga

SEQ ID NO: 181081 - DNA, 55 bp, Artificial
  Synthetic oligonucleotide
gcgctgctggttatgcacccttggcgtgtcacaggtcctgatatgcagcaggaca

SEQ ID NO: 181082 - DNA, 56 bp, Artificial
  Synthetic oligonucleotide
agggtaaatcgggtgttcagacacaacgagcccgcataaatgctacaggttcctac

SEQ ID NO: 181083 - DNA, 54 bp, Artificial
  Synthetic oligonucleotide
atatagggattcgggttaataaatcgggtaggagcatagttatcatacccctta

SEQ ID NO: 181084 - DNA, 55 bp, Artificial
  Synthetic oligonucleotide
gcgctgcccagttctcttcggcgttagcaatcatgagtgccaaatcggcatagcg

SEQ ID NO: 181085 - DNA, 55 bp, Artificial
  Synthetic oligonucleotide
gcgctgaaggtatctttcgcgtcgattagcgaacactgatgcttctctttgcagg

SEQ ID NO: 181086 - DNA, 55 bp, Artificial
  Synthetic oligonucleotide
gcgctctccactatgggtagcagtaccagttccatcggcatcttacgttgcttaa

SEQ ID NO: 181087 - DNA, 55 bp, Artificial
  Synthetic oligonucleotide
gcgctcgtggcgtgacatggcgaaaatcggcagtcctgaggtgatacgtgaggtc

SEQ ID NO: 181088 - DNA, 55 bp, Artificial
  Synthetic oligonucleotide
gcgctcccggtaagatgcgatgcaacgggagatttgtacgtcacatatacccgcg

SEQ ID NO: 181089 - DNA, 55 bp, Artificial
  Synthetic oligonucleotide
gcgttccgtcagacctgctattcgggtcacgaataacggagaggtgaaatagcgt

SEQ ID NO: 181090 - DNA, 55 bp, Artificial
  Synthetic oligonucleotide
gcgttccattttcgttacggttaatctcctgtagcgcggaggtctggcgtcatgt

SEQ ID NO: 181091 - DNA, 55 bp, Artificial
  Synthetic oligonucleotide
gcgttcaaccggaaacgagcgcccttctgagatgacgacgggcgcttctggtagc

SEQ ID NO: 181092 - DNA, 55 bp, Artificial
  Synthetic oligonucleotide
ataccgtcctgtcgtgctacgggcctggcagggactgacagaatgtgtcgacgaa

SEQ ID NO: 181093 - DNA, 60 bp, Artificial
  Synthetic oligonucleotide
ggccgaggataaatgcctggcagacgctggttaatcatcattacgggctgcgtgacccga

SEQ ID NO: 181094 - DNA, 55 bp, Artificial
  Synthetic oligonucleotide
gcgttatcggcaaagtggcaggcatttatgacccaggcctacaaccttgcaccgg

SEQ ID NO: 181095 - DNA, 55 bp, Artificial
  Synthetic oligonucleotide
gcgtgttgaactgctactctttgcgctgccgcgcactttaatcgctcgccccacc

SEQ ID NO: 181096 - DNA, 55 bp, Artificial
  Synthetic oligonucleotide
ataccgtttggatgagctgctagtatggtaccaggtaatatagatgtcgacgacg

SEQ ID NO: 181097 - DNA, 55 bp, Artificial
  Synthetic oligonucleotide
gcgtgtcgtgttatgtaggagaagcaacatgcaagaagggcaaaaccgtaagaca

SEQ ID NO: 181098 - DNA, 55 bp, Artificial
  Synthetic oligonucleotide
gcgtggcgtaatgcgcaggaaaacggtaactatccgttcacactgaatgatcacc

SEQ ID NO: 181099 - DNA, 55 bp, Artificial
  Synthetic oligonucleotide
gcgtgctgctagcgctatatgcgttgatgcaatttctatgcgcacccgttctcgg

SEQ ID NO: 181100 - DNA, 55 bp, Artificial
  Synthetic oligonucleotide
gcgtgcgtcattgaatgtctggcgtttgtctatcagtactggcatttgccgggcg

SEQ ID NO: 181101 - DNA, 55 bp, Artificial
  Synthetic oligonucleotide
gcgtgcgggaaacttactgtgggccgtatctagctcagtattacgactgaatata

SEQ ID NO: 181102 - DNA, 55 bp, Artificial
  Synthetic oligonucleotide
gcgtgcggaaacagagcaccactgcactgcttaccggaaactcgcctgccagcga

SEQ ID NO: 181103 - DNA, 55 bp, Artificial
  Synthetic oligonucleotide
gcgtgccttgaacctgcctgacgacgccaaccaggattcgatcaaggcatcgttc

SEQ ID NO: 181104 - DNA, 60 bp, Artificial
  Synthetic oligonucleotide
gccaaccctgacggcgacaataatgcagaaggcagcgcccagtaaggtccgtaatagctg

SEQ ID NO: 181105 - DNA, 60 bp, Artificial
  Synthetic oligonucleotide
ggccgaattgcatctaggcaaaggaataatcaatagcacaacagatgagatgaacacaat

SEQ ID NO: 181106 - DNA, 55 bp, Artificial
  Synthetic oligonucleotide
atacctacctgcaacaaatcgagcgtgtggccccttatctgggcgagttatcccc

SEQ ID NO: 181107 - DNA, 55 bp, Artificial
  Synthetic oligonucleotide
gcgtgatgacacgtcagccgtatcaaggaatgatagtagcaggcgatatggccga

SEQ ID NO: 181108 - DNA, 55 bp, Artificial
  Synthetic oligonucleotide
gcgtgagtatgatgcatggttacagtgtgactgtattccgggagattcgccggcc

SEQ ID NO: 181109 - DNA, 55 bp, Artificial
  Synthetic oligonucleotide
gcgtgacgaacccgttattgtcgcgttgtaggcagtggcagagcgatacccacgg

SEQ ID NO: 181110 - DNA, 55 bp, Artificial
  Synthetic oligonucleotide
gcgtgaatgttgatgcgggtaaccgtttctacgtgcgtaagatccgctttgaagg

SEQ ID NO: 181111 - DNA, 55 bp, Artificial
  Synthetic oligonucleotide
gcgtgaaggtggtataccgcgtcggtgagcaggaacagaccccgctggagggatt

SEQ ID NO: 181112 - DNA, 55 bp, Artificial
  Synthetic oligonucleotide
gctacaggaagcctcgattaaacacatctggacctatccgtacacaccgaaaatg

SEQ ID NO: 181113 - DNA, 55 bp, Artificial
  Synthetic oligonucleotide
gctacacgctatggtgaccctatcgcgcctgcacggtaataaacacgatcgaacg

SEQ ID NO: 181114 - DNA, 54 bp, Artificial
  Synthetic oligonucleotide
gctaattaacgttcgcccgacttcgggtaacgcatctacggaggtggtagtatc

SEQ ID NO: 181115 - DNA, 55 bp, Artificial
  Synthetic oligonucleotide
gctaatccggcgctgaaacataagacctggcaaatcgcaatgaatggtagccaga

SEQ ID NO: 181116 - DNA, 60 bp, Artificial
  Synthetic oligonucleotide
ggcccggcgcatgttgcttttgtgcgctaaccccatgtatcaagcgacaaatattaccgc

SEQ ID NO: 181117 - DNA, 55 bp, Artificial
  Synthetic oligonucleotide
gctaactcggttcgtacttcattcttctgggatatgggtaccgtttgggatacaa

SEQ ID NO: 181118 - DNA, 55 bp, Artificial
  Synthetic oligonucleotide
gctaaccgtgctcaacgatcctggttaatccgaacacaacgaatatctgaggaga

SEQ ID NO: 181119 - DNA, 55 bp, Artificial
  Synthetic oligonucleotide
gctaacccctcatgtcggacgtctggatatgaataagacgacaggaacggttgtc

SEQ ID NO: 181120 - DNA, 55 bp, Artificial
  Synthetic oligonucleotide
gctaacaccgctgtagcgtcaagttctaagggaaatacccaaagtcattggcgtt

SEQ ID NO: 181121 - DNA, 55 bp, Artificial
  Synthetic oligonucleotide
gctaaaccgacagataagcggcatctgtctgaattaacaaaagtctggtgggatc

SEQ ID NO: 181122 - DNA, 55 bp, Artificial
  Synthetic oligonucleotide
ataatgacgacccgacaggggaacgcatgacaaccttaagctgtaaagtgacctc

SEQ ID NO: 181123 - DNA, 54 bp, Artificial
  Synthetic oligonucleotide
gcgttttgtcagggtacttagcgaagaggctaactgggctttcccttatcaacc

SEQ ID NO: 181124 - DNA, 55 bp, Artificial
  Synthetic oligonucleotide
ataatggtgtcaaacgactcaccacaccgttcgaatccgtcaagtcgcggcagtg

SEQ ID NO: 181125 - DNA, 55 bp, Artificial
  Synthetic oligonucleotide
atacacaatcaagatctgaagcatcaagagccttatggcccaggctcacctacag

SEQ ID NO: 181126 - DNA, 55 bp, Artificial
  Synthetic oligonucleotide
gcgtttgcataagttatgtgtcaatcttgggattaccacgggctgacccagatag

SEQ ID NO: 181127 - DNA, 59 bp, Artificial
  Synthetic oligonucleotide
ggccatgtcccacgcgagcgacagtatcaacgaccgtacgactgatagtggggattccg

SEQ ID NO: 181128 - DNA, 55 bp, Artificial
  Synthetic oligonucleotide
gcgtttcgttcccttttaccaccggattatggatggtatgcgcttcatcgctcgc

SEQ ID NO: 181129 - DNA, 55 bp, Artificial
  Synthetic oligonucleotide
gcgtttcatgtgataataacaaaggataatggtgtgcatgcattccctactaacc

SEQ ID NO: 181130 - DNA, 52 bp, Artificial
  Synthetic oligonucleotide
gcgtttcatcgggttagcgtcccggtaacgcagaaaatacgtaacccactcc

SEQ ID NO: 181131 - DNA, 55 bp, Artificial
  Synthetic oligonucleotide
gcgttgtcaggaagcacgatattcagaaggtcagccacacggcgggcaggctctg

SEQ ID NO: 181132 - DNA, 55 bp, Artificial
  Synthetic oligonucleotide
ataccagacgccgttcatcctggcggaatatccccgacagcagcccctgaggggt

SEQ ID NO: 181133 - DNA, 55 bp, Artificial
  Synthetic oligonucleotide
gcgttgagttgtcgtgagagccaaagattaacgcttccgttttgcgacgaggttt

SEQ ID NO: 181134 - DNA, 55 bp, Artificial
  Synthetic oligonucleotide
ataccgcgcaacccgttgtaacacgctatctttcggtgcccacagcgtggttcgg

SEQ ID NO: 181135 - DNA, 54 bp, Artificial
  Synthetic oligonucleotide
gcgtaatgtttgacccacaagccgcaatctacccgttcccgccgaaaccaacgc

SEQ ID NO: 181136 - DNA, 55 bp, Artificial
  Synthetic oligonucleotide
gcgtaatatacgcctcctcgcaacaacgcagaagaccggaaacggcagcgatagt

SEQ ID NO: 181137 - DNA, 55 bp, Artificial
  Synthetic oligonucleotide
gcgtaactaatactccgcgccataaatagctcggccaaagaatcaggagcgtgta

SEQ ID NO: 181138 - DNA, 57 bp, Artificial
  Synthetic oligonucleotide
agggtttatgtccaaaatgaccagtaagcgcgatcacgaaacttcctatagcctggc

SEQ ID NO: 181139 - DNA, 55 bp, Artificial
  Synthetic oligonucleotide
gcgtaaccggatgcgttctccgcgtttaagaccatagcgaccggatgcatccccg

SEQ ID NO: 181140 - DNA, 55 bp, Artificial
  Synthetic oligonucleotide
gcgtaacatgcgcccacgattacgctaagaggacattcgccttggacacacccag

SEQ ID NO: 181141 - DNA, 55 bp, Artificial
  Synthetic oligonucleotide
gcggtttattttcatcaggtggtgttatccaaagtgggcaacaacgcagagatca

SEQ ID NO: 181142 - DNA, 55 bp, Artificial
  Synthetic oligonucleotide
gcggttgtacgccctttattgcgcacagtccctctactacgcccgaagcctgacc

SEQ ID NO: 181143 - DNA, 55 bp, Artificial
  Synthetic oligonucleotide
atagaacatcagcgccgcgctagccttagctcgagttaaacccagttcacgcccc

SEQ ID NO: 181144 - DNA, 55 bp, Artificial
  Synthetic oligonucleotide
gcggttaatagcggaccgtgccaggacaatcctgccagagcagataagatgcgcg

SEQ ID NO: 181145 - DNA, 55 bp, Artificial
  Synthetic oligonucleotide
gcggtgtacgcatcttatcccactcagcacggcaacccatcatctagaggcccgc

SEQ ID NO: 181146 - DNA, 55 bp, Artificial
  Synthetic oligonucleotide
gcggtgctacagagttcttgaagtggtggcctaactacggctacactagaaggac

SEQ ID NO: 181147 - DNA, 55 bp, Artificial
  Synthetic oligonucleotide
atagacattgcttggtcgaaccacagtaacatcacgttcgctcttaatacacagc

SEQ ID NO: 181148 - DNA, 55 bp, Artificial
  Synthetic oligonucleotide
gcggtgccaatactgacagacggtccgctaaggttcagtttgtaagcggcacgtg

SEQ ID NO: 181149 - DNA, 59 bp, Artificial
  Synthetic oligonucleotide
ggccagccagttaccagcagcgggtaataatgtaccggtgaaatatcgtctgatggacc

SEQ ID NO: 181150 - DNA, 55 bp, Artificial
  Synthetic oligonucleotide
gcggtgcagaagaatattcgtgatgccggataaacccgccaaaagaaacacaggt

SEQ ID NO: 181151 - DNA, 55 bp, Artificial
  Synthetic oligonucleotide
atagaccatcgttcatacgagcgtcagggactggagaaagcgccgggccttcacc

SEQ ID NO: 181152 - DNA, 55 bp, Artificial
  Synthetic oligonucleotide
gcggtctacggtgctgtttccgtagttaatacgagcgccttttgctcctagcgcc

SEQ ID NO: 181153 - DNA, 55 bp, Artificial
  Synthetic oligonucleotide
gcggtccataccctgtttcatcgtcacgcaaacgtggcagctcgccggcaattag

SEQ ID NO: 181154 - DNA, 55 bp, Artificial
  Synthetic oligonucleotide
gcggtatcgcagtgatgggtttaactatcgcttggtacatgggtgcagatgtcag

SEQ ID NO: 181155 - DNA, 55 bp, Artificial
  Synthetic oligonucleotide
atagatcactgcgtcatccgccccggaatacgccgggtcaacaccgaggaaccgg

SEQ ID NO: 181156 - DNA, 55 bp, Artificial
  Synthetic oligonucleotide
gcggtagtcaccgtagtcattctgtatgttgccctgttctggtaaggagtcccgg

SEQ ID NO: 181157 - DNA, 55 bp, Artificial
  Synthetic oligonucleotide
gcgtctggttagccacggtatcgcgtcttgactggccaccggtagcgtcggtgaa

SEQ ID NO: 181158 - DNA, 55 bp, Artificial
  Synthetic oligonucleotide
gcgtctctaaccatgagagcgctttggatacatccgggatcaaatcgacctcccg

SEQ ID NO: 181159 - DNA, 55 bp, Artificial
  Synthetic oligonucleotide
gcgtcgtgattttaccgtcaactgaattgaccaaaccaaatcggtcagcgcgaac

SEQ ID NO: 181160 - DNA, 60 bp, Artificial
  Synthetic oligonucleotide
ggccacgcgtctcataggccatccgcagggcactgcttatcagtgcggtatcggcatgcg

SEQ ID NO: 181161 - DNA, 55 bp, Artificial
  Synthetic oligonucleotide
gcgtcgtaatgtcgcacgcgttaagactttactgactgagaaggcgggtgcgtaa

SEQ ID NO: 181162 - DNA, 55 bp, Artificial
  Synthetic oligonucleotide
gcgtcgcagaccgcacgacaaacgaaacgaagtgtagtttgtatgagtgcgcact

SEQ ID NO: 181163 - DNA, 55 bp, Artificial
  Synthetic oligonucleotide
gcgtcgaatgcattaatccctgggagcatacacaagtatgtgactagggttgatg

SEQ ID NO: 181164 - DNA, 55 bp, Artificial
  Synthetic oligonucleotide
atacgcagaaattcacacgccaaaagcatggaaaatgctaaccgatggtcagcgc

SEQ ID NO: 181165 - DNA, 55 bp, Artificial
  Synthetic oligonucleotide
atacgccggggtgccttgaaagaggtcggttgtatgggatacatggaggcccaac

SEQ ID NO: 181166 - DNA, 53 bp, Artificial
  Synthetic oligonucleotide
gcgtcattttggattctaagcctaaggacctttgttacttacaggtaaaggcc

SEQ ID NO: 181167 - DNA, 55 bp, Artificial
  Synthetic oligonucleotide
gcgtcaggtaaggcattaccgcgtcagaaaaggttattcgagctttggcctcacc

SEQ ID NO: 181168 - DNA, 55 bp, Artificial
  Synthetic oligonucleotide
gcgtcaaattagcatcgctaacaaattgacttcgctctccccaaactgcgtgtga

SEQ ID NO: 181169 - DNA, 55 bp, Artificial
  Synthetic oligonucleotide
gcgtatttgctaccggtatgtccgtattggtggccagcagttttcgcagagtcgt

SEQ ID NO: 181170 - DNA, 55 bp, Artificial
  Synthetic oligonucleotide
gcgtatgaagcccgatcacatcttcctggcagagctacgcggggatgaagcgtgg

SEQ ID NO: 181171 - DNA, 60 bp, Artificial
  Synthetic oligonucleotide
ggccaatgattgcgcgtatctggtcgggtgaatccccgctatggcggttactgctgccgc

SEQ ID NO: 181172 - DNA, 55 bp, Artificial
  Synthetic oligonucleotide
gcgtatccaggatgagtacatttctggctctgccacagctctgtctgttggcagc

SEQ ID NO: 181173 - DNA, 55 bp, Artificial
  Synthetic oligonucleotide
gcgtatataaagttaaaacacaacaacttagtatgcgactggaggaccaattgga

SEQ ID NO: 181174 - DNA, 55 bp, Artificial
  Synthetic oligonucleotide
gcgtaggtgactgaaacagacagtgccaggaacactgcagcaacggcaagtctct

SEQ ID NO: 181175 - DNA, 55 bp, Artificial
  Synthetic oligonucleotide
gcgtagctttgcaacttcatgtaatcttcgcgccatagcttagtaggggatagcg

SEQ ID NO: 181176 - DNA, 55 bp, Artificial
  Synthetic oligonucleotide
gcgtagcacgggaccaactcccctgcgttcttaacagaccatcttgccaacgagt

SEQ ID NO: 181177 - DNA, 55 bp, Artificial
  Synthetic oligonucleotide
atacttgccttcgcgctggatgtagtcggccttggccctggccgattggccgccc

SEQ ID NO: 181178 - DNA, 55 bp, Artificial
  Synthetic oligonucleotide
gcgtacaataatttccgatatccaaacggaccccaagttgcactcccggcatttc

SEQ ID NO: 181179 - DNA, 55 bp, Artificial
  Synthetic oligonucleotide
gcctctgtcagcgcattgagaagatgttgtgccttatccggcgactcactgtcac

SEQ ID NO: 181180 - DNA, 55 bp, Artificial
  Synthetic oligonucleotide
gcctctggctgcaattctggtactttcaggcagcttagtacttataggatgtaat

SEQ ID NO: 181181 - DNA, 55 bp, Artificial
  Synthetic oligonucleotide
gcctatctgagaccgtgtgtgagagcttccgaagactcaggccttatcaaaccgc

SEQ ID NO: 181182 - DNA, 60 bp, Artificial
  Synthetic oligonucleotide
ggcatgttgaaactcgccaatgcgtcgcgactgagacggcagatcgcagaacaggcgcga

SEQ ID NO: 181183 - DNA, 53 bp, Artificial
  Synthetic oligonucleotide
atccaggcagggtttgcgccaaaaacgcggttacggttgcgcgggtcttattc

SEQ ID NO: 181184 - DNA, 55 bp, Artificial
  Synthetic oligonucleotide
atccaggtaaataacagacgcccgcgtccgtttccccagcgtgcaacatgcagtg

SEQ ID NO: 181185 - DNA, 55 bp, Artificial
  Synthetic oligonucleotide
gcctacacggactaccaacgtggtctgttccgtagccaggttcgctatgtgttac

SEQ ID NO: 181186 - DNA, 55 bp, Artificial
  Synthetic oligonucleotide
gcctaacgttaactggctatccaactgtgggatcgggcgttgcacataagtgcgg

SEQ ID NO: 181187 - DNA, 54 bp, Artificial
  Synthetic oligonucleotide
gcctaaatgctttggttacgatattgattaccaaccagttgaaaacttaaggag

SEQ ID NO: 181188 - DNA, 54 bp, Artificial
  Synthetic oligonucleotide
gccgttggcacccaaaccgggccatcttgtttgcgttcaaccgcagttacccag

SEQ ID NO: 181189 - DNA, 55 bp, Artificial
  Synthetic oligonucleotide
gccgttcatgcaggcgttataattgcgtcgcagcgcattcagggtttctcccgct

SEQ ID NO: 181190 - DNA, 55 bp, Artificial
  Synthetic oligonucleotide
gccgttagctttgcggttgaacagatacccggacaccacttcctgataccggcga

SEQ ID NO: 181191 - DNA, 55 bp, Artificial
  Synthetic oligonucleotide
gccgtgcatactgatacagataatctgcacgtccatgtggctgttaaccgggtac

SEQ ID NO: 181192 - DNA, 55 bp, Artificial
  Synthetic oligonucleotide
gccgtgacaacaaaagtgcgacttgcaccgtttaagtggtttgtcagagcgcgcc

SEQ ID NO: 181193 - DNA, 60 bp, Artificial
  Synthetic oligonucleotide
aggtacgagattgcatgcaatctctagtgctctgtctatcctgcattatcctcagcatta

SEQ ID NO: 181194 - DNA, 55 bp, Artificial
  Synthetic oligonucleotide
gccgtgaacctgcgaatagtaaatctgcggccagtcgttaagaatagtgcgcgca

SEQ ID NO: 181195 - DNA, 55 bp, Artificial
  Synthetic oligonucleotide
gccgtcgggtttcatagagatgttgttcaaggcgggtgcgtaactgcggttcatt

SEQ ID NO: 181196 - DNA, 55 bp, Artificial
  Synthetic oligonucleotide
gccgtcgaattacgatccggtagcgcgaacctacaacggcatctgggacggcacg

SEQ ID NO: 181197 - DNA, 55 bp, Artificial
  Synthetic oligonucleotide
gccgtcatctgccgcttcataagcagagacacgcccgaccgttttcaccgcatcg

SEQ ID NO: 181198 - DNA, 55 bp, Artificial
  Synthetic oligonucleotide
gccgtcagttccggggataccgtttcactagaacgctcctgcgggaagacgagcc

SEQ ID NO: 181199 - DNA, 53 bp, Artificial
  Synthetic oligonucleotide
atcccaacgtcgtttgccgggattcttacgggaaaaggcttgtacgcatacag

SEQ ID NO: 181200 - DNA, 55 bp, Artificial
  Synthetic oligonucleotide
gccgtagaagaacagcaaggccgccaatgcctgacgatgcgtggagaccgaaacc

SEQ ID NO: 181201 - DNA, 55 bp, Artificial
  Synthetic oligonucleotide
gccttccttcaatctccacgctgaaagtagcttcgtctcgcatactaagcacgcg

SEQ ID NO: 181202 - DNA, 55 bp, Artificial
  Synthetic oligonucleotide
gccttattgatgacgctgggtcatgtggtattgggcttagaatctgattcaacgc

SEQ ID NO: 181203 - DNA, 55 bp, Artificial
  Synthetic oligonucleotide
atcagtgacgattaataaggataaaacatgcgaacgacaagtatcaccctgtgtc

SEQ ID NO: 181204 - DNA, 51 bp, Artificial
  Synthetic oligonucleotide
aggtacgcgaactcttgaagttgaaaccttttagtggttatactaaaagga

SEQ ID NO: 181205 - DNA, 55 bp, Artificial
  Synthetic oligonucleotide
gcctgttgtacactgagcgtaagtcgcgttatttaatcaaggtgggagtcgtgga

SEQ ID NO: 181206 - DNA, 52 bp, Artificial
  Synthetic oligonucleotide
gcctgttacagcggttctttccgttgttagtaggagaacaccccgccccgac

SEQ ID NO: 181207 - DNA, 55 bp, Artificial
  Synthetic oligonucleotide
gcctgttaatcagacgattctgttcgccgcgttctgtttcgataccgcgtgtttc

SEQ ID NO: 181208 - DNA, 55 bp, Artificial
  Synthetic oligonucleotide
gcctgtgcgatggaaacacgcggtatcgaaacagaacgcggcgaacagaatcgtc

SEQ ID NO: 181209 - DNA, 55 bp, Artificial
  Synthetic oligonucleotide
atcatcatatcccggctgacataatcatgaacgctatcggcataggctattgcct

SEQ ID NO: 181210 - DNA, 55 bp, Artificial
  Synthetic oligonucleotide
gcctgggtcagttcacggagtccaaacgcaaaaggacaggcgacatcgttttatc

SEQ ID NO: 181211 - DNA, 54 bp, Artificial
  Synthetic oligonucleotide
gcctggaagggctttccccgaccaataaacccagtgtaccgattctggcaattc

SEQ ID NO: 181212 - DNA, 55 bp, Artificial
  Synthetic oligonucleotide
gcctgcctcgatagtagcggagcgacgcagttaatatgtcttccgacggtgctgg

SEQ ID NO: 181213 - DNA, 55 bp, Artificial
  Synthetic oligonucleotide
gcctgcaaatgcgcctgagaagctgaagcataggtgatatagacccggcttccct

SEQ ID NO: 181214 - DNA, 55 bp, Artificial
  Synthetic oligonucleotide
gcctgacgcctgttggtgcgtcatccctaagccttccagtttatcgtacatagcc

SEQ ID NO: 181215 - DNA, 57 bp, Artificial
  Synthetic oligonucleotide
gccaaacgcgtaccacgatagacccgtgaaagcgcaaaatcgggactcacttgtagc

SEQ ID NO: 181216 - DNA, 60 bp, Artificial
  Synthetic oligonucleotide
ggcagttcccggtatgtggtggcgtgacgggtgagatggtgcggcgaagacgcatacgtc

SEQ ID NO: 181217 - DNA, 55 bp, Artificial
  Synthetic oligonucleotide
gcctgacgaactgttaaagtcggtaaccctggtgatcttcaccggtgaggtcgct

SEQ ID NO: 181218 - DNA, 55 bp, Artificial
  Synthetic oligonucleotide
atcattttagtgcgccctgcaataaatcacggatatttatcaaggtattgagcgc

SEQ ID NO: 181219 - DNA, 55 bp, Artificial
  Synthetic oligonucleotide
atccaccactctgatcgaggttcacagtactgtgcatacgattaccgggtcatac

SEQ ID NO: 181220 - DNA, 55 bp, Artificial
  Synthetic oligonucleotide
gcctgaagcacggacactccgtaaccccgcataacatcatgacgtatgttgcgat

SEQ ID NO: 181221 - DNA, 55 bp, Artificial
  Synthetic oligonucleotide
atccacccaaggggataactcgcccagataaggggccacacgctcgatttgttgc

SEQ ID NO: 181222 - DNA, 55 bp, Artificial
  Synthetic oligonucleotide
gcctctttgttggctgcactcaccccggtcacatcgttatctatgctcccgggga

SEQ ID NO: 181223 - DNA, 55 bp, Artificial
  Synthetic oligonucleotide
gcctctttaatggcgtgcacgtccggcgcgcagttaagcttcgcggcaatcaccg

SEQ ID NO: 181224 - DNA, 55 bp, Artificial
  Synthetic oligonucleotide
gccgcttgtattcaccccagcggatggtaatggtccgattcattactgacgtttc

SEQ ID NO: 181225 - DNA, 55 bp, Artificial
  Synthetic oligonucleotide
gccgcttcaggagagccacgtcagataatgttgcaacgtcatggagctgagccca

SEQ ID NO: 181226 - DNA, 55 bp, Artificial
  Synthetic oligonucleotide
gccgcttatcaaacgcgccccgatgctcaggcggtggtgcataaccatgccgtac

SEQ ID NO: 181227 - DNA, 57 bp, Artificial
  Synthetic oligonucleotide
aggtagtacggctactacagggacagccgcaagtttggctacagataaacctatcta

SEQ ID NO: 181228 - DNA, 55 bp, Artificial
  Synthetic oligonucleotide
gccgctgttactaccgcattatagaggttgaacgggccatctgcgctcattgacg

SEQ ID NO: 181229 - DNA, 55 bp, Artificial
  Synthetic oligonucleotide
gccgctgaaagccgggcatcaccccgaaacgggcgactgtcgttacaacctcact

SEQ ID NO: 181230 - DNA, 55 bp, Artificial
  Synthetic oligonucleotide
gccgctcgatattcaccacgggccttatgagtaattaacgctcatcccattcgtc

SEQ ID NO: 181231 - DNA, 55 bp, Artificial
  Synthetic oligonucleotide
gccgctccctcgtattatgggatattgaacggcctcttctaatgtggaagtggct

SEQ ID NO: 181232 - DNA, 55 bp, Artificial
  Synthetic oligonucleotide
gccgcgtttaggtacggtaacgatgtattctgcgttgctgtctccgccatctctt

SEQ ID NO: 181233 - DNA, 55 bp, Artificial
  Synthetic oligonucleotide
gccgcgtatcagcttcatgtctggctcaaaacagtgaaaatcgtcagagtatacc

SEQ ID NO: 181234 - DNA, 55 bp, Artificial
  Synthetic oligonucleotide
gccgcgtacaggtacaaattcgcgcccctgaacagtcatccaacgcactaaccca

SEQ ID NO: 181235 - DNA, 55 bp, Artificial
  Synthetic oligonucleotide
gccgcgaatgaatacgtttgctgttatactgcgtgccttgcgcgtcaatgcggcg

SEQ ID NO: 181236 - DNA, 52 bp, Artificial
  Synthetic oligonucleotide
gccgccttcccgcaatctgaactatttagggtaataacctggttaaaccgcg

SEQ ID NO: 181237 - DNA, 55 bp, Artificial
  Synthetic oligonucleotide
gccgcctcatcctgatttagtgaataaagtgaattttccgccgtagttggcaacc

SEQ ID NO: 181238 - DNA, 55 bp, Artificial
  Synthetic oligonucleotide
ggcagtgtcccgtgaataaaacggagtataggtagtaatgggtcaggaaaagcta

SEQ ID NO: 181239 - DNA, 55 bp, Artificial
  Synthetic oligonucleotide
gccgccattgttgtactctcggtgtcgagttgtgctgagtgggttggaatccgac

SEQ ID NO: 181240 - DNA, 55 bp, Artificial
  Synthetic oligonucleotide
gccgcaccaaactcgacagccaagagttgccatcagatcagcgcccggatacctc

SEQ ID NO: 181241 - DNA, 55 bp, Artificial
  Synthetic oligonucleotide
gccgcacagctccataggccgctttcctggctttgcttccagatgtatgctcttc

SEQ ID NO: 181242 - DNA, 55 bp, Artificial
  Synthetic oligonucleotide
gccgcacagaatcaggtatacatcgattagtccgtaaaagtccttttgatatgag

SEQ ID NO: 181243 - DNA, 55 bp, Artificial
  Synthetic oligonucleotide
gccgtaccgagcatcctcagaccttcttccggtgcgtgcatatgaatgccgtggg

SEQ ID NO: 181244 - DNA, 55 bp, Artificial
  Synthetic oligonucleotide
gccgtaaaacagtaggtcattacgagctgacacgcattaactaattgctagtcag

SEQ ID NO: 181245 - DNA, 55 bp, Artificial
  Synthetic oligonucleotide
gccggttgttcaaacaacgctaaaatcgatcagttgtcttccgatgtacagacgc

SEQ ID NO: 181246 - DNA, 55 bp, Artificial
  Synthetic oligonucleotide
gccggtgtggaacgggcagatgatgaccttcgtgcaggacaggccctcggataca

SEQ ID NO: 181247 - DNA, 55 bp, Artificial
  Synthetic oligonucleotide
gccggtgctgtacggcaagatgcaggtggggtcacgcgtgatttcccaggaagtc

SEQ ID NO: 181248 - DNA, 55 bp, Artificial
  Synthetic oligonucleotide
gccggtgcgttttgtcaatattggcctacaattcttgccttgacgctgtgatgtc

SEQ ID NO: 181249 - DNA, 59 bp, Artificial
  Synthetic oligonucleotide
aggtatacggactatcttcttatgccgcttaccccggagcatgtcacgcattacaattc

SEQ ID NO: 181250 - DNA, 55 bp, Artificial
  Synthetic oligonucleotide
gccggtctgggagatagtgagacctggtactattgggttcgcgcggtgaacaagc

SEQ ID NO: 181251 - DNA, 55 bp, Artificial
  Synthetic oligonucleotide
gccggtaagctgtagaggcatctcactgctgtccatgctgagttttcccgggccg

SEQ ID NO: 181252 - DNA, 55 bp, Artificial
  Synthetic oligonucleotide
gccggggtgcggtatgttccgatccactcgctactgatggggattgttgataagc

SEQ ID NO: 181253 - DNA, 55 bp, Artificial
  Synthetic oligonucleotide
gccgggcgttattttgaacgtctagtaagtcacgacgcgactttccgcgtgttgc

SEQ ID NO: 181254 - DNA, 55 bp, Artificial
  Synthetic oligonucleotide
gccgggcgtgaggtttatcaatataaagagttagcgggactggtaggcgttagcg

SEQ ID NO: 181255 - DNA, 55 bp, Artificial
  Synthetic oligonucleotide
gccgggcaagagcaactcggtcgccgcatacactattctcagaatgacttggttg

SEQ ID NO: 181256 - DNA, 55 bp, Artificial
  Synthetic oligonucleotide
gccggcggggattacggagccgtagagtggcaagcgggaagtctgaacacgcttg

SEQ ID NO: 181257 - DNA, 55 bp, Artificial
  Synthetic oligonucleotide
gccggcctgcgcggcgcggatttcggtttccatcttcatggcttccagaatcagc

SEQ ID NO: 181258 - DNA, 54 bp, Artificial
  Synthetic oligonucleotide
atccccagtaccagacccactaaaatttgtttaaccaggctgccctgcgctaaa

SEQ ID NO: 181259 - DNA, 55 bp, Artificial
  Synthetic oligonucleotide
gccggattgataaagactgagccattcggcgcaatactgccggtccattgagggt

SEQ ID NO: 181260 - DNA, 59 bp, Artificial
  Synthetic oligonucleotide
ggcagtgatttacattggcaaagcccgatatcaggacctggctaaacacgcccgcgaaa

SEQ ID NO: 181261 - DNA, 55 bp, Artificial
  Synthetic oligonucleotide
gccggagagaaatctacgcctgtgcagtgaaacccacgctccgctaacaggcggg

SEQ ID NO: 181262 - DNA, 55 bp, Artificial
  Synthetic oligonucleotide
gccggaccgataccatgagcgtaactacgccgttgcgaatcagcgtctaagcggc

SEQ ID NO: 181263 - DNA, 55 bp, Artificial
  Synthetic oligonucleotide
gccggacaagggcgctattatcgtttaaacaacgtctgtaagctattattgaacg

SEQ ID NO: 181264 - DNA, 55 bp, Artificial
  Synthetic oligonucleotide
gccgctttatcgccgcgttttatcctgtggctacctacagtgcaactgagcgcct

SEQ ID NO: 181265 - DNA, 55 bp, Artificial
  Synthetic oligonucleotide
gcgcagcggtcgtgacaattatgattaactccggcgcttatatcgcggaaattac

SEQ ID NO: 181266 - DNA, 55 bp, Artificial
  Synthetic oligonucleotide
gcgcagataccaaatactgttcttctagtgtagccgtagttaggccaccacttca

SEQ ID NO: 181267 - DNA, 55 bp, Artificial
  Synthetic oligonucleotide
gcgcagacggttcctggcgtattgctgtaagacgcatccgcacgtttggaggcat

SEQ ID NO: 181268 - DNA, 55 bp, Artificial
  Synthetic oligonucleotide
atcaactatcaggcattacgtgaacgttattcacctgtgccagtaccgaaatgcc

SEQ ID NO: 181269 - DNA, 55 bp, Artificial
  Synthetic oligonucleotide
gcgcacggtttagttgcatgtaaaccagccatcgatcgttttctccccttcggaa

SEQ ID NO: 181270 - DNA, 55 bp, Artificial
  Synthetic oligonucleotide
gcgcaattattgtctacggcatgtttgctttaggtctgtggatggtcacgctcag

SEQ ID NO: 181271 - DNA, 58 bp, Artificial
  Synthetic oligonucleotide
aggtattgatgtccaccaggcaaaagacgcagacgatctctttaacaaacttggtatc

SEQ ID NO: 181272 - DNA, 55 bp, Artificial
  Synthetic oligonucleotide
atcaactgcgcgttctcccgtatctgtgtcccttgccaccacagcacgctcccgc

SEQ ID NO: 181273 - DNA, 55 bp, Artificial
  Synthetic oligonucleotide
gcgcaacgttgttgccattgctacaggcatcgtggtgtcacgctcgtcgtttggt

SEQ ID NO: 181274 - DNA, 55 bp, Artificial
  Synthetic oligonucleotide
gcgcaaccgtgggaagcgcacaggcggagcaagtgggttccgttgatacggtgtt

SEQ ID NO: 181275 - DNA, 55 bp, Artificial
  Synthetic oligonucleotide
gcgatttcagcggtcagtcattttacccttggtgccgtactggagcagcaggagc

SEQ ID NO: 181276 - DNA, 55 bp, Artificial
  Synthetic oligonucleotide
gcgattggtctgctgggcttactggtgggttaccttgtcgttttaatgtacgcac

SEQ ID NO: 181277 - DNA, 55 bp, Artificial
  Synthetic oligonucleotide
atcaaggacaaggcggttgcgtttgataccggcacccgtcagcgccgcgatgcgc

SEQ ID NO: 181278 - DNA, 55 bp, Artificial
  Synthetic oligonucleotide
gcgattaatcatagcggcatccccgaccaacgctttaacgagattccgctgacta

SEQ ID NO: 181279 - DNA, 55 bp, Artificial
  Synthetic oligonucleotide
gcgatcgaggatcaggctcgaggagtataactgcgggatcaggccgcgttgtacg

SEQ ID NO: 181280 - DNA, 55 bp, Artificial
  Synthetic oligonucleotide
gcgatcctctaaaccctgaaccgcctgaagtagcccaacctaatgtatgaccttg

SEQ ID NO: 181281 - DNA, 55 bp, Artificial
  Synthetic oligonucleotide
gcgatatggtcttttacgggcaaccccgtaatgaagatggttccattagcttcag

SEQ ID NO: 181282 - DNA, 60 bp, Artificial
  Synthetic oligonucleotide
ggcagtgagtgtaccggcaacctgaatgatctcagtctgcgcggacaggtttcagcacag

SEQ ID NO: 181283 - DNA, 55 bp, Artificial
  Synthetic oligonucleotide
gcgatatcttccgaagcaataaattcacgtaataacgttggcaagactggcatga

SEQ ID NO: 181284 - DNA, 55 bp, Artificial
  Synthetic oligonucleotide
gcgatagcggctggatagtcattaaaagggatttgcttgctgagaagctggcgac

SEQ ID NO: 181285 - DNA, 55 bp, Artificial
  Synthetic oligonucleotide
gcgataccgtctggaaacagtagttttggtgctagctcggcaaacggatatagca

SEQ ID NO: 181286 - DNA, 55 bp, Artificial
  Synthetic oligonucleotide
gcgataatcttgtttgaattcaaccgggcagcatgtttcattccctgaccttatt

SEQ ID NO: 181287 - DNA, 55 bp, Artificial
  Synthetic oligonucleotide
gcgcctgagtttgtctgggccaatgattccctgaccctttactatgtgcgtaagc

SEQ ID NO: 181288 - DNA, 55 bp, Artificial
  Synthetic oligonucleotide
gcgcctccgggagtcgaccttttaccaacgtcagtaaatcctgacggatagcgcg

SEQ ID NO: 181289 - DNA, 55 bp, Artificial
  Synthetic oligonucleotide
atatgaccgctgaggcgtccgtgtacgcctatgcacagcgttattgccccgatta

SEQ ID NO: 181290 - DNA, 55 bp, Artificial
  Synthetic oligonucleotide
gcgccggattaacctgagaatattaacggtctttcgacgcgcgcacacaatagca

SEQ ID NO: 181291 - DNA, 55 bp, Artificial
  Synthetic oligonucleotide
gcgccggagtccctgaatcgcaaagcgcgatgtgccttccaggatgcacgagaag

SEQ ID NO: 181292 - DNA, 55 bp, Artificial
  Synthetic oligonucleotide
gcgccctgggacgcacacagaagcgtttctgacgacgtgggagggatttacctgc

SEQ ID NO: 181293 - DNA, 60 bp, Artificial
  Synthetic oligonucleotide
aggtcaggaaaagtacaaatgatcgctctgtattacaggcaggttaaccatgaacaatca

SEQ ID NO: 181294 - DNA, 55 bp, Artificial
  Synthetic oligonucleotide
gcgccctgataagtacccgttcggatctttgcccgatcccgggcggcactatgga

SEQ ID NO: 181295 - DNA, 55 bp, Artificial
  Synthetic oligonucleotide
gcgcccgggtttcatcgttgagtggcgaaacccacagatgcgcctgagtgagtgt

SEQ ID NO: 181296 - DNA, 55 bp, Artificial
  Synthetic oligonucleotide
gcgccccataacataatgagctgagcgagactccagccatttccggtaggaacga

SEQ ID NO: 181297 - DNA, 55 bp, Artificial
  Synthetic oligonucleotide
gcgccaggcgtaggctttactattggcgaaaatatacagccccgctgaactcaat

SEQ ID NO: 181298 - DNA, 55 bp, Artificial
  Synthetic oligonucleotide
gcgccagcctttgtgtcacggtatggggcgtttctcgtttgcgctacggtgtgca

SEQ ID NO: 181299 - DNA, 55 bp, Artificial
  Synthetic oligonucleotide
gcgccactgagcattcccctgcataaagccggcaatcatgccaacggatgaattt

SEQ ID NO: 181300 - DNA, 55 bp, Artificial
  Synthetic oligonucleotide
atattggggcggtcaagtgcggcggtaaggtggcttagcccggtatcgactgaca

SEQ ID NO: 181301 - DNA, 55 bp, Artificial
  Synthetic oligonucleotide
gcgccaacttgagtgtcgagatcttgtgggtcccccacacgtaaacggctggccc

SEQ ID NO: 181302 - DNA, 55 bp, Artificial
  Synthetic oligonucleotide
gcgcattaatggacttagcggcagcgcgtgctgtctggccgatttgtttgcgcgt

SEQ ID NO: 181303 - DNA, 55 bp, Artificial
  Synthetic oligonucleotide
gcgcatgaggctgttcgccgccgtcaatgctcgctttcggattgtgaatggcaaa

SEQ ID NO: 181304 - DNA, 56 bp, Artificial
  Synthetic oligonucleotide
ggcaggtcgtcagggaacagggagcgcgggatgatagttaagtttcatgcccgggg

SEQ ID NO: 181305 - DNA, 55 bp, Artificial
  Synthetic oligonucleotide
gcgcatcactttacggtcgatcagacctgtggtgtccagtttaacatcgccccat

SEQ ID NO: 181306 - DNA, 55 bp, Artificial
  Synthetic oligonucleotide
gcgcatcacagagcagggcttcgcgcagtatgtggcagatacgcacacgccagag

SEQ ID NO: 181307 - DNA, 55 bp, Artificial
  Synthetic oligonucleotide
gcgcagtgggatgcttctactgtttatggcgcaaactggggttctttcgaaatcg

SEQ ID NO: 181308 - DNA, 55 bp, Artificial
  Synthetic oligonucleotide
gcgaagttgattcccaacacaccggtatcaaaatcaacgctttaaagctagctgg

SEQ ID NO: 181309 - DNA, 55 bp, Artificial
  Synthetic oligonucleotide
gcgaagtactctgggccgtactggaaatcgagatactgtgacaccatgctgtccg

SEQ ID NO: 181310 - DNA, 55 bp, Artificial
  Synthetic oligonucleotide
gcgaagccacgataccacattaaaacgcctcagcggatttatctcggcgcaacaa

SEQ ID NO: 181311 - DNA, 53 bp, Artificial
  Synthetic oligonucleotide
gcgaacttaatttcaccgaccgacccacctgtttaccttcgacagaataggcc

SEQ ID NO: 181312 - DNA, 55 bp, Artificial
  Synthetic oligonucleotide
gcgaaccaaacagagcttcggtgcctaccctaccgtctcactttctgatgcgcgt

SEQ ID NO: 181313 - DNA, 55 bp, Artificial
  Synthetic oligonucleotide
gcgaacaccaataaccgtgttcacatgaccgcagaactgtacaaataacggatgg

SEQ ID NO: 181314 - DNA, 55 bp, Artificial
  Synthetic oligonucleotide
gcgaacaaactgggtttgcttacaccgaccaattaactctagacgcattaatgcg

SEQ ID NO: 181315 - DNA, 60 bp, Artificial
  Synthetic oligonucleotide
ggcagcctgattttcacattcaggaacggtggctggtcagtatcgcctcccacaagcagg

SEQ ID NO: 181316 - DNA, 55 bp, Artificial
  Synthetic oligonucleotide
atcagaagagaccaaggcgcgggattggcctgaccttgaactggatatcgcccgc

SEQ ID NO: 181317 - DNA, 55 bp, Artificial
  Synthetic oligonucleotide
atcagaagtagggctgctcatcttcggactatcggccgtatgggctttgtacccg

SEQ ID NO: 181318 - DNA, 55 bp, Artificial
  Synthetic oligonucleotide
gcgaaacggtctaaacccgcagctggatatgtggcttcccactctctgcatgtga

SEQ ID NO: 181319 - DNA, 55 bp, Artificial
  Synthetic oligonucleotide
gcgaaacgactacagcatgagaaaagtcgatttgtgatcccgttcataaatatcg

SEQ ID NO: 181320 - DNA, 55 bp, Artificial
  Synthetic oligonucleotide
gcgaaaattgggatcgtcagaaatataaaagagtgggttccagcggtgcgaacgg

SEQ ID NO: 181321 - DNA, 55 bp, Artificial
  Synthetic oligonucleotide
gccttttacacaatttagcgtttcagctcacaagattgtgccgctgttgtacgga

SEQ ID NO: 181322 - DNA, 55 bp, Artificial
  Synthetic oligonucleotide
atcagatgcagccagtgcacgccactccccggcactcacaggcgccataaaggga

SEQ ID NO: 181323 - DNA, 55 bp, Artificial
  Synthetic oligonucleotide
gcctttgacaacggtatctcgccttatatcagctacagcacctcatttgagccga

SEQ ID NO: 181324 - DNA, 55 bp, Artificial
  Synthetic oligonucleotide
atcagcttacgcgcctgcgcaatggctgcgtctggcgccagataccggcctccat

SEQ ID NO: 181325 - DNA, 55 bp, Artificial
  Synthetic oligonucleotide
gccttgttgctcatttatcaggtgctagttgcgtactgcgagacggggcagagcc

SEQ ID NO: 181326 - DNA, 54 bp, Artificial
  Synthetic oligonucleotide
gcatttattttttgccgaacggccaccaccggcgggcaggtttgtcctccggca

SEQ ID NO: 181327 - DNA, 60 bp, Artificial
  Synthetic oligonucleotide
ggcgtcagtcggctcactggcatcgcgtcagactagggccgctttctgcattatctgacg

SEQ ID NO: 181328 - DNA, 55 bp, Artificial
  Synthetic oligonucleotide
gccttgccttcattgattgggatcggctgactatggatggtcatgtctgccatag

SEQ ID NO: 181329 - DNA, 55 bp, Artificial
  Synthetic oligonucleotide
gccttgagatttgtgtacggtcattgcgtatgccgtgtcgtggtagggtaaacgg

SEQ ID NO: 181330 - DNA, 55 bp, Artificial
  Synthetic oligonucleotide
gccttcggcactaggcacgcttgcgacttcatctaacatgcgcgcgacactggcg

SEQ ID NO: 181331 - DNA, 55 bp, Artificial
  Synthetic oligonucleotide
gccttcgaaggaggctatttagcgggccgttatctgattgaacgcgggcatcgtg

SEQ ID NO: 181332 - DNA, 55 bp, Artificial
  Synthetic oligonucleotide
gcgataaaacgtgatttaaggcctgaaatggcctgtctttaggcttcacattcgc

SEQ ID NO: 181333 - DNA, 55 bp, Artificial
  Synthetic oligonucleotide
gcgagtatggcggtgcaggggtttattctcccgcaggcactcttcacgcagacgc

SEQ ID NO: 181334 - DNA, 55 bp, Artificial
  Synthetic oligonucleotide
atcacagcccctgagtttactgtctagggccatgtttaacagggctaaatcgcgc

SEQ ID NO: 181335 - DNA, 55 bp, Artificial
  Synthetic oligonucleotide
gcgagacgagtcaccaaaactgtcctttcagtgtagccgtagtcaggccaccact

SEQ ID NO: 181336 - DNA, 55 bp, Artificial
  Synthetic oligonucleotide
gcgagaaattcccattggtgacagtgcggccgagttcctgcgccttatgggcatg

SEQ ID NO: 181337 - DNA, 55 bp, Artificial
  Synthetic oligonucleotide
gcgagaaaggaagggaagaaagcgaaaggagcgggcgctagggcgctggcaagtg

SEQ ID NO: 181338 - DNA, 57 bp, Artificial
  Synthetic oligonucleotide
ggcggttcgtcactaacgatccgatgacgctggtacgctggctgaccgccggaaccg

SEQ ID NO: 181339 - DNA, 55 bp, Artificial
  Synthetic oligonucleotide
gcgagaaacctgctaccgtaccgggcgtgccagaggccagatgcgaagtgagtga

SEQ ID NO: 181340 - DNA, 55 bp, Artificial
  Synthetic oligonucleotide
gcgacttaccgataacctacagtggcgactgtgtccgcaggtacgggtggctgac

SEQ ID NO: 181341 - DNA, 55 bp, Artificial
  Synthetic oligonucleotide
gcgacctcccaagagcaagccgacttcataaagtgcgtcgtaatccggatgggag

SEQ ID NO: 181342 - DNA, 55 bp, Artificial
  Synthetic oligonucleotide
gcgaccgtcagtaatctggcggatttgaccggaacccacatccatcacatacagg

SEQ ID NO: 181343 - DNA, 53 bp, Artificial
  Synthetic oligonucleotide
gcgaccattccgagccctgtacgggtcagttcgaaaagagcgtcgtaaaccgt

SEQ ID NO: 181344 - DNA, 55 bp, Artificial
  Synthetic oligonucleotide
gcgaccaaacagtgaccctggccagtcagacgcaaataaatagcgactgcccagc

SEQ ID NO: 181345 - DNA, 55 bp, Artificial
  Synthetic oligonucleotide
gcgacatgaccagataagtaacccaggcatagataatctttccgttcatgctgag

SEQ ID NO: 181346 - DNA, 55 bp, Artificial
  Synthetic oligonucleotide
gcgacaggcttttgattcccttccactggcaaaacagggagaggctgtcagacag

SEQ ID NO: 181347 - DNA, 55 bp, Artificial
  Synthetic oligonucleotide
gcgacagcgtggtactcgcggcttttatccggtcaaaacagcgctacggagcacc

SEQ ID NO: 181348 - DNA, 55 bp, Artificial
  Synthetic oligonucleotide
gcgacaattccagggcgtcgatattaatatgttggctggtagcaatgtcctgcat

SEQ ID NO: 181349 - DNA, 59 bp, Artificial
  Synthetic oligonucleotide
agggatcagaacactggtactcattcggactaatgcccttctcgtgtcaagtctttcca

SEQ ID NO: 181350 - DNA, 55 bp, Artificial
  Synthetic oligonucleotide
gcgacaagtggcgttcccgggaaatttcagactgcggtagaaatgcttatcggct

SEQ ID NO: 181351 - DNA, 52 bp, Artificial
  Synthetic oligonucleotide
gcgaattgcgagtaacctttcaccttacccggcgtattggtacaacgccctt

SEQ ID NO: 181352 - DNA, 55 bp, Artificial
  Synthetic oligonucleotide
gcgaattatttagccgcctgggtgaggtaaaggcagtgccgggtcgcccgatccc

SEQ ID NO: 181353 - DNA, 55 bp, Artificial
  Synthetic oligonucleotide
gcgaatgtccgtttctcgctcatagcagacctgactcgcgcgtccacttagtgcc

SEQ ID NO: 181354 - DNA, 55 bp, Artificial
  Synthetic oligonucleotide
gcgaatatagtgccgccgctgcctgatgtgtggataccgtttaacgattcgctgg

SEQ ID NO: 181355 - DNA, 55 bp, Artificial
  Synthetic oligonucleotide
tctatgaccacattgataaaccgctttaataaggatgcctatgttcaagctgcac

SEQ ID NO: 181356 - DNA, 55 bp, Artificial
  Synthetic oligonucleotide
tctatcgcggcccgcaacagcggcgagagcggagcctgttcaacggtgccgccgc

SEQ ID NO: 181357 - DNA, 55 bp, Artificial
  Synthetic oligonucleotide
acaccttgtgaatacttacgatgtgttaatggtatgccagagtaagctgaaacac

SEQ ID NO: 181358 - DNA, 55 bp, Artificial
  Synthetic oligonucleotide
tctagaggctgtggtagaggtgacgttctcacttagcaaagagtatatttgacgc

SEQ ID NO: 181359 - DNA, 55 bp, Artificial
  Synthetic oligonucleotide
tctactcgcagcgctctcttatcgcaagacgaagcgacattacgccgggtactct

SEQ ID NO: 181360 - DNA, 60 bp, Artificial
  Synthetic oligonucleotide
ggcgggtttttcctcgaggcatacctctctcatccatgtcgccagtcgcggcgaatcaca

SEQ ID NO: 181361 - DNA, 55 bp, Artificial
  Synthetic oligonucleotide
acacgatgcggacagaaaatgcgtgtagtcgaaacaaactcgctctggttttccg

SEQ ID NO: 181362 - DNA, 55 bp, Artificial
  Synthetic oligonucleotide
tcgttcttgtaaggttttagagcctttcgtatgtaacgattaacctcagctcctg

SEQ ID NO: 181363 - DNA, 55 bp, Artificial
  Synthetic oligonucleotide
tcgtggacaacggggcatcattcgatccgcaacccggaacgattcacggcaccgt

SEQ ID NO: 181364 - DNA, 55 bp, Artificial
  Synthetic oligonucleotide
tcgtcttgagtccaacccggtaagacacgacttatcgccactggcagcagccact

SEQ ID NO: 181365 - DNA, 55 bp, Artificial
  Synthetic oligonucleotide
tcgtccactggagaaaacgtttcacaatgcttgccaggagtcgtactggttaaaa

SEQ ID NO: 181366 - DNA, 55 bp, Artificial
  Synthetic oligonucleotide
tcgtcattcagtttcgcgcataactatgcatgaggttaaaatttaccaggcgcga

SEQ ID NO: 181367 - DNA, 55 bp, Artificial
  Synthetic oligonucleotide
acagaaatagcctttcggcctgataacaatttgtttgccgcatgaaggacagggg

SEQ ID NO: 181368 - DNA, 55 bp, Artificial
  Synthetic oligonucleotide
acagactcgccaaagctacgcaatggctccctaatccgatcttgcggcgagcggt

SEQ ID NO: 181369 - DNA, 55 bp, Artificial
  Synthetic oligonucleotide
acagataagccccgctcaatacgtgcgaggcagcatccactaggctccggtaaaa

SEQ ID NO: 181370 - DNA, 55 bp, Artificial
  Synthetic oligonucleotide
tcgtaggcgattcttggtggtgatgtgtgacccatctcttttaaaatgatattgg

SEQ ID NO: 181371 - DNA, 58 bp, Artificial
  Synthetic oligonucleotide
ggcgggagatatccattacaaacctcgttcacgcgtccagatacgaaccggctgttgc

SEQ ID NO: 181372 - DNA, 55 bp, Artificial
  Synthetic oligonucleotide
tcgtagcgctatccatagtctggttgtccagcgcgacttgcacatcggtatgaca

SEQ ID NO: 181373 - DNA, 55 bp, Artificial
  Synthetic oligonucleotide
tcgtaaacttcgcgcctgtgctttattgtggcagatacgcacacgccagagatac

SEQ ID NO: 181374 - DNA, 55 bp, Artificial
  Synthetic oligonucleotide
tcgtaaacttccagtaacggttgcgctcccggaacaagataaaggcactccatca

SEQ ID NO: 181375 - DNA, 55 bp, Artificial
  Synthetic oligonucleotide
tcggttcaaatgctattgaggttcacacgactcttgtgtccagcaaacctacccc

SEQ ID NO: 181376 - DNA, 55 bp, Artificial
  Synthetic oligonucleotide
acaacactgtatcgtttggcagcagcggtagtgaacgacagttaacgaatgtagc

SEQ ID NO: 181377 - DNA, 55 bp, Artificial
  Synthetic oligonucleotide
tctggcaccgcgacggtgattaacacttggggtggcgctgtaaccgtgcaagccg

SEQ ID NO: 181378 - DNA, 52 bp, Artificial
  Synthetic oligonucleotide
acaacctgccttattcgcccggttacagtgcggccgtcggaaacgacacccc

SEQ ID NO: 181379 - DNA, 55 bp, Artificial
  Synthetic oligonucleotide
tctgcggctaaccagctggctgtcattaagcgactccttggcgacacgaagtacc

SEQ ID NO: 181380 - DNA, 55 bp, Artificial
  Synthetic oligonucleotide
acaacgctctacaaggcattttgcaccagtccttcgaaccatcaaacccagggaa

SEQ ID NO: 181381 - DNA, 55 bp, Artificial
  Synthetic oligonucleotide
tctgagcgcgccgaccattaccagtggcgggaatcctccggcattttccctgacg

SEQ ID NO: 181382 - DNA, 57 bp, Artificial
  Synthetic oligonucleotide
ggcggcgcgtcttagcggcatgacacgttacgccgattcgcagtttacccccttgaa

SEQ ID NO: 181383 - DNA, 55 bp, Artificial
  Synthetic oligonucleotide
acaagaaggaaacgtacccaatgtcagctcaaatcaacaacatccgcccggaatt

SEQ ID NO: 181384 - DNA, 55 bp, Artificial
  Synthetic oligonucleotide
tctgacgttcaattcacgacctgtgatacgaacttcacgtacctgatcctgggct

SEQ ID NO: 181385 - DNA, 55 bp, Artificial
  Synthetic oligonucleotide
acaagtaacttgtgccagggcatagttttgttgagcagctccatcagaggctcag

SEQ ID NO: 181386 - DNA, 55 bp, Artificial
  Synthetic oligonucleotide
tctgaactgccgtaacagaccatcctcacccatgatcagacgggttacgggcaat

SEQ ID NO: 181387 - DNA, 55 bp, Artificial
  Synthetic oligonucleotide
acaataaccacggaggtagcaagtgaccattgctattgtcataggcacgcatggc

SEQ ID NO: 181388 - DNA, 55 bp, Artificial
  Synthetic oligonucleotide
acaatccggcggctatggtaatcgggtagctgcgctccccaagcgttacggtaat

SEQ ID NO: 181389 - DNA, 55 bp, Artificial
  Synthetic oligonucleotide
acacacgttcggcgcaaaccgttacgctgcgtccggaagcgattcacctgtcgcc

SEQ ID NO: 181390 - DNA, 55 bp, Artificial
  Synthetic oligonucleotide
tctctaatgcgtcacttccaggtggcgtaagcaagattactcacttctgggtacc

SEQ ID NO: 181391 - DNA, 55 bp, Artificial
  Synthetic oligonucleotide
acacattggttgggccacttttacaaatccgcgctaacagaagcacagacttccg

SEQ ID NO: 181392 - DNA, 54 bp, Artificial
  Synthetic oligonucleotide
acaccaaaggcggtgttcaggttgaagttgcgaccgaaactctgaaagtcaccg

SEQ ID NO: 181393 - DNA, 51 bp, Artificial
  Synthetic oligonucleotide
agggccgtttagtcgggcgaatggatgccaaaatgcaccgtaaaacggggg

SEQ ID NO: 181394 - DNA, 55 bp, Artificial
  Synthetic oligonucleotide
tctccttcaatagccaccgcctgcatcagtgtgtacggcgtaatggcaaccggtc

SEQ ID NO: 181395 - DNA, 55 bp, Artificial
  Synthetic oligonucleotide
tctccgggccagtcaacgccctgagccattctgctgccgcgtcgatttgtgtgga

SEQ ID NO: 181396 - DNA, 55 bp, Artificial
  Synthetic oligonucleotide
acaccccgcctcgccgttgctaatagtctctgcaacctggcgtgtcgtgagcgtt

SEQ ID NO: 181397 - DNA, 55 bp, Artificial
  Synthetic oligonucleotide
acacctcgacctttgagccaaatgaggcggtcacgctctccagcgagctcaccgc

SEQ ID NO: 181398 - DNA, 55 bp, Artificial
  Synthetic oligonucleotide
tctcactggtgataaacatccgaactgtcacgtcccgagtaggcgtgaccagttt

SEQ ID NO: 181399 - DNA, 55 bp, Artificial
  Synthetic oligonucleotide
tcgcctatcctctcggccacgctccctacaggagaacgctgccagatagtggtgc

SEQ ID NO: 181400 - DNA, 55 bp, Artificial
  Synthetic oligonucleotide
tcgccgggaaaattccgcaccttgattgggtattgcacaatgccggattgctggg

SEQ ID NO: 181401 - DNA, 55 bp, Artificial
  Synthetic oligonucleotide
tcgccgccctgatggcggtcttcttcatcatgcaacttgtcggacaggtgccggc

SEQ ID NO: 181402 - DNA, 55 bp, Artificial
  Synthetic oligonucleotide
tcgccagcgtgacgtgccaggatttcagcatatctacgcgttcaaagttagcttc

SEQ ID NO: 181403 - DNA, 55 bp, Artificial
  Synthetic oligonucleotide
tcgccaatgctgtacggcttatgttccgccagcgcgcagcttaacgcaccaaagg

SEQ ID NO: 181404 - DNA, 60 bp, Artificial
  Synthetic oligonucleotide
ggcggcaagtgttgagcaagaggcagtaatcagtaaggcgcagagcgtcgttttgagcat

SEQ ID NO: 181405 - DNA, 55 bp, Artificial
  Synthetic oligonucleotide
tcgccaaggagtcgcttaatgacagccagctggttagccgcagactgaatcagcg

SEQ ID NO: 181406 - DNA, 55 bp, Artificial
  Synthetic oligonucleotide
tcgcatggacaaactaaccactggtgctgcctatggcgcttcagccgggagcatc

SEQ ID NO: 181407 - DNA, 55 bp, Artificial
  Synthetic oligonucleotide
tcgcacccgatggctcatcctttatcttatatgcgaactgcatttcgtagcttcc

SEQ ID NO: 181408 - DNA, 55 bp, Artificial
  Synthetic oligonucleotide
tcgagttgcatcaaggcggcgactcagtgaatccccgggagcgtacattaagtac

SEQ ID NO: 181409 - DNA, 55 bp, Artificial
  Synthetic oligonucleotide
tcgagtatcctgagacgtccaaaatattgccggtataccgcaaaggcgagaatga

SEQ ID NO: 181410 - DNA, 55 bp, Artificial
  Synthetic oligonucleotide
acataagcgcagggagtcgtgtctgaacgcctctttacaatttctccgacagggg

SEQ ID NO: 181411 - DNA, 55 bp, Artificial
  Synthetic oligonucleotide
tcgaccgtaaaatctcgatcagtgttgcctaaacagtatagtttacaggattgtg

SEQ ID NO: 181412 - DNA, 53 bp, Artificial
  Synthetic oligonucleotide
acatagaccggtttctgtccgctctctttcgggaaacgaataacggcctcacg

SEQ ID NO: 181413 - DNA, 55 bp, Artificial
  Synthetic oligonucleotide
tcgacataataagagggatcaaacgttgaaaaggtataagtctgtccgcttaacg

SEQ ID NO: 181414 - DNA, 55 bp, Artificial
  Synthetic oligonucleotide
tcgacaataggtctaatagaacgtgccgcctctgccacttgtggtatcgcatgag

SEQ ID NO: 181415 - DNA, 52 bp, Artificial
  Synthetic oligonucleotide
ggcgcttttaaccggggacgccggtagtgaatacagaagagttttgtccgtc

SEQ ID NO: 181416 - DNA, 55 bp, Artificial
  Synthetic oligonucleotide
acatatgtttactgtattcgcgacgccccaaatcacgaacccgactctgacaggc

SEQ ID NO: 181417 - DNA, 55 bp, Artificial
  Synthetic oligonucleotide
tcgaagacaccatgtctcttaacaacggggtttgaacaaagaactattgacctgg

SEQ ID NO: 181418 - DNA, 55 bp, Artificial
  Synthetic oligonucleotide
acatcgcgattctgccgcctaaagagtagcctgccagccaatactcgcgaatgcc

SEQ ID NO: 181419 - DNA, 55 bp, Artificial
  Synthetic oligonucleotide
acatgaatcacaggcagctaaagggcggaagtcaaaacgcggagctgttgaggac

SEQ ID NO: 181420 - DNA, 55 bp, Artificial
  Synthetic oligonucleotide
acatggaagcggcacgggcactgggaattggctatcgccggcagataatccacta

SEQ ID NO: 181421 - DNA, 55 bp, Artificial
  Synthetic oligonucleotide
acagccaatcgtcgtgccgatgattcagggaagtgggtgtttaaggacggaactg

SEQ ID NO: 181422 - DNA, 55 bp, Artificial
  Synthetic oligonucleotide
acagccacaatacaccttctccgcacttgccctggcggtcgtcgtcggactgagc

SEQ ID NO: 181423 - DNA, 55 bp, Artificial
  Synthetic oligonucleotide
tcgggcgcggtttattcataacgcgcttattttgaacgatgcagtagtgcgtgtg

SEQ ID NO: 181424 - DNA, 55 bp, Artificial
  Synthetic oligonucleotide
tcgggaatgaccacgagataagcgggccgagactccatacggtcgctccgctttt

SEQ ID NO: 181425 - DNA, 55 bp, Artificial
  Synthetic oligonucleotide
tcggctcacacatttatttgagggtaaacagtcggttctataaccgccattgaag

SEQ ID NO: 181426 - DNA, 56 bp, Artificial
  Synthetic oligonucleotide
ggcgcttggggggcgttattaccgggttatcagtggtgagcgtacaggatggaatc

SEQ ID NO: 181427 - DNA, 55 bp, Artificial
  Synthetic oligonucleotide
tcggccttcgaaacgcgctatcagcccctcttgatggagcagccccaacgctttg

SEQ ID NO: 181428 - DNA, 55 bp, Artificial
  Synthetic oligonucleotide
tcggagagcgtgaccatgtcaccttttatcgcctcgaccgtccatacactgttgg

SEQ ID NO: 181429 - DNA, 55 bp, Artificial
  Synthetic oligonucleotide
tcggagacaaaagaaaggggcagcgcgttgtccgagcaaagcgagggagctactg

SEQ ID NO: 181430 - DNA, 55 bp, Artificial
  Synthetic oligonucleotide
tcggaacgggtctgttttatggttccgctagcgcgatccaaatggctggccccag

SEQ ID NO: 181431 - DNA, 55 bp, Artificial
  Synthetic oligonucleotide
tcgctttcgttcgtgccctgaacgtaatgctgaagaataagtcgatcaaagatcg

SEQ ID NO: 181432 - DNA, 55 bp, Artificial
  Synthetic oligonucleotide
acagcgacgttaatgtggttgctattcatcatgcgttgatgcagtcaggtattgc

SEQ ID NO: 181433 - DNA, 55 bp, Artificial
  Synthetic oligonucleotide
tcgcttgggcttacaactaggtgcttagcatgggatgttcagtcaaatgacggca

SEQ ID NO: 181434 - DNA, 55 bp, Artificial
  Synthetic oligonucleotide
acagctttcgctacgttgctggctcgttttaacacggagaagtgcctacactagc

SEQ ID NO: 181435 - DNA, 55 bp, Artificial
  Synthetic oligonucleotide
tcgctgctctttatccgcgtacttcatgggattacgtttggtgttattaccacgg

SEQ ID NO: 181436 - DNA, 55 bp, Artificial
  Synthetic oligonucleotide
tcgctgaatggcagcaccggcacgctaatgagccttatatgctcgatatcatgcc

SEQ ID NO: 181437 - DNA, 55 bp, Artificial
  Synthetic oligonucleotide
gcattaacaatatccaaacctccccattttgccccgttcgacggctggaacgtgc

SEQ ID NO: 181438 - DNA, 60 bp, Artificial
  Synthetic oligonucleotide
gcattctgcgtggataaataaggccttcgcttgcagcggacacaagcgtccgcgccgctc

SEQ ID NO: 181439 - DNA, 51 bp, Artificial
  Synthetic oligonucleotide
agggcgtttctgacgaattttctccaggaagacaaggttttttacggctta

SEQ ID NO: 181440 - DNA, 55 bp, Artificial
  Synthetic oligonucleotide
tcgctcacggattaatgaaacacgcttgtagaattccgtataggctagggcatcc

SEQ ID NO: 181441 - DNA, 55 bp, Artificial
  Synthetic oligonucleotide
acagctttgggttgcggaatagggagagacgaatataatccagataagctaagat

SEQ ID NO: 181442 - DNA, 55 bp, Artificial
  Synthetic oligonucleotide
tcgcggataaaacccacgccaacggaaacgggcaggaggctatcgtattgactgc

SEQ ID NO: 181443 - DNA, 55 bp, Artificial
  Synthetic oligonucleotide
acaggcgcggcgtcgggattgctggatgccggaccgaggtcgatcacatctgccc

SEQ ID NO: 181444 - DNA, 55 bp, Artificial
  Synthetic oligonucleotide
acagggcgcccgtaccggcaacgaagccatgaccacggcggactgggctccaatg

SEQ ID NO: 181445 - DNA, 55 bp, Artificial
  Synthetic oligonucleotide
tgatgccgggttaccttgatggtaacgttcccagcggtatttgcttctacacgcc

SEQ ID NO: 181446 - DNA, 55 bp, Artificial
  Synthetic oligonucleotide
aatcctgtggttcgcgggtatacatgggacgatgattgttaccgggatcatgaac

SEQ ID NO: 181447 - DNA, 55 bp, Artificial
  Synthetic oligonucleotide
aatcgaggaggcactagactcccattgactgacaaaatagtgacgctcggtgggg

SEQ ID NO: 181448 - DNA, 55 bp, Artificial
  Synthetic oligonucleotide
tgatcaacacatggtagacgcggaaggaaataccttgagcgtgccgccagatcgc

SEQ ID NO: 181449 - DNA, 55 bp, Artificial
  Synthetic oligonucleotide
aatcgccctattggccgtattctaattgatgcatgttatagccctatagatcgta

SEQ ID NO: 181450 - DNA, 55 bp, Artificial
  Synthetic oligonucleotide
agggctcggaaggtgcgggtttctggacgctacttgctggcatctttccggaaaa

SEQ ID NO: 181451 - DNA, 55 bp, Artificial
  Synthetic oligonucleotide
tgataaacacagcagtcggaaccggtttagaaaagagtattacgtcacttagtcc

SEQ ID NO: 181452 - DNA, 55 bp, Artificial
  Synthetic oligonucleotide
aatcgggaagttacagggcgcgcagtttcaacattgcgaaatgacagagaccgca

SEQ ID NO: 181453 - DNA, 55 bp, Artificial
  Synthetic oligonucleotide
tgagtgctatgcggcagggagtgatgttgcccgggtcagcgtggcgtgagttacc

SEQ ID NO: 181454 - DNA, 55 bp, Artificial
  Synthetic oligonucleotide
tgagtagaccgacgctaccgttcagcctgccgtacgcctgtgctccgggcctgat

SEQ ID NO: 181455 - DNA, 55 bp, Artificial
  Synthetic oligonucleotide
tgagtaacagagccggagaattcacggtatggggtgatgagctggcgcattaccc

SEQ ID NO: 181456 - DNA, 55 bp, Artificial
  Synthetic oligonucleotide
aatgaaatagccataccggaaccattaccaggtaacgatggtgaaccagcccctg

SEQ ID NO: 181457 - DNA, 55 bp, Artificial
  Synthetic oligonucleotide
tgagctcagggtcatcgcaatacatgacgcaattatcgatatgctccagtgcggc

SEQ ID NO: 181458 - DNA, 55 bp, Artificial
  Synthetic oligonucleotide
aatgagaacattagatgaggtgattgccagtcgttcacctgaaagccagacacga

SEQ ID NO: 181459 - DNA, 55 bp, Artificial
  Synthetic oligonucleotide
aatgagccacccaataaagagccacttaaatgagctaacgcaccccttcggggct

SEQ ID NO: 181460 - DNA, 55 bp, Artificial
  Synthetic oligonucleotide
tgagcaattaggtcctggacgtactttttgcgcacacgctccgggagcaatagag

SEQ ID NO: 181461 - DNA, 60 bp, Artificial
  Synthetic oligonucleotide
ggcgcgtcagcggccttctgtgtcgctttgcggggcttcggatagcccgctttgcgcatg

SEQ ID NO: 181462 - DNA, 55 bp, Artificial
  Synthetic oligonucleotide
tgagatgtgtggtctgttccgtaattggtgtataaaccgaaccgggactcatcgt

SEQ ID NO: 181463 - DNA, 55 bp, Artificial
  Synthetic oligonucleotide
aatgccacgcctgttcctgacaccacgcctccggctctggtgttcgttgacggac

SEQ ID NO: 181464 - DNA, 55 bp, Artificial
  Synthetic oligonucleotide
tgagagtatgtgataacgcattggagtaaagcgaggtacagttctgtctatgtgt

SEQ ID NO: 181465 - DNA, 55 bp, Artificial
  Synthetic oligonucleotide
tgagagattcctgtgtcggttttgatcgtgagtgaagatcctatggcgttttaca

SEQ ID NO: 181466 - DNA, 55 bp, Artificial
  Synthetic oligonucleotide
aatgccacgctacgagaccagcttccccatagcctggcgattaaggaggttaaat

SEQ ID NO: 181467 - DNA, 55 bp, Artificial
  Synthetic oligonucleotide
aatgcccgttattattagcggacacgaaaaccaggccattactcacagtataacg

SEQ ID NO: 181468 - DNA, 55 bp, Artificial
  Synthetic oligonucleotide
tgccggagcggcagcctgaaccggtgcggaagaggccgccggaacagccgtagtg

SEQ ID NO: 181469 - DNA, 55 bp, Artificial
  Synthetic oligonucleotide
tgccggagccaacacccgattcatctggcggatccgtttatcattcataacccgc

SEQ ID NO: 181470 - DNA, 55 bp, Artificial
  Synthetic oligonucleotide
tgccgcactggtaacgcctaaccgctgtaatgctttcgtgcgttggtgtcccgcc

SEQ ID NO: 181471 - DNA, 55 bp, Artificial
  Synthetic oligonucleotide
tgcccgataatgcctacgttaggaataaatcggaccagcaagcttgttcggccag

SEQ ID NO: 181472 - DNA, 60 bp, Artificial
  Synthetic oligonucleotide
ggcgcgatctcatctggcacgagaaatcgcacatgtcgccgaataccattatcgccccta

SEQ ID NO: 181473 - DNA, 55 bp, Artificial
  Synthetic oligonucleotide
aatatctaaccaattcattttcgcgagaacaacgaataaccactcccgaatcatg

SEQ ID NO: 181474 - DNA, 55 bp, Artificial
  Synthetic oligonucleotide
aatattgccgctacctcgtgcgacacgcatgttgataagccccggggataggctc

SEQ ID NO: 181475 - DNA, 55 bp, Artificial
  Synthetic oligonucleotide
aatcagcaatattccgcaatgcgcagtaatgtcagtatgctgggtaagctactcg

SEQ ID NO: 181476 - DNA, 55 bp, Artificial
  Synthetic oligonucleotide
tgcagacagaatcacaacacggttattacgcagcaggctaatagcctcggcccaa

SEQ ID NO: 181477 - DNA, 55 bp, Artificial
  Synthetic oligonucleotide
aatcagccgcccggatgtggatttacatcgtcagcgtagtgaacagtactaccac

SEQ ID NO: 181478 - DNA, 55 bp, Artificial
  Synthetic oligonucleotide
tgcacccacggccttcatcaagccgcgctggaagccgctggtgatcaccccggaa

SEQ ID NO: 181479 - DNA, 55 bp, Artificial
  Synthetic oligonucleotide
aatcatacacctcaataaggcacactgaggccagaaggctaaaatttcactcgtc

SEQ ID NO: 181480 - DNA, 55 bp, Artificial
  Synthetic oligonucleotide
tgcaacattttgagtaaatacgattacagcggtttatcgggtcgggcattgccag

SEQ ID NO: 181481 - DNA, 55 bp, Artificial
  Synthetic oligonucleotide
tgcaaagtaaggatcgctcaacatttgtttaagcagtggccagacgatttgcccc

SEQ ID NO: 181482 - DNA, 55 bp, Artificial
  Synthetic oligonucleotide
aatcatccggcgtcaattcaccacgcaagttttgcgccatcgcgttacgaatcgc

SEQ ID NO: 181483 - DNA, 57 bp, Artificial
  Synthetic oligonucleotide
agggctgacggggtgcgaacgtgcacatcgtggattttacggcgggcgtgagcccaa

SEQ ID NO: 181484 - DNA, 55 bp, Artificial
  Synthetic oligonucleotide
tgattgcctcctttgcaggcagttggtggttaggcgctggcggggtcactacccc

SEQ ID NO: 181485 - DNA, 55 bp, Artificial
  Synthetic oligonucleotide
tgattgatatacaagcggagttactgcgatgagtgggaatcaaaagatcgccaga

SEQ ID NO: 181486 - DNA, 55 bp, Artificial
  Synthetic oligonucleotide
aatcccgccatgttgagtgcagtttgctgctgcttgttcatctttctgttttctc

SEQ ID NO: 181487 - DNA, 55 bp, Artificial
  Synthetic oligonucleotide
aatccgcaaatgtatccgtcttattgccgtgcagtctgcctttcagcgaggttcg

SEQ ID NO: 181488 - DNA, 55 bp, Artificial
  Synthetic oligonucleotide
tgatgtgggtgggctacaaggtgttatggaatggtcagtcgttaaaagactgcgg

SEQ ID NO: 181489 - DNA, 55 bp, Artificial
  Synthetic oligonucleotide
aatccggcaagataaggattgcgcccaggcggtatgggactaagggtaagagtga

SEQ ID NO: 181490 - DNA, 55 bp, Artificial
  Synthetic oligonucleotide
aatttactgcgtacggagctagacgcggttgctacaaaactggctcgcaggggtt

SEQ ID NO: 181491 - DNA, 55 bp, Artificial
  Synthetic oligonucleotide
tcttttgaacaatccggcccggtatacgtttttttatctccaatagttgcatgac

SEQ ID NO: 181492 - DNA, 55 bp, Artificial
  Synthetic oligonucleotide
aatttatcgcagaggacaacggtaagactgcagagtaactccctgtcagaacgta

SEQ ID NO: 181493 - DNA, 55 bp, Artificial
  Synthetic oligonucleotide
aatttcgcaacccatggcggaggcatacgcagacagcgcgggcatgtctatgtgc

SEQ ID NO: 181494 - DNA, 60 bp, Artificial
  Synthetic oligonucleotide
ggcgcgaggaagcctataccctcgatgaactggctgattatctcgatttgagcgcctcag

SEQ ID NO: 181495 - DNA, 55 bp, Artificial
  Synthetic oligonucleotide
aatttcgtcgctcatacaaaatcctgcctatcgtgagaatgaccagcctttatcc

SEQ ID NO: 181496 - DNA, 55 bp, Artificial
  Synthetic oligonucleotide
tctttcgccgttgcatattcaagaaggttgtgaccgggtatgttctggtctgctc

SEQ ID NO: 181497 - DNA, 55 bp, Artificial
  Synthetic oligonucleotide
tctttatttgtctctcgtgatgaagtagaagcatcatggcaatggatagatccaa

SEQ ID NO: 181498 - DNA, 55 bp, Artificial
  Synthetic oligonucleotide
tctttaccacttaatcctacctttgccagcaactcacggccgcgcttttctgtcg

SEQ ID NO: 181499 - DNA, 55 bp, Artificial
  Synthetic oligonucleotide
tcttgcggagaactgtgaatgcgcaaaccaacccttggcagaacatatccatcgc

SEQ ID NO: 181500 - DNA, 55 bp, Artificial
  Synthetic oligonucleotide
tcttatatacctttcagagcatagccaatgagccccacagacgctgtcgccaggc

SEQ ID NO: 181501 - DNA, 54 bp, Artificial
  Synthetic oligonucleotide
aattttgtaataccgaacatcgaattacagtcgcggtaagcgtctccaaccgta

SEQ ID NO: 181502 - DNA, 55 bp, Artificial
  Synthetic oligonucleotide
tcttacctcgccgggagggattgatgcggcagataagaatttctggaccgtgggg

SEQ ID NO: 181503 - DNA, 55 bp, Artificial
  Synthetic oligonucleotide
tctgtcgatggtcgtggatttaatcgacccgcgctgaaatgccctgctaaacact

SEQ ID NO: 181504 - DNA, 55 bp, Artificial
  Synthetic oligonucleotide
tctgtccgttgaccgcgcccgccgcattctgacccttgacagggagattaccctg

SEQ ID NO: 181505 - DNA, 60 bp, Artificial
  Synthetic oligonucleotide
agggctgtcagttccgagagttcctcataggtcgcctgagctgaataatatgttatgtag

SEQ ID NO: 181506 - DNA, 55 bp, Artificial
  Synthetic oligonucleotide
acaaagtgctgcgcccaattcatgattacggctaagtgctttcctcaaatagccg

SEQ ID NO: 181507 - DNA, 53 bp, Artificial
  Synthetic oligonucleotide
tctggggtcggtttggatttctcattagcccaaaacactaggtaaacaccgac

SEQ ID NO: 181508 - DNA, 55 bp, Artificial
  Synthetic oligonucleotide
tctggggccgtgtactacgcccggttttgccgttgggcgccgattctgcgcaaac

SEQ ID NO: 181509 - DNA, 55 bp, Artificial
  Synthetic oligonucleotide
tctgggcgtgttgaacagtccggattatgtccgctagggaaaagatgttctttgt

SEQ ID NO: 181510 - DNA, 55 bp, Artificial
  Synthetic oligonucleotide
tctgggcgtgtaggtactgccgttagccgcccttaacgtgatgtttaggcgctgc

SEQ ID NO: 181511 - DNA, 55 bp, Artificial
  Synthetic oligonucleotide
acaacaccgggtgtcgccagggccgtagcctgggtggtgacgcctggtgtgaaaa

SEQ ID NO: 181512 - DNA, 55 bp, Artificial
  Synthetic oligonucleotide
tctgggaacggcgctgtactggatagcggccagcgtgaatatcaggccaggcagg

SEQ ID NO: 181513 - DNA, 55 bp, Artificial
  Synthetic oligonucleotide
tgagaacgttttggtattatctacgcagaaagttaccggctctttgtcagtgggg

SEQ ID NO: 181514 - DNA, 55 bp, Artificial
  Synthetic oligonucleotide
tgactctatttcaggtgcgtttggtattctttgcactgtctggatgtactgtaga

SEQ ID NO: 181515 - DNA, 55 bp, Artificial
  Synthetic oligonucleotide
aatgcgcgcgcatagcatgactcccgagcgcgcagtcagacgcgtcatacgccat

SEQ ID NO: 181516 - DNA, 56 bp, Artificial
  Synthetic oligonucleotide
aggggaagcccttccctgagcagtacaactatacgcttactctgaactgtcttttg

SEQ ID NO: 181517 - DNA, 55 bp, Artificial
  Synthetic oligonucleotide
tgacgccggggcgctacaccctgtccgtcagggcggtgaacagccagggacaaca

SEQ ID NO: 181518 - DNA, 55 bp, Artificial
  Synthetic oligonucleotide
tgacgatatagaattaggctgtggtgatcctacccacgtaatatggacacaggcc

SEQ ID NO: 181519 - DNA, 55 bp, Artificial
  Synthetic oligonucleotide
tgaccccgagtcttctagcaaagccgtcaacctcacggttgtcgcctgcataggg

SEQ ID NO: 181520 - DNA, 55 bp, Artificial
  Synthetic oligonucleotide
tgacagagaggccctgcggccgtcctgttcgagctgaccatatcccctctgaata

SEQ ID NO: 181521 - DNA, 55 bp, Artificial
  Synthetic oligonucleotide
tgaattttgaccatgtcgcggtgttgaactcgcgcttatcgagcctgttactccc

SEQ ID NO: 181522 - DNA, 55 bp, Artificial
  Synthetic oligonucleotide
tgaatgaacggcggttgtaatgcccagggtacatggaaggggatgacccagggac

SEQ ID NO: 181523 - DNA, 55 bp, Artificial
  Synthetic oligonucleotide
aatgtacgcgctgtttgatgcggagcacgtgcctgccgaggggcgcactgagaca

SEQ ID NO: 181524 - DNA, 55 bp, Artificial
  Synthetic oligonucleotide
aatgtcggaataactgaccagtgtctgacgctccatatccttaccggtcgatacc

SEQ ID NO: 181525 - DNA, 55 bp, Artificial
  Synthetic oligonucleotide
tgaagtcaaaccgtacacccctgcctggggcgagcaaattaccggcgttccgcgc

SEQ ID NO: 181526 - DNA, 55 bp, Artificial
  Synthetic oligonucleotide
aattaagtgatggacgtcgttatgacgctcatattattggtaaggattcacgttc

SEQ ID NO: 181527 - DNA, 60 bp, Artificial
  Synthetic oligonucleotide
ggcgcaggtgatatgtggctgtctgcatcgtgatttacggcaacaccataccctgcatac

SEQ ID NO: 181528 - DNA, 55 bp, Artificial
  Synthetic oligonucleotide
tgaactgaacgctataactgcaaataggcttacgtgcagtcagaacagtgaatgg

SEQ ID NO: 181529 - DNA, 55 bp, Artificial
  Synthetic oligonucleotide
aattcagtttcttctacgctttgtcgcgcataagctgcctgtatccgaagcggct

SEQ ID NO: 181530 - DNA, 55 bp, Artificial
  Synthetic oligonucleotide
tgaacagccagggacaacagggagacccggccagcacacagttcagcatctccgc

SEQ ID NO: 181531 - DNA, 55 bp, Artificial
  Synthetic oligonucleotide
tgaaatagacaccggtcaccgccttaatgcatcaggagcaagtactcccggaagc

SEQ ID NO: 181532 - DNA, 55 bp, Artificial
  Synthetic oligonucleotide
aattgattgaccggggactgctccaaccagtggaagaaggagctcgttcctatac

SEQ ID NO: 181533 - DNA, 55 bp, Artificial
  Synthetic oligonucleotide
tgaaaattgtgcggatattagcaatcgtacggttaacattagacgtcaacgtttc

SEQ ID NO: 181534 - DNA, 55 bp, Artificial
  Synthetic oligonucleotide
tgaaaatcaccccgctggatgcggcggtgccggatcgggcgcaggcgctgatcga

SEQ ID NO: 181535 - DNA, 55 bp, Artificial
  Synthetic oligonucleotide
tgaaaaggatacccatctcacccgcttaaatccagcacagtttgcgcatagtacg

SEQ ID NO: 181536 - DNA, 55 bp, Artificial
  Synthetic oligonucleotide
accgtgaggtcggcaagaaatgtgtccgtcgtttccccactgcggtgggacatga

SEQ ID NO: 181537 - DNA, 54 bp, Artificial
  Synthetic oligonucleotide
accgtggaagcctctaccggttgccatccccgggttaacaggcgttgccatagc

SEQ ID NO: 181538 - DNA, 56 bp, Artificial
  Synthetic oligonucleotide
ggcgattgaagtaggcggcaccaacgtttctattagcgaggagccgtttgaaccgc

SEQ ID NO: 181539 - DNA, 55 bp, Artificial
  Synthetic oligonucleotide
tatggcaaacactgccgaagtaatcaattttcctgtgcctgacgtggcacctaag

SEQ ID NO: 181540 - DNA, 55 bp, Artificial
  Synthetic oligonucleotide
tatgcgcaggtgaagtcgcgttagatgtcatattacctagctcggacccaacttt

SEQ ID NO: 181541 - DNA, 55 bp, Artificial
  Synthetic oligonucleotide
tatgccactgcgaggagtatcaatcagttaaccgggcttccggtcgtaatgacag

SEQ ID NO: 181542 - DNA, 55 bp, Artificial
  Synthetic oligonucleotide
tatgcaggctggagcggttaaacttgcttgagtcagtcacgacaataatacgctc

SEQ ID NO: 181543 - DNA, 55 bp, Artificial
  Synthetic oligonucleotide
acctatcaggataacaaacaggactccgacaaactacaagccgctatccgtgact

SEQ ID NO: 181544 - DNA, 55 bp, Artificial
  Synthetic oligonucleotide
acctcactgctcgcggctttgcctgaaggggcgtcaggtcagacaacctcactgg

SEQ ID NO: 181545 - DNA, 55 bp, Artificial
  Synthetic oligonucleotide
tatctctcgatcttgaacagatttacgagacggatcattctattatgatcgactc

SEQ ID NO: 181546 - DNA, 55 bp, Artificial
  Synthetic oligonucleotide
acctcttcaggacacaatgccaaatggacggcaccgcgcactgtcgcatacaggg

SEQ ID NO: 181547 - DNA, 55 bp, Artificial
  Synthetic oligonucleotide
tatctccgcgttagcgcctacgagcgtgtacttacgaacctcacaagatattctc

SEQ ID NO: 181548 - DNA, 55 bp, Artificial
  Synthetic oligonucleotide
tatctcaccggatacagtgggacaaacggtctgcgggattcgctactgtacagct

SEQ ID NO: 181549 - DNA, 60 bp, Artificial
  Synthetic oligonucleotide
atcgtcacagatttgcaaggttagtcctggttgatggaacttgtgttctgtatatgtcgc

SEQ ID NO: 181550 - DNA, 59 bp, Artificial
  Synthetic oligonucleotide
aggggcatcaggacggcccgtggagtacgtgaaaccacagcgctgataaccgctctggc

SEQ ID NO: 181551 - DNA, 54 bp, Artificial
  Synthetic oligonucleotide
acctgaatagcagtgtaaccgtcgttttccaggcctttgacctgagtaacgcgg

SEQ ID NO: 181552 - DNA, 55 bp, Artificial
  Synthetic oligonucleotide
acctgcaatttatagtctccggatgccaggcccgggtcgctagcgcccagatccc

SEQ ID NO: 181553 - DNA, 55 bp, Artificial
  Synthetic oligonucleotide
tatcgcttataccattacacaaacaaacgtacatgattgctcccgttcaatttcc

SEQ ID NO: 181554 - DNA, 55 bp, Artificial
  Synthetic oligonucleotide
acctggcacaatgccccacgcacccatagcggccaaaccgcgctcaccgcgttta

SEQ ID NO: 181555 - DNA, 55 bp, Artificial
  Synthetic oligonucleotide
tatcgcaacagctgacatttaatagtgagctcgcctggcaccgaaagtcaccatg

SEQ ID NO: 181556 - DNA, 55 bp, Artificial
  Synthetic oligonucleotide
tatccggtgaaccgatccatttgcatctggttggccgccgagtcaataaatatga

SEQ ID NO: 181557 - DNA, 55 bp, Artificial
  Synthetic oligonucleotide
acctgtggaattacctcggcgagcaacaaaaggccctgtcgtcgaatcaattccg

SEQ ID NO: 181558 - DNA, 55 bp, Artificial
  Synthetic oligonucleotide
accgcccgttaaggatctcatcccttaaccaacgtgctttgatgcatggtgcccg

SEQ ID NO: 181559 - DNA, 55 bp, Artificial
  Synthetic oligonucleotide
accgccgggccaataacgcggcgtcattcccaccatgctatattgcgccagacga

SEQ ID NO: 181560 - DNA, 55 bp, Artificial
  Synthetic oligonucleotide
tcacaccagcaactggcgggttggtgacgctcttcatgcgggagagatagccgag

SEQ ID NO: 181561 - DNA, 56 bp, Artificial
  Synthetic oligonucleotide
aggggccattcccctttcgatgaaacaataatacgactttcaagtcgcacctgcaa

SEQ ID NO: 181562 - DNA, 55 bp, Artificial
  Synthetic oligonucleotide
tcacaacctcgtctagttgttcgccatagattcagtggcaggcggtgacgagtcc

SEQ ID NO: 181563 - DNA, 55 bp, Artificial
  Synthetic oligonucleotide
tcaattgcgagacgagcacctcgagttacacgtaacccatgtaatgtcaaagcca

SEQ ID NO: 181564 - DNA, 55 bp, Artificial
  Synthetic oligonucleotide
tcaagcatattgggttaacatccaggttacagcctttcctgcgtacggaggcatt

SEQ ID NO: 181565 - DNA, 55 bp, Artificial
  Synthetic oligonucleotide
tcaacattgacgggttaaatgcggatacgcgcaatatgctgttaacggaaaccag

SEQ ID NO: 181566 - DNA, 55 bp, Artificial
  Synthetic oligonucleotide
accggcagtactatgaattttgtgcgcttagcgagcttaaaggggcgttgcgctc

SEQ ID NO: 181567 - DNA, 55 bp, Artificial
  Synthetic oligonucleotide
accggcagtccataaagaccatgctctgacgctcgttgaactaacaccagttcat

SEQ ID NO: 181568 - DNA, 55 bp, Artificial
  Synthetic oligonucleotide
tattttagaggtacaacaacagttaggttcaggtgtagtacgaactatcgctatg

SEQ ID NO: 181569 - DNA, 55 bp, Artificial
  Synthetic oligonucleotide
tattgcagtgccgctcaaggtaatcacgctcgtcgtctctaagttcaggtgctcg

SEQ ID NO: 181570 - DNA, 55 bp, Artificial
  Synthetic oligonucleotide
accgggttatcagtggtgagcgtacaggatggaatccgttctctctgccggcaac

SEQ ID NO: 181571 - DNA, 55 bp, Artificial
  Synthetic oligonucleotide
tattgagtcattttcttcctgtccgcgtcactatcctgattgaaatagtgtagtc

SEQ ID NO: 181572 - DNA, 60 bp, Artificial
  Synthetic oligonucleotide
ggcgatgggtataagccagccagcagtaacaaagctggagcagcgcggaaatgatttaaa

SEQ ID NO: 181573 - DNA, 55 bp, Artificial
  Synthetic oligonucleotide
tattcacccaacgcattgagcgtaataatctgacgctacgcacccgcattaagcg

SEQ ID NO: 181574 - DNA, 55 bp, Artificial
  Synthetic oligonucleotide
tattagcggacacgaaaaccaggccattactcacagtataacggtcggtagcgca

SEQ ID NO: 181575 - DNA, 55 bp, Artificial
  Synthetic oligonucleotide
tattacggcgccctgatatacgtcatcgtattgcacgtctgttggctaagcttac

SEQ ID NO: 181576 - DNA, 55 bp, Artificial
  Synthetic oligonucleotide
tatgttcagataatgcccgatgactttgtcatgcagctccaccgattttgagaac

SEQ ID NO: 181577 - DNA, 55 bp, Artificial
  Synthetic oligonucleotide
tatgtggtggcgtgacgggtgagatggtgcggcgaagacgcatacgtcacgcagg

SEQ ID NO: 181578 - DNA, 55 bp, Artificial
  Synthetic oligonucleotide
tatgtgatggagagtcgggaatggaagtccgggacaattttgacaccccgcctgg

SEQ ID NO: 181579 - DNA, 55 bp, Artificial
  Synthetic oligonucleotide
acgacgctaatactaattttggcattggactcagggtaacacgaggatgtatcag

SEQ ID NO: 181580 - DNA, 55 bp, Artificial
  Synthetic oligonucleotide
acgagatctgcaggaaactatgcgcttacatgatgcccagtagacggggtaagaa

SEQ ID NO: 181581 - DNA, 55 bp, Artificial
  Synthetic oligonucleotide
tagtcatacgtcacgtccagcttgctgcgcttgcgctcgccccgcttgagggcac

SEQ ID NO: 181582 - DNA, 55 bp, Artificial
  Synthetic oligonucleotide
tagtcacgttaagccgatcatgttaatttgcgacatgcatcaggcaggtcaggga

SEQ ID NO: 181583 - DNA, 58 bp, Artificial
  Synthetic oligonucleotide
ggcgagctggctgaaggccaacatgaaccctgacgccctttcggattcaacgttgaaa

SEQ ID NO: 181584 - DNA, 53 bp, Artificial
  Synthetic oligonucleotide
acgagttttactaccagatacgggatatgccctgggaactggggcccggatta

SEQ ID NO: 181585 - DNA, 55 bp, Artificial
  Synthetic oligonucleotide
acgatctggagacatccccaaacccagacgcgtaagtgcctccatccgtgttccg

SEQ ID NO: 181586 - DNA, 55 bp, Artificial
  Synthetic oligonucleotide
taggccggataaggtgctcgcaccgccatccggtaataacacggcgttaatgccg

SEQ ID NO: 181587 - DNA, 55 bp, Artificial
  Synthetic oligonucleotide
acgatgttacggctgataccctgacaaccagcctgcatgacccgctgccgcctgg

SEQ ID NO: 181588 - DNA, 55 bp, Artificial
  Synthetic oligonucleotide
taggccactataatggttacctaaggcaattacacatgctccggtgagtgtagct

SEQ ID NO: 181589 - DNA, 55 bp, Artificial
  Synthetic oligonucleotide
taggatatgcgccgcttttgtcacctttggggctgtagggagtaacaccccgacc

SEQ ID NO: 181590 - DNA, 55 bp, Artificial
  Synthetic oligonucleotide
acgcaaggagtggctcgtgtatttgttaactggactaatttaaaaggtggcaatg

SEQ ID NO: 181591 - DNA, 55 bp, Artificial
  Synthetic oligonucleotide
tagctaactgaaatgtagcgacatcacattcttgcctgtttctggtgtgcgtgat

SEQ ID NO: 181592 - DNA, 55 bp, Artificial
  Synthetic oligonucleotide
acgcacatagtaaagagtcagggaatcattggcccagacaaattcaggcgcaacg

SEQ ID NO: 181593 - DNA, 55 bp, Artificial
  Synthetic oligonucleotide
tagcggaggagctaaatactctcaatcaggaaaggcgtgaaatcgaacaagggat

SEQ ID NO: 181594 - DNA, 59 bp, Artificial
  Synthetic oligonucleotide
agggggatggcctgtcgtaggatcggtacacagggcggtacacagctggatcagccaac

SEQ ID NO: 181595 - DNA, 55 bp, Artificial
  Synthetic oligonucleotide
tagccttaccgaacgcactacacaatttattaataccattatgagcgctaatacg

SEQ ID NO: 181596 - DNA, 55 bp, Artificial
  Synthetic oligonucleotide
tagccgtcacacttcgtgtgacatgtgcgttggtcgccccggtcatgcgcttctg

SEQ ID NO: 181597 - DNA, 55 bp, Artificial
  Synthetic oligonucleotide
acgcagatgagtgatatagtctctgaccgtttgccggacatgacgcctctgatga

SEQ ID NO: 181598 - DNA, 55 bp, Artificial
  Synthetic oligonucleotide
tagcccgatcccatcatgctggggaaagggatcaggcaacaacctgtacgctgtg

SEQ ID NO: 181599 - DNA, 55 bp, Artificial
  Synthetic oligonucleotide
tagcagcgccataaccagtaaaccgaatttcagcgcacgtaaccgtgcttcttca

SEQ ID NO: 181600 - DNA, 55 bp, Artificial
  Synthetic oligonucleotide
tagcaccggtagttacctggatagcagtgtaaccgtcgttttccaggcctttgac

SEQ ID NO: 181601 - DNA, 55 bp, Artificial
  Synthetic oligonucleotide
accttacatctcctcagatattcgttgtgttcggattaaccaggatcgttgagca

SEQ ID NO: 181602 - DNA, 55 bp, Artificial
  Synthetic oligonucleotide
tatcaggctctaccgaaaattgttgtggattacccgtcttcccgatggttgtttc

SEQ ID NO: 181603 - DNA, 55 bp, Artificial
  Synthetic oligonucleotide
tatcaggcgtccgcaactgctcccacataacaaacattctgccctgtccatgatt

SEQ ID NO: 181604 - DNA, 55 bp, Artificial
  Synthetic oligonucleotide
tatcaggagtctggcgtgctattgtccttcacaaacaacgtaagctgatcgcccg

SEQ ID NO: 181605 - DNA, 54 bp, Artificial
  Synthetic oligonucleotide
ggtcgaccgtaaccaatctattaccagcgtcaacgacaaagcccacgtaaactc

SEQ ID NO: 181606 - DNA, 51 bp, Artificial
  Synthetic oligonucleotide
accttgtacagcggttaaggttaacccgcgattggcacctttaatcgaaag

SEQ ID NO: 181607 - DNA, 55 bp, Artificial
  Synthetic oligonucleotide
acctttaaacgctttgctgtaccaactacccgcatccacgcgcagtaaatcctgc

SEQ ID NO: 181608 - DNA, 55 bp, Artificial
  Synthetic oligonucleotide
tatcaacatttctcgccagcttacccgtctgactgatcaatttaaggtgtggcgt

SEQ ID NO: 181609 - DNA, 55 bp, Artificial
  Synthetic oligonucleotide
tatcaacacgctaaatcccactgaggaacagctgttggttggtttgcgcacagct

SEQ ID NO: 181610 - DNA, 55 bp, Artificial
  Synthetic oligonucleotide
tatattatggttatcgtcaggagtgttctctatttcgcatacagaccttgatcgc

SEQ ID NO: 181611 - DNA, 55 bp, Artificial
  Synthetic oligonucleotide
tatatctgcagaagccacacgtaatgagcggatccgtcagattatttacgatgcc

SEQ ID NO: 181612 - DNA, 54 bp, Artificial
  Synthetic oligonucleotide
acctttaggggtaacacgaaggaacataccaaagccatcagtaagcttgtattc

SEQ ID NO: 181613 - DNA, 55 bp, Artificial
  Synthetic oligonucleotide
tatagattcaccgtgagaccattgtgaatagcccaggtatgattcgatagcatga

SEQ ID NO: 181614 - DNA, 55 bp, Artificial
  Synthetic oligonucleotide
tatacgtgagctgcacgacttttacggttcaggcaagggataccgtatagcgcga

SEQ ID NO: 181615 - DNA, 55 bp, Artificial
  Synthetic oligonucleotide
tatacgctcaccacacagccattaccgccggcagattccgcggaagtcgtattag

SEQ ID NO: 181616 - DNA, 60 bp, Artificial
  Synthetic oligonucleotide
agcggagttactgcgatgagtgggaatcaaaagatcgccagagagcgaaacatgacagcg

SEQ ID NO: 181617 - DNA, 55 bp, Artificial
  Synthetic oligonucleotide
tataccaacgtagctgcccattttcacttaccgtcaggctatgtccaatccagcg

SEQ ID NO: 181618 - DNA, 55 bp, Artificial
  Synthetic oligonucleotide
acgaagctgttaaatagcgtatcggactggtatctgagtcgtgggtatattacca

SEQ ID NO: 181619 - DNA, 55 bp, Artificial
  Synthetic oligonucleotide
tataatgacgccatccgtaaatgctacgttatccgttgattatcctgcgacgctc

SEQ ID NO: 181620 - DNA, 55 bp, Artificial
  Synthetic oligonucleotide
tataacgaaaggcaagagcccataaccgttcattatcggttttactggtatgacg

SEQ ID NO: 181621 - DNA, 55 bp, Artificial
  Synthetic oligonucleotide
acgacagttcgttacgggcaccgcgaagaatttgcgataacgttaaatcatgtcc

SEQ ID NO: 181622 - DNA, 55 bp, Artificial
  Synthetic oligonucleotide
acgaccacggatgtaaagatcaaataatccttggagaacgggagccagacgggtg

SEQ ID NO: 181623 - DNA, 55 bp, Artificial
  Synthetic oligonucleotide
tagtgtgggtgcggaggggctgcgccacgttcccggtgatgtgattgaggtttgc

SEQ ID NO: 181624 - DNA, 55 bp, Artificial
  Synthetic oligonucleotide
accagtctgccggagctgccctcagaactgcggagtctgaatatcctctaacccg

SEQ ID NO: 181625 - DNA, 55 bp, Artificial
  Synthetic oligonucleotide
tccccgagagtgacagttatttctgcgccaagcaagactatacaccaggtccagt

SEQ ID NO: 181626 - DNA, 55 bp, Artificial
  Synthetic oligonucleotide
accatgagcgtaactacgccgttgcgaatcagcgtctaagcggcagtaacgatgt

SEQ ID NO: 181627 - DNA, 55 bp, Artificial
  Synthetic oligonucleotide
ggtccttccgtacgggaaatcagcagaggtgattccccatcaggggaaggactgg

SEQ ID NO: 181628 - DNA, 55 bp, Artificial
  Synthetic oligonucleotide
tcccagttaaacgtcaaccataaactattacctaatcgcatacgatcaatgacac

SEQ ID NO: 181629 - DNA, 55 bp, Artificial
  Synthetic oligonucleotide
tccattttacagacgatgacgggataccgtattcagaaacccgctacattgcctg

SEQ ID NO: 181630 - DNA, 55 bp, Artificial
  Synthetic oligonucleotide
acccagacctaaagcaacgattcctcgcaccagcactaccttaaaagactgaacc

SEQ ID NO: 181631 - DNA, 55 bp, Artificial
  Synthetic oligonucleotide
tccagttgataccgcgcttttagacgctgggtgaatatatccacgtccccggaga

SEQ ID NO: 181632 - DNA, 55 bp, Artificial
  Synthetic oligonucleotide
tccagcctggttccgtcccgacagctataaggcgctgggcggacagttgggccac

SEQ ID NO: 181633 - DNA, 55 bp, Artificial
  Synthetic oligonucleotide
tccagcctggacaccggaccgggaagacgtgctcctctcacttgccggagagatt

SEQ ID NO: 181634 - DNA, 55 bp, Artificial
  Synthetic oligonucleotide
tccacctgaaatacaggctaccgacactctgcgcctcttaagcgttcgacaaccg

SEQ ID NO: 181635 - DNA, 55 bp, Artificial
  Synthetic oligonucleotide
tccaccagtgctttcagcgatccgtcagtaggatcgagacctgccgagcggaatt

SEQ ID NO: 181636 - DNA, 55 bp, Artificial
  Synthetic oligonucleotide
tccaaaccaggcaacgacagtgacgttttcagatgcaaccggacacccctgggta

SEQ ID NO: 181637 - DNA, 55 bp, Artificial
  Synthetic oligonucleotide
tcattcgactactttcattgtcgtcaaccacgtggagggataaggttactctgta

SEQ ID NO: 181638 - DNA, 57 bp, Artificial
  Synthetic oligonucleotide
agcggcaaagcgcgataacaacaccgggtgtcgccagggccgtagcctgggtggtga

SEQ ID NO: 181639 - DNA, 55 bp, Artificial
  Synthetic oligonucleotide
tcatgcaagaagagcaatcaattcaacgagcagtaacacggttatgtattcaatg

SEQ ID NO: 181640 - DNA, 55 bp, Artificial
  Synthetic oligonucleotide
tcatgagcgtgggggatggctgaaagggcatcacagcggtatggcttactgggcc

SEQ ID NO: 181641 - DNA, 55 bp, Artificial
  Synthetic oligonucleotide
tcatctgtgtggcatagtatcgaaacgtatagccaatcgaaggctgagtattctg

SEQ ID NO: 181642 - DNA, 52 bp, Artificial
  Synthetic oligonucleotide
accccgcgaaccggtattatttaaacagatcggcagacaccgtcaggttacc

SEQ ID NO: 181643 - DNA, 55 bp, Artificial
  Synthetic oligonucleotide
tcatcgcgccagctcattccgccaggaatgccacctgactctccgcgcttacctg

SEQ ID NO: 181644 - DNA, 55 bp, Artificial
  Synthetic oligonucleotide
tcatccagctcgaatcctctccgaaccgtcccgcttccgggttcaccctcacgca

SEQ ID NO: 181645 - DNA, 55 bp, Artificial
  Synthetic oligonucleotide
tcatcagtaagcagctctggaaatccttacagccacttctgccgccccaacagcc

SEQ ID NO: 181646 - DNA, 55 bp, Artificial
  Synthetic oligonucleotide
tcatcagcggcggcactgccctcccgctcgctggccatccgtttgcgtgacggtg

SEQ ID NO: 181647 - DNA, 55 bp, Artificial
  Synthetic oligonucleotide
tcctcgctggataaaatattctagaaaccaaactcgccttattcgaaggaaactg

SEQ ID NO: 181648 - DNA, 55 bp, Artificial
  Synthetic oligonucleotide
tcctccgctgtcggggctttgtagtccgtgatacggtcgggcgtgagtttcatcg

SEQ ID NO: 181649 - DNA, 56 bp, Artificial
  Synthetic oligonucleotide
ggtcatttggtcccatgtgaccaaaccaccgacagtaccgctatttaactctgtac

SEQ ID NO: 181650 - DNA, 55 bp, Artificial
  Synthetic oligonucleotide
acattacgtgggtaggatcacgttgacgtctattgatgttccgatggtgcgaagg

SEQ ID NO: 181651 - DNA, 55 bp, Artificial
  Synthetic oligonucleotide
acatttgcatcgaatctttctcttgctaacttataactttcttctcccatactga

SEQ ID NO: 181652 - DNA, 55 bp, Artificial
  Synthetic oligonucleotide
tccgtcacccggaaaacgagtacgaccagatgacctcagatgccactgtggatga

SEQ ID NO: 181653 - DNA, 55 bp, Artificial
  Synthetic oligonucleotide
accaaatcccggcagcattccttacgtcagttatcccgcatcaccctgtgggtgc

SEQ ID NO: 181654 - DNA, 55 bp, Artificial
  Synthetic oligonucleotide
tccggtattttatgcgccagaccgttaaacggcagcacaatacctggctccgtga

SEQ ID NO: 181655 - DNA, 55 bp, Artificial
  Synthetic oligonucleotide
accacacgaaggatgctaggaaggcttttcttaatgaatgcccggataatggcga

SEQ ID NO: 181656 - DNA, 55 bp, Artificial
  Synthetic oligonucleotide
tccggatagaggccttcttgtgacaaaagagcaccgcctgtagtactgacaaacg

SEQ ID NO: 181657 - DNA, 55 bp, Artificial
  Synthetic oligonucleotide
tccggatagacgcatgacaggcgacgacaggtctgctccgcacgcggcgacttac

SEQ ID NO: 181658 - DNA, 54 bp, Artificial
  Synthetic oligonucleotide
accacaggggtgccctcccggtgccttctgtaagagaaggagtttcgtatgtcc

SEQ ID NO: 181659 - DNA, 55 bp, Artificial
  Synthetic oligonucleotide
accaccggattatggatggtatgcgcttcatcgctcgcttgttcgggatcgttag

SEQ ID NO: 181660 - DNA, 54 bp, Artificial
  Synthetic oligonucleotide
atcgtcagcaaaattcaccagcggtccagcccgaaaacccgtattaagggtata

SEQ ID NO: 181661 - DNA, 57 bp, Artificial
  Synthetic oligonucleotide
agcggccataagttgccagcaacggattgcgtagaacaccttttgtgtcgcgtcccg

SEQ ID NO: 181662 - DNA, 54 bp, Artificial
  Synthetic oligonucleotide
tccgaccgatcgtctgcgttctaccggggtattaagcggaccggattggttgcg

SEQ ID NO: 181663 - DNA, 55 bp, Artificial
  Synthetic oligonucleotide
accaccggcactgataccggcaagaatggttgcaaacttccgctccgtacagcgg

SEQ ID NO: 181664 - DNA, 55 bp, Artificial
  Synthetic oligonucleotide
tcccttgtatatgggttaaccagataaccacggggagcaggtaccggcatccacg

SEQ ID NO: 181665 - DNA, 55 bp, Artificial
  Synthetic oligonucleotide
tccctacttgtgagcaggtaacgcccgccgcagtctcacggcaagagcgtagcga

SEQ ID NO: 181666 - DNA, 55 bp, Artificial
  Synthetic oligonucleotide
tcccgcggcttggcgcaattggcaccagcttgatacggttttcgttcgagcgagt

SEQ ID NO: 181667 - DNA, 55 bp, Artificial
  Synthetic oligonucleotide
tcccgcaatggcgcggctttccttatgattgaggtggtagcgctcgccgcagtct

SEQ ID NO: 181668 - DNA, 55 bp, Artificial
  Synthetic oligonucleotide
accagctgacagacgtctacgatgccactcagcactcgttgcctgttccaagtcg

SEQ ID NO: 181669 - DNA, 55 bp, Artificial
  Synthetic oligonucleotide
accctcaccatgtaagattaagtccgcacaggctcattaaagttctggagctttt

SEQ ID NO: 181670 - DNA, 55 bp, Artificial
  Synthetic oligonucleotide
accctccgttctcaggattagtacataataatatgttacatgggcgaggcgcaat

SEQ ID NO: 181671 - DNA, 55 bp, Artificial
  Synthetic oligonucleotide
accctgaatcaatcagagccatccagtttaatcgtcggttccgttcatatgagca

SEQ ID NO: 181672 - DNA, 53 bp, Artificial
  Synthetic oligonucleotide
ggtcagccgcactactttaccttcggaaaggccgatgttacggcgaacaaacc

SEQ ID NO: 181673 - DNA, 55 bp, Artificial
  Synthetic oligonucleotide
tcagaatactgattcgacgctggctgtacgtgcttatagaaatatggttgaacga

SEQ ID NO: 181674 - DNA, 55 bp, Artificial
  Synthetic oligonucleotide
tcagaacgcgttacagagcgttttaaggcgatgtcggaaagagccatatctcacc

SEQ ID NO: 181675 - DNA, 55 bp, Artificial
  Synthetic oligonucleotide
tcactggctgagtaccttgaacaggccgtgactaaatatcatggctcaccgttcc

SEQ ID NO: 181676 - DNA, 55 bp, Artificial
  Synthetic oligonucleotide
tcactatgttaagggatactggcggcataaaaccccatgagcgtaagcgggctgt

SEQ ID NO: 181677 - DNA, 55 bp, Artificial
  Synthetic oligonucleotide
tcacgcgctgggtttatcagggattatgcggtctggagaaggagcaccaggatga

SEQ ID NO: 181678 - DNA, 55 bp, Artificial
  Synthetic oligonucleotide
tcacgaagtgcgcacttatacaatctcaacttcgtttcgattgtgcgcggtctgc

SEQ ID NO: 181679 - DNA, 55 bp, Artificial
  Synthetic oligonucleotide
tcacctcataggatggctggagtatgagccggttagtcagtaaaacgtcgtattc

SEQ ID NO: 181680 - DNA, 55 bp, Artificial
  Synthetic oligonucleotide
accgattcgctcagacggcacactaaacgagcgcccctgctggtcaaccatatgc

SEQ ID NO: 181681 - DNA, 55 bp, Artificial
  Synthetic oligonucleotide
tcaccgtttccgatgaatcgctccctcttgcgctctcctgttccaaccctgccgt

SEQ ID NO: 181682 - DNA, 55 bp, Artificial
  Synthetic oligonucleotide
tcaccgtggtactaatgagtccgccgagaagtttaagtaaagcacccatactccc

SEQ ID NO: 181683 - DNA, 60 bp, Artificial
  Synthetic oligonucleotide
agcggctggcgcgatctcatctggcacgagaaatcgcacatgtcgccgaataccattatc

SEQ ID NO: 181684 - DNA, 55 bp, Artificial
  Synthetic oligonucleotide
tcaccgctatacgtactttcggtcaataacaggaatttaagctcgccgcgtttgc

SEQ ID NO: 181685 - DNA, 55 bp, Artificial
  Synthetic oligonucleotide
accgcaaaaccacttactacgcacatattggccatgcgaacttgtttgtcatgta

SEQ ID NO: 181686 - DNA, 55 bp, Artificial
  Synthetic oligonucleotide
tcaccactcggctccccggaatgggctaacggacttgcgacagccatgacagacg

SEQ ID NO: 181687 - DNA, 55 bp, Artificial
  Synthetic oligonucleotide
tcacatgacgcaataccgactcaggcacgcgctgtataaaagccgcccattgctc

SEQ ID NO: 181688 - DNA, 55 bp, Artificial
  Synthetic oligonucleotide
accgcatttaaggcgatatctgcgcgattgtgagcctttatggggacatgacgtg

SEQ ID NO: 181689 - DNA, 55 bp, Artificial
  Synthetic oligonucleotide
accgccaatacgctcaaaggcgcgagggacaacgttaccccagaacgagattggc

SEQ ID NO: 181690 - DNA, 55 bp, Artificial
  Synthetic oligonucleotide
accgccccgcaggacaggggatgcgtccacagactgagtgatgtagactacgccg

SEQ ID NO: 181691 - DNA, 55 bp, Artificial
  Synthetic oligonucleotide
tcacagacaacgatgagttaccgtggtgggagcagttcggaaaggctcactatct

SEQ ID NO: 181692 - DNA, 55 bp, Artificial
  Synthetic oligonucleotide
tcatatgaaacaaaccatgcctgttctcatgccagtaagtgtagcattcacacaa

SEQ ID NO: 181693 - DNA, 55 bp, Artificial
  Synthetic oligonucleotide
tcatagcataagctccacgtagtttaaagctatgtaccggctgtctatcttctcg

SEQ ID NO: 181694 - DNA, 60 bp, Artificial
  Synthetic oligonucleotide
ggtcagatctctgacgcatgatatctcgcagcagtacgggcgggagatggctgcacgggt

SEQ ID NO: 181695 - DNA, 55 bp, Artificial
  Synthetic oligonucleotide
tcagtgcgtcccggagtgtgtgccatgccataaagttacagtgtcccataggtgt

SEQ ID NO: 181696 - DNA, 55 bp, Artificial
  Synthetic oligonucleotide
tcagtgcaaacctcgtacataattcactgttaagcgaattcggctgggtgtctgg

SEQ ID NO: 181697 - DNA, 55 bp, Artificial
  Synthetic oligonucleotide
tcagtcgtggcgcaggtagtggggcacagaacgcagtaggcacaggggttatggg

SEQ ID NO: 181698 - DNA, 55 bp, Artificial
  Synthetic oligonucleotide
tcagtatcgatgtctgtacccagacccatgtaccaggtgctctggcgaccatttt

SEQ ID NO: 181699 - DNA, 55 bp, Artificial
  Synthetic oligonucleotide
tcaggtaacgagcccaatacaaaacataataatccccattctctacaggctcggg

SEQ ID NO: 181700 - DNA, 55 bp, Artificial
  Synthetic oligonucleotide
acccgcttcaaacgctgacggtgccaggtaaacaccttcgtccagcatcatatgg

SEQ ID NO: 181701 - DNA, 54 bp, Artificial
  Synthetic oligonucleotide
acccggacctgattggcccggacgagcgattaggtgcaacaacggaaggtctcc

SEQ ID NO: 181702 - DNA, 55 bp, Artificial
  Synthetic oligonucleotide
tcaggatagcgcagcagtcgaactacttcatactgaaccggctcatcgtgtcgcg

SEQ ID NO: 181703 - DNA, 55 bp, Artificial
  Synthetic oligonucleotide
tcagcttcgggctgggtccggtattatacattccgacgctgtcccagtttctgcc

SEQ ID NO: 181704 - DNA, 55 bp, Artificial
  Synthetic oligonucleotide
tcagcgtggtcgcctgtagggactgactattatcgatttgcccggaaatagcccc

SEQ ID NO: 181705 - DNA, 60 bp, Artificial
  Synthetic oligonucleotide
ggtcagaggggctggcgatgccggagtcgttgtcacatatcacgacggaatcacagtgga

SEQ ID NO: 181706 - DNA, 55 bp, Artificial
  Synthetic oligonucleotide
tcagcgaggagagcagcttcaccatttcctgtctgccgatgatcggatggaggcc

SEQ ID NO: 181707 - DNA, 55 bp, Artificial
  Synthetic oligonucleotide
tcagcctgcaggtagccagtggtgctgaagctgtccgggcactggcggtacagtt

SEQ ID NO: 181708 - DNA, 55 bp, Artificial
  Synthetic oligonucleotide
tcagcccgcacgataagaagcactggttacgtacgctgtgcgaggtggattacac

SEQ ID NO: 181709 - DNA, 55 bp, Artificial
  Synthetic oligonucleotide
tcagcatatccaccgtatcatggcgaattatatgccgcacaacaaacgtagcggc

SEQ ID NO: 181710 - DNA, 55 bp, Artificial
  Synthetic oligonucleotide
acccgttacggctgaccctgaatgatttcgctccgtgcaactgaagcacccagcg

SEQ ID NO: 181711 - DNA, 55 bp, Artificial
  Synthetic oligonucleotide
acccgttcgcccttctgaacgctcgaaacagatcgcgcattgctttcgtgaatag

SEQ ID NO: 181712 - DNA, 55 bp, Artificial
  Synthetic oligonucleotide
tcagacgcgcagattacggatatctatcaggtggaaaacgccgcacgatatctgg

SEQ ID NO: 181713 - DNA, 55 bp, Artificial
  Synthetic oligonucleotide
ttgcacaatatcgcgcccaggattacctctacgcgaatagtcatgaactcgaggc

SEQ ID NO: 181714 - DNA, 55 bp, Artificial
  Synthetic oligonucleotide
ttgcaatttgagtttcagaaacgacaggatttaatgtaagcgtcaacggagcacc

SEQ ID NO: 181715 - DNA, 55 bp, Artificial
  Synthetic oligonucleotide
ttgattacactcctgttaatccatacagcaacagtgccggggagacccggcgctg

SEQ ID NO: 181716 - DNA, 59 bp, Artificial
  Synthetic oligonucleotide
ggtcacggataacacctccctgctgcgtttctatcaacactggcaaccgcagtggaaac

SEQ ID NO: 181717 - DNA, 55 bp, Artificial
  Synthetic oligonucleotide
ttgatgaagggaggtcgtatgcaaacagtgacgcgctcatgaacgtactggatac

SEQ ID NO: 181718 - DNA, 55 bp, Artificial
  Synthetic oligonucleotide
aaatctttatgaatttcacgtaacagggcatcggtcatctcccagctaatacaag

SEQ ID NO: 181719 - DNA, 55 bp, Artificial
  Synthetic oligonucleotide
aaatgattgtcctgctgaaccagtacacggcagcaggcacttacggcagatactt

SEQ ID NO: 181720 - DNA, 55 bp, Artificial
  Synthetic oligonucleotide
ttgagtaaaatgcaacataattcatctctgcaaggtagctacaccatgataccgc

SEQ ID NO: 181721 - DNA, 55 bp, Artificial
  Synthetic oligonucleotide
ttgagatggtggataagtcacaagaaacgacgcactttggttttcagaccgtcgc

SEQ ID NO: 181722 - DNA, 55 bp, Artificial
  Synthetic oligonucleotide
ttgagagtgtgaaaccgtctcaggtgcctcgtcaggagggcgcatgggcaccgga

SEQ ID NO: 181723 - DNA, 55 bp, Artificial
  Synthetic oligonucleotide
ttgagagcctcgctgagaaacgtaaagcttatagcagggcaaaacgtcttaccgg

SEQ ID NO: 181724 - DNA, 55 bp, Artificial
  Synthetic oligonucleotide
aaatgctgaacaacgagttcaggaggctcggcgagtctgtcagcgaggctgtgac

SEQ ID NO: 181725 - DNA, 55 bp, Artificial
  Synthetic oligonucleotide
ttgaactatggctcgctacgaccttcccgatgaggcatggactatcatcgagtag

SEQ ID NO: 181726 - DNA, 55 bp, Artificial
  Synthetic oligonucleotide
ttgaaccctccgtcgctgtaacgctgacccagggcttagggcctgtcagtatgac

SEQ ID NO: 181727 - DNA, 60 bp, Artificial
  Synthetic oligonucleotide
ggtcaaagtttacaggcatggcagcggcatcctttcagcgtctcacagcgacattataaa

SEQ ID NO: 181728 - DNA, 53 bp, Artificial
  Synthetic oligonucleotide
aaattccgcgtcccgttcaccgttttctgatgagaaagtttgctgttttgacc

SEQ ID NO: 181729 - DNA, 55 bp, Artificial
  Synthetic oligonucleotide
ttcttgacgtggagtagtataacgagatgtacctggtcttctacgatttaaatcg

SEQ ID NO: 181730 - DNA, 55 bp, Artificial
  Synthetic oligonucleotide
aaattggctcccatgcccatccatactccctttcataatctcttcgataccactc

SEQ ID NO: 181731 - DNA, 55 bp, Artificial
  Synthetic oligonucleotide
ttcttccacgcatctcgttaagcatccgttataatcggtgtcagataccagcctg

SEQ ID NO: 181732 - DNA, 55 bp, Artificial
  Synthetic oligonucleotide
ttcttatttcatgtaaacgctgcgcgccaggttgtatctcagggttcacggtaaa

SEQ ID NO: 181733 - DNA, 55 bp, Artificial
  Synthetic oligonucleotide
ttctgtatcagtcataactagggaaattgggtcagatccggcttcagtggtgtat

SEQ ID NO: 181734 - DNA, 55 bp, Artificial
  Synthetic oligonucleotide
ttctctgcttttgccaccggctgcgcggcttccgcctgcggcaccggctcaaacg

SEQ ID NO: 181735 - DNA, 55 bp, Artificial
  Synthetic oligonucleotide
ttggttggtcagaaggttgtaagtaatcatcaatgataacctcgcagattccaga

SEQ ID NO: 181736 - DNA, 55 bp, Artificial
  Synthetic oligonucleotide
ttggttcagcgtcgccattaactgcccgttcgctaacgctaaatcatagagcggc

SEQ ID NO: 181737 - DNA, 55 bp, Artificial
  Synthetic oligonucleotide
ttggtagtggcgttatctgtctgcttccgcttttatgttggtggctagcggtaac

SEQ ID NO: 181738 - DNA, 60 bp, Artificial
  Synthetic oligonucleotide
ggtattatttcctagcgtcagataagatgctatacgcaatcgtgataagcactattctat

SEQ ID NO: 181739 - DNA, 55 bp, Artificial
  Synthetic oligonucleotide
ttgggagttcttcatcctgatagcggtggtctgggtcgaaatcctcatagcccgg

SEQ ID NO: 181740 - DNA, 55 bp, Artificial
  Synthetic oligonucleotide
ttggctgttccttagtgcgtcaggcggtcagtgtatcatcactcatactctgccc

SEQ ID NO: 181741 - DNA, 55 bp, Artificial
  Synthetic oligonucleotide
aaaggtgtcgtcatggcagcaggcctatcgccccttaccggggcgatgagtcaga

SEQ ID NO: 181742 - DNA, 55 bp, Artificial
  Synthetic oligonucleotide
aaaggttcaattgttacgccagcgagtcttttgcgctggaattaccgtatgaacc

SEQ ID NO: 181743 - DNA, 55 bp, Artificial
  Synthetic oligonucleotide
ttggaggcctcagacgtgatgaaattctacgtatgcagtgtgggtgtatccgctg

SEQ ID NO: 181744 - DNA, 55 bp, Artificial
  Synthetic oligonucleotide
ttgctgttacctggctggcggtgactaacagaacactcattcatgagcagcgtac

SEQ ID NO: 181745 - DNA, 55 bp, Artificial
  Synthetic oligonucleotide
ttgctgtcgcgccgtcagtgcccaggctattctggccagcttgtttgccagagca

SEQ ID NO: 181746 - DNA, 55 bp, Artificial
  Synthetic oligonucleotide
aaatataatcgcgtggggatgattgcgccgtttaactttctgatcccgttttctg

SEQ ID NO: 181747 - DNA, 55 bp, Artificial
  Synthetic oligonucleotide
ttgcgggcgacccatttcgcaaggtgcagatctatatgactggctatacagccca

SEQ ID NO: 181748 - DNA, 55 bp, Artificial
  Synthetic oligonucleotide
ttgcgggccacggaatgatgagacctgtcgggaactgttagccctgttgactccg

SEQ ID NO: 181749 - DNA, 57 bp, Artificial
  Synthetic oligonucleotide
ggtatgcggttatacgttgttacgatcattgtgtagtggcaaggttcggtagtattc

SEQ ID NO: 181750 - DNA, 55 bp, Artificial
  Synthetic oligonucleotide
aaatcacgcaaagcgcaggccgtacccgtgaggggcatgccatacagcagaccgg

SEQ ID NO: 181751 - DNA, 55 bp, Artificial
  Synthetic oligonucleotide
ttgcgcgccatccactggttgcccatgtacgcgccgatatccgcacggtactgcg

SEQ ID NO: 181752 - DNA, 55 bp, Artificial
  Synthetic oligonucleotide
aaatcatcgagaacattggaagtgcgaaaacatcggccacatgtcatctcaccgt

SEQ ID NO: 181753 - DNA, 55 bp, Artificial
  Synthetic oligonucleotide
aaatccgtttcagcagtctctggctggcaattcctgcgtgattcacatggctgca

SEQ ID NO: 181754 - DNA, 55 bp, Artificial
  Synthetic oligonucleotide
aaatcgccgacctgcaacttatagtctccggatgccaggcccgggtcgctagcgc

SEQ ID NO: 181755 - DNA, 55 bp, Artificial
  Synthetic oligonucleotide
ttgccctaccgtgacgctaagggagtcgacgcgaccgtcaaccagtgcacggacg

SEQ ID NO: 181756 - DNA, 55 bp, Artificial
  Synthetic oligonucleotide
ttgcccgccgccatacaccttaagcccttgtgccccatggtgttgcagcgatccg

SEQ ID NO: 181757 - DNA, 55 bp, Artificial
  Synthetic oligonucleotide
aaatcggcccctatcataatttggagcaaacatgtccaacattctgcaatttatc

SEQ ID NO: 181758 - DNA, 55 bp, Artificial
  Synthetic oligonucleotide
ttccgcttcctcgctcattcgctcactccgttcggtcatgagtctgcggcgagcg

SEQ ID NO: 181759 - DNA, 55 bp, Artificial
  Synthetic oligonucleotide
ttccgcttcctagtaaagctggaactcatccaaaaccggacaacccaacgcctgc

SEQ ID NO: 181760 - DNA, 60 bp, Artificial
  Synthetic oligonucleotide
ggtatgcagtgcgcactctatgacgcgggtcgctgccgttcctgtcaatggattacgcag

SEQ ID NO: 181761 - DNA, 55 bp, Artificial
  Synthetic oligonucleotide
ttccgattatcgcgaatggcgacattactaacccgcataaagccagagctgttct

SEQ ID NO: 181762 - DNA, 55 bp, Artificial
  Synthetic oligonucleotide
ttccgaaaccggcataagaattgatctgaataaaaggttcgccctgaaagtgacg

SEQ ID NO: 181763 - DNA, 55 bp, Artificial
  Synthetic oligonucleotide
ttcccggttactgtccggatcgatggcgcagatgtgtagtgtacgaagcgccctg

SEQ ID NO: 181764 - DNA, 55 bp, Artificial
  Synthetic oligonucleotide
ttccatgcctgacggcctggccaacacctcacggcagcacagtaaactgcgcacc

SEQ ID NO: 181765 - DNA, 54 bp, Artificial
  Synthetic oligonucleotide
ttccagttcagccagttccggtttgagtaaatccgccgggcggcaggtcaccgg

SEQ ID NO: 181766 - DNA, 55 bp, Artificial
  Synthetic oligonucleotide
ttccagccggtgacggtgcccgagccgacggtggcccaggccatcatgattctgc

SEQ ID NO: 181767 - DNA, 55 bp, Artificial
  Synthetic oligonucleotide
aaccatcccttgtaactaaatgcatcaccagccgaagaaactaaatacccattgc

SEQ ID NO: 181768 - DNA, 55 bp, Artificial
  Synthetic oligonucleotide
ttccacttccacggtgtagataccggaagcggcaggcttctctgcttttgccacc

SEQ ID NO: 181769 - DNA, 55 bp, Artificial
  Synthetic oligonucleotide
ttcatttaaggccgcgtttatctccggtatcgaatgtaaattttgtcgaactggc

SEQ ID NO: 181770 - DNA, 55 bp, Artificial
  Synthetic oligonucleotide
aacccgacttcagtttactgcggcgcacactaacgacaacgcgacgagatacccc

SEQ ID NO: 181771 - DNA, 58 bp, Artificial
  Synthetic oligonucleotide
gcattacttggcccatcctttctgaccggtaacgttgggctcaattgatactgaaatg

SEQ ID NO: 181772 - DNA, 57 bp, Artificial
  Synthetic oligonucleotide
ggtatcttggcgggaggatacagacgaacctggaagaaatcagggtacaggaagaga

SEQ ID NO: 181773 - DNA, 55 bp, Artificial
  Synthetic oligonucleotide
ttcattactgcgcgccccagattaccgcttagcaccttagtaccgccgtgaggag

SEQ ID NO: 181774 - DNA, 55 bp, Artificial
  Synthetic oligonucleotide
ttcatgttgctgcctttgccccacagctcgtagatgtaatccttgttgagcggca

SEQ ID NO: 181775 - DNA, 54 bp, Artificial
  Synthetic oligonucleotide
aacccgattcttttgaagacattgtttctcttgttgctttatatcgaccgggtc

SEQ ID NO: 181776 - DNA, 55 bp, Artificial
  Synthetic oligonucleotide
ttcatcgactgaaatgccctcgtaacggctatgggacaaaaggaccgaatccttt

SEQ ID NO: 181777 - DNA, 55 bp, Artificial
  Synthetic oligonucleotide
ttcaggccgatgcttacggtagttaccgggcgttgtacgaatccggcagaataac

SEQ ID NO: 181778 - DNA, 52 bp, Artificial
  Synthetic oligonucleotide
aaccctgaccgaattttattaacagaggttcgcggtgcggaagcctgggact

SEQ ID NO: 181779 - DNA, 55 bp, Artificial
  Synthetic oligonucleotide
ttcagcacatgggacccctcgggagtgcatatgattagagactggttaaccccgg

SEQ ID NO: 181780 - DNA, 55 bp, Artificial
  Synthetic oligonucleotide
ttcagcaaggttgataacttgcacttgctgttcgcgccaaatctgtaatagcggg

SEQ ID NO: 181781 - DNA, 55 bp, Artificial
  Synthetic oligonucleotide
ttcagattaagcgcgaatattgcctgcgatagcagcgagtgcggatgctttcgac

SEQ ID NO: 181782 - DNA, 55 bp, Artificial
  Synthetic oligonucleotide
aacacgatattgtacgttcatttcaacgcggatcacgttttcatctgacgttaac

SEQ ID NO: 181783 - DNA, 60 bp, Artificial
  Synthetic oligonucleotide
agcggtgatgtttggaaactgggtctaggtggctctgaggataatgcctttttgctgtca

SEQ ID NO: 181784 - DNA, 55 bp, Artificial
  Synthetic oligonucleotide
ttctcgccgtcaaacagacgacggctgcgatattccacggtcggcctgacccgtt

SEQ ID NO: 181785 - DNA, 55 bp, Artificial
  Synthetic oligonucleotide
ttctccgttctgtctgtcatctgcgttgtgtgattatatcgcgtaccacttttcg

SEQ ID NO: 181786 - DNA, 55 bp, Artificial
  Synthetic oligonucleotide
ttctccagaacacttccgtgcaggggcgcgatttccgcgtgtcgggcacaacgaa

SEQ ID NO: 181787 - DNA, 55 bp, Artificial
  Synthetic oligonucleotide
aacacgcgactcttaacgtcgccataacacatgcaaacagggagacacaccgcaa

SEQ ID NO: 181788 - DNA, 55 bp, Artificial
  Synthetic oligonucleotide
aacacggcggctagcgcagtttgtggcgtgtggctgtcgaccgctccactcgata

SEQ ID NO: 181789 - DNA, 55 bp, Artificial
  Synthetic oligonucleotide
ttcgtgtatttgaggatcgcttacatcaggattatgcgacaggcactatcccggg

SEQ ID NO: 181790 - DNA, 55 bp, Artificial
  Synthetic oligonucleotide
ttcgtcgacacattctgtcagtccctgccaggcccgtagcacgacaggacggtat

SEQ ID NO: 181791 - DNA, 55 bp, Artificial
  Synthetic oligonucleotide
aacaggttttggtgactgcgctcctccaagccagttaccttggttcttcgagccg

SEQ ID NO: 181792 - DNA, 55 bp, Artificial
  Synthetic oligonucleotide
aacagttaactgaagccgcgctgtctgcggaactcgactctcatctggcttcgga

SEQ ID NO: 181793 - DNA, 55 bp, Artificial
  Synthetic oligonucleotide
ttcgctgaaataatcgcacccttcatggtcgccccttcacccgaccctgtacccg

SEQ ID NO: 181794 - DNA, 60 bp, Artificial
  Synthetic oligonucleotide
agcggtggcaaagtatcgctgcacagcggacaggatgcatcgctgattggcgcgcaggtg

SEQ ID NO: 181795 - DNA, 55 bp, Artificial
  Synthetic oligonucleotide
aacataatccactccttagactatctgcggagaaggaaccggtgatatcagtgtc

SEQ ID NO: 181796 - DNA, 55 bp, Artificial
  Synthetic oligonucleotide
ttcgcgatgggatcgaagcattattccgcattattgtgaatgagggcgatcggtg

SEQ ID NO: 181797 - DNA, 55 bp, Artificial
  Synthetic oligonucleotide
ttcgcctggtaagctgcggttttcatctgcttcgcattgaaatcgtcctgagcgg

SEQ ID NO: 181798 - DNA, 55 bp, Artificial
  Synthetic oligonucleotide
ttcgccatgattttgggctgagtatcacagccgttgggttgcttaactcgctgcc

SEQ ID NO: 181799 - DNA, 55 bp, Artificial
  Synthetic oligonucleotide
ttcgcaccaaacaacgtcggcatatggggcataagccaacccacggctgatagcc

SEQ ID NO: 181800 - DNA, 55 bp, Artificial
  Synthetic oligonucleotide
ttcgcaattgttttaggcgataagttaagtatgttagctatctccttgcgactga

SEQ ID NO: 181801 - DNA, 55 bp, Artificial
  Synthetic oligonucleotide
ttcgacggatgacaccggtaatctcattggtggtgcgccaattctaatcgctccg

SEQ ID NO: 181802 - DNA, 55 bp, Artificial
  Synthetic oligonucleotide
aacatcccttgcgtgcaccgcctgagaggctctgagggcgtttctgacgggaaac

SEQ ID NO: 181803 - DNA, 55 bp, Artificial
  Synthetic oligonucleotide
aaaactctcgcagcaactgaacgttaagcctatgaaatacgatacttccgagctt

SEQ ID NO: 181804 - DNA, 55 bp, Artificial
  Synthetic oligonucleotide
tttgtacccctaatgctgctaacttagttctggcagttctacgcagatcgcgagg

SEQ ID NO: 181805 - DNA, 60 bp, Artificial
  Synthetic oligonucleotide
ggtatcttctgcgccatccacacgtatggccgtcgtctcaactgtcatccgcatgtacat

SEQ ID NO: 181806 - DNA, 55 bp, Artificial
  Synthetic oligonucleotide
tttgggctgttcagccacagacagcgtgagtccgggccattcgggcgcttctgcc

SEQ ID NO: 181807 - DNA, 55 bp, Artificial
  Synthetic oligonucleotide
tttgggctcaatatctggtcacgtatcctcgatgtaccgttagggattgacgttc

SEQ ID NO: 181808 - DNA, 55 bp, Artificial
  Synthetic oligonucleotide
tttgctaatcaatgcgcaaatgctcaattccgccagtatgacgcgagacgattac

SEQ ID NO: 181809 - DNA, 55 bp, Artificial
  Synthetic oligonucleotide
tttgcgttacctgatcctgagagttaacggtggaaacggtcagtacgtcagaatt

SEQ ID NO: 181810 - DNA, 54 bp, Artificial
  Synthetic oligonucleotide
tttgcgtccaccacgctgaatggcccctaagcggttttcttccgttaagtgaac

SEQ ID NO: 181811 - DNA, 55 bp, Artificial
  Synthetic oligonucleotide
tttgcactcaccgtatctgaccgccttgtcatgtcttacaaatattgatcatacg

SEQ ID NO: 181812 - DNA, 55 bp, Artificial
  Synthetic oligonucleotide
tttgcacatcacacctggtcgggacggttccgagttcacttatatcgaagcacgc

SEQ ID NO: 181813 - DNA, 55 bp, Artificial
  Synthetic oligonucleotide
tttgatggtacgggtaagctcattgataccgcgtatgttaattatgaacccagtg

SEQ ID NO: 181814 - DNA, 53 bp, Artificial
  Synthetic oligonucleotide
aaaagcggttagcaaaacacagcgaagcgtaaatttaccgtccgtacgcagcg

SEQ ID NO: 181815 - DNA, 55 bp, Artificial
  Synthetic oligonucleotide
tttgatacgcggataggcgtaagggcaatcattaccgcgaggcttggcggacgtc

SEQ ID NO: 181816 - DNA, 60 bp, Artificial
  Synthetic oligonucleotide
ggtatcgattctcgtcgatcttatatacctttcagagcatagccaatgagccccacagac

SEQ ID NO: 181817 - DNA, 53 bp, Artificial
  Synthetic oligonucleotide
tttgagtgacggcgcgccgttaaccgtgtaccccggcgaagtgccttcgcgtt

SEQ ID NO: 181818 - DNA, 54 bp, Artificial
  Synthetic oligonucleotide
aaaaggtggcgcgaaaacgaaaggccgtggacgtaaggccgcgcagccagagtc

SEQ ID NO: 181819 - DNA, 55 bp, Artificial
  Synthetic oligonucleotide
aaaaggttagtggctgggatcaaccagccactaactttgttattcaacagtgacg

SEQ ID NO: 181820 - DNA, 55 bp, Artificial
  Synthetic oligonucleotide
tttcttgaggcaagtagccaatccctaatcgagctctacgatagattggtaacgt

SEQ ID NO: 181821 - DNA, 55 bp, Artificial
  Synthetic oligonucleotide
tttctgagtgtccttgagtgtgcctttctggtgtctcattccgctttaattcgcc

SEQ ID NO: 181822 - DNA, 55 bp, Artificial
  Synthetic oligonucleotide
tttcgcagctcgcccgtctgggttcacttctcgggttagacccgctcagccgcat

SEQ ID NO: 181823 - DNA, 55 bp, Artificial
  Synthetic oligonucleotide
tttcctgccccacaatggcgttgatggtagttgatttacctgctttcatcgtgcc

SEQ ID NO: 181824 - DNA, 55 bp, Artificial
  Synthetic oligonucleotide
tttcctcggcactgcggccccggctggccagcttctgcgcggcgataaagtcgca

SEQ ID NO: 181825 - DNA, 55 bp, Artificial
  Synthetic oligonucleotide
tttccgctgcacctcacaaaacgggtgtcgggtttcgcagcctgctgactacaca

SEQ ID NO: 181826 - DNA, 55 bp, Artificial
  Synthetic oligonucleotide
ttttgtcccggacctgtgccaggttatgcgcaatatcgttcattttccgaggatc

SEQ ID NO: 181827 - DNA, 59 bp, Artificial
  Synthetic oligonucleotide
agcgtcacgcgcgggatagacgctctttatcatgtcggggagataaaaggccgtcagga

SEQ ID NO: 181828 - DNA, 55 bp, Artificial
  Synthetic oligonucleotide
ttttggagtttgcgccaaatgttatggtagagacctagctcgtggtcatttagtg

SEQ ID NO: 181829 - DNA, 55 bp, Artificial
  Synthetic oligonucleotide
ttttgcttttcggctccatgcaatggccctcggagagcgcaccgcccgaagggtg

SEQ ID NO: 181830 - DNA, 55 bp, Artificial
  Synthetic oligonucleotide
ttttgcgagaggtttcgcggatcggactttgctgtcagttaacatatgagggtca

SEQ ID NO: 181831 - DNA, 55 bp, Artificial
  Synthetic oligonucleotide
ttttgccccgatggctatgtgagggaaattgacgggcaatatgtgatgactacgc

SEQ ID NO: 181832 - DNA, 54 bp, Artificial
  Synthetic oligonucleotide
ttttgaagtaggaaaagacaagtgggcgtttaatcgggaagaggtcatgttgac

SEQ ID NO: 181833 - DNA, 55 bp, Artificial
  Synthetic oligonucleotide
ttttctcttgccggatgccagtccaatgcggatgactacgccgcagatgtttacc

SEQ ID NO: 181834 - DNA, 53 bp, Artificial
  Synthetic oligonucleotide
ttttcgttttactcgcggcgtccttttcaaccgcctgcggagaaggcaactta

SEQ ID NO: 181835 - DNA, 55 bp, Artificial
  Synthetic oligonucleotide
aaaaccggtcgcactaattcgcactgtttcgcactaaatggctgcgttcctgggg

SEQ ID NO: 181836 - DNA, 55 bp, Artificial
  Synthetic oligonucleotide
ttttcccgaaagctcccagaaccttggatacccagacacccgcgatgaatgtacc

SEQ ID NO: 181837 - DNA, 53 bp, Artificial
  Synthetic oligonucleotide
ttttccccgcgctgtacagttcaaccatcgaaacgtagtacggcgaagggtta

SEQ ID NO: 181838 - DNA, 60 bp, Artificial
  Synthetic oligonucleotide
agcgtcctgcatgggaaggctatatgcgggtgaatgcgttattagcggataagttattgc

SEQ ID NO: 181839 - DNA, 55 bp, Artificial
  Synthetic oligonucleotide
ttttccaacgtcgtgatatcaaccttggtagccaagcggttttctatcagattgg

SEQ ID NO: 181840 - DNA, 55 bp, Artificial
  Synthetic oligonucleotide
ttttcatctgcgcgttttgtcagggtacttagcgaagaggctgactgggctttcc

SEQ ID NO: 181841 - DNA, 55 bp, Artificial
  Synthetic oligonucleotide
ttttcagagatcctttaacatcctcacttcgcaatcgacatgtccggtgcagccg

SEQ ID NO: 181842 - DNA, 55 bp, Artificial
  Synthetic oligonucleotide
aaaacctcttctgaatcagtgttgtattcacatgagatacgctcggaaaggtcat

SEQ ID NO: 181843 - DNA, 55 bp, Artificial
  Synthetic oligonucleotide
ttttcaaagggcagataactgaaagtcacctgggtaaggaactgctggagaaggt

SEQ ID NO: 181844 - DNA, 55 bp, Artificial
  Synthetic oligonucleotide
aaaacgcacttcagttcatgggcgcgaagaggccttgtttcagaccgcctggcag

SEQ ID NO: 181845 - DNA, 55 bp, Artificial
  Synthetic oligonucleotide
aaaacggtatccatctcaccaatatgatcttctccatactgcgtaatgcccgcgc

SEQ ID NO: 181846 - DNA, 55 bp, Artificial
  Synthetic oligonucleotide
tttgttgaatacgcgttgtttgaggatcaggtcataccaactggtgtgctcattg

SEQ ID NO: 181847 - DNA, 55 bp, Artificial
  Synthetic oligonucleotide
tttgttaatcatcgttctcagggctgtggtcgccgttgcaaacgcgctgattgca

SEQ ID NO: 181848 - DNA, 55 bp, Artificial
  Synthetic oligonucleotide
tttacgcagacgtgcgacgaagaatccttcgcagtcgtaaatttgtgggaagacg

SEQ ID NO: 181849 - DNA, 60 bp, Artificial
  Synthetic oligonucleotide
ggtatacaataagctgtgttatgcagaggatatactgtaatgagcgagtgatataaacta

SEQ ID NO: 181850 - DNA, 55 bp, Artificial
  Synthetic oligonucleotide
tttaccgtctcggtcagtgaatcgttatagctgctgacggcatcgctaagtgatt

SEQ ID NO: 181851 - DNA, 50 bp, Artificial
  Synthetic oligonucleotide
aaacgacgttgagtggtttaggttttcactggtctggtaacgtccgttac

SEQ ID NO: 181852 - DNA, 51 bp, Artificial
  Synthetic oligonucleotide
tttaagtttataaggcgcctgaccggtttaggtttaaattgccatctttac

SEQ ID NO: 181853 - DNA, 55 bp, Artificial
  Synthetic oligonucleotide
aaacgactattaagcgcatctagatgcacagctatttcgttaatttccgtatcac

SEQ ID NO: 181854 - DNA, 55 bp, Artificial
  Synthetic oligonucleotide
aaactcataactgtcatgattgacgaatgctgtatctacccgtgcgaagcacacc

SEQ ID NO: 181855 - DNA, 55 bp, Artificial
  Synthetic oligonucleotide
aaactcgccgtaaactgtgtcatttccccgctcaccgttatctatgactgcaaaa

SEQ ID NO: 181856 - DNA, 55 bp, Artificial
  Synthetic oligonucleotide
ttgttgcccgattaccctggttgaagtggcgtaattgcaggcagacttcccgcga

SEQ ID NO: 181857 - DNA, 55 bp, Artificial
  Synthetic oligonucleotide
aaactgcatttcaccagtccctgttctcgtcagcaaaagagccgttcatttcaat

SEQ ID NO: 181858 - DNA, 55 bp, Artificial
  Synthetic oligonucleotide
ttgttgcaaatggatgatgtcgcctttgtcagtagccgtatgagcggcgtttatg

SEQ ID NO: 181859 - DNA, 55 bp, Artificial
  Synthetic oligonucleotide
ttgttagacgggcatatacgggaattgcacgacttttatggtccaggcaagggat

SEQ ID NO: 181860 - DNA, 53 bp, Artificial
  Synthetic oligonucleotide
ggtaggctgacccctgtttaacagtgacgccccccctgtttaacagtgacgaa

SEQ ID NO: 181861 - DNA, 55 bp, Artificial
  Synthetic oligonucleotide
aaagagcgcagctgttccgagtacattacaagcagtggcgagtggtcagtcaatc

SEQ ID NO: 181862 - DNA, 55 bp, Artificial
  Synthetic oligonucleotide
aaagatgattttggcagtttcaaattttggcgagctctcgaaaagtgcatgtacg

SEQ ID NO: 181863 - DNA, 54 bp, Artificial
  Synthetic oligonucleotide
ttgtggctcagttctgtaacttttcccgtaacattgtctgttgttacgggaaag

SEQ ID NO: 181864 - DNA, 55 bp, Artificial
  Synthetic oligonucleotide
aaagcgaccgctcgtatcctcttgaaaccgaacaccccatgtcttcgcgttcaac

SEQ ID NO: 181865 - DNA, 55 bp, Artificial
  Synthetic oligonucleotide
ttgtgacgtcattacccgcagatgatattactgaatcacctgtcagttcattacc

SEQ ID NO: 181866 - DNA, 55 bp, Artificial
  Synthetic oligonucleotide
ttgtcgctgaccaaatcagcgctggccgcacttgacggcaaggacactgcacgcg

SEQ ID NO: 181867 - DNA, 55 bp, Artificial
  Synthetic oligonucleotide
ttgtcagtccggctgcacatctcccggtaagtccgttcgcggagggctggtcgta

SEQ ID NO: 181868 - DNA, 55 bp, Artificial
  Synthetic oligonucleotide
aaagcgcagcattccgcgctggatgatattccacgcagtttaccggccttaatgc

SEQ ID NO: 181869 - DNA, 55 bp, Artificial
  Synthetic oligonucleotide
ttgtataaacaagagggataaccgtgagcgataacagcagtgatacccgccgtaa

SEQ ID NO: 181870 - DNA, 55 bp, Artificial
  Synthetic oligonucleotide
aaaggcacatactgcagcggattcatcacctctccctgacgggcaaacacccgac

SEQ ID NO: 181871 - DNA, 52 bp, Artificial
  Synthetic oligonucleotide
agcgtcgggtggcgacgtaactgtcttatccggcctacaaaaaccgtttcga

SEQ ID NO: 181872 - DNA, 53 bp, Artificial
  Synthetic oligonucleotide
aaaatcggtaccggtcgtttccgcgacctcagcccgtgcgttatcgtcgtagc

SEQ ID NO: 181873 - DNA, 55 bp, Artificial
  Synthetic oligonucleotide
aaaatcgtaatgccacgtctcatcagggttttcggggccatgaataaacacatag

SEQ ID NO: 181874 - DNA, 55 bp, Artificial
  Synthetic oligonucleotide
tttccgactgcaacaaggggtctgcccgtgacaacaatagtaagtgtacgacgca

SEQ ID NO: 181875 - DNA, 55 bp, Artificial
  Synthetic oligonucleotide
aaaatggatgcgtttggctgtaccagtcgcgggcaggcgcaccgcgccgggctgt

SEQ ID NO: 181876 - DNA, 55 bp, Artificial
  Synthetic oligonucleotide
tttcccaacacaacccgtcccgcaagggtaaatagcacgcattctgcgcccttgc

SEQ ID NO: 181877 - DNA, 55 bp, Artificial
  Synthetic oligonucleotide
tttccacgctttgtcgtggacaggacacgggataatcagccaataagcagtaccg

SEQ ID NO: 181878 - DNA, 55 bp, Artificial
  Synthetic oligonucleotide
aaaatggtaaggggagagcggtgattccaatagaacgacatcagcgtattttagc

SEQ ID NO: 181879 - DNA, 55 bp, Artificial
  Synthetic oligonucleotide
tttcaggtcagtaatactggccgctgtggttgtcagaatttgatagctcataagt

SEQ ID NO: 181880 - DNA, 55 bp, Artificial
  Synthetic oligonucleotide
aaaattactggcggtgggccattaccttgaatctaccgtcgatatcgctgaatct

SEQ ID NO: 181881 - DNA, 55 bp, Artificial
  Synthetic oligonucleotide
tttcagatccgacaacgagcgttgagccgatggtactgataacgggagttatggt

SEQ ID NO: 181882 - DNA, 56 bp, Artificial
  Synthetic oligonucleotide
gcaccataacatattgcggaccgcttacgcctaaggtagacccttttacaccggca

SEQ ID NO: 181883 - DNA, 60 bp, Artificial
  Synthetic oligonucleotide
ggttagctatctgatgagccgtagcgagagcagaaaaacagacgatcgaatccaggtgag

SEQ ID NO: 181884 - DNA, 55 bp, Artificial
  Synthetic oligonucleotide
tttcagaccacgcgttatcgtgataccccaagtaattacaggagatacgtcttga

SEQ ID NO: 181885 - DNA, 55 bp, Artificial
  Synthetic oligonucleotide
tttattcgggtgcaggacaagaaaaccgcatcttcacaacctgtaatctcccaac

SEQ ID NO: 181886 - DNA, 55 bp, Artificial
  Synthetic oligonucleotide
tttatgcggctgaaccgagggagagcagctttacgccgtctggccgcagttcgcc

SEQ ID NO: 181887 - DNA, 55 bp, Artificial
  Synthetic oligonucleotide
tttatgccgcctcggcgagcacatggaacgggttggcatggattgtaggcgccgc

SEQ ID NO: 181888 - DNA, 55 bp, Artificial
  Synthetic oligonucleotide
tttatgacaagccagtacgagataccgccacatacatatcgctttccatacagaa

SEQ ID NO: 181889 - DNA, 55 bp, Artificial
  Synthetic oligonucleotide
tttatctaatgcgctgtctctttgccgtatggccacttctaactggtcggtggcc

SEQ ID NO: 181890 - DNA, 53 bp, Artificial
  Synthetic oligonucleotide
aaaccagacggagaaacgtaaaggaaagtaattcgtgattgctgtcgtaaagc

SEQ ID NO: 181891 - DNA, 55 bp, Artificial
  Synthetic oligonucleotide
tttatcaatcgactgttcaggctctacccattccacgaaggggaattaaccgtgg

SEQ ID NO: 181892 - DNA, 55 bp, Artificial
  Synthetic oligonucleotide
tttatagcaaacttgagctatagctgctgattccatatctactgctattgcagac

SEQ ID NO: 181893 - DNA, 55 bp, Artificial
  Synthetic oligonucleotide
tttagtatttctaacgccaacctgcaatcccaatagctaaactcctcttaagaag

SEQ ID NO: 181894 - DNA, 57 bp, Artificial
  Synthetic oligonucleotide
agcgacaaaactaataggccaaaaatggtgggataatgtatacaccgacacatcaaa

SEQ ID NO: 181895 - DNA, 55 bp, Artificial
  Synthetic oligonucleotide
tttacgtggcaggttttctttacgtaccgtactctactgcctgctactgattagc

SEQ ID NO: 181896 - DNA, 55 bp, Artificial
  Synthetic oligonucleotide
tgggtcgccgcgatatttatgtttggtgcattaggtacggccctggcatggagtg

SEQ ID NO: 181897 - DNA, 55 bp, Artificial
  Synthetic oligonucleotide
tgggtatggcgcagtacgctgaacaccgaatagatgtggtcgcactgaatctgcg

SEQ ID NO: 181898 - DNA, 55 bp, Artificial
  Synthetic oligonucleotide
tgggccccagtcccaactaaccttgccgccaacgtatgccaccacgtcaaccgca

SEQ ID NO: 181899 - DNA, 55 bp, Artificial
  Synthetic oligonucleotide
tgggaggaagagtaccgctggcacagtttcttcctgactccggattatctgtccc

SEQ ID NO: 181900 - DNA, 55 bp, Artificial
  Synthetic oligonucleotide
tgggacgacaaggccgaacgcgtggtgttcgaacgcaaagagccaccgcagaccc

SEQ ID NO: 181901 - DNA, 55 bp, Artificial
  Synthetic oligonucleotide
tggcttcggccagtgcgtcgagcagcgcccgcttgttcctgaagtgccagtaaag

SEQ ID NO: 181902 - DNA, 55 bp, Artificial
  Synthetic oligonucleotide
aagcgatcagtattgcccgggtaagccagtgagaaataccatcgcaggacgttcg

SEQ ID NO: 181903 - DNA, 55 bp, Artificial
  Synthetic oligonucleotide
tggctcagcccggaacgaggctctgcactgccaagcagttatcccagcaattgca

SEQ ID NO: 181904 - DNA, 55 bp, Artificial
  Synthetic oligonucleotide
tggcgttgataattgccgacgcgccattgcctgacagactggcggcgagcggacc

SEQ ID NO: 181905 - DNA, 60 bp, Artificial
  Synthetic oligonucleotide
ggtgtcggggctgtgccctgaccaggtggcatttgtctgattgcgcgtgcgcggtccgac

SEQ ID NO: 181906 - DNA, 55 bp, Artificial
  Synthetic oligonucleotide
tggcggcaagggtaaagcccttgctcatgccaattacatcacgcgggaagataag

SEQ ID NO: 181907 - DNA, 55 bp, Artificial
  Synthetic oligonucleotide
tggcggagatcactccccgccgttgctcttactcggattcgtaagccgtgaaaac

SEQ ID NO: 181908 - DNA, 54 bp, Artificial
  Synthetic oligonucleotide
aagctgaagtactcccaaatttgcagggcgacaacgtagtaaatagcgcggggt

SEQ ID NO: 181909 - DNA, 55 bp, Artificial
  Synthetic oligonucleotide
aagctgctgcacttggaacaacggctgcacgagcgcctggtgggacaagacgagg

SEQ ID NO: 181910 - DNA, 55 bp, Artificial
  Synthetic oligonucleotide
aagcttagcgagcaacctatcagagtcacgaagatcgttaaccccgtgagaagcg

SEQ ID NO: 181911 - DNA, 54 bp, Artificial
  Synthetic oligonucleotide
aaggaaaacgactggtacttgatttgtgattaaagagtactgaacgccctcgga

SEQ ID NO: 181912 - DNA, 55 bp, Artificial
  Synthetic oligonucleotide
tggcaccagatgctaccgacgtcgcgatggcgctattctccgggatatttaatat

SEQ ID NO: 181913 - DNA, 55 bp, Artificial
  Synthetic oligonucleotide
tggcaaggatagtaatcgacatgcacgcctaacgccgtaatacgcccgcccatac

SEQ ID NO: 181914 - DNA, 55 bp, Artificial
  Synthetic oligonucleotide
tggcaactaatgaatcctgaaacggttaatcgactgccgaccgttatactgtgag

SEQ ID NO: 181915 - DNA, 55 bp, Artificial
  Synthetic oligonucleotide
aaggcccgcaacgtaagctgatgagccctgaagctatcgccagcctggtagtgac

SEQ ID NO: 181916 - DNA, 55 bp, Artificial
  Synthetic oligonucleotide
ggtggggggaggccgtcattaaatgaagtgtgggttgatttgggtgttagcagaa

SEQ ID NO: 181917 - DNA, 55 bp, Artificial
  Synthetic oligonucleotide
tgtagataagccgcattcatcagataattgttctactgatgcttgtactaactcg

SEQ ID NO: 181918 - DNA, 55 bp, Artificial
  Synthetic oligonucleotide
tgtaccggtactggttgcgtatcgaacttaatgatggtgcatgtttcgatggcaa

SEQ ID NO: 181919 - DNA, 55 bp, Artificial
  Synthetic oligonucleotide
tgtacaacgattggctttgtgaggaggggatacgggagagaaatcctgtcagacg

SEQ ID NO: 181920 - DNA, 55 bp, Artificial
  Synthetic oligonucleotide
tgtaatacgaaagccagcagcattcaaagctcgaatagtagattctctaccaggt

SEQ ID NO: 181921 - DNA, 55 bp, Artificial
  Synthetic oligonucleotide
tgtaatacatcctggcagggagtgggctgagaaatgtacaggtgttcattctgag

SEQ ID NO: 181922 - DNA, 55 bp, Artificial
  Synthetic oligonucleotide
tgtaaggtcttgtaggtcgggtaaggcgttcacatcgcatccgacatttgcacac

SEQ ID NO: 181923 - DNA, 55 bp, Artificial
  Synthetic oligonucleotide
tgtaagcgtcgcggtttctgcccgagctgtggggcgcggcggatggccgaaagtg

SEQ ID NO: 181924 - DNA, 55 bp, Artificial
  Synthetic oligonucleotide
aagcacacttccgcgatacagcagtttgcccctccgtttgctcatcctgacctgt

SEQ ID NO: 181925 - DNA, 55 bp, Artificial
  Synthetic oligonucleotide
tggttcggatattactgccattgacgctatggcggtagaaattgagcgggtaggg

SEQ ID NO: 181926 - DNA, 55 bp, Artificial
  Synthetic oligonucleotide
aagcagccgtagtccaacccagtaggcccagacatgccggtacaccactgggtgg

SEQ ID NO: 181927 - DNA, 60 bp, Artificial
  Synthetic oligonucleotide
ggtggaagtcacgatataatccaggagacagcgttccccattctggcatttatcgatgta

SEQ ID NO: 181928 - DNA, 55 bp, Artificial
  Synthetic oligonucleotide
tggtgtgacagccaatgcgaatggtggagtttatcagtcttctgaactgagccaa

SEQ ID NO: 181929 - DNA, 55 bp, Artificial
  Synthetic oligonucleotide
aagccacaatgcggagaacgcccgtcaggcgcgggagttatcaggtgtaacggcc

SEQ ID NO: 181930 - DNA, 55 bp, Artificial
  Synthetic oligonucleotide
tggtgcgggtttcgagtcgtctggcctaaattcaggctgaaatctgccaccagtc

SEQ ID NO: 181931 - DNA, 55 bp, Artificial
  Synthetic oligonucleotide
tggtgagaataaaggacgactctgaataacaatccagtttagggactaagattgc

SEQ ID NO: 181932 - DNA, 55 bp, Artificial
  Synthetic oligonucleotide
tggtccctttgagcaaccgaagggtgaacaccattctggacaggtctctggacag

SEQ ID NO: 181933 - DNA, 55 bp, Artificial
  Synthetic oligonucleotide
tggtatacgataccatgccttccatcttgtcaagtctcaatgagcagttgtcgac

SEQ ID NO: 181934 - DNA, 55 bp, Artificial
  Synthetic oligonucleotide
tggtagcggcccgctcatccatgcagtgaccggcggcgatatgacgctacccgat

SEQ ID NO: 181935 - DNA, 55 bp, Artificial
  Synthetic oligonucleotide
aagccgcgatggcaaaagctgaaaagctggccgagaccgacaggcgcgatgccag

SEQ ID NO: 181936 - DNA, 55 bp, Artificial
  Synthetic oligonucleotide
tggtaacggactcgcactgataagcaaataacgcgcaatggtaaggggaaatgcg

SEQ ID NO: 181937 - DNA, 55 bp, Artificial
  Synthetic oligonucleotide
aagccgtcttccataaaccgcagcgccggtgctatctcctgaggcgtttcagcgg

SEQ ID NO: 181938 - DNA, 58 bp, Artificial
  Synthetic oligonucleotide
agcgaccctcttggcctgatcgatggagtaaacacctacgggtatgtgcatggaaacc

SEQ ID NO: 181939 - DNA, 55 bp, Artificial
  Synthetic oligonucleotide
aagtcctgcagcacataagtctgcatataagccgagggtagcaacatgccgggat

SEQ ID NO: 181940 - DNA, 55 bp, Artificial
  Synthetic oligonucleotide
tgcgtatagtagcggggtttattgcattaccgggatgtagagtgagtaataaagt

SEQ ID NO: 181941 - DNA, 55 bp, Artificial
  Synthetic oligonucleotide
aagtgcagacccggtgaccggcaatcacactgcgaccgatccgctggttgagagc

SEQ ID NO: 181942 - DNA, 55 bp, Artificial
  Synthetic oligonucleotide
aagttcaatgtggatgaagacagtccgcacatcattctcaaaaccgatcctgata

SEQ ID NO: 181943 - DNA, 55 bp, Artificial
  Synthetic oligonucleotide
aagttgtcggcaggtcgctcgatctgggtctcggtcgcgagcatgctgtcaggga

SEQ ID NO: 181944 - DNA, 55 bp, Artificial
  Synthetic oligonucleotide
aataccgcccgcgataaacagatgctttctggctgagggaattagcgcaaacgcc

SEQ ID NO: 181945 - DNA, 55 bp, Artificial
  Synthetic oligonucleotide
tgcgctcacgatcccgtcataacccgcgtctaccagcgcttttgccggcagatcg

SEQ ID NO: 181946 - DNA, 55 bp, Artificial
  Synthetic oligonucleotide
tgcgcgcgcctatcgccgaccagctaaacagatcgcccaggtattgcgggctgtt

SEQ ID NO: 181947 - DNA, 55 bp, Artificial
  Synthetic oligonucleotide
aataccttcagagcgcgcgaattaataagaatgccccgggcagcattactgtgcg

SEQ ID NO: 181948 - DNA, 55 bp, Artificial
  Synthetic oligonucleotide
tgcgccaacaggtcagcaaggtggtcggcaagggcgccgaggatggccgcgctga

SEQ ID NO: 181949 - DNA, 59 bp, Artificial
  Synthetic oligonucleotide
agcgaccgtatatctgatatagacgcttgtcctactttacacgattcttgaaaagcgta

SEQ ID NO: 181950 - DNA, 55 bp, Artificial
  Synthetic oligonucleotide
tgcgcatcacatactcccaaaacgtttgtgtcgcgattcaacgagagagagttta

SEQ ID NO: 181951 - DNA, 55 bp, Artificial
  Synthetic oligonucleotide
tgcgcactgataaaggtgacaatgcgttgctgttgattgatttaggcgcgggcca

SEQ ID NO: 181952 - DNA, 55 bp, Artificial
  Synthetic oligonucleotide
tgcgataactgtgatcttgctaattattaccttatttagtcagttccgctgacag

SEQ ID NO: 181953 - DNA, 55 bp, Artificial
  Synthetic oligonucleotide
tgcgacatattgttgcctcttaaacagtattcgattcgtcgttttgtctgcgggc

SEQ ID NO: 181954 - DNA, 55 bp, Artificial
  Synthetic oligonucleotide
tgcctttatcacttacctcgggcgtctgaatgagccgttgattgaactcaccacc

SEQ ID NO: 181955 - DNA, 55 bp, Artificial
  Synthetic oligonucleotide
tgccttaccttatcaccaagtatggttgctccgtaaagtattccacctttagtta

SEQ ID NO: 181956 - DNA, 55 bp, Artificial
  Synthetic oligonucleotide
tgccttacattatcgatatcacactgaatgagaccgacagctggttcccggtact

SEQ ID NO: 181957 - DNA, 55 bp, Artificial
  Synthetic oligonucleotide
tgccttaacatgggcccggtctcagggataccgccagatgatagcggttgtgggg

SEQ ID NO: 181958 - DNA, 55 bp, Artificial
  Synthetic oligonucleotide
tgccgtgcctccatctttgccgggcttctgcgggcgggttgcaaggtaaggtgaa

SEQ ID NO: 181959 - DNA, 55 bp, Artificial
  Synthetic oligonucleotide
aatatcgatacgttctccgcataattcattagataccgcctgtacacgagatcct

SEQ ID NO: 181960 - DNA, 60 bp, Artificial
  Synthetic oligonucleotide
ggtgctgttactcgtcaggggattcggaacagtattgattatatgagccgtgagtcagag

SEQ ID NO: 181961 - DNA, 55 bp, Artificial
  Synthetic oligonucleotide
tggatgatattggcggagtgatgcataatataagcacaatggttattgttgacgt

SEQ ID NO: 181962 - DNA, 55 bp, Artificial
  Synthetic oligonucleotide
tggatagatagagagtctccactctgggttgactgggttaatgccaatctcgacg

SEQ ID NO: 181963 - DNA, 55 bp, Artificial
  Synthetic oligonucleotide
tggatacgtcatcgtctataatacatcgtcctctatgaatagatcgccctggctg

SEQ ID NO: 181964 - DNA, 55 bp, Artificial
  Synthetic oligonucleotide
aaggctggtaaaccgcccggtaatctatcctgaacgatcaataaaggccgcactc

SEQ ID NO: 181965 - DNA, 54 bp, Artificial
  Synthetic oligonucleotide
aaggggcgtccccacccattcttcgagagattgtatccgacgactaaatgcggg

SEQ ID NO: 181966 - DNA, 55 bp, Artificial
  Synthetic oligonucleotide
tggacagcattgcactgtttcgaggtctatccggcacgataagaactgaccaggg

SEQ ID NO: 181967 - DNA, 55 bp, Artificial
  Synthetic oligonucleotide
tggacagaacgcggcgctgcccgccacgccaagatgctcgaaacagatcaggctt

SEQ ID NO: 181968 - DNA, 55 bp, Artificial
  Synthetic oligonucleotide
tggaagtcgccaaagggatgctgcgcacactgattaaagtcacgttcggttatcc

SEQ ID NO: 181969 - DNA, 55 bp, Artificial
  Synthetic oligonucleotide
tggaaggtactgaacgtgggtgacgaagcacgcagaagaaatatgatccggggac

SEQ ID NO: 181970 - DNA, 55 bp, Artificial
  Synthetic oligonucleotide
aaggggttaagcgtacagcttcttcaaggtagcttggggcgaaatgcaccgcgca

SEQ ID NO: 181971 - DNA, 60 bp, Artificial
  Synthetic oligonucleotide
ggtgctcgtcttccgttacccacatcgtgagcattttgctgcgtttgtctgccaatgtta

SEQ ID NO: 181972 - DNA, 53 bp, Artificial
  Synthetic oligonucleotide
aaggtcgtaagggatttttcgcctcgtttcagtatgttacgcttatcggtggc

SEQ ID NO: 181973 - DNA, 55 bp, Artificial
  Synthetic oligonucleotide
tgcttgctttgatagccgtgtagtagtaatggatcttcttcgcatactcgtaacg

SEQ ID NO: 181974 - DNA, 55 bp, Artificial
  Synthetic oligonucleotide
tgcttcgggacggaacggttagttatcagagggaaggcaaacctgcagttaggga

SEQ ID NO: 181975 - DNA, 55 bp, Artificial
  Synthetic oligonucleotide
tgcttactccgttgataccagtaaatgactgaggccgcccagatcagttttcgtg

SEQ ID NO: 181976 - DNA, 55 bp, Artificial
  Synthetic oligonucleotide
aaggtggtttgccagggtaatgcatcgttatccggcgtagtaaggccaggttgcg

SEQ ID NO: 181977 - DNA, 55 bp, Artificial
  Synthetic oligonucleotide
tgctgtacacatacggcctagcgctctgcttatgttatgctatctgcaatcttgc

SEQ ID NO: 181978 - DNA, 55 bp, Artificial
  Synthetic oligonucleotide
tgctgcagcaccctctgccgcatccaaggcggcacagccacaggtagatgacaag

SEQ ID NO: 181979 - DNA, 55 bp, Artificial
  Synthetic oligonucleotide
aagtagatataggcccttctatgcgcaccattatgtctacccattgaccaatgcc

SEQ ID NO: 181980 - DNA, 55 bp, Artificial
  Synthetic oligonucleotide
tgctgacagtaagccgaccaggagcgttttacgcaattgcatcgattatcccctt

SEQ ID NO: 181981 - DNA, 55 bp, Artificial
  Synthetic oligonucleotide
aagtagtactacacctatctcctcatagtctgaagatacaataatcccacccgca

SEQ ID NO: 181982 - DNA, 58 bp, Artificial
  Synthetic oligonucleotide
ggtgcggtctcaccactaacaaccgaccatcggcataactaatacgtaaagcacatcc

SEQ ID NO: 181983 - DNA, 55 bp, Artificial
  Synthetic oligonucleotide
tgctcattacccgtgaaggcgtatgaagatagccagcagcgttcggtatcccggg

SEQ ID NO: 181984 - DNA, 53 bp, Artificial
  Synthetic oligonucleotide
ttacgcgtcagggtaaccagtatacgattaataacccaactgcctattacgtt

SEQ ID NO: 181985 - DNA, 55 bp, Artificial
  Synthetic oligonucleotide
aacgaatgggggcatgatcacagaagtacacccaaccgatgaaccggcttacaca

SEQ ID NO: 181986 - DNA, 55 bp, Artificial
  Synthetic oligonucleotide
ttacctggctaatcaacgcgcctttctgtgtctccagattcatcgctttggcgag

SEQ ID NO: 181987 - DNA, 55 bp, Artificial
  Synthetic oligonucleotide
aacgagcgacgtgagcgtatggcgaaagcgcgtttgtaaaccctgttcggtcgcc

SEQ ID NO: 181988 - DNA, 55 bp, Artificial
  Synthetic oligonucleotide
ttacctgacgcggtgaacagcccacaggcagcggggaacgggcaccacaggggtg

SEQ ID NO: 181989 - DNA, 55 bp, Artificial
  Synthetic oligonucleotide
ttacagtctggcccaaataataggccgcgaatcgaaactcgtacagtcagagcag

SEQ ID NO: 181990 - DNA, 55 bp, Artificial
  Synthetic oligonucleotide
ttaattgtgtccgtacatagacgaggatcacctggaccgtttgataacaatacac

SEQ ID NO: 181991 - DNA, 55 bp, Artificial
  Synthetic oligonucleotide
ttaatgactggcaccgggtagacgcgagtatcataaccacggtatgcgtcagggc

SEQ ID NO: 181992 - DNA, 55 bp, Artificial
  Synthetic oligonucleotide
ttaatcccgaattagagcgcttcatggcgaaacgtgctcacagcaccgtgacgga

SEQ ID NO: 181993 - DNA, 60 bp, Artificial
  Synthetic oligonucleotide
atgatgttatcagacggcgtgacggtaagggcagtgatgatggatgacgttatcgcatga

SEQ ID NO: 181994 - DNA, 60 bp, Artificial
  Synthetic oligonucleotide
agcgagtcatagcgtttttgcggcgagacaagatggaccaccatcaacatatcgggtgac

SEQ ID NO: 181995 - DNA, 55 bp, Artificial
  Synthetic oligonucleotide
aacgccggtcattacaacccgggaaaccgatgacaaaataacatggtcactgaca

SEQ ID NO: 181996 - DNA, 55 bp, Artificial
  Synthetic oligonucleotide
ttaactatatgaccggggagacattctggtcatgcccatttcccactactggagc

SEQ ID NO: 181997 - DNA, 55 bp, Artificial
  Synthetic oligonucleotide
ttaacgtccataccggttgcgcgctggatcagattccccgtggtgccggttgcat

SEQ ID NO: 181998 - DNA, 55 bp, Artificial
  Synthetic oligonucleotide
ttaacgcattcatggcgacggtcctagtagaaggtgtggtggattgccctcagcc

SEQ ID NO: 181999 - DNA, 55 bp, Artificial
  Synthetic oligonucleotide
ttaaccctttcgggagttgttacccctcatgcaagatattatgcagttcgcaggc

SEQ ID NO: 182000 - DNA, 55 bp, Artificial
  Synthetic oligonucleotide
ttaacacaccacgctcatagccttccagaccaggattaagttcttcctgataaag

SEQ ID NO: 182001 - DNA, 55 bp, Artificial
  Synthetic oligonucleotide
ttaacaaccgccagttagccgatatccccggggcttacacgcaggttatgccgcc

SEQ ID NO: 182002 - DNA, 51 bp, Artificial
  Synthetic oligonucleotide
aacgcgtttctacgtaaattctattggttttagagggtcctactgtccgaa

SEQ ID NO: 182003 - DNA, 55 bp, Artificial
  Synthetic oligonucleotide
aacggagtccaccagtgctttcagcgatccgtcagtaggatcgagacctgccgag

SEQ ID NO: 182004 - DNA, 55 bp, Artificial
  Synthetic oligonucleotide
tgttgtcagtaaccggacgccaggtaatagaatccagcttgggtaagccctgctg

SEQ ID NO: 182005 - DNA, 60 bp, Artificial
  Synthetic oligonucleotide
ggtgcctgagatcttcctgccggctaaagcagataacggcagctacattattgttcgttc

SEQ ID NO: 182006 - DNA, 54 bp, Artificial
  Synthetic oligonucleotide
tgttggccggacaggtcacgcccaccgtaaaggaccgttgcggaccggcatccc

SEQ ID NO: 182007 - DNA, 55 bp, Artificial
  Synthetic oligonucleotide
ttcagaggcccggaataagctcagttcggtgacggaatcgcttaacacggcccgt

SEQ ID NO: 182008 - DNA, 55 bp, Artificial
  Synthetic oligonucleotide
ttcagacgcggtaagacagaatgtcgtacacactgaaccatgcttcctcccggca

SEQ ID NO: 182009 - DNA, 55 bp, Artificial
  Synthetic oligonucleotide
ttcacgtcaggaaaggaacggcagaatgcattttcgcgccattacccgcatagtg

SEQ ID NO: 182010 - DNA, 55 bp, Artificial
  Synthetic oligonucleotide
ttcacaaggcgcgtaacgaggaccgtaaagtgcggccaggcgctgtaatgtcgcc

SEQ ID NO: 182011 - DNA, 55 bp, Artificial
  Synthetic oligonucleotide
ttcaaggcaggaatcgtccgaatagctctgctctttgacaaacgcccaaaatgcg

SEQ ID NO: 182012 - DNA, 55 bp, Artificial
  Synthetic oligonucleotide
ttcaactatttcgcgcagctgtgtgagcataatctacgtggcttaacctctcttt

SEQ ID NO: 182013 - DNA, 51 bp, Artificial
  Synthetic oligonucleotide
aaccgcctggggaggcggtttagtcgaaggttaagtcagttggggactgct

SEQ ID NO: 182014 - DNA, 55 bp, Artificial
  Synthetic oligonucleotide
ttatttccagtcagcgtacctccgtcgcccagcctctctatggttccagtgggtg

SEQ ID NO: 182015 - DNA, 55 bp, Artificial
  Synthetic oligonucleotide
ttattgcgagagcaagaaatccctgtctcggtggatatccatggcttgagaacaa

SEQ ID NO: 182016 - DNA, 60 bp, Artificial
  Synthetic oligonucleotide
ggtgattcatcgatgactcaacacactgtcgctctggtgttcagagaaggcgagtcgcag

SEQ ID NO: 182017 - DNA, 55 bp, Artificial
  Synthetic oligonucleotide
aaccggcagcggtggctatggtaccaccaacgatatcgcggtgatttggccaaaa

SEQ ID NO: 182018 - DNA, 51 bp, Artificial
  Synthetic oligonucleotide
aaccgggacaggggttgacggaaattacctgccgaattctggagggattaa

SEQ ID NO: 182019 - DNA, 51 bp, Artificial
  Synthetic oligonucleotide
aaccgtatttcccggcgggtcctcagtaacgcggctcaccaagttgcgggg

SEQ ID NO: 182020 - DNA, 55 bp, Artificial
  Synthetic oligonucleotide
ttatctgacgtcgatctgtttctggccgatctaaaacacgtggcggatgcgccgt

SEQ ID NO: 182021 - DNA, 55 bp, Artificial
  Synthetic oligonucleotide
aaccgtgttcacatgaccgcagaactgtacaaataacggatggtcgtacagggaa

SEQ ID NO: 182022 - DNA, 55 bp, Artificial
  Synthetic oligonucleotide
ttatcgaaatagagccttgatacgggcttattatacacatcgccgttatgcgacg

SEQ ID NO: 182023 - DNA, 55 bp, Artificial
  Synthetic oligonucleotide
ttatccttgttccgggttgagtggcgtcaccctgcacatgacgtcgtgcgggcat

SEQ ID NO: 182024 - DNA, 55 bp, Artificial
  Synthetic oligonucleotide
ttatcctgcagctcgttattcagaacagcggtccgggtctgtaacaaataatgcg

SEQ ID NO: 182025 - DNA, 55 bp, Artificial
  Synthetic oligonucleotide
ttatcagcgctatctgaacggtgaaaatccgaatacgtttaatccggccttctcc

SEQ ID NO: 182026 - DNA, 55 bp, Artificial
  Synthetic oligonucleotide
ttagatgcactaccagatggcgtattatcagaagcgacttaagggcagcggcctg

SEQ ID NO: 182027 - DNA, 60 bp, Artificial
  Synthetic oligonucleotide
ggtgatgagctggcgcattacccccagagtgttcatgacccggtgaatgtttacctgtcg

SEQ ID NO: 182028 - DNA, 55 bp, Artificial
  Synthetic oligonucleotide
ttagacttcgccggaagcctgcacactatattttgtccgctttcaacactagcag

SEQ ID NO: 182029 - DNA, 55 bp, Artificial
  Synthetic oligonucleotide
tgtctcaaaccgcctatgagttaccgaagtcgccggaggcagaggtgtacgcccc

SEQ ID NO: 182030 - DNA, 55 bp, Artificial
  Synthetic oligonucleotide
aactgataaaatcttgcgccatcacaacgaaaccagtgtcgcgtacaacgacgct

SEQ ID NO: 182031 - DNA, 55 bp, Artificial
  Synthetic oligonucleotide
aactgccgtcgctgcgccagcgtctcttccggtgtgtggctgtccgggaaaatga

SEQ ID NO: 182032 - DNA, 51 bp, Artificial
  Synthetic oligonucleotide
aactgcttttagttccgccccagtaggttttgtttccccgcgctcccatct

SEQ ID NO: 182033 - DNA, 55 bp, Artificial
  Synthetic oligonucleotide
aactggccagtatcgaaacgctgtacctgtcccgccccaagatgccgctccggct

SEQ ID NO: 182034 - DNA, 55 bp, Artificial
  Synthetic oligonucleotide
aacttacgtatccctgaaatggcgagaccaggctaaatctacccgaggtcactcg

SEQ ID NO: 182035 - DNA, 55 bp, Artificial
  Synthetic oligonucleotide
tgtccgttaaactcaggctacctcatagagattcaatatttaagggcacggtttt

SEQ ID NO: 182036 - DNA, 55 bp, Artificial
  Synthetic oligonucleotide
aacttcctctctgcccggcttctggggtcgagcgcatgagggccacagttcatcg

SEQ ID NO: 182037 - DNA, 55 bp, Artificial
  Synthetic oligonucleotide
tgtccctgcaccgacggcagcgccagcgctaatgcctctttaatggcgtgcacgt

SEQ ID NO: 182038 - DNA, 53 bp, Artificial
  Synthetic oligonucleotide
ggtgatcgggtgtgtggaaaaggttgggctcagccgttcgggggtgcttgttt

SEQ ID NO: 182039 - DNA, 54 bp, Artificial
  Synthetic oligonucleotide
aactttacgggcagagccgtatatgtactggatagcggggcaggttaagaaacg

SEQ ID NO: 182040 - DNA, 55 bp, Artificial
  Synthetic oligonucleotide
aactttcgcgccacgttgtagactttacatcgccaaggttgctctataacgccag

SEQ ID NO: 182041 - DNA, 55 bp, Artificial
  Synthetic oligonucleotide
tgtatggcgatatgccgaataactggtcgccggagttaagcggtctggcgcggct

SEQ ID NO: 182042 - DNA, 55 bp, Artificial
  Synthetic oligonucleotide
aagaacaacgccggtggtgcttatcccggccatgacaagcgtgcttacgccgcgc

SEQ ID NO: 182043 - DNA, 55 bp, Artificial
  Synthetic oligonucleotide
tgtatatcaccaaatcggtcttcaccggtgtgagtctacgtgagcagcgaacctg

SEQ ID NO: 182044 - DNA, 55 bp, Artificial
  Synthetic oligonucleotide
tgtatagtccaatgagtaaagcggttactgttatttggcgtcccgctaagcagta

SEQ ID NO: 182045 - DNA, 55 bp, Artificial
  Synthetic oligonucleotide
aagagccccagcctcattaacgccaccggttgaacagtgttattactgttcggcg

SEQ ID NO: 182046 - DNA, 55 bp, Artificial
  Synthetic oligonucleotide
tgtaggagaagcaacatgcaagaagggcaaaaccgtaagacatcctctctgagca

SEQ ID NO: 182047 - DNA, 55 bp, Artificial
  Synthetic oligonucleotide
aagagcgtggtttgacgacccgctctttgtgaactcaccgctgggcctgtctccc

SEQ ID NO: 182048 - DNA, 55 bp, Artificial
  Synthetic oligonucleotide
tgtagcttatggcgattaaactgacggtatgtgcgtcaaaaccgtgctgaacttt

SEQ ID NO: 182049 - DNA, 60 bp, Artificial
  Synthetic oligonucleotide
ggtgagttattatccgaagactatcttatcatcagcctctgaccgagttcagtgaccgaa

SEQ ID NO: 182050 - DNA, 55 bp, Artificial
  Synthetic oligonucleotide
aagagtcgtgtgaacctcaatagcatttgaaccgagtgttcaccaacgtgtaact

SEQ ID NO: 182051 - DNA, 55 bp, Artificial
  Synthetic oligonucleotide
tgttcggtcatgttgtagcgataaaccgactgtgcactgtccgcagcactgtagg

SEQ ID NO: 182052 - DNA, 55 bp, Artificial
  Synthetic oligonucleotide
tgttcaggggtggatcagggctacggaggtgacgcgaggtaaggatggcagcgca

SEQ ID NO: 182053 - DNA, 55 bp, Artificial
  Synthetic oligonucleotide
tgttagtgccagaagttattggttggataacatgaacgctatcaccaaatacgac

SEQ ID NO: 182054 - DNA, 55 bp, Artificial
  Synthetic oligonucleotide
tgttagcaggtgtcgcccctgattatcgtcaagatatacacggcaggcgctgcgt

SEQ ID NO: 182055 - DNA, 55 bp, Artificial
  Synthetic oligonucleotide
tgttaatcacgattttccatatgagggttgatcgctacaatgtgcgggctaacat

SEQ ID NO: 182056 - DNA, 55 bp, Artificial
  Synthetic oligonucleotide
tgtgtttgctccttagtggcttgttgggacataacaaattgacgacgcagctcta

SEQ ID NO: 182057 - DNA, 54 bp, Artificial
  Synthetic oligonucleotide
aacgggaattaactcaggatcgcacgaaaatatcccgccagattttccccaaga

SEQ ID NO: 182058 - DNA, 55 bp, Artificial
  Synthetic oligonucleotide
tgtgttgaacgggatgtacgtcgctcagagggtgataccaaaggagactggcgtc

SEQ ID NO: 182059 - DNA, 55 bp, Artificial
  Synthetic oligonucleotide
tgtggctgtaccacgacagcggggatgcagggctgacacacctgtacaggatgcg

SEQ ID NO: 182060 - DNA, 60 bp, Artificial
  Synthetic oligonucleotide
ggtcttccggcgaccgggttcaggtggtggccgcactgatggccatcggggatgagctgc

SEQ ID NO: 182061 - DNA, 55 bp, Artificial
  Synthetic oligonucleotide
aacggttaatccgcagtgacagttgcgcacgcgacacgccccatggtccggctga

SEQ ID NO: 182062 - DNA, 55 bp, Artificial
  Synthetic oligonucleotide
tgtgcggtcagataacacgatgtaacagcgtaacggtacggctatgggctgttac

SEQ ID NO: 182063 - DNA, 55 bp, Artificial
  Synthetic oligonucleotide
tgtgcaggttcaggtcagccggataccggacggcgtggcggaatacagcgtctgg

SEQ ID NO: 182064 - DNA, 55 bp, Artificial
  Synthetic oligonucleotide
aacgtgaggatcggtgtttgatcgaggcgcctgtggcacacgcaggctgaggagc

SEQ ID NO: 182065 - DNA, 55 bp, Artificial
  Synthetic oligonucleotide
aacgtgctgttctattttatcgtgaagcatgttgctccggaatggtatggttccc

SEQ ID NO: 182066 - DNA, 55 bp, Artificial
  Synthetic oligonucleotide
tgtgaaccggttctgtaatatgacttcaaatgtaccaacaagctttgtccgcgct

SEQ ID NO: 182067 - DNA, 55 bp, Artificial
  Synthetic oligonucleotide
aacgtttagcatcgaaattattcactacggtcacaccacgcggcggcgtgggaga

SEQ ID NO: 182068 - DNA, 53 bp, Artificial
  Synthetic oligonucleotide
aactattgtagctcaggtatcaaaagaacttgggtaattaaagataaggggcc

SEQ ID NO: 182069 - DNA, 55 bp, Artificial
  Synthetic oligonucleotide
tgtctgttcgctgtctggtcacaggaaagtacgcagaactgaaacgacaagacgg

SEQ ID NO: 182070 - DNA, 55 bp, Artificial
  Synthetic oligonucleotide
tgtctgtatgaccagaacagggagtacaaccagcagagcgttctgtccgataccg

SEQ ID NO: 182071 - DNA, 53 bp, Artificial
  Synthetic oligonucleotide
ggtctgtaactgcttaatgtacttccggaaaagagaaaagccggaacaccacc

SEQ ID NO: 182072 - DNA, 55 bp, Artificial
  Synthetic oligonucleotide
aactgacgccggcgttattacagacacttatccgcgaaataaaagggagcagcca

SEQ ID NO: 182073 - DNA, 55 bp, Artificial
  Synthetic oligonucleotide
gtagaagctagagatgataaccatagtttgccgatacaaccacatccgagaactg

SEQ ID NO: 182074 - DNA, 55 bp, Artificial
  Synthetic oligonucleotide
gtactggagcgtgaacgaataccagaacctgaccgaatggaaacggtcagccgag

SEQ ID NO: 182075 - DNA, 55 bp, Artificial
  Synthetic oligonucleotide
agccagcttgcctgatgtggggtttgcataatgggctggtcagtgccccaggcgg

SEQ ID NO: 182076 - DNA, 54 bp, Artificial
  Synthetic oligonucleotide
gtactccctgaaggtatatccgcccgggtaagtttagcgagtatttctattgtc

SEQ ID NO: 182077 - DNA, 55 bp, Artificial
  Synthetic oligonucleotide
gtacggtgaaatagcccgtactttcgagattgctgataatcgttgctcgcgtagc

SEQ ID NO: 182078 - DNA, 55 bp, Artificial
  Synthetic oligonucleotide
agccatcaagccattatctaccgcatgaactatcatcccgcgtttcacgagctgg

SEQ ID NO: 182079 - DNA, 55 bp, Artificial
  Synthetic oligonucleotide
agcccacttttagaattgggcgccggtatctgacagcagttatggcagcgctgcg

SEQ ID NO: 182080 - DNA, 55 bp, Artificial
  Synthetic oligonucleotide
gtacgccattgatagcgccttaaacactatctggcgcagcaaacgcacacgccca

SEQ ID NO: 182081 - DNA, 55 bp, Artificial
  Synthetic oligonucleotide
agccccgggcgacataggtcagtcgtagtgaattaatcagacgatgactgtaatg

SEQ ID NO: 182082 - DNA, 60 bp, Artificial
  Synthetic oligonucleotide
agcgcctcagcgcgccgtagcatcgataaacattacgggatggggcgaaactgccacctg

SEQ ID NO: 182083 - DNA, 55 bp, Artificial
  Synthetic oligonucleotide
gtacgatttcggacaccaaaaccgctgttgtcccgccattctggcgattcctaaa

SEQ ID NO: 182084 - DNA, 55 bp, Artificial
  Synthetic oligonucleotide
gtacgaaggctatgtaaagtcggccaaagccagtacctatcttgagcgtaccgtc

SEQ ID NO: 182085 - DNA, 55 bp, Artificial
  Synthetic oligonucleotide
gtaccgcccaaaggcaccatctctcaggttacaatggttttatgacgagtcaccc

SEQ ID NO: 182086 - DNA, 55 bp, Artificial
  Synthetic oligonucleotide
gtaccgccagccgtcggatctgacacagagtcagcgcggaagcgggattggtaag

SEQ ID NO: 182087 - DNA, 55 bp, Artificial
  Synthetic oligonucleotide
gtaccgccaaccgcagcaatatagttggttgccagttgagtcagacatgaatcag

SEQ ID NO: 182088 - DNA, 55 bp, Artificial
  Synthetic oligonucleotide
gtaccgcacgaatgcgtttaccggtcctggcagcttcgctcccgtcagcgttcca

SEQ ID NO: 182089 - DNA, 55 bp, Artificial
  Synthetic oligonucleotide
gtaccatggtgataatacctactaattgactaacatccctcaaatagacacccaa

SEQ ID NO: 182090 - DNA, 55 bp, Artificial
  Synthetic oligonucleotide
gtaccaccagcgtactcaagtaaagatcatgacgattccaggttttatcgaccgg

SEQ ID NO: 182091 - DNA, 55 bp, Artificial
  Synthetic oligonucleotide
gtacatcgtagcggcctttgtcatcccatcgtaagcgcgctgtgattccgtctaa

SEQ ID NO: 182092 - DNA, 55 bp, Artificial
  Synthetic oligonucleotide
gtacagaagttgcaaagtaaagtaatcagagcggttacacaagtcgaagagaggc

SEQ ID NO: 182093 - DNA, 60 bp, Artificial
  Synthetic oligonucleotide
ggtctgcccggagttactcaagataggttgtgctaaatatcgtgagtgcaacacccctga

SEQ ID NO: 182094 - DNA, 55 bp, Artificial
  Synthetic oligonucleotide
gtacaacgcaatgggcaagtcaaaacgcgcatttgggtgaaatcattatcgggta

SEQ ID NO: 182095 - DNA, 55 bp, Artificial
  Synthetic oligonucleotide
gtattaaacgggttattgttaaatctggtgtatggcaccatcagacaatgctccg

SEQ ID NO: 182096 - DNA, 55 bp, Artificial
  Synthetic oligonucleotide
gtatgttgcgcagacagcggtagctggtttacgcagtgaacctgtacatgactgg

SEQ ID NO: 182097 - DNA, 55 bp, Artificial
  Synthetic oligonucleotide
gtatgatatgcaccgactggtgaaattcgtttctgacctcaagtcgggcgtaccg

SEQ ID NO: 182098 - DNA, 55 bp, Artificial
  Synthetic oligonucleotide
gtatctgccggtagatgaatccggtattccacgccaggggctaaaatcggtagcc

SEQ ID NO: 182099 - DNA, 55 bp, Artificial
  Synthetic oligonucleotide
gtatccggcaacttcttgcggtacaactccctgctcggcaaatgctgctcgttcg

SEQ ID NO: 182100 - DNA, 55 bp, Artificial
  Synthetic oligonucleotide
gtatatgtggatggcgcataaggtcatcgggtgtctgcagtgtgccgtttcgcgc

SEQ ID NO: 182101 - DNA, 55 bp, Artificial
  Synthetic oligonucleotide
gtatagtgcgattgcagtcagggcatagtttagaatatttacaagtctcaccatc

SEQ ID NO: 182102 - DNA, 55 bp, Artificial
  Synthetic oligonucleotide
gtataatacaggctttcttcgcctgttgcccatgctgatatggcgcttatctgcg

SEQ ID NO: 182103 - DNA, 55 bp, Artificial
  Synthetic oligonucleotide
gtataaatggagtgcgtgactttgttcgtcaaaacccgtgggtagtctgacggtc

SEQ ID NO: 182104 - DNA, 59 bp, Artificial
  Synthetic oligonucleotide
gcacattaaatacatcctgctcgttataatctacggtctgaatacgcccgtctcgttcc

SEQ ID NO: 182105 - DNA, 55 bp, Artificial
  Synthetic oligonucleotide
ggtcggggtgttactccctacagccccaaaggtgacaaaagcggcgcatatccta

SEQ ID NO: 182106 - DNA, 55 bp, Artificial
  Synthetic oligonucleotide
gtagttgaatctgatgtataatgcgggcttttgaggttctttcatggccagcgtt

SEQ ID NO: 182107 - DNA, 53 bp, Artificial
  Synthetic oligonucleotide
gtagttgaaacgggtattccagaacaactagctaaactaaccgaacacgcagt

SEQ ID NO: 182108 - DNA, 55 bp, Artificial
  Synthetic oligonucleotide
gtaggcccggtgagcgtcctcactaccgggccacaagccaacatcaggtcgtttt

SEQ ID NO: 182109 - DNA, 55 bp, Artificial
  Synthetic oligonucleotide
agcatgagctcttccaaatatctcccgtacatttcggttaccaatggcgctttgc

SEQ ID NO: 182110 - DNA, 55 bp, Artificial
  Synthetic oligonucleotide
gtaggcaggaattttacctttgcagattaagagatacagcacggttccgataccg

SEQ ID NO: 182111 - DNA, 55 bp, Artificial
  Synthetic oligonucleotide
gtagcttatgctgcgaagccagccccataaacctgttcagggactcatccgcacg

SEQ ID NO: 182112 - DNA, 55 bp, Artificial
  Synthetic oligonucleotide
gtagcgtgcaggcacggattttacgcactgacgtgcttcgtctctaaccaaggct

SEQ ID NO: 182113 - DNA, 55 bp, Artificial
  Synthetic oligonucleotide
gtagcggaccgtcagcgattttgagaccttgcgcggctcacgccaggtaaatatc

SEQ ID NO: 182114 - DNA, 55 bp, Artificial
  Synthetic oligonucleotide
gtagcgcctttgacgttttgggatgattctatgtttccagaggctgtaatgtttc

SEQ ID NO: 182115 - DNA, 55 bp, Artificial
  Synthetic oligonucleotide
gtagcagtctggtagagattgggcatacccaggtcaatccttatggtaagcgctg

SEQ ID NO: 182116 - DNA, 60 bp, Artificial
  Synthetic oligonucleotide
agcgctgcttgtgagcagcaagaaaaggtcgctcttcgtagtggcatcagaatccgagtt

SEQ ID NO: 182117 - DNA, 55 bp, Artificial
  Synthetic oligonucleotide
gtagatcctgcccgctgatactggcgatataaaacgcaaaacggtcgtgttccgg

SEQ ID NO: 182118 - DNA, 53 bp, Artificial
  Synthetic oligonucleotide
gtaaaggattttcccggggcgcaattcgcgttacacttgcgccctttagcgcc

SEQ ID NO: 182119 - DNA, 55 bp, Artificial
  Synthetic oligonucleotide
agccgctgatgagagacgcgaagcgacagccgtggagtcgggagcgtctcgcttt

SEQ ID NO: 182120 - DNA, 55 bp, Artificial
  Synthetic oligonucleotide
gtaaaagacacgcgtcaggcatttggccaactggccgcctgggtacgtatgcagg

SEQ ID NO: 182121 - DNA, 55 bp, Artificial
  Synthetic oligonucleotide
gtaaaacgcgtggagcgcaggttgtaccataatatcaaaggcgtgttcaaccgcg

SEQ ID NO: 182122 - DNA, 55 bp, Artificial
  Synthetic oligonucleotide
gtaaaacaacgtaaagtcatggattagcgacgtctgatgacgtaatttctgcctc

SEQ ID NO: 182123 - DNA, 55 bp, Artificial
  Synthetic oligonucleotide
ggttttttgtgaaccactccacatttaattcgttcataacgattaatgctcctgc

SEQ ID NO: 182124 - DNA, 55 bp, Artificial
  Synthetic oligonucleotide
ggttttccacgtgcatttcgactagtttcaggtaattggtatactttcatccaat

SEQ ID NO: 182125 - DNA, 53 bp, Artificial
  Synthetic oligonucleotide
ggttttaatccgcgaatagaaagttgatgaccgggtcctattttcgatagaaa

SEQ ID NO: 182126 - DNA, 51 bp, Artificial
  Synthetic oligonucleotide
ggtttgttcgccgggaaggagggttttgccccgttcttgtgcttccgtcgc

SEQ ID NO: 182127 - DNA, 58 bp, Artificial
  Synthetic oligonucleotide
ggtcggcctgtaatgggctacggcagtccgcattatacggaagcagcaaaggtataaa

SEQ ID NO: 182128 - DNA, 54 bp, Artificial
  Synthetic oligonucleotide
ggtttcgctattggacccaccgactgaatcggttcaccattaggttaacacggc

SEQ ID NO: 182129 - DNA, 55 bp, Artificial
  Synthetic oligonucleotide
ggtttcccgcgcattactacaagcgttagcgtcgggtggtaagagcgttgcaggg

SEQ ID NO: 182130 - DNA, 50 bp, Artificial
  Synthetic oligonucleotide
ggtttccccggttaatccgtatccgggcagagcgtttaccgtctgtaccg

SEQ ID NO: 182131 - DNA, 55 bp, Artificial
  Synthetic oligonucleotide
ggtttattgttccaggacacggtactgacgtgccagtcactgctggtcgggtaga

SEQ ID NO: 182132 - DNA, 55 bp, Artificial
  Synthetic oligonucleotide
ggtttattgtcgcgctttgctccgcaaatgaacgcttttgcgatttcactgacgg

SEQ ID NO: 182133 - DNA, 55 bp, Artificial
  Synthetic oligonucleotide
agccgtcgataaatgacgatcctagagtagattgcaaacctcgcagtataccgtt

SEQ ID NO: 182134 - DNA, 51 bp, Artificial
  Synthetic oligonucleotide
ggtttaaagggaagaactacgttaagcacgaacgttgggtagaactctggc

SEQ ID NO: 182135 - DNA, 55 bp, Artificial
  Synthetic oligonucleotide
agccgtgcatgcaacaggtgcatggttttgcatgcgtcagactttcccgttctgg

SEQ ID NO: 182136 - DNA, 55 bp, Artificial
  Synthetic oligonucleotide
ggttggtgatgctaagaaattcgcggccagacttggtgtatcgtcatcttactta

SEQ ID NO: 182137 - DNA, 55 bp, Artificial
  Synthetic oligonucleotide
ggttgcgggtctcagctaacatataagacagcgacaacgcagcgcctcgctcgca

SEQ ID NO: 182138 - DNA, 60 bp, Artificial
  Synthetic oligonucleotide
ggtcgctgctattagaatgagtccgattactgcgctcattatgccgttagcgctaatgcc

SEQ ID NO: 182139 - DNA, 55 bp, Artificial
  Synthetic oligonucleotide
ggttgcgatagatatgatcggaatagaccaccagtagagaacttagcgcattcgt

SEQ ID NO: 182140 - DNA, 55 bp, Artificial
  Synthetic oligonucleotide
gtaattaagggacacagcctaatcttttcttattggtgcatctaagggatacggg

SEQ ID NO: 182141 - DNA, 55 bp, Artificial
  Synthetic oligonucleotide
gtaatgcaacctgggtatatgctacataatattcgtttattacgtcctgctatgg

SEQ ID NO: 182142 - DNA, 54 bp, Artificial
  Synthetic oligonucleotide
gtaatccggataccggtgcgccgaccaaagtattagcgcccgatacggcgggta

SEQ ID NO: 182143 - DNA, 52 bp, Artificial
  Synthetic oligonucleotide
gtaatccaccgccataaagtaacgacgtccgtcttcggtgtaaccgtagtcg

SEQ ID NO: 182144 - DNA, 55 bp, Artificial
  Synthetic oligonucleotide
gtaatatgcggatattgggggctaactatcctagtcactattcgagtgttattaa

SEQ ID NO: 182145 - DNA, 55 bp, Artificial
  Synthetic oligonucleotide
gtaataacggcctcactcatgccgtgcctcgtcattaaatttcaccgtgactggc

SEQ ID NO: 182146 - DNA, 55 bp, Artificial
  Synthetic oligonucleotide
gtaagtctgcagcccggtacggccctgcactattgaatcggaacgcggatatctg

SEQ ID NO: 182147 - DNA, 55 bp, Artificial
  Synthetic oligonucleotide
gtaaggcccgaaaggatagcggttatctaacgcttctagttgcgtaatagctccc

SEQ ID NO: 182148 - DNA, 55 bp, Artificial
  Synthetic oligonucleotide
gtaaggcataccattccttatgtttcagagggttagccatagcacccaaaatatc

SEQ ID NO: 182149 - DNA, 54 bp, Artificial
  Synthetic oligonucleotide
agcggagagacgtataccggcggctggtttcgaacaaggggtgatacaggttgg

SEQ ID NO: 182150 - DNA, 55 bp, Artificial
  Synthetic oligonucleotide
gtaagcggcacgaacaaccagcgttgcgtgaatcacatttctgaaccggacactg

SEQ ID NO: 182151 - DNA, 55 bp, Artificial
  Synthetic oligonucleotide
gtaagatgccgatggaactggtactgctacccatagtggagagcgcttttgaccc

SEQ ID NO: 182152 - DNA, 55 bp, Artificial
  Synthetic oligonucleotide
gtaagacattatgggcggtatatggcgaattttaaccctggtccaagaacagcca

SEQ ID NO: 182153 - DNA, 55 bp, Artificial
  Synthetic oligonucleotide
agccgaatagaattgcagcggttaagtttacaccggacatgttagcgcaagtcag

SEQ ID NO: 182154 - DNA, 55 bp, Artificial
  Synthetic oligonucleotide
gtaacgctggtgctagtaaatgattcactgggttgacgctgatacttctctagca

SEQ ID NO: 182155 - DNA, 55 bp, Artificial
  Synthetic oligonucleotide
gtaacgcagcgcgataataaccggttaccgtaaagacagagcaggacacaccatg

SEQ ID NO: 182156 - DNA, 55 bp, Artificial
  Synthetic oligonucleotide
gtaacgatgcgatgcctatgtcgagtcggctatcaaaatgtatggttagatctcg

SEQ ID NO: 182157 - DNA, 55 bp, Artificial
  Synthetic oligonucleotide
gtaacctgcgaccagtctggaggattcaaccgatctcgtttttgcttagcgttct

SEQ ID NO: 182158 - DNA, 55 bp, Artificial
  Synthetic oligonucleotide
gtaaccggtatcagtgagcgttaaggatgcgtaatgaaaagtgaaattctctccg

SEQ ID NO: 182159 - DNA, 55 bp, Artificial
  Synthetic oligonucleotide
gtaaccaggcatttcgttctgtatagacataagcattcgtcgtcaaagggaggaa

SEQ ID NO: 182160 - DNA, 55 bp, Artificial
  Synthetic oligonucleotide
ggggtaaggtctttgctgcggtaatcagtacccgcaaattgagttgtgccccgga

SEQ ID NO: 182161 - DNA, 55 bp, Artificial
  Synthetic oligonucleotide
gtaaatcccatttaccattcgtactgtgcagagtataaaccgccggatcgctgcg

SEQ ID NO: 182162 - DNA, 55 bp, Artificial
  Synthetic oligonucleotide
gtaaatcactgatgttacctgtttcagtacttccaattgcgggaatacttcttgg

SEQ ID NO: 182163 - DNA, 55 bp, Artificial
  Synthetic oligonucleotide
agaggtgtcgggtgcctcccgaaaacacatattagcccggtatgtgtctgtgacc

SEQ ID NO: 182164 - DNA, 55 bp, Artificial
  Synthetic oligonucleotide
gtccggtgtaaacttaaccgctgcaattctattcggctcagacttaactgacacc

SEQ ID NO: 182165 - DNA, 55 bp, Artificial
  Synthetic oligonucleotide
gtccggtcgcgtaatcctgtagtcttcgtgaccggtacggcctgtcacattatgc

SEQ ID NO: 182166 - DNA, 55 bp, Artificial
  Synthetic oligonucleotide
gtccggtatgtaaatccagaccggcaaataaatgtagcataggacgttacgccat

SEQ ID NO: 182167 - DNA, 55 bp, Artificial
  Synthetic oligonucleotide
gtccgggaaaatgacgacggaacgtatgccatcaccgccgtacagcatgttccgg

SEQ ID NO: 182168 - DNA, 55 bp, Artificial
  Synthetic oligonucleotide
gtccgagctgatttatacgcgcctgaaagagaacggttttattaagaaccgcacc

SEQ ID NO: 182169 - DNA, 55 bp, Artificial
  Synthetic oligonucleotide
agataacgccttcttactacaaaggtaataagaccagatacgttattacatgcgc

SEQ ID NO: 182170 - DNA, 55 bp, Artificial
  Synthetic oligonucleotide
gtcccgagcccctcatcccggcacggacatacattccccagatagtagcgacatg

SEQ ID NO: 182171 - DNA, 60 bp, Artificial
  Synthetic oligonucleotide
agctggcgggcgcctcatttttcttcggcatgatgactgtttgactctctgtaatggcag

SEQ ID NO: 182172 - DNA, 55 bp, Artificial
  Synthetic oligonucleotide
gtccccgcatagagtcttgcttaaggggcaattaagttaacgaagcgagcgtgcc

SEQ ID NO: 182173 - DNA, 55 bp, Artificial
  Synthetic oligonucleotide
gtcccataggtgtctcatctcatggtttcagtaaaacataatgaggtctgagaac

SEQ ID NO: 182174 - DNA, 55 bp, Artificial
  Synthetic oligonucleotide
gtccatgttattggcctcgatacatcgctggaacgtttgttgctacaggcgttgc

SEQ ID NO: 182175 - DNA, 55 bp, Artificial
  Synthetic oligonucleotide
gtccatatgtgataaggcagggcaactggccacgtgaagcagcgtgtcacgcagt

SEQ ID NO: 182176 - DNA, 55 bp, Artificial
  Synthetic oligonucleotide
gtccagcacgttcagcgaatttaggaccgactgacgctcggcttcattatcggga

SEQ ID NO: 182177 - DNA, 55 bp, Artificial
  Synthetic oligonucleotide
gtccactgagaatatcgcccagctctgccggggtcatggcctggaccagagagac

SEQ ID NO: 182178 - DNA, 55 bp, Artificial
  Synthetic oligonucleotide
agatcagccggataacgaaatgcgctgcattgagcaccttttgcaacgccaggtg

SEQ ID NO: 182179 - DNA, 55 bp, Artificial
  Synthetic oligonucleotide
gtccaccttaacgcagggcttcccgtcacaacgcgatatatcagccagcggggct

SEQ ID NO: 182180 - DNA, 55 bp, Artificial
  Synthetic oligonucleotide
gtccaactggtttacttcatatgggaggagttcgtactgcattgtattcatggct

SEQ ID NO: 182181 - DNA, 55 bp, Artificial
  Synthetic oligonucleotide
gtcatttgttcaccataggcgtcgaagtgtaagacgactaccgtacagccccagt

SEQ ID NO: 182182 - DNA, 58 bp, Artificial
  Synthetic oligonucleotide
gggggtatgatgcgaaaaatacagaccgtatgggtggcagcgttactctgtggctccc

SEQ ID NO: 182183 - DNA, 55 bp, Artificial
  Synthetic oligonucleotide
gtcattatgaccattcagggtgcaccgtcctttgtctcgtggcataattatcagg

SEQ ID NO: 182184 - DNA, 55 bp, Artificial
  Synthetic oligonucleotide
agatctctaaatgtgaatggtccggtttaccgggatgcttacacagctgcgggaa

SEQ ID NO: 182185 - DNA, 55 bp, Artificial
  Synthetic oligonucleotide
agatgcacaaaggccacaaccgtggactggcagctagtacgaatgtaaacttcgg

SEQ ID NO: 182186 - DNA, 55 bp, Artificial
  Synthetic oligonucleotide
gtcgcgaatgttcggacgcgccgttgatgtggtgtcccgcaatgccgtcaatccc

SEQ ID NO: 182187 - DNA, 55 bp, Artificial
  Synthetic oligonucleotide
gtcgcctggatgcattcaatgggccaaaatctggtggagtcagtcgcgattaccg

SEQ ID NO: 182188 - DNA, 55 bp, Artificial
  Synthetic oligonucleotide
agaggaggcttcaaaggagtctgaacataagcgcaacatggatgtcttgacggcc

SEQ ID NO: 182189 - DNA, 54 bp, Artificial
  Synthetic oligonucleotide
gtcgcatggaacgtttcctggtaagtcggccaaattaatttacgcacttcgtta

SEQ ID NO: 182190 - DNA, 55 bp, Artificial
  Synthetic oligonucleotide
gtcgcatgaaatacgcaatatgcttgccgtggtaatcgtcttcattgatgtgaaa

SEQ ID NO: 182191 - DNA, 55 bp, Artificial
  Synthetic oligonucleotide
gtcgcagtagttgcgatgtcgaaatcattcctgggtacgtactttggcgttattg

SEQ ID NO: 182192 - DNA, 55 bp, Artificial
  Synthetic oligonucleotide
gtcgcagggttacggagtgcaactacgaatgctgccggtatatggctgaatggcg

SEQ ID NO: 182193 - DNA, 60 bp, Artificial
  Synthetic oligonucleotide
ggggggcatctgggtatccccttcgatattggcatgtacatgggtaagatagagtcgatc

SEQ ID NO: 182194 - DNA, 55 bp, Artificial
  Synthetic oligonucleotide
gtcgcacgctgtcaaatgtttattgtcggcttctgtttcaatacgactgtcgcac

SEQ ID NO: 182195 - DNA, 55 bp, Artificial
  Synthetic oligonucleotide
gtcgatcagtgcagcacgccgtttcacgttgtcacaggtgttgccagtaaccggg

SEQ ID NO: 182196 - DNA, 55 bp, Artificial
  Synthetic oligonucleotide
gtcgagtgcatactcccctgtatatgaacgattttggttgtctcgtaactcccta

SEQ ID NO: 182197 - DNA, 55 bp, Artificial
  Synthetic oligonucleotide
gtcgaggcaaatagcccctttacgcggaaccaggtaagccagcttctgagctggg

SEQ ID NO: 182198 - DNA, 55 bp, Artificial
  Synthetic oligonucleotide
gtcgagctgaccctcgaccagcagaaggcgctggcgtccgagttcgcccagcacc

SEQ ID NO: 182199 - DNA, 55 bp, Artificial
  Synthetic oligonucleotide
gtcgagcgaagggaaatatcttgattacagttcagatgtagttcttgactttccc

SEQ ID NO: 182200 - DNA, 55 bp, Artificial
  Synthetic oligonucleotide
gtccttccagacgcaaatgttcgggatcttgtccaaaacgcgcgacaggggcccc

SEQ ID NO: 182201 - DNA, 51 bp, Artificial
  Synthetic oligonucleotide
gtccttacgctgtctgaacgaaaagtattacgccttttaggaaaagggtgg

SEQ ID NO: 182202 - DNA, 55 bp, Artificial
  Synthetic oligonucleotide
gtcctgtcaccgtaaatgttgacgtaaggtcaccacctgcgacttcaagcgccag

SEQ ID NO: 182203 - DNA, 55 bp, Artificial
  Synthetic oligonucleotide
gtcctgtaataaaggcattactcccagtaagaatccgcgccaggcatcttgccgc

SEQ ID NO: 182204 - DNA, 57 bp, Artificial
  Synthetic oligonucleotide
gggggctgctagcggcgcggtgtgtttttttataggataccgctaggggcgctgcta

SEQ ID NO: 182205 - DNA, 55 bp, Artificial
  Synthetic oligonucleotide
agaggctcttaatagcgtcatgcgccgctttgatatgatgtcatggggaagcctg

SEQ ID NO: 182206 - DNA, 55 bp, Artificial
  Synthetic oligonucleotide
gtcctgccgtcagagcgactcgggcacaagcggatagggtactttaccgtcaagc

SEQ ID NO: 182207 - DNA, 54 bp, Artificial
  Synthetic oligonucleotide
gtcctcttttcccgaacaacagtacccgcatccgacgtcgaagccactacgtac

SEQ ID NO: 182208 - DNA, 55 bp, Artificial
  Synthetic oligonucleotide
gtcaccacctaacaggccgtaagccccattccatgccaagtgcaatgcgctgtta

SEQ ID NO: 182209 - DNA, 55 bp, Artificial
  Synthetic oligonucleotide
gtcacagttgtctgaacggtacctttcgtcggatcggtatcacccgacttcacca

SEQ ID NO: 182210 - DNA, 55 bp, Artificial
  Synthetic oligonucleotide
gtcacacgtaatgtttggaggaattacacatcctgccgctgtatctctttgtcgg

SEQ ID NO: 182211 - DNA, 55 bp, Artificial
  Synthetic oligonucleotide
gtcacacaccgctggatgatgcggggaggccgaccgtatgagccagaatcaaccc

SEQ ID NO: 182212 - DNA, 55 bp, Artificial
  Synthetic oligonucleotide
gtcacaaagctcggaagtatcgtatttcataggcttaacgttcagttgctgcgag

SEQ ID NO: 182213 - DNA, 55 bp, Artificial
  Synthetic oligonucleotide
agcaattgtagggttgtgacctgctcccttctacttggttatgtcggccttatgg

SEQ ID NO: 182214 - DNA, 55 bp, Artificial
  Synthetic oligonucleotide
gtcaatgccgatgcagctaaaacgatgcaatcaactgaaaagccgctggaaacca

SEQ ID NO: 182215 - DNA, 59 bp, Artificial
  Synthetic oligonucleotide
gcacagatcgaaacggccgtaaccgctaaccagattccgaccacaagccgtatcaatgc

SEQ ID NO: 182216 - DNA, 60 bp, Artificial
  Synthetic oligonucleotide
agcttatcgctgtgtataccgcagtaaggcacccggccaggtggacttactgcatgcgtt

SEQ ID NO: 182217 - DNA, 55 bp, Artificial
  Synthetic oligonucleotide
gtcaatgacgctttcaaagcggtatcacgctattgggatcgcataacctggccgg

SEQ ID NO: 182218 - DNA, 55 bp, Artificial
  Synthetic oligonucleotide
gtcaagatgctttagaacttcatgaaccgctctcactcattactgaatctgtttt

SEQ ID NO: 182219 - DNA, 55 bp, Artificial
  Synthetic oligonucleotide
agcaccagaccatgccgctcctgctcggcgggcctgatatacacgtcattgccct

SEQ ID NO: 182220 - DNA, 55 bp, Artificial
  Synthetic oligonucleotide
gtcaaatccaacagactactgaggtctgacgggcccggacactcccttgaaccgc

SEQ ID NO: 182221 - DNA, 55 bp, Artificial
  Synthetic oligonucleotide
gtcaaagccactggtggtacggtgacttggttggggcaagatctattatcgatga

SEQ ID NO: 182222 - DNA, 55 bp, Artificial
  Synthetic oligonucleotide
gtcaaaatacgcgtggtattggttgaaccgacggtgctcatgacatcgccttggg

SEQ ID NO: 182223 - DNA, 55 bp, Artificial
  Synthetic oligonucleotide
gtatttcgtgaggagctttcggtttaattaataccgcgattctctgtgtgtcact

SEQ ID NO: 182224 - DNA, 55 bp, Artificial
  Synthetic oligonucleotide
gtatttagttagtgacagatgcgatgccttaatgaatatggaggcaagagggatc

SEQ ID NO: 182225 - DNA, 55 bp, Artificial
  Synthetic oligonucleotide
gtattcggccccacctgtcgacggaacacgaatgaataagaatgcgtgggtatac

SEQ ID NO: 182226 - DNA, 55 bp, Artificial
  Synthetic oligonucleotide
gtattatcccgcccgatctcataaacgcctggagtgaactaaaagcgccagtggg

SEQ ID NO: 182227 - DNA, 57 bp, Artificial
  Synthetic oligonucleotide
gggggcggaatctcaggctaaagggggcgctgtatgagcaatcttttacaaatggga

SEQ ID NO: 182228 - DNA, 55 bp, Artificial
  Synthetic oligonucleotide
gtattagcctgggtcagttcacggagtccaaacgcaaaaggacaggcgacatcgt

SEQ ID NO: 182229 - DNA, 55 bp, Artificial
  Synthetic oligonucleotide
gtattacatgtcgattaacaggggaagatgtgagaagaggaacattttcacatag

SEQ ID NO: 182230 - DNA, 55 bp, Artificial
  Synthetic oligonucleotide
agcagataaagaagttgcgtcaaattagcatcgctaacaaattgacttcgctctc

SEQ ID NO: 182231 - DNA, 55 bp, Artificial
  Synthetic oligonucleotide
agcagcatgatggcctggcctgcgccaaggtgcatcagccccatgccctgaagca

SEQ ID NO: 182232 - DNA, 55 bp, Artificial
  Synthetic oligonucleotide
gtcatctacagcggagtgtggttacaccatgatggacagcttacgcacggctgct

SEQ ID NO: 182233 - DNA, 55 bp, Artificial
  Synthetic oligonucleotide
gtcatcatctcaccagttctggtaacagtgttaaggctgactttgaggtaacgcg

SEQ ID NO: 182234 - DNA, 55 bp, Artificial
  Synthetic oligonucleotide
gtcatcaacacgaagagtcggcctacgttattacctgctgtcagtgaagtaggcc

SEQ ID NO: 182235 - DNA, 55 bp, Artificial
  Synthetic oligonucleotide
gtcagttccccgaaggttcgcagggtgatgcgcaatgccccggcgacatgaatat

SEQ ID NO: 182236 - DNA, 55 bp, Artificial
  Synthetic oligonucleotide
agatgcgttttacggggctgaagcggggataccgtctgacagagctggtagtgat

SEQ ID NO: 182237 - DNA, 55 bp, Artificial
  Synthetic oligonucleotide
gtcagcttgcgcctcgtcatacgctggaggcaatgattcgcgctctgcgtacagg

SEQ ID NO: 182238 - DNA, 60 bp, Artificial
  Synthetic oligonucleotide
gggggaggagatttgtagttctcgcaatgtggcaattattgatctttctgtgtcagaaaa

SEQ ID NO: 182239 - DNA, 55 bp, Artificial
  Synthetic oligonucleotide
agattaccctgccgtcgtccggcaccacgctgataagcctgatggatggcgaagg

SEQ ID NO: 182240 - DNA, 55 bp, Artificial
  Synthetic oligonucleotide
gtcagctattgctcagttagtaacggaaaacgcactagaaaaggcaagacgggag

SEQ ID NO: 182241 - DNA, 55 bp, Artificial
  Synthetic oligonucleotide
gtcagcgtggacgtgcagtctgttaccgacggtgtgcaggttcaggtcagccgga

SEQ ID NO: 182242 - DNA, 55 bp, Artificial
  Synthetic oligonucleotide
gtcagccaacagttgtgttgtgctccacatggtatctaaggttgcccacacaggc

SEQ ID NO: 182243 - DNA, 55 bp, Artificial
  Synthetic oligonucleotide
gtcagcagccttctggcgcacagaacgtgtgtcatatcccttcctcgaccggaca

SEQ ID NO: 182244 - DNA, 55 bp, Artificial
  Synthetic oligonucleotide
gtcagcactctgcccctcaagtgtcaaggatcgcgcccctcatctgtcagtgagg

SEQ ID NO: 182245 - DNA, 55 bp, Artificial
  Synthetic oligonucleotide
gtcactcaatcggtcgtttatgtgacaacccacgccgttactggtcgcggaaaaa

SEQ ID NO: 182246 - DNA, 55 bp, Artificial
  Synthetic oligonucleotide
gtcacggtagtagttacaacgggtgcgctgacgtaaattcccgcccagcgacgcc

SEQ ID NO: 182247 - DNA, 55 bp, Artificial
  Synthetic oligonucleotide
agcaaccttggcgatgtaaagtctacaacgtggcgcgaaagttacaagtgtgatg

SEQ ID NO: 182248 - DNA, 55 bp, Artificial
  Synthetic oligonucleotide
gtcacggcgtgtcactggttgtcactctccgtcacggtatgtcgctactcgttaa

SEQ ID NO: 182249 - DNA, 58 bp, Artificial
  Synthetic oligonucleotide
agcttcggtgttcatcccacggtttatctgctggagagtaatccgtcagattcttaag

SEQ ID NO: 182250 - DNA, 55 bp, Artificial
  Synthetic oligonucleotide
gtcacgctgaatgcaaaagggctgacctgcgaagccgacaccctcggctctgtgg

SEQ ID NO: 182251 - DNA, 55 bp, Artificial
  Synthetic oligonucleotide
gtcacgacaacctaacagggactgactacaaagatctttaaagaaacgttcatta

SEQ ID NO: 182252 - DNA, 55 bp, Artificial
  Synthetic oligonucleotide
gtcaccagggcgaagccgcaaatgtgtgacatagcccgtaaccggagaccgaaca

SEQ ID NO: 182253 - DNA, 55 bp, Artificial
  Synthetic oligonucleotide
ggtacctataggtagtttcgctatattagaaggtgaccaaatttggcttcgcagt

SEQ ID NO: 182254 - DNA, 55 bp, Artificial
  Synthetic oligonucleotide
agcgtgaaggttcagtcggagcgcagtcaacatgcgaataagcgtctcggcccgg

SEQ ID NO: 182255 - DNA, 55 bp, Artificial
  Synthetic oligonucleotide
ggtacccgtatcaccgtttgagtccattcgccggggctgagacaagcacaacccg

SEQ ID NO: 182256 - DNA, 55 bp, Artificial
  Synthetic oligonucleotide
ggtacatttgttttactgtcaggctgtgatagcaatggcccttcacccaatcccc

SEQ ID NO: 182257 - DNA, 55 bp, Artificial
  Synthetic oligonucleotide
ggtacagtgttgtggcgtttcacgcgccgggtcatttgtggccccacccagcgta

SEQ ID NO: 182258 - DNA, 55 bp, Artificial
  Synthetic oligonucleotide
ggtaatgaatcccgccctgtaacgtttctacaggcatcattgccgttccatcccc

SEQ ID NO: 182259 - DNA, 55 bp, Artificial
  Synthetic oligonucleotide
agcgtgccaaatggattcagcggttattatatgtaaaaggtcagactttcaccat

SEQ ID NO: 182260 - DNA, 57 bp, Artificial
  Synthetic oligonucleotide
agcttctcaggagtaaaagatgaccgccctttcccaaccgacggccatagatggcta

SEQ ID NO: 182261 - DNA, 55 bp, Artificial
  Synthetic oligonucleotide
ggtaagtgaaacgctatcggtgggatacgactatgcatattacgctacgacaact

SEQ ID NO: 182262 - DNA, 55 bp, Artificial
  Synthetic oligonucleotide
agcgtgtgcagcccataggcgtgtaaaatcggctgtacttcatgggtatccagtg

SEQ ID NO: 182263 - DNA, 55 bp, Artificial
  Synthetic oligonucleotide
ggtaaactccagctatttccgccatccttcgagataacgtattgggtcgtccaac

SEQ ID NO: 182264 - DNA, 52 bp, Artificial
  Synthetic oligonucleotide
ggtaaaccaaccgcctttctccgttcaaaagacaaatgtgctcgcttaacgt

SEQ ID NO: 182265 - DNA, 55 bp, Artificial
  Synthetic oligonucleotide
agctaagggatgaacaggagcgtgcccggtacagacatgaggtacaggaacgcgc

SEQ ID NO: 182266 - DNA, 53 bp, Artificial
  Synthetic oligonucleotide
gggtttttgcattcaggggttgagctttcgctttcccccttccctggacgcta

SEQ ID NO: 182267 - DNA, 55 bp, Artificial
  Synthetic oligonucleotide
gggttttgaaccgccggaacactggggcacactgcataccgccgcgggctatgaa

SEQ ID NO: 182268 - DNA, 55 bp, Artificial
  Synthetic oligonucleotide
gggttgttaatagtgaaacccgtgttaccgcgagtgcacgtttggtggatctgcg

SEQ ID NO: 182269 - DNA, 55 bp, Artificial
  Synthetic oligonucleotide
gggttgtggcggttctcaaggaacttcaggccgatttgcgggaacagcgccacgg

SEQ ID NO: 182270 - DNA, 55 bp, Artificial
  Synthetic oligonucleotide
gggttgtagatcacttcgctcacgttggtgatccctaaatctgacagggctgtgt

SEQ ID NO: 182271 - DNA, 56 bp, Artificial
  Synthetic oligonucleotide
agcttggagtaggaaacctaggcgcatcagaaaagagcgatgtttttctcgtagtt

SEQ ID NO: 182272 - DNA, 55 bp, Artificial
  Synthetic oligonucleotide
gggttggggccagaccgaagattttatcgcgccgtggtttgcgacgctggaagcg

SEQ ID NO: 182273 - DNA, 55 bp, Artificial
  Synthetic oligonucleotide
gggttagcggataggtccagctaccctgtggattgacctggacggtagtcagttc

SEQ ID NO: 182274 - DNA, 55 bp, Artificial
  Synthetic oligonucleotide
ggtcagttcagctgaggatgacggggatacagtcccgccctgaacatcgcggata

SEQ ID NO: 182275 - DNA, 55 bp, Artificial
  Synthetic oligonucleotide
ggtcagggctctacaggtaccgaaatcgcaggtaataacgctgtagtgaatcagg

SEQ ID NO: 182276 - DNA, 55 bp, Artificial
  Synthetic oligonucleotide
ggtcagggatagggggaatgctatcttcattcctgtctttatctgggttacgtgt

SEQ ID NO: 182277 - DNA, 55 bp, Artificial
  Synthetic oligonucleotide
ggtcaggctatcggacatttagggcaattaactcatggaacgctgcgggttaacc

SEQ ID NO: 182278 - DNA, 55 bp, Artificial
  Synthetic oligonucleotide
ggtcagccagcgtaccagcgtcatcggatcgttagtgacgaaccgcccctgtgga

SEQ ID NO: 182279 - DNA, 55 bp, Artificial
  Synthetic oligonucleotide
ggtcactcctgagccacatatcacgcctgccacatgaagcactttcctgatcccc

SEQ ID NO: 182280 - DNA, 55 bp, Artificial
  Synthetic oligonucleotide
ggtcacggcatcaggcagttatcctgtcgactttaccactctctcccggcttatt

SEQ ID NO: 182281 - DNA, 55 bp, Artificial
  Synthetic oligonucleotide
ggtcacgatcttatgcagttccggccagtttaccgggctttcaagaccgctaacg

SEQ ID NO: 182282 - DNA, 55 bp, Artificial
  Synthetic oligonucleotide
ggggcatgtaaaacccttcattggttgctctgccggcaacggtccggaataacaa

SEQ ID NO: 182283 - DNA, 55 bp, Artificial
  Synthetic oligonucleotide
ggtatttgcgtcagaattgcgttcagcgcgtttcagcggtgcgtacaattaaggg

SEQ ID NO: 182284 - DNA, 55 bp, Artificial
  Synthetic oligonucleotide
ggtattgcgtaccagccataacgccagagcaatatcgcagcattcacaaatacgc

SEQ ID NO: 182285 - DNA, 55 bp, Artificial
  Synthetic oligonucleotide
ggtattcccaaataacgcgggtgtctgagtacaataggagacttgctggcgatac

SEQ ID NO: 182286 - DNA, 55 bp, Artificial
  Synthetic oligonucleotide
ggtatgcagatcggcaagcaagggaccccgacaaacgatgtctctttgttggcgg

SEQ ID NO: 182287 - DNA, 55 bp, Artificial
  Synthetic oligonucleotide
ggtatccttgatgcgcatgaagaactgacagaacgtcgtgctgcgttacctgacg

SEQ ID NO: 182288 - DNA, 55 bp, Artificial
  Synthetic oligonucleotide
ggtatccactatggagagtaaaccttcactgttttcagcggatgtctactctcca

SEQ ID NO: 182289 - DNA, 55 bp, Artificial
  Synthetic oligonucleotide
ggtatcaagttgtttggctaggtactgcagatcgcattgaatcgaagttagttcc

SEQ ID NO: 182290 - DNA, 55 bp, Artificial
  Synthetic oligonucleotide
ggtatatgactcataactctcagttggctgagccgcaaccaataaggcatattgt

SEQ ID NO: 182291 - DNA, 55 bp, Artificial
  Synthetic oligonucleotide
ggtaggaacgtgtgggtattcccatgctaccgcaatccctttgcttaccttgccg

SEQ ID NO: 182292 - DNA, 55 bp, Artificial
  Synthetic oligonucleotide
ggtagcgcataaaacttacatgcagtgcttctacaaacgtcaactcatgtacgac

SEQ ID NO: 182293 - DNA, 59 bp, Artificial
  Synthetic oligonucleotide
aggaaagaacggacggtatcgttcacttataaccaatacgctcagatgatgaacatcag

SEQ ID NO: 182294 - DNA, 55 bp, Artificial
  Synthetic oligonucleotide
ggtagcagaggcctggtcaacgatattgagatccataagcagcttaatggcccgg

SEQ ID NO: 182295 - DNA, 55 bp, Artificial
  Synthetic oligonucleotide
ggtacgcctgatctttaacggtcaatggtcgcgcttcgacaactatgcggggccg

SEQ ID NO: 182296 - DNA, 55 bp, Artificial
  Synthetic oligonucleotide
ggtacctgacgtaaatacccgctcccctcatgcgtccgataatagccgtagggtc

SEQ ID NO: 182297 - DNA, 55 bp, Artificial
  Synthetic oligonucleotide
ggggtgacgatcgttgtttgggtaacacaacgtaatattaagcagcttatcgaac

SEQ ID NO: 182298 - DNA, 55 bp, Artificial
  Synthetic oligonucleotide
ggggtctgctcagtcttgattaacccggaaaatattatctagacggcttacaccc

SEQ ID NO: 182299 - DNA, 55 bp, Artificial
  Synthetic oligonucleotide
ggggtctgagctagcacaagtaatgatcgattcaaccctctcccaccacgcctgg

SEQ ID NO: 182300 - DNA, 55 bp, Artificial
  Synthetic oligonucleotide
ggggtaatcggttggtcaaatgcgccatgaggaagcaaggggtcaatctgcccga

SEQ ID NO: 182301 - DNA, 55 bp, Artificial
  Synthetic oligonucleotide
agctgtcaaagaagggtactcagagcgagacgtcataaggcatcgtatcctggag

SEQ ID NO: 182302 - DNA, 54 bp, Artificial
  Synthetic oligonucleotide
agctgtttaacggcaaccgtgggccgatgaatctgattttcgccgccggaattt

SEQ ID NO: 182303 - DNA, 55 bp, Artificial
  Synthetic oligonucleotide
agcttcacacacccgaacgcgattgtgctggacccgttatgttgagtttcacata

SEQ ID NO: 182304 - DNA, 56 bp, Artificial
  Synthetic oligonucleotide
aggaaatcattttccaggggatggtccaaaatatatcggcaggggactactccatc

SEQ ID NO: 182305 - DNA, 55 bp, Artificial
  Synthetic oligonucleotide
gggggataactcgcccagataaggggccacacgctcgatttgttgcaggtaggta

SEQ ID NO: 182306 - DNA, 55 bp, Artificial
  Synthetic oligonucleotide
ggggcttaagcctcatggcataagattacaatagcagcccgtcatcaggcgggct

SEQ ID NO: 182307 - DNA, 55 bp, Artificial
  Synthetic oligonucleotide
ggggctgtcggcgtttaacagttatgtcaatgcgctacaggccgccactcaggct

SEQ ID NO: 182308 - DNA, 55 bp, Artificial
  Synthetic oligonucleotide
ggggctcacaatgcattactcgatatcttacccacgatgaagaaaatgcgtcttc

SEQ ID NO: 182309 - DNA, 55 bp, Artificial
  Synthetic oligonucleotide
ggggctatattcccagtacgccagcaaaatctggcgtcgggattggcgtcccgga

SEQ ID NO: 182310 - DNA, 55 bp, Artificial
  Synthetic oligonucleotide
ggggctaacctggacacatggagcgctgcaaccacgcagtgggatgacgctatcg

SEQ ID NO: 182311 - DNA, 49 bp, Artificial
  Synthetic oligonucleotide
ggggcgtttggcgaaagggaaattaaagtacgctaagacttagggaacg

SEQ ID NO: 182312 - DNA, 53 bp, Artificial
  Synthetic oligonucleotide
ggggcgttgtcttttctgccgcttaacgttacacaccccaccgaactttgtca

SEQ ID NO: 182313 - DNA, 55 bp, Artificial
  Synthetic oligonucleotide
ggggcgttatgttcaggctggggctcggatttattattccgtggccaacgagcac

SEQ ID NO: 182314 - DNA, 55 bp, Artificial
  Synthetic oligonucleotide
ggggcgtggtgatttaggtaaagcttccaccactacacggatgccgcaggacggg

SEQ ID NO: 182315 - DNA, 58 bp, Artificial
  Synthetic oligonucleotide
ggggcataatctaacctacgaggactatgcaatgaaaaaacgactagtgatagccacc

SEQ ID NO: 182316 - DNA, 55 bp, Artificial
  Synthetic oligonucleotide
ggggcgggcgttatcaccgacggtcatttgcttcatgcgggcagtagcagtctgg

SEQ ID NO: 182317 - DNA, 55 bp, Artificial
  Synthetic oligonucleotide
ggggcggcgatatttcatgcgccagtacttagaacctttaggggagacctcaaga

SEQ ID NO: 182318 - DNA, 54 bp, Artificial
  Synthetic oligonucleotide
ggggcgagaacgctattacatggtggcgtcggtcttccctgggttcgttccacc

SEQ ID NO: 182319 - DNA, 55 bp, Artificial
  Synthetic oligonucleotide
ggggcgaatcactggattgatgatcatattgccaccccgatgagtaaataccgcg

SEQ ID NO: 182320 - DNA, 55 bp, Artificial
  Synthetic oligonucleotide
gggttacgcattcgccatgcaggatccacgcagaaatagcatcaagtgcgccggg

SEQ ID NO: 182321 - DNA, 53 bp, Artificial
  Synthetic oligonucleotide
gggttaattgaaatagttaatccccagctaaaccgtgattttaagcgatccgc

SEQ ID NO: 182322 - DNA, 55 bp, Artificial
  Synthetic oligonucleotide
gggttaatctccagcacatgacgttttatcccgtagtcgaatatgcggcgcgtcc

SEQ ID NO: 182323 - DNA, 55 bp, Artificial
  Synthetic oligonucleotide
gggtggggatacacccgtttcgcagagacaactgcatgacccatgaccagtggac

SEQ ID NO: 182324 - DNA, 55 bp, Artificial
  Synthetic oligonucleotide
gggtgggcatacaactcctgaaagatgaaacgtcacggcgaatagcgttaaacag

SEQ ID NO: 182325 - DNA, 55 bp, Artificial
  Synthetic oligonucleotide
gggtggcagtgagatgaggggtcagatgataggtaagcagggtactgacagtgga

SEQ ID NO: 182326 - DNA, 60 bp, Artificial
  Synthetic oligonucleotide
gcacaagccgtacttctcggacgatctgcacttcggtgtgcgtatcgcagggaaagaacg

SEQ ID NO: 182327 - DNA, 60 bp, Artificial
  Synthetic oligonucleotide
aggaacagttgtccaccctgcttcctctaggatgctatatccccacctgcttgctaagat

SEQ ID NO: 182328 - DNA, 55 bp, Artificial
  Synthetic oligonucleotide
gggtgcacgagtgggttacatcgaactggatctcaacagcggtaagatccttgag

SEQ ID NO: 182329 - DNA, 55 bp, Artificial
  Synthetic oligonucleotide
gggtgcaatttagccgccttctttacccggcattccgcaattttcactgcacgcg

SEQ ID NO: 182330 - DNA, 54 bp, Artificial
  Synthetic oligonucleotide
gggtgatacccggtaatagctcggtaagattggccacgcgggagcgaacggagg

SEQ ID NO: 182331 - DNA, 55 bp, Artificial
  Synthetic oligonucleotide
gggtgagaaagaaggtgcggcttgtcaggcagcggttgacattatcattgaacga

SEQ ID NO: 182332 - DNA, 55 bp, Artificial
  Synthetic oligonucleotide
agctcttgaacgcaccatgcgatggcatcacgactgcggattgttccatccgcct

SEQ ID NO: 182333 - DNA, 55 bp, Artificial
  Synthetic oligonucleotide
gggtcaggggttatatgaacgaacaatattcggcaatgcgaagtaatgtcagtat

SEQ ID NO: 182334 - DNA, 55 bp, Artificial
  Synthetic oligonucleotide
gggtattcagaatttcgaccactcgcaccacaagctcaaaattcgcggcctgcaa

SEQ ID NO: 182335 - DNA, 55 bp, Artificial
  Synthetic oligonucleotide
gggtatcccatcatccgcatatatccagtgtttaagagccggcatatccgccgcg

SEQ ID NO: 182336 - DNA, 55 bp, Artificial
  Synthetic oligonucleotide
gggtagcaccgctggcgtggcatcctgaaaatcgcaatgccgtaattatggtgga

SEQ ID NO: 182337 - DNA, 55 bp, Artificial
  Synthetic oligonucleotide
agctgacatcgtattggggcccatgtgggtctgggtgttcttcagtgaattgcca

SEQ ID NO: 182338 - DNA, 56 bp, Artificial
  Synthetic oligonucleotide
aggaagcgcaaaggcgtccggtggtgcatgggcacttacgcgccggggcttagtgg

SEQ ID NO: 182339 - DNA, 55 bp, Artificial
  Synthetic oligonucleotide
gggtactggattctatagtcacgcgagtataagtcgaggcaggccaaaccctcac

SEQ ID NO: 182340 - DNA, 55 bp, Artificial
  Synthetic oligonucleotide
gggtaagcaaaacatatatagtgtcagcctttgtaaatcccctcgctcaccttca

SEQ ID NO: 182341 - DNA, 55 bp, Artificial
  Synthetic oligonucleotide
gggtaaaatagaggttcaaccacaggactaaaatgagcgagaaacgttgatgtcg

SEQ ID NO: 182342 - DNA, 55 bp, Artificial
  Synthetic oligonucleotide
ggggttgaagcgttaaatccaatcaggctagtttgttagtggcgtgtccgttcgc

SEQ ID NO: 182343 - DNA, 55 bp, Artificial
  Synthetic oligonucleotide
ggggttaaatgccacactacgcgacctgcttccccatagtctggcgattaagggg

SEQ ID NO: 182344 - DNA, 55 bp, Artificial
  Synthetic oligonucleotide
ggtgttgcgggcgctttcacaggacgcgggctaaagcgcgtcatatctacaccca

SEQ ID NO: 182345 - DNA, 55 bp, Artificial
  Synthetic oligonucleotide
ggtgttcagacacaacgagcccgcataaatgctacaggttcctaccggctgaacc

SEQ ID NO: 182346 - DNA, 55 bp, Artificial
  Synthetic oligonucleotide
ggtgtgttgtggtcgtgcagtatatcgcttgcggtcggtgggtgcaggggttacc

SEQ ID NO: 182347 - DNA, 55 bp, Artificial
  Synthetic oligonucleotide
ggtgtgggcaggtataatcttctgcggcggcaatcttctgtagcagagtcaacgc

SEQ ID NO: 182348 - DNA, 55 bp, Artificial
  Synthetic oligonucleotide
ggtgtctgttaaacccgtggcgattcacttcttgcgccaagtgtaaaaggtagcg

SEQ ID NO: 182349 - DNA, 60 bp, Artificial
  Synthetic oligonucleotide
ggggcagatgccaacgcgtctgttaccgggaatgaatcaactgtaccgatgcagttgcgt

SEQ ID NO: 182350 - DNA, 55 bp, Artificial
  Synthetic oligonucleotide
ggtgtctggcactgccgccttctttaaagccccggttatcgcaagatgccggggt

SEQ ID NO: 182351 - DNA, 55 bp, Artificial
  Synthetic oligonucleotide
ggtgtccttaggtttcacgacgctaacaaaccggaatcgccatcgctccatgtgc

SEQ ID NO: 182352 - DNA, 55 bp, Artificial
  Synthetic oligonucleotide
ggtggttctctaaaacagagtggcctaagtctgatataacgaaagttctagctcc

SEQ ID NO: 182353 - DNA, 55 bp, Artificial
  Synthetic oligonucleotide
ggtggtctaccctcaaggaaaccggagaaacgcgtctgaggctgcgtgaggcgca

SEQ ID NO: 182354 - DNA, 55 bp, Artificial
  Synthetic oligonucleotide
agcgacagcagatttaattggaacgccagcatccattaaagctagagaagcaccg

SEQ ID NO: 182355 - DNA, 55 bp, Artificial
  Synthetic oligonucleotide
ggtggcggagcgtggtatacaactaagaaatctggcattcaattacgtacccgtg

SEQ ID NO: 182356 - DNA, 55 bp, Artificial
  Synthetic oligonucleotide
ggtggacgatatccatctgactgttagtggcctgggcgataaacaccgccgctat

SEQ ID NO: 182357 - DNA, 55 bp, Artificial
  Synthetic oligonucleotide
ggtggaatactttacggagcaaccatacttggtgataaggtaaggcataatagtt

SEQ ID NO: 182358 - DNA, 55 bp, Artificial
  Synthetic oligonucleotide
ggtggaacaacaaggcattttagggatagagcaaagcgaaggccataaaattgcc

SEQ ID NO: 182359 - DNA, 55 bp, Artificial
  Synthetic oligonucleotide
ggtgcttgtcaaaactttgtggcggctactctggatttatctgccactttctggc

SEQ ID NO: 182360 - DNA, 55 bp, Artificial
  Synthetic oligonucleotide
aggaatgcgggctgacgagtagacagtaggttaaacaccactaccgaataaacga

SEQ ID NO: 182361 - DNA, 55 bp, Artificial
  Synthetic oligonucleotide
ggtgcttatcgacaacataacgtcagcatcgctcagtctgaccatttaccgccgg

SEQ ID NO: 182362 - DNA, 55 bp, Artificial
  Synthetic oligonucleotide
agcgacctgcaactctcgacctgtggagagcagagacgccactgcgtgagggtga

SEQ ID NO: 182363 - DNA, 55 bp, Artificial
  Synthetic oligonucleotide
agcgagctgagcgcgccttcccgccatttcaattcaccgttatccagccacggct

SEQ ID NO: 182364 - DNA, 53 bp, Artificial
  Synthetic oligonucleotide
ggtgcggtacggaataactggttatcgggtacagttttaccaacgatcaggta

SEQ ID NO: 182365 - DNA, 55 bp, Artificial
  Synthetic oligonucleotide
ggttgcgagcgctctcagttgctcaatatccgagtgtgacgtagcgaatttccag

SEQ ID NO: 182366 - DNA, 55 bp, Artificial
  Synthetic oligonucleotide
ggttgccttacccacgctcgatttccacactcgatgtccgcgctctattgctaaa

SEQ ID NO: 182367 - DNA, 55 bp, Artificial
  Synthetic oligonucleotide
ggttgccgactgcgtcaggatgacaactgaagtgtgagatatccgagggtacaga

SEQ ID NO: 182368 - DNA, 55 bp, Artificial
  Synthetic oligonucleotide
ggttgccagatagatgcaagagtacctcattcagcttgcgggcgactgtaaccaa

SEQ ID NO: 182369 - DNA, 55 bp, Artificial
  Synthetic oligonucleotide
ggttgcacagtactcccgggcagcaatatgtctacgatggggaaagatgtgatca

SEQ ID NO: 182370 - DNA, 53 bp, Artificial
  Synthetic oligonucleotide
agcctatttcccgtggtaattctcctacgtagtataagagggttccgatggga

SEQ ID NO: 182371 - DNA, 60 bp, Artificial
  Synthetic oligonucleotide
ggggatcagcctgtaactgaacaatatcccgttcagtatcgtagtaggctgactgtacca

SEQ ID NO: 182372 - DNA, 55 bp, Artificial
  Synthetic oligonucleotide
ggttgatcgcctccataatccgcgtcatggttgcacctgtttcatccaccaacag

SEQ ID NO: 182373 - DNA, 55 bp, Artificial
  Synthetic oligonucleotide
ggttgagtatgagtaggtgtctggcatctgacaagaggcgatgatatctgccata

SEQ ID NO: 182374 - DNA, 55 bp, Artificial
  Synthetic oligonucleotide
ggttctacaagtacgaccgcatgattattgccgtgtcgataatgatgaagcgcta

SEQ ID NO: 182375 - DNA, 55 bp, Artificial
  Synthetic oligonucleotide
ggttcaggcgacttttgccatcgctccagtgaacaatctcatgcagatccgtggc

SEQ ID NO: 182376 - DNA, 55 bp, Artificial
  Synthetic oligonucleotide
ggttcagccgtattattctgccggctgtcgctaacggattaggccgaactggtca

SEQ ID NO: 182377 - DNA, 55 bp, Artificial
  Synthetic oligonucleotide
ggttcacgctaataattcctgctgtagcagctcaatcactggctcgacctgcggt

SEQ ID NO: 182378 - DNA, 55 bp, Artificial
  Synthetic oligonucleotide
agcctgtctggcaggtagtgataaacagtcctgctcagcgctatgaccgacaggc

SEQ ID NO: 182379 - DNA, 55 bp, Artificial
  Synthetic oligonucleotide
ggttatcgcttcgcgatagggcggggagacgatgactatgacgaatcaccttggg

SEQ ID NO: 182380 - DNA, 55 bp, Artificial
  Synthetic oligonucleotide
ggttatccacctgaataacgtagatgcccgcctgttgcgcccgtttatacaagcg

SEQ ID NO: 182381 - DNA, 55 bp, Artificial
  Synthetic oligonucleotide
ggttacaccatgatggacagcttacgcacggctgcaaacagtctcgtgctcaaga

SEQ ID NO: 182382 - DNA, 59 bp, Artificial
  Synthetic oligonucleotide
aggacgaaggctaagaatcttaaggccataccgctgtcgtattttgaagctcatgcgga

SEQ ID NO: 182383 - DNA, 53 bp, Artificial
  Synthetic oligonucleotide
agcgaattcgtcgctcttcccgggtggtcgttttaagcgtattcaccgctgtt

SEQ ID NO: 182384 - DNA, 55 bp, Artificial
  Synthetic oligonucleotide
ggttaagtctgttaatcagacgattctgttcgccgcgttctgtttcgataccgcg

SEQ ID NO: 182385 - DNA, 55 bp, Artificial
  Synthetic oligonucleotide
ggttaagggtaaggcgctgttcaggcagtttgcggggtgatgagagtccctcatt

SEQ ID NO: 182386 - DNA, 55 bp, Artificial
  Synthetic oligonucleotide
ggttaaccacaaaccccgcagcggtcagccatccgttgcgtttacatgggacaga

SEQ ID NO: 182387 - DNA, 55 bp, Artificial
  Synthetic oligonucleotide
ggttaaagcagttcagccggttcaggcaagaggtgcattagagactgttcgccgc

SEQ ID NO: 182388 - DNA, 53 bp, Artificial
  Synthetic oligonucleotide
ggtctaaacggggagtgctacaaaagaccatacccgaaacgagtgcctaagtg

SEQ ID NO: 182389 - DNA, 51 bp, Artificial
  Synthetic oligonucleotide
ggtcgttctgaaaccttaacggtataaaatgaacgtccccggatgacgaaa

SEQ ID NO: 182390 - DNA, 55 bp, Artificial
  Synthetic oligonucleotide
ggtcgtgtggagatgactgcttctattggactgatggggccaacattgtgaccag

SEQ ID NO: 182391 - DNA, 55 bp, Artificial
  Synthetic oligonucleotide
ggtcggttttctgggagtaaggtagcgtgttttatggctttggcctcaggatcgc

SEQ ID NO: 182392 - DNA, 55 bp, Artificial
  Synthetic oligonucleotide
agcgctctgggtcattttcggcgaggaccgctttcgctggagcgcgacgatgatc

SEQ ID NO: 182393 - DNA, 60 bp, Artificial
  Synthetic oligonucleotide
ggggatatctctccagcgagtggtgtacgcaggggagagcatatcgcgtttcatttgcca

SEQ ID NO: 182394 - DNA, 55 bp, Artificial
  Synthetic oligonucleotide
ggtcggatcgttggagcctccagccaaggatatgtcaacagatctgattgtgttg

SEQ ID NO: 182395 - DNA, 55 bp, Artificial
  Synthetic oligonucleotide
agcggaaaaatggccccgtgaatattctacgcttgctcgcaggatacaatttcta

SEQ ID NO: 182396 - DNA, 55 bp, Artificial
  Synthetic oligonucleotide
ggtcgcgatcgtcgatttcctgaagaatccgcaggactatggccgtctcggggcg

SEQ ID NO: 182397 - DNA, 55 bp, Artificial
  Synthetic oligonucleotide
ggtcgcccggtagaagagctaagcctcgatcagcaggcactgttagtcggtatgg

SEQ ID NO: 182398 - DNA, 55 bp, Artificial
  Synthetic oligonucleotide
ggtcgcatgcgctcatacactcgccgttccccgttactgaattccaaatcgaccg

SEQ ID NO: 182399 - DNA, 55 bp, Artificial
  Synthetic oligonucleotide
ggtcgcatagcgcgttcacagaagcgcagaaatattgcaatccgcggattatcaa

SEQ ID NO: 182400 - DNA, 55 bp, Artificial
  Synthetic oligonucleotide
ggtcgcatacgttcatacacgcgacgcacgccgttgctgaactccagatccacgc

SEQ ID NO: 182401 - DNA, 55 bp, Artificial
  Synthetic oligonucleotide
agcggagctataacggtccgacgctgggctgactgagcgcatccagtgacaaccc

SEQ ID NO: 182402 - DNA, 55 bp, Artificial
  Synthetic oligonucleotide
ggtcgatagcgcccggacggaaacggtacgtagcgttaacgcactgatgaccgcg

SEQ ID NO: 182403 - DNA, 55 bp, Artificial
  Synthetic oligonucleotide
ggtcgagtcggccctttcagacgcttggttgaggcatcactgtttaccgcaacga

SEQ ID NO: 182404 - DNA, 54 bp, Artificial
  Synthetic oligonucleotide
ggggagaacgaatcgctaaataattttcgtagttgtatttcccatcgttgctac

SEQ ID NO: 182405 - DNA, 55 bp, Artificial
  Synthetic oligonucleotide
ggtcgactggggtgatgtctggaccgtcatccgcgactataaccgcacggcgctt

SEQ ID NO: 182406 - DNA, 55 bp, Artificial
  Synthetic oligonucleotide
agcggaggagttcaatctgaagaaagggcttctgctggcagtgatgtgcggtatt

SEQ ID NO: 182407 - DNA, 55 bp, Artificial
  Synthetic oligonucleotide
ggtcctcacctttgctactacgctgtgcgcatatcccacgagtgtaaagtttacg

SEQ ID NO: 182408 - DNA, 55 bp, Artificial
  Synthetic oligonucleotide
ggtcattgtgggtgcagcattgctggcaaaggtcagaaagccggaggaggtgcag

SEQ ID NO: 182409 - DNA, 55 bp, Artificial
  Synthetic oligonucleotide
ggtcatgagttaatgcgtctcggcctgtggtacagacctatttatgcacgacatc

SEQ ID NO: 182410 - DNA, 55 bp, Artificial
  Synthetic oligonucleotide
ggtcagttcgctgttcagaaactgaacatcacgctgcaggtatgtgtcaccggta

SEQ ID NO: 182411 - DNA, 55 bp, Artificial
  Synthetic oligonucleotide
ggtgcgcatagcgccgtgaaaccgaggccagtacgccgtaggttgaggccacgca

SEQ ID NO: 182412 - DNA, 54 bp, Artificial
  Synthetic oligonucleotide
ggtgccgaacatgtttctaccggggcgtcgaacgatattaaagtcgcgactaac

SEQ ID NO: 182413 - DNA, 55 bp, Artificial
  Synthetic oligonucleotide
ggtgcaggtcctagacactatagtatcaatcagatactgtcacacagagtcgaaa

SEQ ID NO: 182414 - DNA, 55 bp, Artificial
  Synthetic oligonucleotide
ggtgcacaaagaagcgtaacgacagcactgaatgacggttaacggagcgcaagcg

SEQ ID NO: 182415 - DNA, 57 bp, Artificial
  Synthetic oligonucleotide
aggacgtatatttgttttgccccgatggctatgtgagggaaattgacgggcaatatg

SEQ ID NO: 182416 - DNA, 55 bp, Artificial
  Synthetic oligonucleotide
ggtgcaaatgctcaggacgttgcagcgttttgcgtgaccgctcggggaaggcaaa

SEQ ID NO: 182417 - DNA, 55 bp, Artificial
  Synthetic oligonucleotide
ggtgattatggccaacagcggtgcaaccagtggatggtatcacgactttcttgag

SEQ ID NO: 182418 - DNA, 55 bp, Artificial
  Synthetic oligonucleotide
ggtgatcagccagtaacgccccaacaactgcactggcgttcgccccagattgcgt

SEQ ID NO: 182419 - DNA, 55 bp, Artificial
  Synthetic oligonucleotide
ggtgagttattcaggtaaggggaattatcgttacgcattgagtgagggtatgcca

SEQ ID NO: 182420 - DNA, 55 bp, Artificial
  Synthetic oligonucleotide
ggtgacgctcatcagccggacatacggaccaaaactgtccttacggcgttctgca

SEQ ID NO: 182421 - DNA, 55 bp, Artificial
  Synthetic oligonucleotide
ggtgacgaaataactaagcacttgtctcctgtttactcccctgagcttgaggggt

SEQ ID NO: 182422 - DNA, 55 bp, Artificial
  Synthetic oligonucleotide
ggtgaagcgccacgttgaccagttcctgttgataccagccgcccgccgttgcaaa

SEQ ID NO: 182423 - DNA, 55 bp, Artificial
  Synthetic oligonucleotide
ggtgaagccatataacctacgattgcacccgcagcccttccacgcttttaggtgg

SEQ ID NO: 182424 - DNA, 54 bp, Artificial
  Synthetic oligonucleotide
ggtgaaccgattcagtcggtgggtccaatagcgaaacctgttaactttgagacg

SEQ ID NO: 182425 - DNA, 55 bp, Artificial
  Synthetic oligonucleotide
ggtgaaatttaatgacgaggcacggcatgagtgaggccgttattacgctgaacgg

SEQ ID NO: 182426 - DNA, 57 bp, Artificial
  Synthetic oligonucleotide
ggggaaaatttcttctgcattgggatctacaaaacctgttattatatctgataatcg

SEQ ID NO: 182427 - DNA, 55 bp, Artificial
  Synthetic oligonucleotide
ggtcttaccgatagatgataccctgacaggggaattacgagccttcattggctca

SEQ ID NO: 182428 - DNA, 55 bp, Artificial
  Synthetic oligonucleotide
agcgccctccggtgtttatcgaacgccatgcaggcatgttaggtgcggaacattg

SEQ ID NO: 182429 - DNA, 55 bp, Artificial
  Synthetic oligonucleotide
ggtctgccacagcttgtagctgattagtccgttatccgcaccgacacaacctgtg

SEQ ID NO: 182430 - DNA, 55 bp, Artificial
  Synthetic oligonucleotide
ggtctgacagttaccaatgcttaatcagtgaggcacctatctcagcgatctgtct

SEQ ID NO: 182431 - DNA, 55 bp, Artificial
  Synthetic oligonucleotide
ggtctaccgttgatgtggcggtaatatcatgaccacccaaagtaacattaaggtc

SEQ ID NO: 182432 - DNA, 55 bp, Artificial
  Synthetic oligonucleotide
acgttcggccagtatgtcgttgtaattcggttggtgatcgctgtcccaggtatag

SEQ ID NO: 182433 - DNA, 55 bp, Artificial
  Synthetic oligonucleotide
acgttgttatgcccggtaggatggactatcgcacagtctattggcgcagaccctc

SEQ ID NO: 182434 - DNA, 55 bp, Artificial
  Synthetic oligonucleotide
acgtttattacgggaaacattcattgccgcactgcaatatatcgccaggagtcca

SEQ ID NO: 182435 - DNA, 55 bp, Artificial
  Synthetic oligonucleotide
gttttgtgcccacagctatgctggcttattcacaaaacagcgggacaagatgtgt

SEQ ID NO: 182436 - DNA, 55 bp, Artificial
  Synthetic oligonucleotide
gttttgtacatatttgccgtctggataccgcaggcgcacgactactgggataatg

SEQ ID NO: 182437 - DNA, 60 bp, Artificial
  Synthetic oligonucleotide
atgcaataagtaatatatcgttttgctatcgtgcatcgctcgcgctcagttccattgtgc

SEQ ID NO: 182438 - DNA, 60 bp, Artificial
  Synthetic oligonucleotide
aggactgggtacaactgacggagtgacacagagtgacggagctggaaagacatttgctga

SEQ ID NO: 182439 - DNA, 54 bp, Artificial
  Synthetic oligonucleotide
gttttggttggtctaccatcatggaaaccggagaaacgcgcctacggcttcgta

SEQ ID NO: 182440 - DNA, 54 bp, Artificial
  Synthetic oligonucleotide
actaaggttaactaacctgatgtttcgcggtgtgggtgggcattacggctcgtc

SEQ ID NO: 182441 - DNA, 55 bp, Artificial
  Synthetic oligonucleotide
gttttccgtcagttgcttattcagctccaaatcgcgataacgcatcacttcaagc

SEQ ID NO: 182442 - DNA, 55 bp, Artificial
  Synthetic oligonucleotide
gttttcagtctcgtgcgtcacatcctcacagacgatcttcctgagttcggatacc

SEQ ID NO: 182443 - DNA, 51 bp, Artificial
  Synthetic oligonucleotide
actacccccaacgacaaaacctgtcgagtcttcccgcaaacccgatccatt

SEQ ID NO: 182444 - DNA, 55 bp, Artificial
  Synthetic oligonucleotide
gttttagcgctgttttgaattcatcagactctatcttttcgagctcatctcggag

SEQ ID NO: 182445 - DNA, 55 bp, Artificial
  Synthetic oligonucleotide
actaccgcaggatgatttaatctgggagcaggagcgcaaagtggtaagcgcggag

SEQ ID NO: 182446 - DNA, 52 bp, Artificial
  Synthetic oligonucleotide
gtttgttgttaatggacaagttattccggataattacggtaatttcgacgcc

SEQ ID NO: 182447 - DNA, 55 bp, Artificial
  Synthetic oligonucleotide
gtttgggcgagtggtttattaatgcttagtgttatacgccatgcgaacaggagac

SEQ ID NO: 182448 - DNA, 55 bp, Artificial
  Synthetic oligonucleotide
gtttgaatattttcgcacagtcacaggctctataccaagacgctttgcaacgtct

SEQ ID NO: 182449 - DNA, 55 bp, Artificial
  Synthetic oligonucleotide
ggtaccggtattacaatccggggcagggtcggtatatcacgcaggatccgatagg

SEQ ID NO: 182450 - DNA, 55 bp, Artificial
  Synthetic oligonucleotide
actactcgcatccattacgattgatggaggagtgtaatcgttgagcacataaccc

SEQ ID NO: 182451 - DNA, 55 bp, Artificial
  Synthetic oligonucleotide
gtttcctccgctagatagcaacggccctcaagctaacccgccccagcgtctgagc

SEQ ID NO: 182452 - DNA, 55 bp, Artificial
  Synthetic oligonucleotide
gtttcatcagtattcaacacacctttcacgctgcggttaatatcgcgctggcata

SEQ ID NO: 182453 - DNA, 55 bp, Artificial
  Synthetic oligonucleotide
actcaccatcagcgcgtcttttttgagtacgcggtacatctcattactggcaggt

SEQ ID NO: 182454 - DNA, 55 bp, Artificial
  Synthetic oligonucleotide
acgtaaatacgtgtcgattttctacgttgaatcggagcctggttatgcatgaaaa

SEQ ID NO: 182455 - DNA, 55 bp, Artificial
  Synthetic oligonucleotide
taacttcctgttacgatgagttgtttcaacggcctgcagggcatattttcacgaa

SEQ ID NO: 182456 - DNA, 55 bp, Artificial
  Synthetic oligonucleotide
taactgctaaagctgttattcgagatgtaggtcgagtgttaggttatccatatgg

SEQ ID NO: 182457 - DNA, 55 bp, Artificial
  Synthetic oligonucleotide
taactctgctttattgatatgtacagcatcctcgagggtgacaaatcgcaagcga

SEQ ID NO: 182458 - DNA, 55 bp, Artificial
  Synthetic oligonucleotide
taactctgcgctccgcactctatcccattattggcgatcgcatatacgggcctgt

SEQ ID NO: 182459 - DNA, 55 bp, Artificial
  Synthetic oligonucleotide
taactacacctgctaagcgcgcaatgaataaaacccgtcaacaagagttaacccg

SEQ ID NO: 182460 - DNA, 57 bp, Artificial
  Synthetic oligonucleotide
ggtacatcacacaggatccgatagggctgaaagggggattaaatccttatacttatc

SEQ ID NO: 182461 - DNA, 55 bp, Artificial
  Synthetic oligonucleotide
taacgtagcaataacccgtttgccttccgctgaatatgctccggaacaggcgtga

SEQ ID NO: 182462 - DNA, 55 bp, Artificial
  Synthetic oligonucleotide
taacgcttatgctacatcttttcgctggcctggatttccataccggccttatgtt

SEQ ID NO: 182463 - DNA, 55 bp, Artificial
  Synthetic oligonucleotide
taacctgccattaagtaacatgtttcgcttgcatcatgcgtgtcttttgccaccc

SEQ ID NO: 182464 - DNA, 55 bp, Artificial
  Synthetic oligonucleotide
taaccggacgctattgaggttgtatgctatgagactgacatccaaaggacgttat

SEQ ID NO: 182465 - DNA, 55 bp, Artificial
  Synthetic oligonucleotide
taaccgcctgtgggatgagggcaccccgctgaatgccctgtactgaatcagcccc

SEQ ID NO: 182466 - DNA, 55 bp, Artificial
  Synthetic oligonucleotide
acgtccacgagtactgacgccaccacgacggtagatgactccttccatatcgagc

SEQ ID NO: 182467 - DNA, 55 bp, Artificial
  Synthetic oligonucleotide
taaccacgcgtccatgttctgtgactcgctgattgtgatgcagcaagggcagatt

SEQ ID NO: 182468 - DNA, 55 bp, Artificial
  Synthetic oligonucleotide
taacacgtgaatatgcacgcatggatacggaaaatatctatcttctgcctcttac

SEQ ID NO: 182469 - DNA, 54 bp, Artificial
  Synthetic oligonucleotide
taaattcacgccgggaatggtttattcctggtaaccgtcttgcctgacggtcac

SEQ ID NO: 182470 - DNA, 55 bp, Artificial
  Synthetic oligonucleotide
taaatccaatgcgctggttgaagccagttataaattgaccctacaggaacagcgt

SEQ ID NO: 182471 - DNA, 58 bp, Artificial
  Synthetic oligonucleotide
ggtaatgcgggctttgttccccaagacccgatcacgcgcattcgagccgtcaaagagc

SEQ ID NO: 182472 - DNA, 55 bp, Artificial
  Synthetic oligonucleotide
taaatagattctgggcgaatggcgagagttccttgtaaattgacacctagcatcc

SEQ ID NO: 182473 - DNA, 55 bp, Artificial
  Synthetic oligonucleotide
taaagatcatattagtcatgacacggacaagtggcctgagacgggccttatcgtt

SEQ ID NO: 182474 - DNA, 55 bp, Artificial
  Synthetic oligonucleotide
taaagaactgttacatacgttggggaatctcacattaacgcgctataactcccgc

SEQ ID NO: 182475 - DNA, 55 bp, Artificial
  Synthetic oligonucleotide
acgttatgcgccagtctgatgagttgcggccactggcagggaaagacgaaaacgt

SEQ ID NO: 182476 - DNA, 55 bp, Artificial
  Synthetic oligonucleotide
taaacctgtaagcctgcaggcacgacgttgcgacagaccggtcgcatcacacatc

SEQ ID NO: 182477 - DNA, 55 bp, Artificial
  Synthetic oligonucleotide
gttgcaaacgcggtcaccctctatcagataaacgcgcaaatcgtaggggctaccc

SEQ ID NO: 182478 - DNA, 55 bp, Artificial
  Synthetic oligonucleotide
gttgatggcgaggaatgtcaggccaaagccacgtaacatggcatcatcttgcttt

SEQ ID NO: 182479 - DNA, 55 bp, Artificial
  Synthetic oligonucleotide
gttgagtcggtaatatgatcaccggttaggatcacccgtttataaagcactaccg

SEQ ID NO: 182480 - DNA, 55 bp, Artificial
  Synthetic oligonucleotide
gttgacgcagctgaacaaacgcattttacccaacacggcaggctgtcacacggtt

SEQ ID NO: 182481 - DNA, 55 bp, Artificial
  Synthetic oligonucleotide
gttgacagcttcagctcgaacaggcagtctaacgcgccaacttaagtgcagtctt

SEQ ID NO: 182482 - DNA, 60 bp, Artificial
  Synthetic oligonucleotide
ggtaatcgacaacgaagcatcatcgcataacgtggttctaatttctgttcatgacgttct

SEQ ID NO: 182483 - DNA, 55 bp, Artificial
  Synthetic oligonucleotide
gttcttcctgcttacgcagggtctcaacatccagcttaaagcctctgcgagccag

SEQ ID NO: 182484 - DNA, 55 bp, Artificial
  Synthetic oligonucleotide
gttctgtcggctctgtccctgagttctacagcggctctggctgaaactacaccca

SEQ ID NO: 182485 - DNA, 55 bp, Artificial
  Synthetic oligonucleotide
gttctgcgcaaattggtatgacgcagtacggtttactgtccggtgcattagtcgt

SEQ ID NO: 182486 - DNA, 55 bp, Artificial
  Synthetic oligonucleotide
gttctgagcgccgcgaagtgatgggtaaagccaacatgcaggtagaagaagcgag

SEQ ID NO: 182487 - DNA, 55 bp, Artificial
  Synthetic oligonucleotide
gttctagccaggcctgtgggaacgtgtcattccccggagcaatcgaatggctgca

SEQ ID NO: 182488 - DNA, 55 bp, Artificial
  Synthetic oligonucleotide
gttcgtcccaccatgttggcggtggatgcactcaacctaatggagtcacgtcata

SEQ ID NO: 182489 - DNA, 55 bp, Artificial
  Synthetic oligonucleotide
gttcgtagtcaacatttcgttgtctcatcggcactgcgtggcgcacatattactt

SEQ ID NO: 182490 - DNA, 55 bp, Artificial
  Synthetic oligonucleotide
gttcgtaagctgtgaagacagcggcctccgtctggccggttcggattcgtacccc

SEQ ID NO: 182491 - DNA, 55 bp, Artificial
  Synthetic oligonucleotide
gttcggggtcgggtttacctgaacccaatatgtgaccggcgcattctttgcactc

SEQ ID NO: 182492 - DNA, 55 bp, Artificial
  Synthetic oligonucleotide
gttcggagtcgaccccgtatgtcgaaaattggtccggctcatctcagagcgaagc

SEQ ID NO: 182493 - DNA, 60 bp, Artificial
  Synthetic oligonucleotide
ggtaaaccggaaggaactggtcagatctctgacgcatgatatctcgcagcagtacgggcg

SEQ ID NO: 182494 - DNA, 55 bp, Artificial
  Synthetic oligonucleotide
actctatctgtttaaagagtacgggtatcagaacttcatcttcttcgtacatacc

SEQ ID NO: 182495 - DNA, 55 bp, Artificial
  Synthetic oligonucleotide
gttccgttgtccgctttgtgccgcatctgcccgtatccgcacaagtcgtccggaa

SEQ ID NO: 182496 - DNA, 54 bp, Artificial
  Synthetic oligonucleotide
actcttccgcagttaattcgatgacggttaattccttgtaatggtaacccattc

SEQ ID NO: 182497 - DNA, 55 bp, Artificial
  Synthetic oligonucleotide
actcttgttacatctctcgcacatcctgcttaccagtggccgttgccagtggcgt

SEQ ID NO: 182498 - DNA, 55 bp, Artificial
  Synthetic oligonucleotide
actctttgctaagtgagaacgtcacctctaccacagcctctagatatgaaacgct

SEQ ID NO: 182499 - DNA, 55 bp, Artificial
  Synthetic oligonucleotide
actgaatctacggactttgacgcgccctcatccggaccataaacggtcgtacgct

SEQ ID NO: 182500 - DNA, 55 bp, Artificial
  Synthetic oligonucleotide
gtttacccgtcaatatttttagggccatgatattcccatgacgtattcccacagc

SEQ ID NO: 182501 - DNA, 55 bp, Artificial
  Synthetic oligonucleotide
gtttacacgaccaaatccgctcatgcctcgaatattcacactgattgctccctga

SEQ ID NO: 182502 - DNA, 53 bp, Artificial
  Synthetic oligonucleotide
gtttacaccgggagatgcgtttgacgatttacttttaaccagtacgactcctg

SEQ ID NO: 182503 - DNA, 55 bp, Artificial
  Synthetic oligonucleotide
gtttaatggccagacactgttagcgcatcagggctatcattatgccattttcccc

SEQ ID NO: 182504 - DNA, 60 bp, Artificial
  Synthetic oligonucleotide
agctaaaatcgatatttatcactgaaggtgattgattagattcaagccttttcattgcag

SEQ ID NO: 182505 - DNA, 55 bp, Artificial
  Synthetic oligonucleotide
gttgtttaggagcgcaaggatgcgctctgagtgttttagagggatctatgactgt

SEQ ID NO: 182506 - DNA, 55 bp, Artificial
  Synthetic oligonucleotide
gttgttgctccagtgtctacgctatgagtggcggtggagtgcgaggccgttgcga

SEQ ID NO: 182507 - DNA, 55 bp, Artificial
  Synthetic oligonucleotide
gttgttcaggatacaacctgatcattagttactcagcgtagtggagacgcgtgct

SEQ ID NO: 182508 - DNA, 55 bp, Artificial
  Synthetic oligonucleotide
gttgtggtgagagtgtaagggtgcatcatgtcatctttgaatgttaagtgtgatg

SEQ ID NO: 182509 - DNA, 55 bp, Artificial
  Synthetic oligonucleotide
gttgtggcacaggaatatactgttgaacaattgaaccacggccgtaaagtctggg

SEQ ID NO: 182510 - DNA, 55 bp, Artificial
  Synthetic oligonucleotide
gttgtgagctggtcgttgggtacacgcccggatgcagaactggcgaataccatgc

SEQ ID NO: 182511 - DNA, 55 bp, Artificial
  Synthetic oligonucleotide
gttggtctacaagtgagcggcgaacagctttagattcacgagcagccactcgaag

SEQ ID NO: 182512 - DNA, 55 bp, Artificial
  Synthetic oligonucleotide
gttgggtcgtggcttcgccgccactcaccgttatcccttcgataaacagcactgc

SEQ ID NO: 182513 - DNA, 55 bp, Artificial
  Synthetic oligonucleotide
actcatacgtttcagagccgcggattgtactctgtgtcagacagcacatcagggc

SEQ ID NO: 182514 - DNA, 55 bp, Artificial
  Synthetic oligonucleotide
gttggcagtatgacgccgggacgttaatccgccacatacaggtgcagtcgcggaa

SEQ ID NO: 182515 - DNA, 54 bp, Artificial
  Synthetic oligonucleotide
ggtaaaaggtgccggtaccactctgtgggtttacaacggcaagggtgatgctta

SEQ ID NO: 182516 - DNA, 55 bp, Artificial
  Synthetic oligonucleotide
actcatctctcgttgccttgccgaatcaggtactgtaacgctacacaagcgccgt

SEQ ID NO: 182517 - DNA, 55 bp, Artificial
  Synthetic oligonucleotide
gttggatcatttgagcaagcggctatcagtgaactggttctgcgtgccggtaatg

SEQ ID NO: 182518 - DNA, 55 bp, Artificial
  Synthetic oligonucleotide
actcattaactcagtgcaaaactatgcctggggaagtaaaactgcgataacggaa

SEQ ID NO: 182519 - DNA, 54 bp, Artificial
  Synthetic oligonucleotide
actccagtcaaactcgtacatttattgacctccaatattacccggtaaacgcac

SEQ ID NO: 182520 - DNA, 55 bp, Artificial
  Synthetic oligonucleotide
gttgcggcaatttaaggacgatatgaagttactggctaactcagtgcgggcgcgc

SEQ ID NO: 182521 - DNA, 55 bp, Artificial
  Synthetic oligonucleotide
gttgcgaaagatatatcctcacgcgctgacggactcctgacaacgtcactgctga

SEQ ID NO: 182522 - DNA, 55 bp, Artificial
  Synthetic oligonucleotide
gttgcaatctgaaagccgaaatcagcgcgagtctttccgctgataagctcacttc

SEQ ID NO: 182523 - DNA, 55 bp, Artificial
  Synthetic oligonucleotide
tacggccagtaacgcacaacgatttgttaatatatgggagagggatactgataaa

SEQ ID NO: 182524 - DNA, 55 bp, Artificial
  Synthetic oligonucleotide
tacggatatcagcttgtccggctacctcaagaaagcgcaaccactccgcatcatc

SEQ ID NO: 182525 - DNA, 55 bp, Artificial
  Synthetic oligonucleotide
tacgctgaaccgtgcgcacgctcatcccggacagttcagcaagctgctcctggga

SEQ ID NO: 182526 - DNA, 60 bp, Artificial
  Synthetic oligonucleotide
agctaaatctgattgggatgtaatacatcctggcagggagtgggctgagaaatgtacagg

SEQ ID NO: 182527 - DNA, 54 bp, Artificial
  Synthetic oligonucleotide
acgcgcggcttgcctcaggcggtaagtcattccccgtaccggcctcgttataac

SEQ ID NO: 182528 - DNA, 55 bp, Artificial
  Synthetic oligonucleotide
tacgcgatgggattatacggtgatgggatttgccatgaccggcgtcgttatcccc

SEQ ID NO: 182529 - DNA, 55 bp, Artificial
  Synthetic oligonucleotide
tacgatcattgtgtagtggcaaggttcggtagtattccggatagcggacgcgctc

SEQ ID NO: 182530 - DNA, 55 bp, Artificial
  Synthetic oligonucleotide
tacgaagagctccataacgctaaagacgtaccgtttatttacccgatgctcgaaa

SEQ ID NO: 182531 - DNA, 55 bp, Artificial
  Synthetic oligonucleotide
acgcggcatcattgatctccgcataactgccagtgaataccagtgcctgtgtcac

SEQ ID NO: 182532 - DNA, 55 bp, Artificial
  Synthetic oligonucleotide
acgcggccgaaacggcctacggcgttataccgtgctgatatgtcaggccagccca

SEQ ID NO: 182533 - DNA, 55 bp, Artificial
  Synthetic oligonucleotide
tacctgttagctttagtgtgccgtctctcggggcggcaatttgagtctatttgcc

SEQ ID NO: 182534 - DNA, 55 bp, Artificial
  Synthetic oligonucleotide
tacctggaatgatgattatgactcctagtgatgaaaacgagtgtcgtcatatgct

SEQ ID NO: 182535 - DNA, 55 bp, Artificial
  Synthetic oligonucleotide
taccggcgtctggcatttgactgtacccctatcctcaaggaggactatgtcagca

SEQ ID NO: 182536 - DNA, 55 bp, Artificial
  Synthetic oligonucleotide
acgcgtcagtttgtgcccatagcgtttgccagtgtccagagcccgagttgccaat

SEQ ID NO: 182537 - DNA, 52 bp, Artificial
  Synthetic oligonucleotide
ggtaaaaccggcagcaaaccgcccggtaaaccgcccagtccgcgcctgataa

SEQ ID NO: 182538 - DNA, 55 bp, Artificial
  Synthetic oligonucleotide
taccggcacggataacaaagcggcaatagaacggcttatcgctgcatcagggact

SEQ ID NO: 182539 - DNA, 55 bp, Artificial
  Synthetic oligonucleotide
acgctactcagccagcgtttaggtgggcgcggtaagttaacctgtgggagagttc

SEQ ID NO: 182540 - DNA, 55 bp, Artificial
  Synthetic oligonucleotide
taccgatacgggatttggggcataggcggttctgttaaatttcgccagatattgg

SEQ ID NO: 182541 - DNA, 55 bp, Artificial
  Synthetic oligonucleotide
acgctgatatctacgaataactaaaacgctttattatgcagtgaacgttatcccc

SEQ ID NO: 182542 - DNA, 55 bp, Artificial
  Synthetic oligonucleotide
taccccggctcttcgcgccaggcgtacctggctaaccgtgcacttcatgcgttac

SEQ ID NO: 182543 - DNA, 55 bp, Artificial
  Synthetic oligonucleotide
taccccattcggttctatttatacccgcattggtctaagccacagggagataacc

SEQ ID NO: 182544 - DNA, 55 bp, Artificial
  Synthetic oligonucleotide
tacccattttaccagcgtatgaccgtggcctgatgggaccaacacgttgtgcagc

SEQ ID NO: 182545 - DNA, 55 bp, Artificial
  Synthetic oligonucleotide
tacccactccggaagctacgccaggttcgccataatgggtgtccagtagccacga

SEQ ID NO: 182546 - DNA, 55 bp, Artificial
  Synthetic oligonucleotide
acgcatacagttcaccattccgatcgtcacgggtattccactcttgcctaacgtt

SEQ ID NO: 182547 - DNA, 55 bp, Artificial
  Synthetic oligonucleotide
acgccaaagggcagtgtggaacaacatacccggcattacgtttatgcatcagacg

SEQ ID NO: 182548 - DNA, 57 bp, Artificial
  Synthetic oligonucleotide
gcattaaacctaaaaccggtcgcactaattcgcactgtttcgcactaaatggctgcg

SEQ ID NO: 182549 - DNA, 60 bp, Artificial
  Synthetic oligonucleotide
atgcacaaatggtgaagcagttcctgagtcgtgacccgttcgaatgcgtgctgtgtggcg

SEQ ID NO: 182550 - DNA, 55 bp, Artificial
  Synthetic oligonucleotide
gggttatttcgcccgaccagcagccctttcgccaccaggtgtccaggaagcggta

SEQ ID NO: 182551 - DNA, 55 bp, Artificial
  Synthetic oligonucleotide
tagatccgttcctgattaatactttagcggcaagtcacatgctgatgacccctgt

SEQ ID NO: 182552 - DNA, 55 bp, Artificial
  Synthetic oligonucleotide
tagagcgtaagatcatccgcctgttcgcgctgggaatgagctaccaggatatcgg

SEQ ID NO: 182553 - DNA, 55 bp, Artificial
  Synthetic oligonucleotide
tacttgctctgcctgccggcgctgcgtcgcgggctttggagcggcgcagggcaac

SEQ ID NO: 182554 - DNA, 55 bp, Artificial
  Synthetic oligonucleotide
tactgtgactcgatgcagggccgtataatgtgctgtgattacccctctatgaata

SEQ ID NO: 182555 - DNA, 55 bp, Artificial
  Synthetic oligonucleotide
tactgtacggcgttataaaagcttagcgagcaacctatcagagtcacgaagatcg

SEQ ID NO: 182556 - DNA, 55 bp, Artificial
  Synthetic oligonucleotide
tactggtttctgagatttccgttgccgtagcggcacgaacataacgccatgggtt

SEQ ID NO: 182557 - DNA, 55 bp, Artificial
  Synthetic oligonucleotide
tactggaggaagtcaccgttgcttgctcatacattgcctgtcacaacggctctct

SEQ ID NO: 182558 - DNA, 55 bp, Artificial
  Synthetic oligonucleotide
tactgccttgcgctttcgcatctgcgcctgtgggcgtatatcacgcctgtcggcg

SEQ ID NO: 182559 - DNA, 55 bp, Artificial
  Synthetic oligonucleotide
tactgagcgcgacatggagaagattactgtcacgttaggggaacgtagctacccc

SEQ ID NO: 182560 - DNA, 55 bp, Artificial
  Synthetic oligonucleotide
tactcatgccttgatagctggtttaacgataagattactaccggtggcaccgggg

SEQ ID NO: 182561 - DNA, 58 bp, Artificial
  Synthetic oligonucleotide
agctacttaccgatgctaacagcaccattgtcgactggcgaaccgaactggcgttggg

SEQ ID NO: 182562 - DNA, 55 bp, Artificial
  Synthetic oligonucleotide
tactatgagaaatggcactattctcgcggacctgatctcatgctcgccatgggtg

SEQ ID NO: 182563 - DNA, 55 bp, Artificial
  Synthetic oligonucleotide
tactaccagctcgcagggcagtttatcagcggtacggacgttgtctgcgcccgct

SEQ ID NO: 182564 - DNA, 55 bp, Artificial
  Synthetic oligonucleotide
tactaaagctatgagtcctatcccgctcaggtaggcatgcgtcctaggtatgtcc

SEQ ID NO: 182565 - DNA, 55 bp, Artificial
  Synthetic oligonucleotide
acgccgctctgcataccgtacgtccggtcctttgcgactgacgcgatcacgcaga

SEQ ID NO: 182566 - DNA, 55 bp, Artificial
  Synthetic oligonucleotide
tacgtttagccgtcatgatatgttgggatgccttggggtacgcgtatacggaagc

SEQ ID NO: 182567 - DNA, 55 bp, Artificial
  Synthetic oligonucleotide
acgccggaaggtgtgtctatcgccatcttattttcccgccatcatcgaacccgga

SEQ ID NO: 182568 - DNA, 55 bp, Artificial
  Synthetic oligonucleotide
tacgtaccaccgcgctaatcgaagccttgcagtacatgtaggaccgccaattaaa

SEQ ID NO: 182569 - DNA, 55 bp, Artificial
  Synthetic oligonucleotide
acgcctgtccacgaacgttttcacctggcgttatgttcaccgggaaatgtctctc

SEQ ID NO: 182570 - DNA, 55 bp, Artificial
  Synthetic oligonucleotide
acggctctcacgctgacgattatcccgcgacagaagatcgtgctatttgttagcg

SEQ ID NO: 182571 - DNA, 55 bp, Artificial
  Synthetic oligonucleotide
taatgcttcgccttacagcgatgacagccacgttccgcaatataatccgttggga

SEQ ID NO: 182572 - DNA, 58 bp, Artificial
  Synthetic oligonucleotide
gggtggagcaccaggacaagggacggcttgagcttaattttgtcattccgaacatgga

SEQ ID NO: 182573 - DNA, 55 bp, Artificial
  Synthetic oligonucleotide
acgggctttgtgttatctataactcgaaaatgtggtcactgcgtggacatgcgtc

SEQ ID NO: 182574 - DNA, 55 bp, Artificial
  Synthetic oligonucleotide
taatgaataactggcatgttgtactaaaaatcgatgttttgctttgacaatcacc

SEQ ID NO: 182575 - DNA, 55 bp, Artificial
  Synthetic oligonucleotide
taatcttgcggccatatattgatagtctggtgtttcttgcgagattagatcagcc

SEQ ID NO: 182576 - DNA, 55 bp, Artificial
  Synthetic oligonucleotide
taatataaaagagattcacagaaccagtaagatcgttagtcaattttgcaataca

SEQ ID NO: 182577 - DNA, 55 bp, Artificial
  Synthetic oligonucleotide
acgggtagatatagggttcgatgatgacatctttctgccgctggcgtggaagcac

SEQ ID NO: 182578 - DNA, 55 bp, Artificial
  Synthetic oligonucleotide
taagtggctcacagccgggacgtcggaggagggtcaatggcgagcaacggaggaa

SEQ ID NO: 182579 - DNA, 55 bp, Artificial
  Synthetic oligonucleotide
taagtctgttctttgtcagaatccagattcagcaccgttacggtagcaccgaaaa

SEQ ID NO: 182580 - DNA, 55 bp, Artificial
  Synthetic oligonucleotide
acgggtttccagtgatataccccgtatctctgcgaggctgcaagtttaatgtttt

SEQ ID NO: 182581 - DNA, 55 bp, Artificial
  Synthetic oligonucleotide
taaggcgggcacattctcgcggggttaaacggcgcgggctccttgccatatttac

SEQ ID NO: 182582 - DNA, 55 bp, Artificial
  Synthetic oligonucleotide
taaggccaatcggtcatggtaatgcagtcaaccaggttcgcggggctgtagtcgc

SEQ ID NO: 182583 - DNA, 53 bp, Artificial
  Synthetic oligonucleotide
gggtgccgtgcgacattgtttaacgaccacggttgtgggtatccggtgtttgg

SEQ ID NO: 182584 - DNA, 55 bp, Artificial
  Synthetic oligonucleotide
acggtcgtaagtgatgctgataacccgggcattgacgctaccgatacaccattac

SEQ ID NO: 182585 - DNA, 53 bp, Artificial
  Synthetic oligonucleotide
taagcttccgggagtgccttttccgccaaacggattaacagtaccaatcggga

SEQ ID NO: 182586 - DNA, 55 bp, Artificial
  Synthetic oligonucleotide
acggtctgttttggattgctaactatcccggattctgcgcgttttatttagtcac

SEQ ID NO: 182587 - DNA, 55 bp, Artificial
  Synthetic oligonucleotide
acggtgagcacgtcgtcgatggcgtttcccgccagagtaatgcccttctcctgcg

SEQ ID NO: 182588 - DNA, 55 bp, Artificial
  Synthetic oligonucleotide
acggtggatgagctgtttccctgctaaccagttagtgacctctcccacgcaagag

SEQ ID NO: 182589 - DNA, 55 bp, Artificial
  Synthetic oligonucleotide
acggtgtacggtgtcagcatatttaatcttgctgcttcggtagaaagaacgacaa

SEQ ID NO: 182590 - DNA, 55 bp, Artificial
  Synthetic oligonucleotide
taccatcgccgaggctcttaccgagcgcttcgaaagacaggttgccggactgcgc

SEQ ID NO: 182591 - DNA, 55 bp, Artificial
  Synthetic oligonucleotide
taccagtcagtcgtgaacccctgccagttgatcccgaaacgggatgagttaaagg

SEQ ID NO: 182592 - DNA, 55 bp, Artificial
  Synthetic oligonucleotide
acggaaggatctgaggttcttatggctcttgtatctatcagtgaagcatcaagac

SEQ ID NO: 182593 - DNA, 55 bp, Artificial
  Synthetic oligonucleotide
taccacttgactggattggcagaaagtagcattcgttcgccattggatcaggcgt

SEQ ID NO: 182594 - DNA, 60 bp, Artificial
  Synthetic oligonucleotide
gggtgcacataagctgatttatcgatcacgaattctagattcccgtctacgagcacacat

SEQ ID NO: 182595 - DNA, 53 bp, Artificial
  Synthetic oligonucleotide
acggaattcggggattcgcgcgtaggcgattaagccactcgagaggtttaggt

SEQ ID NO: 182596 - DNA, 55 bp, Artificial
  Synthetic oligonucleotide
taccaacggtgtggtaaatgctatcagccctcccaataaacctaaccagcgattg

SEQ ID NO: 182597 - DNA, 55 bp, Artificial
  Synthetic oligonucleotide
tacattgcgacatagaacgtggaatcattcatcgtagccacattttcactgacag

SEQ ID NO: 182598 - DNA, 54 bp, Artificial
  Synthetic oligonucleotide
tacattaaattccccacgtaagttatagcgacagagtccgttataaccgtagcg

SEQ ID NO: 182599 - DNA, 55 bp, Artificial
  Synthetic oligonucleotide
acggacacatgcgggccggggtgtcagctccgcgctgatcgaggcttgccgccat

SEQ ID NO: 182600 - DNA, 55 bp, Artificial
  Synthetic oligonucleotide
tacatattcataactgggctactggcaaatctgtccatctggtggtatacgcagg

SEQ ID NO: 182601 - DNA, 55 bp, Artificial
  Synthetic oligonucleotide
tacagttctctatcgagaatggtgctaaaggtccgtctgcagcaaacgtaactgc

SEQ ID NO: 182602 - DNA, 55 bp, Artificial
  Synthetic oligonucleotide
acggacagtctcccggaataacaccctgaggataatcaaaacgtcatgacgcgta

SEQ ID NO: 182603 - DNA, 55 bp, Artificial
  Synthetic oligonucleotide
tacaggctaaagttaagtcgccaggctagactttagttccacaacactaaaccta

SEQ ID NO: 182604 - DNA, 55 bp, Artificial
  Synthetic oligonucleotide
acggagtgctccggtgcccatgcgccctccagacgtggcacctgagacggtttca

SEQ ID NO: 182605 - DNA, 58 bp, Artificial
  Synthetic oligonucleotide
agctcgaagcgtctgtagacagggaactgaacttaaacgggcagaaaatcagagacgc

SEQ ID NO: 182606 - DNA, 55 bp, Artificial
  Synthetic oligonucleotide
acggattgccagcgatgcccattggtgtccagtcaatgcctgtctgcgtatagat

SEQ ID NO: 182607 - DNA, 55 bp, Artificial
  Synthetic oligonucleotide
tacacttccacgcaatactactcctttaaatcgtgctcgccttaaggcttaacgc

SEQ ID NO: 182608 - DNA, 55 bp, Artificial
  Synthetic oligonucleotide
acggcatcgacataatgcctgtgtataccgccttattccgtcgacataaccacaa

SEQ ID NO: 182609 - DNA, 55 bp, Artificial
  Synthetic oligonucleotide
tacaccgggtctggctaacggataatttccgatcataaaggagtgttgaaatggc

SEQ ID NO: 182610 - DNA, 55 bp, Artificial
  Synthetic oligonucleotide
tacaaatcatatcgacggttgggttacctgccggattcatccagtaaacgatagt

SEQ ID NO: 182611 - DNA, 55 bp, Artificial
  Synthetic oligonucleotide
tacaaagttacccacagattccgtgtataagcaggggactaacatgtgaggcaaa

SEQ ID NO: 182612 - DNA, 55 bp, Artificial
  Synthetic oligonucleotide
gtgcatctttaccataagtattaggttctgctctaaaacaggcacttaatgctgt

SEQ ID NO: 182613 - DNA, 55 bp, Artificial
  Synthetic oligonucleotide
agaactgtgcatgaggctggttctgctggatataccgtgcaagaagcgcgcgccc

SEQ ID NO: 182614 - DNA, 55 bp, Artificial
  Synthetic oligonucleotide
gtgcaatgggcgcaagagaaacgcttacatgttgaacgcgatcaggttggcaaca

SEQ ID NO: 182615 - DNA, 55 bp, Artificial
  Synthetic oligonucleotide
agaagaatttagcgtgttctgtggcccatatctgagagccggcggggtcaatcgc

SEQ ID NO: 182616 - DNA, 60 bp, Artificial
  Synthetic oligonucleotide
agctcgaggcggcctttgtcctgatgctcaacccacagacaggcgtactggtctttgtcg

SEQ ID NO: 182617 - DNA, 55 bp, Artificial
  Synthetic oligonucleotide
agaagagatcccacgcaaagcgttctagttggcgaaagtttcctggccaaggagc

SEQ ID NO: 182618 - DNA, 55 bp, Artificial
  Synthetic oligonucleotide
gtgattcaatctccaactctgacaactacatgactggccgttctactggcctggc

SEQ ID NO: 182619 - DNA, 55 bp, Artificial
  Synthetic oligonucleotide
agaaggccagacgggctgtgacgccagtacgcgtagttccagacatgccgccgtg

SEQ ID NO: 182620 - DNA, 55 bp, Artificial
  Synthetic oligonucleotide
gtgatgaaaagaacgggcgcttcggatttggtcttcgggccagcaaaagtcgttc

SEQ ID NO: 182621 - DNA, 55 bp, Artificial
  Synthetic oligonucleotide
gtgatcgctgaagagttgaatgcgcaatctattgagcaggtggtatacgcctgga

SEQ ID NO: 182622 - DNA, 55 bp, Artificial
  Synthetic oligonucleotide
gtgatatggaatatatcgcgatgatcgtctgcaattgccacatctcgagctggtg

SEQ ID NO: 182623 - DNA, 55 bp, Artificial
  Synthetic oligonucleotide
gtgagtgccagccaaagtttcagcggtctgtgagaaacgccttcgggtgactgcc

SEQ ID NO: 182624 - DNA, 55 bp, Artificial
  Synthetic oligonucleotide
gtgagtgagtcggtttacccggattgccaggcaccttacaggggcttcgctggtc

SEQ ID NO: 182625 - DNA, 53 bp, Artificial
  Synthetic oligonucleotide
agaataatgcaaactttgttacaacaaaccgccaaccggactaccacggccca

SEQ ID NO: 182626 - DNA, 55 bp, Artificial
  Synthetic oligonucleotide
gtgaggactaccacggcgggtattgggaatattgtaccttatccaatggtggcgc

SEQ ID NO: 182627 - DNA, 57 bp, Artificial
  Synthetic oligonucleotide
gggtctgtgatccggcccgtttgttcattgccgtgaacccagtattgaggtcattaa

SEQ ID NO: 182628 - DNA, 55 bp, Artificial
  Synthetic oligonucleotide
agaatgcggccgacccagctctgcgtaagagacggtcgggcgacaaggactgtga

SEQ ID NO: 182629 - DNA, 54 bp, Artificial
  Synthetic oligonucleotide
agaatttaaaagcttcgacgattttcggaaggctgtatgggaagaggtgtcgaa

SEQ ID NO: 182630 - DNA, 55 bp, Artificial
  Synthetic oligonucleotide
gtgaccgccgttagcctcaacatggcggcgaatggcattgacagaacctttacgg

SEQ ID NO: 182631 - DNA, 55 bp, Artificial
  Synthetic oligonucleotide
gtgacagttcggcgaaaccacgagaaaactcttgttgttacaagagcgcccttgt

SEQ ID NO: 182632 - DNA, 55 bp, Artificial
  Synthetic oligonucleotide
gtgacagcctgcggggccgcatcggtgtctcactggataaggaaacgacctggag

SEQ ID NO: 182633 - DNA, 55 bp, Artificial
  Synthetic oligonucleotide
gtgacaacccagaggattcagcctctgcggtcgatacgccccactccgcgtggtt

SEQ ID NO: 182634 - DNA, 55 bp, Artificial
  Synthetic oligonucleotide
agaaattacgtcatcagacgtcgctgatccatgactttacgttgttttacacccc

SEQ ID NO: 182635 - DNA, 55 bp, Artificial
  Synthetic oligonucleotide
gtgctcggatggggaatgaaaacaatgctcgacaggaactacaacgccacagcgg

SEQ ID NO: 182636 - DNA, 55 bp, Artificial
  Synthetic oligonucleotide
gtgctcgctggattatcgcttcgtctctgaccgagccggtaagctgcgctgtacg

SEQ ID NO: 182637 - DNA, 55 bp, Artificial
  Synthetic oligonucleotide
gtgctattatgtcaagctctaatgatcagcaaactcgagcagatattgcatgtgg

SEQ ID NO: 182638 - DNA, 60 bp, Artificial
  Synthetic oligonucleotide
agctcgcagcctggatgcggcagacgtgcctggacgagaagccggcacgcgcctgcaaac

SEQ ID NO: 182639 - DNA, 55 bp, Artificial
  Synthetic oligonucleotide
gtgctacctgccgcaatcgcggcttccatatcgtcgctcatacccagagataggg

SEQ ID NO: 182640 - DNA, 55 bp, Artificial
  Synthetic oligonucleotide
gtgctaacgcacttgctattttatacgcaacgggttgccgtccggacgaactcca

SEQ ID NO: 182641 - DNA, 55 bp, Artificial
  Synthetic oligonucleotide
gtgctaacagatggctggttttgagtttacggatatctgccgtgccaatatgcgg

SEQ ID NO: 182642 - DNA, 55 bp, Artificial
  Synthetic oligonucleotide
gtgcgtcaaatgccttaagattgcgagcaacggattgcacactaccgaaaaccac

SEQ ID NO: 182643 - DNA, 55 bp, Artificial
  Synthetic oligonucleotide
gtgcgagagatcagcatcgcccacaagccccgcttttatgaacggcagacggcgg

SEQ ID NO: 182644 - DNA, 54 bp, Artificial
  Synthetic oligonucleotide
gtgcctgggacaacggcgtaacgaccaataactatattcagttcgagaaaaccc

SEQ ID NO: 182645 - DNA, 55 bp, Artificial
  Synthetic oligonucleotide
gtgcctgatgcacacacatcgtagtgcctgatgcacacacatgacagtgccggat

SEQ ID NO: 182646 - DNA, 55 bp, Artificial
  Synthetic oligonucleotide
gtgcctaaaacagacgcaactatccacctctgattaactgtgctcgaacctctgg

SEQ ID NO: 182647 - DNA, 51 bp, Artificial
  Synthetic oligonucleotide
gtgccgctcagtataggtaatccggtcgtaaaacgcacccctttcccgggg

SEQ ID NO: 182648 - DNA, 55 bp, Artificial
  Synthetic oligonucleotide
agaaccgctcctgcgtgggcgaatcggcggcgcgtacgttacgccacctggctat

SEQ ID NO: 182649 - DNA, 55 bp, Artificial
  Synthetic oligonucleotide
agctctcattattttaaacccttacgtttgtagtcaacagaggaataagacgatc

SEQ ID NO: 182650 - DNA, 55 bp, Artificial
  Synthetic oligonucleotide
gtgccataaatatgaacgttaccatctgctactaattctgctcctgcgctcacat

SEQ ID NO: 182651 - DNA, 55 bp, Artificial
  Synthetic oligonucleotide
gtgccagtttataactgtgtggcatacctcgcggaactacttgattcattacgta

SEQ ID NO: 182652 - DNA, 55 bp, Artificial
  Synthetic oligonucleotide
gtgccaggcaccataacgccatgcccaatcagcgtggtcgcctgtagggactgac

SEQ ID NO: 182653 - DNA, 55 bp, Artificial
  Synthetic oligonucleotide
gtgccagcggcatcccgtacctttctactgcatccactatattcagtgttgtccg

SEQ ID NO: 182654 - DNA, 55 bp, Artificial
  Synthetic oligonucleotide
agaacggctgacacagcagatccagcgacaggagcagagtcgtagtcggggtttc

SEQ ID NO: 182655 - DNA, 55 bp, Artificial
  Synthetic oligonucleotide
gtctcccatgtctagagttcctatattcgtgagagcaatgcagcgcggagcattg

SEQ ID NO: 182656 - DNA, 55 bp, Artificial
  Synthetic oligonucleotide
gtctaatgaggggacttgtgagctaaaagtatccccttgagatcctgtgttccta

SEQ ID NO: 182657 - DNA, 55 bp, Artificial
  Synthetic oligonucleotide
agactctaccaccagagtagcgatctcgtctgtaggcatatctcactgcactgga

SEQ ID NO: 182658 - DNA, 55 bp, Artificial
  Synthetic oligonucleotide
gtcgttcatcgctatcccctactaagctatggcgcgaagattacatgatgttgca

SEQ ID NO: 182659 - DNA, 55 bp, Artificial
  Synthetic oligonucleotide
gtcgtggctactggacacccattatggcgaacctggcgtagcttccggagtgggt

SEQ ID NO: 182660 - DNA, 60 bp, Artificial
  Synthetic oligonucleotide
gcacaactgcttagcgcgttaagtgagttcgctacgcttaaccctggcgatgcgatctta

SEQ ID NO: 182661 - DNA, 60 bp, Artificial
  Synthetic oligonucleotide
gggtcgaaagatgaagatcgatatgcggatagcagcgacgaaagtccgcgagctgcgaga

SEQ ID NO: 182662 - DNA, 55 bp, Artificial
  Synthetic oligonucleotide
gtcgtgcgtggcttcagtattcattcgctacagctacaggtacgtgtaaattagg

SEQ ID NO: 182663 - DNA, 55 bp, Artificial
  Synthetic oligonucleotide
gtcgtgcgtgacagtgtgacgtactattcttatgcttatgctaaaagtgtacttg

SEQ ID NO: 182664 - DNA, 55 bp, Artificial
  Synthetic oligonucleotide
gtcgtgagatctgcacggttaagccgaccttcccacagtaggcgaaaatcgatga

SEQ ID NO: 182665 - DNA, 55 bp, Artificial
  Synthetic oligonucleotide
gtcgtagataaatgcagtactaaaggatgtgcgattgatatcggtacggtgattg

SEQ ID NO: 182666 - DNA, 55 bp, Artificial
  Synthetic oligonucleotide
gtcggttcatagccggtggtcgcgtctgacaaaacaggcccctacagtgtaagga

SEQ ID NO: 182667 - DNA, 55 bp, Artificial
  Synthetic oligonucleotide
gtcggtgctatgggatctatctccacgcataaccgtcccagcttcccacaagtgg

SEQ ID NO: 182668 - DNA, 55 bp, Artificial
  Synthetic oligonucleotide
gtcggtgagcgcctaattgatgccgcgtcgcttagtgattatcgtcgccagacgg

SEQ ID NO: 182669 - DNA, 55 bp, Artificial
  Synthetic oligonucleotide
gtcggtcatttgtataaggcaccggaaacgttgcagaagttttatcgcgagaacg

SEQ ID NO: 182670 - DNA, 55 bp, Artificial
  Synthetic oligonucleotide
gtcggggttgtagttaagccgattactgagatttgcccaggagtagctcttaccc

SEQ ID NO: 182671 - DNA, 55 bp, Artificial
  Synthetic oligonucleotide
gtcggccaccatcagcaaagagcttatgagcgcctcactttctgagtatcgccca

SEQ ID NO: 182672 - DNA, 60 bp, Artificial
  Synthetic oligonucleotide
gggtagaaatggtcgcacacatttagttagtcctattatggcagcattagctgctttata

SEQ ID NO: 182673 - DNA, 55 bp, Artificial
  Synthetic oligonucleotide
gtcggattaaaataagggccgacaataaacatttgacagtgtgtgactgtcggac

SEQ ID NO: 182674 - DNA, 55 bp, Artificial
  Synthetic oligonucleotide
gtcggacggcaactggactagagatattcatgcccctgcagcttccgcggagaat

SEQ ID NO: 182675 - DNA, 55 bp, Artificial
  Synthetic oligonucleotide
agagacgggaggcaagtatgcctgaacagggggagccgttaggtttatctgcggc

SEQ ID NO: 182676 - DNA, 55 bp, Artificial
  Synthetic oligonucleotide
gtcgctggaatatctgatcctgacatttatcgccgtgaacggtagtcgcctgtgg

SEQ ID NO: 182677 - DNA, 55 bp, Artificial
  Synthetic oligonucleotide
gtcgctgaccagacggtagcaggcgtcttccctttcccatccgacacgtcaccgg

SEQ ID NO: 182678 - DNA, 55 bp, Artificial
  Synthetic oligonucleotide
gtcgcgtagaagaggacgtgataaatcagggatggatcacactacaagaggccgg

SEQ ID NO: 182679 - DNA, 55 bp, Artificial
  Synthetic oligonucleotide
agacaaacgctaatttcagactatgccgcgaggtaatagcgacgaactcgtatag

SEQ ID NO: 182680 - DNA, 55 bp, Artificial
  Synthetic oligonucleotide
gtgaagcacaggcgagtcatctcgttattaaaactggcggagaatgtgattcgac

SEQ ID NO: 182681 - DNA, 55 bp, Artificial
  Synthetic oligonucleotide
gtgaaccttgcgggtgttcatcacataactgtacagggcatcattcagcggagtc

SEQ ID NO: 182682 - DNA, 55 bp, Artificial
  Synthetic oligonucleotide
gtgaacattattaggtgtgctctcgtaatccgttcttattctttccgcgatactg

SEQ ID NO: 182683 - DNA, 60 bp, Artificial
  Synthetic oligonucleotide
ggggttatatgtcgatatctatgcagcaaatagattcatgtattgaaacgaccatcaatc

SEQ ID NO: 182684 - DNA, 55 bp, Artificial
  Synthetic oligonucleotide
gtgaaaatgcatgcccgggtgagaaggcgtggagtgtgcctaacgttaagtgtcc

SEQ ID NO: 182685 - DNA, 55 bp, Artificial
  Synthetic oligonucleotide
gtcttgtggttgaaaactgagcgctatggctatgacctaggagtgggagtgaaaa

SEQ ID NO: 182686 - DNA, 55 bp, Artificial
  Synthetic oligonucleotide
gtcttgatcaggcgtctcttttgagtgtatcggagtcgcgttcggaacaggtggc

SEQ ID NO: 182687 - DNA, 55 bp, Artificial
  Synthetic oligonucleotide
gtcttcaaacttcaggacgtggaccaacggataactagcagccgcctcagtgtcg

SEQ ID NO: 182688 - DNA, 55 bp, Artificial
  Synthetic oligonucleotide
gtctgtgtcgcaccttgtgagcattttacgatcggcgtattataaccgaccggag

SEQ ID NO: 182689 - DNA, 55 bp, Artificial
  Synthetic oligonucleotide
gtctgtcttcatgcgtgagcatgttcaggtaggtgtgcgccagttcgttactcag

SEQ ID NO: 182690 - DNA, 55 bp, Artificial
  Synthetic oligonucleotide
agacagtaggttaaacaccactaccgaataaacgatgacatcagtccggcgctgc

SEQ ID NO: 182691 - DNA, 54 bp, Artificial
  Synthetic oligonucleotide
agaccctttgacaattgccgttgcgagcgatttaacgacttttgttcacgtagg

SEQ ID NO: 182692 - DNA, 55 bp, Artificial
  Synthetic oligonucleotide
gtctggttagggccttcggcccaagaatggcaataggtacaacggagattgcata

SEQ ID NO: 182693 - DNA, 55 bp, Artificial
  Synthetic oligonucleotide
gtctggtcgtcgtataccgagattattgatgtccggcagcgctatcccaacaccg

SEQ ID NO: 182694 - DNA, 54 bp, Artificial
  Synthetic oligonucleotide
ggggtgagcttcattagctcccaaagcgccaaaagtttcggcgaaccgagtacc

SEQ ID NO: 182695 - DNA, 55 bp, Artificial
  Synthetic oligonucleotide
gtctggccataacgttctccagtcagaataaatcagcacagtctgccagacacag

SEQ ID NO: 182696 - DNA, 55 bp, Artificial
  Synthetic oligonucleotide
gtctgctcactcaaaagcggtgatactgttatccacacaatcaggggataacgcc

SEQ ID NO: 182697 - DNA, 54 bp, Artificial
  Synthetic oligonucleotide
gtctgcctactgaccccactttcaagcggtttgctacccgggaactcgttcctc

SEQ ID NO: 182698 - DNA, 55 bp, Artificial
  Synthetic oligonucleotide
gtctgagaactatagtctggacatatgagccacaaatagacattagcattgagcc

SEQ ID NO: 182699 - DNA, 55 bp, Artificial
  Synthetic oligonucleotide
gtctgacatgcggccaatacccagatcgatctcgcctgatttcagacccgcaagc

SEQ ID NO: 182700 - DNA, 55 bp, Artificial
  Synthetic oligonucleotide
gtctcccgaagggacaacgataaagcagcggttgtctagccaactccgcggcgaa

SEQ ID NO: 182701 - DNA, 55 bp, Artificial
  Synthetic oligonucleotide
gttagacagcggatgggaaatataataatgcacggtgtttgcacaagaaaggagc

SEQ ID NO: 182702 - DNA, 55 bp, Artificial
  Synthetic oligonucleotide
actgccaatagcctcgtagcctgaaagaggaagcccatgtggcggtaactccgtt

SEQ ID NO: 182703 - DNA, 54 bp, Artificial
  Synthetic oligonucleotide
gttacgtgcgctggcggacgctcctttaatacccggcgcggtttcgacgatttc

SEQ ID NO: 182704 - DNA, 55 bp, Artificial
  Synthetic oligonucleotide
gttaccggggattgtccctgtgaacgctgtgcttggcggtgctatctgctacgcc

SEQ ID NO: 182705 - DNA, 57 bp, Artificial
  Synthetic oligonucleotide
ggggtgaacattccactaagccaaagtgtgagaatccagcctggttccgtcccgaca

SEQ ID NO: 182706 - DNA, 55 bp, Artificial
  Synthetic oligonucleotide
gttaccatcgtagcaacgtaccgaactccagtaagcacaaattcacctggctgac

SEQ ID NO: 182707 - DNA, 55 bp, Artificial
  Synthetic oligonucleotide
gttaattcgcaaaagaaggtactcgatgtctggagtatctataaatgcacacact

SEQ ID NO: 182708 - DNA, 52 bp, Artificial
  Synthetic oligonucleotide
gttaactacgtcaggtggcacttttcggggaaatgtgcgcggaacccctatt

SEQ ID NO: 182709 - DNA, 55 bp, Artificial
  Synthetic oligonucleotide
gttaacgtcacacctagtttatgctaactgtcaataacacagcaaacgctattac

SEQ ID NO: 182710 - DNA, 55 bp, Artificial
  Synthetic oligonucleotide
gttaacccttcaaacggaaaattcatcagccctggtctttcatcgccagtagtga

SEQ ID NO: 182711 - DNA, 54 bp, Artificial
  Synthetic oligonucleotide
gttaaaatttttccggggctcaattcaagcgacacgtcagagaggacgcggcgt

SEQ ID NO: 182712 - DNA, 54 bp, Artificial
  Synthetic oligonucleotide
gtgttggtcgctaaatcccgtcgttttaggttacacgtcatagcggtctatccc

SEQ ID NO: 182713 - DNA, 54 bp, Artificial
  Synthetic oligonucleotide
gtgtggtggaatccgtaacggtatggagacccggcttaccctccgcccagcgtg

SEQ ID NO: 182714 - DNA, 55 bp, Artificial
  Synthetic oligonucleotide
gtgtggtcagctggttagctgagtgctatccaacctgtctgtcaccatctgattg

SEQ ID NO: 182715 - DNA, 55 bp, Artificial
  Synthetic oligonucleotide
actggatgaactgctaccttaccgtcagtaggtggactgaaaactccctgtcata

SEQ ID NO: 182716 - DNA, 52 bp, Artificial
  Synthetic oligonucleotide
ggggtcggggttctaaccccgcgatataagtctggtgaatttgtggttgtac

SEQ ID NO: 182717 - DNA, 55 bp, Artificial
  Synthetic oligonucleotide
actggatgctgatacagggtattctggcctgctctgcaagaatccgaaccacggt

SEQ ID NO: 182718 - DNA, 55 bp, Artificial
  Synthetic oligonucleotide
gtgtgcgtatcagccacatactgtgcgaaagtttccggcgtgaagttcctgtgcg

SEQ ID NO: 182719 - DNA, 55 bp, Artificial
  Synthetic oligonucleotide
gtgtgccgtttgtcaccacatgacggataaccactctaacgccattgtcaaaccg

SEQ ID NO: 182720 - DNA, 55 bp, Artificial
  Synthetic oligonucleotide
actgggtcagatagagctattcagccgctcgaccaaagtgacgcgttcggctaac

SEQ ID NO: 182721 - DNA, 55 bp, Artificial
  Synthetic oligonucleotide
gtgtctggacgtaatgcagctctggcgcagattacagccctaatacaccagttgg

SEQ ID NO: 182722 - DNA, 55 bp, Artificial
  Synthetic oligonucleotide
actgaccaacaaagtacgaggaagcagctcccttatggggcgaatcacgctggat

SEQ ID NO: 182723 - DNA, 55 bp, Artificial
  Synthetic oligonucleotide
actgaccaacgttgtcagcaactaggcgagtaaatacagccgggagtgattcagg

SEQ ID NO: 182724 - DNA, 55 bp, Artificial
  Synthetic oligonucleotide
gttcactcggctagttatagcctgttcgatgggcaagaatatgatccacccaagg

SEQ ID NO: 182725 - DNA, 55 bp, Artificial
  Synthetic oligonucleotide
gttcaccttctcgcgatctcgccattaggtcgaggagttgcagtaactcacggtg

SEQ ID NO: 182726 - DNA, 55 bp, Artificial
  Synthetic oligonucleotide
gttcacagtggtctcagagataaagattttccctgcggcgaagcaacgcagggga

SEQ ID NO: 182727 - DNA, 55 bp, Artificial
  Synthetic oligonucleotide
ggggtatctactggtggtgtaccacgcttgaaggaatgcgggatttaattaaatc

SEQ ID NO: 182728 - DNA, 55 bp, Artificial
  Synthetic oligonucleotide
gttattgttatgccaataatcattataccaggtgacacgcatccgcttcccagcg

SEQ ID NO: 182729 - DNA, 55 bp, Artificial
  Synthetic oligonucleotide
gttattcgccaccatgtggaatactggcatacgtataggagaagccagaacactg

SEQ ID NO: 182730 - DNA, 55 bp, Artificial
  Synthetic oligonucleotide
gttatggcggccgcggcggtgcttaagcagagtgaaacgcaaaagcagctgctta

SEQ ID NO: 182731 - DNA, 55 bp, Artificial
  Synthetic oligonucleotide
gttatgcggtcgctacccgtttaaatcctgcggcgctccgctggcctgttgtgcc

SEQ ID NO: 182732 - DNA, 55 bp, Artificial
  Synthetic oligonucleotide
actgactcgtcaccacacgactggtgtgggccatatcgcctatcgcgccagctct

SEQ ID NO: 182733 - DNA, 55 bp, Artificial
  Synthetic oligonucleotide
actgataaccattgatcgggagaggacccttaatttcttacaaggattttggcac

SEQ ID NO: 182734 - DNA, 55 bp, Artificial
  Synthetic oligonucleotide
actgataagaaaagagtgaacgaaccggaaatccatcgccaacccagtgcggtcg

SEQ ID NO: 182735 - DNA, 55 bp, Artificial
  Synthetic oligonucleotide
gttatccagtgtaaagcgcatagagtttctcccggttcagtcattcaggtgagtg

SEQ ID NO: 182736 - DNA, 55 bp, Artificial
  Synthetic oligonucleotide
gttatccagacatctgctccaggctgattctcaagagccttacgtgcagttccgc

SEQ ID NO: 182737 - DNA, 55 bp, Artificial
  Synthetic oligonucleotide
gttatcactctgccgtaccatcgccaacccgtagcttcccatatgttcccgcgcc

SEQ ID NO: 182738 - DNA, 60 bp, Artificial
  Synthetic oligonucleotide
gctcgggcaaactcacgcatagcagcctgagtcaccgaagtcccggttcccagcataata

SEQ ID NO: 182739 - DNA, 55 bp, Artificial
  Synthetic oligonucleotide
gttagtggttgcatagctcaccaggcgtatttgttcgaattcaagattaaagagc

SEQ ID NO: 182740 - DNA, 55 bp, Artificial
  Synthetic oligonucleotide
actgatgaactcggcaaattacagaccggcgttatcaccagcggaaccttctccc

SEQ ID NO: 182741 - DNA, 55 bp, Artificial
  Synthetic oligonucleotide
gttaggcttcccagcagaaacgttaaagggcagagagtggttagctccctgccct

SEQ ID NO: 182742 - DNA, 55 bp, Artificial
  Synthetic oligonucleotide
gttagcaagcccggcaatcataggcccgaaacggaaagacttcgttaggcggaga

SEQ ID NO: 182743 - DNA, 55 bp, Artificial
  Synthetic oligonucleotide
actgcagtggtattaaaccagctgggtcaggcattaattcctgtaaacgggccag

SEQ ID NO: 182744 - DNA, 55 bp, Artificial
  Synthetic oligonucleotide
gtgggcgctattacgttctgaagacagtgcgttattgctcggaaccagcgtactg

SEQ ID NO: 182745 - DNA, 55 bp, Artificial
  Synthetic oligonucleotide
actttccgcaacgagacctgtggcgcgggtgattgcacaccagcaggcaaccgac

SEQ ID NO: 182746 - DNA, 55 bp, Artificial
  Synthetic oligonucleotide
gtggcttccaccgtgtggagcgctcctacggcagctttcagcgtgccttgaacct

SEQ ID NO: 182747 - DNA, 55 bp, Artificial
  Synthetic oligonucleotide
actttggcgaagatttcccaccttgcgtttactcaaggcaataatgccgtcgagg

SEQ ID NO: 182748 - DNA, 55 bp, Artificial
  Synthetic oligonucleotide
gtggctacgcgctgaaattctagtgaaccgctttcgtggacttgagtgaaccaac

SEQ ID NO: 182749 - DNA, 59 bp, Artificial
  Synthetic oligonucleotide
ataaattagacatccaacctcacaaagaggaatacttaaatcatcttggtatatgtatc

SEQ ID NO: 182750 - DNA, 55 bp, Artificial
  Synthetic oligonucleotide
gtggctaacattaggcggggtggcgctgggtatgtcgctactaccggggcaagca

SEQ ID NO: 182751 - DNA, 55 bp, Artificial
  Synthetic oligonucleotide
gtggcgttcgtcgccataaacgaagtcgtgaacctgatacatgaaggcgatctct

SEQ ID NO: 182752 - DNA, 55 bp, Artificial
  Synthetic oligonucleotide
gtggccagctaagcgcggttgaccctcagaactggcggccacaaagcaaggtcac

SEQ ID NO: 182753 - DNA, 55 bp, Artificial
  Synthetic oligonucleotide
gtggccacggaaggtgcggaatttattacccagccgtacatcaaccgtcgcgcca

SEQ ID NO: 182754 - DNA, 55 bp, Artificial
  Synthetic oligonucleotide
gtggcactctaggtcaacatgacagtcgtaataattgtcaaaaccaaaccggacc

SEQ ID NO: 182755 - DNA, 55 bp, Artificial
  Synthetic oligonucleotide
gtggcaatgacgtgagtggaatactgacgcgctggcgacagttaggcagacgata

SEQ ID NO: 182756 - DNA, 55 bp, Artificial
  Synthetic oligonucleotide
gtggatgataaatcctgatatcgctgactggaacgctcgataatttctacatccc

SEQ ID NO: 182757 - DNA, 55 bp, Artificial
  Synthetic oligonucleotide
gtggataaatctgacgacaactctctgatttcagaagagaagaccgagttacccc

SEQ ID NO: 182758 - DNA, 55 bp, Artificial
  Synthetic oligonucleotide
gtggagcaagtagacgctaacgctcactcacatgatgcctcagcaaagaaagtcc

SEQ ID NO: 182759 - DNA, 55 bp, Artificial
  Synthetic oligonucleotide
gtggactcacgctatggcgaggacgttcgccggatcagtctgatgggacagcatg

SEQ ID NO: 182760 - DNA, 60 bp, Artificial
  Synthetic oligonucleotide
gctccgctgtctctagtggcaagccgtctatttgctggacattaaacacagtgaacgttt

SEQ ID NO: 182761 - DNA, 55 bp, Artificial
  Synthetic oligonucleotide
gtggaatggttaatgaccaatcatccacacgactgtcccgtatgtgaagaagggg

SEQ ID NO: 182762 - DNA, 55 bp, Artificial
  Synthetic oligonucleotide
gtggaagtagcgaacctgcgtccgaatccctggaataccaactccgttggggcgc

SEQ ID NO: 182763 - DNA, 55 bp, Artificial
  Synthetic oligonucleotide
agaaatcagggtacaggaagagacattgcggaaactgaacgcgaagacatggggc

SEQ ID NO: 182764 - DNA, 55 bp, Artificial
  Synthetic oligonucleotide
agaaatcttcgtgcgggttgtctcgctgtagcgggctctggagagcgactcgggg

SEQ ID NO: 182765 - DNA, 55 bp, Artificial
  Synthetic oligonucleotide
gtgctgtagtgatgggaccttatattcatattactgaaggtactaaggttcgatg

SEQ ID NO: 182766 - DNA, 55 bp, Artificial
  Synthetic oligonucleotide
gtgctgcctcagattcaggttatgccgctcaattcgctgcgtatatcgcttgctg

SEQ ID NO: 182767 - DNA, 55 bp, Artificial
  Synthetic oligonucleotide
gtgtcctacgcaaaatctcctgaacacttacccaccctcagaaataactttcacg

SEQ ID NO: 182768 - DNA, 55 bp, Artificial
  Synthetic oligonucleotide
actggtgagtactcaaccaagtcattctgagaatagtgtatgcggcgaccgagtt

SEQ ID NO: 182769 - DNA, 55 bp, Artificial
  Synthetic oligonucleotide
gtgtccagtgggcacggatggtgtcttacgacatgcttaccttaatcgttcccag

SEQ ID NO: 182770 - DNA, 55 bp, Artificial
  Synthetic oligonucleotide
gtgtcaggtgactggcgcacacttcggacagaactcatgtatggaatcagacagt

SEQ ID NO: 182771 - DNA, 60 bp, Artificial
  Synthetic oligonucleotide
atgcactggttgaggccagctataaattgactcttcaggaacagcgattcttgttacttt

SEQ ID NO: 182772 - DNA, 59 bp, Artificial
  Synthetic oligonucleotide
gctccagtttattcgtgcaaattctgataaaatagcttcaaaatcagatactttacgaa

SEQ ID NO: 182773 - DNA, 55 bp, Artificial
  Synthetic oligonucleotide
gtgtcaccgagaatggttagtgtgtccgggcgcttcagatggactgtcagggatg

SEQ ID NO: 182774 - DNA, 55 bp, Artificial
  Synthetic oligonucleotide
gtgtatcggtagcgtcaatgcccgggttatcagcatcacttacgaccgtttgttg

SEQ ID NO: 182775 - DNA, 55 bp, Artificial
  Synthetic oligonucleotide
gtgtaggcaaacgtttacctggcgtttctcaggagcttagcgagggtctggagtg

SEQ ID NO: 182776 - DNA, 55 bp, Artificial
  Synthetic oligonucleotide
gtgtagaagggcttggtatgtaacctgaactctggattggttacatatttgtagg

SEQ ID NO: 182777 - DNA, 55 bp, Artificial
  Synthetic oligonucleotide
gtgtactgagctgcatattattgcccgcctgcagtaaaccgccacggttattcag

SEQ ID NO: 182778 - DNA, 55 bp, Artificial
  Synthetic oligonucleotide
gtgtactacgaggaactccctctcgataataggaaggaagaacaaatacgcttga

SEQ ID NO: 182779 - DNA, 55 bp, Artificial
  Synthetic oligonucleotide
gtgtacgtaaggtttactggggatatgcgccgaacgagagcctgagtaacgacga

SEQ ID NO: 182780 - DNA, 55 bp, Artificial
  Synthetic oligonucleotide
gtggtttaattatgggctcttttattttccacgcaatatacggcctgcaagcagg

SEQ ID NO: 182781 - DNA, 52 bp, Artificial
  Synthetic oligonucleotide
gtggttctcaccaaccggacggcagttagggaccgtttctttaccactggac

SEQ ID NO: 182782 - DNA, 55 bp, Artificial
  Synthetic oligonucleotide
gtggtgtgtgaagccggtacacagcgtgtggtgggattctatgccctcgcgtcgg

SEQ ID NO: 182783 - DNA, 60 bp, Artificial
  Synthetic oligonucleotide
gctattcagagcggcaatcggatcccggggattgcacgtaatagcgcctatgcctccttt

SEQ ID NO: 182784 - DNA, 55 bp, Artificial
  Synthetic oligonucleotide
gtggtcgtattgtgtccggagaacgagtagcacccgatccgtcacacctcatgcg

SEQ ID NO: 182785 - DNA, 55 bp, Artificial
  Synthetic oligonucleotide
acttacgaaccttcacctccactgaacggatcgcacgatagcctttcagcaccga

SEQ ID NO: 182786 - DNA, 55 bp, Artificial
  Synthetic oligonucleotide
acttacgcccagagtcgaggtggacaatgttcatcagcgacggacgacggatgtc

SEQ ID NO: 182787 - DNA, 55 bp, Artificial
  Synthetic oligonucleotide
acttacgtcaacctagtccaagcacggaacactgccaggaggttcgatccagagg

SEQ ID NO: 182788 - DNA, 55 bp, Artificial
  Synthetic oligonucleotide
acttcactctccgctataatgggtgttccctgttctaagagacatccattgtggc

SEQ ID NO: 182789 - DNA, 53 bp, Artificial
  Synthetic oligonucleotide
gtggggattacgtctggcgaacaaacctcaagctgggacaggggaaataccgt

SEQ ID NO: 182790 - DNA, 54 bp, Artificial
  Synthetic oligonucleotide
acttccggaattcccctcgtttcctgttaacctgaacaggcggcaactgtatgc

SEQ ID NO: 182791 - DNA, 55 bp, Artificial
  Synthetic oligonucleotide
cgatatgcggatagcagcgacgaaagtccgcgagctgcgagaataaaacaccggt

SEQ ID NO: 182792 - DNA, 55 bp, Artificial
  Synthetic oligonucleotide
ctaccggtgagttagatcacaccttactggcgggagtggattatcagcgttcgcg

SEQ ID NO: 182793 - DNA, 55 bp, Artificial
  Synthetic oligonucleotide
catttcagttgcgtgaagaagcgcaccacatcacaggactcaccatcgtaggccc

SEQ ID NO: 182794 - DNA, 60 bp, Artificial
  Synthetic oligonucleotide
gctatgttgatcgtgtattctgggatgatacaacgcctgaagcagtacagacggcaggtg

SEQ ID NO: 182795 - DNA, 55 bp, Artificial
  Synthetic oligonucleotide
ctacgattttgggcgctactagactgctcaactacatcgtttaagacattaacaa

SEQ ID NO: 182796 - DNA, 55 bp, Artificial
  Synthetic oligonucleotide
catttcattagccgtacgcgggatgtgaattttgaccaggtccttataggcgtaa

SEQ ID NO: 182797 - DNA, 55 bp, Artificial
  Synthetic oligonucleotide
ctacgccattaccgggtatagcttcgattggtaacctcaaacgcctcgactgacc

SEQ ID NO: 182798 - DNA, 55 bp, Artificial
  Synthetic oligonucleotide
ctacgccgcattacgtcaattaataaggcttgggagttaattcgagagcttaacg

SEQ ID NO: 182799 - DNA, 55 bp, Artificial
  Synthetic oligonucleotide
cgatacgggagggcttaccatctggccccagtgctgcaatgataccgcgagaccc

SEQ ID NO: 182800 - DNA, 55 bp, Artificial
  Synthetic oligonucleotide
cgatacacgtaaacactgatggggtaataatttctgtttggaacgaacaaatgag

SEQ ID NO: 182801 - DNA, 55 bp, Artificial
  Synthetic oligonucleotide
cagatgtgaggtgaccggatatgcaaccgtaagatcccataaactgacgccgccc

SEQ ID NO: 182802 - DNA, 55 bp, Artificial
  Synthetic oligonucleotide
cagatcgatatttgttgttaagtgtgctctggaaaatttggtgattgtaggactg

SEQ ID NO: 182803 - DNA, 55 bp, Artificial
  Synthetic oligonucleotide
ctacggtatgtgttcagatccgctgtataccaaagaccaggaggcactcaaggcg

SEQ ID NO: 182804 - DNA, 55 bp, Artificial
  Synthetic oligonucleotide
ctacggtgacccagcagagcttttacatcactggacttcggtttaaccagcgcga

SEQ ID NO: 182805 - DNA, 60 bp, Artificial
  Synthetic oligonucleotide
gctatgctgttacgtgcctgttatcgcatgaatccagaccgtattttaatgaccgaagtc

SEQ ID NO: 182806 - DNA, 55 bp, Artificial
  Synthetic oligonucleotide
cgataaagttaaggcggcgtctgatatccgaggcgtcgtttacagactaccttgc

SEQ ID NO: 182807 - DNA, 55 bp, Artificial
  Synthetic oligonucleotide
ctacgttgctacagcctgaaatgttccgagcattattctcgttagtccgccagaa

SEQ ID NO: 182808 - DNA, 55 bp, Artificial
  Synthetic oligonucleotide
ctactcaagtttagacgatcgaccaagtggcataggatcgcctttaattaaaaga

SEQ ID NO: 182809 - DNA, 55 bp, Artificial
  Synthetic oligonucleotide
cagatagccgggatgcctgaatcgccccacattccaaaccaatcgcattaagcat

SEQ ID NO: 182810 - DNA, 55 bp, Artificial
  Synthetic oligonucleotide
cgagtaaaatgcgcgctagccgcccttctggcgtgttgtggggagtcgcggtaag

SEQ ID NO: 182811 - DNA, 55 bp, Artificial
  Synthetic oligonucleotide
ctagcggcacgattcatataaatatgtcgtgactgagtgtcttttattccccaag

SEQ ID NO: 182812 - DNA, 55 bp, Artificial
  Synthetic oligonucleotide
cgagtaaaccaacgacctgtttcatcgcttatcataacaaaagattgctgtgcag

SEQ ID NO: 182813 - DNA, 55 bp, Artificial
  Synthetic oligonucleotide
cgagtaactgccgtattttcaatggtatcacggttcagcgtacctcagcgccgtc

SEQ ID NO: 182814 - DNA, 55 bp, Artificial
  Synthetic oligonucleotide
cgagtaagatcgcatcgccagggttaagcgtagcgaactcacttaacgcgctaag

SEQ ID NO: 182815 - DNA, 55 bp, Artificial
  Synthetic oligonucleotide
cagatcagagtagcaaggtctattacgcggtgaagtggaagctcctcagactgcc

SEQ ID NO: 182816 - DNA, 55 bp, Artificial
  Synthetic oligonucleotide
gctatagtcctatgaagtcccttgacccttctgatttttgataaaaaaggcctgt

SEQ ID NO: 182817 - DNA, 55 bp, Artificial
  Synthetic oligonucleotide
cgagtccttgcgacacaagggctggagccgtgcactgtataatgcgtcgggtgtg

SEQ ID NO: 182818 - DNA, 54 bp, Artificial
  Synthetic oligonucleotide
ctagatataccaataactgcacgtcgggtagttacttttcgtcccggacataaa

SEQ ID NO: 182819 - DNA, 55 bp, Artificial
  Synthetic oligonucleotide
cgagtcttctagcaaagccgtcaacctcacggttgtcgcctgcataggggcgcat

SEQ ID NO: 182820 - DNA, 55 bp, Artificial
  Synthetic oligonucleotide
ctagaatcatccgaaacgatagtagaccctgtggttaaaactgcacttgattgtg

SEQ ID NO: 182821 - DNA, 55 bp, Artificial
  Synthetic oligonucleotide
cgagtggcaagagctattgactggaaagtcaccccacacgaactgcgtcctgatc

SEQ ID NO: 182822 - DNA, 55 bp, Artificial
  Synthetic oligonucleotide
cgagttacagcgtgaactccacgtaatctcagaatatcgtgtggagattccggtc

SEQ ID NO: 182823 - DNA, 55 bp, Artificial
  Synthetic oligonucleotide
ctagaaggacagtatttggtatctgcgctctgctgaagccagttaccttcggaaa

SEQ ID NO: 182824 - DNA, 54 bp, Artificial
  Synthetic oligonucleotide
ctactgtttgtcggttttagttaaccagcaggttgtcttaacgataatgtagcc

SEQ ID NO: 182825 - DNA, 55 bp, Artificial
  Synthetic oligonucleotide
ctactggtttaactctctcacgccactcttagttgatttcaatcgacctgtcaga

SEQ ID NO: 182826 - DNA, 55 bp, Artificial
  Synthetic oligonucleotide
catttccacaaaccggtggttatctatatcagaaaggcatgatcttctcaccaga

SEQ ID NO: 182827 - DNA, 60 bp, Artificial
  Synthetic oligonucleotide
gctatacgcgcgctgcatagtggttgagtttctcgggcacatatgaattgtgaacccgcg

SEQ ID NO: 182828 - DNA, 55 bp, Artificial
  Synthetic oligonucleotide
cagcaaccgccgatttaaagcaatcgcaagcgaagtttgaacaatcaactacagc

SEQ ID NO: 182829 - DNA, 55 bp, Artificial
  Synthetic oligonucleotide
cgatgcaagcgtatgtgcgccaatctcgttttacctgctgtaccgcattaccagc

SEQ ID NO: 182830 - DNA, 55 bp, Artificial
  Synthetic oligonucleotide
ctaatctcttcatggatatagtcactttcccctatcatatctcccggatagcgga

SEQ ID NO: 182831 - DNA, 55 bp, Artificial
  Synthetic oligonucleotide
ctaatgacgatgcatttctgaaccagatgttattgtggtctttgataatgatccc

SEQ ID NO: 182832 - DNA, 55 bp, Artificial
  Synthetic oligonucleotide
ctaatggaaccatcttcattacggggttgcccgtaaaagaccatatcgctgtcac

SEQ ID NO: 182833 - DNA, 55 bp, Artificial
  Synthetic oligonucleotide
cattgcgaaatacacgcatagaaaattctcgccagaagggttttccgctgtacag

SEQ ID NO: 182834 - DNA, 55 bp, Artificial
  Synthetic oligonucleotide
cgatcttcaacacaatgcaggattcccaagttgtggtcctgtcatctctgctcga

SEQ ID NO: 182835 - DNA, 55 bp, Artificial
  Synthetic oligonucleotide
cgatctgggcaggattaacttctcgtgcatcctggaaggcacatcgcgctttgcg

SEQ ID NO: 182836 - DNA, 55 bp, Artificial
  Synthetic oligonucleotide
ctaatggtacggtcagctatagcggaacatatagcgacaatcgttacacccagac

SEQ ID NO: 182837 - DNA, 55 bp, Artificial
  Synthetic oligonucleotide
cgatctggatttcgtaccgcatgaagcacgtcaggtcagcggaatggaatacacg

SEQ ID NO: 182838 - DNA, 56 bp, Artificial
  Synthetic oligonucleotide
ataacggaagccgcctgttgggctcacgcccgccgtaaaatccacgatgtgcacgt

SEQ ID NO: 182839 - DNA, 55 bp, Artificial
  Synthetic oligonucleotide
ctacacagcatcatcgctgtcagtcttctggctggatgtactgaatacacgctcg

SEQ ID NO: 182840 - DNA, 55 bp, Artificial
  Synthetic oligonucleotide
cgatcgtatgggcgatactcagaaagtgaggtgctcataagctctttgctgatgg

SEQ ID NO: 182841 - DNA, 55 bp, Artificial
  Synthetic oligonucleotide
ctacacgcgtagtatctatgccttctactaatgtatttgatcgacaagattctac

SEQ ID NO: 182842 - DNA, 55 bp, Artificial
  Synthetic oligonucleotide
cgatcgcttgcgtactgaaggacacgaagcccgtcaccctggtttctggcagcgc

SEQ ID NO: 182843 - DNA, 55 bp, Artificial
  Synthetic oligonucleotide
cgatcgaaatgctgcgagtcggatcagacgtcgtggatgtcggaccggccgccag

SEQ ID NO: 182844 - DNA, 55 bp, Artificial
  Synthetic oligonucleotide
cgatccgaaacgtacctttatgagtatcagcggtgcgcagatccgcgaaaacccg

SEQ ID NO: 182845 - DNA, 55 bp, Artificial
  Synthetic oligonucleotide
ctaccgccctttcgtgtggcctcctgatgttctgagggtgcagaaatccctccgg

SEQ ID NO: 182846 - DNA, 55 bp, Artificial
  Synthetic oligonucleotide
ctaccgccatattacgggtgacttatgcgaagctcggctaaacaagaagaactag

SEQ ID NO: 182847 - DNA, 55 bp, Artificial
  Synthetic oligonucleotide
ctaccatgtgaattctggtcgtccgttgaaacgaaattgccatacagtagccgac

SEQ ID NO: 182848 - DNA, 55 bp, Artificial
  Synthetic oligonucleotide
ctaccatatcggcagcgggaaataaatctgttactcgaggtacgagaactttagc

SEQ ID NO: 182849 - DNA, 56 bp, Artificial
  Synthetic oligonucleotide
ataactacaaggtcatggttttgtagtgcttatataaccaagacaaatcttagtta

SEQ ID NO: 182850 - DNA, 55 bp, Artificial
  Synthetic oligonucleotide
cattgtcggcatacttacgggcgtcgtcgtcctggttgctccttgggtcgccacg

SEQ ID NO: 182851 - DNA, 55 bp, Artificial
  Synthetic oligonucleotide
ctaccagtgcgctcagacggtcgttagttgggtcgacacgtaaggttcagagata

SEQ ID NO: 182852 - DNA, 55 bp, Artificial
  Synthetic oligonucleotide
cagatgttattagccatcggagtttcacgtgtccggctactaaccaataaccccg

SEQ ID NO: 182853 - DNA, 55 bp, Artificial
  Synthetic oligonucleotide
cgatattcaccacgggccttatgagtaattaacgctcatcccattcgtctgccgc

SEQ ID NO: 182854 - DNA, 55 bp, Artificial
  Synthetic oligonucleotide
cgatattctgctggcgccgtttactccctccaatacggctcgtaccggcgggact

SEQ ID NO: 182855 - DNA, 55 bp, Artificial
  Synthetic oligonucleotide
cgatcacttaccgttttgtattttgcgtaaggctcagtaaaaggcgtgttcagtc

SEQ ID NO: 182856 - DNA, 55 bp, Artificial
  Synthetic oligonucleotide
cgatccatcgcgacggtatccacttttatcgcgtcatagccttcattcactgcaa

SEQ ID NO: 182857 - DNA, 55 bp, Artificial
  Synthetic oligonucleotide
cagattctgtcgccgtgaactgacatgcatccgctcagtgctcgaccgactgagg

SEQ ID NO: 182858 - DNA, 55 bp, Artificial
  Synthetic oligonucleotide
cagattgattttcattcatccagtcgtagtcatccatattacctgacccggaagc

SEQ ID NO: 182859 - DNA, 55 bp, Artificial
  Synthetic oligonucleotide
cgatcccggtactcgtgctgaaaatatctctgtagcgcactattgtaagatggca

SEQ ID NO: 182860 - DNA, 57 bp, Artificial
  Synthetic oligonucleotide
ataagcaattataaggggatgattatgcctgtaacgaagtgtgaaccagaaactacc

SEQ ID NO: 182861 - DNA, 55 bp, Artificial
  Synthetic oligonucleotide
cagattgctattgtgtgcgcgcgtcgaaggaccgttaatattctcaggttaatcc

SEQ ID NO: 182862 - DNA, 55 bp, Artificial
  Synthetic oligonucleotide
ctacatcatgcaattcctggtcgtaggcataattcatcagtctgcggaatgtccc

SEQ ID NO: 182863 - DNA, 55 bp, Artificial
  Synthetic oligonucleotide
cagcaaaggtctagcagaatttacagatacccacaactcaaaggaaaaggactag

SEQ ID NO: 182864 - DNA, 55 bp, Artificial
  Synthetic oligonucleotide
cagagatccttgaagagctagtcctatagctattccggcagcacctatcactgct

SEQ ID NO: 182865 - DNA, 55 bp, Artificial
  Synthetic oligonucleotide
cgagaccaggctaacgactaatgcaccggacagtaaaccgtactgcgtcatacca

SEQ ID NO: 182866 - DNA, 55 bp, Artificial
  Synthetic oligonucleotide
cgagaagtaagattaccatctggaggctccattgttatagacactaccgaagctc

SEQ ID NO: 182867 - DNA, 55 bp, Artificial
  Synthetic oligonucleotide
cgagaaagtgtgcgccgggccttttgtctcttcataacgccctgcaatgacccgc

SEQ ID NO: 182868 - DNA, 53 bp, Artificial
  Synthetic oligonucleotide
ccaaacctccccattttgccccgttcgacggctggaacgtgcgaaactgatcg

SEQ ID NO: 182869 - DNA, 55 bp, Artificial
  Synthetic oligonucleotide
ctattacgtcgaatgcttttcctttcgagttgacacacgatatggaggttgccct

SEQ ID NO: 182870 - DNA, 51 bp, Artificial
  Synthetic oligonucleotide
ctattccgggtatggccgttgccgttatctaccagggaaaaccctattatt

SEQ ID NO: 182871 - DNA, 60 bp, Artificial
  Synthetic oligonucleotide
ataagcctgagtggcggcctgtagcgcattgacataactgttaaacgccgacagccccca

SEQ ID NO: 182872 - DNA, 55 bp, Artificial
  Synthetic oligonucleotide
ccaaacgctcaggctatgtacgataaactggaaggcttagggatagcgcaccaac

SEQ ID NO: 182873 - DNA, 55 bp, Artificial
  Synthetic oligonucleotide
ctatttcgcgcagctgtgtgagcataatctacgtggcttaacctctcttccgtcg

SEQ ID NO: 182874 - DNA, 55 bp, Artificial
  Synthetic oligonucleotide
cagactccagaattcgtgagcggtgtttactttcaggaatatgtagcatgggtgt

SEQ ID NO: 182875 - DNA, 55 bp, Artificial
  Synthetic oligonucleotide
ctcaaaagcgctccgcctttgttgtcgcgccagttcagggtaaaatagcgttttc

SEQ ID NO: 182876 - DNA, 55 bp, Artificial
  Synthetic oligonucleotide
cgagaaaacgcggagcggagaaagggatgtatagccttgcttcgactattgcagg

SEQ ID NO: 182877 - DNA, 55 bp, Artificial
  Synthetic oligonucleotide
cgactttctttaactccgccgatataccggtaagaacatacaggcaccattgctc

SEQ ID NO: 182878 - DNA, 55 bp, Artificial
  Synthetic oligonucleotide
cgacttcgagcaaacctgcaattaataaaacgatccaggacatatcaggctccag

SEQ ID NO: 182879 - DNA, 55 bp, Artificial
  Synthetic oligonucleotide
ctcaaagtcggcaggaaacagggtataaataccatcgggctgaggccttttgctg

SEQ ID NO: 182880 - DNA, 55 bp, Artificial
  Synthetic oligonucleotide
ctcaaataggccgtattgtcgctacctgaatccgcgtctgagccatggttttccg

SEQ ID NO: 182881 - DNA, 55 bp, Artificial
  Synthetic oligonucleotide
cgactcaaccgcgccagtcctggtacggttcctttcaccaataacgtatgtgtta

SEQ ID NO: 182882 - DNA, 60 bp, Artificial
  Synthetic oligonucleotide
atgcagcacaggaaggacgtgttaaagctggcagggaatacgggcatgatgttactgggg

SEQ ID NO: 182883 - DNA, 56 bp, Artificial
  Synthetic oligonucleotide
ataagcctgtgtatccgatacagggataataaaatcactaggaaacccttgaagtc

SEQ ID NO: 182884 - DNA, 55 bp, Artificial
  Synthetic oligonucleotide
cgactcactagtgggcagatcttcgaatgcatcgcgcgcaccgtacgtctcgagg

SEQ ID NO: 182885 - DNA, 54 bp, Artificial
  Synthetic oligonucleotide
ctcaccgactcctcaaccgacgcgaattgcgagtaacctttcaccttacccggc

SEQ ID NO: 182886 - DNA, 55 bp, Artificial
  Synthetic oligonucleotide
cgactccttacttagtgccgagcgacgacctgctgcatgctatctgtacggccgc

SEQ ID NO: 182887 - DNA, 55 bp, Artificial
  Synthetic oligonucleotide
ctcaccatcaataagcttatagtttcctccgtgtatacctaccccacacttagcc

SEQ ID NO: 182888 - DNA, 55 bp, Artificial
  Synthetic oligonucleotide
ctcaccacatctcggtatacgaaattgttggcgaggaggggctactgcatgaaaa

SEQ ID NO: 182889 - DNA, 55 bp, Artificial
  Synthetic oligonucleotide
ctcaccaaagacagtgcgtaagagcctccgttcacgttccggttccctggtgctt

SEQ ID NO: 182890 - DNA, 55 bp, Artificial
  Synthetic oligonucleotide
ctcacatcaagtgctctcgatacggctgctaaattcagtagttgctcggcattcg

SEQ ID NO: 182891 - DNA, 55 bp, Artificial
  Synthetic oligonucleotide
ccaaagtagcgctcgacataatattgacccaccgacaggactgaggtcatcagca

SEQ ID NO: 182892 - DNA, 55 bp, Artificial
  Synthetic oligonucleotide
ctcaatgttcgattcacacccgttgcttacaagcatcgctaatgttgctgaaggg

SEQ ID NO: 182893 - DNA, 55 bp, Artificial
  Synthetic oligonucleotide
cagacgcaccgataacgatccctttccaacgtagctcaccctgcagttgttcgcc

SEQ ID NO: 182894 - DNA, 60 bp, Artificial
  Synthetic oligonucleotide
gctactgacctgaaatctattacgccaggcattcaagcatcgtttcctgaataaccatag

SEQ ID NO: 182895 - DNA, 55 bp, Artificial
  Synthetic oligonucleotide
cgactgagttgcagtgcggattctccataaaatgcccctcattccctacaatctg

SEQ ID NO: 182896 - DNA, 55 bp, Artificial
  Synthetic oligonucleotide
cgactggtggcggcatggtgacaatctctatctggataatctggagacgacgggg

SEQ ID NO: 182897 - DNA, 52 bp, Artificial
  Synthetic oligonucleotide
ctcaataccgcgccaaccgttaacgtaatttgtgacaccaacgccgggttat

SEQ ID NO: 182898 - DNA, 55 bp, Artificial
  Synthetic oligonucleotide
ccaaagatttcagtcgcacgcataaacatgtaagtgctgttaatgctggtaccag

SEQ ID NO: 182899 - DNA, 55 bp, Artificial
  Synthetic oligonucleotide
ctcaacctggcggaaactaaactaagagagagctctatgaaccctgagcgttccg

SEQ ID NO: 182900 - DNA, 55 bp, Artificial
  Synthetic oligonucleotide
ctcaacctaagtcaacctgattcaatctacatcaacttactgatgcgggtacaac

SEQ ID NO: 182901 - DNA, 55 bp, Artificial
  Synthetic oligonucleotide
ctatccgttgttcgcgtgtcagttcacgcggtaatgcgatctcaatttcacggta

SEQ ID NO: 182902 - DNA, 55 bp, Artificial
  Synthetic oligonucleotide
ccaaaaggttgtattaacgttcatacttcgttattacctagatggagaggtgcta

SEQ ID NO: 182903 - DNA, 55 bp, Artificial
  Synthetic oligonucleotide
ccaaaacggccggagttgaaatcgcggactgcttctgcgatctcttgtttcgtgt

SEQ ID NO: 182904 - DNA, 55 bp, Artificial
  Synthetic oligonucleotide
cgaggaagcggaaaagagactggtttgacactgagcactgacgctctgaggcctc

SEQ ID NO: 182905 - DNA, 60 bp, Artificial
  Synthetic oligonucleotide
gctacgcaccgaagttctgctgagccgctttcgtggactcgagtgaaccagctgcttagc

SEQ ID NO: 182906 - DNA, 55 bp, Artificial
  Synthetic oligonucleotide
cgaggacgctacaacgattgcccggcgataactggcgtgtcaccagctactccgg

SEQ ID NO: 182907 - DNA, 55 bp, Artificial
  Synthetic oligonucleotide
ctatcccttgccattccgactgattgccatgagtacatcaagaaccgtatgacac

SEQ ID NO: 182908 - DNA, 52 bp, Artificial
  Synthetic oligonucleotide
cagagggcggggagtaaaaccggacaacatgaggatggattaaaccccggta

SEQ ID NO: 182909 - DNA, 55 bp, Artificial
  Synthetic oligonucleotide
ctatagtccttatgacaatgtcaaagcgcaggactatccgcacctgctggtgacg

SEQ ID NO: 182910 - DNA, 55 bp, Artificial
  Synthetic oligonucleotide
cagaggtgtgttcacgatagtgcagccactatatcccacaacggaacccgaggag

SEQ ID NO: 182911 - DNA, 55 bp, Artificial
  Synthetic oligonucleotide
cattttcgctgcccactctctgttgagcctctattacgtgagcaggcgtttggtg

SEQ ID NO: 182912 - DNA, 55 bp, Artificial
  Synthetic oligonucleotide
cgagggcttacgtagcgccagcctgaataaactacttacctgctgtatgagcata

SEQ ID NO: 182913 - DNA, 55 bp, Artificial
  Synthetic oligonucleotide
ctataatgacacctaggtacccaagtagtttatgcctgacctgctgacctatgcc

SEQ ID NO: 182914 - DNA, 55 bp, Artificial
  Synthetic oligonucleotide
cgaggtcagaaagtaccgtcgctcaccgacgaaagataaaactgaatcaggctag

SEQ ID NO: 182915 - DNA, 55 bp, Artificial
  Synthetic oligonucleotide
cagataaacctatctataaaacagcggctggaacgcttactaccgaacaagtaag

SEQ ID NO: 182916 - DNA, 58 bp, Artificial
  Synthetic oligonucleotide
gctaatcctactatagagatttcacttacagttaacgccccagaacgacaaatgatta

SEQ ID NO: 182917 - DNA, 53 bp, Artificial
  Synthetic oligonucleotide
catttctcctggttcaaataaagttttaggtcttggtttgtctccaatttgac

SEQ ID NO: 182918 - DNA, 55 bp, Artificial
  Synthetic oligonucleotide
cagatagactgtgagcgggttttaccgattccgaagatcgacgttaaggcgatta

SEQ ID NO: 182919 - DNA, 55 bp, Artificial
  Synthetic oligonucleotide
ctatgtggcgcggtattatcccgtgttgacgccgggcaagagcaactcggtcgcc

SEQ ID NO: 182920 - DNA, 55 bp, Artificial
  Synthetic oligonucleotide
ctatggtgttgggatcctcagctattacggaccttactgggcgctgccttctgca

SEQ ID NO: 182921 - DNA, 55 bp, Artificial
  Synthetic oligonucleotide
ctatggagattgccgagcaaccagctgttattacctacgtgccagaactgaatgc

SEQ ID NO: 182922 - DNA, 55 bp, Artificial
  Synthetic oligonucleotide
cgagacggctatcgtttcaaaacaacccagccttgtacattcaagcagccccgaa

SEQ ID NO: 182923 - DNA, 55 bp, Artificial
  Synthetic oligonucleotide
ctatggaactgttagaacgatttcccaacgcgccgcattaccctcaggcagacgg

SEQ ID NO: 182924 - DNA, 55 bp, Artificial
  Synthetic oligonucleotide
ctatgctgatggggaccttgcaacctttcctgattattacgggaaccgcttgggc

SEQ ID NO: 182925 - DNA, 55 bp, Artificial
  Synthetic oligonucleotide
ccaaacagggcatagttcatgttataggtccagaacagggtctgacattacccgg

SEQ ID NO: 182926 - DNA, 55 bp, Artificial
  Synthetic oligonucleotide
cgagcaccggcgggaaaagtaaatcggtgcaaatagaggtccgcaagaaacgcac

SEQ ID NO: 182927 - DNA, 52 bp, Artificial
  Synthetic oligonucleotide
ataataaggttgggacaaccagaccgacgcctttacctgaacgtgtaggggc

SEQ ID NO: 182928 - DNA, 55 bp, Artificial
  Synthetic oligonucleotide
cgagcattattatctttcggcaggtgtgaatcagcatgagagtgtgagtgcgcca

SEQ ID NO: 182929 - DNA, 55 bp, Artificial
  Synthetic oligonucleotide
cgagccaagacagtacgggagctgcgtcactgcctgcgatataacacccggctgg

SEQ ID NO: 182930 - DNA, 55 bp, Artificial
  Synthetic oligonucleotide
cgagccacgccaggccgagaacattggttcctgtaggcatcgggattggcggatc

SEQ ID NO: 182931 - DNA, 55 bp, Artificial
  Synthetic oligonucleotide
cagagcggttttccggtgccagggcattgctgcttgcgtcggcgacttgaacggt

SEQ ID NO: 182932 - DNA, 55 bp, Artificial
  Synthetic oligonucleotide
cgagccacttcggatagagacttaaccggcacaactccctcggtatgcccagggc

SEQ ID NO: 182933 - DNA, 55 bp, Artificial
  Synthetic oligonucleotide
ctatcgctaaacgaacttgacctcagtgataaccagttccgtacaatcccgccag

SEQ ID NO: 182934 - DNA, 55 bp, Artificial
  Synthetic oligonucleotide
cgagcctcagttacctgatgtggcgacattaaaagatgtgcgattacagacacca

SEQ ID NO: 182935 - DNA, 55 bp, Artificial
  Synthetic oligonucleotide
cgagcgcgtcgggatttgtgcgggccagattgccgagaaacagaacaaatcgctc

SEQ ID NO: 182936 - DNA, 55 bp, Artificial
  Synthetic oligonucleotide
ctatcctcacgaaaagattaagcgtcaactaaacccgtaatttgtgatacacgag

SEQ ID NO: 182937 - DNA, 55 bp, Artificial
  Synthetic oligonucleotide
cgcacagcattttactccaggccgaatagcgatgtggattggcaccattgccctg

SEQ ID NO: 182938 - DNA, 60 bp, Artificial
  Synthetic oligonucleotide
ataatcataatctcttcaacctcgggctcttttttaagtgccgctatcgcaactgagaga

SEQ ID NO: 182939 - DNA, 55 bp, Artificial
  Synthetic oligonucleotide
cgcacagacgagaagattcctctggtaagcacgtctgcgaccattcatgacgccc

SEQ ID NO: 182940 - DNA, 55 bp, Artificial
  Synthetic oligonucleotide
catgtatagcaaatggtgttcgggaggtttatatgcttgctatccggttatctga

SEQ ID NO: 182941 - DNA, 55 bp, Artificial
  Synthetic oligonucleotide
cgttcacgtatggcgcggcggggtatggtgtccgatcagcacaatggagctgagc

SEQ ID NO: 182942 - DNA, 55 bp, Artificial
  Synthetic oligonucleotide
catgtccaatgctcaaatactctctaaacgagcttgggcttaaacgccacatcag

SEQ ID NO: 182943 - DNA, 55 bp, Artificial
  Synthetic oligonucleotide
cgttcagtggttcagatctctccggcggcgagttttcgactttcgactggcgagc

SEQ ID NO: 182944 - DNA, 55 bp, Artificial
  Synthetic oligonucleotide
cagcccctgtattcggttcatcagtgtcatccaaggtcggattgacacctgtgcg

SEQ ID NO: 182945 - DNA, 55 bp, Artificial
  Synthetic oligonucleotide
cgcacaagcagcttcgatgatggacatcgccagagcttgcacaatcccctcacct

SEQ ID NO: 182946 - DNA, 55 bp, Artificial
  Synthetic oligonucleotide
cgttcgcgctaacgcaaatgctcagtatcctgcctacattagcgccggacgaagc

SEQ ID NO: 182947 - DNA, 55 bp, Artificial
  Synthetic oligonucleotide
cgttcgtttgctgcctatctgcaacgccaactactttgggtatagttcgactcta

SEQ ID NO: 182948 - DNA, 55 bp, Artificial
  Synthetic oligonucleotide
cgcacaaacaccaaagtcggtgtcacaggatacgacggaacgcactttcacggag

SEQ ID NO: 182949 - DNA, 60 bp, Artificial
  Synthetic oligonucleotide
ataatcatgctgattgtgtgctaagccaactacgagcgaccattagggcaatttattcta

SEQ ID NO: 182950 - DNA, 55 bp, Artificial
  Synthetic oligonucleotide
cgttctcggcacgctgtgtgtgacagacactgaaccgcacccgtttagcgccgac

SEQ ID NO: 182951 - DNA, 55 bp, Artificial
  Synthetic oligonucleotide
cgttctggctgcgcaaattgtcaactggaatctgaactaggacaagtaacgagcg

SEQ ID NO: 182952 - DNA, 55 bp, Artificial
  Synthetic oligonucleotide
cagccccagtagctcctgtgatccctgaaagcaaacggcctaaatacagcatcca

SEQ ID NO: 182953 - DNA, 55 bp, Artificial
  Synthetic oligonucleotide
cgttcttaaaagtcttatgtatgctgccatcgcagggggttgtgttatcgcggcc

SEQ ID NO: 182954 - DNA, 55 bp, Artificial
  Synthetic oligonucleotide
catgtcgtgaatgtaggcctgaattttgggctctatctcatgcccgggttcggcc

SEQ ID NO: 182955 - DNA, 55 bp, Artificial
  Synthetic oligonucleotide
cgttgtactcatcggcccgctgatttgcgccattaacagcgcacgctatctccgc

SEQ ID NO: 182956 - DNA, 55 bp, Artificial
  Synthetic oligonucleotide
cattcagatgtctacttgcgttggcaatgctttaaaacgtaccatgagacgcctg

SEQ ID NO: 182957 - DNA, 55 bp, Artificial
  Synthetic oligonucleotide
cattacgatccgaatgataacgcgaattatatggcgtcaccaatgttagtaagct

SEQ ID NO: 182958 - DNA, 55 bp, Artificial
  Synthetic oligonucleotide
cgttgtacctaaagatagtgatatagcaacagttatgataatccaggttggagca

SEQ ID NO: 182959 - DNA, 55 bp, Artificial
  Synthetic oligonucleotide
cgttggggatacgcggttgtggggtatcgatgccgtttaagcaggcgtgtattcc

SEQ ID NO: 182960 - DNA, 57 bp, Artificial
  Synthetic oligonucleotide
ataatcccgcctgactggtaagaatgtcgcgcgggcgcaaaaagggaatggggcaca

SEQ ID NO: 182961 - DNA, 55 bp, Artificial
  Synthetic oligonucleotide
cattaacggcctgaaagcccgatatgaggcacaccacgatgtgcgttacaccgcg

SEQ ID NO: 182962 - DNA, 55 bp, Artificial
  Synthetic oligonucleotide
cgttggcgattctgtaccagttatcatccggtacgctgacttcttctatacatga

SEQ ID NO: 182963 - DNA, 55 bp, Artificial
  Synthetic oligonucleotide
cagccagttaacgaaagggatatagatctgaccggactccatctcggaggtatgg

SEQ ID NO: 182964 - DNA, 55 bp, Artificial
  Synthetic oligonucleotide
cgcaatcacactgttccgcttactgctgccttagtcgctcactttatcaggtgcc

SEQ ID NO: 182965 - DNA, 55 bp, Artificial
  Synthetic oligonucleotide
cgttgctgtacccaaccgagtccctcaatcctattccacagagaccgttaacatg

SEQ ID NO: 182966 - DNA, 55 bp, Artificial
  Synthetic oligonucleotide
cgcaatgcgcgcggtttcaattttgcgtggatcgcagactataattttcgccccg

SEQ ID NO: 182967 - DNA, 55 bp, Artificial
  Synthetic oligonucleotide
cgttgcgcttcccgaatcatggtttatttcccggatagcaacagcagccaactac

SEQ ID NO: 182968 - DNA, 55 bp, Artificial
  Synthetic oligonucleotide
catgtgctgttgcctgtggcaacccgttaatataggagcgggcatagccggcctg

SEQ ID NO: 182969 - DNA, 55 bp, Artificial
  Synthetic oligonucleotide
cgttgcccgacccggtttacaaaagcccaccagcgtcagattacagcgctcagcc

SEQ ID NO: 182970 - DNA, 55 bp, Artificial
  Synthetic oligonucleotide
cgcaattcaacgaccctctatttattcgctcaggcaaaggaattacgcctaccgt

SEQ ID NO: 182971 - DNA, 52 bp, Artificial
  Synthetic oligonucleotide
gctaacaccaagacaacaaagttccggggggaaagcacggttagggagaata

SEQ ID NO: 182972 - DNA, 55 bp, Artificial
  Synthetic oligonucleotide
cgttgattactacttctctgccgaaccttatcttagtgcctcaagcagtaacgac

SEQ ID NO: 182973 - DNA, 55 bp, Artificial
  Synthetic oligonucleotide
cagccatcatgcctgtcgtacggagtgttatgccatgacggtccattattatcgg

SEQ ID NO: 182974 - DNA, 55 bp, Artificial
  Synthetic oligonucleotide
cgcactcggagaaggtggcaaattacgctggcttgtcactggattcagccgactg

SEQ ID NO: 182975 - DNA, 55 bp, Artificial
  Synthetic oligonucleotide
cgttaattgtcgcgttcaataatgaagctggctaacgctcgcaatggcgctgtgt

SEQ ID NO: 182976 - DNA, 55 bp, Artificial
  Synthetic oligonucleotide
cgttaactatctggagcaatgctgacgttcggcgcaactggacaggcatagtcat

SEQ ID NO: 182977 - DNA, 55 bp, Artificial
  Synthetic oligonucleotide
cgttaacgtaggcatgaggcatgtcggttctggctacagcggagcagccctcccg

SEQ ID NO: 182978 - DNA, 54 bp, Artificial
  Synthetic oligonucleotide
catgggcttttaccggtttctgtaccgtcacgcttaaatcaatggccgtcacgt

SEQ ID NO: 182979 - DNA, 55 bp, Artificial
  Synthetic oligonucleotide
cagcgaatggatgataccggcgagtggttctgctatcacccgctgtttggtaact

SEQ ID NO: 182980 - DNA, 55 bp, Artificial
  Synthetic oligonucleotide
cgttaacatatgtgcatcggctttaattaatttgacggcgttgctacaccggtgc

SEQ ID NO: 182981 - DNA, 55 bp, Artificial
  Synthetic oligonucleotide
cgttaaataatcctccgcgatcctattgctgaaataatgaccgtgcatccacggt

SEQ ID NO: 182982 - DNA, 60 bp, Artificial
  Synthetic oligonucleotide
ataatcgagcaggctcatatggtgttttgcgagttgccggttggtagccagtccagtcgc

SEQ ID NO: 182983 - DNA, 55 bp, Artificial
  Synthetic oligonucleotide
cgcagagtacggatttccagaggttcatctccagtagtgataatcttcgttaagc

SEQ ID NO: 182984 - DNA, 55 bp, Artificial
  Synthetic oligonucleotide
cgtgttgatgggtaacaaatgatatgtggcgtcatcgagagcagatgcataaccc

SEQ ID NO: 182985 - DNA, 55 bp, Artificial
  Synthetic oligonucleotide
cgcagataatgtagatgcagtcgtttatgttactcgcgccgcattaaattttcgc

SEQ ID NO: 182986 - DNA, 55 bp, Artificial
  Synthetic oligonucleotide
catggattttcttaagtatccattttcatagccctggcgaacaccctggttcacc

SEQ ID NO: 182987 - DNA, 55 bp, Artificial
  Synthetic oligonucleotide
cgtgttaccaaagttacgtgatgaagttggtcgtgtgggattgagatggaagtca

SEQ ID NO: 182988 - DNA, 55 bp, Artificial
  Synthetic oligonucleotide
cagcgacttacaaggcgacgctatagaatggaacgtggcgattaacgaccgtgat

SEQ ID NO: 182989 - DNA, 55 bp, Artificial
  Synthetic oligonucleotide
catgcttatagcgacaagtcctgtagccgctcagacaacggttcctgagacgact

SEQ ID NO: 182990 - DNA, 55 bp, Artificial
  Synthetic oligonucleotide
cgtgtggctggttgaactggatgtatttcgcaagaattgcgcgctctttcccggc

SEQ ID NO: 182991 - DNA, 55 bp, Artificial
  Synthetic oligonucleotide
cgcagcgaagtggagaaacgtctaagtgcgcactgataataaaagcttatcagtg

SEQ ID NO: 182992 - DNA, 55 bp, Artificial
  Synthetic oligonucleotide
cagccgattttacacgcctatgggctgcatacgctcccaacctggattgccagcg

SEQ ID NO: 182993 - DNA, 60 bp, Artificial
  Synthetic oligonucleotide
gcaatggtcagatcgtcgaaatcgctcgtaatggcgctgtcgctgtcaatcagcgtatag

SEQ ID NO: 182994 - DNA, 60 bp, Artificial
  Synthetic oligonucleotide
gcgttttctacaggctaaagcgattaaccctgagtgtagcttgcgtgggcgctatcttgc

SEQ ID NO: 182995 - DNA, 55 bp, Artificial
  Synthetic oligonucleotide
cagccggatgcatagccattcaccctctcaggattcatctgtgccgttttgcggg

SEQ ID NO: 182996 - DNA, 55 bp, Artificial
  Synthetic oligonucleotide
catgtactggaagaggatccagccagcttcccgtttgaatattatgcggtaaaat

SEQ ID NO: 182997 - DNA, 55 bp, Artificial
  Synthetic oligonucleotide
cgttatagcgttaaaagacgttgcgagcgatcagtaaagggtaatccagtctgga

SEQ ID NO: 182998 - DNA, 55 bp, Artificial
  Synthetic oligonucleotide
cgcaccgaaaacagtgctgatttagccatattcactcatgcagcattaacaccta

SEQ ID NO: 182999 - DNA, 55 bp, Artificial
  Synthetic oligonucleotide
cagccggttttcacccagacgatgtagctcactgagtaaaacgccgcccagatta

SEQ ID NO: 183000 - DNA, 55 bp, Artificial
  Synthetic oligonucleotide
cagccgttttgtcagacgggtaggggcgcagaacatgtttcgggccgggctatgg

SEQ ID NO: 183001 - DNA, 55 bp, Artificial
  Synthetic oligonucleotide
cgttacttgcaggtattgcttaaacatcatactcgccgctcttagtgcatcatca

SEQ ID NO: 183002 - DNA, 55 bp, Artificial
  Synthetic oligonucleotide
cgttactattttgggctggagtattgagcgcattataaaggtcttgtgatgaagg

SEQ ID NO: 183003 - DNA, 54 bp, Artificial
  Synthetic oligonucleotide
cgttacgtaacggttcgcaaaacggatgtcatcttactcaattggcaaataacc

SEQ ID NO: 183004 - DNA, 55 bp, Artificial
  Synthetic oligonucleotide
catggtatctcccgatgggtcaggttcgcgatagcaaataagcaggctcagatta

SEQ ID NO: 183005 - DNA, 60 bp, Artificial
  Synthetic oligonucleotide
ataatgttcacattccaggctgatttgtgctggtttactgtacgccccgctgccaaacac

SEQ ID NO: 183006 - DNA, 55 bp, Artificial
  Synthetic oligonucleotide
cgttacgcccactaaaaggcgcacagtatgcacgatttatactgcttgcctatcc

SEQ ID NO: 183007 - DNA, 55 bp, Artificial
  Synthetic oligonucleotide
cgttaccgatcctatttctgcttatgccggaaatatctacgactcacggggagtc

SEQ ID NO: 183008 - DNA, 55 bp, Artificial
  Synthetic oligonucleotide
catggtataccgcggagtttgtgcgacacgtcaactggcaaagcgccaaatacct

SEQ ID NO: 183009 - DNA, 55 bp, Artificial
  Synthetic oligonucleotide
cgcactatggtctgtagcgcgctggtggagtcacacctgtagtcaagcgacgcgt

SEQ ID NO: 183010 - DNA, 55 bp, Artificial
  Synthetic oligonucleotide
cattcggtctgcctgatgttccgtgtgcgttaggcggtgtataaagaaacgtacg

SEQ ID NO: 183011 - DNA, 55 bp, Artificial
  Synthetic oligonucleotide
cgattatatcgcccattctacattgctggaaactcatgagtgggaacaacgccct

SEQ ID NO: 183012 - DNA, 55 bp, Artificial
  Synthetic oligonucleotide
cattcgtggaggcgaccgggcaggccagcaacgatgccgcaggctatctggattt

SEQ ID NO: 183013 - DNA, 55 bp, Artificial
  Synthetic oligonucleotide
cagcagagtcaactgcgtattgtccgtactggtggtgacatgccaacggatcgtg

SEQ ID NO: 183014 - DNA, 55 bp, Artificial
  Synthetic oligonucleotide
cagcacagacagcttatcgagacaataacaatcaaagatagccgtctgtgagcga

SEQ ID NO: 183015 - DNA, 53 bp, Artificial
  Synthetic oligonucleotide
ctaaactgccgaacgattccctcacaggattcgaaaattaacgccgttttatc

SEQ ID NO: 183016 - DNA, 60 bp, Artificial
  Synthetic oligonucleotide
gctggcgcatacaaggcttacgggatcaaattttacctcgctggtatcatcagtggtttg

SEQ ID NO: 183017 - DNA, 55 bp, Artificial
  Synthetic oligonucleotide
ctaaatcggtggcgtacatatcgggcttttgagtgttgtccggtaaatcacctcg

SEQ ID NO: 183018 - DNA, 55 bp, Artificial
  Synthetic oligonucleotide
ctaaatctcaggaatggagagctgaaccagtaaccgacacagagacaccacgccc

SEQ ID NO: 183019 - DNA, 55 bp, Artificial
  Synthetic oligonucleotide
cgattactaatccttcgccgtactacgtttcgatggttgaactgtatagcgcggg

SEQ ID NO: 183020 - DNA, 55 bp, Artificial
  Synthetic oligonucleotide
ctaacaccacaagaagcagcaggagtgatacataatatggaaactatgcataacg

SEQ ID NO: 183021 - DNA, 55 bp, Artificial
  Synthetic oligonucleotide
cgattaattagggtcttatgtgctagttcttgcatgtgttggcctcgtgttagtt

SEQ ID NO: 183022 - DNA, 55 bp, Artificial
  Synthetic oligonucleotide
cgattaagttgaccgccggtagcggtagctgtagatgacggcgacacagcacagc

SEQ ID NO: 183023 - DNA, 55 bp, Artificial
  Synthetic oligonucleotide
ctaacaccagggacctggtcgcttattacaggtattgcggtgacaattattacgg

SEQ ID NO: 183024 - DNA, 55 bp, Artificial
  Synthetic oligonucleotide
ctaacagctacactgacagcaaaatcagtgatacgaagacagaactgaatgccaa

SEQ ID NO: 183025 - DNA, 55 bp, Artificial
  Synthetic oligonucleotide
ctaatacatctctagtagcttcatctgcacgtctttctgtcattgaacaatgaag

SEQ ID NO: 183026 - DNA, 55 bp, Artificial
  Synthetic oligonucleotide
cgatgccgagttacctcattagcagtacagtaagaaaccgaagggaaacgtgggc

SEQ ID NO: 183027 - DNA, 56 bp, Artificial
  Synthetic oligonucleotide
agttaggacgtccgaggatgttcgctaattcggctgtcatcggcgggattttacca

SEQ ID NO: 183028 - DNA, 55 bp, Artificial
  Synthetic oligonucleotide
cgatgcggtattagttcggtatgctattaagattagctctatcacgtttggttgt

SEQ ID NO: 183029 - DNA, 55 bp, Artificial
  Synthetic oligonucleotide
ctaaggtgactagtcatgttccgtctgattatggtgagttattcaggtaagggga

SEQ ID NO: 183030 - DNA, 55 bp, Artificial
  Synthetic oligonucleotide
ctaagcgacgcgccagaatgtcatacaccgggcgggtgacaataatccgctccac

SEQ ID NO: 183031 - DNA, 55 bp, Artificial
  Synthetic oligonucleotide
cagcaataattgtgtttccatccactaaggcatcttcaagacgacgtaacactac

SEQ ID NO: 183032 - DNA, 55 bp, Artificial
  Synthetic oligonucleotide
cgatgctggtcaacggcacgatggatctctggccgccctatacctttgccgccac

SEQ ID NO: 183033 - DNA, 55 bp, Artificial
  Synthetic oligonucleotide
ctaactatattccggcatgtgatgtacaggaatatgcaaagcgtaccccacgggt

SEQ ID NO: 183034 - DNA, 55 bp, Artificial
  Synthetic oligonucleotide
cgatggtgggtacggcgtcaggattaggacatataacaaagacttctccgccagt

SEQ ID NO: 183035 - DNA, 55 bp, Artificial
  Synthetic oligonucleotide
cgatgtaatactcgaatttagcggcgaactgccttcgggtttccatcgccacggc

SEQ ID NO: 183036 - DNA, 55 bp, Artificial
  Synthetic oligonucleotide
cgatgtcgtccactgaaatgaaacgttaatcctgagccagccgcagattacgtgg

SEQ ID NO: 183037 - DNA, 55 bp, Artificial
  Synthetic oligonucleotide
cgatgttccgtttaggtattagtgaatcgatggctgatacgttggccgagctgac

SEQ ID NO: 183038 - DNA, 59 bp, Artificial
  Synthetic oligonucleotide
agttatgtcactgatcctgtggggactggatggtattctggttcgcctggtatccttta

SEQ ID NO: 183039 - DNA, 55 bp, Artificial
  Synthetic oligonucleotide
ctaacccgcaagtgtgggaaagcgataaatctcgtttacggatggtgcacgttga

SEQ ID NO: 183040 - DNA, 55 bp, Artificial
  Synthetic oligonucleotide
cgatgtttcgcactaacttttgggcacatttatcacaatctacgcgatgtttcct

SEQ ID NO: 183041 - DNA, 52 bp, Artificial
  Synthetic oligonucleotide
cgattaaccgttaagccgtgttaacctaatggtgaaccgattcagtcggtgg

SEQ ID NO: 183042 - DNA, 55 bp, Artificial
  Synthetic oligonucleotide
cagcacaaacagcaattcgacaatattgtccagccagggcattaccagtagcgtg

SEQ ID NO: 183043 - DNA, 55 bp, Artificial
  Synthetic oligonucleotide
ctaacatcctgtcgctcgtcaaagacaagcgtatgaacctcaccaataccgttga

SEQ ID NO: 183044 - DNA, 55 bp, Artificial
  Synthetic oligonucleotide
cagccacaccgcgtcaggcggtatacgacccgacggtgcagtatgagttctggtt

SEQ ID NO: 183045 - DNA, 55 bp, Artificial
  Synthetic oligonucleotide
cgcaacaaggcgttgctcatagtgtggaggcacattccccacgcataaggaccgc

SEQ ID NO: 183046 - DNA, 55 bp, Artificial
  Synthetic oligonucleotide
cgcaacaccagagctgggttaacgctttgcatcagctgctgacgctcactatcgc

SEQ ID NO: 183047 - DNA, 54 bp, Artificial
  Synthetic oligonucleotide
cgcaaccgataaacaaggtacgcaatcagttaacaataaatacctccaacgagg

SEQ ID NO: 183048 - DNA, 55 bp, Artificial
  Synthetic oligonucleotide
cgcaacggtgtgctcgatacccggacaggattgttcagcccgcacgataagaagc

SEQ ID NO: 183049 - DNA, 60 bp, Artificial
  Synthetic oligonucleotide
gctggcgattcgtatctgcgaacactgctggttcagggggcccgttcagttctgattggc

SEQ ID NO: 183050 - DNA, 55 bp, Artificial
  Synthetic oligonucleotide
cgtttatatggtcaactacaccggatggcatcttgcccgtcataaataagtgggc

SEQ ID NO: 183051 - DNA, 53 bp, Artificial
  Synthetic oligonucleotide
cgtttactccgccgcaaggggtaacgatagacgaccaacgtaagtagaggcga

SEQ ID NO: 183052 - DNA, 54 bp, Artificial
  Synthetic oligonucleotide
cgtttaccagtaagccgattaccttagccctcgttgacgcacaaaatcgaggtg

SEQ ID NO: 183053 - DNA, 55 bp, Artificial
  Synthetic oligonucleotide
cgttgttgtaacctggctttatgggcatttagtccgcgatttaatgcctgaggag

SEQ ID NO: 183054 - DNA, 55 bp, Artificial
  Synthetic oligonucleotide
cgttgtgtgacgcgctttattatattgaggagatgtattgtggagactaaaaccg

SEQ ID NO: 183055 - DNA, 55 bp, Artificial
  Synthetic oligonucleotide
cgcaagcgctggcgatacgtcctgatatgcctgaagttttcaactacctaggcat

SEQ ID NO: 183056 - DNA, 55 bp, Artificial
  Synthetic oligonucleotide
cagccacatctccatttcgctcagaaacgatacggaaaggtatatcgcgtcctgt

SEQ ID NO: 183057 - DNA, 55 bp, Artificial
  Synthetic oligonucleotide
cgttgtctggaggcattagatagtccagccttgtttaaccagtgaagcctagaac

SEQ ID NO: 183058 - DNA, 55 bp, Artificial
  Synthetic oligonucleotide
cgcaagctcgcagtaaacgggaagggccatatcatagaaggcaaggctggggtca

SEQ ID NO: 183059 - DNA, 55 bp, Artificial
  Synthetic oligonucleotide
cagccagagataattcacgctcctgtgcgccattcattgcgtgacggatgatgtc

SEQ ID NO: 183060 - DNA, 55 bp, Artificial
  Synthetic oligonucleotide
agttattgggtcatggtctcttagctcgttaatctggctaagtttggttaggttg

SEQ ID NO: 183061 - DNA, 55 bp, Artificial
  Synthetic oligonucleotide
cgattgggcgtcagtttcagatatttccaccctgacggggctatctgcgccacgt

SEQ ID NO: 183062 - DNA, 55 bp, Artificial
  Synthetic oligonucleotide
cgattgtccgggactcactgtttcgccgccgactatttatatggtatacttgtcg

SEQ ID NO: 183063 - DNA, 55 bp, Artificial
  Synthetic oligonucleotide
cagcagcacatcgccttcggccacgctctggccttcagtggcaatcaccttccag

SEQ ID NO: 183064 - DNA, 55 bp, Artificial
  Synthetic oligonucleotide
cagcagtgctactcgaaggggtaggtttgctggacacaagagtcgtgtgaacctc

SEQ ID NO: 183065 - DNA, 55 bp, Artificial
  Synthetic oligonucleotide
cgatttagagctacccaagcgcatcacaaaagccgaagcaatcggccttggtcgc

SEQ ID NO: 183066 - DNA, 53 bp, Artificial
  Synthetic oligonucleotide
cgatttcgggttacgtagttttggtctaccctgaggcgagaagactcttcctc

SEQ ID NO: 183067 - DNA, 55 bp, Artificial
  Synthetic oligonucleotide
cgttttggtgtacaatgtacagttgttggcattgattcttggttcgactcagaca

SEQ ID NO: 183068 - DNA, 55 bp, Artificial
  Synthetic oligonucleotide
cgttttgaattgttctatcaagtttctcctgtaaggagtacatacctacggcagc

SEQ ID NO: 183069 - DNA, 52 bp, Artificial
  Synthetic oligonucleotide
cgttttcttacggcccggtaatacagacgttcttccggttgctgtgacgaaa

SEQ ID NO: 183070 - DNA, 54 bp, Artificial
  Synthetic oligonucleotide
cgttttcgaacggctcttgtttgcggccatcgatttcgcggaagataactttcg

SEQ ID NO: 183071 - DNA, 60 bp, Artificial
  Synthetic oligonucleotide
gctgctgcatatgttggtgttcgtttccgccactctcccaatcagttccgtggcttctga

SEQ ID NO: 183072 - DNA, 55 bp, Artificial
  Synthetic oligonucleotide
cattcgagttgaccagagatctgacacctactctttccgtcggatatcacgcaac

SEQ ID NO: 183073 - DNA, 54 bp, Artificial
  Synthetic oligonucleotide
cgttttaaacatcgtgccaaatatgggcggagtcccgttagtttgggctgttgc

SEQ ID NO: 183074 - DNA, 55 bp, Artificial
  Synthetic oligonucleotide
cgtttgttgtaccaatctgtacgtgaatctgggctgatgagctcagtcccgtcgc

SEQ ID NO: 183075 - DNA, 54 bp, Artificial
  Synthetic oligonucleotide
cattccgaccgttcaaggattacctagtggccgtctgtccgaacgggtatggcg

SEQ ID NO: 183076 - DNA, 55 bp, Artificial
  Synthetic oligonucleotide
cgcaaagagtatggcttattcaccttatatgcgcattcaacgtcatatctggatg

SEQ ID NO: 183077 - DNA, 55 bp, Artificial
  Synthetic oligonucleotide
cagcatcgcggcgagagtaataaagtctgcccctacatggctgatggtgagtacg

SEQ ID NO: 183078 - DNA, 55 bp, Artificial
  Synthetic oligonucleotide
cgcaaatacgccccagccaaagtattctcgcgtccaggtgacgtggcgtttgggg

SEQ ID NO: 183079 - DNA, 55 bp, Artificial
  Synthetic oligonucleotide
ctgaatcatcattaccgtgatcaagggtatgtaaagcccaccagcctgattaacg

SEQ ID NO: 183080 - DNA, 55 bp, Artificial
  Synthetic oligonucleotide
ctgaatgcaccagccggcactcgccggtattctcgtcgttgctctgtacaaacgc

SEQ ID NO: 183081 - DNA, 55 bp, Artificial
  Synthetic oligonucleotide
ctgaatggtttgatctgctttcgaggcaatacccagtaactgccccagatcacct

SEQ ID NO: 183082 - DNA, 60 bp, Artificial
  Synthetic oligonucleotide
gctgcgccacgcgtgccatgctccgctgggcacgtcaacaggggatcgaagtcggtatct

SEQ ID NO: 183083 - DNA, 55 bp, Artificial
  Synthetic oligonucleotide
ctgacaaaccagtcatcggcgctttcccatgtttcctggagaatttcgctaatgc

SEQ ID NO: 183084 - DNA, 55 bp, Artificial
  Synthetic oligonucleotide
ctgacagcctttatagcagaagtagcgttagcctccagcccgacgcataaatccg

SEQ ID NO: 183085 - DNA, 55 bp, Artificial
  Synthetic oligonucleotide
cactgataagcaaataacgcgcaatggtaaggggaaatgcgcaagatgtccgtga

SEQ ID NO: 183086 - DNA, 55 bp, Artificial
  Synthetic oligonucleotide
cactgaaggtgattgattagattcaagccttttcattgcagacgcattagaacga

SEQ ID NO: 183087 - DNA, 55 bp, Artificial
  Synthetic oligonucleotide
ctgacattactacgcaacgcggaatattgttcgttcatatgaccccagacacccc

SEQ ID NO: 183088 - DNA, 55 bp, Artificial
  Synthetic oligonucleotide
cactctgaataattcgagtttcttgtaggccaaagtccaatagtcaggtaacttg

SEQ ID NO: 183089 - DNA, 55 bp, Artificial
  Synthetic oligonucleotide
ccttgcttcctttcgaactacgctgaaagtctcgcgctacttattcagagcgtta

SEQ ID NO: 183090 - DNA, 55 bp, Artificial
  Synthetic oligonucleotide
ccttgcaacctctggagcagtgacactctgctctgtcgtaacagcctatctgctc

SEQ ID NO: 183091 - DNA, 55 bp, Artificial
  Synthetic oligonucleotide
cactctcccttgtatgattttggtaccgaattcacgttaacatagcttgtatccc

SEQ ID NO: 183092 - DNA, 55 bp, Artificial
  Synthetic oligonucleotide
ccttgagctagtataaaaggaggaacatcttgagaaatgcctgaacatcctccaa

SEQ ID NO: 183093 - DNA, 60 bp, Artificial
  Synthetic oligonucleotide
agttccggctgccacacagcaagctgccagtggtcatggttcggattcttgcagattaac

SEQ ID NO: 183094 - DNA, 55 bp, Artificial
  Synthetic oligonucleotide
ccttgagattcgcaccatgacagaaattgtttagtaagcgcaaacactctcttag

SEQ ID NO: 183095 - DNA, 55 bp, Artificial
  Synthetic oligonucleotide
ctgacctcccagtatcccatccactggcctgatgagctgggtcagtacagcgggg

SEQ ID NO: 183096 - DNA, 55 bp, Artificial
  Synthetic oligonucleotide
cactccagtcctgagtaagcggaatacctgcccaacgggcgatatcttcacgagt

SEQ ID NO: 183097 - DNA, 55 bp, Artificial
  Synthetic oligonucleotide
ccttccccttgaggacaccgggttgtcaggctgaccatacgcttaagtgacaacc

SEQ ID NO: 183098 - DNA, 55 bp, Artificial
  Synthetic oligonucleotide
cactcagctaagcgggttccccgccaagcttcgcagaaccccgcgagcgggtttc

SEQ ID NO: 183099 - DNA, 55 bp, Artificial
  Synthetic oligonucleotide
ctgagaggacgttgcatcaccggatgctgagttatcctggcctcctgttgcccca

SEQ ID NO: 183100 - DNA, 55 bp, Artificial
  Synthetic oligonucleotide
ctgagacaatacggcacgaccactggcaggtttgcccttaatcgtccagccacgc

SEQ ID NO: 183101 - DNA, 55 bp, Artificial
  Synthetic oligonucleotide
cactcagtcgtgccgccacgttggaggtcgtgccgccaacaaaatcggtcagaat

SEQ ID NO: 183102 - DNA, 54 bp, Artificial
  Synthetic oligonucleotide
ctgactttcgcgtatacccgaacgattaacgaacgactaacgcctcagcgtggg

SEQ ID NO: 183103 - DNA, 55 bp, Artificial
  Synthetic oligonucleotide
ctgactgttacatcacacctacattatgacgaacatcagctaagtgatgtatacg

SEQ ID NO: 183104 - DNA, 51 bp, Artificial
  Synthetic oligonucleotide
atgcagtccggggaaatttatcggacgcaaaaaggcggtttcccgggtgct

SEQ ID NO: 183105 - DNA, 60 bp, Artificial
  Synthetic oligonucleotide
gctgatacaggcagctcccggagacggacacagcttgcctgtgagcggatgccgggagcc

SEQ ID NO: 183106 - DNA, 55 bp, Artificial
  Synthetic oligonucleotide
cactcatcgccccgtgacgctccggggaactccagaccatgccgtcacaccatct

SEQ ID NO: 183107 - DNA, 55 bp, Artificial
  Synthetic oligonucleotide
ccacccacggcaatattttgtcacaatgatgtcatggcgataggcgctatgtggc

SEQ ID NO: 183108 - DNA, 55 bp, Artificial
  Synthetic oligonucleotide
ctgactccggcacatgatctcaccctcagcagcgggatttctgcggtaacccggc

SEQ ID NO: 183109 - DNA, 55 bp, Artificial
  Synthetic oligonucleotide
ctgacgttatggcccggtttcatccacttagacattactcacatgctcgtccaag

SEQ ID NO: 183110 - DNA, 51 bp, Artificial
  Synthetic oligonucleotide
ccttcggaaaggccgatgttacggcgaacaaacctgtcaccccgcaaaccc

SEQ ID NO: 183111 - DNA, 55 bp, Artificial
  Synthetic oligonucleotide
ccttctgacttaaatcgtcctggacatgtgtttcccttacgcgctcaaaatgggg

SEQ ID NO: 183112 - DNA, 55 bp, Artificial
  Synthetic oligonucleotide
ctgacgtagcattcgccagcgccccacttccgttctactacgcttcatgtttacg

SEQ ID NO: 183113 - DNA, 55 bp, Artificial
  Synthetic oligonucleotide
ccttcttagcctgaaagtgtcttccctggccgtgctgtttagcctgccgtttggg

SEQ ID NO: 183114 - DNA, 55 bp, Artificial
  Synthetic oligonucleotide
cactccaaacctgcgcaatgcctcaattccgtagctagagcacgttggcgtgaaa

SEQ ID NO: 183115 - DNA, 55 bp, Artificial
  Synthetic oligonucleotide
ccacccaatgggaaagttcgcccaggtaaggggccacacgctcgatttgttgcag

SEQ ID NO: 183116 - DNA, 60 bp, Artificial
  Synthetic oligonucleotide
gctgagtgtatgccagcgacacatattgtgaccccttatctgagtgatggatggtgcccg

SEQ ID NO: 183117 - DNA, 55 bp, Artificial
  Synthetic oligonucleotide
ccaattttgggctccgttgtgtgaatcgccgtcactataggccgggtcaggaccg

SEQ ID NO: 183118 - DNA, 55 bp, Artificial
  Synthetic oligonucleotide
ctctggcgggagtgcctgcgggtcagttacaacccgaatgttgatgtccgggcag

SEQ ID NO: 183119 - DNA, 55 bp, Artificial
  Synthetic oligonucleotide
cgaaacttagtctgtagccataatgaaaggatgcgaaacatacggtcgtcgtatt

SEQ ID NO: 183120 - DNA, 55 bp, Artificial
  Synthetic oligonucleotide
cgaaaccatagccgacggcggtagagaaggaatcttcccgtgtccagatgtcgtc

SEQ ID NO: 183121 - DNA, 55 bp, Artificial
  Synthetic oligonucleotide
ccacactagagaacatactggctaaatacggaaggatctgaggttcttatggctc

SEQ ID NO: 183122 - DNA, 53 bp, Artificial
  Synthetic oligonucleotide
cgaaacagcgccgctagccgtaacgaccgaacttcccggacgtacgcccgcat

SEQ ID NO: 183123 - DNA, 55 bp, Artificial
  Synthetic oligonucleotide
cacttagcacttgtatgtgctctcagcaaatggattgagaatcaccttggccggg

SEQ ID NO: 183124 - DNA, 55 bp, Artificial
  Synthetic oligonucleotide
ccacactcaccttagataacgctgaacagtatcgacaaatcttgttaacacgagg

SEQ ID NO: 183125 - DNA, 55 bp, Artificial
  Synthetic oligonucleotide
ctctggtaccctctagtcaaggccttaagtgagtcgtattacggactggccgtcg

SEQ ID NO: 183126 - DNA, 55 bp, Artificial
  Synthetic oligonucleotide
ctcttactctcgtgcctacggcatgggtgtaactatctattcggaaggtacaggc

SEQ ID NO: 183127 - DNA, 56 bp, Artificial
  Synthetic oligonucleotide
agttctactttgtgccttttaaggtatatcgtgagcgtaaaaagctagcgccttca

SEQ ID NO: 183128 - DNA, 55 bp, Artificial
  Synthetic oligonucleotide
ctcttcatcacgcgataccgcattgaccagcagtgctgcatagagcgagttcccc

SEQ ID NO: 183129 - DNA, 55 bp, Artificial
  Synthetic oligonucleotide
ctcttcccattccatgacacgctggctgagttcagcggcgctcccggacacatcc

SEQ ID NO: 183130 - DNA, 55 bp, Artificial
  Synthetic oligonucleotide
ctctttcagtttacccgcttcagtacggaagtatcgcagttggtgaacgccatcg

SEQ ID NO: 183131 - DNA, 55 bp, Artificial
  Synthetic oligonucleotide
ccaccagcgattcgccagggatgatatgccgttcaccactcaactcgctcagcga

SEQ ID NO: 183132 - DNA, 55 bp, Artificial
  Synthetic oligonucleotide
ccaccagcagccctctatgctgtgcttgagagcgttacgttagggctaccggaag

SEQ ID NO: 183133 - DNA, 55 bp, Artificial
  Synthetic oligonucleotide
ccaccagaagctgcttacgcgcttgtagccattggtcgattaacgcattattgcc

SEQ ID NO: 183134 - DNA, 55 bp, Artificial
  Synthetic oligonucleotide
ccaccaacgcaatggcattcacaaaggccgccagagtggtgagtcttagccagcc

SEQ ID NO: 183135 - DNA, 53 bp, Artificial
  Synthetic oligonucleotide
ctgaacgcccggaagatacccgtgaggttgtattcccgacgtattgtccggta

SEQ ID NO: 183136 - DNA, 55 bp, Artificial
  Synthetic oligonucleotide
cctttgaatccgggacacagtagagggatagcggttagatgagcggccttgcgag

SEQ ID NO: 183137 - DNA, 55 bp, Artificial
  Synthetic oligonucleotide
ctgaacctaaatcacgtttccagatgatctgtcctgaacgcatatctagactgac

SEQ ID NO: 183138 - DNA, 55 bp, Artificial
  Synthetic oligonucleotide
agttctaggttctgataatacaggccacaagaatttactacgaactgtaggtaag

SEQ ID NO: 183139 - DNA, 55 bp, Artificial
  Synthetic oligonucleotide
ctgaacagcttcggagcaggaagaactatttttgtggtgcagttactgagaacag

SEQ ID NO: 183140 - DNA, 55 bp, Artificial
  Synthetic oligonucleotide
cactggcggatccgttaaatctgatactgggcgcacgttacacccgttggaacaa

SEQ ID NO: 183141 - DNA, 55 bp, Artificial
  Synthetic oligonucleotide
ccacatatgacgtcagatttgccgtaaacctggatgccttatcgcgtagcggtgt

SEQ ID NO: 183142 - DNA, 55 bp, Artificial
  Synthetic oligonucleotide
cactgtatccaacgctgaggcaaatcgatcgcaaactcgtgttatggctgacccg

SEQ ID NO: 183143 - DNA, 51 bp, Artificial
  Synthetic oligonucleotide
ctgaaaacgacgggtaaaacaaaagcgcggtataacaaagtctaatcaccg

SEQ ID NO: 183144 - DNA, 55 bp, Artificial
  Synthetic oligonucleotide
ctctttggactacttaagggtgcaccgcaagtcgtgagtgcccctcatactccgg

SEQ ID NO: 183145 - DNA, 55 bp, Artificial
  Synthetic oligonucleotide
cctttgtgtatctatcactaccatgcttaacaccaagaagagtccctcccttcat

SEQ ID NO: 183146 - DNA, 55 bp, Artificial
  Synthetic oligonucleotide
ccttttatttgcccggtattaaagcattcaactggatgccgccagattcactgcg

SEQ ID NO: 183147 - DNA, 55 bp, Artificial
  Synthetic oligonucleotide
ccacatacagcattgtatattttcccttactaactcccgctgatacagatagtag

SEQ ID NO: 183148 - DNA, 55 bp, Artificial
  Synthetic oligonucleotide
cctgttgctatcacgcttaaaccatttcattgcgatttacacagaacgtacgctc

SEQ ID NO: 183149 - DNA, 60 bp, Artificial
  Synthetic oligonucleotide
gctgagcaataaagtcaccgctcaggatatgcgtattaccccggaaaccctgcgcttaca

SEQ ID NO: 183150 - DNA, 55 bp, Artificial
  Synthetic oligonucleotide
cctgtgtatgccggcacctttacgggatttaacggacaaacatggacagtcagca

SEQ ID NO: 183151 - DNA, 55 bp, Artificial
  Synthetic oligonucleotide
ctgattgatgcacataaccaggccgtggactttgctgttcgtcaggtggaggcgc

SEQ ID NO: 183152 - DNA, 55 bp, Artificial
  Synthetic oligonucleotide
cctgtggggactggatggtattctggttcgcctggtatcctttatcactggcctg

SEQ ID NO: 183153 - DNA, 53 bp, Artificial
  Synthetic oligonucleotide
cctgtgcagcgcccaactttatggcgggaaggtttccccggttaatccgtatc

SEQ ID NO: 183154 - DNA, 55 bp, Artificial
  Synthetic oligonucleotide
cctgtctgtctggtttacgggctttgaagacgaactggttcgtaatgggattgct

SEQ ID NO: 183155 - DNA, 55 bp, Artificial
  Synthetic oligonucleotide
cctgtctcgcaatgggagatcccctcgctacagaattcaacgctaaactgttctc

SEQ ID NO: 183156 - DNA, 55 bp, Artificial
  Synthetic oligonucleotide
ccacgacggagaactctgtatcggctttgctgaactctttcaccacatgggaaag

SEQ ID NO: 183157 - DNA, 55 bp, Artificial
  Synthetic oligonucleotide
cacggtgacctgtacagggttaatctccactggcaaggtggcaccatcgatcaat

SEQ ID NO: 183158 - DNA, 55 bp, Artificial
  Synthetic oligonucleotide
ctgcaactgtgccgcaattagcggccagcgggcgtcaaaatcatccgtcgggagg

SEQ ID NO: 183159 - DNA, 55 bp, Artificial
  Synthetic oligonucleotide
ctgcaagatctgttggcaggttctgtcgatgtggtggttgggcgaattggcggtc

SEQ ID NO: 183160 - DNA, 60 bp, Artificial
  Synthetic oligonucleotide
agttctttgtgccaggctttaatcagccggaaagcagtcacttatgctcaaggtcaggaa

SEQ ID NO: 183161 - DNA, 55 bp, Artificial
  Synthetic oligonucleotide
cctgtatgtgcggtaatcgcacttttattcgttgttcgcacaaaatgtgacccgc

SEQ ID NO: 183162 - DNA, 55 bp, Artificial
  Synthetic oligonucleotide
cacggtgaatagggctcgaatgacctgtgggttgttgtatggacttccctctggc

SEQ ID NO: 183163 - DNA, 55 bp, Artificial
  Synthetic oligonucleotide
ctgcacaacagcactcgcccgtcgatatcccatgaatgaatggtccgcgggcgcg

SEQ ID NO: 183164 - DNA, 55 bp, Artificial
  Synthetic oligonucleotide
ctgcacctgctcatcggatttggtgatggttggcggtaccccgagcatgtcgccg

SEQ ID NO: 183165 - DNA, 55 bp, Artificial
  Synthetic oligonucleotide
cacgggtgggttgcctgccatccaaccgaatgcggaattgttatatcagcgtacc

SEQ ID NO: 183166 - DNA, 55 bp, Artificial
  Synthetic oligonucleotide
cctggcaagcattgtgaaacgttttctccagtggacgaatatcctgacctaccgc

SEQ ID NO: 183167 - DNA, 55 bp, Artificial
  Synthetic oligonucleotide
ccacgcacaggctgatacgtacgccctgcggtggggcagaaagcagatgctcact

SEQ ID NO: 183168 - DNA, 55 bp, Artificial
  Synthetic oligonucleotide
cctggctatcgatacggcctttatctccgccagcggctgggacagtcgcgggata

SEQ ID NO: 183169 - DNA, 55 bp, Artificial
  Synthetic oligonucleotide
ccacgattcatgatgtttatttgcatggaatcagtcggttatcagtatcacggac

SEQ ID NO: 183170 - DNA, 55 bp, Artificial
  Synthetic oligonucleotide
ctgcccgttcttaactttgtcactatgccggggctggtaggtccgattctggggc

SEQ ID NO: 183171 - DNA, 54 bp, Artificial
  Synthetic oligonucleotide
gctgacgttcgggacttaccgtaagtccacgggggcgtctgtaccgccgcgtga

SEQ ID NO: 183172 - DNA, 54 bp, Artificial
  Synthetic oligonucleotide
ctgcccggaaacgtacaaaccgcagttacaggaaggcagtggtcgtacccagac

SEQ ID NO: 183173 - DNA, 55 bp, Artificial
  Synthetic oligonucleotide
ctgcccagaatgcccattttgtctgcgcatccattgaaccggaactggcagaaag

SEQ ID NO: 183174 - DNA, 55 bp, Artificial
  Synthetic oligonucleotide
ctgccatgtacggcctgcggatttaacgggaggataaattcggttaaccaagcgc

SEQ ID NO: 183175 - DNA, 55 bp, Artificial
  Synthetic oligonucleotide
cacggatcggtatccgttattaccggatgcgtgactacagcaaccttgaccacgc

SEQ ID NO: 183176 - DNA, 55 bp, Artificial
  Synthetic oligonucleotide
cctgggtggaatagcggtacgccgtgaggttaaatgatgtcccggtatcctggaa

SEQ ID NO: 183177 - DNA, 55 bp, Artificial
  Synthetic oligonucleotide
ctgcattactgtgtggtaccgtcggttttggtattcacgtcattattgacgccat

SEQ ID NO: 183178 - DNA, 55 bp, Artificial
  Synthetic oligonucleotide
ctgcatcatgcctcgcaggatattcagagctggctacaaacctggtacaaccaga

SEQ ID NO: 183179 - DNA, 55 bp, Artificial
  Synthetic oligonucleotide
ctgcagtctgaagatccgacttagcatcttttcggatctgtgcggcgggcaacgg

SEQ ID NO: 183180 - DNA, 55 bp, Artificial
  Synthetic oligonucleotide
ccacgatcggcatttcgcttgccgcatttggcattctgcattcactcgcccaggc

SEQ ID NO: 183181 - DNA, 53 bp, Artificial
  Synthetic oligonucleotide
cctggtcctgagagttaacggtagaaacggtcagtacgtcagaatttacgcgt

SEQ ID NO: 183182 - DNA, 60 bp, Artificial
  Synthetic oligonucleotide
gctgacgcgcccgtagggcttatccaacccttcgcctcagatgcaagctctgaacagact

SEQ ID NO: 183183 - DNA, 54 bp, Artificial
  Synthetic oligonucleotide
cctggtggtcggattgcagctaaagtcggaaagttcacccgtattggcggtaag

SEQ ID NO: 183184 - DNA, 55 bp, Artificial
  Synthetic oligonucleotide
cctgtataaccagtatgcagtgctttcgatgttggcaccgctttgtatgtaacgt

SEQ ID NO: 183185 - DNA, 55 bp, Artificial
  Synthetic oligonucleotide
ctgatagtcgatcttagagggtcctttcaggctgttcgtcttgaacgcccaggac

SEQ ID NO: 183186 - DNA, 55 bp, Artificial
  Synthetic oligonucleotide
ctgatagctgtcgctgtcaactgtcactgtaatacgctgcttcatagcacacctc

SEQ ID NO: 183187 - DNA, 55 bp, Artificial
  Synthetic oligonucleotide
ccttatcggtcagcgcactgatgaccagatgcctgttatcggctgagggaacggc

SEQ ID NO: 183188 - DNA, 53 bp, Artificial
  Synthetic oligonucleotide
ccttatgggaaacagcggtgaatacgcttaaaacgaccacccgggaagagcga

SEQ ID NO: 183189 - DNA, 54 bp, Artificial
  Synthetic oligonucleotide
ccttcaaacggttactcgtagctacccctgccggtggctctcgtgagggacagg

SEQ ID NO: 183190 - DNA, 55 bp, Artificial
  Synthetic oligonucleotide
ctgagtgttcggcacattcgctttatggctttagggtcagcgattggtaccggct

SEQ ID NO: 183191 - DNA, 55 bp, Artificial
  Synthetic oligonucleotide
ctgagtgtagcttgcgagggcgctatcttgcttcgcttcgcgctacgcttgcgcc

SEQ ID NO: 183192 - DNA, 55 bp, Artificial
  Synthetic oligonucleotide
ccttcagatgtgtatgacggctgatacaaatatgggtatagctcggtttcaccag

SEQ ID NO: 183193 - DNA, 60 bp, Artificial
  Synthetic oligonucleotide
gctgacaggcttcggtaaaggcgttccgcatcctcatggagtttctcgcagaaatcagcc

SEQ ID NO: 183194 - DNA, 55 bp, Artificial
  Synthetic oligonucleotide
ctgagtataatcgcggacaatttgccgggaggaagcatggttcagtgtgtacgac

SEQ ID NO: 183195 - DNA, 55 bp, Artificial
  Synthetic oligonucleotide
ccttcagtccaggcgataatgtcctgcggtgtggcttccacgcgtgacgtcgggt

SEQ ID NO: 183196 - DNA, 55 bp, Artificial
  Synthetic oligonucleotide
ctgaggtagtcgcaatgtagttactgtcccgactaccggcggaacacgagtcacc

SEQ ID NO: 183197 - DNA, 55 bp, Artificial
  Synthetic oligonucleotide
ctgaggcgtctggacgcaactgattcccggtgcgacacttcattcactttccgct

SEQ ID NO: 183198 - DNA, 55 bp, Artificial
  Synthetic oligonucleotide
ccaccctgcttcctctaggatgctatatccccacctgcttgctaagatcgctggt

SEQ ID NO: 183199 - DNA, 55 bp, Artificial
  Synthetic oligonucleotide
ctgaggcgcaacaacggccactgggactttaccgcccacggtaaagcaagcggtg

SEQ ID NO: 183200 - DNA, 55 bp, Artificial
  Synthetic oligonucleotide
ctgaggacactctcctgcccttttatcttggggaaaaggatgacgccagctacgc

SEQ ID NO: 183201 - DNA, 55 bp, Artificial
  Synthetic oligonucleotide
ctgagcggtcacgcagaagtacaggcccgctactggtcgttacgtcgctgcatgg

SEQ ID NO: 183202 - DNA, 55 bp, Artificial
  Synthetic oligonucleotide
cactaggacctagtttagttaactcactcagagtgtacttagttactaatgcacg

SEQ ID NO: 183203 - DNA, 55 bp, Artificial
  Synthetic oligonucleotide
cctgttggtgctacgtgaacatggtattgtgatgacaaaactcgagtcacgcccc

SEQ ID NO: 183204 - DNA, 60 bp, Artificial
  Synthetic oligonucleotide
gctctttcaaccgcttaaaccccgcattcatcgcggtcagcgtctcaccaagcgcgtcaa

SEQ ID NO: 183205 - DNA, 55 bp, Artificial
  Synthetic oligonucleotide
ccaccgttgcagttgcgtctcaaccaacaattacgtattctgagggctcaggtga

SEQ ID NO: 183206 - DNA, 55 bp, Artificial
  Synthetic oligonucleotide
ctgatgtccagtggtggtaagtacggggctgaccatatagacaagtttaactgcc

SEQ ID NO: 183207 - DNA, 55 bp, Artificial
  Synthetic oligonucleotide
cacgttccagacttaaatccggagaacgtgatgatgactgagttcaaacgcaccc

SEQ ID NO: 183208 - DNA, 52 bp, Artificial
  Synthetic oligonucleotide
ccttaagcccacccaatgtggcaaccgttttaattaaattttctcgctgttc

SEQ ID NO: 183209 - DNA, 55 bp, Artificial
  Synthetic oligonucleotide
ccttacagcacgtttgaaccgcatatcgcggcttctgcttacggatggctgtctg

SEQ ID NO: 183210 - DNA, 55 bp, Artificial
  Synthetic oligonucleotide
ctgatgcgctggacattgttgattcagttacaaaccgtacccaagttcaacgcgc

SEQ ID NO: 183211 - DNA, 55 bp, Artificial
  Synthetic oligonucleotide
ctgatgcgatatagagatttactcttccagcgaatatggcagtggctcgatacgc

SEQ ID NO: 183212 - DNA, 55 bp, Artificial
  Synthetic oligonucleotide
ccttacgcagcgtcaagcggaatcgtgtcaatcattgcgacaaatcaatcctatg

SEQ ID NO: 183213 - DNA, 55 bp, Artificial
  Synthetic oligonucleotide
ctgatgattacaggcgtaagaaccattgaattacgtgctgcattatggtcggaat

SEQ ID NO: 183214 - DNA, 52 bp, Artificial
  Synthetic oligonucleotide
ccacccttgtaattttaacaccccaaggttttgtagcttcatcaactatgtt

SEQ ID NO: 183215 - DNA, 60 bp, Artificial
  Synthetic oligonucleotide
atgcatatccggaatgatgttcattgcaccgggtgtgtgcatatgtttagtataggcaga

SEQ ID NO: 183216 - DNA, 49 bp, Artificial
  Synthetic oligonucleotide
agtttactaagttttttccgccaaattgtgaggtaaagtttactctaac

SEQ ID NO: 183217 - DNA, 55 bp, Artificial
  Synthetic oligonucleotide
ctgatgaccataagtatgtctcagcacaatcatcgtaacgcgctggctaacctgg

SEQ ID NO: 183218 - DNA, 55 bp, Artificial
  Synthetic oligonucleotide
ctgatcgcgcagccgttaaaacctaagcgccgggatctatttggccgctaacgtt

SEQ ID NO: 183219 - DNA, 55 bp, Artificial
  Synthetic oligonucleotide
ctgatcagggtacatcaccacatccacacctttcggagcccagtatttgttggcg

SEQ ID NO: 183220 - DNA, 55 bp, Artificial
  Synthetic oligonucleotide
ctgatcaaccgtcctgttgtggtgagtcccctggggacgcgactgtgccgacctt

SEQ ID NO: 183221 - DNA, 55 bp, Artificial
  Synthetic oligonucleotide
ctgatatggggtttgcctcacggcgttacggtttatagcgggatgcaatactcgc

SEQ ID NO: 183222 - DNA, 55 bp, Artificial
  Synthetic oligonucleotide
cagaatggtgattatctgagcactaaataccgcgaacgttaaaacgcacagcgaa

SEQ ID NO: 183223 - DNA, 55 bp, Artificial
  Synthetic oligonucleotide
cagaatgcccgccgtttctttggcaatggttttgtagcgttcgccggtcaggacg

SEQ ID NO: 183224 - DNA, 55 bp, Artificial
  Synthetic oligonucleotide
cgaccgtgcgtcgccgtcgatcctgcatatcagaacgaaaactggggcgggaaga

SEQ ID NO: 183225 - DNA, 52 bp, Artificial
  Synthetic oligonucleotide
ccaacggtggttctttctcgttcaaaacgttcggcgactctcacgcccgacg

SEQ ID NO: 183226 - DNA, 55 bp, Artificial
  Synthetic oligonucleotide
ctccctcggaatgtacctggtggtttacggtcttcgcaacgctggactgacagaa

SEQ ID NO: 183227 - DNA, 60 bp, Artificial
  Synthetic oligonucleotide
agtttagccgtagttgggctgagaattcaagaactctgcatcagtaatctcttgtacacc

SEQ ID NO: 183228 - DNA, 55 bp, Artificial
  Synthetic oligonucleotide
cgaccggataaccgcctgttcgagtacaccgccaccattgacctggcgaacaaag

SEQ ID NO: 183229 - DNA, 55 bp, Artificial
  Synthetic oligonucleotide
ctccctttccagcgctgacggatttacgcatgaactgcgcgcaatgcaacagcga

SEQ ID NO: 183230 - DNA, 55 bp, Artificial
  Synthetic oligonucleotide
cgaccgctgcatcagaactgttcgtttgataactatcgggttgagtgcgacggac

SEQ ID NO: 183231 - DNA, 55 bp, Artificial
  Synthetic oligonucleotide
cagaatctgcggggctaacactgcgaatcagtaacggcagacatggcagcacgac

SEQ ID NO: 183232 - DNA, 55 bp, Artificial
  Synthetic oligonucleotide
ctccgcgctgtagaagtcaccattgttgtgcacgacgacatcattccgtggcgtt

SEQ ID NO: 183233 - DNA, 55 bp, Artificial
  Synthetic oligonucleotide
ctccgctaatattggagaggtatcaggctattacatcgcgacgtttcccctgaat

SEQ ID NO: 183234 - DNA, 54 bp, Artificial
  Synthetic oligonucleotide
ctccgctggacgctaaaggttgtactcgcctggtaccaccccgtactgactacc

SEQ ID NO: 183235 - DNA, 55 bp, Artificial
  Synthetic oligonucleotide
ctccggagctgcctggtgttaaacagaaacgcgcggcacttgtgacgttcactcg

SEQ ID NO: 183236 - DNA, 55 bp, Artificial
  Synthetic oligonucleotide
ctccgtcactaaatggggtcattcggcgattgtgaataccagcggcaacggcgac

SEQ ID NO: 183237 - DNA, 55 bp, Artificial
  Synthetic oligonucleotide
ctcgactcacttcgataactgcattcattcgatcccatacttgagacgccaaatc

SEQ ID NO: 183238 - DNA, 48 bp, Artificial
  Synthetic oligonucleotide
agttttttaaaatttctactaaaaaattatatctaaaaacaggaagta

SEQ ID NO: 183239 - DNA, 55 bp, Artificial
  Synthetic oligonucleotide
cgacaggccagtaatgtgcgtttgaccagagatacgatcaactcattaaattcgg

SEQ ID NO: 183240 - DNA, 55 bp, Artificial
  Synthetic oligonucleotide
ctcgaagttactttgagaaactcgattgataaagaagcgacaaaactaataggcc

SEQ ID NO: 183241 - DNA, 55 bp, Artificial
  Synthetic oligonucleotide
cgacagttaccagcatatcaagcaggtccgttcggtgagaggctctcgcttaccc

SEQ ID NO: 183242 - DNA, 53 bp, Artificial
  Synthetic oligonucleotide
ctcgaaggctctatttccaccctcgacgaagattcttccaccgggtaaacgag

SEQ ID NO: 183243 - DNA, 55 bp, Artificial
  Synthetic oligonucleotide
cgacatagctgcgaccctctttgacttcgactgtgatggtttcccggaaccacga

SEQ ID NO: 183244 - DNA, 55 bp, Artificial
  Synthetic oligonucleotide
cagaagcatatacgtaatgccgggtatgttgttccacgctgccctttggggtaca

SEQ ID NO: 183245 - DNA, 55 bp, Artificial
  Synthetic oligonucleotide
cgacattcaccgcaggaaaacacggtattcaaatcggtgcttattatgggccggc

SEQ ID NO: 183246 - DNA, 55 bp, Artificial
  Synthetic oligonucleotide
ctccttcggtcctccgatcgttgtcagaagtaagttggccgcagtgttatcactc

SEQ ID NO: 183247 - DNA, 55 bp, Artificial
  Synthetic oligonucleotide
ctccttcatgagtgttacatggcagatgaagtcgttagcacagttacacgtgatc

SEQ ID NO: 183248 - DNA, 55 bp, Artificial
  Synthetic oligonucleotide
ctcctgtgacgttgactgacacactaccggaattcgcgacggcagattaagcgct

SEQ ID NO: 183249 - DNA, 50 bp, Artificial
  Synthetic oligonucleotide
ataaaacaggcaacaacccccccggaaaactgccggaaacgcgcccgata

SEQ ID NO: 183250 - DNA, 55 bp, Artificial
  Synthetic oligonucleotide
cgacatttcccagctcacgaaagtggtttaccagacgtttgatagacttacgcag

SEQ ID NO: 183251 - DNA, 55 bp, Artificial
  Synthetic oligonucleotide
ccaacgtaaatcaagtcggtgcaggcaacgcctcatacgttaatcagaactaact

SEQ ID NO: 183252 - DNA, 55 bp, Artificial
  Synthetic oligonucleotide
cgaccagcatcgctgggtattgcgtatgacgctgtggagcctgccgttaccgtgg

SEQ ID NO: 183253 - DNA, 55 bp, Artificial
  Synthetic oligonucleotide
cagaaggtcagccatacggcgtgcgggctctgtcagctcactgttcctgagttcg

SEQ ID NO: 183254 - DNA, 55 bp, Artificial
  Synthetic oligonucleotide
cagaatcaggatgcgtttctgtatggcgtcgactactcaatccatactcacggag

SEQ ID NO: 183255 - DNA, 55 bp, Artificial
  Synthetic oligonucleotide
ctccgtgctgaatgctcaatttaatttgtggggtgacggaaatcgaccaacagtt

SEQ ID NO: 183256 - DNA, 55 bp, Artificial
  Synthetic oligonucleotide
ctcatagcttctccatcacgcccaagtgatcagaaccttaaaacagcgtagacgc

SEQ ID NO: 183257 - DNA, 55 bp, Artificial
  Synthetic oligonucleotide
ccaacggcggaaagcgttgcacaatgcacagtcgatcgggttagcggcctgggga

SEQ ID NO: 183258 - DNA, 55 bp, Artificial
  Synthetic oligonucleotide
cgacggaaaatatgcgcgacatgccaggtatctttacgattcagaacgtagggag

SEQ ID NO: 183259 - DNA, 55 bp, Artificial
  Synthetic oligonucleotide
cgacggagcgttgaaatgccgcgtcgtatcctggtcagacggtcggtaaaatgcc

SEQ ID NO: 183260 - DNA, 60 bp, Artificial
  Synthetic oligonucleotide
gctctgcctgaatgtgtttggcagcggggcgtacagtaaaccagcacaaatcagcctgga

SEQ ID NO: 183261 - DNA, 55 bp, Artificial
  Synthetic oligonucleotide
cgacgggtaattacttaccgcgcaccagaggcagattctcgccgctccagcctgc

SEQ ID NO: 183262 - DNA, 55 bp, Artificial
  Synthetic oligonucleotide
cagaccagagagttcagactgaaccttgcgcagcgatgtggtgagcttattaacg

SEQ ID NO: 183263 - DNA, 55 bp, Artificial
  Synthetic oligonucleotide
cgacggtagacgctttattattcgggagggctgctccgctgtagccagaaccgac

SEQ ID NO: 183264 - DNA, 55 bp, Artificial
  Synthetic oligonucleotide
ctcaggctacctcaatggtcaatacgatactcagcaaaagggttatcgcagcgag

SEQ ID NO: 183265 - DNA, 55 bp, Artificial
  Synthetic oligonucleotide
cagaccggagatctcacgatcgacccaacctttagggtccagttctaccgtggga

SEQ ID NO: 183266 - DNA, 55 bp, Artificial
  Synthetic oligonucleotide
cgacggttatcccaggttgaaatgacgtccgagctggtaccgacctggctgtgcg

SEQ ID NO: 183267 - DNA, 55 bp, Artificial
  Synthetic oligonucleotide
cagaccggccataactttcggcagctcatctttacgtttgtagatgcgcagacct

SEQ ID NO: 183268 - DNA, 55 bp, Artificial
  Synthetic oligonucleotide
ctcagctacgacccactcgggtagctcggtagtcaaagtaacgcgatgaaatggt

SEQ ID NO: 183269 - DNA, 55 bp, Artificial
  Synthetic oligonucleotide
cagaccggggccgatgtactgtgttggcaaggggcgtgtatcgtgcatgacgagt

SEQ ID NO: 183270 - DNA, 55 bp, Artificial
  Synthetic oligonucleotide
cgacgtccctaaggcatattccgattgcgcgataaacgccaccagacccagtaag

SEQ ID NO: 183271 - DNA, 60 bp, Artificial
  Synthetic oligonucleotide
gctctcgaaaagtgcatgtacgaagcaaactcaacttactcacacgcgatacttgccgta

SEQ ID NO: 183272 - DNA, 55 bp, Artificial
  Synthetic oligonucleotide
ccaacaccgtgacgacatatatatttaagccattatacaccccgctagtgctccg

SEQ ID NO: 183273 - DNA, 55 bp, Artificial
  Synthetic oligonucleotide
ctcagcgatctgtctatttcgttcatccatagttgcctgactccccgtcgtgtag

SEQ ID NO: 183274 - DNA, 54 bp, Artificial
  Synthetic oligonucleotide
cgactactttcattgtcgtcaccacgtggagggataggttactctgtaaacccc

SEQ ID NO: 183275 - DNA, 55 bp, Artificial
  Synthetic oligonucleotide
ctcccactcgttcaacacataggacgggtaatagccacgcaactgcacatcggta

SEQ ID NO: 183276 - DNA, 55 bp, Artificial
  Synthetic oligonucleotide
cgacctcagatgaacgtgtgaatctaacgagttctcgcgtagctgacgccatcag

SEQ ID NO: 183277 - DNA, 55 bp, Artificial
  Synthetic oligonucleotide
ctccattttcattgagcctgcatcgtcatttaggatgacacccctctacgatgtc

SEQ ID NO: 183278 - DNA, 55 bp, Artificial
  Synthetic oligonucleotide
cgacctgataatccattatgtttgatgagtaacactgtagcttgattctcgcttc

SEQ ID NO: 183279 - DNA, 55 bp, Artificial
  Synthetic oligonucleotide
cgacctgattttccccgaacatggggatcgatagtgcgtgttaaggagaagcaac

SEQ ID NO: 183280 - DNA, 55 bp, Artificial
  Synthetic oligonucleotide
cagacaaccaggttcagccgtataaccgtgcttcctgggtgcataaaacgggcgc

SEQ ID NO: 183281 - DNA, 55 bp, Artificial
  Synthetic oligonucleotide
ctccagtccgcagaaccaggctttattcgtcagatacgccaccggaatacgctcg

SEQ ID NO: 183282 - DNA, 60 bp, Artificial
  Synthetic oligonucleotide
gctctccagagccggctacagcgagacaacccgcacgaagatttctatcgtccctgcaga

SEQ ID NO: 183283 - DNA, 55 bp, Artificial
  Synthetic oligonucleotide
cgacgacgttccactattcatctgattataattctagccccttaaaccgcggact

SEQ ID NO: 183284 - DNA, 55 bp, Artificial
  Synthetic oligonucleotide
ctccagcgccctaagcggcactctgagtctggtcatgtggtgtagcgaccagcat

SEQ ID NO: 183285 - DNA, 55 bp, Artificial
  Synthetic oligonucleotide
cgacgcaccagtttcccatagctcaacgccgtaaacagaatcgcgattaacgcga

SEQ ID NO: 183286 - DNA, 55 bp, Artificial
  Synthetic oligonucleotide
cgacgcagtagatgctataggaagcaaagacatacctgtcatagcggatggaggg

SEQ ID NO: 183287 - DNA, 55 bp, Artificial
  Synthetic oligonucleotide
ctccacgctgttacaggcgaaagggacgctgcggttacataaagacgcgcgacca

SEQ ID NO: 183288 - DNA, 55 bp, Artificial
  Synthetic oligonucleotide
cgacgcagtggcatttgtcgagagtattccattctccgagacgcgcggttatgtg

SEQ ID NO: 183289 - DNA, 55 bp, Artificial
  Synthetic oligonucleotide
ctcatttaaattatctgcgaaaatcaaatcttcattcgtctcctgactttcgcgc

SEQ ID NO: 183290 - DNA, 55 bp, Artificial
  Synthetic oligonucleotide
ctcattaagcggtaccttcaccacgcgtcggtaagtgtgtagtagactgaaggcg

SEQ ID NO: 183291 - DNA, 55 bp, Artificial
  Synthetic oligonucleotide
cgacgctcaagtcagaggtggcgaaacccgacaggactataaagataccaggcgt

SEQ ID NO: 183292 - DNA, 55 bp, Artificial
  Synthetic oligonucleotide
ctcatcaaatctttactaagcctccaccacgttttagtgagtcatctttagtacg

SEQ ID NO: 183293 - DNA, 60 bp, Artificial
  Synthetic oligonucleotide
gctctcatggacagcgctatatacagttttaaggctgcgaccttatgtgacggttttcct

SEQ ID NO: 183294 - DNA, 55 bp, Artificial
  Synthetic oligonucleotide
cgaagctttctgctatgccattgctttccgggcttcgcactgctgtcgtacaagg

SEQ ID NO: 183295 - DNA, 55 bp, Artificial
  Synthetic oligonucleotide
cgaagcggcgcggaactagcctgtccaccggggtcatctatcgtcgcacgacttg

SEQ ID NO: 183296 - DNA, 55 bp, Artificial
  Synthetic oligonucleotide
cagaaatagctaacggcttactggcaaggtctatcaacaatgctttacctaacgc

SEQ ID NO: 183297 - DNA, 54 bp, Artificial
  Synthetic oligonucleotide
cgaagcctgtatcgtcaaagcgcgtcgtttaattaaactgtataacgaagcggg

SEQ ID NO: 183298 - DNA, 55 bp, Artificial
  Synthetic oligonucleotide
cgaagccctgagagcatgaacaaactttgattaccattacttagctccttcctgc

SEQ ID NO: 183299 - DNA, 55 bp, Artificial
  Synthetic oligonucleotide
cactttacgccttatgaaccggaatcaccggcattccccggtgcggcatacctta

SEQ ID NO: 183300 - DNA, 55 bp, Artificial
  Synthetic oligonucleotide
ctcgttctctgatcccacatcccagctttgccatcaaacggacaacccagggaca

SEQ ID NO: 183301 - DNA, 55 bp, Artificial
  Synthetic oligonucleotide
cgaagcatcatcgcataacgtggttctaatttctgttcatgacgttctatacgca

SEQ ID NO: 183302 - DNA, 55 bp, Artificial
  Synthetic oligonucleotide
ccaatattctggcgtaagctgttaacaccaacccttgcaaatcgtcggaaccgat

SEQ ID NO: 183303 - DNA, 55 bp, Artificial
  Synthetic oligonucleotide
ctctaacaggtggagtaggtattaatggattgactgcctcagctaacggcgcagc

SEQ ID NO: 183304 - DNA, 54 bp, Artificial
  Synthetic oligonucleotide
atacgtgccggttacagagcgactttaaaggggttcccatggtaagtgagaaca

SEQ ID NO: 183305 - DNA, 55 bp, Artificial
  Synthetic oligonucleotide
ctctaaggcgttcagcaaatgtctttccagctccgtcactctgtgtcactccgtc

SEQ ID NO: 183306 - DNA, 55 bp, Artificial
  Synthetic oligonucleotide
ctctacagcaataacgttatgaccagaagcgaaacaactacgattacaaaatcgg

SEQ ID NO: 183307 - DNA, 55 bp, Artificial
  Synthetic oligonucleotide
ctctaccggttgccatccccgggttaacaggcgttgccatagcgcagagaacggg

SEQ ID NO: 183308 - DNA, 55 bp, Artificial
  Synthetic oligonucleotide
ctctactaattattcatctgccgctaccctcaatacatcgagtagaaccaggcgc

SEQ ID NO: 183309 - DNA, 55 bp, Artificial
  Synthetic oligonucleotide
cactttaccatgccggagagataaaaggccgtcaggatgtgattcaggcgctcac

SEQ ID NO: 183310 - DNA, 55 bp, Artificial
  Synthetic oligonucleotide
ctctgccatgccatccgccatgattaaatcctcgttcgtttcccgctccagttgc

SEQ ID NO: 183311 - DNA, 55 bp, Artificial
  Synthetic oligonucleotide
ccaatttcgaactacacttaacgagcatctcttacctgaggtaaccatcatgccg

SEQ ID NO: 183312 - DNA, 55 bp, Artificial
  Synthetic oligonucleotide
ctctctttaatcacccgtaagaagacgctatcgtcctggctctcttcgtagctca

SEQ ID NO: 183313 - DNA, 55 bp, Artificial
  Synthetic oligonucleotide
ctctctgtacggtgtcgttaaatttagttcgaccgtgcgcttccggttgtggcac

SEQ ID NO: 183314 - DNA, 55 bp, Artificial
  Synthetic oligonucleotide
ccaatgtttgaccgttgccgatactgttattaccgaaaatataatatccaacgtc

SEQ ID NO: 183315 - DNA, 52 bp, Artificial
  Synthetic oligonucleotide
gcgtacgttcacaaactgtaaatgtacgggttaaacccgtacacgcccagta

SEQ ID NO: 183316 - DNA, 55 bp, Artificial
  Synthetic oligonucleotide
cacttcgacatgtcagcagaacgtatacgcgatcagatgtctgtcatggccagtc

SEQ ID NO: 183317 - DNA, 55 bp, Artificial
  Synthetic oligonucleotide
cgaaattaccggccagagaggatagtataggcaatcttaagtatcgcaaatggca

SEQ ID NO: 183318 - DNA, 55 bp, Artificial
  Synthetic oligonucleotide
ccaatgccgcgaaatgagagatacggggtagactgttgcataacgtctccgtgag

SEQ ID NO: 183319 - DNA, 55 bp, Artificial
  Synthetic oligonucleotide
cacttctgacggctcagtcagatataaaattacgggatcactctatggaaaacgc

SEQ ID NO: 183320 - DNA, 55 bp, Artificial
  Synthetic oligonucleotide
ctctccaatagaagcacggcatccgaatcgaatctttcgtatttctcctgaccgc

SEQ ID NO: 183321 - DNA, 55 bp, Artificial
  Synthetic oligonucleotide
ccaatcctcactggaaccaaaaccgcagaactgttcgcttacgagctggatggta

SEQ ID NO: 183322 - DNA, 55 bp, Artificial
  Synthetic oligonucleotide
ctctagggattattgtcactttatgaacaggatcatgacctggaactaacctgcc

SEQ ID NO: 183323 - DNA, 55 bp, Artificial
  Synthetic oligonucleotide
cacttgcttcaacaggtgagactgttgcagctggccacttgcagcctgcatacgc

SEQ ID NO: 183324 - DNA, 55 bp, Artificial
  Synthetic oligonucleotide
ccaatcccgatggggttactggccgttctccagccatgaaaacacactgctcgcc

SEQ ID NO: 183325 - DNA, 55 bp, Artificial
  Synthetic oligonucleotide
ctctagattcaattcgtggtgtgattcgccttatgaatcgagtttcaaggcggtg

SEQ ID NO: 183326 - DNA, 60 bp, Artificial
  Synthetic oligonucleotide
atgcatcgatgctgcagcacaagcatgattaggcaaaaccctcacgcgcatacctacagg

SEQ ID NO: 183327 - DNA, 60 bp, Artificial
  Synthetic oligonucleotide
atactgggagtgaaggaatacaactgcgataaacctgagtgccccacgtcagatacgtca

SEQ ID NO: 183328 - DNA, 55 bp, Artificial
  Synthetic oligonucleotide
cgaacgccccagccaaggtactagatttaggcaccggcaacggtgcgatagcact

SEQ ID NO: 183329 - DNA, 55 bp, Artificial
  Synthetic oligonucleotide
ccaagagcacatcagggatctgcaattgccaacgttcaccatcgatactgccacg

SEQ ID NO: 183330 - DNA, 55 bp, Artificial
  Synthetic oligonucleotide
cagaacgagctgttactacttatttagaaagttactgccgtttaccaatcgccag

SEQ ID NO: 183331 - DNA, 55 bp, Artificial
  Synthetic oligonucleotide
cgaatggacaggcctaaaccgggcacagtctgccctaacccgtctgcatgaagcg

SEQ ID NO: 183332 - DNA, 55 bp, Artificial
  Synthetic oligonucleotide
ctcgctacggtatccaccatccattgcatatcgtcagcggtagaaacaatacgcg

SEQ ID NO: 183333 - DNA, 55 bp, Artificial
  Synthetic oligonucleotide
cagaacgcgaattgagctggaacataccgctgctgaacctgaatctgcctaagat

SEQ ID NO: 183334 - DNA, 55 bp, Artificial
  Synthetic oligonucleotide
cgacaacaatttcccattgaagcggtgtgtcaggtatttggtgtatccaggagcg

SEQ ID NO: 183335 - DNA, 55 bp, Artificial
  Synthetic oligonucleotide
cgacacaagacaggataagcagggtgttgctgtgcgaggctgcgtgaaccatccg

SEQ ID NO: 183336 - DNA, 55 bp, Artificial
  Synthetic oligonucleotide
ccaactcactgtcaacatggtagtgatgaggcattccgcaaccccgctgcggcag

SEQ ID NO: 183337 - DNA, 55 bp, Artificial
  Synthetic oligonucleotide
ccaacgtgagtggatgggttacgttcacatttactcctgcacacaaatcgtcaca

SEQ ID NO: 183338 - DNA, 60 bp, Artificial
  Synthetic oligonucleotide
gcgtacacgcacaatctgccgcgactgcctatcgagccagtgcgtttcacgcatctctgc

SEQ ID NO: 183339 - DNA, 55 bp, Artificial
  Synthetic oligonucleotide
ctcgcccgacttggacatacactcattctgttcagaaatagtattgcggctaatc

SEQ ID NO: 183340 - DNA, 55 bp, Artificial
  Synthetic oligonucleotide
ctcgccaccatcaaagtggactactttcgccgtttctatagctactacgaactca

SEQ ID NO: 183341 - DNA, 55 bp, Artificial
  Synthetic oligonucleotide
ctcgcatgatggatcgtccagttatcaaatgatcccgggtatgttccgttttgta

SEQ ID NO: 183342 - DNA, 55 bp, Artificial
  Synthetic oligonucleotide
ctcgcaaagccgtcaacctcacggttgtcgcctgcataggggcgcattatctcgg

SEQ ID NO: 183343 - DNA, 55 bp, Artificial
  Synthetic oligonucleotide
ctcgatgtatttagggtagcggcagatgaataattagtagagggatagcagctcc

SEQ ID NO: 183344 - DNA, 55 bp, Artificial
  Synthetic oligonucleotide
ctcgatgaactggctgattatctcgatttgagcgcctcagcgcgccgtagcatcg

SEQ ID NO: 183345 - DNA, 55 bp, Artificial
  Synthetic oligonucleotide
cgacagcgattactgtccgccgctgatgcaattatgctcgactggcgcacagagc

SEQ ID NO: 183346 - DNA, 55 bp, Artificial
  Synthetic oligonucleotide
ctcgtcataaaaccattgtaacctgagagatggtgcctttgggcggtacacccgt

SEQ ID NO: 183347 - DNA, 55 bp, Artificial
  Synthetic oligonucleotide
cgaaggcccgggtaactactatgcgccaaccatcctcgccgatgttacacctgag

SEQ ID NO: 183348 - DNA, 55 bp, Artificial
  Synthetic oligonucleotide
cgaaggtctggactttattcatcatgccgatacgccactgtaaacggcgatcgtc

SEQ ID NO: 183349 - DNA, 60 bp, Artificial
  Synthetic oligonucleotide
atactttaccaccggagtagcgatctcgtctgtatgcatatttgacagcgctggtgatct

SEQ ID NO: 183350 - DNA, 55 bp, Artificial
  Synthetic oligonucleotide
ctcggtttgtaccataccggggatcacatgaggattgatgcgaacgttcatgttt

SEQ ID NO: 183351 - DNA, 55 bp, Artificial
  Synthetic oligonucleotide
cgaaggttaagtgtaatgtctatggctcattaagagggcgctaagatcgcccctc

SEQ ID NO: 183352 - DNA, 55 bp, Artificial
  Synthetic oligonucleotide
ctcggtgggataggagcggcgctaaaatcagtcggtgataccttagacccctacg

SEQ ID NO: 183353 - DNA, 55 bp, Artificial
  Synthetic oligonucleotide
cagaacaacatgagataaagcggctgaacgtcagatgagtcacatcggtaagggg

SEQ ID NO: 183354 - DNA, 55 bp, Artificial
  Synthetic oligonucleotide
cgaaggttttcatactcacgaacccaatggcctggggcttacgcctgcggctggt

SEQ ID NO: 183355 - DNA, 55 bp, Artificial
  Synthetic oligonucleotide
cgaagtatcaacgtcatcccctttgataaacgtgcgcagcactggcgtaacgggc

SEQ ID NO: 183356 - DNA, 53 bp, Artificial
  Synthetic oligonucleotide
cgaataaaaggtaggccgagcgttatattcactccccgaccgaatccctggta

SEQ ID NO: 183357 - DNA, 55 bp, Artificial
  Synthetic oligonucleotide
ctcgggtcgccgaccaaagctaaccgagaattctactagcgcgaccaaacgctag

SEQ ID NO: 183358 - DNA, 55 bp, Artificial
  Synthetic oligonucleotide
ctcggggaaggtatcgggcggactttcatgctccagagacgaacactggggaacg

SEQ ID NO: 183359 - DNA, 55 bp, Artificial
  Synthetic oligonucleotide
cgaataggtggcggtataaccgtatgtaggtagtacgtgattggtgccagaagcg

SEQ ID NO: 183360 - DNA, 60 bp, Artificial
  Synthetic oligonucleotide
atagaaatacaagtagagcataccgacgggcgcgataaatattgagaagcaccagcacag

SEQ ID NO: 183361 - DNA, 55 bp, Artificial
  Synthetic oligonucleotide
ccaaggagttaaccaatgagtcatcaggatgccctgtttcccatcgtcaaagacg

SEQ ID NO: 183362 - DNA, 55 bp, Artificial
  Synthetic oligonucleotide
ctcgggcggtagcgcatgggtggccaaacaagtcgttttgacgtcaataggcagt

SEQ ID NO: 183363 - DNA, 55 bp, Artificial
  Synthetic oligonucleotide
ctcggcttatgtgcggcagtgctcgccagccagctaaatgccggacacgctattc

SEQ ID NO: 183364 - DNA, 55 bp, Artificial
  Synthetic oligonucleotide
cgctcgtcgtttggtatggcttcattcagctccggttcccaacgatcaaggcgag

SEQ ID NO: 183365 - DNA, 55 bp, Artificial
  Synthetic oligonucleotide
cgctcgggtctaactcagcttgaataactgacgtttcccagatccccggcaattg

SEQ ID NO: 183366 - DNA, 55 bp, Artificial
  Synthetic oligonucleotide
cggtaaaccaaacacgctggaggattatatgggtggatagcgacaaattcgaccc

SEQ ID NO: 183367 - DNA, 55 bp, Artificial
  Synthetic oligonucleotide
cgctcgccaagaccgcaccaatcgggtaatctcgaactcgttttgcctcggcggt

SEQ ID NO: 183368 - DNA, 55 bp, Artificial
  Synthetic oligonucleotide
catagtctggcgcgtgaagtgtacgcaagtaacattcttgatgcgtcactgccgc

SEQ ID NO: 183369 - DNA, 55 bp, Artificial
  Synthetic oligonucleotide
cagtaaacgcgtttggctactcgacgtgagaacgaccgacgcctcaatcgcatat

SEQ ID NO: 183370 - DNA, 55 bp, Artificial
  Synthetic oligonucleotide
cggtaaggagtcaaggttatgagtcgcttagtagtcgtatctaaccgtatcgcca

SEQ ID NO: 183371 - DNA, 60 bp, Artificial
  Synthetic oligonucleotide
gcggttgatacctgcgtcacggtacagggaaataggcagactgccgatatattccagcac

SEQ ID NO: 183372 - DNA, 55 bp, Artificial
  Synthetic oligonucleotide
caggtttgggctttgtgcgaaattgtccgtagatcctgttagactagaaagcatt

SEQ ID NO: 183373 - DNA, 55 bp, Artificial
  Synthetic oligonucleotide
cgctcctaattcttctatggtcgtgttgtttatggcgcggagtattagataggct

SEQ ID NO: 183374 - DNA, 55 bp, Artificial
  Synthetic oligonucleotide
cgctccggcaggcaaatctggtgataaagcaaaccaccccacagtaatggacacg

SEQ ID NO: 183375 - DNA, 55 bp, Artificial
  Synthetic oligonucleotide
cgctccgctatgtcagacacaatgacagtgaaagactttgctgccactcgcggtg

SEQ ID NO: 183376 - DNA, 55 bp, Artificial
  Synthetic oligonucleotide
cgctcccgggcgttggctcacccacccaaaggaacgtcacgatgtttggatctca

SEQ ID NO: 183377 - DNA, 55 bp, Artificial
  Synthetic oligonucleotide
cggtacacacaggagacactgtcacttttatggcatggcacacagttcaagagac

SEQ ID NO: 183378 - DNA, 55 bp, Artificial
  Synthetic oligonucleotide
cgctccaggtacggccctcttccggcagacgaatcaaaatacagccgtcgccttc

SEQ ID NO: 183379 - DNA, 55 bp, Artificial
  Synthetic oligonucleotide
cgctcatgagacgttccggcagcaaactgtgtcttatcgccatgataacagcgac

SEQ ID NO: 183380 - DNA, 55 bp, Artificial
  Synthetic oligonucleotide
cggtaccgaaagtgacagcgcaaatgctgactgaggcgattgaacatcatggccc

SEQ ID NO: 183381 - DNA, 55 bp, Artificial
  Synthetic oligonucleotide
catattttactcttttaatgtcatgtaaccaagcatgctctggaccgacagcagg

SEQ ID NO: 183382 - DNA, 60 bp, Artificial
  Synthetic oligonucleotide
gcggtggggtatgccatgccggcctgtgaagggatggtgcagtcagaacgttgtagggat

SEQ ID NO: 183383 - DNA, 55 bp, Artificial
  Synthetic oligonucleotide
cggtaggtccaggtctttcaggatctatagtagtgcacagttgcagatctattgc

SEQ ID NO: 183384 - DNA, 55 bp, Artificial
  Synthetic oligonucleotide
cggtagcgccacataccggattaccgtcaaactgtaccgatattgcccctcctga

SEQ ID NO: 183385 - DNA, 55 bp, Artificial
  Synthetic oligonucleotide
cgctattcgccgtgacgtttcatctttcaggagttgtatgcccacccatttagtc

SEQ ID NO: 183386 - DNA, 55 bp, Artificial
  Synthetic oligonucleotide
cgctattggcaacagcgccagtgcccagcgaatccgcgttatctgcaatcagcgt

SEQ ID NO: 183387 - DNA, 55 bp, Artificial
  Synthetic oligonucleotide
cggtacttaggattcaccatgaacgtaatgtggcctgttgttgcagattgcatgg

SEQ ID NO: 183388 - DNA, 55 bp, Artificial
  Synthetic oligonucleotide
catatggagcatatcttatgaatggtatccctcatttcgactatagcctggcccc

SEQ ID NO: 183389 - DNA, 55 bp, Artificial
  Synthetic oligonucleotide
cggtactgtatcgctttactggcatccattagcgaacgaataaaaggggctatcg

SEQ ID NO: 183390 - DNA, 55 bp, Artificial
  Synthetic oligonucleotide
cgctattgttcatatgcttcccaccgatctgttgttaaatgttggatcggctcac

SEQ ID NO: 183391 - DNA, 55 bp, Artificial
  Synthetic oligonucleotide
catatgattcgaaatatagtacgcgttcaatgtctcgtaacggcatatctaacag

SEQ ID NO: 183392 - DNA, 55 bp, Artificial
  Synthetic oligonucleotide
cgctcacaggtcgcattcattttcggtgtgtacggataggtccagatgtgtttaa

SEQ ID NO: 183393 - DNA, 56 bp, Artificial
  Synthetic oligonucleotide
gcggtgcgcgttacttcccgttcatgtatgacggaaagcggagcttcacccgtcgg

SEQ ID NO: 183394 - DNA, 55 bp, Artificial
  Synthetic oligonucleotide
cgctcacccgtcctctgctgtcgggtttatgtatccccgtcgcccgtggagatga

SEQ ID NO: 183395 - DNA, 55 bp, Artificial
  Synthetic oligonucleotide
cgctcactcatgtaaccgacagtccgcacgtgcctgctacataccgacagactgt

SEQ ID NO: 183396 - DNA, 55 bp, Artificial
  Synthetic oligonucleotide
cggtactccagcataaaagcgtatgtatggtgcaccggttgtcagcggatgtgag

SEQ ID NO: 183397 - DNA, 55 bp, Artificial
  Synthetic oligonucleotide
cgctcagcaagctgacggcgcaagcgtctaagatggacgtcatagcgacgggtag

SEQ ID NO: 183398 - DNA, 55 bp, Artificial
  Synthetic oligonucleotide
cggtactattcgtgctatcacgtcctcttaaggataggaacacaatcagtcagcc

SEQ ID NO: 183399 - DNA, 55 bp, Artificial
  Synthetic oligonucleotide
cgctcatcgtggcttctcgttttactgacttaacgaaacaaccgaatgaaagcgt

SEQ ID NO: 183400 - DNA, 55 bp, Artificial
  Synthetic oligonucleotide
cgggtaaataggcgcagactgtcagggcccgacatccgcaggtatcagcccttcc

SEQ ID NO: 183401 - DNA, 55 bp, Artificial
  Synthetic oligonucleotide
cgggtaatccatccactgtaccgggcgcataatccactataccgggtagattcga

SEQ ID NO: 183402 - DNA, 55 bp, Artificial
  Synthetic oligonucleotide
cgctgggcggcccctgaagccacgaattgcgtgcaaattccgtcacctggcgtta

SEQ ID NO: 183403 - DNA, 55 bp, Artificial
  Synthetic oligonucleotide
cgctggcgatccagtgattcgtctggggttccagatgagtttcgatctccgtatc

SEQ ID NO: 183404 - DNA, 60 bp, Artificial
  Synthetic oligonucleotide
atagacgctccggattgcctgcctgtgagccagttatacagcgagaactggagagaagag

SEQ ID NO: 183405 - DNA, 55 bp, Artificial
  Synthetic oligonucleotide
cgctggagtattaatgtataagcaaacggcaccggggtatttgcaattcgctcac

SEQ ID NO: 183406 - DNA, 54 bp, Artificial
  Synthetic oligonucleotide
cgggtaccgaccaccgaaatcgcagcagtaagctcgttattggcgttaaacacc

SEQ ID NO: 183407 - DNA, 55 bp, Artificial
  Synthetic oligonucleotide
catagagaaaacatagcgaggcatataggcaacagaaccgtccatgctcggggag

SEQ ID NO: 183408 - DNA, 55 bp, Artificial
  Synthetic oligonucleotide
cgggtactgtggtcggggatgccagtagcagaacggggcttaaaccggatcgcga

SEQ ID NO: 183409 - DNA, 55 bp, Artificial
  Synthetic oligonucleotide
cgggtagtaatggtattattgcccgcttacgtcatctgcatggtacagaagaccc

SEQ ID NO: 183410 - DNA, 55 bp, Artificial
  Synthetic oligonucleotide
cgctgccggtatacaacaacgggccgcgaccaacatgttaatcaaaccactggtg

SEQ ID NO: 183411 - DNA, 53 bp, Artificial
  Synthetic oligonucleotide
cgggtatcaaataccccgttactgaatccaatcaggttgcgggcggtattccc

SEQ ID NO: 183412 - DNA, 55 bp, Artificial
  Synthetic oligonucleotide
cgctgagcaaagcacgacggataggacgacgttgttgcatgatggtttgatcccc

SEQ ID NO: 183413 - DNA, 55 bp, Artificial
  Synthetic oligonucleotide
cgggtattattcgccagacgaatcgcctcatcgaaatgcgcataacgccagacgt

SEQ ID NO: 183414 - DNA, 55 bp, Artificial
  Synthetic oligonucleotide
cgctgaccagataccaggtagccgaagtgttattttcatggtccggccactctgt

SEQ ID NO: 183415 - DNA, 55 bp, Artificial
  Synthetic oligonucleotide
atagacgtttaaccagtttttagccagttgcccccaggtgatgcgaccgctagct

SEQ ID NO: 183416 - DNA, 55 bp, Artificial
  Synthetic oligonucleotide
cgggttcagtgcatgcgttagcattacatacgtattcgacaaaagagtgggccag

SEQ ID NO: 183417 - DNA, 55 bp, Artificial
  Synthetic oligonucleotide
cgctcgtgagtctcatcctgtcttaactcaccgtacacccggataagctcgctgg

SEQ ID NO: 183418 - DNA, 55 bp, Artificial
  Synthetic oligonucleotide
cgggttattctcagtgtggctggacaagtgatttaatgcaccatatcagaccaga

SEQ ID NO: 183419 - DNA, 55 bp, Artificial
  Synthetic oligonucleotide
cgggttacgcagctttgcgctggaactacaaagcgccagcaaaccggtagtgcat

SEQ ID NO: 183420 - DNA, 55 bp, Artificial
  Synthetic oligonucleotide
catagcggtcggacgctatttcttcacgcactcggtctgaattcaacaattcgag

SEQ ID NO: 183421 - DNA, 55 bp, Artificial
  Synthetic oligonucleotide
cgggtggtttcgcaaattactcgtcactcgccgtccttcgaaatgcatatggcaa

SEQ ID NO: 183422 - DNA, 55 bp, Artificial
  Synthetic oligonucleotide
cgggtggtcgatctgagtctggataaggcgaatgtcataactacaatacgtttta

SEQ ID NO: 183423 - DNA, 55 bp, Artificial
  Synthetic oligonucleotide
cgctctgcattcatgacctcccggtccgcccttggctcaaacacatcgtgggctg

SEQ ID NO: 183424 - DNA, 55 bp, Artificial
  Synthetic oligonucleotide
cgggtgatacttctgactggtttgtgtctgtcggcccgtccgcaggagcctgctg

SEQ ID NO: 183425 - DNA, 55 bp, Artificial
  Synthetic oligonucleotide
cgggtgactatcgccatgcgctgctggcatcgggagagggctcatcacatgttgc

SEQ ID NO: 183426 - DNA, 57 bp, Artificial
  Synthetic oligonucleotide
gcggtccgacaaatgcacatcctgccccgtcctgtacgtgtttttttcaccagaaca

SEQ ID NO: 183427 - DNA, 55 bp, Artificial
  Synthetic oligonucleotide
cgggtgaccaacaacccgcaacccgttaagtggcgatcgcattccctgaatgcac

SEQ ID NO: 183428 - DNA, 55 bp, Artificial
  Synthetic oligonucleotide
cgggtgaaggtggcattctcacattaatgtcgctggctgggcgtaatacctccga

SEQ ID NO: 183429 - DNA, 55 bp, Artificial
  Synthetic oligonucleotide
cgctctgtcccgttcagggacgcaggtattctccccggcagacgcactgataagt

SEQ ID NO: 183430 - DNA, 55 bp, Artificial
  Synthetic oligonucleotide
cgggtcctgataaaccagacgtagcgacattcctggatgttttatcagcggtacg

SEQ ID NO: 183431 - DNA, 55 bp, Artificial
  Synthetic oligonucleotide
cgggtcccgatgtacatagttggacgacccaatacgttatctcgaaggatggcgg

SEQ ID NO: 183432 - DNA, 55 bp, Artificial
  Synthetic oligonucleotide
cgctgaagtttaactagcggcgtattacctataaattgttccagagttgccactg

SEQ ID NO: 183433 - DNA, 55 bp, Artificial
  Synthetic oligonucleotide
cgggtcaacctgtgtgtggcctatttccacgaggctactgctgcctgcgtgtagc

SEQ ID NO: 183434 - DNA, 55 bp, Artificial
  Synthetic oligonucleotide
caggtcaacgatgccaatagcgagcaggctccagcctatacggtgacggcactga

SEQ ID NO: 183435 - DNA, 55 bp, Artificial
  Synthetic oligonucleotide
catcagctacgtgccttgctgaagaaacaccagatctaatacgcatttgcaggtg

SEQ ID NO: 183436 - DNA, 55 bp, Artificial
  Synthetic oligonucleotide
cagggtggagtgactgactggacgtatccgatcctctcccttcaactgatgcagg

SEQ ID NO: 183437 - DNA, 60 bp, Artificial
  Synthetic oligonucleotide
atgcatggcatcctcagattctctggtacctcatgcgcaatgatacgaactctctgaaga

SEQ ID NO: 183438 - DNA, 59 bp, Artificial
  Synthetic oligonucleotide
gcggtatcacactttttgacgcattggctggacaatccgcatctaccttattcccccga

SEQ ID NO: 183439 - DNA, 55 bp, Artificial
  Synthetic oligonucleotide
catcagtagcacacaatgcccttgagtctatacagaacagcacaagagaaggggc

SEQ ID NO: 183440 - DNA, 55 bp, Artificial
  Synthetic oligonucleotide
cgctaagcgtagccgcctcacccagtcggagcggattttgcgttatacaggcttc

SEQ ID NO: 183441 - DNA, 55 bp, Artificial
  Synthetic oligonucleotide
cagggtgcgacgagagttggcgaaaggctagaaattgatgctattgaacacccag

SEQ ID NO: 183442 - DNA, 55 bp, Artificial
  Synthetic oligonucleotide
cgctaacagcataacagcgagccagcacacgtttaacgtttccatcaagaatcgg

SEQ ID NO: 183443 - DNA, 55 bp, Artificial
  Synthetic oligonucleotide
cagggtgactgccctgttatgcgtttacacactctggtatggttagtctgcactt

SEQ ID NO: 183444 - DNA, 55 bp, Artificial
  Synthetic oligonucleotide
cggtgtcggtagagtggtgaggcatagttgatatccgggaagcgttgcaatccca

SEQ ID NO: 183445 - DNA, 55 bp, Artificial
  Synthetic oligonucleotide
cgcgttttgcgacatgtattaaggtaatcagggaagcgcgattcattatcgtgtc

SEQ ID NO: 183446 - DNA, 53 bp, Artificial
  Synthetic oligonucleotide
cggtgtctttcgtttgcttaagggcatggaataaggctttatccggtccgacc

SEQ ID NO: 183447 - DNA, 55 bp, Artificial
  Synthetic oligonucleotide
cggtgtgatttctctggcaaggtcgctcatggagccgctatccctctatttaggc

SEQ ID NO: 183448 - DNA, 55 bp, Artificial
  Synthetic oligonucleotide
cggtgtgtcctggccaactgttaaattcaattttacccgaatgctgatcgataag

SEQ ID NO: 183449 - DNA, 60 bp, Artificial
  Synthetic oligonucleotide
gcggtacgcgtaatgcggcgttatggtaaatagcctatgctaatgtccgctaagagcgag

SEQ ID NO: 183450 - DNA, 55 bp, Artificial
  Synthetic oligonucleotide
cggtgttacgcgaccagatatttacccatcctacaatgagtgagtctttaaacga

SEQ ID NO: 183451 - DNA, 54 bp, Artificial
  Synthetic oligonucleotide
cggttaaaatgccacctcgtgactattctgaaggggcatccggtttgttacgcc

SEQ ID NO: 183452 - DNA, 55 bp, Artificial
  Synthetic oligonucleotide
cgcgtttcatcaacaaggcgagtataaagcacatcggaacaattttagctggccg

SEQ ID NO: 183453 - DNA, 55 bp, Artificial
  Synthetic oligonucleotide
cgcgtagcgcggaattgctcccctattcaccagttctttgctaaaggaaagcaag

SEQ ID NO: 183454 - DNA, 55 bp, Artificial
  Synthetic oligonucleotide
cgcgtagctctttgagggcccgggttaatgtcggctctgagcattccagactggt

SEQ ID NO: 183455 - DNA, 55 bp, Artificial
  Synthetic oligonucleotide
cgcgtatcaaacgttgccaaccctcccaaagtgtctatccatgatggtagggtgg

SEQ ID NO: 183456 - DNA, 55 bp, Artificial
  Synthetic oligonucleotide
cgcgtcacaaaatagtgttgcatgaactgtcccctctggacggacagcgaggttc

SEQ ID NO: 183457 - DNA, 55 bp, Artificial
  Synthetic oligonucleotide
cggttgatattgggtgataatttccgagactcccgcataaatacgttgcagacgg

SEQ ID NO: 183458 - DNA, 55 bp, Artificial
  Synthetic oligonucleotide
cgcgtcagtccacgctattgcgccatacgcggcacgaactggctaacgatcggca

SEQ ID NO: 183459 - DNA, 55 bp, Artificial
  Synthetic oligonucleotide
cggttgagagcgtacccactgtataactcaacgtcacggtatgcgcagagttgct

SEQ ID NO: 183460 - DNA, 56 bp, Artificial
  Synthetic oligonucleotide
gcggtaccacaggagaggccgtactgacaggcaccaccgttttcacctcccgggca

SEQ ID NO: 183461 - DNA, 55 bp, Artificial
  Synthetic oligonucleotide
cgcgtcagttacagccacaactgcagaaactactggatgaagccgtcagacgggg

SEQ ID NO: 183462 - DNA, 55 bp, Artificial
  Synthetic oligonucleotide
cgcgtgaattgccccttcagttgcgtcagataaggcattaccgcgtcagaaaagg

SEQ ID NO: 183463 - DNA, 55 bp, Artificial
  Synthetic oligonucleotide
cgcgtgtactacttcatgaataaatgagcgtgttgtatcaaatggttgtgggcca

SEQ ID NO: 183464 - DNA, 55 bp, Artificial
  Synthetic oligonucleotide
cgcgttataaatcgtactgcccgcacgttcattagtgccaatcgataccaccatg

SEQ ID NO: 183465 - DNA, 55 bp, Artificial
  Synthetic oligonucleotide
cagggtatgaaaagtctcagggttccaccccagaatacgccatcaacaagtcctg

SEQ ID NO: 183466 - DNA, 55 bp, Artificial
  Synthetic oligonucleotide
cgcgttatttgcttatcagtgcgagtccgttaccatagacttgtgctgccattac

SEQ ID NO: 183467 - DNA, 55 bp, Artificial
  Synthetic oligonucleotide
cggttagctgcgaacggacacgccactaacaaactagcctgattggatttaacgc

SEQ ID NO: 183468 - DNA, 55 bp, Artificial
  Synthetic oligonucleotide
catcatggcggggttagtggacagtcaaacgggtaaaccggtagatgaccccgca

SEQ ID NO: 183469 - DNA, 55 bp, Artificial
  Synthetic oligonucleotide
cgcgttgaatatggggctttatgttttgggtcgattgccaccttgtcaccgcctg

SEQ ID NO: 183470 - DNA, 54 bp, Artificial
  Synthetic oligonucleotide
cggttactggctggtagatggcgcagtcgttaatccggtacctgtttcgttaac

SEQ ID NO: 183471 - DNA, 60 bp, Artificial
  Synthetic oligonucleotide
gcgggtcggccagtcggaaccaatatttcagccgctgttctgtcagagtttgtgattgcg

SEQ ID NO: 183472 - DNA, 55 bp, Artificial
  Synthetic oligonucleotide
cgctaccggcagcgaagccattatgtcggcggttaacagcttgcgccatctggac

SEQ ID NO: 183473 - DNA, 55 bp, Artificial
  Synthetic oligonucleotide
caggtgattccgttccgaaccaaatctatcggtaacatgccgcctgccaatcagg

SEQ ID NO: 183474 - DNA, 55 bp, Artificial
  Synthetic oligonucleotide
caggtgcacctgttctgaatatttcagttaatgacagtacgccagcagtacagac

SEQ ID NO: 183475 - DNA, 55 bp, Artificial
  Synthetic oligonucleotide
caggtgtcatactggcgggtttgacgcataacgtcataaggtttaccatggcgtc

SEQ ID NO: 183476 - DNA, 55 bp, Artificial
  Synthetic oligonucleotide
cgctagatctatctcatctgcgcaaggcagaacgtgaagacggccgccctggacc

SEQ ID NO: 183477 - DNA, 55 bp, Artificial
  Synthetic oligonucleotide
cgctagcacagtgggctaaacggttttatacctcggagcgcacattatctcgtcg

SEQ ID NO: 183478 - DNA, 55 bp, Artificial
  Synthetic oligonucleotide
cgctaggtgacggcataggagtgggctatggccaaagttatcagccctggcttag

SEQ ID NO: 183479 - DNA, 55 bp, Artificial
  Synthetic oligonucleotide
cggtatttgactgggataaccattatgcgaagggcacgactgataccactcgccg

SEQ ID NO: 183480 - DNA, 55 bp, Artificial
  Synthetic oligonucleotide
catcacccgcacgccaaactgatacgtttccagcgtgtcgtttatggctgacaga

SEQ ID NO: 183481 - DNA, 55 bp, Artificial
  Synthetic oligonucleotide
catcaacggcagtagcttcccctactttgatagcctacagttcgccgacaatgta

SEQ ID NO: 183482 - DNA, 57 bp, Artificial
  Synthetic oligonucleotide
gcggggcagatcactggcctgcgtaagcgggcggcggtaggtcgggtcattcgggtc

SEQ ID NO: 183483 - DNA, 55 bp, Artificial
  Synthetic oligonucleotide
cgctatatgcagcgcactcagcatatccaccgtatcatggcgaactatatgccgc

SEQ ID NO: 183484 - DNA, 55 bp, Artificial
  Synthetic oligonucleotide
cggtattctactcgcagcgctctcttatcgcaagacgaagcgacattacgccggg

SEQ ID NO: 183485 - DNA, 55 bp, Artificial
  Synthetic oligonucleotide
cggtattcgttccgacgaatcctataaccggtttgtcgctatcgctaactcgcat

SEQ ID NO: 183486 - DNA, 55 bp, Artificial
  Synthetic oligonucleotide
cgctatcaggggacactatttagaatcgccgccatgaaaacagagaatccaggcg

SEQ ID NO: 183487 - DNA, 55 bp, Artificial
  Synthetic oligonucleotide
cggtatgccagttggattacactgggtgcttcagcgacctgatggcagttttatg

SEQ ID NO: 183488 - DNA, 55 bp, Artificial
  Synthetic oligonucleotide
cggtgcgtagccgcgtggacggtcaactgatggcgttacatttccaggaaggcca

SEQ ID NO: 183489 - DNA, 55 bp, Artificial
  Synthetic oligonucleotide
caggtcagggtattctgatagcgttggaaatctgagtcgcggggtgcgcggcaat

SEQ ID NO: 183490 - DNA, 55 bp, Artificial
  Synthetic oligonucleotide
cgctaatgagtgagcatgataacaattaagcgctaactagccgggcgcgatcacg

SEQ ID NO: 183491 - DNA, 55 bp, Artificial
  Synthetic oligonucleotide
cgctaatgccgattattcccatacgcgcctatcacgggacgtcgtattcttcgcg

SEQ ID NO: 183492 - DNA, 55 bp, Artificial
  Synthetic oligonucleotide
cgctaattcagtaagcctggaattttgtctgatcttgaggaaaaggggaagcgtt

SEQ ID NO: 183493 - DNA, 55 bp, Artificial
  Synthetic oligonucleotide
gcggcgtgccgctaggaacattgggtaacgcctaccttaaccaattaagccagcg

SEQ ID NO: 183494 - DNA, 55 bp, Artificial
  Synthetic oligonucleotide
cgctaattcgccaagcatgattattaactgtgggtctgacttttattgtaaagcg

SEQ ID NO: 183495 - DNA, 50 bp, Artificial
  Synthetic oligonucleotide
cggtcttaccgggctgttatcaaaactaacacttacgttaaccccgaata

SEQ ID NO: 183496 - DNA, 55 bp, Artificial
  Synthetic oligonucleotide
cggtctgcgccccagcttatctgaccatctgcccagcagcggagcaaaacagacc

SEQ ID NO: 183497 - DNA, 55 bp, Artificial
  Synthetic oligonucleotide
caggtccggaacttaatagacagacaatttgaccatcagtagagttaactctcac

SEQ ID NO: 183498 - DNA, 55 bp, Artificial
  Synthetic oligonucleotide
caggtcgtaagccagttccgcatattttacgtagctctcaatacgccccgggcag

SEQ ID NO: 183499 - DNA, 55 bp, Artificial
  Synthetic oligonucleotide
catcactgccagcagaagccctttcttcagattgaactcctccgctttaatgccc

SEQ ID NO: 183500 - DNA, 55 bp, Artificial
  Synthetic oligonucleotide
cggtcccagatggctataggggtcgttaaacaatcccatgtcatattttacgttg

SEQ ID NO: 183501 - DNA, 55 bp, Artificial
  Synthetic oligonucleotide
cggtcatgttacctgacggtatccgttcccctgtgtactgcaggtttagcccggc

SEQ ID NO: 183502 - DNA, 55 bp, Artificial
  Synthetic oligonucleotide
cggtcatcggaagcgtacacataatgtcgggtatgttgttccacactgcctttcg

SEQ ID NO: 183503 - DNA, 55 bp, Artificial
  Synthetic oligonucleotide
cgctacaggagattaaccgtaacgaaaatggaacgctgacgggagcgaagctgcc

SEQ ID NO: 183504 - DNA, 60 bp, Artificial
  Synthetic oligonucleotide
gcggatgccagttgagacgacggccatacgtgtggatggcgcagaagataccgggttcca

SEQ ID NO: 183505 - DNA, 55 bp, Artificial
  Synthetic oligonucleotide
cgctacataatacttgcatgtacatgtgttattgcattaggacaaataggtgtgc

SEQ ID NO: 183506 - DNA, 55 bp, Artificial
  Synthetic oligonucleotide
cgctacatcttgtgatggcgtaaggagattcgcacaatgtgtctgctacccacaa

SEQ ID NO: 183507 - DNA, 55 bp, Artificial
  Synthetic oligonucleotide
cggcactgaataccggctatgaaatatgtgactagataactgtaccgtcgacctc

SEQ ID NO: 183508 - DNA, 55 bp, Artificial
  Synthetic oligonucleotide
cagttgttacgtaactcgctaaagtaatacagcgggcgcaacactagccagcttt

SEQ ID NO: 183509 - DNA, 55 bp, Artificial
  Synthetic oligonucleotide
cggcaatcttagactcgtcctataagcagcaaacgtccagagaacaacgccgctc

SEQ ID NO: 183510 - DNA, 55 bp, Artificial
  Synthetic oligonucleotide
cagtgatcaggtaagaaaatcgccctatgaactagtcaaatatctacgcgacaac

SEQ ID NO: 183511 - DNA, 55 bp, Artificial
  Synthetic oligonucleotide
cggctccaccaattagcaatactgtgtctagccggtgtactgttttctggctccg

SEQ ID NO: 183512 - DNA, 55 bp, Artificial
  Synthetic oligonucleotide
cggcaagcggcgaacgaatcagaggatgcagactaatctcgcactcagagatgaa

SEQ ID NO: 183513 - DNA, 55 bp, Artificial
  Synthetic oligonucleotide
cggctcgtaaacgctggtatgcgcagcgttctctcgatgccatcaagttccgacg

SEQ ID NO: 183514 - DNA, 55 bp, Artificial
  Synthetic oligonucleotide
cggctcgtcggcgcctgaatcctaatttacacgtacctgtagctgtagcgaatga

SEQ ID NO: 183515 - DNA, 60 bp, Artificial
  Synthetic oligonucleotide
atagctgaaacgttattgggtagtatgcgatctggtatcgtcatgggaagcagtcgatta

SEQ ID NO: 183516 - DNA, 55 bp, Artificial
  Synthetic oligonucleotide
cagtgaagtcgatctcattgtctggcgtcacgttaagtgatggcaccacccttac

SEQ ID NO: 183517 - DNA, 55 bp, Artificial
  Synthetic oligonucleotide
cggctgcactcataaggttgtaaatgctcacaatgcacacagccgtgcggaccgg

SEQ ID NO: 183518 - DNA, 55 bp, Artificial
  Synthetic oligonucleotide
cggcaaccactatctcgccagcagccatggtaaccacatccacttaccctgaatc

SEQ ID NO: 183519 - DNA, 55 bp, Artificial
  Synthetic oligonucleotide
cggcaacattggaataatcccgcgcgacgtaaaactgcatcgcaagaattatctg

SEQ ID NO: 183520 - DNA, 55 bp, Artificial
  Synthetic oligonucleotide
cggattaacgactgcgccatctaccagccagtaaccgttatgttcaaccggagac

SEQ ID NO: 183521 - DNA, 55 bp, Artificial
  Synthetic oligonucleotide
cggctgcagatacacagtgaaggactgggctggtgattttcccagcagttcataa

SEQ ID NO: 183522 - DNA, 55 bp, Artificial
  Synthetic oligonucleotide
cggatggtttcatccctgatataattactgtccgtccaagccagtcggtcacgtt

SEQ ID NO: 183523 - DNA, 54 bp, Artificial
  Synthetic oligonucleotide
cggctgcgcaaggaaacgtactttaccttactccaaggggtaggcgcatctttc

SEQ ID NO: 183524 - DNA, 55 bp, Artificial
  Synthetic oligonucleotide
cgggaatttgaagaatttctccaatgcgggcggctggagcatggctttctacggg

SEQ ID NO: 183525 - DNA, 55 bp, Artificial
  Synthetic oligonucleotide
cggagtatggtaagatgcgcgctattttattgatctaagcacgaaacctcatgcg

SEQ ID NO: 183526 - DNA, 60 bp, Artificial
  Synthetic oligonucleotide
gcggagtcagtcatctgatacgggcttcctgtttcggtactgcttattggctgattatcc

SEQ ID NO: 183527 - DNA, 55 bp, Artificial
  Synthetic oligonucleotide
cataaacgcctcaatggtagacagcggctatgcatgggtataccggtttgacggt

SEQ ID NO: 183528 - DNA, 55 bp, Artificial
  Synthetic oligonucleotide
cagtcgcttcggcgctttatcaggcacaggacgacacgttgagtgaggcgccacc

SEQ ID NO: 183529 - DNA, 55 bp, Artificial
  Synthetic oligonucleotide
cggatacagggaggttacggcaagcatggcttacgaatccggcggtaagtagcaa

SEQ ID NO: 183530 - DNA, 55 bp, Artificial
  Synthetic oligonucleotide
cagtcgtacgtctgcaggtaccggaactcgaaggtgaacgtcatctggttatcct

SEQ ID NO: 183531 - DNA, 55 bp, Artificial
  Synthetic oligonucleotide
cgggaactatctttggctatgtctgatatgcaagttcgaccaggacgtaaacggt

SEQ ID NO: 183532 - DNA, 55 bp, Artificial
  Synthetic oligonucleotide
cagtctgaatacgttaacgaattgacgcagaaactacaaaatgcgggcattcgtg

SEQ ID NO: 183533 - DNA, 55 bp, Artificial
  Synthetic oligonucleotide
cggatattagcgcccgcacttgtgttcatgtagcgctggcagcccgtccaatgcg

SEQ ID NO: 183534 - DNA, 55 bp, Artificial
  Synthetic oligonucleotide
cggatcgagatagtcccatcctcgttagactcgagttcattatcggtcagtaccg

SEQ ID NO: 183535 - DNA, 55 bp, Artificial
  Synthetic oligonucleotide
cggatctatgtcgggtgcggagaaagaggtaatgaaatggcagatccctggcttg

SEQ ID NO: 183536 - DNA, 55 bp, Artificial
  Synthetic oligonucleotide
cggatgccgtatgcagtacccatacagagctgactgaatgatggctcgggaatcc

SEQ ID NO: 183537 - DNA, 54 bp, Artificial
  Synthetic oligonucleotide
atagtcggcttaaagttcttttcagttctacataggaacggcccccgctgtctc

SEQ ID NO: 183538 - DNA, 53 bp, Artificial
  Synthetic oligonucleotide
cggcttgttcttacgcttatcaccgaaagtggcgaacggtccttacgggctaa

SEQ ID NO: 183539 - DNA, 50 bp, Artificial
  Synthetic oligonucleotide
cagtgaaagggccgagggcggtaaactccaacaaacgggcaaaggtcttt

SEQ ID NO: 183540 - DNA, 55 bp, Artificial
  Synthetic oligonucleotide
cggatgcgtgccaaagccgcctcaagatgaaaagtcagctggcgggtacgttgat

SEQ ID NO: 183541 - DNA, 55 bp, Artificial
  Synthetic oligonucleotide
cggcttcagacggctcactttcccggcagttcctgacgacttttcacgatctgac

SEQ ID NO: 183542 - DNA, 55 bp, Artificial
  Synthetic oligonucleotide
cggatggctctgacggtataggtacgaacaaatgggcgaggtttgtcttctggcc

SEQ ID NO: 183543 - DNA, 55 bp, Artificial
  Synthetic oligonucleotide
cggcccgagtagcggactaatcaggcgttgatagacccgaatgagggctatcagg

SEQ ID NO: 183544 - DNA, 55 bp, Artificial
  Synthetic oligonucleotide
cggcggaattcctaccggctgatatttactgaccgcactgagcgcaattttatcc

SEQ ID NO: 183545 - DNA, 55 bp, Artificial
  Synthetic oligonucleotide
cggcccgggccagcaatcaaataccgctttacgctgtgcggcggtaagtatgctg

SEQ ID NO: 183546 - DNA, 55 bp, Artificial
  Synthetic oligonucleotide
cagttcggtcattcccaacgggtagggtatgatgtagcgaccagtatgatcagtc

SEQ ID NO: 183547 - DNA, 55 bp, Artificial
  Synthetic oligonucleotide
cagtgtaccggatagcagtacaggcgagaagcataagccgaattaacgcctcacg

SEQ ID NO: 183548 - DNA, 60 bp, Artificial
  Synthetic oligonucleotide
gcaatgctggatgcgcacgctaacttcctgcgtaacaacccgtcttacaaagtcaccgta

SEQ ID NO: 183549 - DNA, 57 bp, Artificial
  Synthetic oligonucleotide
atagtgccacgcgggggctgatcagcctcggaactcttctcggattccggttgttta

SEQ ID NO: 183550 - DNA, 55 bp, Artificial
  Synthetic oligonucleotide
cggccgtgcttaacatgcattcacgaccgccgttcatctgatggccacgtaacgc

SEQ ID NO: 183551 - DNA, 55 bp, Artificial
  Synthetic oligonucleotide
cggcctgtgagcgcgcgcagaaaggatttgcgcgaaacagacagaagcaccggca

SEQ ID NO: 183552 - DNA, 55 bp, Artificial
  Synthetic oligonucleotide
cggcctgtgcttcccacccggatggttgaactcacaatacactccagcacctggc

SEQ ID NO: 183553 - DNA, 55 bp, Artificial
  Synthetic oligonucleotide
cggcgctcatgtgttaggatttcctccgtgtgttacgacccacacgccccttgaa

SEQ ID NO: 183554 - DNA, 55 bp, Artificial
  Synthetic oligonucleotide
cagttcatggagtcagtccgatggtctggcgtcggctgagaattgctgccgacac

SEQ ID NO: 183555 - DNA, 55 bp, Artificial
  Synthetic oligonucleotide
cggcgctaaaaggctgggtgatgggctcgcgggaaaagataccgacagcctgatc

SEQ ID NO: 183556 - DNA, 55 bp, Artificial
  Synthetic oligonucleotide
cggcgagaaacaccggaaagtcatgacggaataactctaccggagagatttgcgc

SEQ ID NO: 183557 - DNA, 53 bp, Artificial
  Synthetic oligonucleotide
cggcgcaactcgacggaaagaagatggccggtaaaacacaggaacgactccgg

SEQ ID NO: 183558 - DNA, 55 bp, Artificial
  Synthetic oligonucleotide
cagtgtcatgattaagaaacaggctcattagaataacgcttcgccgctggacggt

SEQ ID NO: 183559 - DNA, 55 bp, Artificial
  Synthetic oligonucleotide
cggcgcgggttttgtttgacttcgagctgacttaatgttgaatgccgcccaccgg

SEQ ID NO: 183560 - DNA, 55 bp, Artificial
  Synthetic oligonucleotide
gcgctttaagaatagggtctttcgatgtaggggggaacagggtatctgtgtgcgt

SEQ ID NO: 183561 - DNA, 55 bp, Artificial
  Synthetic oligonucleotide
cggctatcgacggtaaagcggacgattgcgtaatcccctccctgatcgctggtta

SEQ ID NO: 183562 - DNA, 54 bp, Artificial
  Synthetic oligonucleotide
cggcagttctttgaccagtataatacccgcgttcctcgtatgggcgggcgcggg

SEQ ID NO: 183563 - DNA, 55 bp, Artificial
  Synthetic oligonucleotide
cagtgcatgggaagcatcgcaaatcaataatacgcggctggtaaatttactcact

SEQ ID NO: 183564 - DNA, 51 bp, Artificial
  Synthetic oligonucleotide
cggctaaccagcaaaaggtatcggcgggttttaagttaggaagacccagaa

SEQ ID NO: 183565 - DNA, 55 bp, Artificial
  Synthetic oligonucleotide
cagtgctgaattacgagcatttcccttatggtctgtactccctgccacctttgag

SEQ ID NO: 183566 - DNA, 55 bp, Artificial
  Synthetic oligonucleotide
cagtggcccttaagggtaatggacggtgacggcaggtgcttaatatgatcgcgga

SEQ ID NO: 183567 - DNA, 55 bp, Artificial
  Synthetic oligonucleotide
cggcatacccagccgccccagctattggcaaatgaacccgtcagatgctccgatc

SEQ ID NO: 183568 - DNA, 55 bp, Artificial
  Synthetic oligonucleotide
cggcgtacacttacaattgttgtcacgagcggaccctcgttgcagactgaatgag

SEQ ID NO: 183569 - DNA, 55 bp, Artificial
  Synthetic oligonucleotide
cggcggtttatgtgattaacccacagtcgcaggcgcagcttcgcgtggtggtacc

SEQ ID NO: 183570 - DNA, 55 bp, Artificial
  Synthetic oligonucleotide
cagttctgcgtactttcctgtgaccagacagcgaacagacatgagttgatagccg

SEQ ID NO: 183571 - DNA, 55 bp, Artificial
  Synthetic oligonucleotide
atagtggttcgcttcttcggccgagggcttgttaaagctcacatcggtaaaggta

SEQ ID NO: 183572 - DNA, 55 bp, Artificial
  Synthetic oligonucleotide
cggcggctaagtttatccaatgttggcgaacatctgggtttaagcccaacaacgc

SEQ ID NO: 183573 - DNA, 55 bp, Artificial
  Synthetic oligonucleotide
cggcatcgctacgcgactgacgatcttccggcaacctcccgagaaaccctgttgg

SEQ ID NO: 183574 - DNA, 55 bp, Artificial
  Synthetic oligonucleotide
cggcggcgtgtttatggcctcatctgttatcaacgcggtgataggtttgtcggta

SEQ ID NO: 183575 - DNA, 55 bp, Artificial
  Synthetic oligonucleotide
cggcggcatacgacacactttcaggatcgtcaaatacgcccgtaagcgtggcccc

SEQ ID NO: 183576 - DNA, 55 bp, Artificial
  Synthetic oligonucleotide
cggcatggattgccactgatgagcctaaaggcagccaagaagaggttattgcacc

SEQ ID NO: 183577 - DNA, 55 bp, Artificial
  Synthetic oligonucleotide
cggaaaatttgtcccggcgtgtcgccaagagtacacagatagagatgcgcgcaaa

SEQ ID NO: 183578 - DNA, 55 bp, Artificial
  Synthetic oligonucleotide
cagtcagcactgaatacccgttgctacagtgagttcagggcacttcagacgctgg

SEQ ID NO: 183579 - DNA, 55 bp, Artificial
  Synthetic oligonucleotide
cgggctaagcatccgcgatacagcttccttatgcggggtatcagagcgaactgtt

SEQ ID NO: 183580 - DNA, 55 bp, Artificial
  Synthetic oligonucleotide
cggaaaactcagcactcattacaacccttaccgacaagaatactgttttagcagc

SEQ ID NO: 183581 - DNA, 55 bp, Artificial
  Synthetic oligonucleotide
cgcttttccagtttcgaatggttcgagtagaaacctccaacatcgccgcaatagc

SEQ ID NO: 183582 - DNA, 59 bp, Artificial
  Synthetic oligonucleotide
ataatgttttcgcatgaattgcattcttctgttttttactatccaataggacgatggcc

SEQ ID NO: 183583 - DNA, 55 bp, Artificial
  Synthetic oligonucleotide
cgggctacgtcatttaccgctaccttagtcacactctatttacatcctgaggcgg

SEQ ID NO: 183584 - DNA, 55 bp, Artificial
  Synthetic oligonucleotide
cgggcttcctgtttcggtactgcttatgggctgattatcccgtgtcctgtccacg

SEQ ID NO: 183585 - DNA, 54 bp, Artificial
  Synthetic oligonucleotide
cggggaaagtaacggatagataatctggcgagacctgccgggcggtagtaacac

SEQ ID NO: 183586 - DNA, 55 bp, Artificial
  Synthetic oligonucleotide
cgctttggatatggaacgatcaagaagttaatcagctatcgtgtaattcctatgc

SEQ ID NO: 183587 - DNA, 55 bp, Artificial
  Synthetic oligonucleotide
cagtatgcatgatgacctattttaagggatctatgtcctttacgcaattcaggca

SEQ ID NO: 183588 - DNA, 55 bp, Artificial
  Synthetic oligonucleotide
cgctttcacctccgcgcatctgttcaattgcctgagtgatattggccgtggtcgc

SEQ ID NO: 183589 - DNA, 55 bp, Artificial
  Synthetic oligonucleotide
cggggactcattcagtctgcaacgagggtccgctcgtgacaacaattgtaagtgt

SEQ ID NO: 183590 - DNA, 55 bp, Artificial
  Synthetic oligonucleotide
cgctttactggcatccattagcgaacgaataaaagggattatcgaatgcgggtcc

SEQ ID NO: 183591 - DNA, 53 bp, Artificial
  Synthetic oligonucleotide
cggggatatttatgaagaggttgtacgtagtattaagcgttcacccaacaccg

SEQ ID NO: 183592 - DNA, 55 bp, Artificial
  Synthetic oligonucleotide
cagtagcgtggtataacagagtcgggcaatagccagtgtcgacgccccacctgcc

SEQ ID NO: 183593 - DNA, 60 bp, Artificial
  Synthetic oligonucleotide
ataattgcgagcgcgactttcctgttaatttcagtgtctcttgaactgtgtgccatgcca

SEQ ID NO: 183594 - DNA, 55 bp, Artificial
  Synthetic oligonucleotide
cggggccaagaccagtagagccagaatgaccaggatagcgtgaattaccgccgag

SEQ ID NO: 183595 - DNA, 55 bp, Artificial
  Synthetic oligonucleotide
cgctggggttgaagcgtcaaccgtgggtcaaggcttctctggcaccggggtcaaa

SEQ ID NO: 183596 - DNA, 55 bp, Artificial
  Synthetic oligonucleotide
cgctgtaggtatctcagttcggtgtaggtcgttcgctccaagctgggctgtgtgc

SEQ ID NO: 183597 - DNA, 55 bp, Artificial
  Synthetic oligonucleotide
cgctgtcagtttctgcacaacccgccttcgcaaacgaagcgccacattggtcata

SEQ ID NO: 183598 - DNA, 55 bp, Artificial
  Synthetic oligonucleotide
cgctgtccggataaggtcgcccgggttgaacgctcacagaatggcgtcagtgtgg

SEQ ID NO: 183599 - DNA, 55 bp, Artificial
  Synthetic oligonucleotide
cagtacttggcggctgcatgaacaggtcacggccaagtggttcaaattcgctggg

SEQ ID NO: 183600 - DNA, 55 bp, Artificial
  Synthetic oligonucleotide
cggggtctgctctacaatcggcaagcggatttcactgtaaccgtagctaccgagc

SEQ ID NO: 183601 - DNA, 55 bp, Artificial
  Synthetic oligonucleotide
cggggtcacgcgtacttgaggacgcaactgctgatgggcggaaacaattgcgtcg

SEQ ID NO: 183602 - DNA, 55 bp, Artificial
  Synthetic oligonucleotide
catacggtacgcttacgcagcttcagccaactgctacgcctgagtcttccctggc

SEQ ID NO: 183603 - DNA, 55 bp, Artificial
  Synthetic oligonucleotide
catacggctcctacaacgggaggccgtatgctgctcatctctaataatcctatcg

SEQ ID NO: 183604 - DNA, 58 bp, Artificial
  Synthetic oligonucleotide
gcgttttccgctctgtagctccatattcggaatgacaaaattaagctcaagccgcccc

SEQ ID NO: 183605 - DNA, 55 bp, Artificial
  Synthetic oligonucleotide
cgcttagtaagttgtatcgacacaatcaacccacatacagacctgtgaagtacag

SEQ ID NO: 183606 - DNA, 55 bp, Artificial
  Synthetic oligonucleotide
cgcttatcaggggtaatgcgcgactacagcctgctaattaaccgcccgtgctacg

SEQ ID NO: 183607 - DNA, 55 bp, Artificial
  Synthetic oligonucleotide
cgcttcaagccatacacgaaaatgtaatcgtcgtttattagccggacggcgtcac

SEQ ID NO: 183608 - DNA, 55 bp, Artificial
  Synthetic oligonucleotide
cagtagcggagctgtaaggacatataatagaaatgctagccacgcgagcacctta

SEQ ID NO: 183609 - DNA, 55 bp, Artificial
  Synthetic oligonucleotide
cgcttccagatacgtctgagaatgaagcgtctctggtatcgccagcgggaacggt

SEQ ID NO: 183610 - DNA, 55 bp, Artificial
  Synthetic oligonucleotide
cgcttcgatttgccggtgcttctgtctgtttcgcgcaaatcctttctgcgcgcgc

SEQ ID NO: 183611 - DNA, 55 bp, Artificial
  Synthetic oligonucleotide
cgcttgagcaaaagcgctatggacgagacaggaattgctattggggatcgtgtcg

SEQ ID NO: 183612 - DNA, 55 bp, Artificial
  Synthetic oligonucleotide
catacgcgatgctgctccacctatatgaaacgtccgcatagttaattgcgttccg

SEQ ID NO: 183613 - DNA, 55 bp, Artificial
  Synthetic oligonucleotide
cgggcaagcagttgagcaacatccacataatatgcattcataagatccatctaga

SEQ ID NO: 183614 - DNA, 55 bp, Artificial
  Synthetic oligonucleotide
cgggcaaaaccatttacacctcgaatgcccagcttggaagctaccagctcaatac

SEQ ID NO: 183615 - DNA, 55 bp, Artificial
  Synthetic oligonucleotide
atacacagacgtgctgagtttcaaattattatagaccctaattaccagggaaaag

SEQ ID NO: 183616 - DNA, 55 bp, Artificial
  Synthetic oligonucleotide
cataaggatcgacctgggtatgcccaatctctaccagactgctactgcccgcatg

SEQ ID NO: 183617 - DNA, 55 bp, Artificial
  Synthetic oligonucleotide
cggagaatgctgggcttaaagatgcagtgaatgctcgggatgagcatatcagttc

SEQ ID NO: 183618 - DNA, 55 bp, Artificial
  Synthetic oligonucleotide
cgggatttaatccaggccgctcaaacagcacttctccgaatctggaaaccaggtg

SEQ ID NO: 183619 - DNA, 55 bp, Artificial
  Synthetic oligonucleotide
cggagaattccccaaatgaaacgcgaaggcttctggcgggatgtcactccgccac

SEQ ID NO: 183620 - DNA, 54 bp, Artificial
  Synthetic oligonucleotide
cgggattagttaatggttatcccttggtcggaacgccgttacatgccgaggtga

SEQ ID NO: 183621 - DNA, 55 bp, Artificial
  Synthetic oligonucleotide
cgggattactaaggaagggaactgccttactatggtaccgtatcagatatcaggg

SEQ ID NO: 183622 - DNA, 55 bp, Artificial
  Synthetic oligonucleotide
cataaattgtgccgcgagcagtcgacaatcccggtgatcacaggcggtataggcg

SEQ ID NO: 183623 - DNA, 55 bp, Artificial
  Synthetic oligonucleotide
cggagcccaacccgaagaccagacgcttcacgataaggagcatacacaggacgat

SEQ ID NO: 183624 - DNA, 55 bp, Artificial
  Synthetic oligonucleotide
cggaggcagaatttcggctatagcgctgtatcgagcgttcagcccagcgcccttc

SEQ ID NO: 183625 - DNA, 55 bp, Artificial
  Synthetic oligonucleotide
cggagtatgacgagtggggaaacctgctgagcgaaaccagcgcgcagccccttca

SEQ ID NO: 183626 - DNA, 57 bp, Artificial
  Synthetic oligonucleotide
gcgttgtttattgacagcgaaggtaaccgaataggtttacatcaacctgcgtgatat

SEQ ID NO: 183627 - DNA, 55 bp, Artificial
  Synthetic oligonucleotide
cgggagagttaagtatgtccgctgaacacgttttgacgatgctgaatgagcatga

SEQ ID NO: 183628 - DNA, 55 bp, Artificial
  Synthetic oligonucleotide
cggagtatgcgaggcgagtgtcaatgaacgaccagggatttatgaagaaacagtc

SEQ ID NO: 183629 - DNA, 55 bp, Artificial
  Synthetic oligonucleotide
cgggactcaccgttcacgtacctgtcgtcaaagaagctaccgcgttagggtgcgc

SEQ ID NO: 183630 - DNA, 55 bp, Artificial
  Synthetic oligonucleotide
cgggacgggtgccggttcagcgcattccggatgcgacccagcgtctgtggattgc

SEQ ID NO: 183631 - DNA, 55 bp, Artificial
  Synthetic oligonucleotide
cgggacagcattttggtggctcagtggcggcgcctgtcttcggccagattatcgg

SEQ ID NO: 183632 - DNA, 52 bp, Artificial
  Synthetic oligonucleotide
catacgacctaaccagtcgtaacccatttcaaagccaacatacgggttaacc

SEQ ID NO: 183633 - DNA, 55 bp, Artificial
  Synthetic oligonucleotide
cgggccatttgtacagttagcgctccgaacttggccatcaacctgacaggacagg

SEQ ID NO: 183634 - DNA, 55 bp, Artificial
  Synthetic oligonucleotide
cggaaatgagttctaaggcattcactgctgactacgacctgtttatagcttctcc

SEQ ID NO: 183635 - DNA, 55 bp, Artificial
  Synthetic oligonucleotide
cggaacatcgtagtgcactggacccctcagagtttgctcagcgtcataaattagt

SEQ ID NO: 183636 - DNA, 55 bp, Artificial
  Synthetic oligonucleotide
cagtccgtaatagttatcgatatgcacgttgcaggtatctcgaatgcagatgaca

SEQ ID NO: 183637 - DNA, 59 bp, Artificial
  Synthetic oligonucleotide
gcgttggtataccgtataaagagtagtgcccagtttcaggcgtcctgatgtgctttcac

SEQ ID NO: 183638 - DNA, 55 bp, Artificial
  Synthetic oligonucleotide
cagtcctggaccaaacgcacgtcgtagtccgcatcactagcccaggcgacgcttg

SEQ ID NO: 183639 - DNA, 55 bp, Artificial
  Synthetic oligonucleotide
catacagtcggtgatactggatttaccctgaacatctaaggcgatgatgtcctga

SEQ ID NO: 183640 - DNA, 55 bp, Artificial
  Synthetic oligonucleotide
cgggcagggataggcattaatgctggtcgaattagagctgtaggtagtccaatac

SEQ ID NO: 183641 - DNA, 51 bp, Artificial
  Synthetic oligonucleotide
cggaagtaagccaaacggttatcggacggccggaacatttcgtacagcctt

SEQ ID NO: 183642 - DNA, 55 bp, Artificial
  Synthetic oligonucleotide
cgggcagccttgtcaatcgcgttcatcagacatcataatccggtatcagtcagcc

SEQ ID NO: 183643 - DNA, 55 bp, Artificial
  Synthetic oligonucleotide
cgggcagagccgtatatgtactggatagccgggcaagttaagaaacgtaacatgc

SEQ ID NO: 183644 - DNA, 55 bp, Artificial
  Synthetic oligonucleotide
catacacactgaaagtgatccaacctatcatgcagagctaggccttattcgccag

SEQ ID NO: 183645 - DNA, 55 bp, Artificial
  Synthetic oligonucleotide
cggacgatctgcacttcggtgtgcgtatcgcagggaaagaacgcgcactcttggc

SEQ ID NO: 183646 - DNA, 55 bp, Artificial
  Synthetic oligonucleotide
cgggcaatggtgatgactaaacagcggatggatatcccgttgaaactgaaatctg

SEQ ID NO: 183647 - DNA, 55 bp, Artificial
  Synthetic oligonucleotide
cataataccttttgaagtgcaaggacgtaacacaggagatcgttgacataatcga

SEQ ID NO: 183648 - DNA, 59 bp, Artificial
  Synthetic oligonucleotide
ataccagactgcaatcttaacctatccgcctcatttttaagtgagtcaatatcattagt

SEQ ID NO: 183649 - DNA, 54 bp, Artificial
  Synthetic oligonucleotide
cgggcaataaaacgcccgtcggatgtcccgcctgtagtcagtaactgcggttta

SEQ ID NO: 183650 - DNA, 55 bp, Artificial
  Synthetic oligonucleotide
cggactcatgcttatttgcctcccagcatgtagcgcaagtggagttgtgccgtac

SEQ ID NO: 183651 - DNA, 55 bp, Artificial
  Synthetic oligonucleotide
cgtcctgtttgttgtacgtaacgtgcctgcagctcaaggtagcaacgagcccatc

SEQ ID NO: 183652 - DNA, 55 bp, Artificial
  Synthetic oligonucleotide
cgtcgaattagtcttaatttcgtaccaactgctattctttcacggcaagttggtg

SEQ ID NO: 183653 - DNA, 55 bp, Artificial
  Synthetic oligonucleotide
cgtcgagttgttgtgactggactgggcatgttgtctcctgtcggtaatacagtcg

SEQ ID NO: 183654 - DNA, 55 bp, Artificial
  Synthetic oligonucleotide
cgcccaccaggaatacagaggcatccagatcgaatgcctgaccatccgtcacacg

SEQ ID NO: 183655 - DNA, 55 bp, Artificial
  Synthetic oligonucleotide
cgcccaagcaacgtgaagtatgacgggtataccgtgataagcacaacgtctagta

SEQ ID NO: 183656 - DNA, 55 bp, Artificial
  Synthetic oligonucleotide
cgtcggctagtgcaacgcattaacgagataatgatctttgccgtaaatacagggc

SEQ ID NO: 183657 - DNA, 55 bp, Artificial
  Synthetic oligonucleotide
cgtcggttgatccagcggaccatgaagcgtaatacgaccaaactcaggcgcaggc

SEQ ID NO: 183658 - DNA, 55 bp, Artificial
  Synthetic oligonucleotide
cgtcgtaacacttacggaggcgctattggatacctaactggtgctggaaatttag

SEQ ID NO: 183659 - DNA, 60 bp, Artificial
  Synthetic oligonucleotide
gcatgttggccctagtcgcaatcaacatgctcttaatgctaattaccggctggctcttag

SEQ ID NO: 183660 - DNA, 60 bp, Artificial
  Synthetic oligonucleotide
gcaatcttacctgttccaccgcatggttagcgctcttggtcataataaggctggcacgtt

SEQ ID NO: 183661 - DNA, 60 bp, Artificial
  Synthetic oligonucleotide
ataccagctgacttgccgttacggtcaaaagccggcagtgccacatacggctgcggatat

SEQ ID NO: 183662 - DNA, 52 bp, Artificial
  Synthetic oligonucleotide
cgtcgtccgctaaaagcggctcccggtaaatagaaatcttcgtaagcgcccc

SEQ ID NO: 183663 - DNA, 55 bp, Artificial
  Synthetic oligonucleotide
cgccattgaccctcctccgacgtcccggctgtgagccacttacgtatgagcctga

SEQ ID NO: 183664 - DNA, 55 bp, Artificial
  Synthetic oligonucleotide
cgccattgaagctggtgacgtcaaaatcgaagggactattaatggattaggagag

SEQ ID NO: 183665 - DNA, 55 bp, Artificial
  Synthetic oligonucleotide
cgtctcaggatatccacgaaacagcgcaatgctgtccagaatacgcgcgacctga

SEQ ID NO: 183666 - DNA, 55 bp, Artificial
  Synthetic oligonucleotide
cgccatgctggcgtgacgggcggctgaaggtaaaaggccggaaggatctttggga

SEQ ID NO: 183667 - DNA, 55 bp, Artificial
  Synthetic oligonucleotide
cgtctcataacggattgcatccgattattcctgctcatcagcggtaaaacgccca

SEQ ID NO: 183668 - DNA, 55 bp, Artificial
  Synthetic oligonucleotide
cgccatctcatgtatatcaccaaatcggtcttcaccggtgtgagtctacgtgagc

SEQ ID NO: 183669 - DNA, 55 bp, Artificial
  Synthetic oligonucleotide
cgccactacacagtaaagcctaaaatcctccgcattgcgtgaaatttgaccgtgc

SEQ ID NO: 183670 - DNA, 55 bp, Artificial
  Synthetic oligonucleotide
cgccactggcagcagccactggtaacaggattagcagagcgaggtatgtaggcgg

SEQ ID NO: 183671 - DNA, 55 bp, Artificial
  Synthetic oligonucleotide
cgtctgttgtgttaaacgcagggtctaacggccaaatatttcttcactgcgcgtc

SEQ ID NO: 183672 - DNA, 60 bp, Artificial
  Synthetic oligonucleotide
gcgttgggggatatcagcgacgatgatagggcaagcctgactaaatggatggtctatatc

SEQ ID NO: 183673 - DNA, 55 bp, Artificial
  Synthetic oligonucleotide
cgccagagtaccaatgcggggtacaggggcggagcaagccgtagtagcgttgaag

SEQ ID NO: 183674 - DNA, 55 bp, Artificial
  Synthetic oligonucleotide
cgccagagtatgtcgctggcgtactgacgtaagtcatcctccacaaaagtaccgg

SEQ ID NO: 183675 - DNA, 55 bp, Artificial
  Synthetic oligonucleotide
cgtctggacgacacggggtgggaaatactgcgaaagcaaatcaccgataagcagc

SEQ ID NO: 183676 - DNA, 54 bp, Artificial
  Synthetic oligonucleotide
cgtctggaaacgccagctccggtacatgctttacccggttttgctgagggttgg

SEQ ID NO: 183677 - DNA, 55 bp, Artificial
  Synthetic oligonucleotide
cgccagatggctttgtgtggccgtcgcgtttgcagcgacttgagtggccatccct

SEQ ID NO: 183678 - DNA, 55 bp, Artificial
  Synthetic oligonucleotide
cgccagcgatcggttgctcatcgatagcctgtaagacgtagtgatggtgttggag

SEQ ID NO: 183679 - DNA, 54 bp, Artificial
  Synthetic oligonucleotide
cgccagcggtaggatcttgccttaacacttcctgaaactcccggagttcgtcgg

SEQ ID NO: 183680 - DNA, 55 bp, Artificial
  Synthetic oligonucleotide
cgccagcggtgacatttacgtcaaagttccgctattgccttttacctgaccgctg

SEQ ID NO: 183681 - DNA, 55 bp, Artificial
  Synthetic oligonucleotide
cgccagtgcctttaatcacgatagacccatagttaaagattcgtcccagtatccc

SEQ ID NO: 183682 - DNA, 55 bp, Artificial
  Synthetic oligonucleotide
cgccagtggattcaggatgtggctcaggttcagctcagtgctggcgtcgttttgg

SEQ ID NO: 183683 - DNA, 60 bp, Artificial
  Synthetic oligonucleotide
gcgttgcttccgccgttgcactgtctggatgcagtgctgttaacacagcaatatccaagc

SEQ ID NO: 183684 - DNA, 55 bp, Artificial
  Synthetic oligonucleotide
cgccataattcagcatcgggctccactgtttactcagtcgcaagcctacgccgac

SEQ ID NO: 183685 - DNA, 55 bp, Artificial
  Synthetic oligonucleotide
cgccatccggcgttgtgcagtaacaggctaccactatgaaaatcgtaattgcccc

SEQ ID NO: 183686 - DNA, 55 bp, Artificial
  Synthetic oligonucleotide
cgccatccggctaataaacggcgattacattttcgtgtatggcttgaagcgttcc

SEQ ID NO: 183687 - DNA, 55 bp, Artificial
  Synthetic oligonucleotide
caggaacgggaagtacgggtatggcgtggcccgtcaatggggatgtgacggtgag

SEQ ID NO: 183688 - DNA, 55 bp, Artificial
  Synthetic oligonucleotide
cgtcagattgcctaactgacagcgtaccttttcaaggtggtagctgatcgtgttt

SEQ ID NO: 183689 - DNA, 55 bp, Artificial
  Synthetic oligonucleotide
cgccgcaattttaccattcaggaggcctaatgagccacgtagacgacggtttccg

SEQ ID NO: 183690 - DNA, 55 bp, Artificial
  Synthetic oligonucleotide
caggcacaaggaaagcctgcgttgtttgcccttggaaatgactcgctatcaccgg

SEQ ID NO: 183691 - DNA, 55 bp, Artificial
  Synthetic oligonucleotide
cgtcaggctacgcatatagtgttcgtcattatcgtgtgcccgaacccagtcactg

SEQ ID NO: 183692 - DNA, 55 bp, Artificial
  Synthetic oligonucleotide
caggcaacttgaggacgcgaccgtctttagtcgcagattagccgatattcgccat

SEQ ID NO: 183693 - DNA, 55 bp, Artificial
  Synthetic oligonucleotide
cgtcaggggattcggaacagtattgattatatgagccgtgagtcagagctaccag

SEQ ID NO: 183694 - DNA, 60 bp, Artificial
  Synthetic oligonucleotide
gcgttgcgtatgttgcacgacatgacaggggcggacagtagcgtgtcgaaatgctatttc

SEQ ID NO: 183695 - DNA, 55 bp, Artificial
  Synthetic oligonucleotide
caggatggaagtatcagtgtgcaaagcgggcggtagccagatggaatacagcctg

SEQ ID NO: 183696 - DNA, 55 bp, Artificial
  Synthetic oligonucleotide
cgtcagttcagttcgactgaaatagcggacagtagggttacgatacgcagatatc

SEQ ID NO: 183697 - DNA, 55 bp, Artificial
  Synthetic oligonucleotide
caggatgagttacctgccactgaatttagtatgtggatacgtcccttgcaggcag

SEQ ID NO: 183698 - DNA, 55 bp, Artificial
  Synthetic oligonucleotide
catcttccagtgtcagcaacacgaccacgaacacaaagaacgccatacataccca

SEQ ID NO: 183699 - DNA, 55 bp, Artificial
  Synthetic oligonucleotide
cgtcatcgggcatgtagcggcatatcgttagaacggaataaactgatactcggtc

SEQ ID NO: 183700 - DNA, 55 bp, Artificial
  Synthetic oligonucleotide
cgccgaatcctttaacgtgggtcgatccgctgggattatgtaagggagggatagc

SEQ ID NO: 183701 - DNA, 55 bp, Artificial
  Synthetic oligonucleotide
cgtcattacccgcagatgatattactgaatcacctgtcagttcattacctctcga

SEQ ID NO: 183702 - DNA, 55 bp, Artificial
  Synthetic oligonucleotide
caggatatctgaatgggaacggcgactcaagcaaccaggttttgcttaacttgtt

SEQ ID NO: 183703 - DNA, 55 bp, Artificial
  Synthetic oligonucleotide
cgtcctgttcaaattgacgtagaatgaggcggttgttaaatcggttagtgtgtgc

SEQ ID NO: 183704 - DNA, 55 bp, Artificial
  Synthetic oligonucleotide
cgcccctattacagactcataccacatgatgaccgaatataaagtggagacgttt

SEQ ID NO: 183705 - DNA, 60 bp, Artificial
  Synthetic oligonucleotide
ataccgcagataatacgcaggtgctttatcgcggtgatgaacgctttccaatgtgcagta

SEQ ID NO: 183706 - DNA, 55 bp, Artificial
  Synthetic oligonucleotide
caggaccagttatggttggcggatgtcaaaatcggggtcattcgttgtctgagta

SEQ ID NO: 183707 - DNA, 55 bp, Artificial
  Synthetic oligonucleotide
caggagcccgttgttccggtcataatgcagaccggagatatccttcaggaaccat

SEQ ID NO: 183708 - DNA, 54 bp, Artificial
  Synthetic oligonucleotide
cgccccttccaggggcacagactaaaagggtaggtgtggaccgaatggttgcaa

SEQ ID NO: 183709 - DNA, 55 bp, Artificial
  Synthetic oligonucleotide
cgtccgcctgtccagatgccgacctcttccgttgcttcagtattacgagacatag

SEQ ID NO: 183710 - DNA, 53 bp, Artificial
  Synthetic oligonucleotide
caggagcgttacggaaggtaacgacaaattgggcaactttctgagtaacccac

SEQ ID NO: 183711 - DNA, 55 bp, Artificial
  Synthetic oligonucleotide
cgcccgaaatgcaacatggcatcaggcccgccagccttactgactagcgattgca

SEQ ID NO: 183712 - DNA, 54 bp, Artificial
  Synthetic oligonucleotide
cgtcccgttcgctggacgcccagtgtagtggcgattagtggaacgaacgtaccg

SEQ ID NO: 183713 - DNA, 55 bp, Artificial
  Synthetic oligonucleotide
caggagttagccgcgacaatcgaccgactggaagctttggatcgaagtgagctgc

SEQ ID NO: 183714 - DNA, 55 bp, Artificial
  Synthetic oligonucleotide
cgtccattccgcctgatggggtgagcgaaattgatcgccgggaagtgaagtccgg

SEQ ID NO: 183715 - DNA, 55 bp, Artificial
  Synthetic oligonucleotide
cgcccgacccttcggcataaagcgaattcagtctcccgtccgcagaagcaacccc

SEQ ID NO: 183716 - DNA, 54 bp, Artificial
  Synthetic oligonucleotide
gcgttctgacggggttatttcgccgtatatttcaccacggtgttgtcggtcgtc

SEQ ID NO: 183717 - DNA, 55 bp, Artificial
  Synthetic oligonucleotide
cgcccggtaaaccgcccagtccgcgcctgataaatttcccgcgactgcatagcca

SEQ ID NO: 183718 - DNA, 55 bp, Artificial
  Synthetic oligonucleotide
catgaaagcccagcagccaccgattcgtatcatcgcgcctggccgtgtttatcgt

SEQ ID NO: 183719 - DNA, 55 bp, Artificial
  Synthetic oligonucleotide
cgtccatggatacgctactcacgataataaggaatgtctaccggataggtggtcg

SEQ ID NO: 183720 - DNA, 55 bp, Artificial
  Synthetic oligonucleotide
cgtccatctggtaacgacgccatatagattagcgcacgtaagccgtaatcggtga

SEQ ID NO: 183721 - DNA, 55 bp, Artificial
  Synthetic oligonucleotide
cgtccagtgagaattgctgagaactatcacttatggcaccctgaatgggacccac

SEQ ID NO: 183722 - DNA, 55 bp, Artificial
  Synthetic oligonucleotide
catgattaaccttgaagcacggaaactcgttaataccgcaaataccgtggcgtcc

SEQ ID NO: 183723 - DNA, 55 bp, Artificial
  Synthetic oligonucleotide
cgcatcgccggattttcacatcaacaaaggaagtgcagatattattgttgaggcg

SEQ ID NO: 183724 - DNA, 55 bp, Artificial
  Synthetic oligonucleotide
cgcatcaattttcacgaatgccatcagtgtgccgcgtttaaatgcaccactttcg

SEQ ID NO: 183725 - DNA, 55 bp, Artificial
  Synthetic oligonucleotide
cgcataggtcaagatgttacagaagcccttaaaggttatggcctccccgtgctgg

SEQ ID NO: 183726 - DNA, 55 bp, Artificial
  Synthetic oligonucleotide
cgtgctacgttagtacgcggcaatacacttgcagaaatggcacgggagttagaac

SEQ ID NO: 183727 - DNA, 60 bp, Artificial
  Synthetic oligonucleotide
ataccgcgtaagattgcaatgagagggagattagtttgccactgcatgagcgatgctcct

SEQ ID NO: 183728 - DNA, 55 bp, Artificial
  Synthetic oligonucleotide
catgccatttagatcccagcaatacgcaataggatcaccgtcactcacaacaacg

SEQ ID NO: 183729 - DNA, 55 bp, Artificial
  Synthetic oligonucleotide
cgtgcttcacatataccctaaagacaagcgatcccactggtttgggatctcctgc

SEQ ID NO: 183730 - DNA, 55 bp, Artificial
  Synthetic oligonucleotide
cgtgctttcttcataataagccttcgctggttgtattttagccagagaactctat

SEQ ID NO: 183731 - DNA, 54 bp, Artificial
  Synthetic oligonucleotide
cgtggaacagggtaaaataaccgttcaatcacaggactaaatgagcgagaaacg

SEQ ID NO: 183732 - DNA, 55 bp, Artificial
  Synthetic oligonucleotide
cgtggacgtaactgacgggcgttccattctttgagcgtcaaatacatgtcatatc

SEQ ID NO: 183733 - DNA, 55 bp, Artificial
  Synthetic oligonucleotide
catgcctattggttgaactcagtggacaaggtgcggaatgaaacagaactcagtc

SEQ ID NO: 183734 - DNA, 55 bp, Artificial
  Synthetic oligonucleotide
cgtggatcccagatgatgcggagtggttgcgctttcttgaggtagccggacaagc

SEQ ID NO: 183735 - DNA, 55 bp, Artificial
  Synthetic oligonucleotide
cgtggcacgccgactcttgttttagttctactgaatctggaagttgattcaatac

SEQ ID NO: 183736 - DNA, 55 bp, Artificial
  Synthetic oligonucleotide
cgcataatcgactgagttgcagtgcggattctccataaaatgcccctcattccct

SEQ ID NO: 183737 - DNA, 55 bp, Artificial
  Synthetic oligonucleotide
cagcgcctccgcatataccgccgtccggggtcggtgttggttgactaccgcatcc

SEQ ID NO: 183738 - DNA, 60 bp, Artificial
  Synthetic oligonucleotide
ataccgctgaattgccgacctatggctacagacgagtctgggcgttactgcgtaatgaaa

SEQ ID NO: 183739 - DNA, 55 bp, Artificial
  Synthetic oligonucleotide
cgcagcgctctcttatcgcaagacgaagcgacattacgccgggtactctactacc

SEQ ID NO: 183740 - DNA, 55 bp, Artificial
  Synthetic oligonucleotide
cagcgattgtaatcacattcgatataattaaacactgttgcccgcattatttccc

SEQ ID NO: 183741 - DNA, 55 bp, Artificial
  Synthetic oligonucleotide
catgctaatcatccccatggccgcagagacggttcctttactgatatcactggcg

SEQ ID NO: 183742 - DNA, 55 bp, Artificial
  Synthetic oligonucleotide
cgtgtcacaactgtctctacggctggaaaacgcgacagattcgaaggagtcgcaa

SEQ ID NO: 183743 - DNA, 55 bp, Artificial
  Synthetic oligonucleotide
cgtgtaccccatccatgccggttaacgtctcacgcttgacccgtgacgggctgta

SEQ ID NO: 183744 - DNA, 55 bp, Artificial
  Synthetic oligonucleotide
cgcaggcatctgattcgcgtgatgaatggcatccgaaagacgatagcactgctgc

SEQ ID NO: 183745 - DNA, 55 bp, Artificial
  Synthetic oligonucleotide
catgctaatataggccaacgcaattcttatagccgctggtacctaatgtgattac

SEQ ID NO: 183746 - DNA, 55 bp, Artificial
  Synthetic oligonucleotide
cgtggtatccaacggaccggtcagtaagatgcagcattcgctgggtaaactgggc

SEQ ID NO: 183747 - DNA, 55 bp, Artificial
  Synthetic oligonucleotide
cgcaggcgtaacgcgtgggtggcaaattatacggactccctaccaaagcgcaagg

SEQ ID NO: 183748 - DNA, 54 bp, Artificial
  Synthetic oligonucleotide
cgcagggatgtactaaggtaaccaacagggattatgtagttttgtttgcgttgg

SEQ ID NO: 183749 - DNA, 60 bp, Artificial
  Synthetic oligonucleotide
gcgttattgccgccaggagccgtatattagccttgggcgctacattcatgtcaccgcgat

SEQ ID NO: 183750 - DNA, 55 bp, Artificial
  Synthetic oligonucleotide
cgtgggtcagctgtacttctgaaggatgacgcataggaacctcttgacggcctac

SEQ ID NO: 183751 - DNA, 55 bp, Artificial
  Synthetic oligonucleotide
catgcctctataacagaatcaacccacctccatgaatcctctatttcgtcataac

SEQ ID NO: 183752 - DNA, 55 bp, Artificial
  Synthetic oligonucleotide
cgtgggtagagccatgctgacgatacgtcgcgaaaacgcccgattgccaaaggca

SEQ ID NO: 183753 - DNA, 55 bp, Artificial
  Synthetic oligonucleotide
cgcagttaatcgtacgcattcatgaatctgccaaataagggcaatcaggggtgct

SEQ ID NO: 183754 - DNA, 55 bp, Artificial
  Synthetic oligonucleotide
cgcagttccacctgagaaacggagacattgtgtaaaccttctgcggcccaggtaa

SEQ ID NO: 183755 - DNA, 55 bp, Artificial
  Synthetic oligonucleotide
cgtggctaataacacatgctgataaaatgcggtctgatagcgaaagcgctcactg

SEQ ID NO: 183756 - DNA, 55 bp, Artificial
  Synthetic oligonucleotide
cgtggctaacataggctttcaaatcctagcggagaataatcgagccacccggtgg

SEQ ID NO: 183757 - DNA, 55 bp, Artificial
  Synthetic oligonucleotide
cgcattgcccgtataacgcttaggtgaatcaaggttagttagaccaagggctgcc

SEQ ID NO: 183758 - DNA, 55 bp, Artificial
  Synthetic oligonucleotide
cgcattgtgctacgccagcgcatttgcctcacttgcggttgaaacgcctaatgcc

SEQ ID NO: 183759 - DNA, 55 bp, Artificial
  Synthetic oligonucleotide
cgcatttatcagctatctgggtcgtcttaacgagccgttgatcgagctcaccacc

SEQ ID NO: 183760 - DNA, 60 bp, Artificial
  Synthetic oligonucleotide
gcgttactttcaggccagccttctttaatgcggtattgttgtcagtcatgcggaatctgt

SEQ ID NO: 183761 - DNA, 55 bp, Artificial
  Synthetic oligonucleotide
cgtgaggggccttcaactaaaacacgctgtatcgtgccaaccatcgcgcggctaa

SEQ ID NO: 183762 - DNA, 55 bp, Artificial
  Synthetic oligonucleotide
cgcatttatgacaaccaaccgggcctgggggatccagtgcgacactgtttctcag

SEQ ID NO: 183763 - DNA, 55 bp, Artificial
  Synthetic oligonucleotide
cgcattttacaaacggctggtcaatggcattccggggttggttgatgtcacgtcc

SEQ ID NO: 183764 - DNA, 55 bp, Artificial
  Synthetic oligonucleotide
catgatagtacgggacacggtatatcctctttcgttaccgccagtatcaggcggg

SEQ ID NO: 183765 - DNA, 55 bp, Artificial
  Synthetic oligonucleotide
cgtgagatcgttcgtaatcttgcggctggaatgcaattgaccaccgtgaaagagc

SEQ ID NO: 183766 - DNA, 55 bp, Artificial
  Synthetic oligonucleotide
cgccaactttcggcaatatcgacgcagatggcaggctgaaagcggcctatgtcag

SEQ ID NO: 183767 - DNA, 55 bp, Artificial
  Synthetic oligonucleotide
cgtgacgcgctggatatgtggacggagcggttagggatactggcgggaacacatg

SEQ ID NO: 183768 - DNA, 55 bp, Artificial
  Synthetic oligonucleotide
cgccaatacaggtcggtgaattgcttatcctgattcgcccggaaagcgagccgtg

SEQ ID NO: 183769 - DNA, 55 bp, Artificial
  Synthetic oligonucleotide
cgtgacaccccggtggattactcacagccgatggctaatgtttatattcggggcg

SEQ ID NO: 183770 - DNA, 55 bp, Artificial
  Synthetic oligonucleotide
cagctacttttgggccaggattgataggttctcttttggtaggtgtgtccttggc

SEQ ID NO: 183771 - DNA, 60 bp, Artificial
  Synthetic oligonucleotide
atgcccactgtgcggtcaccctgaacattggagtgaccgcgtaacggacagatccccgca

SEQ ID NO: 183772 - DNA, 60 bp, Artificial
  Synthetic oligonucleotide
gcgtgtgagaccgtaaaatcatccctgattaattcagggatgcgcacttagtagtttctc

SEQ ID NO: 183773 - DNA, 55 bp, Artificial
  Synthetic oligonucleotide
cagctcaggggagcgagggatgacggggttaacttcttacggaaatgagcgacgg

SEQ ID NO: 183774 - DNA, 55 bp, Artificial
  Synthetic oligonucleotide
cgccacaataattcggtgctaccagcgctgttatagggctgtccggctattcgcg

SEQ ID NO: 183775 - DNA, 55 bp, Artificial
  Synthetic oligonucleotide
cgccacgggatgtcataggctaaacagccttaatttgaatcgattgtaacaggac

SEQ ID NO: 183776 - DNA, 55 bp, Artificial
  Synthetic oligonucleotide
cagctctggttaatgcattacgggccgtcttaagcgattccgtcaccgaactgag

SEQ ID NO: 183777 - DNA, 55 bp, Artificial
  Synthetic oligonucleotide
cgtgcgtcactgatcctgcggcgtacagccttcatcagcagtcgatgatgtacgg

SEQ ID NO: 183778 - DNA, 55 bp, Artificial
  Synthetic oligonucleotide
cgtgcgggctgaacaatcctgtccgggtatcgagcacaccgttgcgaaatccgat

SEQ ID NO: 183779 - DNA, 55 bp, Artificial
  Synthetic oligonucleotide
cgcatgacttaacccggcgagaattaagccgtctttatcgcgtaacgtcagattg

SEQ ID NO: 183780 - DNA, 55 bp, Artificial
  Synthetic oligonucleotide
cgcatgccagattggttcgtagtcgtcgagtggtgattgtgacaataaagatcga

SEQ ID NO: 183781 - DNA, 55 bp, Artificial
  Synthetic oligonucleotide
cgtgccacaggtcgattaatgacatgcgggttacgcccgtgactaagctcagcat

SEQ ID NO: 183782 - DNA, 55 bp, Artificial
  Synthetic oligonucleotide
cgtgcatttcgactagtttcaggtaattggtatactttcatccaatatagtagtc

SEQ ID NO: 183783 - DNA, 60 bp, Artificial
  Synthetic oligonucleotide
gcgtgatgcgtggactgtaacacgctgctctgatgcagtgccgcccccgtgtttcacggg

SEQ ID NO: 183784 - DNA, 55 bp, Artificial
  Synthetic oligonucleotide
cgcattatctctatattgcagacgaataatgtgacgccatacgattaaccagcga

SEQ ID NO: 183785 - DNA, 55 bp, Artificial
  Synthetic oligonucleotide
cagcgtcatctgataggcgttaaacagggcattgtcagaaacttcgagggtgcta

SEQ ID NO: 183786 - DNA, 55 bp, Artificial
  Synthetic oligonucleotide
cgcattcattttcggtgtgtacggataggtccagatgtgtttaatcgaggcttcc

SEQ ID NO: 183787 - DNA, 55 bp, Artificial
  Synthetic oligonucleotide
cgtgcaattaggtctcccgttcgatacttatggtaaaacgcttgattctgcagac

SEQ ID NO: 183788 - DNA, 55 bp, Artificial
  Synthetic oligonucleotide
cgtgcaatcagcggcaaaggagggctatactacccgctctgtcccgttcagggac

SEQ ID NO: 183789 - DNA, 55 bp, Artificial
  Synthetic oligonucleotide
cagcgtggttaaccctttctccggctccacattgactgcgcgattcagttcgtca

SEQ ID NO: 183790 - DNA, 55 bp, Artificial
  Synthetic oligonucleotide
cgcattgacctggcgtggcaaatagctaaggttgatcttagttcaacaacgaata

SEQ ID NO: 183791 - DNA, 55 bp, Artificial
  Synthetic oligonucleotide
cgtgatcgcttaggttgatttcccctcgtgcaatggcgtcgccactaagcacgcc

SEQ ID NO: 183792 - DNA, 55 bp, Artificial
  Synthetic oligonucleotide
cgtgatatgaagagatgacccatatatgtctcattcgcgcccgtatgccctgaga

SEQ ID NO: 183793 - DNA, 55 bp, Artificial
  Synthetic oligonucleotide
cgtgataacgatggcgcgtggactggggtgtttgtcgatgccttctcgaacgtag

SEQ ID NO: 183794 - DNA, 56 bp, Artificial
  Synthetic oligonucleotide
atacgacgcgcgtaccggtctgctgcctgaccggtttacctgtccattactgtggg

SEQ ID NO: 183795 - DNA, 54 bp, Artificial
  Synthetic oligonucleotide
cgtaataaaacgccctcacacaatatgaggacgccgaattttagggcggtgtac

SEQ ID NO: 183796 - DNA, 55 bp, Artificial
  Synthetic oligonucleotide
cgcgcccgttatgaagcgccaccgcgttctgctaatgctgaagcccttcgtcagc

SEQ ID NO: 183797 - DNA, 53 bp, Artificial
  Synthetic oligonucleotide
cgcgcccagttatccggcccgtcaataaaggtacgcggcggattaaaacgcag

SEQ ID NO: 183798 - DNA, 55 bp, Artificial
  Synthetic oligonucleotide
cgtaatattggttccttaaatggctatcagggaaataccaaggctgaagccgact

SEQ ID NO: 183799 - DNA, 55 bp, Artificial
  Synthetic oligonucleotide
cgtaatcggggtcatcaggattctccgtcagggcgcgttttgccgcaccctggac

SEQ ID NO: 183800 - DNA, 54 bp, Artificial
  Synthetic oligonucleotide
cagggataataaaatcactaggaaacccttgaagtcttgacgcttcccgcggag

SEQ ID NO: 183801 - DNA, 55 bp, Artificial
  Synthetic oligonucleotide
cgcgcatccggcacaacaagagagatatccgaatgacatcgttacgacatacagc

SEQ ID NO: 183802 - DNA, 55 bp, Artificial
  Synthetic oligonucleotide
cgcgcagtgtggctgccagtaatgcaccaacaaccccgagcggtaccacgagcat

SEQ ID NO: 183803 - DNA, 55 bp, Artificial
  Synthetic oligonucleotide
cagggaagattaatcttggggcaagtttcgtgcttatatgcgttcagcacttatc

SEQ ID NO: 183804 - DNA, 55 bp, Artificial
  Synthetic oligonucleotide
cgcgcaggcaatgccaaacgaatgaccatgactagctcaaataactccgtgctga

SEQ ID NO: 183805 - DNA, 54 bp, Artificial
  Synthetic oligonucleotide
atacgagcctcacggaataacgaccgcaggagaacgcgggaattatcgaccccg

SEQ ID NO: 183806 - DNA, 48 bp, Artificial
  Synthetic oligonucleotide
cagggaaatcattaccccgtttctggcccggggattttttcccgacgt

SEQ ID NO: 183807 - DNA, 55 bp, Artificial
  Synthetic oligonucleotide
cagggaaaatctttatctctgagaccactgtgaacaaatacaaagaggccttcgc

SEQ ID NO: 183808 - DNA, 55 bp, Artificial
  Synthetic oligonucleotide
cgcgcagcggttcaataaaacgatagatagcgggtgttgtctggaaggattgccg

SEQ ID NO: 183809 - DNA, 55 bp, Artificial
  Synthetic oligonucleotide
cgcgcagattatctccggtatggtatgtctattacataaaggcaccaatcgcggg

SEQ ID NO: 183810 - DNA, 55 bp, Artificial
  Synthetic oligonucleotide
cgtacatccgacccccttctcttcatgcttgatgctcttgccaacgctttacggt

SEQ ID NO: 183811 - DNA, 55 bp, Artificial
  Synthetic oligonucleotide
cgcgacatatttaatcgagttgcgtatctggtgaatcacacacaactgcactctg

SEQ ID NO: 183812 - DNA, 55 bp, Artificial
  Synthetic oligonucleotide
cgcgagctggtcgtaccgctgataaaacatccaggaatgtcgctacgtctggctt

SEQ ID NO: 183813 - DNA, 55 bp, Artificial
  Synthetic oligonucleotide
cgcgaggctcttataaccctcggcaacacccttaccacaatacacgtcaaataag

SEQ ID NO: 183814 - DNA, 55 bp, Artificial
  Synthetic oligonucleotide
cgtactttcgagttggtcaatccccatgctgaaaatacgccatcattctgggtgt

SEQ ID NO: 183815 - DNA, 55 bp, Artificial
  Synthetic oligonucleotide
cgcgagttgaaagctcggacagactatacgcggatagcgaaaacgttgactcgcc

SEQ ID NO: 183816 - DNA, 60 bp, Artificial
  Synthetic oligonucleotide
gcgtctagcttacaattctcaatgttcgattcacacccgttgcttacaagcatcgctaat

SEQ ID NO: 183817 - DNA, 55 bp, Artificial
  Synthetic oligonucleotide
catcggcatatctcagtttacgccgggacgccagtcccataaagcggttaaggga

SEQ ID NO: 183818 - DNA, 55 bp, Artificial
  Synthetic oligonucleotide
caggcttaccaaggaacccatccttcatggatttaatagcatccatcgccgccgt

SEQ ID NO: 183819 - DNA, 55 bp, Artificial
  Synthetic oligonucleotide
cgcgatcgcatatttaacgctttatccgggaacggtccgctaactaaggctgaaa

SEQ ID NO: 183820 - DNA, 55 bp, Artificial
  Synthetic oligonucleotide
cgcgatgtgggaattccgctgcatttgcgtgatgtcggcgttcgatgatgtctgt

SEQ ID NO: 183821 - DNA, 55 bp, Artificial
  Synthetic oligonucleotide
catcgctgatatggagcgtgaagcggccagacttattcgccgactgataaccacg

SEQ ID NO: 183822 - DNA, 55 bp, Artificial
  Synthetic oligonucleotide
cgtaccgctttatgctggcaaacgcgctctgctgatcacccaccaaataacggac

SEQ ID NO: 183823 - DNA, 55 bp, Artificial
  Synthetic oligonucleotide
cgtaccgaccggcacattctgtgcgtatcccgtcaacatggcggtagacagaatt

SEQ ID NO: 183824 - DNA, 55 bp, Artificial
  Synthetic oligonucleotide
cgcgatttgcgagaactatcggcgctgtgacttctaccagcgttacatttggtga

SEQ ID NO: 183825 - DNA, 55 bp, Artificial
  Synthetic oligonucleotide
cgtacccgactaatcactttggtgtagaacgggctatattgatctgatatgtgcg

SEQ ID NO: 183826 - DNA, 55 bp, Artificial
  Synthetic oligonucleotide
cgcgcagatcttggtcgatccgccttattttcactgcgctctccgcctccgattg

SEQ ID NO: 183827 - DNA, 60 bp, Artificial
  Synthetic oligonucleotide
gcgtccttttacggatcaggatggcaatatatgggatttgtcatttcttgatgcacatga

SEQ ID NO: 183828 - DNA, 55 bp, Artificial
  Synthetic oligonucleotide
cgcgcagattacggatatccatcaggtggaaaacgccgcacgatatctgggaacg

SEQ ID NO: 183829 - DNA, 55 bp, Artificial
  Synthetic oligonucleotide
cgtaccagcgtcatcggatcgttagtgacgaaccgcccctgtggaatcagtcggg

SEQ ID NO: 183830 - DNA, 55 bp, Artificial
  Synthetic oligonucleotide
cgcgctttgtaggttgtagacattagcgagaaagtctgagatgcgtttgcggata

SEQ ID NO: 183831 - DNA, 55 bp, Artificial
  Synthetic oligonucleotide
cgtaaagctaaacgtgaacatattctttcgagatcactcacttgacgaagaatac

SEQ ID NO: 183832 - DNA, 55 bp, Artificial
  Synthetic oligonucleotide
cgcggaaaattcatccctgtgggatgcgcagaacgttaccgaccgggttctcgct

SEQ ID NO: 183833 - DNA, 55 bp, Artificial
  Synthetic oligonucleotide
cgcggacgttacaccgtgactctatctaccgccagcacactacgcagcatagcta

SEQ ID NO: 183834 - DNA, 55 bp, Artificial
  Synthetic oligonucleotide
cgtaaacgtcggcattaccgtgaatcgattgaactaagtctgtttcgctacccgc

SEQ ID NO: 183835 - DNA, 55 bp, Artificial
  Synthetic oligonucleotide
cgtaaacgagatttatcgctttcccacacttgcgggttagaagacatcatctcgg

SEQ ID NO: 183836 - DNA, 55 bp, Artificial
  Synthetic oligonucleotide
cgcggagcctatccaggcaatcgggcgccattttacggactcccagacggcaaag

SEQ ID NO: 183837 - DNA, 55 bp, Artificial
  Synthetic oligonucleotide
cgcggagcgtatcggtgatttaggcacagagggttcgtcatcctattatcgcatc

SEQ ID NO: 183838 - DNA, 55 bp, Artificial
  Synthetic oligonucleotide
gcgtccgcggcgattttagcgctgaagggtacgttagtttccgtaaagcgctgtc

SEQ ID NO: 183839 - DNA, 55 bp, Artificial
  Synthetic oligonucleotide
catccgctgcgcaaaggtgcgatggattatcgactgcgccctgaaccgacgactg

SEQ ID NO: 183840 - DNA, 55 bp, Artificial
  Synthetic oligonucleotide
catccgaagccagatgagagtcgagttccgcagacagcgcggcttcagttaactg

SEQ ID NO: 183841 - DNA, 55 bp, Artificial
  Synthetic oligonucleotide
cgcggtggcatcggcaataaatccggcgaaaataatggttttctcactcagccgt

SEQ ID NO: 183842 - DNA, 55 bp, Artificial
  Synthetic oligonucleotide
cggttttccataccacaacgtccgtcaaagagccgttctgcattagcgtgagtgt

SEQ ID NO: 183843 - DNA, 55 bp, Artificial
  Synthetic oligonucleotide
cgcggttctggcgagacagagaaccggtatagcaaagattatccaccagcagccc

SEQ ID NO: 183844 - DNA, 55 bp, Artificial
  Synthetic oligonucleotide
cgcggttgcgtatggtgtatggccatttaagggataaagaatcatctccttaccg

SEQ ID NO: 183845 - DNA, 55 bp, Artificial
  Synthetic oligonucleotide
cggtttagccgtgttggaggcatggttaagcgaaatatcagagctagatggcagt

SEQ ID NO: 183846 - DNA, 55 bp, Artificial
  Synthetic oligonucleotide
cgcgtaacttttcagcaccacgcaacgtcatcggaaattgtttcatatcgtcact

SEQ ID NO: 183847 - DNA, 54 bp, Artificial
  Synthetic oligonucleotide
cgtaagttaacccgtcattagaatacaaaagtctggtacctggttgcttcgctc

SEQ ID NO: 183848 - DNA, 55 bp, Artificial
  Synthetic oligonucleotide
cgcgccttcgttggctttgccacgaataccgtctgtgccgaaatatttgcgcacc

SEQ ID NO: 183849 - DNA, 60 bp, Artificial
  Synthetic oligonucleotide
gcgtccgcaactgctcccacataacgaacattctgccctgtccatgattcagcgttccgg

SEQ ID NO: 183850 - DNA, 55 bp, Artificial
  Synthetic oligonucleotide
cagggcgttgagttgatcaccctcggttataacaccccttcagtgaacgcccttg

SEQ ID NO: 183851 - DNA, 55 bp, Artificial
  Synthetic oligonucleotide
cgtaagtcttgtcaatcgcttcctggttgtttgtctcttcatatcctttcagatc

SEQ ID NO: 183852 - DNA, 55 bp, Artificial
  Synthetic oligonucleotide
cgcgcgctgacagtatccatcgtagccgcttcctgctcatactcaggcgcggacc

SEQ ID NO: 183853 - DNA, 55 bp, Artificial
  Synthetic oligonucleotide
cgtaagggaactcgcaatctctaattcgaaataaagcaagctttggttgaccact

SEQ ID NO: 183854 - DNA, 55 bp, Artificial
  Synthetic oligonucleotide
cgtaaggcgtgggatgtgctgaccgacttctgctccgccatgcgttgtatgccgg

SEQ ID NO: 183855 - DNA, 55 bp, Artificial
  Synthetic oligonucleotide
cgtaaggcatctcgcactggggctttactggcggctaaacgggtagcgagggcag

SEQ ID NO: 183856 - DNA, 55 bp, Artificial
  Synthetic oligonucleotide
cgtaagacatcttaagccacaccagatatggtcatcggtagaagtcagctcacgg

SEQ ID NO: 183857 - DNA, 55 bp, Artificial
  Synthetic oligonucleotide
cgcgcgtaataagatcatttcaacacctatacggggattaggagctaacattaaa

SEQ ID NO: 183858 - DNA, 55 bp, Artificial
  Synthetic oligonucleotide
cgcgctaagatccttgcgctttggtagggagtccgtataatttgccacccacgcg

SEQ ID NO: 183859 - DNA, 55 bp, Artificial
  Synthetic oligonucleotide
cgtaacttccaggtatatcataagcgatccatacactccatccagctctacgcat

SEQ ID NO: 183860 - DNA, 53 bp, Artificial
  Synthetic oligonucleotide
gcgtccccctttttcacccccgtgactgggcttatgccttcaacaaactgccg

SEQ ID NO: 183861 - DNA, 55 bp, Artificial
  Synthetic oligonucleotide
catcctgcttcaactgacgtacagaggcatcatccgaattacctagcagatcgcg

SEQ ID NO: 183862 - DNA, 55 bp, Artificial
  Synthetic oligonucleotide
cagggctcgacttatctggtgatgcgtacctccggtgatctgcatttccgtgcca

SEQ ID NO: 183863 - DNA, 55 bp, Artificial
  Synthetic oligonucleotide
cgcgctatttcttggtctggcaggcaacatgaacagtgctgaacgtaatcgtcag

SEQ ID NO: 183864 - DNA, 55 bp, Artificial
  Synthetic oligonucleotide
cgcgctcttcttgcgcgctacatccagcagaaccagccacatgcgcagttctggc

SEQ ID NO: 183865 - DNA, 55 bp, Artificial
  Synthetic oligonucleotide
caggccaccgacaaataacacaccagggcggaatccctaatcatcacgcgaccgc

SEQ ID NO: 183866 - DNA, 55 bp, Artificial
  Synthetic oligonucleotide
cgcctcattttgtgtgccatcaggctgtgccacggtgggccgtgatgctgtgcca

SEQ ID NO: 183867 - DNA, 55 bp, Artificial
  Synthetic oligonucleotide
cgcctatcagacgcggtaaacgctgggtgccatctgaaccgggtaacaatccaag

SEQ ID NO: 183868 - DNA, 55 bp, Artificial
  Synthetic oligonucleotide
cgccgtttgtttccacataaggcccctcaagtagctgtacacaatacgggtacac

SEQ ID NO: 183869 - DNA, 55 bp, Artificial
  Synthetic oligonucleotide
cgtcaaggatccggtccaacgaaataacgtggcgcgtcgactctcgaacagggag

SEQ ID NO: 183870 - DNA, 55 bp, Artificial
  Synthetic oligonucleotide
cgtcaaggttatcgacggaaaggtgtatgtccgtgaaggtcatcgccgtcgccgt

SEQ ID NO: 183871 - DNA, 60 bp, Artificial
  Synthetic oligonucleotide
ggagctatttgtgttgcattacgtggcgttggtattttctcgcaggtatctaagtggtgc

SEQ ID NO: 183872 - DNA, 55 bp, Artificial
  Synthetic oligonucleotide
cgccgtttgccactcttctcccggccacggacctgagtagttcatccaactgccg

SEQ ID NO: 183873 - DNA, 55 bp, Artificial
  Synthetic oligonucleotide
cgccgtttcaccgtattcgaagttcagtcttgcccaggcattaatcccttttgcg

SEQ ID NO: 183874 - DNA, 55 bp, Artificial
  Synthetic oligonucleotide
catctccctcacgcagataattgagacagtcttgccagaccggacgattcactgt

SEQ ID NO: 183875 - DNA, 55 bp, Artificial
  Synthetic oligonucleotide
cgccgttatttcctgacggcgcagtagactcctgccaaatatcgactcacgtcac

SEQ ID NO: 183876 - DNA, 55 bp, Artificial
  Synthetic oligonucleotide
cgccgtcgccgtgccatcctgcttgctatcgaggaaggtgctgacatccagttcg

SEQ ID NO: 183877 - DNA, 54 bp, Artificial
  Synthetic oligonucleotide
cgtcacaggaagctctctacgccgtttaaattagttttattgcatttgggtagg

SEQ ID NO: 183878 - DNA, 55 bp, Artificial
  Synthetic oligonucleotide
cgccgtatttgaattgcgttatcacgaactgggtgcggagccataattcgggtcc

SEQ ID NO: 183879 - DNA, 55 bp, Artificial
  Synthetic oligonucleotide
caggccacaatgttgcgattaatcatagcggcatccccgaccaacgctttaacga

SEQ ID NO: 183880 - DNA, 55 bp, Artificial
  Synthetic oligonucleotide
cgccgtatatttcaccacggtgttgtcggtcgtcgatgtgtaggtttccacgccg

SEQ ID NO: 183881 - DNA, 54 bp, Artificial
  Synthetic oligonucleotide
cgccgtaatacgcccgcccatacctaaagggccgatccctgtattattcacggc

SEQ ID NO: 183882 - DNA, 60 bp, Artificial
  Synthetic oligonucleotide
gcaatccaggaacggaggaatgccgagcgggaactcaagaccgccagagatgccgcaaat

SEQ ID NO: 183883 - DNA, 60 bp, Artificial
  Synthetic oligonucleotide
agtaggcatgacacgaaaaatcatcagtaagcagctctggaaatccttacagccacttct

SEQ ID NO: 183884 - DNA, 55 bp, Artificial
  Synthetic oligonucleotide
catctgtcacacgggtatgcttgtgataaatagcatcgtaattatgctctgcaag

SEQ ID NO: 183885 - DNA, 55 bp, Artificial
  Synthetic oligonucleotide
cgtcagaggataagtgtgacactctgactattgacgaggtgaattatcaggtgcg

SEQ ID NO: 183886 - DNA, 55 bp, Artificial
  Synthetic oligonucleotide
cgccgcccaacgggcaattcttatcgattgagccctgaggggcgttaagcgtcaa

SEQ ID NO: 183887 - DNA, 55 bp, Artificial
  Synthetic oligonucleotide
cgccgcggtccattattatcagcgaacccggcgttataggagccaaggcattgcc

SEQ ID NO: 183888 - DNA, 55 bp, Artificial
  Synthetic oligonucleotide
cgccggaacctggagctgagaaagagcctcgccggtatagagaggacgatagctc

SEQ ID NO: 183889 - DNA, 55 bp, Artificial
  Synthetic oligonucleotide
cgtcagagaaaacgcgtgttcctgcccgttatagggcgcatactgcgcaaaagcg

SEQ ID NO: 183890 - DNA, 55 bp, Artificial
  Synthetic oligonucleotide
cgccggactaatgaacgcgcgtgatgtaaacgcccggcagaagaccaaccatagg

SEQ ID NO: 183891 - DNA, 55 bp, Artificial
  Synthetic oligonucleotide
cgtcagaaaatacgccttatgggcatcagacgcgcccaaaccgctcgccattcag

SEQ ID NO: 183892 - DNA, 55 bp, Artificial
  Synthetic oligonucleotide
cgccggcggtaattgcaatttatcccactgttgacgaagtagcgtgataatctga

SEQ ID NO: 183893 - DNA, 55 bp, Artificial
  Synthetic oligonucleotide
cgccgggttaatctggcgaatacgctccgccataacttccgcttttgccagccca

SEQ ID NO: 183894 - DNA, 59 bp, Artificial
  Synthetic oligonucleotide
agtagtagaggcacatgctaaagtcttagaacctcctatcgaagtgatttgagcgtaaa

SEQ ID NO: 183895 - DNA, 55 bp, Artificial
  Synthetic oligonucleotide
caggcatacggagttcctgcaatttattgagttttcacgattttgttggcctgat

SEQ ID NO: 183896 - DNA, 55 bp, Artificial
  Synthetic oligonucleotide
cgtcacttcgagtctcatgaagggagagtcaaaccggttcgctacgaaccgcgca

SEQ ID NO: 183897 - DNA, 55 bp, Artificial
  Synthetic oligonucleotide
cgccggtaaacgccccactgtcatcgcaatcagggaccttcttggtaaggggagc

SEQ ID NO: 183898 - DNA, 54 bp, Artificial
  Synthetic oligonucleotide
cgccggtcggtgatccggttacgccaaccctgtacgtctcaccacccaatccga

SEQ ID NO: 183899 - DNA, 55 bp, Artificial
  Synthetic oligonucleotide
cgccggttttggctggaccggagtagtggacatgaacgattcgccatcctgtgtt

SEQ ID NO: 183900 - DNA, 55 bp, Artificial
  Synthetic oligonucleotide
cgcctgttggtgcgtcatccctaagccttccagtttatcgtacatagcctgagcg

SEQ ID NO: 183901 - DNA, 55 bp, Artificial
  Synthetic oligonucleotide
catcgggttatctccggttttgaccttagcgagtgtgctcggtcgttgaaatgat

SEQ ID NO: 183902 - DNA, 55 bp, Artificial
  Synthetic oligonucleotide
cgccttatggtgtactggcgcgtcgtctgtgtgaatttgttgccggtagtggccc

SEQ ID NO: 183903 - DNA, 55 bp, Artificial
  Synthetic oligonucleotide
cgtagtgtagagcgccgtaatcagcaatggactaaccgaatgctggaggagcatc

SEQ ID NO: 183904 - DNA, 55 bp, Artificial
  Synthetic oligonucleotide
caggcgtgaggtgatgatcgtgccttgaaaccaaattatcccgcccaggatgcca

SEQ ID NO: 183905 - DNA, 60 bp, Artificial
  Synthetic oligonucleotide
ggagcgaccgccccagattgcagtttcatgtcgcagagctcgagtcaggtccgttggcga

SEQ ID NO: 183906 - DNA, 55 bp, Artificial
  Synthetic oligonucleotide
cgcgaaaagtaggtccaaaagaataaacattcgacaaagaacatgcgtatgcttc

SEQ ID NO: 183907 - DNA, 55 bp, Artificial
  Synthetic oligonucleotide
cgcgaaatgccgagtgaagcccgtccattcgtccacctccagcagcagttcggtg

SEQ ID NO: 183908 - DNA, 55 bp, Artificial
  Synthetic oligonucleotide
cgcgaaatgctctagaaacaacgtcgctttctctataaattagacatggtgctct

SEQ ID NO: 183909 - DNA, 55 bp, Artificial
  Synthetic oligonucleotide
cgtagtactgcgccagtcacgtcgtggatctaacctgaggtgggcgtacttgtac

SEQ ID NO: 183910 - DNA, 55 bp, Artificial
  Synthetic oligonucleotide
cgcgaacaagtaccgagcagcatggaatacgacgttcaggtaagtataaggcatc

SEQ ID NO: 183911 - DNA, 55 bp, Artificial
  Synthetic oligonucleotide
cgcgaaccgtgatagtgccatccgaaaccgcagcatgagtagtcgaactggcatc

SEQ ID NO: 183912 - DNA, 55 bp, Artificial
  Synthetic oligonucleotide
caggctattaatcccggggatgagtcgtccggcgcaattattgccaaattcggag

SEQ ID NO: 183913 - DNA, 55 bp, Artificial
  Synthetic oligonucleotide
cgtagcgttggaccgtttcgtgttcatgtgatctaacgtatcacgactaaacgta

SEQ ID NO: 183914 - DNA, 55 bp, Artificial
  Synthetic oligonucleotide
cgcgaatacgccagggatgctggtttgtgtggcgttgccatgggtgccggactga

SEQ ID NO: 183915 - DNA, 55 bp, Artificial
  Synthetic oligonucleotide
cgtagcgtgtagtgcggcacactcctgttaacttacggcattcatcctcacggat

SEQ ID NO: 183916 - DNA, 60 bp, Artificial
  Synthetic oligonucleotide
ggagccggactatgccgaagtctaccttccgtgtgcttgcctgtgaagcacgacccgcat

SEQ ID NO: 183917 - DNA, 55 bp, Artificial
  Synthetic oligonucleotide
cgtagcgtggtgtaagcagagtggcggggcgttaggtatcactgttgaccaagtc

SEQ ID NO: 183918 - DNA, 55 bp, Artificial
  Synthetic oligonucleotide
caggctcgataagcgcgagttcaacaccgcgacatggtcaaaattcatacctgct

SEQ ID NO: 183919 - DNA, 55 bp, Artificial
  Synthetic oligonucleotide
caggcccgcgaagcagggattaatctgtctgccacgcttgccaccgccctgaaac

SEQ ID NO: 183920 - DNA, 54 bp, Artificial
  Synthetic oligonucleotide
cgtatgaaccctgaccgcattttattaacggaggttcgcggtgcggaagcctgg

SEQ ID NO: 183921 - DNA, 55 bp, Artificial
  Synthetic oligonucleotide
cgtatcgcgggtactgtgatctcgttttcccgcacaacggagaagcacaccaaag

SEQ ID NO: 183922 - DNA, 55 bp, Artificial
  Synthetic oligonucleotide
cgtatccgtattctgacgaactgcatggagtataccaatctggattggcagaccc

SEQ ID NO: 183923 - DNA, 55 bp, Artificial
  Synthetic oligonucleotide
caggcctcccgcatgcagtgcatcattacagtttctgatacaagggatggtcgct

SEQ ID NO: 183924 - DNA, 55 bp, Artificial
  Synthetic oligonucleotide
caggcgcgtttgccgagtctataaggctctctgcagcgtcagctgtgcttggtgc

SEQ ID NO: 183925 - DNA, 54 bp, Artificial
  Synthetic oligonucleotide
cgtatcacctccacggacggctgttaagacgaacccacaagccaaaactctgtt

SEQ ID NO: 183926 - DNA, 55 bp, Artificial
  Synthetic oligonucleotide
cgtatcacacaggcaagattttagcggcagcaggcagcgttgacagcggcgaacc

SEQ ID NO: 183927 - DNA, 58 bp, Artificial
  Synthetic oligonucleotide
agtagtgccagccgcaacagtcctaagaccacggccagcgaaatagaccgattcttag

SEQ ID NO: 183928 - DNA, 55 bp, Artificial
  Synthetic oligonucleotide
caggcgctcacagaggcggggcttgaagttgtcagggtgacgcgaagcagtatca

SEQ ID NO: 183929 - DNA, 55 bp, Artificial
  Synthetic oligonucleotide
cgtataacgcaccctatctggcagccctgacttttgttctgcttactggtatcgc

SEQ ID NO: 183930 - DNA, 55 bp, Artificial
  Synthetic oligonucleotide
cgcctcgccctaacgggccatcgctacgcgatgttatccttcacgctaaacaccg

SEQ ID NO: 183931 - DNA, 55 bp, Artificial
  Synthetic oligonucleotide
caggcggagatgtctgtgccacgaatcgctgataagtgaatatgcctgttacagg

SEQ ID NO: 183932 - DNA, 55 bp, Artificial
  Synthetic oligonucleotide
cgcctcgttgctgctaactcttaacggatgtgctctggtcccgcgtaccccgctg

SEQ ID NO: 183933 - DNA, 55 bp, Artificial
  Synthetic oligonucleotide
catctactgggttgcacaggtcatcgtagtcatacagattccttccatcagtcag

SEQ ID NO: 183934 - DNA, 55 bp, Artificial
  Synthetic oligonucleotide
cgtagttatctacgttcctagggattagcttcacttgccgccttgctacaaccca

SEQ ID NO: 183935 - DNA, 55 bp, Artificial
  Synthetic oligonucleotide
cgcctgggcgcactgcccgtcacagcaggcaaagggcttgagtaactcgttttcc

SEQ ID NO: 183936 - DNA, 55 bp, Artificial
  Synthetic oligonucleotide
catcgtcttttggtttccgtgacttcaccactctgatatccacattcgggtcata

SEQ ID NO: 183937 - DNA, 52 bp, Artificial
  Synthetic oligonucleotide
ccagttaagggtacggttaatccagcgatcggaaaattcggtaaacaggata

SEQ ID NO: 183938 - DNA, 57 bp, Artificial
  Synthetic oligonucleotide
ggagagaaagggacaggccgcacgtattgccgcgaccattcgacataaccgggccag

SEQ ID NO: 183939 - DNA, 55 bp, Artificial
  Synthetic oligonucleotide
ccgataaatgggccaaagaacgctaggcgcagaatattcacatccgggaactggg

SEQ ID NO: 183940 - DNA, 55 bp, Artificial
  Synthetic oligonucleotide
ccagttatacagcgagaacaggagataagggacgaacggctgatacaggaacgcg

SEQ ID NO: 183941 - DNA, 55 bp, Artificial
  Synthetic oligonucleotide
caacagggtgcctaacgctcgggctcgaaacgggcaggattaacactagcgtgat

SEQ ID NO: 183942 - DNA, 55 bp, Artificial
  Synthetic oligonucleotide
gacaagtagcttcagctgtgactgcgggttttgctccataagacagtatccacac

SEQ ID NO: 183943 - DNA, 55 bp, Artificial
  Synthetic oligonucleotide
gacaagtctcggttacgaatggtacatagtgatgaattggggatccgctccgtac

SEQ ID NO: 183944 - DNA, 55 bp, Artificial
  Synthetic oligonucleotide
caacagcgaaaaccacgtgctgaaccgcgaatccgggatggtgaaaggctgcttt

SEQ ID NO: 183945 - DNA, 55 bp, Artificial
  Synthetic oligonucleotide
caacagagctattgggtagagtactcgatagtaaaggtagacctttagacggacg

SEQ ID NO: 183946 - DNA, 55 bp, Artificial
  Synthetic oligonucleotide
ccgagtcgccagtaatccaccgttggcaaataaccgctgccgtagtagatagggc

SEQ ID NO: 183947 - DNA, 55 bp, Artificial
  Synthetic oligonucleotide
ccgaggggatagtacgatggaaggccgcaaataaatttgtattggggcatgcgtg

SEQ ID NO: 183948 - DNA, 55 bp, Artificial
  Synthetic oligonucleotide
gacacgccctgattgtgtgcccgtcagtgtgttagatctactgcaaggctattgc

SEQ ID NO: 183949 - DNA, 60 bp, Artificial
  Synthetic oligonucleotide
agtatccaagccgagcagacgatattgatcaggcgtaccgtgagcgtgtggaaattaccg

SEQ ID NO: 183950 - DNA, 55 bp, Artificial
  Synthetic oligonucleotide
gacacggcattttcctgcgatgtcagccgtacgctaaatgcatccgtttacctcg

SEQ ID NO: 183951 - DNA, 55 bp, Artificial
  Synthetic oligonucleotide
caacaattcgatcagacacgcactgaggcgattaacgctaactatcacgcgccgg

SEQ ID NO: 183952 - DNA, 55 bp, Artificial
  Synthetic oligonucleotide
ccgaggctttctgcccgttaagcgtcagttcaaagaatagcgtgacgtgtttacc

SEQ ID NO: 183953 - DNA, 55 bp, Artificial
  Synthetic oligonucleotide
gacacgggcgcttctggacgtaaagcctctcacactatccttaacggagaccaac

SEQ ID NO: 183954 - DNA, 55 bp, Artificial
  Synthetic oligonucleotide
gacactctttcccgattccgatactatagtggtatggtatcacttcgccccgtcg

SEQ ID NO: 183955 - DNA, 55 bp, Artificial
  Synthetic oligonucleotide
gacagcaatcacgaattactttcctttacgtttctccgtctggttttagccatac

SEQ ID NO: 183956 - DNA, 55 bp, Artificial
  Synthetic oligonucleotide
gacagcctcatccgttgtctgccttttgtacgaaaccctgtcaacaccacacttc

SEQ ID NO: 183957 - DNA, 55 bp, Artificial
  Synthetic oligonucleotide
ccagtttctcaacatcaggtgtgtaagcaacacgaactgtttcgattaacaagca

SEQ ID NO: 183958 - DNA, 55 bp, Artificial
  Synthetic oligonucleotide
gacagcgaaggcaaccgaataggtttacatcaacctgcgtgatatttgctaaacg

SEQ ID NO: 183959 - DNA, 55 bp, Artificial
  Synthetic oligonucleotide
gacagcgagaccaggtgaacgcaaccaatcgcgcaattccaccccgttcgtgaag

SEQ ID NO: 183960 - DNA, 60 bp, Artificial
  Synthetic oligonucleotide
agtatctagatttagacgaatggatgatattggcggagtgatgcataatataagcacaat

SEQ ID NO: 183961 - DNA, 55 bp, Artificial
  Synthetic oligonucleotide
gacagcgctcgtatagtcgatttgctacaaacttggcagacatcaattgtcgact

SEQ ID NO: 183962 - DNA, 55 bp, Artificial
  Synthetic oligonucleotide
ccgagcaaatcgtatcagaagccagctcagtcattgcgatactggatagccaggg

SEQ ID NO: 183963 - DNA, 55 bp, Artificial
  Synthetic oligonucleotide
ccgagaactgtcgaaggacaagcagggagttgtagcaataccgctttactcgttt

SEQ ID NO: 183964 - DNA, 55 bp, Artificial
  Synthetic oligonucleotide
gacaggagataacatgcctagtccggtcacgactactcgacgcttagacacggtt

SEQ ID NO: 183965 - DNA, 55 bp, Artificial
  Synthetic oligonucleotide
gacaggccctcggatacagtctggacctatacccgcagcaatgtggtgatgccgg

SEQ ID NO: 183966 - DNA, 55 bp, Artificial
  Synthetic oligonucleotide
gacaggcttccgccacagttttaagccactgcgggtcaaaagtttctgcatcgga

SEQ ID NO: 183967 - DNA, 55 bp, Artificial
  Synthetic oligonucleotide
ccgactggagatggaaggcttgcagtacagcgaaatcccgatgctggcgtgcggt

SEQ ID NO: 183968 - DNA, 55 bp, Artificial
  Synthetic oligonucleotide
gacagtacgttgtgtgacgcgctttattatattgaggagatgtattgtggagact

SEQ ID NO: 183969 - DNA, 55 bp, Artificial
  Synthetic oligonucleotide
caaattctaagcatttcaccggggtaaagctattgttttggcgccaacaggagag

SEQ ID NO: 183970 - DNA, 55 bp, Artificial
  Synthetic oligonucleotide
gacagtgcacctaaccttggtatcggtacgataaatgttgtatgcgctgctgatg

SEQ ID NO: 183971 - DNA, 59 bp, Artificial
  Synthetic oligonucleotide
agtatctgaaaaaactcccccctgataacacaataccgccagatcttactgatgagcac

SEQ ID NO: 183972 - DNA, 55 bp, Artificial
  Synthetic oligonucleotide
ccgacgttcccgtccatgctcagtatcgtcgcgccacgaatcaacgtagcccgtg

SEQ ID NO: 183973 - DNA, 55 bp, Artificial
  Synthetic oligonucleotide
ccgcagcccgctaactgtctgaaagatcaatacgtcttacgccattgctgcgttg

SEQ ID NO: 183974 - DNA, 55 bp, Artificial
  Synthetic oligonucleotide
caacgcgcatctgaccgcgggaaaaggcttcgttttgccagcttaagcgaacctt

SEQ ID NO: 183975 - DNA, 55 bp, Artificial
  Synthetic oligonucleotide
ccgcagacgtaatggttaaacctctgtttagctcagcgagtatggataaggagtc

SEQ ID NO: 183976 - DNA, 55 bp, Artificial
  Synthetic oligonucleotide
ccgcacatgttacgccatgcttgtggctatgccttagcggatcggggaatcgata

SEQ ID NO: 183977 - DNA, 55 bp, Artificial
  Synthetic oligonucleotide
ccgcaaatgacttctcatgcgatgggtagcgatgtcgggcagtgaaacggggttc

SEQ ID NO: 183978 - DNA, 55 bp, Artificial
  Synthetic oligonucleotide
gaatgatggcattgaacgtacaccggaacagtatttccggcgctataacgccagg

SEQ ID NO: 183979 - DNA, 55 bp, Artificial
  Synthetic oligonucleotide
ccgcaaaggaggtattaccagtaccgcctaagcataacaccaggtactaacatga

SEQ ID NO: 183980 - DNA, 55 bp, Artificial
  Synthetic oligonucleotide
ccgattgagacgcgacgctcggccatttggacagtgatttcatcctgtggacgcg

SEQ ID NO: 183981 - DNA, 55 bp, Artificial
  Synthetic oligonucleotide
ccagtggtgtaattcgccggtataccggacattccgttaactcgctgccacggac

SEQ ID NO: 183982 - DNA, 60 bp, Artificial
  Synthetic oligonucleotide
agtatgcgcggatggtggaagagtaacctgctcgtcattcatcgacttaatggacgcaaa

SEQ ID NO: 183983 - DNA, 55 bp, Artificial
  Synthetic oligonucleotide
ccgattaacactcagactgccagtgtcaaaatcctgtaggccttggtagaattat

SEQ ID NO: 183984 - DNA, 53 bp, Artificial
  Synthetic oligonucleotide
ccgattaaagcaccccgttagctttgttactgcgccagcttaaccaaccccgc

SEQ ID NO: 183985 - DNA, 55 bp, Artificial
  Synthetic oligonucleotide
ccagtgtggtttatagggaaaattgcttgtctggagcttggcgggagtaacgatg

SEQ ID NO: 183986 - DNA, 55 bp, Artificial
  Synthetic oligonucleotide
ccgatggtgcaggtctgcacttattggttcacactaatggttctaagtactggcg

SEQ ID NO: 183987 - DNA, 55 bp, Artificial
  Synthetic oligonucleotide
gaatggttctcggcaaaccgcaaacagaccctactctcgaatggttcctgtccta

SEQ ID NO: 183988 - DNA, 55 bp, Artificial
  Synthetic oligonucleotide
caaccggcgcgtcctaatcgcatcaacaaagagattcgcgccacagaagttcgct

SEQ ID NO: 183989 - DNA, 55 bp, Artificial
  Synthetic oligonucleotide
ccgataatcttgcctcttccaagagccatcaatgattgagtaagttgatatccgc

SEQ ID NO: 183990 - DNA, 55 bp, Artificial
  Synthetic oligonucleotide
ccgatagcatttagcgccagacgcatattatcggcacaactgtcgtggtattcag

SEQ ID NO: 183991 - DNA, 55 bp, Artificial
  Synthetic oligonucleotide
gacaacagcggttttggtgtccgaaatcgtacaattctgtacatctacgcaaggg

SEQ ID NO: 183992 - DNA, 55 bp, Artificial
  Synthetic oligonucleotide
ccgatcacaagtttataatccgccggagcccattatgcgcgatagccgtccacaa

SEQ ID NO: 183993 - DNA, 57 bp, Artificial
  Synthetic oligonucleotide
gcaatattgacattaacttccacccggatataacagtagtataagttgttgtttcaa

SEQ ID NO: 183994 - DNA, 60 bp, Artificial
  Synthetic oligonucleotide
ggactgagtccggtatttcttcctccgcggcgatggagattatcagcaacgtgagcgaaa

SEQ ID NO: 183995 - DNA, 55 bp, Artificial
  Synthetic oligonucleotide
gaatttacgcagcgcgatatgcgttgaaacgtgaatcacttttagtttatcggtg

SEQ ID NO: 183996 - DNA, 55 bp, Artificial
  Synthetic oligonucleotide
caaccacattaggtgacctgttccctgagatacgtaatgctgcgtcagtgcggga

SEQ ID NO: 183997 - DNA, 55 bp, Artificial
  Synthetic oligonucleotide
ccagtgttagtaattgggaccacggtccaccttggatatccaatgccaacgttgg

SEQ ID NO: 183998 - DNA, 55 bp, Artificial
  Synthetic oligonucleotide
caaccagctcagtactgcgggtgccaccagacgcatattcgcccaagtcagccgc

SEQ ID NO: 183999 - DNA, 55 bp, Artificial
  Synthetic oligonucleotide
ccgatctacggatcagggtggacggcacaccagtagaagatatgctctcccgtgg

SEQ ID NO: 184000 - DNA, 55 bp, Artificial
  Synthetic oligonucleotide
ccgatcttttactcctgcgcaatctaatgaaccccttacaatatggtaacgtact

SEQ ID NO: 184001 - DNA, 55 bp, Artificial
  Synthetic oligonucleotide
caaccaggagtacgttgccaacaggttacacggccaataaattgtgtaggattat

SEQ ID NO: 184002 - DNA, 55 bp, Artificial
  Synthetic oligonucleotide
ccgatgaatcgctccctcttgcgctctcctgttccaaccctgccgtttcccggat

SEQ ID NO: 184003 - DNA, 55 bp, Artificial
  Synthetic oligonucleotide
ccgatgctgatggccttagtggttgtcagcgacctttaatgcgtcgcagagtcag

SEQ ID NO: 184004 - DNA, 55 bp, Artificial
  Synthetic oligonucleotide
gaattcactttcccgttggatagcgtctagaaacgctgggctagaaaaataatcc

SEQ ID NO: 184005 - DNA, 60 bp, Artificial
  Synthetic oligonucleotide
agtattacgtgcatctcctagacaagctgatgtcatggtgatagcaggtacgccatttat

SEQ ID NO: 184006 - DNA, 55 bp, Artificial
  Synthetic oligonucleotide
caaccatgcgaggtgtaaagcccgattgcagcgaaactttacgtttccagccacg

SEQ ID NO: 184007 - DNA, 55 bp, Artificial
  Synthetic oligonucleotide
ccgatgggtgctggtcgcactgatgatggggattggcccgctggtcgtcggaata

SEQ ID NO: 184008 - DNA, 55 bp, Artificial
  Synthetic oligonucleotide
gaattaacgatagcgccacatcctcatatgctgcgacatgcctgcggctacgccc

SEQ ID NO: 184009 - DNA, 55 bp, Artificial
  Synthetic oligonucleotide
ccgaaaccgggattactacaccggctgagacttggcagattgacttcacggcgcg

SEQ ID NO: 184010 - DNA, 55 bp, Artificial
  Synthetic oligonucleotide
caaagagttcgaaggtctgcgcttacacgcttatcgctgcgccgctgacgtctgg

SEQ ID NO: 184011 - DNA, 55 bp, Artificial
  Synthetic oligonucleotide
ccctttgcatcagtactgataatgtgaacctgactaaaccgcccacagagcgcgg

SEQ ID NO: 184012 - DNA, 55 bp, Artificial
  Synthetic oligonucleotide
caaactgcacatagcgtcctccccatgtgcggtaatagctatcgacaaattgacg

SEQ ID NO: 184013 - DNA, 55 bp, Artificial
  Synthetic oligonucleotide
caaactcaatcacaacgaaaccctgagttatccgacacaatatgaccagacactg

SEQ ID NO: 184014 - DNA, 55 bp, Artificial
  Synthetic oligonucleotide
ccatacgcgcgtaaataagtctgaaaccaaacttcaccgcttaacgctctcctct

SEQ ID NO: 184015 - DNA, 55 bp, Artificial
  Synthetic oligonucleotide
gaccggataaaaggcaaaactggcggtcagactggcaaaccagggcaacggcttg

SEQ ID NO: 184016 - DNA, 60 bp, Artificial
  Synthetic oligonucleotide
ggactcgccgtcctgcaaagagaagcatcagtgttcgctaatcgacgcgaaagatacctt

SEQ ID NO: 184017 - DNA, 55 bp, Artificial
  Synthetic oligonucleotide
gaccggcgctatttaaaagagccgcatgtaatgactcgcttaatagcctcttgcg

SEQ ID NO: 184018 - DNA, 55 bp, Artificial
  Synthetic oligonucleotide
ccctttcaggggaaagagtgggtacatctgaaggagtgacacagaatgacagagc

SEQ ID NO: 184019 - DNA, 54 bp, Artificial
  Synthetic oligonucleotide
cccttgaagggttcagtcgttccacaaccttacattgataaacaagtcaaagaa

SEQ ID NO: 184020 - DNA, 55 bp, Artificial
  Synthetic oligonucleotide
cccttctgtgcgtgagtactcatagtataacaggcgtgagtaccaacgcaagcac

SEQ ID NO: 184021 - DNA, 55 bp, Artificial
  Synthetic oligonucleotide
caaactcaaccgtaccatcagggaagacaaatacatctacggctgcggtatcacc

SEQ ID NO: 184022 - DNA, 55 bp, Artificial
  Synthetic oligonucleotide
gaccgtctcagtcatattaccggacgcactgtccagctcccgaatgaccttgctc

SEQ ID NO: 184023 - DNA, 55 bp, Artificial
  Synthetic oligonucleotide
caaactagcctgattggatttaacgcttcaaccccaggcagggcatccacgcgat

SEQ ID NO: 184024 - DNA, 55 bp, Artificial
  Synthetic oligonucleotide
cccttatccatacgcagcatggccggataaccgcggttgctgtaatcctgtcgag

SEQ ID NO: 184025 - DNA, 55 bp, Artificial
  Synthetic oligonucleotide
caaacctgggcaaatactcattgtcgccgacccaaatagcatgatgacagaacag

SEQ ID NO: 184026 - DNA, 55 bp, Artificial
  Synthetic oligonucleotide
gacgaccgaaataatacaagctagctagcgggaaaccccgaatttgagcacggcc

SEQ ID NO: 184027 - DNA, 54 bp, Artificial
  Synthetic oligonucleotide
ggactataccctcacattaccggaacctgtgaaaccgaactatgcagggaaaag

SEQ ID NO: 184028 - DNA, 55 bp, Artificial
  Synthetic oligonucleotide
gacgaccccataccgccatatttcgccttccagtttgtaatagctggcctctgac

SEQ ID NO: 184029 - DNA, 55 bp, Artificial
  Synthetic oligonucleotide
caaaccttcaagaatcaatatatcaggctgagcgacggttttatccccttcagga

SEQ ID NO: 184030 - DNA, 55 bp, Artificial
  Synthetic oligonucleotide
gaccttggggaatacattcttcagcttgcacacgaaccgccatcacatgtggttg

SEQ ID NO: 184031 - DNA, 55 bp, Artificial
  Synthetic oligonucleotide
gaccttctgattaagatccgcgatggtaacgtcaaagacattcggcaggttggtc

SEQ ID NO: 184032 - DNA, 55 bp, Artificial
  Synthetic oligonucleotide
ccatcacacgggttctcggacagatggctaacgatcctgcccattccggctggca

SEQ ID NO: 184033 - DNA, 55 bp, Artificial
  Synthetic oligonucleotide
gaccttctacacccagataagccaatcgttcacgtaaatcccgttgtaacgtgcg

SEQ ID NO: 184034 - DNA, 55 bp, Artificial
  Synthetic oligonucleotide
cccttaatgtgttctcccggcgcatacggcgtttcagcaggagtatcatgatatt

SEQ ID NO: 184035 - DNA, 54 bp, Artificial
  Synthetic oligonucleotide
caaacggtaaaacagtgagtaaagcctgatcgggtatccgtcatggtcgaaatt

SEQ ID NO: 184036 - DNA, 55 bp, Artificial
  Synthetic oligonucleotide
gacctgaatgatggcttttaaccccagataggcatactgataccagcgctcacgg

SEQ ID NO: 184037 - DNA, 55 bp, Artificial
  Synthetic oligonucleotide
caaactacgtcgattttgcacctgttccgtgttagcgcgtcttaataaccagacg

SEQ ID NO: 184038 - DNA, 60 bp, Artificial
  Synthetic oligonucleotide
ggacgcttctgaccaagcccaagctcacgcaaccacggcgcaagctcacctgcgggacac

SEQ ID NO: 184039 - DNA, 55 bp, Artificial
  Synthetic oligonucleotide
gacctcgccaggcttctatcagacatgcttaccagtgaagggctatgtggtggaa

SEQ ID NO: 184040 - DNA, 55 bp, Artificial
  Synthetic oligonucleotide
gacctccgcgctacaggagattaaccgtaacgaaaatggcacgctgacgggagcg

SEQ ID NO: 184041 - DNA, 55 bp, Artificial
  Synthetic oligonucleotide
gacctccacaggttacagacacatgtacatgcggatgccagttgagacgacggcc

SEQ ID NO: 184042 - DNA, 55 bp, Artificial
  Synthetic oligonucleotide
ccatatagattagcgcacgtaatccgtaatcggtgaaactcgttaactgcacatc

SEQ ID NO: 184043 - DNA, 55 bp, Artificial
  Synthetic oligonucleotide
cccttaggaggtttaggtatgtgagctaacttacttgttgcaactactctcatgt

SEQ ID NO: 184044 - DNA, 55 bp, Artificial
  Synthetic oligonucleotide
gacagtgctatgacaccacaaaggaacgggctaacgtcgaagttctcaatgtcca

SEQ ID NO: 184045 - DNA, 55 bp, Artificial
  Synthetic oligonucleotide
caaattcaagcctcgccatcgtgcggggttttccatttctaagtctgccaatcgg

SEQ ID NO: 184046 - DNA, 55 bp, Artificial
  Synthetic oligonucleotide
ccgacgttaaggcaggcggtgccgctgacttttcccgcgtcaaacagcgcgtagt

SEQ ID NO: 184047 - DNA, 55 bp, Artificial
  Synthetic oligonucleotide
ccgacggtaggagtcatcgacacatccggaaaacctgtcgttgtagcccaggaca

SEQ ID NO: 184048 - DNA, 55 bp, Artificial
  Synthetic oligonucleotide
gacatcaacgtttctcgctttattcctatggtttaacctctattttgccacgttc

SEQ ID NO: 184049 - DNA, 55 bp, Artificial
  Synthetic oligonucleotide
ggacgcaggacggtttctccccagctctcgataaacacggcgacaaccagccccc

SEQ ID NO: 184050 - DNA, 54 bp, Artificial
  Synthetic oligonucleotide
ccgacgcgaattgcgaataacctttcaccttacccggcgcattggtacaacgcc

SEQ ID NO: 184051 - DNA, 55 bp, Artificial
  Synthetic oligonucleotide
ccgacgccatgctaccggcataatgcggtaaccactgcaaccggttatagaccac

SEQ ID NO: 184052 - DNA, 55 bp, Artificial
  Synthetic oligonucleotide
ccgacgataacgatccggtagacgcagaggcgtgcgagaagtacctggcacagtt

SEQ ID NO: 184053 - DNA, 55 bp, Artificial
  Synthetic oligonucleotide
ccgaccctgctgccgtatcattttccacacgaccaggtggagttatctctgctga

SEQ ID NO: 184054 - DNA, 54 bp, Artificial
  Synthetic oligonucleotide
gaccaaaatcccttaacgtgagttttcgttccactgagcgtcagaccccgtaga

SEQ ID NO: 184055 - DNA, 55 bp, Artificial
  Synthetic oligonucleotide
gaccaaagataacgaaacgcgaattcaacccaatacgaaatgtcctgagaaaagc

SEQ ID NO: 184056 - DNA, 55 bp, Artificial
  Synthetic oligonucleotide
gaccaagtcttctcgagcgagtcagaggataatgtttgttattttcgcaaggcgt

SEQ ID NO: 184057 - DNA, 55 bp, Artificial
  Synthetic oligonucleotide
ccgacattacgcgtcacagttgtacccgcagcaatggttgcacctttgcctactg

SEQ ID NO: 184058 - DNA, 55 bp, Artificial
  Synthetic oligonucleotide
ccgacatcttggcaactctatcgggaaaagtttacgttgcaagtagcgtaccggc

SEQ ID NO: 184059 - DNA, 55 bp, Artificial
  Synthetic oligonucleotide
ccgacataccaattccgtagaaatacacctgccccgcattgctcagataatcagc

SEQ ID NO: 184060 - DNA, 56 bp, Artificial
  Synthetic oligonucleotide
agtcaaagtttgcttctccgccgatgagtccgccctgcgtcggatagtccgatttt

SEQ ID NO: 184061 - DNA, 55 bp, Artificial
  Synthetic oligonucleotide
ccgaaatacgtcgtattgcaggtgttaccgatgtgcgtactgtcccgtggatgcc

SEQ ID NO: 184062 - DNA, 55 bp, Artificial
  Synthetic oligonucleotide
gaccctcgctaagctcctgagaaacgccaggtaaacgtttgcctacacacaccct

SEQ ID NO: 184063 - DNA, 55 bp, Artificial
  Synthetic oligonucleotide
ccgaaccggccagacggagtcgctgtcttcacagcttacgaactgagagtagaga

SEQ ID NO: 184064 - DNA, 55 bp, Artificial
  Synthetic oligonucleotide
ccgaacctatcgtttagcgaatgctattcccaatcagttacatgtgagtgaccgt

SEQ ID NO: 184065 - DNA, 55 bp, Artificial
  Synthetic oligonucleotide
ccgaagtcacggtaccaaaaggcagtgcagccggtgataccctgacactgacggt

SEQ ID NO: 184066 - DNA, 55 bp, Artificial
  Synthetic oligonucleotide
ccgaatcagtggccgacagcacaatcatttcgagcatgacagaacgtgctccctg

SEQ ID NO: 184067 - DNA, 55 bp, Artificial
  Synthetic oligonucleotide
caaaggcttagccacagtgggctggtagtgagaaagtaatcctttaagtaccgcg

SEQ ID NO: 184068 - DNA, 52 bp, Artificial
  Synthetic oligonucleotide
caaaggtttcgcgcaacggggtcagcctttccataatcccgttgaacacccc

SEQ ID NO: 184069 - DNA, 55 bp, Artificial
  Synthetic oligonucleotide
gacccactaaaatttgtttaaccagactgccttgcgctaaacgctgcagtagccc

SEQ ID NO: 184070 - DNA, 55 bp, Artificial
  Synthetic oligonucleotide
ccgaatccatcccctctttacgcaagcgccaggctactgaggccagagcgccata

SEQ ID NO: 184071 - DNA, 60 bp, Artificial
  Synthetic oligonucleotide
agtcaagcggactgcgtgacgtgtgaccacactcacgggtctggacaccgttaaggctgc

SEQ ID NO: 184072 - DNA, 55 bp, Artificial
  Synthetic oligonucleotide
gaccatgtttaaaccgcatgtgaccgtggcctgcgttgtacaggcggaaggccat

SEQ ID NO: 184073 - DNA, 55 bp, Artificial
  Synthetic oligonucleotide
caaatagggactggagtaagaccagtatcgactgaaagaattcatagtcaaggca

SEQ ID NO: 184074 - DNA, 55 bp, Artificial
  Synthetic oligonucleotide
ccgacaaaccttgctcataaagcgtgcgtgtgatcacacttcggtaacttaatgc

SEQ ID NO: 184075 - DNA, 55 bp, Artificial
  Synthetic oligonucleotide
ccgacagagggaacgcatgacaacgttaagctgtaaagtaacttcagttgaagcg

SEQ ID NO: 184076 - DNA, 55 bp, Artificial
  Synthetic oligonucleotide
ccgacaggcgttacactctcgggtagctgaatttactcacttatggaactgggac

SEQ ID NO: 184077 - DNA, 55 bp, Artificial
  Synthetic oligonucleotide
gaccactcgccagcgcggcattaatatccttatcttccgcgaagttgataacttc

SEQ ID NO: 184078 - DNA, 55 bp, Artificial
  Synthetic oligonucleotide
gaactacatgacagcgtagcggcagagttggcctacattgtggagcttcacaaag

SEQ ID NO: 184079 - DNA, 55 bp, Artificial
  Synthetic oligonucleotide
gaactatgtcgggaataagctgaccacgtcgaaggaagagatcattcagtgggct

SEQ ID NO: 184080 - DNA, 55 bp, Artificial
  Synthetic oligonucleotide
caaggcgtggttgttgtggaattacagtgagaatacctgctgggaacaccaggtc

SEQ ID NO: 184081 - DNA, 55 bp, Artificial
  Synthetic oligonucleotide
gaactggccgatcgaaatatgtatcaggctaaacaccggcgtgcggagcgctcgc

SEQ ID NO: 184082 - DNA, 60 bp, Artificial
  Synthetic oligonucleotide
ggacgaatatcctgacctaccgcatcaacgacatgccatctaatgctgcattctggacag

SEQ ID NO: 184083 - DNA, 55 bp, Artificial
  Synthetic oligonucleotide
gaactggtacgtttgcggcgtctcaaatcccattaaacgcgcgcactctctcggc

SEQ ID NO: 184084 - DNA, 53 bp, Artificial
  Synthetic oligonucleotide
ccgcttaccggatacctgtccgcctttctcccttcgggaagcgtggcgctttc

SEQ ID NO: 184085 - DNA, 55 bp, Artificial
  Synthetic oligonucleotide
caagcggtaaggatacggtgatgctaacaccgcctgatgatgaatgatcggcatt

SEQ ID NO: 184086 - DNA, 55 bp, Artificial
  Synthetic oligonucleotide
ccgctgaaacgccatactgatgtacactggcagccaacgcgtaatcttaaaacgc

SEQ ID NO: 184087 - DNA, 55 bp, Artificial
  Synthetic oligonucleotide
gaagaatttggggccgacattacagtctcaacagctcatcggtgcaaggggttag

SEQ ID NO: 184088 - DNA, 55 bp, Artificial
  Synthetic oligonucleotide
ccgctctgtctcagataatcactgatactgataccggacaaacgaattctacccg

SEQ ID NO: 184089 - DNA, 55 bp, Artificial
  Synthetic oligonucleotide
gaagagaacctgcatgcccctgtggattttgggtcgcctgtcggccgggaagcgt

SEQ ID NO: 184090 - DNA, 55 bp, Artificial
  Synthetic oligonucleotide
gaagaggacaatgacgaatctctggagataggccactgtgggagagcgttacgat

SEQ ID NO: 184091 - DNA, 55 bp, Artificial
  Synthetic oligonucleotide
ccgctattgccagtacacctcagttagccctgttgactccgttctgtatcggcat

SEQ ID NO: 184092 - DNA, 55 bp, Artificial
  Synthetic oligonucleotide
caagatagagtagcttgaaccgctgtatttccactgatcacgctaaaagaacaca

SEQ ID NO: 184093 - DNA, 60 bp, Artificial
  Synthetic oligonucleotide
ggacagagagtatgcggaggtgctgatcgctattacggagtatcaccgggccctgttatc

SEQ ID NO: 184094 - DNA, 55 bp, Artificial
  Synthetic oligonucleotide
ccgctattgccagtacacctcaggctggctaacaccccattataaggggtacgaa

SEQ ID NO: 184095 - DNA, 55 bp, Artificial
  Synthetic oligonucleotide
ccgctacctgatgttgccgcataacccgcatatggttatcgttgatacgaaaatt

SEQ ID NO: 184096 - DNA, 52 bp, Artificial
  Synthetic oligonucleotide
gaagagtccggcttacgaactttgacctcgtaaacagggagcgaatttccct

SEQ ID NO: 184097 - DNA, 55 bp, Artificial
  Synthetic oligonucleotide
ccgctacaggctgaattgaacgacaatacgctggccttatatgcaccaaatcggt

SEQ ID NO: 184098 - DNA, 55 bp, Artificial
  Synthetic oligonucleotide
gaagatccaggaaagaggcgttctcggattccaccgggtgatatggtgccggacg

SEQ ID NO: 184099 - DNA, 55 bp, Artificial
  Synthetic oligonucleotide
caagaattgaggttatttgattggggagcagcggaaacattagcttatgcatcta

SEQ ID NO: 184100 - DNA, 54 bp, Artificial
  Synthetic oligonucleotide
ccgctaaaaggggcgatatccagcgtaacgtcgagggcggtaaactcattgccg

SEQ ID NO: 184101 - DNA, 55 bp, Artificial
  Synthetic oligonucleotide
caactttcggatttcctctcagcgccggtgcaggaatcacaaaatgcgtttgacg

SEQ ID NO: 184102 - DNA, 55 bp, Artificial
  Synthetic oligonucleotide
gaagattaccggggtccactaaaactgtatagagtttgttgctctatgcagggag

SEQ ID NO: 184103 - DNA, 55 bp, Artificial
  Synthetic oligonucleotide
ccgcgttaatctattccattccgctactgtgttaaaccgaagcttgctctccccg

SEQ ID NO: 184104 - DNA, 60 bp, Artificial
  Synthetic oligonucleotide
gcaatacctctacatccaacatagaacgttttcactgtatacacttcgtcacagggttgc

SEQ ID NO: 184105 - DNA, 60 bp, Artificial
  Synthetic oligonucleotide
agtcagcttgcgcactcgatgcagtatccagtagcgttgcgggttatcctctagccccgc

SEQ ID NO: 184106 - DNA, 55 bp, Artificial
  Synthetic oligonucleotide
ccgcgtgccggttaaatcccggacgaatcacggtcgtaacgcagaatattatgcc

SEQ ID NO: 184107 - DNA, 55 bp, Artificial
  Synthetic oligonucleotide
ccgcgtgcagtcttaacggtgtccagacccgagagtgttgtcacacgtcacgcag

SEQ ID NO: 184108 - DNA, 55 bp, Artificial
  Synthetic oligonucleotide
ccgcgtgcagacgtggcatccttacgccagaatttgtacaatgcagcgcccctgg

SEQ ID NO: 184109 - DNA, 55 bp, Artificial
  Synthetic oligonucleotide
gaagcctctaaccgtcgtcccaatttcaccgtagattactggcatcagcacgcta

SEQ ID NO: 184110 - DNA, 55 bp, Artificial
  Synthetic oligonucleotide
ccagtcaccactgggaatacgcgtgaggcctttgattgaacgctgataaacgtat

SEQ ID NO: 184111 - DNA, 55 bp, Artificial
  Synthetic oligonucleotide
ccgcgtcagatggcaggtagtcatgccgggttgcgtcgtcacaaggcgcgtttca

SEQ ID NO: 184112 - DNA, 55 bp, Artificial
  Synthetic oligonucleotide
ccgcggttgcctgctgaacaggttcgctactgcaagccgacaataataacgcggc

SEQ ID NO: 184113 - DNA, 55 bp, Artificial
  Synthetic oligonucleotide
gaaccctactagcggtttaggatcaggaatcggccagactagcgctacaaccgcg

SEQ ID NO: 184114 - DNA, 55 bp, Artificial
  Synthetic oligonucleotide
gaaccgagagccacaggaaaatctgggtcatccttcataatctgaccattgctgt

SEQ ID NO: 184115 - DNA, 55 bp, Artificial
  Synthetic oligonucleotide
gaaccgcagtttgtaaggtgctgaccacatctgggttgtacgcatggtattcgcc

SEQ ID NO: 184116 - DNA, 60 bp, Artificial
  Synthetic oligonucleotide
agtcaggccagtgatggtcattgctcgcatcttggcgattggctcttgtgtcacctcacc

SEQ ID NO: 184117 - DNA, 53 bp, Artificial
  Synthetic oligonucleotide
ccggagtctccggaatccttcatgaaacgacctaaacgtcgccgctgggtaaa

SEQ ID NO: 184118 - DNA, 54 bp, Artificial
  Synthetic oligonucleotide
gaaccgtggtaacagggtgtacaagaccgctgccacctaattcgtccttccagt

SEQ ID NO: 184119 - DNA, 55 bp, Artificial
  Synthetic oligonucleotide
ccggagtaattacgagcgatatgaactacaaagcgtaggtgtgacaggatcagcg

SEQ ID NO: 184120 - DNA, 55 bp, Artificial
  Synthetic oligonucleotide
ccggaggcggcaagaatcccgataaagggcgtgaaaatgccggacacaacatcga

SEQ ID NO: 184121 - DNA, 55 bp, Artificial
  Synthetic oligonucleotide
ccggaggatggcatcatcagcctgagaaatcgcggtatcaaacaggttttcggac

SEQ ID NO: 184122 - DNA, 55 bp, Artificial
  Synthetic oligonucleotide
caaggtatgccgtattgcctgagttggattatgctacagcccacggcgagggatg

SEQ ID NO: 184123 - DNA, 55 bp, Artificial
  Synthetic oligonucleotide
ccaggttgagggcaatcacttttctgccttctgaactctccaggtcttcatcagt

SEQ ID NO: 184124 - DNA, 55 bp, Artificial
  Synthetic oligonucleotide
ccggacttctgttagcattgaataatggacaggctgatgcaatcttagcttatgg

SEQ ID NO: 184125 - DNA, 55 bp, Artificial
  Synthetic oligonucleotide
ccggactcatcaataaaccgtgttagcccagcagacttatcagcatcaggaaggg

SEQ ID NO: 184126 - DNA, 55 bp, Artificial
  Synthetic oligonucleotide
gaacgaaagcaattagcacatatgcagcttggcgtctgacgggtatatcacttcc

SEQ ID NO: 184127 - DNA, 60 bp, Artificial
  Synthetic oligonucleotide
ggaatgggatgctacgcatccggttgaagcggctgagcgaaattatgaacgcgcgcgtgc

SEQ ID NO: 184128 - DNA, 55 bp, Artificial
  Synthetic oligonucleotide
gaacgaaccagatcgccgttcgggagcatggtgataacaaattcagcgccgatgg

SEQ ID NO: 184129 - DNA, 54 bp, Artificial
  Synthetic oligonucleotide
gaacgtttgaatgaattctgcgagttatttacgactttaaaccgcgatgttttc

SEQ ID NO: 184130 - DNA, 55 bp, Artificial
  Synthetic oligonucleotide
ccgcttatggtattcgtgctttgccggatgcctattacgtgtataagcacaaacg

SEQ ID NO: 184131 - DNA, 55 bp, Artificial
  Synthetic oligonucleotide
gaacgttcgatcgacattcacaaagatcccgtagcactgaacaaatatatctgcg

SEQ ID NO: 184132 - DNA, 55 bp, Artificial
  Synthetic oligonucleotide
gaacgtgcggaatactgggaagaacgggggcggtcagcactgcttcacgcgaagt

SEQ ID NO: 184133 - DNA, 55 bp, Artificial
  Synthetic oligonucleotide
caagggcaaaacgcactgtccactgcttgagcggtagggtggtgaacgatacgcg

SEQ ID NO: 184134 - DNA, 55 bp, Artificial
  Synthetic oligonucleotide
gaacggtatgcacctcgcccggattacagtacaccaagaaattccagtgcgctgt

SEQ ID NO: 184135 - DNA, 55 bp, Artificial
  Synthetic oligonucleotide
ccagtattatcaccattacggccatggttatcagtatggcgttactctcctgggc

SEQ ID NO: 184136 - DNA, 55 bp, Artificial
  Synthetic oligonucleotide
ccgcttgagatgcaagatacacaaccttcatggcatgtgttacaagcgcgtctcc

SEQ ID NO: 184137 - DNA, 55 bp, Artificial
  Synthetic oligonucleotide
ccggaaaatcgaatactttccgcaatgcctgttgctatcacgcttaaaccatttc

SEQ ID NO: 184138 - DNA, 60 bp, Artificial
  Synthetic oligonucleotide
ggaatatagaagagaggaggcttcaaaggagtctgaacataagcgcaacatggatgtctt

SEQ ID NO: 184139 - DNA, 55 bp, Artificial
  Synthetic oligonucleotide
ccggaacagagagggatgttatgatcatgttgtgtaaagcctgcggcacgtctta

SEQ ID NO: 184140 - DNA, 55 bp, Artificial
  Synthetic oligonucleotide
ccggaacagccgtagtgagctggctgatatcgccgccgtcgctgactttgaccac

SEQ ID NO: 184141 - DNA, 55 bp, Artificial
  Synthetic oligonucleotide
ccggaaccgccacgatggtttgccattactgacctccgtcatagattagacatca

SEQ ID NO: 184142 - DNA, 55 bp, Artificial
  Synthetic oligonucleotide
ccagtatgaaaagcttcgccatttctaattggactacctaatgcgcgaattttcc

SEQ ID NO: 184143 - DNA, 55 bp, Artificial
  Synthetic oligonucleotide
ccggaagagccgtggttagacaccgaacaattggttaaatggatgaccgtgttgc

SEQ ID NO: 184144 - DNA, 55 bp, Artificial
  Synthetic oligonucleotide
ccggaagggccgagcgcagaagtggtcctgcaactttatccgcctccatccagtc

SEQ ID NO: 184145 - DNA, 55 bp, Artificial
  Synthetic oligonucleotide
ccagtatctactgggtgtgtccaaggcgaatgtcctcttagcgtaatcgtgggcg

SEQ ID NO: 184146 - DNA, 55 bp, Artificial
  Synthetic oligonucleotide
ccagtacattgtttagagacaggtctgtacagatgatctcatatgtgcgtgatca

SEQ ID NO: 184147 - DNA, 55 bp, Artificial
  Synthetic oligonucleotide
gaagtgcgcacttatacaatctctactccgtttcgattgtgtgcggtctgcgacg

SEQ ID NO: 184148 - DNA, 53 bp, Artificial
  Synthetic oligonucleotide
ccgccgacggtaacgataaacggtacgaactgcggtaatcccatacgccactg

SEQ ID NO: 184149 - DNA, 56 bp, Artificial
  Synthetic oligonucleotide
aggtctgaacaccgctgaaaccaaattctgttctatcgagtttagccgtaatgacg

SEQ ID NO: 184150 - DNA, 55 bp, Artificial
  Synthetic oligonucleotide
ccgcccatgtcgggttcccaccagataccgcagctcaactcatgctcgacatggc

SEQ ID NO: 184151 - DNA, 55 bp, Artificial
  Synthetic oligonucleotide
ccgccatcggcacgttaatcgagactactggcgcgcattccgttaccccgtagcc

SEQ ID NO: 184152 - DNA, 55 bp, Artificial
  Synthetic oligonucleotide
ccgccataggaaccagcatccattataagatcatgtgcgataataaaatcggcga

SEQ ID NO: 184153 - DNA, 55 bp, Artificial
  Synthetic oligonucleotide
caacgtgaagaagtggcagatcccgcgattcatcaacacggataaagcgcccgcc

SEQ ID NO: 184154 - DNA, 55 bp, Artificial
  Synthetic oligonucleotide
gaataccctctgactgtcgatgttacccctccaacctacacttcgattgcacctg

SEQ ID NO: 184155 - DNA, 55 bp, Artificial
  Synthetic oligonucleotide
ccgccagtagcttcagcgaggctaatatgacttcctgcacttcattttgagggcg

SEQ ID NO: 184156 - DNA, 55 bp, Artificial
  Synthetic oligonucleotide
ccgccagccgaatcaatagcgttacgaccatgcccatcatactggctgtttccag

SEQ ID NO: 184157 - DNA, 55 bp, Artificial
  Synthetic oligonucleotide
ccagtcggcagtcattaatctagtcatgacaggccgtaaacaggggattcgactc

SEQ ID NO: 184158 - DNA, 55 bp, Artificial
  Synthetic oligonucleotide
ccgccacgcccttccctaccctgtttctgcaggacgcgagtcttataatgccagg

SEQ ID NO: 184159 - DNA, 55 bp, Artificial
  Synthetic oligonucleotide
ccgccacaggttgattattcaaggcatatttacaggctgggtaccgatcacaggc

SEQ ID NO: 184160 - DNA, 60 bp, Artificial
  Synthetic oligonucleotide
ggcacggctgccgcatgagttggtcaggtactttacgtgctgacagtccgggttatcaca

SEQ ID NO: 184161 - DNA, 55 bp, Artificial
  Synthetic oligonucleotide
ccgccacagcatcgtgggcgagcgttactattttgggtagccgaataatttaccc

SEQ ID NO: 184162 - DNA, 55 bp, Artificial
  Synthetic oligonucleotide
gaatagtgacatccattcctaacgttggatcttcagctaataccagtcccataca

SEQ ID NO: 184163 - DNA, 54 bp, Artificial
  Synthetic oligonucleotide
caacggtattctgtttgtccttacgactgggataccgtgggaggacttgcccca

SEQ ID NO: 184164 - DNA, 55 bp, Artificial
  Synthetic oligonucleotide
ccgcaggctatcggcaacgtagaatatatcgcctatggaatgccatctcttagcg

SEQ ID NO: 184165 - DNA, 53 bp, Artificial
  Synthetic oligonucleotide
caacgcgttcagtaccgtaccgtccgggttacccgcgccaggatgtaccacca

SEQ ID NO: 184166 - DNA, 55 bp, Artificial
  Synthetic oligonucleotide
gaatgagactgacgccataacgccggataagagtgacaaccagacggcggaacgt

SEQ ID NO: 184167 - DNA, 55 bp, Artificial
  Synthetic oligonucleotide
gaatgacggactgacatacccctgaaggtgaatcggtttgtcttgaagcggatag

SEQ ID NO: 184168 - DNA, 55 bp, Artificial
  Synthetic oligonucleotide
gaatgaacagcgcgtgaaagccgtagatcggcagtgaatagcgtgcaatcaccgt

SEQ ID NO: 184169 - DNA, 55 bp, Artificial
  Synthetic oligonucleotide
caacgcttacgtaattaagggacacagcctaattactgaggccggatgtcgctgc

SEQ ID NO: 184170 - DNA, 55 bp, Artificial
  Synthetic oligonucleotide
gaatcgataattaccgcccttcgcctatctgagtctaagagcggtcagtgagcta

SEQ ID NO: 184171 - DNA, 58 bp, Artificial
  Synthetic oligonucleotide
ggcacgataccgattgtacacaagaccgttccggtcatgttacaatcgtgtgccaaag

SEQ ID NO: 184172 - DNA, 55 bp, Artificial
  Synthetic oligonucleotide
ccgcagtaacagggtttaccctgcgggtttatctgtgtgtgaccgatttctgccg

SEQ ID NO: 184173 - DNA, 55 bp, Artificial
  Synthetic oligonucleotide
gaatccgcataattcaatggatgatgtgaatacccagccacatcaatattcgctg

SEQ ID NO: 184174 - DNA, 55 bp, Artificial
  Synthetic oligonucleotide
gaatcccatccccgggaacagagtgctgtctttgccggtgactgagcggttcgct

SEQ ID NO: 184175 - DNA, 54 bp, Artificial
  Synthetic oligonucleotide
ccgcagttgactcggcctggggttggtgttctttcgacggcgaaccttgtggtg

SEQ ID NO: 184176 - DNA, 55 bp, Artificial
  Synthetic oligonucleotide
caacggcaagcgcgacgttaggacatacatcgataccaaggtcccaacccgcggg

SEQ ID NO: 184177 - DNA, 55 bp, Artificial
  Synthetic oligonucleotide
caacggcaggcatttcggctgagggtaaaagaactttccgctaagcgatagactg

SEQ ID NO: 184178 - DNA, 55 bp, Artificial
  Synthetic oligonucleotide
gaatcagcgaagctaggcctaggaatgcctagcaatgagcatctcgagcatgccg

SEQ ID NO: 184179 - DNA, 55 bp, Artificial
  Synthetic oligonucleotide
gaatattaacctcgcgacagacccgctggggtacgatcgtaaagacgatccggta

SEQ ID NO: 184180 - DNA, 55 bp, Artificial
  Synthetic oligonucleotide
caacgggcgctaaactgcgtatgatcgtcagctgttcaccccttttcattacgcc

SEQ ID NO: 184181 - DNA, 55 bp, Artificial
  Synthetic oligonucleotide
gaatatcacctagatggccggcaggctaaggtgcaagctctaagcaaccaagggg

SEQ ID NO: 184182 - DNA, 56 bp, Artificial
  Synthetic oligonucleotide
aggtgccggtaccactctgtgggtttacaacggcaagggtgatgcttatgcaaacc

SEQ ID NO: 184183 - DNA, 55 bp, Artificial
  Synthetic oligonucleotide
ccgcgggctgtcaaatagtaatcagcggcttcctgaagatcacgaggtgcagtag

SEQ ID NO: 184184 - DNA, 55 bp, Artificial
  Synthetic oligonucleotide
ccgcgctttgtcgggatgagaaatataggcaccagtatgggacagtaactgcgcg

SEQ ID NO: 184185 - DNA, 55 bp, Artificial
  Synthetic oligonucleotide
ccgcgcctggttgatatcgagcaagtgagttcgacgcacgccaaggtgacccttg

SEQ ID NO: 184186 - DNA, 55 bp, Artificial
  Synthetic oligonucleotide
ccgcgccgaacgtctctcgtcaggccgtgctctctccaataattcgctattgccg

SEQ ID NO: 184187 - DNA, 55 bp, Artificial
  Synthetic oligonucleotide
gaagcgtgtgaacgatacgctgtagctggtcgatttcacgtgacaacacaacgcg

SEQ ID NO: 184188 - DNA, 51 bp, Artificial
  Synthetic oligonucleotide
gaaggaccactttatttcgtctttaccgataagggcggggaaaatacggca

SEQ ID NO: 184189 - DNA, 55 bp, Artificial
  Synthetic oligonucleotide
ccgcgcagatcaattcgttacatggtttactgctggaatttggtgaaaccgtaca

SEQ ID NO: 184190 - DNA, 55 bp, Artificial
  Synthetic oligonucleotide
gaaggagataccgaatgtctgaccctgtacgtattacaaatcccggtgcagaatc

SEQ ID NO: 184191 - DNA, 55 bp, Artificial
  Synthetic oligonucleotide
gaaggataacggttcagaatatctgccgaaggcaggtgactttcagtgcacatca

SEQ ID NO: 184192 - DNA, 55 bp, Artificial
  Synthetic oligonucleotide
ccgcgatcgttttctgctgtctcacgggcattacgctatcgcctattatgccgca

SEQ ID NO: 184193 - DNA, 60 bp, Artificial
  Synthetic oligonucleotide
ggcacattaaagcatcaccacatttgaacgggatctttgtatgtcggacttgattgccta

SEQ ID NO: 184194 - DNA, 55 bp, Artificial
  Synthetic oligonucleotide
gaaggatcccgtgtgcgggcgacctatgcattactggcgaagcagtatggcgtga

SEQ ID NO: 184195 - DNA, 55 bp, Artificial
  Synthetic oligonucleotide
ccagtcaggcgtcgtatcgccctagcgcacgttgcaatttaatactctttacccg

SEQ ID NO: 184196 - DNA, 55 bp, Artificial
  Synthetic oligonucleotide
ccgcgaatatccgctctatctgcgtaactaccgcgtgtttctggtgtatgcccac

SEQ ID NO: 184197 - DNA, 55 bp, Artificial
  Synthetic oligonucleotide
ccgccttgtgtctgccctttgctgctatataccggagtgcctgcatatagttggc

SEQ ID NO: 184198 - DNA, 55 bp, Artificial
  Synthetic oligonucleotide
caacgtgcgggtattgtgctagctgcacataaacgggagatggtttacaaccgtt

SEQ ID NO: 184199 - DNA, 55 bp, Artificial
  Synthetic oligonucleotide
ccgccgcaaggggtaacgatagacgaccaacgtaagtagaggcgatgagtgagca

SEQ ID NO: 184200 - DNA, 52 bp, Artificial
  Synthetic oligonucleotide
caacgtttgttaatccgtaataaccctacagttaacctgttgtcgcctgtgg

SEQ ID NO: 184201 - DNA, 55 bp, Artificial
  Synthetic oligonucleotide
gaagtccggggatgcgaccgttaaaggcacgtttggtaagcagtccagtgtcgtc

SEQ ID NO: 184202 - DNA, 55 bp, Artificial
  Synthetic oligonucleotide
caacgttttcagattcaatgccagctaccatgacatgcttaccctgatcagtagc

SEQ ID NO: 184203 - DNA, 53 bp, Artificial
  Synthetic oligonucleotide
ccagtccccacgccaatatgaccggctgtttccgtctccctgacgggtacgtt

SEQ ID NO: 184204 - DNA, 56 bp, Artificial
  Synthetic oligonucleotide
ggcaatcttccaatattcatgacgatactaaaacacttagacgtaaaacgaagaag

SEQ ID NO: 184205 - DNA, 55 bp, Artificial
  Synthetic oligonucleotide
gaagtcaacctgacacaatcggtcaaaaatcgtacttagcgactagaaacgaaat

SEQ ID NO: 184206 - DNA, 55 bp, Artificial
  Synthetic oligonucleotide
gaagtatccaatatgaatcgtgcaaatattttacaacaagccggaacagccgttc

SEQ ID NO: 184207 - DNA, 55 bp, Artificial
  Synthetic oligonucleotide
ccgccgggtaataacagtgacaacctcgagcaacagatagccagtacttcacagc

SEQ ID NO: 184208 - DNA, 55 bp, Artificial
  Synthetic oligonucleotide
caactacaggggatggtattattgtagcgttacagatattatctactatggtgtc

SEQ ID NO: 184209 - DNA, 55 bp, Artificial
  Synthetic oligonucleotide
ccgcctccatccagtctattaattgttgccgggaagctagagtaagtagttcgcc

SEQ ID NO: 184210 - DNA, 55 bp, Artificial
  Synthetic oligonucleotide
ccgcctggcctgtatatcgcaatcatttacgttatccagacgtaaatccgccgct

SEQ ID NO: 184211 - DNA, 55 bp, Artificial
  Synthetic oligonucleotide
caactcgcatattccgtagtggcgcgaaatttcgatgcgcgataaatcgcgccgc

SEQ ID NO: 184212 - DNA, 55 bp, Artificial
  Synthetic oligonucleotide
caactgtatgtctaaacgagtgaaacgctaagccgctacggtcagcgagaacttt

SEQ ID NO: 184213 - DNA, 55 bp, Artificial
  Synthetic oligonucleotide
ccgccttcttccgagagcctcaccatttcgtgacattggctgactttgtacgctc

SEQ ID NO: 184214 - DNA, 55 bp, Artificial
  Synthetic oligonucleotide
gaaggcgaaactctcctctaaattacacagaacctcatcacattgtcccgatgtc

SEQ ID NO: 184215 - DNA, 60 bp, Artificial
  Synthetic oligonucleotide
gcaataacctgaatcagatagcccggaagataaacagcggacagtggtcggggcatgacc

SEQ ID NO: 184216 - DNA, 60 bp, Artificial
  Synthetic oligonucleotide
aggtgtgaccatgtatgaagcagcccgtgtggatgaccctatctaccacaccagtgcgct

SEQ ID NO: 184217 - DNA, 55 bp, Artificial
  Synthetic oligonucleotide
gaaggcatccctaccgggaaccacagagcgtaaccgattaggcacaaacagagcg

SEQ ID NO: 184218 - DNA, 55 bp, Artificial
  Synthetic oligonucleotide
attgtgcggttcttcgaggcgcgggtttccgccttgcgacggagcggggtcgctg

SEQ ID NO: 184219 - DNA, 55 bp, Artificial
  Synthetic oligonucleotide
gagattgtgggagagtgcgcgaacgcggtagaagcgattggcgcggtacataagc

SEQ ID NO: 184220 - DNA, 55 bp, Artificial
  Synthetic oligonucleotide
gagatttcacttacagttaacgccccagaacgacaaatgattatatcagcccatt

SEQ ID NO: 184221 - DNA, 54 bp, Artificial
  Synthetic oligonucleotide
ccccgtgactgggcttatgccttcaacaaactgccgttgaagttagtaagcggt

SEQ ID NO: 184222 - DNA, 55 bp, Artificial
  Synthetic oligonucleotide
gagcaaccgctatgtctcacgcggcaacaagcgtaaagtacgcgcgcaaaatgcc

SEQ ID NO: 184223 - DNA, 55 bp, Artificial
  Synthetic oligonucleotide
ccccgtatgtgcatcatgtcattatctgcaataactcgcggttttaatgaggaat

SEQ ID NO: 184224 - DNA, 55 bp, Artificial
  Synthetic oligonucleotide
ccatttatctacggggaacaggcttatcacgatggtactgctttgttcgtatctg

SEQ ID NO: 184225 - DNA, 55 bp, Artificial
  Synthetic oligonucleotide
gagcaataaccataaagacgacccgacagagggaccgcatgacaacgttaagctg

SEQ ID NO: 184226 - DNA, 55 bp, Artificial
  Synthetic oligonucleotide
gagcaattaccgctggggtgactaatgcttgaaatttacactatctatggcgggg

SEQ ID NO: 184227 - DNA, 60 bp, Artificial
  Synthetic oligonucleotide
aggttgacccgctgaagtgcattctgtgcggaagtcagatgcgttttacggggctgaaga

SEQ ID NO: 184228 - DNA, 54 bp, Artificial
  Synthetic oligonucleotide
ccccgctaattcaacgaggaaaagatggcccaacagacgcctttgtacgaacaa

SEQ ID NO: 184229 - DNA, 55 bp, Artificial
  Synthetic oligonucleotide
ccccgccttaaagcagacaggacatgaactgaaacctcatgagcgatagtgcgag

SEQ ID NO: 184230 - DNA, 55 bp, Artificial
  Synthetic oligonucleotide
gagcaccttcttccactggttggagcagtccccggtcaatcaatttaccgagctg

SEQ ID NO: 184231 - DNA, 55 bp, Artificial
  Synthetic oligonucleotide
gagcactccggtatatgccttggaaacgtgctcttggataccctccgctctttcg

SEQ ID NO: 184232 - DNA, 55 bp, Artificial
  Synthetic oligonucleotide
gagcagattatccaccggatagtgaacatacgcgccctgatctgccgtctcgcca

SEQ ID NO: 184233 - DNA, 55 bp, Artificial
  Synthetic oligonucleotide
ccccgccacggtatgagtcaggagtgttgatgccacgccatttacaccggtgttc

SEQ ID NO: 184234 - DNA, 55 bp, Artificial
  Synthetic oligonucleotide
ccccgcattcatcgcggtcagcgtctcaccaagcgcgtcaatggaacagttgcgc

SEQ ID NO: 184235 - DNA, 55 bp, Artificial
  Synthetic oligonucleotide
gagcagcacggtttacagctcgatagccgcgaacttcccgatcatctgccgctat

SEQ ID NO: 184236 - DNA, 55 bp, Artificial
  Synthetic oligonucleotide
gagcataccgacgggcgcgataaatattgagaagcaccagcacagcatcatggta

SEQ ID NO: 184237 - DNA, 55 bp, Artificial
  Synthetic oligonucleotide
ccccgcatagtggaaattgcgggcagtggtaagcatttacgaacacgcctggcat

SEQ ID NO: 184238 - DNA, 60 bp, Artificial
  Synthetic oligonucleotide
ggcaatagcatagttaaatgagccacccaataaagagccacttaaatgagctaacgcacc

SEQ ID NO: 184239 - DNA, 55 bp, Artificial
  Synthetic oligonucleotide
gagcatcgatccacaggcacagtgtacgcagcgtttgcggggttaaccctttcgg

SEQ ID NO: 184240 - DNA, 55 bp, Artificial
  Synthetic oligonucleotide
ccatttgctaaccctatttctgataaccgaggcagtgttatggatcaggagttcc

SEQ ID NO: 184241 - DNA, 55 bp, Artificial
  Synthetic oligonucleotide
ccccctgtcattcgtcaacattcttcagcacctcaatgtcgttcgtagtgagcct

SEQ ID NO: 184242 - DNA, 55 bp, Artificial
  Synthetic oligonucleotide
cccaacaagggatgaattaacagttaaattctcatgttctgaatatgcacgcact

SEQ ID NO: 184243 - DNA, 55 bp, Artificial
  Synthetic oligonucleotide
gagccacaaaatcgaaccgctgggcggctggtatatcgacacggccatcatggcc

SEQ ID NO: 184244 - DNA, 53 bp, Artificial
  Synthetic oligonucleotide
cccccggaaaactgccggaaacgcgcccgataaattttatcctaatgcatgcc

SEQ ID NO: 184245 - DNA, 55 bp, Artificial
  Synthetic oligonucleotide
gagccgcaagcttggttttacccaatgtatttgcgatgtctgaaaacgcttgtgc

SEQ ID NO: 184246 - DNA, 55 bp, Artificial
  Synthetic oligonucleotide
gagccggtgtgaacgtgatgtcgctcggaatgtagcacccgataagcgggtcata

SEQ ID NO: 184247 - DNA, 55 bp, Artificial
  Synthetic oligonucleotide
attgggacgttggaccgaagtggctgaacgtaccgtactcaaccatgtttcgctg

SEQ ID NO: 184248 - DNA, 55 bp, Artificial
  Synthetic oligonucleotide
ccccatgacgcaatggaggaagcgcaccgagatgataaaggtgaccatgggtcag

SEQ ID NO: 184249 - DNA, 58 bp, Artificial
  Synthetic oligonucleotide
ggcaaggttcggtagtattccggatagcggacgcgccctgatgtatcgtcgtggtgac

SEQ ID NO: 184250 - DNA, 55 bp, Artificial
  Synthetic oligonucleotide
gagcctactgaacgtccgctgtctgtgcccgcgccatgatactcggctgcacttg

SEQ ID NO: 184251 - DNA, 55 bp, Artificial
  Synthetic oligonucleotide
gagcctgtgcggacttaatcttacatagtgagggtcgttaccctgagtaggaacc

SEQ ID NO: 184252 - DNA, 55 bp, Artificial
  Synthetic oligonucleotide
ccccatagctagaccctatgaggtcactatgatggtgggtgatcaagaagccttg

SEQ ID NO: 184253 - DNA, 55 bp, Artificial
  Synthetic oligonucleotide
gagaccgccacaggcactgtgacgacgccagcgattgtaatcacactcgatataa

SEQ ID NO: 184254 - DNA, 55 bp, Artificial
  Synthetic oligonucleotide
cccgataccattaaggtgacggggattaggcccactttgtgagcatcagcatccg

SEQ ID NO: 184255 - DNA, 55 bp, Artificial
  Synthetic oligonucleotide
gagacgcaaccacaagcgttaatgacaactggagacatcaatgcattccgctacc

SEQ ID NO: 184256 - DNA, 55 bp, Artificial
  Synthetic oligonucleotide
cccgactgtttaacgtagaaagcgtggatctggagttcagcaacggcgtgcgtcg

SEQ ID NO: 184257 - DNA, 55 bp, Artificial
  Synthetic oligonucleotide
cccgactagcgagatgccccaggtttctttaagctaaagggtacacaggcgtcga

SEQ ID NO: 184258 - DNA, 55 bp, Artificial
  Synthetic oligonucleotide
cccgaatcactgactggttttgggtcataaaatgaatagattcatcgggatgcat

SEQ ID NO: 184259 - DNA, 54 bp, Artificial
  Synthetic oligonucleotide
cccgaaattacgggaatgctccggccataacagcgccgtatacaaagaggggtc

SEQ ID NO: 184260 - DNA, 60 bp, Artificial
  Synthetic oligonucleotide
ggcaagcttatagagaaaaaaggcagcctgtctcaggctgttttaagtcttctacatcat

SEQ ID NO: 184261 - DNA, 55 bp, Artificial
  Synthetic oligonucleotide
gagacggaagcgccatggaacaattacgaggtttgtacccaccgttggcagcgta

SEQ ID NO: 184262 - DNA, 55 bp, Artificial
  Synthetic oligonucleotide
gagactggagcccgagagcaatatcgggtgagcaaagcggggacagcggtgcaga

SEQ ID NO: 184263 - DNA, 55 bp, Artificial
  Synthetic oligonucleotide
gagacttgtgggttacgtgaagaacgctgccatcctgaatgttcgtacgaacccc

SEQ ID NO: 184264 - DNA, 55 bp, Artificial
  Synthetic oligonucleotide
gagagaagcacgaacggtagggaaggggagtttagagtttactcgtgcaatgtct

SEQ ID NO: 184265 - DNA, 55 bp, Artificial
  Synthetic oligonucleotide
ccattcagcgcagcggtcgtgacaattatgattaactccggcgcttatatcgcgg

SEQ ID NO: 184266 - DNA, 55 bp, Artificial
  Synthetic oligonucleotide
cccctttgcacttcacgatgtttcgttctgcaaagtcaggcgtgaactccatacg

SEQ ID NO: 184267 - DNA, 55 bp, Artificial
  Synthetic oligonucleotide
gagagaagcggacgtagtaaggctggggaggttgtgcttagggttaaggatcacc

SEQ ID NO: 184268 - DNA, 54 bp, Artificial
  Synthetic oligonucleotide
atttaattccggttaaggggaggattgttgtatccaatgtaacagtgccttgag

SEQ ID NO: 184269 - DNA, 55 bp, Artificial
  Synthetic oligonucleotide
gagagcgatatccgatgaccggcagaatctgcgtgcaccatcgaaccgcgccaca

SEQ ID NO: 184270 - DNA, 55 bp, Artificial
  Synthetic oligonucleotide
ccccgtggcgggtgttcaactctcatggttgtaacggatgctgggacgatacatc

SEQ ID NO: 184271 - DNA, 60 bp, Artificial
  Synthetic oligonucleotide
ggcaaataatgcgcgtcagcgcatgtaaggcggcatacggtggttacatgtagcacaggt

SEQ ID NO: 184272 - DNA, 55 bp, Artificial
  Synthetic oligonucleotide
ccccgttaagcgcggagatccatctatgaaaaccgcatggcgggaaggcaaccac

SEQ ID NO: 184273 - DNA, 55 bp, Artificial
  Synthetic oligonucleotide
ccattggcctctgtggggtatggccccgcgacttttcagatgacctacattccgg

SEQ ID NO: 184274 - DNA, 55 bp, Artificial
  Synthetic oligonucleotide
ccattgcgaatggacaagcccttaactatcggcacgtaaagaccaccaggagtgg

SEQ ID NO: 184275 - DNA, 55 bp, Artificial
  Synthetic oligonucleotide
gagatgcatggcgggtcggtggtgcactgacttacagttacacctcggtccatgg

SEQ ID NO: 184276 - DNA, 55 bp, Artificial
  Synthetic oligonucleotide
gagatcgctagccggactgggaaataagatactcaaatcgttcctgagtcctcgt

SEQ ID NO: 184277 - DNA, 55 bp, Artificial
  Synthetic oligonucleotide
gagataggtgcctcacttgattaagcattggtaactgtcagaccaagtttactca

SEQ ID NO: 184278 - DNA, 55 bp, Artificial
  Synthetic oligonucleotide
ccccgtttcaatctgtggacacctgtagcggcgtctgctcagtaggtaacgtgta

SEQ ID NO: 184279 - DNA, 55 bp, Artificial
  Synthetic oligonucleotide
cccctattcgtacgcaaaaccagataattcgtaaagcaatgcgggaacttgaatc

SEQ ID NO: 184280 - DNA, 55 bp, Artificial
  Synthetic oligonucleotide
cccctcagaagcccctctaagcaatttggcatcaaccctagccctatccttaccc

SEQ ID NO: 184281 - DNA, 55 bp, Artificial
  Synthetic oligonucleotide
cccctgacggatgtttgcagctatcgccgtacactggctatcgttgaatcgcaaa

SEQ ID NO: 184282 - DNA, 59 bp, Artificial
  Synthetic oligonucleotide
ggcaaataacatggagggggatgtatcagcggttactgaaggttgacccgctgaaatgc

SEQ ID NO: 184283 - DNA, 55 bp, Artificial
  Synthetic oligonucleotide
cccctgcacccgccgaccgcaagcgatatactgcacgaccacaaaccgccgtaaa

SEQ ID NO: 184284 - DNA, 55 bp, Artificial
  Synthetic oligonucleotide
gagagtaattcatccctgaggatttgcagctcaacagccagtctggcctgtagca

SEQ ID NO: 184285 - DNA, 55 bp, Artificial
  Synthetic oligonucleotide
attgtgtttgtcgccgcactggcatggtttgtcaacgggaaatccgctaagccga

SEQ ID NO: 184286 - DNA, 55 bp, Artificial
  Synthetic oligonucleotide
ccattgagaggtggctgatcggaaaccaaacgggagacgcgacactacgagcggg

SEQ ID NO: 184287 - DNA, 55 bp, Artificial
  Synthetic oligonucleotide
gagagcgggatatcaactcgcgtaagaatacctatcggttcgcctgcgctctggg

SEQ ID NO: 184288 - DNA, 55 bp, Artificial
  Synthetic oligonucleotide
attgagcaccgatttctcttgtttagtcgcatcagtattaataccgttggcttgc

SEQ ID NO: 184289 - DNA, 55 bp, Artificial
  Synthetic oligonucleotide
gaggcgaaattcagcagcggcggtaaagtaggtgggttcatacagagcataagga

SEQ ID NO: 184290 - DNA, 55 bp, Artificial
  Synthetic oligonucleotide
cccagtccggtcacaatttcttgacgcttagacacgtttgtcctccagggaggga

SEQ ID NO: 184291 - DNA, 53 bp, Artificial
  Synthetic oligonucleotide
cccaagacttcgcctctaacataaattatagttaccaaatctggcaaaagggt

SEQ ID NO: 184292 - DNA, 55 bp, Artificial
  Synthetic oligonucleotide
gaggcgctacgctatcagacctacaaaacctgcacgttagccctttgtaggccag

SEQ ID NO: 184293 - DNA, 54 bp, Artificial
  Synthetic oligonucleotide
ggatttaatgggttacgccccagaatcgttctgaggccgttttagcggtgcgtg

SEQ ID NO: 184294 - DNA, 51 bp, Artificial
  Synthetic oligonucleotide
cccaggtgggtaaagagtgccggtttacgacaggtttagccgttgttatta

SEQ ID NO: 184295 - DNA, 55 bp, Artificial
  Synthetic oligonucleotide
gaggctggttatacgatgtccagtaataatcatgatgtcattgttcgttttcctg

SEQ ID NO: 184296 - DNA, 55 bp, Artificial
  Synthetic oligonucleotide
cccaagcgatagaaatgacggttaatcccttgatattgcgacgtgcatattcagc

SEQ ID NO: 184297 - DNA, 55 bp, Artificial
  Synthetic oligonucleotide
cccaggctttacactttatgcttccggctcgtatgttgtgtggaattgtgagcgg

SEQ ID NO: 184298 - DNA, 55 bp, Artificial
  Synthetic oligonucleotide
gagggcacaccgttccgttacagcttcagtgcgcggaaggaccgccataatgcgg

SEQ ID NO: 184299 - DNA, 54 bp, Artificial
  Synthetic oligonucleotide
attgaaggagtatttatccgaagaggtggtgattgtaacggagccgccccacgg

SEQ ID NO: 184300 - DNA, 55 bp, Artificial
  Synthetic oligonucleotide
gagggctcgctgccgggtctagaacaggcgcctgaggctatcttccgatttgtgc

SEQ ID NO: 184301 - DNA, 55 bp, Artificial
  Synthetic oligonucleotide
gaggggcggattacctgtccaacgaacaaaatgactagccatctgtcgctccgtg

SEQ ID NO: 184302 - DNA, 55 bp, Artificial
  Synthetic oligonucleotide
cccaggcggaactgacgcatcccagccgttggtcgctgaatattaaaagcctcaa

SEQ ID NO: 184303 - DNA, 55 bp, Artificial
  Synthetic oligonucleotide
cccagcttttcgctgaaccagtcactgatgctgtcacccattccggttacgctgg

SEQ ID NO: 184304 - DNA, 60 bp, Artificial
  Synthetic oligonucleotide
ggatgttgccacgcgatcccctccagtagcatagataacagagctggcgtcaggtgcact

SEQ ID NO: 184305 - DNA, 55 bp, Artificial
  Synthetic oligonucleotide
cccacacacaggcggccacatggcgaacaacttcatctcagaacaattctcggca

SEQ ID NO: 184306 - DNA, 55 bp, Artificial
  Synthetic oligonucleotide
cccacacgtaactctttgctttctttaatctcctgccagggttttgccatcgcgg

SEQ ID NO: 184307 - DNA, 55 bp, Artificial
  Synthetic oligonucleotide
gagtaagtcccaggagcttacaccagtaagtgattgggctgaacgaagacagcca

SEQ ID NO: 184308 - DNA, 51 bp, Artificial
  Synthetic oligonucleotide
cccaccaccagccaataaaattaaaacagggaaaactaaccaaccttcaga

SEQ ID NO: 184309 - DNA, 55 bp, Artificial
  Synthetic oligonucleotide
cccacgatattcagacagtcgttgtatcttaagttgacattacccgctgacgtcg

SEQ ID NO: 184310 - DNA, 55 bp, Artificial
  Synthetic oligonucleotide
cccacgctcaccggctccagatttatcagcaataaaccagccagccggaagggcc

SEQ ID NO: 184311 - DNA, 55 bp, Artificial
  Synthetic oligonucleotide
gaggtttactgtccttagcctcatccggggagctgaaaacgcgtcaggacgtcac

SEQ ID NO: 184312 - DNA, 55 bp, Artificial
  Synthetic oligonucleotide
cccactgtctgtctatgacgcaattggggaggcctgccgatgaacctccagcatg

SEQ ID NO: 184313 - DNA, 55 bp, Artificial
  Synthetic oligonucleotide
cccagcaggcttgttgtttggcaacattttgttagcactttgttcacctgagtgc

SEQ ID NO: 184314 - DNA, 55 bp, Artificial
  Synthetic oligonucleotide
cccagcatcgggcgacccaacgcagttttatagcgcacggcacctttacgggtta

SEQ ID NO: 184315 - DNA, 60 bp, Artificial
  Synthetic oligonucleotide
ggatgttcctgccaccaatccgcagacttggtttcttccccgcagccagaaagcagcgat

SEQ ID NO: 184316 - DNA, 55 bp, Artificial
  Synthetic oligonucleotide
attctgcccaatctatcgctgcggaaggtaacgcagcgggtttacggatttcccc

SEQ ID NO: 184317 - DNA, 55 bp, Artificial
  Synthetic oligonucleotide
gaggtgcctgatgtggcgtgaagcgcgtctggcttttactgactcactggccgcg

SEQ ID NO: 184318 - DNA, 55 bp, Artificial
  Synthetic oligonucleotide
gaggtgcagcggagcgatgacggtttattccgccttaccaccgaggcacaggctg

SEQ ID NO: 184319 - DNA, 53 bp, Artificial
  Synthetic oligonucleotide
cccagcccaacacatgccgaaattccttacgctctttcaaccgcttaaacccc

SEQ ID NO: 184320 - DNA, 55 bp, Artificial
  Synthetic oligonucleotide
attctgttgagcagaaatgcgaactaagcgtcacaacgtaggtcacaatgcctgg

SEQ ID NO: 184321 - DNA, 55 bp, Artificial
  Synthetic oligonucleotide
gaggtcagaaacgaatttcaccagtcggtgcatatcatacgattcggggaacccc

SEQ ID NO: 184322 - DNA, 55 bp, Artificial
  Synthetic oligonucleotide
cccagctaggacgcactggcctgagtgtaatggtatctccctctctggagattac

SEQ ID NO: 184323 - DNA, 52 bp, Artificial
  Synthetic oligonucleotide
ccccagtttatccaacagctcaggggttaacacgggaacaattttgcccgaa

SEQ ID NO: 184324 - DNA, 55 bp, Artificial
  Synthetic oligonucleotide
ccccagcgtcgccatagtgcgttcaccgaatacgtgcgcaacaaccgtcttccgg

SEQ ID NO: 184325 - DNA, 55 bp, Artificial
  Synthetic oligonucleotide
gagcgccaaatgtttgaacccattctgcgtgttcgtacacatggtgtcgataccg

SEQ ID NO: 184326 - DNA, 60 bp, Artificial
  Synthetic oligonucleotide
atgcgcagttctggctggtttttgacgttgaccgcgagggggcagcgattgactggagcg

SEQ ID NO: 184327 - DNA, 58 bp, Artificial
  Synthetic oligonucleotide
agtacatgttatgaatcttattcgcaattgttttaggcgataagttaagtatgttagc

SEQ ID NO: 184328 - DNA, 55 bp, Artificial
  Synthetic oligonucleotide
ccccagcaggtggcaacacgcatagagaatattagctttcacccatcgatcggca

SEQ ID NO: 184329 - DNA, 55 bp, Artificial
  Synthetic oligonucleotide
attggaaggcgtccttttattattgggtcgctgattggtatcgcctcattcggga

SEQ ID NO: 184330 - DNA, 55 bp, Artificial
  Synthetic oligonucleotide
gagcgcggcacgaaatacatcggaacgacttaaattagcccggcgaggaactatt

SEQ ID NO: 184331 - DNA, 55 bp, Artificial
  Synthetic oligonucleotide
gagcgcggccagctaacgattactaacccttcgccgtactacgtttcgatggttg

SEQ ID NO: 184332 - DNA, 55 bp, Artificial
  Synthetic oligonucleotide
ccccagacgacatcgtcagccaccacgaaagcgtgattgcccaattccgtgacat

SEQ ID NO: 184333 - DNA, 55 bp, Artificial
  Synthetic oligonucleotide
ccccagaatcagtgacgccagtacattagcgcaagtactcgaagaaccgtttacc

SEQ ID NO: 184334 - DNA, 54 bp, Artificial
  Synthetic oligonucleotide
gagcgggatcagacggctaccggtgttgatcacccgttactttattcgtacccc

SEQ ID NO: 184335 - DNA, 55 bp, Artificial
  Synthetic oligonucleotide
gagcgtaaacgtctgctggtgagtctcggcactgtcaaaccgatggttgacggcc

SEQ ID NO: 184336 - DNA, 55 bp, Artificial
  Synthetic oligonucleotide
gagcgtaatgaggccgccacgtgtcaataaccacgcgagggttctcgctactgga

SEQ ID NO: 184337 - DNA, 55 bp, Artificial
  Synthetic oligonucleotide
ccccaatatcgcccgatgggtgacggtaccccgatcgtcaaaattcagcaccacg

SEQ ID NO: 184338 - DNA, 60 bp, Artificial
  Synthetic oligonucleotide
ggatcgatatcttcgctcagtccggtctgacgtttagccgctccggttgcaagcggctga

SEQ ID NO: 184339 - DNA, 55 bp, Artificial
  Synthetic oligonucleotide
gagcgtcaagcggaatcgtgtcaatagttgctgtaagtcaaacctatgaccaatc

SEQ ID NO: 184340 - DNA, 55 bp, Artificial
  Synthetic oligonucleotide
cccagtctgccattcatacccgatctcgccgtcctctgtacccatgctaagcgta

SEQ ID NO: 184341 - DNA, 55 bp, Artificial
  Synthetic oligonucleotide
gaggcattgaccatcatagcaggaaacttgccagtcaagtaacattcaccggagc

SEQ ID NO: 184342 - DNA, 51 bp, Artificial
  Synthetic oligonucleotide
cccataaccaaattcccgttattactaccgaacttttggcgcacttatacg

SEQ ID NO: 184343 - DNA, 55 bp, Artificial
  Synthetic oligonucleotide
cccatgcggggcctgactgagattatgtatgccgcgtatcagcttcatgtctgac

SEQ ID NO: 184344 - DNA, 55 bp, Artificial
  Synthetic oligonucleotide
gaggagacggtcatggcacggctgaacagagaatcggttattgatgcggcactgg

SEQ ID NO: 184345 - DNA, 55 bp, Artificial
  Synthetic oligonucleotide
gaggaattgaccatcggttcgcagtatgccttaatgtagagtgaacgcaggcttg

SEQ ID NO: 184346 - DNA, 55 bp, Artificial
  Synthetic oligonucleotide
gagctttatcattgcctggctgcgtctcaatccattgtggctaacgctttcggtt

SEQ ID NO: 184347 - DNA, 55 bp, Artificial
  Synthetic oligonucleotide
gagctgagttccgctgtgcctctacgtgaaagtaaatcgcttgatgataagtcgt

SEQ ID NO: 184348 - DNA, 53 bp, Artificial
  Synthetic oligonucleotide
cccattacgaaccagttcgtcttcaaagcccgtaaaccagacagacaggtaag

SEQ ID NO: 184349 - DNA, 55 bp, Artificial
  Synthetic oligonucleotide
ggatccgtaccaccacctgatgaagggccacctttaccagacgtaccgttcacat

SEQ ID NO: 184350 - DNA, 55 bp, Artificial
  Synthetic oligonucleotide
cccattatcatgcttgctatttcagctcgtaactcctctttagcgtacatatcac

SEQ ID NO: 184351 - DNA, 55 bp, Artificial
  Synthetic oligonucleotide
cccattatctttgacctcgcctgaaacgacctcacgatatgcctcagatgcagcc

SEQ ID NO: 184352 - DNA, 55 bp, Artificial
  Synthetic oligonucleotide
cccattcagcaggtgaatagttcaaccctgcatgtatacccgccaatggcccgac

SEQ ID NO: 184353 - DNA, 55 bp, Artificial
  Synthetic oligonucleotide
cccaagactacctcttattttaagagagtcgaagtgtctggtgatctatggggcc

SEQ ID NO: 184354 - DNA, 53 bp, Artificial
  Synthetic oligonucleotide
ccccaaccgtttcgccagtttacgcgtactcggatagctacgataaagctggg

SEQ ID NO: 184355 - DNA, 55 bp, Artificial
  Synthetic oligonucleotide
gagctcgactccgtatgtacaaggcgaacaggcgtgacggtttatgtgagaggag

SEQ ID NO: 184356 - DNA, 55 bp, Artificial
  Synthetic oligonucleotide
attgcacctgaagagttataagcagcttgaagcgtatattatcaagacggccaat

SEQ ID NO: 184357 - DNA, 55 bp, Artificial
  Synthetic oligonucleotide
attgcgaccaccatatcggcgatcactcttcgatgttggtttcttgtccaagaga

SEQ ID NO: 184358 - DNA, 55 bp, Artificial
  Synthetic oligonucleotide
caaaatagtgccccaggttgaatcgccagtccagtagagccaaatgaccgcagga

SEQ ID NO: 184359 - DNA, 55 bp, Artificial
  Synthetic oligonucleotide
ccctcaagctggccgctacttctggcggcccttaacagcatgccggagcgttatt

SEQ ID NO: 184360 - DNA, 60 bp, Artificial
  Synthetic oligonucleotide
ggatattaggaccattgccaataacccgattggctcccatcgcagcaacgagataaatgc

SEQ ID NO: 184361 - DNA, 55 bp, Artificial
  Synthetic oligonucleotide
ccatccctcccggcaccatgagcaccataaccggtgtcattgcagcgtgtggcgt

SEQ ID NO: 184362 - DNA, 55 bp, Artificial
  Synthetic oligonucleotide
ccctatacgttcaattccgccaaagagatgctggatcactgcaaacaaagtggcc

SEQ ID NO: 184363 - DNA, 55 bp, Artificial
  Synthetic oligonucleotide
ccctagcgtacttacttcgagcgagctgtggggtatacggtgatagtgcatagcc

SEQ ID NO: 184364 - DNA, 55 bp, Artificial
  Synthetic oligonucleotide
gacggagcgtaaagagacgctgggcgacgtaactcaccgcattctgacggtgcct

SEQ ID NO: 184365 - DNA, 55 bp, Artificial
  Synthetic oligonucleotide
gacggagcgtagtctgaatcatgactgcattcactggacggtaagcgccctgtta

SEQ ID NO: 184366 - DNA, 55 bp, Artificial
  Synthetic oligonucleotide
gacggatgagctggaaccactctctattcaacccatctaccgtccgttcgcaccg

SEQ ID NO: 184367 - DNA, 55 bp, Artificial
  Synthetic oligonucleotide
gacggcaaacggaacctccaatggtgcaagcgtgtccagtggtggaacctgttca

SEQ ID NO: 184368 - DNA, 55 bp, Artificial
  Synthetic oligonucleotide
ccctagaagggcgagccagtatggccctcatggttgatattaataagcgctagat

SEQ ID NO: 184369 - DNA, 55 bp, Artificial
  Synthetic oligonucleotide
gacggcaccggacgtgttgtctgtatactgtagggtaaagaatagcggatccctc

SEQ ID NO: 184370 - DNA, 55 bp, Artificial
  Synthetic oligonucleotide
gacggcaggcttacagtagttcgaacgatccttgtttaacgcgagcggaatccac

SEQ ID NO: 184371 - DNA, 58 bp, Artificial
  Synthetic oligonucleotide
ggagttaactttttgagagattcctgtgtcggttttgatcgtgagtgaagatcctatg

SEQ ID NO: 184372 - DNA, 55 bp, Artificial
  Synthetic oligonucleotide
ccctactctcgcatggggagaccccacactaccatcggcgctacggcgtttcact

SEQ ID NO: 184373 - DNA, 55 bp, Artificial
  Synthetic oligonucleotide
ccctacgctctccaagagctatattatattcagatgttcctctttcgtctgcatg

SEQ ID NO: 184374 - DNA, 52 bp, Artificial
  Synthetic oligonucleotide
cccgtttcgataaggcctaaccagtcgcgccaaattaaaccgcctggttgtg

SEQ ID NO: 184375 - DNA, 55 bp, Artificial
  Synthetic oligonucleotide
gacggggttgaacaacgagctatgcgaggcgttagccggtcataaaaggaaccat

SEQ ID NO: 184376 - DNA, 53 bp, Artificial
  Synthetic oligonucleotide
cccgtttcatttgccactcaggggcggttcctcgccccgtaaaccacactgtc

SEQ ID NO: 184377 - DNA, 55 bp, Artificial
  Synthetic oligonucleotide
cccgttatgggtcgcctgataagaggccagaaactagcgcaaatattcaccgtac

SEQ ID NO: 184378 - DNA, 55 bp, Artificial
  Synthetic oligonucleotide
ccatcgccgacctcagaaccggtacccatttctcccgagatacgcacgacggcga

SEQ ID NO: 184379 - DNA, 55 bp, Artificial
  Synthetic oligonucleotide
gacggtcgcactattgtcagcgacggcaaacctaaagaatcagactcaggcctgc

SEQ ID NO: 184380 - DNA, 51 bp, Artificial
  Synthetic oligonucleotide
cccgtggtcttaacaagaatttcggtgacgtaacgggtgataccgttatcc

SEQ ID NO: 184381 - DNA, 55 bp, Artificial
  Synthetic oligonucleotide
caaaactgcgccccatgaccgggcttgataagccggtagccgcgtttcttgaccg

SEQ ID NO: 184382 - DNA, 56 bp, Artificial
  Synthetic oligonucleotide
ggagtctatggatgtaggaaaagccgcaaaaaatatagccaagttcagtaaaggac

SEQ ID NO: 184383 - DNA, 55 bp, Artificial
  Synthetic oligonucleotide
gacgtaccagaagaatgtcgtttccataccaacagacttcagggacaacgcgaca

SEQ ID NO: 184384 - DNA, 55 bp, Artificial
  Synthetic oligonucleotide
cccgtggtcattctgataacctggaatctcatcacggaacagtgctaaaacttcg

SEQ ID NO: 184385 - DNA, 55 bp, Artificial
  Synthetic oligonucleotide
gacgtaccttgcactgaggctattcacagtgatgacatcttcaccgagaggcgcg

SEQ ID NO: 184386 - DNA, 55 bp, Artificial
  Synthetic oligonucleotide
gacgtaggtattatacggcgtcggcgtttccagatccttacgcgacagcttaccg

SEQ ID NO: 184387 - DNA, 55 bp, Artificial
  Synthetic oligonucleotide
gacgtattagagcattaggtagtccaatacgtaacggagaagcgttccacaccgg

SEQ ID NO: 184388 - DNA, 55 bp, Artificial
  Synthetic oligonucleotide
gacgtattgatctttcagacagttagcgggctgcgggttgcagtccttaccggca

SEQ ID NO: 184389 - DNA, 55 bp, Artificial
  Synthetic oligonucleotide
gacgtcgggtgcaactcatggctgctccttaagcaacggaacggacgccgggtta

SEQ ID NO: 184390 - DNA, 55 bp, Artificial
  Synthetic oligonucleotide
cccgtcatctttcaagttgcctctttgttggctgcactcgctcaccccggttaca

SEQ ID NO: 184391 - DNA, 55 bp, Artificial
  Synthetic oligonucleotide
cccgtactgcatgacaatgtgatgagataattcctacatgaataggtattcaatc

SEQ ID NO: 184392 - DNA, 55 bp, Artificial
  Synthetic oligonucleotide
gacgtgaaatgctgtcaccagcgtatacaacacgctgggctgaaataccgcaagc

SEQ ID NO: 184393 - DNA, 55 bp, Artificial
  Synthetic oligonucleotide
agtacgccgcctaataccggccccagaatcggacctaccagccccggcatagtga

SEQ ID NO: 184394 - DNA, 55 bp, Artificial
  Synthetic oligonucleotide
ccctgtggcgtgaataaatagtgtatacggttacactcgccaggcggtatccggc

SEQ ID NO: 184395 - DNA, 55 bp, Artificial
  Synthetic oligonucleotide
ccatcacggaacgaattcccatcaatacagggattattggctacaactcaacgtt

SEQ ID NO: 184396 - DNA, 55 bp, Artificial
  Synthetic oligonucleotide
ccctgtgcgtctaattcagccagcgtgggactgagatcggtgggcagggtacggt

SEQ ID NO: 184397 - DNA, 55 bp, Artificial
  Synthetic oligonucleotide
ccatcagggcagaaattatagtaacgtgtcgggagatcaagcccaatccaatctc

SEQ ID NO: 184398 - DNA, 55 bp, Artificial
  Synthetic oligonucleotide
gacgagcaaggggctgcgggcactcggctacaacgtgaggatcggtgtttgatcg

SEQ ID NO: 184399 - DNA, 55 bp, Artificial
  Synthetic oligonucleotide
gacgagcaatcaagcttttatttggccttgccctagatggagtttacactgccaa

SEQ ID NO: 184400 - DNA, 55 bp, Artificial
  Synthetic oligonucleotide
ccctgtcgggtacgatgtaaacactgcatagcctgctggctttcgtccttcactg

SEQ ID NO: 184401 - DNA, 55 bp, Artificial
  Synthetic oligonucleotide
ccctgtcgcggtgtcaaagttcagtccattacggaactgaatgcggtaagtcgcg

SEQ ID NO: 184402 - DNA, 55 bp, Artificial
  Synthetic oligonucleotide
gacgatcccgcaacaccggaaacgcccgtggcaagccgcaattgcgtggaaccaa

SEQ ID NO: 184403 - DNA, 55 bp, Artificial
  Synthetic oligonucleotide
ccctgtaaagccaaattgaaatgcatagtaaaatccaggtttcgcaggtgcgtta

SEQ ID NO: 184404 - DNA, 60 bp, Artificial
  Synthetic oligonucleotide
agtactgtcttccctaataacttgcgggtcaccatatctgctggtgtggcaacacaagat

SEQ ID NO: 184405 - DNA, 55 bp, Artificial
  Synthetic oligonucleotide
ccctgcgcgtccgccatcgtttcggctatcacgttgatatccagtgccggcatgc

SEQ ID NO: 184406 - DNA, 55 bp, Artificial
  Synthetic oligonucleotide
ccctgcgattaccagcggaatagaaaatccgttagaccggcatgacaacgataaa

SEQ ID NO: 184407 - DNA, 55 bp, Artificial
  Synthetic oligonucleotide
gacgatttaatggaattactgcgttacgacactatgtttacatgccaccgtcagg

SEQ ID NO: 184408 - DNA, 55 bp, Artificial
  Synthetic oligonucleotide
ccctgcccgcaggagcacagttaatatctggcccggcgttgcattggaatctacc

SEQ ID NO: 184409 - DNA, 55 bp, Artificial
  Synthetic oligonucleotide
ccctgcatccgtgtactgctgtacccttttgaccacatcggtacaataactgcac

SEQ ID NO: 184410 - DNA, 55 bp, Artificial
  Synthetic oligonucleotide
ccctgagggcataatgcccgctttctacagtgcacagttgcaggcagaatcatga

SEQ ID NO: 184411 - DNA, 55 bp, Artificial
  Synthetic oligonucleotide
gacgctctgcccactggtcaagtaaccacatacgtcgctccagggattgaacgaa

SEQ ID NO: 184412 - DNA, 55 bp, Artificial
  Synthetic oligonucleotide
ccctcaggcaggataatgtgccgcgcatccgactattacgtttcactcaccggcg

SEQ ID NO: 184413 - DNA, 55 bp, Artificial
  Synthetic oligonucleotide
caaaatgaccagtaagcgcgatcacgaaacttcctatagcctggctcgtgaagtg

SEQ ID NO: 184414 - DNA, 55 bp, Artificial
  Synthetic oligonucleotide
gacgcgctaacacggaacaggtgcaaaatcgacgcagtttgattacactcctgtt

SEQ ID NO: 184415 - DNA, 55 bp, Artificial
  Synthetic oligonucleotide
ggaggaggctgttgatgggtaaattattcggctacccaaaatagtaacgctcgcc

SEQ ID NO: 184416 - DNA, 55 bp, Artificial
  Synthetic oligonucleotide
ccctccagtagcatagataacagagctggcgtcaggtgcactttcccttcccggg

SEQ ID NO: 184417 - DNA, 55 bp, Artificial
  Synthetic oligonucleotide
caaaattcaccgttagtcgcattgcggcactatcactggtttcactatggctggc

SEQ ID NO: 184418 - DNA, 55 bp, Artificial
  Synthetic oligonucleotide
ccctcgccatcgtgccctggttagaaaactgagtactctcaacgctgatgtgctg

SEQ ID NO: 184419 - DNA, 55 bp, Artificial
  Synthetic oligonucleotide
gacgcgatcggcgctagcgttgcctctaagtggacagcaatcatccacgcaccgg

SEQ ID NO: 184420 - DNA, 55 bp, Artificial
  Synthetic oligonucleotide
ccctctcgccaggccgttaacttcagcttgcgtcgtatcaggtgcaacctgcagc

SEQ ID NO: 184421 - DNA, 55 bp, Artificial
  Synthetic oligonucleotide
ccctctggcgaaccagcttcagcggaagtcctcttacctggttatctccggcgac

SEQ ID NO: 184422 - DNA, 55 bp, Artificial
  Synthetic oligonucleotide
gacgcctttatgacaattctatcccaggaaaaccctgtcattcgtaagcgcctca

SEQ ID NO: 184423 - DNA, 50 bp, Artificial
  Synthetic oligonucleotide
ccctcttccggaaccgggatatacggagtttcgttatcagtacgttccgg

SEQ ID NO: 184424 - DNA, 55 bp, Artificial
  Synthetic oligonucleotide
gacgcagggcgatgacatttgtcacaacggagaggctgagattctggcgggaccg

SEQ ID NO: 184425 - DNA, 55 bp, Artificial
  Synthetic oligonucleotide
ccctgacaacttcaagccccgcctctgtgagcgcctgaatcacatcctgacggcc

SEQ ID NO: 184426 - DNA, 60 bp, Artificial
  Synthetic oligonucleotide
agtgccacaacttgtgccgtcgcacacaaaatggggcgtaggtatattggcatagaacaa

SEQ ID NO: 184427 - DNA, 55 bp, Artificial
  Synthetic oligonucleotide
gacgcagcacagcctcacggatggcatcggctacattgttaaaaccgaggtgacg

SEQ ID NO: 184428 - DNA, 55 bp, Artificial
  Synthetic oligonucleotide
gacgcagagccgtttacggtgcttatcgtccactgacagatgtcgcttatgcctc

SEQ ID NO: 184429 - DNA, 55 bp, Artificial
  Synthetic oligonucleotide
gacgcaccaacagctcagaatgcacgtaatgacccgtaccctgccctgatccgta

SEQ ID NO: 184430 - DNA, 55 bp, Artificial
  Synthetic oligonucleotide
ccatgaagtacagccgattttacacgcctatgggctgcacacgctcccaacctgg

SEQ ID NO: 184431 - DNA, 55 bp, Artificial
  Synthetic oligonucleotide
cccggacatcaacattcgggtcataatcgacccgcagacactcccgccagagttc

SEQ ID NO: 184432 - DNA, 55 bp, Artificial
  Synthetic oligonucleotide
ccatgacgatactcggatgggtaaaacggagatgcggtgagtgtacttaagacgc

SEQ ID NO: 184433 - DNA, 55 bp, Artificial
  Synthetic oligonucleotide
gactggcgagcagcaaacgttacgcactgtgatttgaccaattcggaactgggcg

SEQ ID NO: 184434 - DNA, 55 bp, Artificial
  Synthetic oligonucleotide
cccggaatgctgtctcctgggtaacgaatgtgcgctaacagagcgcatgataaac

SEQ ID NO: 184435 - DNA, 52 bp, Artificial
  Synthetic oligonucleotide
cccggaaccaaaggaagtaggttaaacccgctccgatcaggccgagccacgc

SEQ ID NO: 184436 - DNA, 55 bp, Artificial
  Synthetic oligonucleotide
gactgggaactgtgatgacacaaaaccctccggatgtatggatacgcgccgtcgg

SEQ ID NO: 184437 - DNA, 60 bp, Artificial
  Synthetic oligonucleotide
gcaagacatacgcatttgacataaacttaccaaatcggtagtcgcattctgatatgtaat

SEQ ID NO: 184438 - DNA, 57 bp, Artificial
  Synthetic oligonucleotide
gcttatgtgttggctacggattacccggcccatccataggcctcgccctgacgggtc

SEQ ID NO: 184439 - DNA, 55 bp, Artificial
  Synthetic oligonucleotide
atttggattgtgttgtagtcgtaggcttcgcgattgagtacgtactgattgagcc

SEQ ID NO: 184440 - DNA, 54 bp, Artificial
  Synthetic oligonucleotide
cccgcttcgggaaagctcacaaccgctttcggcttaaatctaccaggaatccga

SEQ ID NO: 184441 - DNA, 55 bp, Artificial
  Synthetic oligonucleotide
ccatgatcatcggataaccggaataggtatacgtcaccccgaggaagccaccggt

SEQ ID NO: 184442 - DNA, 55 bp, Artificial
  Synthetic oligonucleotide
cccgctcatagcaggcttgcagccattgctcatactgcggccagccctgacggat

SEQ ID NO: 184443 - DNA, 55 bp, Artificial
  Synthetic oligonucleotide
gacttaaatgtggggtttccgatgagtagaaacggctggcgttcgcttagtgttg

SEQ ID NO: 184444 - DNA, 54 bp, Artificial
  Synthetic oligonucleotide
cccgctatcggtaacagtaatgataacgcggtcggtcccactttctttcgcctc

SEQ ID NO: 184445 - DNA, 55 bp, Artificial
  Synthetic oligonucleotide
cccgcgcaagttgtgagttcttccggcgttcggccttctcaacggcattccagag

SEQ ID NO: 184446 - DNA, 55 bp, Artificial
  Synthetic oligonucleotide
cccgccttgtggcgggtccttccgtccgatcagaagtcttcgacctcttctaatc

SEQ ID NO: 184447 - DNA, 55 bp, Artificial
  Synthetic oligonucleotide
cccgccttagagcgcgtgagggcgctgtttgtggccaccacgataacagaatttt

SEQ ID NO: 184448 - DNA, 54 bp, Artificial
  Synthetic oligonucleotide
cccgatcaaatgacggtaaggtaaagaccaacatcaccaggcctttcaccccag

SEQ ID NO: 184449 - DNA, 60 bp, Artificial
  Synthetic oligonucleotide
gcttatcaagtaacgtgcggtatatcacgccattcggcgtatcggaggtatacatccact

SEQ ID NO: 184450 - DNA, 55 bp, Artificial
  Synthetic oligonucleotide
gagacccacttgctacggaagttatccagcacgttggtcggcaaatcggtaaagc

SEQ ID NO: 184451 - DNA, 55 bp, Artificial
  Synthetic oligonucleotide
cccgatctgtatcctgctggggatgcgtgacggtacgtcgttctcccacggtctg

SEQ ID NO: 184452 - DNA, 55 bp, Artificial
  Synthetic oligonucleotide
cccgcaccaggcgtatattgatgcgggattttataaccgggtaacaggcgaggaa

SEQ ID NO: 184453 - DNA, 55 bp, Artificial
  Synthetic oligonucleotide
gagacaagcggagggcttatgagctatcaaattctgacaaccacagcggccagta

SEQ ID NO: 184454 - DNA, 55 bp, Artificial
  Synthetic oligonucleotide
cccgcactatacattcctgtaattgctgccgctcctagccaaccagcggggttcc

SEQ ID NO: 184455 - DNA, 55 bp, Artificial
  Synthetic oligonucleotide
ccattcacctggcggctatgcgttaagcgcctgtatgctgagcgagtttgtcctc

SEQ ID NO: 184456 - DNA, 55 bp, Artificial
  Synthetic oligonucleotide
gagaatattaacggtctttcgacgcgcgcacacaatagcaatctgtaacaaggtg

SEQ ID NO: 184457 - DNA, 55 bp, Artificial
  Synthetic oligonucleotide
atttccgtctcctaatagaactcacgctggtgccattcataactgattctacttg

SEQ ID NO: 184458 - DNA, 55 bp, Artificial
  Synthetic oligonucleotide
gagaaagggtcattctgagaatgaagattccgacgttactaactgagtgttgtat

SEQ ID NO: 184459 - DNA, 55 bp, Artificial
  Synthetic oligonucleotide
ccattaggattacatcttaacgtcggtttcacgctggatacgctggcatttcggc

SEQ ID NO: 184460 - DNA, 60 bp, Artificial
  Synthetic oligonucleotide
gctgtttcccacaaggcactttcacgtgcgttgatatctgtgtcgtactcttccagcatt

SEQ ID NO: 184461 - DNA, 55 bp, Artificial
  Synthetic oligonucleotide
ccattagcccatagccgaaagaaaaggtggccctctctatgtcagaccaccgttg

SEQ ID NO: 184462 - DNA, 55 bp, Artificial
  Synthetic oligonucleotide
gagaaagataggacgagacactctctgtcgaatcacaacttccggtatggctcac

SEQ ID NO: 184463 - DNA, 55 bp, Artificial
  Synthetic oligonucleotide
cccgccgtaacaacgccatcggacctccagtgttcagagctctatggttttcggc

SEQ ID NO: 184464 - DNA, 55 bp, Artificial
  Synthetic oligonucleotide
atttctggggcacaacaatatcgtgataagtttgctgtacgcgctctagtggctc

SEQ ID NO: 184465 - DNA, 55 bp, Artificial
  Synthetic oligonucleotide
cccgccgtaatccctgttgtctaaccatgcgtgtcacaaaatccgccgggcgtgc

SEQ ID NO: 184466 - DNA, 55 bp, Artificial
  Synthetic oligonucleotide
gacttattgcaacacaccagtctgtcgattgtcggtgagatgaccgtcactatcg

SEQ ID NO: 184467 - DNA, 55 bp, Artificial
  Synthetic oligonucleotide
cccgtacaaatcagtgcggggttttagatgattaatctggagtcctaaccatgcg

SEQ ID NO: 184468 - DNA, 55 bp, Artificial
  Synthetic oligonucleotide
gacgtgtctgatactgacgtatgcgcactccctcataattttccatcgacaggca

SEQ ID NO: 184469 - DNA, 55 bp, Artificial
  Synthetic oligonucleotide
gacgttaactgtcaggaactgcgagataggtgaacttggaacagtccttacagca

SEQ ID NO: 184470 - DNA, 55 bp, Artificial
  Synthetic oligonucleotide
gacgttatcgacgttatgcagtccgctacgttcgaaggctgtcgccagctgtgcc

SEQ ID NO: 184471 - DNA, 56 bp, Artificial
  Synthetic oligonucleotide
agtggatatatctgttagctacagagaaaagcgattttagagggtttgacgaggtt

SEQ ID NO: 184472 - DNA, 54 bp, Artificial
  Synthetic oligonucleotide
gacgttttgattatcctcgaagtgttattccgggagactgtccgttaagctccc

SEQ ID NO: 184473 - DNA, 55 bp, Artificial
  Synthetic oligonucleotide
gactaacaacatctactgtaagtcggttagctgtcagggagctgttcttgccctg

SEQ ID NO: 184474 - DNA, 55 bp, Artificial
  Synthetic oligonucleotide
gactaagcgccagtatggccattacctcactggctgcccatcaggatatccatcc

SEQ ID NO: 184475 - DNA, 51 bp, Artificial
  Synthetic oligonucleotide
gactaatacaccttatttcccgacaggggttgtatcttaagttaacgttac

SEQ ID NO: 184476 - DNA, 55 bp, Artificial
  Synthetic oligonucleotide
cccggtcgatacggccataaccggcgctctcgcagatgtagcgccatgccatgta

SEQ ID NO: 184477 - DNA, 55 bp, Artificial
  Synthetic oligonucleotide
gactacaggccggtcgatggggtaataggcactgagacgatgtcgcagatgcact

SEQ ID NO: 184478 - DNA, 55 bp, Artificial
  Synthetic oligonucleotide
gactaccgggttaaatggcgtgaaccaatgcaaatctcctggcgcggcaataccc

SEQ ID NO: 184479 - DNA, 55 bp, Artificial
  Synthetic oligonucleotide
cccggtcacttacttgtgtaagctcccggggattcacaggctagccgccttgctc

SEQ ID NO: 184480 - DNA, 55 bp, Artificial
  Synthetic oligonucleotide
cccggtcacgtaatactgtcaggatccgctcacgctgttctgcattcgggatata

SEQ ID NO: 184481 - DNA, 51 bp, Artificial
  Synthetic oligonucleotide
attttgtacccacgtgtcccctttaccgttttgatcccatgaaccactacc

SEQ ID NO: 184482 - DNA, 59 bp, Artificial
  Synthetic oligonucleotide
agtggcgggacgctctggtatcttggcgggatgatacaggcgaacctggaagaaatcag

SEQ ID NO: 184483 - DNA, 55 bp, Artificial
  Synthetic oligonucleotide
gactcacgctggaagcgattcgtgttacccaatccgatcgcgatctgtttaagca

SEQ ID NO: 184484 - DNA, 55 bp, Artificial
  Synthetic oligonucleotide
gactcagatgtccgataacgctcaactttccggtctgtgcgaccgttttcgtggt

SEQ ID NO: 184485 - DNA, 55 bp, Artificial
  Synthetic oligonucleotide
cccggagataatccgcccgagatacaacatccacagcacattggacagtgccagc

SEQ ID NO: 184486 - DNA, 55 bp, Artificial
  Synthetic oligonucleotide
cccggatgtacatcccctgattgtgtcccgtattcgtcattctccggacgaacgc

SEQ ID NO: 184487 - DNA, 55 bp, Artificial
  Synthetic oligonucleotide
cccggattcggcgtgcaagacttcatccatgtcgcgggcatacttgccttcgcgc

SEQ ID NO: 184488 - DNA, 55 bp, Artificial
  Synthetic oligonucleotide
atttgtcgatagctattaccgtacatggggaggacgctatgtgcagtttgcgatc

SEQ ID NO: 184489 - DNA, 55 bp, Artificial
  Synthetic oligonucleotide
cccggattgctactacctgattcgcgcctttgacagtgctgaaagcatgactacg

SEQ ID NO: 184490 - DNA, 55 bp, Artificial
  Synthetic oligonucleotide
cccggcacgattcatcagtcgccagactctgttcactccgcactgttgaccgcta

SEQ ID NO: 184491 - DNA, 53 bp, Artificial
  Synthetic oligonucleotide
cccggcctaaaatatcgcttcgtaccacttatcctccggcgtgggtaacgcat

SEQ ID NO: 184492 - DNA, 55 bp, Artificial
  Synthetic oligonucleotide
gactgcctaatcaagaggacatgttgccatgactgtgacaaccacttatcccggc

SEQ ID NO: 184493 - DNA, 59 bp, Artificial
  Synthetic oligonucleotide
agtggggatgatcctaaagccgtcgataaatgacgatcctagagtagattgcaaacctc

SEQ ID NO: 184494 - DNA, 55 bp, Artificial
  Synthetic oligonucleotide
cccggcgcataatatcattgcaatatgacatcgtaaagaagcgccccagacgctc

SEQ ID NO: 184495 - DNA, 55 bp, Artificial
  Synthetic oligonucleotide
cccgggatttgcattgaattttgacccaccccttgttgtcagaattatgtctcga

SEQ ID NO: 184496 - DNA, 55 bp, Artificial
  Synthetic oligonucleotide
gactgatgccatgcatgttttcaagccagtatttacgtgctgcaactttgccgcg

SEQ ID NO: 184497 - DNA, 55 bp, Artificial
  Synthetic oligonucleotide
ccatgaagcgcggaaactgacgcctccgcagattagcacgctgatgcgtatcagc

SEQ ID NO: 184498 - DNA, 55 bp, Artificial
  Synthetic oligonucleotide
gactgactcgaaaagtttcggttgtggatggagcaaggtaataaatggtagttgg

SEQ ID NO: 184499 - DNA, 55 bp, Artificial
  Synthetic oligonucleotide
cccgggcgaggatggtttgtcggtttgccgccgcttgcgtagtcagagtaatccg

SEQ ID NO: 184500 - DNA, 55 bp, Artificial
  Synthetic oligonucleotide
gactctgttcgagtacaccggtaactacagtgcgtttgaagtacagcgtgccacg

SEQ ID NO: 184501 - DNA, 55 bp, Artificial
  Synthetic oligonucleotide
gactcgcccttcgggtcaacgctagcgcgttgctgtctcgttttgctcggctcga

SEQ ID NO: 184502 - DNA, 55 bp, Artificial
  Synthetic oligonucleotide
ccgtttggttgaggagtatcaatgcgtcgttatgcagtctggttagcttgttttg

SEQ ID NO: 184503 - DNA, 55 bp, Artificial
  Synthetic oligonucleotide
ctgtccgcccagcgccttatagctgtcgggacggaaccaggctggattctcacac

SEQ ID NO: 184504 - DNA, 60 bp, Artificial
  Synthetic oligonucleotide
gctgttcttcaagtttgtgatattgcattacaaccaggagagcaagtcaacagcattaat

SEQ ID NO: 184505 - DNA, 55 bp, Artificial
  Synthetic oligonucleotide
caccgcagtagacgtcggaaccgataacctgctgcacgtctttacaggtatagag

SEQ ID NO: 184506 - DNA, 55 bp, Artificial
  Synthetic oligonucleotide
ctgtcgaaaactgacggtatgaacaccgtaagctcccaaagtgatcaccattcgc

SEQ ID NO: 184507 - DNA, 55 bp, Artificial
  Synthetic oligonucleotide
ccagacatagcgcgttagggttccaggctgccggtaatggtatcgggcgctgata

SEQ ID NO: 184508 - DNA, 55 bp, Artificial
  Synthetic oligonucleotide
ccgtttgacttaattttcatagcggatcaccttctgggcagtgcgggaagtggct

SEQ ID NO: 184509 - DNA, 55 bp, Artificial
  Synthetic oligonucleotide
ctgtctcagctcgccactgaaccagggaaaatcgggaagcgtgccttttgttcgc

SEQ ID NO: 184510 - DNA, 55 bp, Artificial
  Synthetic oligonucleotide
ctgtctccgaatggaagatggtcagcacacagtgttgaccgcgtaatcctgcgcg

SEQ ID NO: 184511 - DNA, 55 bp, Artificial
  Synthetic oligonucleotide
ctgtctgctgccgtgatcgcaccgaacgcgttttctgcggtgtgcgtaacagatg

SEQ ID NO: 184512 - DNA, 55 bp, Artificial
  Synthetic oligonucleotide
ctgtgagcgccacaacctgtatccaagagcggtgcctacgagcagtcctgccgtc

SEQ ID NO: 184513 - DNA, 55 bp, Artificial
  Synthetic oligonucleotide
ctgtgagcgtgacgtaaatattcccgcctgagcgcacttctatcgtcagcggctc

SEQ ID NO: 184514 - DNA, 53 bp, Artificial
  Synthetic oligonucleotide
ccgtttacccatcaggttcacacaacgtattgttttagccctgtccgttccga

SEQ ID NO: 184515 - DNA, 60 bp, Artificial
  Synthetic oligonucleotide
agtggtgctgttcagaatagcaccggtaattcgatgtatattagcgcagtagatgggtca

SEQ ID NO: 184516 - DNA, 55 bp, Artificial
  Synthetic oligonucleotide
ctgtgagttcacggtagatacggtcagtacgtcagaatttacgcgttgttcgaac

SEQ ID NO: 184517 - DNA, 55 bp, Artificial
  Synthetic oligonucleotide
ctgtgataagcttctccgcacagttcagtagagcatcatgcgtgagtgacccggt

SEQ ID NO: 184518 - DNA, 55 bp, Artificial
  Synthetic oligonucleotide
ctgtgataagtagtttctccagcgtacggacactacagctcagcgcatgtctgtg

SEQ ID NO: 184519 - DNA, 55 bp, Artificial
  Synthetic oligonucleotide
caccgaaagcaactgtatcaacccgatggacgttcatcttggggcaagatacccc

SEQ ID NO: 184520 - DNA, 55 bp, Artificial
  Synthetic oligonucleotide
ccagaccggaacgctgaatcatggacagggcagaatgttcgttatgtgggagcag

SEQ ID NO: 184521 - DNA, 55 bp, Artificial
  Synthetic oligonucleotide
ccagactctcgccagagatcgcgcatgtcagttgcatgccattcacgagagcggg

SEQ ID NO: 184522 - DNA, 55 bp, Artificial
  Synthetic oligonucleotide
ccgttctggaaacacaacctgctaccggcttctcatccggagtattcaggccgct

SEQ ID NO: 184523 - DNA, 55 bp, Artificial
  Synthetic oligonucleotide
ctgtgcgtccatgacgttactcagatgggtaaaacggagatgcggtgagtgtact

SEQ ID NO: 184524 - DNA, 54 bp, Artificial
  Synthetic oligonucleotide
ccgttccggttgtgaagcagaaggtaacaggtcatttccccgttaccaggcatg

SEQ ID NO: 184525 - DNA, 55 bp, Artificial
  Synthetic oligonucleotide
caccccggaaggcctcgaccggaaattctacgaaatctgcgccctgtccgagctg

SEQ ID NO: 184526 - DNA, 57 bp, Artificial
  Synthetic oligonucleotide
gctgtcgcagcagttctggcgccaacgtaggcaaaggttttgatgttcgggtgggtt

SEQ ID NO: 184527 - DNA, 55 bp, Artificial
  Synthetic oligonucleotide
ctgtggtactctgacggaaaatcagaggccggtacactgaaggctaagggctcgc

SEQ ID NO: 184528 - DNA, 55 bp, Artificial
  Synthetic oligonucleotide
ccagacttaaatccggagaacgtgatgatgactgagttcaaacgcacccaacgcg

SEQ ID NO: 184529 - DNA, 55 bp, Artificial
  Synthetic oligonucleotide
ctgtggtatctatccccattcttgtgttagccacgttttcgttagtgagcaggaa

SEQ ID NO: 184530 - DNA, 55 bp, Artificial
  Synthetic oligonucleotide
ctgttacatctgagcagtgaacacccgtaaagatgcagcgtcagacgtggcaagc

SEQ ID NO: 184531 - DNA, 55 bp, Artificial
  Synthetic oligonucleotide
ccagagacattcgtgcacgtgatatccctcactggccaaaacagcaaggtcatgc

SEQ ID NO: 184532 - DNA, 53 bp, Artificial
  Synthetic oligonucleotide
ccgttcaggcgagaagaccggccttaacccgtttgcgctcgctccaacgaaac

SEQ ID NO: 184533 - DNA, 55 bp, Artificial
  Synthetic oligonucleotide
ctggtgagtctcggcactgtcaaaccgatggttgacggccttgatctaatcgcct

SEQ ID NO: 184534 - DNA, 55 bp, Artificial
  Synthetic oligonucleotide
cctcactggcgataaccagacctccgttcgcccaaacaatattgcatacatgcac

SEQ ID NO: 184535 - DNA, 55 bp, Artificial
  Synthetic oligonucleotide
ctggtgcgtattaatcgtgtgctgcacgttgttgatattcacactcctgacccgg

SEQ ID NO: 184536 - DNA, 55 bp, Artificial
  Synthetic oligonucleotide
ctggtgcgtcaaggcaaagctttatatgtcggcttgtccaactacccagctgcac

SEQ ID NO: 184537 - DNA, 56 bp, Artificial
  Synthetic oligonucleotide
agtggtttagcccggtaacctctatcaccgagtaccagactgacaagaattctgtg

SEQ ID NO: 184538 - DNA, 55 bp, Artificial
  Synthetic oligonucleotide
ctggtggatcaggaatgacattccctgtcatcgatatatggtaggtcggtttgag

SEQ ID NO: 184539 - DNA, 55 bp, Artificial
  Synthetic oligonucleotide
ctggtggcaataaagtgaactactccgcctgtaagtggtatcagtcatctgtagc

SEQ ID NO: 184540 - DNA, 55 bp, Artificial
  Synthetic oligonucleotide
ctggtgtatcgtcttgctaggcgcggaaataactgtcactctcggggaataccgc

SEQ ID NO: 184541 - DNA, 55 bp, Artificial
  Synthetic oligonucleotide
ctggttgaaaccgacgataaatatgatccactattaagtacgctacgtgtgacgg

SEQ ID NO: 184542 - DNA, 55 bp, Artificial
  Synthetic oligonucleotide
ccactgagaacccttcgaggggaggctcactcgaccgtcaaaccggatgcactat

SEQ ID NO: 184543 - DNA, 55 bp, Artificial
  Synthetic oligonucleotide
cctatgaggcggcgagaaaaggggcgtgatacaggcccggtagcgcaaactaccg

SEQ ID NO: 184544 - DNA, 55 bp, Artificial
  Synthetic oligonucleotide
ctggttttctcgtttcactaaccgaaggagatgcgtataaagcttccgatgagcg

SEQ ID NO: 184545 - DNA, 55 bp, Artificial
  Synthetic oligonucleotide
cctatctcatgaccgcactggctctgacgactatgttcatgggttaccgggctgt

SEQ ID NO: 184546 - DNA, 55 bp, Artificial
  Synthetic oligonucleotide
caccggtataggatctggcatgttacgccgaagactgcctgtagcttccgtatgg

SEQ ID NO: 184547 - DNA, 55 bp, Artificial
  Synthetic oligonucleotide
ccactgcgactcctaccctacctcatcacgccagttaaaccttccagtgagacca

SEQ ID NO: 184548 - DNA, 58 bp, Artificial
  Synthetic oligonucleotide
atgcgctgaacccgcatgaatactggatttccacagggttggagggggtgtattcgga

SEQ ID NO: 184549 - DNA, 60 bp, Artificial
  Synthetic oligonucleotide
gctgtagcagctcaatcactggctcgacctgcggtaatacaccgtgccaaagcaaaacgg

SEQ ID NO: 184550 - DNA, 54 bp, Artificial
  Synthetic oligonucleotide
cctatagccttatccgttcgctttccaccacgacgaatatacccctcaacaatt

SEQ ID NO: 184551 - DNA, 55 bp, Artificial
  Synthetic oligonucleotide
ctgtaatcaccggtcatcgtcaagtcattgcgctcaaacaatgtggtgatcggta

SEQ ID NO: 184552 - DNA, 55 bp, Artificial
  Synthetic oligonucleotide
cctagctgttgaacttcttaaccgcggattctctcgactgtgccagcctccgcgc

SEQ ID NO: 184553 - DNA, 54 bp, Artificial
  Synthetic oligonucleotide
caccggaaagtcatgacggaataactctaccggggagatttgcgcggtggaaac

SEQ ID NO: 184554 - DNA, 55 bp, Artificial
  Synthetic oligonucleotide
ctgtacggtgaactgacaggcatgatttctgatgttgacctaggcgagatgaaga

SEQ ID NO: 184555 - DNA, 55 bp, Artificial
  Synthetic oligonucleotide
ctgtagcgccgcgttcaccggcaccggcgtgtggccgtattcgcctttcagaatg

SEQ ID NO: 184556 - DNA, 55 bp, Artificial
  Synthetic oligonucleotide
ctgtagtctttccgcttatggcaatggcgcgacaaaacgcggtcgcaccatcgca

SEQ ID NO: 184557 - DNA, 55 bp, Artificial
  Synthetic oligonucleotide
cctagcaatgggcgtattataaccgacaagagtagtcaactattgagcagatgcc

SEQ ID NO: 184558 - DNA, 55 bp, Artificial
  Synthetic oligonucleotide
ctgtataaaagctgggagtagtgtagtgcggggagtgtgccgggtaaatagaggg

SEQ ID NO: 184559 - DNA, 55 bp, Artificial
  Synthetic oligonucleotide
cctactactgcattaccgcaacggcacgaccggaaatctggccgcttttggccgt

SEQ ID NO: 184560 - DNA, 59 bp, Artificial
  Synthetic oligonucleotide
gctgtacccagaagtaaaagcacaatgtcaagctattggtgttcaggtaagagaaggta

SEQ ID NO: 184561 - DNA, 55 bp, Artificial
  Synthetic oligonucleotide
ccacttacagtggttataggggcattcttcctcacaggggtatatgtcaacaagc

SEQ ID NO: 184562 - DNA, 55 bp, Artificial
  Synthetic oligonucleotide
caccgccccatatcaccacatcgccatgttccaataacaaacgtttgagcggatc

SEQ ID NO: 184563 - DNA, 55 bp, Artificial
  Synthetic oligonucleotide
ccacttctggcacaaagcggacagtgatcaccgttcttacgactactttctgact

SEQ ID NO: 184564 - DNA, 54 bp, Artificial
  Synthetic oligonucleotide
cctaatcctcgtcccaacaaaatatttccccgcccaaatgctattagtgattgg

SEQ ID NO: 184565 - DNA, 55 bp, Artificial
  Synthetic oligonucleotide
ctgtcagagcgtctctgtagcccgccagcctctgagcgctgtcttcaatcgtgtg

SEQ ID NO: 184566 - DNA, 53 bp, Artificial
  Synthetic oligonucleotide
ccgttttagcggtgcacgtaatagggctttatgttaaattaagactggtttga

SEQ ID NO: 184567 - DNA, 55 bp, Artificial
  Synthetic oligonucleotide
ctgtccaattctgagtcgtgtgagcgtctcaccgccacctggcgctattgtcagg

SEQ ID NO: 184568 - DNA, 55 bp, Artificial
  Synthetic oligonucleotide
cttagagcaattgcagcaggactatacgcagcggctgaaagactgggagagcgcc

SEQ ID NO: 184569 - DNA, 55 bp, Artificial
  Synthetic oligonucleotide
cttagctagttgtgcgggaataatttccatacatcaccttccgtctaaaatggct

SEQ ID NO: 184570 - DNA, 55 bp, Artificial
  Synthetic oligonucleotide
cttagggctgtgtccacattacgtgggtaggatcaaccacccatgtcgcacgggg

SEQ ID NO: 184571 - DNA, 60 bp, Artificial
  Synthetic oligonucleotide
gctgtaatccatcgttatgcagatcagagtagcaaggtctattacgcggtgaagtggaag

SEQ ID NO: 184572 - DNA, 55 bp, Artificial
  Synthetic oligonucleotide
ccgtctgaccaggatacgacgcggcatttcaacgctccgtcgatagaaagcaatc

SEQ ID NO: 184573 - DNA, 55 bp, Artificial
  Synthetic oligonucleotide
cttaggtatatgccagatgatggcactcttaatcttggtagtgggatacctgcag

SEQ ID NO: 184574 - DNA, 55 bp, Artificial
  Synthetic oligonucleotide
caccacacgagagtccggccatgagcactatccacttcagaatcgatgacgacgt

SEQ ID NO: 184575 - DNA, 55 bp, Artificial
  Synthetic oligonucleotide
cttatcctctcaaagtcgtattaatggaccgtgaccgattactgatgacgatcag

SEQ ID NO: 184576 - DNA, 55 bp, Artificial
  Synthetic oligonucleotide
cacattcaatgccggagagcagccgtgaatgacgctatccctcgcccgtaggcga

SEQ ID NO: 184577 - DNA, 55 bp, Artificial
  Synthetic oligonucleotide
cacatgtgtggcttcaccgcccacccacgggaagagtagccggggcaggtccggg

SEQ ID NO: 184578 - DNA, 55 bp, Artificial
  Synthetic oligonucleotide
ccgtcgtcgtaacgcgtcgaggagacagcccctctcggctgagtgagcatactca

SEQ ID NO: 184579 - DNA, 55 bp, Artificial
  Synthetic oligonucleotide
ccgtcctaatgaccttggatgactgccagatggaatgtgacgggatgacatgggc

SEQ ID NO: 184580 - DNA, 55 bp, Artificial
  Synthetic oligonucleotide
cttcacagaccaccgccgctcgggcgggaatactgaataaccgaccgcgcaattc

SEQ ID NO: 184581 - DNA, 55 bp, Artificial
  Synthetic oligonucleotide
ccagattgtacgtgcgcgtcactgattttctctcgatgccctaaactccgcttcg

SEQ ID NO: 184582 - DNA, 55 bp, Artificial
  Synthetic oligonucleotide
gctggttatcacggtaaagagataaccactctaaaaccaacgcttgagggtgaac

SEQ ID NO: 184583 - DNA, 55 bp, Artificial
  Synthetic oligonucleotide
ccgtcattaattgtcagcaaccgattaatagaaaggaggcactgcccggataaca

SEQ ID NO: 184584 - DNA, 55 bp, Artificial
  Synthetic oligonucleotide
cttcagccgggacttctcctttatttagagttcaagcggtacaatatgctacgtc

SEQ ID NO: 184585 - DNA, 55 bp, Artificial
  Synthetic oligonucleotide
cttcagtgatgccggcacacacaccgtggggatgagcgtcactcggctggctgaa

SEQ ID NO: 184586 - DNA, 54 bp, Artificial
  Synthetic oligonucleotide
ccgtcatgcttcagttttcctctccggccattccggggagttcctgaaccttcc

SEQ ID NO: 184587 - DNA, 53 bp, Artificial
  Synthetic oligonucleotide
ccgtcatccccgtttcagacgcgaagacatccccgctccggaaattgaccccg

SEQ ID NO: 184588 - DNA, 55 bp, Artificial
  Synthetic oligonucleotide
ccgtcatagccgttagctgccaagctagcttgaacgggagcactgttagcgtcag

SEQ ID NO: 184589 - DNA, 55 bp, Artificial
  Synthetic oligonucleotide
cacataagcccagtctttcaccagcctgcttcggtggtaaccggctccgtcaagg

SEQ ID NO: 184590 - DNA, 55 bp, Artificial
  Synthetic oligonucleotide
ccagcagatcggctattatctgcatcgcgccagtatgcgcggtagcggcgtgttg

SEQ ID NO: 184591 - DNA, 55 bp, Artificial
  Synthetic oligonucleotide
cacagtgaccagttgctttcagaggaatcacgacggagaacgtacacatcaagcg

SEQ ID NO: 184592 - DNA, 55 bp, Artificial
  Synthetic oligonucleotide
ccgtcagtataactgtggacaatccccgacagcgttttaatcgaacagggcaaga

SEQ ID NO: 184593 - DNA, 60 bp, Artificial
  Synthetic oligonucleotide
gctggtacggaacgccaccgacgctactgcgccattaccgtcaattgtttgcatatgaca

SEQ ID NO: 184594 - DNA, 55 bp, Artificial
  Synthetic oligonucleotide
cttccggtaatgcagccgacggtactggcatgctgagctatcccacacctcctgc

SEQ ID NO: 184595 - DNA, 55 bp, Artificial
  Synthetic oligonucleotide
ccgtcagctggctcgctagcagattagttgaataacaaagtggcgccagcaagac

SEQ ID NO: 184596 - DNA, 55 bp, Artificial
  Synthetic oligonucleotide
cacaggacgggcattgcgttgactgcggttgatcgcagcaaataaccaggtacac

SEQ ID NO: 184597 - DNA, 55 bp, Artificial
  Synthetic oligonucleotide
cttcgataccactctgagcagaacaatgtgaaacaggctgcgtaccctttatcac

SEQ ID NO: 184598 - DNA, 55 bp, Artificial
  Synthetic oligonucleotide
ccgtcacttcacataacttcaaaatttacccacatagcgtgcttactctgccggt

SEQ ID NO: 184599 - DNA, 55 bp, Artificial
  Synthetic oligonucleotide
cttcggatgtcattaatgctattcgtgtacaaaacaaccaagttgctgccggtca

SEQ ID NO: 184600 - DNA, 55 bp, Artificial
  Synthetic oligonucleotide
cacagcattctccgaatctctcagaccagctaaggtgatccagtcaagtcctgat

SEQ ID NO: 184601 - DNA, 55 bp, Artificial
  Synthetic oligonucleotide
ccagaggacgccagtctcctttggtatcaccatctgagcgacgtacatcccgttc

SEQ ID NO: 184602 - DNA, 55 bp, Artificial
  Synthetic oligonucleotide
ccgttcaacccgactaccgcgcccatccggcaacatactcttgaggccaatccgg

SEQ ID NO: 184603 - DNA, 54 bp, Artificial
  Synthetic oligonucleotide
ctgttcgctggggaaattggttagaaaagcgcggtgaatacaccgtaacctatc

SEQ ID NO: 184604 - DNA, 59 bp, Artificial
  Synthetic oligonucleotide
gctgggttgaactctggcgggagtgcctgcgggtcagttacaacccgaatgttgatgtc

SEQ ID NO: 184605 - DNA, 55 bp, Artificial
  Synthetic oligonucleotide
ctgttcgtcttaaaataagtggcgagtgtcgaagaacattcttcgctaacgtcag

SEQ ID NO: 184606 - DNA, 55 bp, Artificial
  Synthetic oligonucleotide
ctgttgagagcgcttcacgcgtatggtcaggcaatgagcgcgatcaggaactact

SEQ ID NO: 184607 - DNA, 53 bp, Artificial
  Synthetic oligonucleotide
ctgttgctaccggacgtaccccagtacctatctgtaaaccagaaggtaagcgg

SEQ ID NO: 184608 - DNA, 55 bp, Artificial
  Synthetic oligonucleotide
ctgttgttgggccggtacatactgccctaaactacacagaaacgcaccgtaatta

SEQ ID NO: 184609 - DNA, 55 bp, Artificial
  Synthetic oligonucleotide
ccgttagcataaggtaacgcgcaggttaccaataatttattcgcgacgtgagaca

SEQ ID NO: 184610 - DNA, 55 bp, Artificial
  Synthetic oligonucleotide
ccgttaccatagacttgtactgccattacagagagtcaaacagtcatcatgccga

SEQ ID NO: 184611 - DNA, 55 bp, Artificial
  Synthetic oligonucleotide
ccagataacccagcgaccatgactactgtaacgattcacggcgaaactcctggtg

SEQ ID NO: 184612 - DNA, 55 bp, Artificial
  Synthetic oligonucleotide
ccgttaaaagacagactgccgaataagctggagtccgtatagctatcgcccagcg

SEQ ID NO: 184613 - DNA, 55 bp, Artificial
  Synthetic oligonucleotide
ccagatcaatggtgtaccgggataggggatacgggatacaggaattggcagaagt

SEQ ID NO: 184614 - DNA, 55 bp, Artificial
  Synthetic oligonucleotide
ccgtgtaccggatatgtcagcgtatcgaaaactattgggagagacgttgctgcgc

SEQ ID NO: 184615 - DNA, 60 bp, Artificial
  Synthetic oligonucleotide
gctgggcagataccccagcatatgtaaaccggcggctgcaaatgtcctgccggtgggttg

SEQ ID NO: 184616 - DNA, 55 bp, Artificial
  Synthetic oligonucleotide
ccgtggggcagcgtcggtagcttggtcagtgaggtgtgagagacgtccagactct

SEQ ID NO: 184617 - DNA, 55 bp, Artificial
  Synthetic oligonucleotide
ccgtggcctgtatgtgccctggccgacctatgcaccgggaagctggccatttgtt

SEQ ID NO: 184618 - DNA, 55 bp, Artificial
  Synthetic oligonucleotide
cttaaggcgctggcgcgttcagttgccgatgccgtctatggcttctctatgacac

SEQ ID NO: 184619 - DNA, 55 bp, Artificial
  Synthetic oligonucleotide
cttaatgatgcgaagctccgagcattagctcgcggacacgataaccccaacccgc

SEQ ID NO: 184620 - DNA, 55 bp, Artificial
  Synthetic oligonucleotide
ccgtggagtgtacgatgaatgccgctaaatgccgcatggtattacagccagtgtg

SEQ ID NO: 184621 - DNA, 55 bp, Artificial
  Synthetic oligonucleotide
cttaatggccagactatttatgtattgcgcctgtggcacactcgagaaaacaggt

SEQ ID NO: 184622 - DNA, 55 bp, Artificial
  Synthetic oligonucleotide
ccagatgcgtttctctggccagtcctcggcagtgtcggtcaatgcgcattgcaga

SEQ ID NO: 184623 - DNA, 55 bp, Artificial
  Synthetic oligonucleotide
cttaccgccagcgattaactctgcgctgttgaaagagacgtaataaggcgttggg

SEQ ID NO: 184624 - DNA, 55 bp, Artificial
  Synthetic oligonucleotide
ccgtgataacagatcgtttatcgctggagtttcgctcatgggtaacgcggatgcg

SEQ ID NO: 184625 - DNA, 52 bp, Artificial
  Synthetic oligonucleotide
cttacgacctgaaacagaaaggtaaggatagatttgaacttatcgtttcggt

SEQ ID NO: 184626 - DNA, 60 bp, Artificial
  Synthetic oligonucleotide
agtgttcgatataaccttgagattcgcaccatgacagaaattgtttagtaagcgcaaaca

SEQ ID NO: 184627 - DNA, 55 bp, Artificial
  Synthetic oligonucleotide
ccgtgacagcaaccgtgttatccggtagcgccacatgctcatcaccttacgggcg

SEQ ID NO: 184628 - DNA, 55 bp, Artificial
  Synthetic oligonucleotide
cttacgctgggcgtaatattcatgggtggtaatagttctgtcggtaagggatacc

SEQ ID NO: 184629 - DNA, 55 bp, Artificial
  Synthetic oligonucleotide
ccagatggtccctgacggattcggcgggacagagccgcgtatgacctttaatgcg

SEQ ID NO: 184630 - DNA, 55 bp, Artificial
  Synthetic oligonucleotide
ccagattgcactggactacgacaaaggcgtcgctattcacctgcacgaaaccact

SEQ ID NO: 184631 - DNA, 55 bp, Artificial
  Synthetic oligonucleotide
caccacgtaatcgttcagcatgtttaaatgggacggttagaaaagtggctagtgg

SEQ ID NO: 184632 - DNA, 55 bp, Artificial
  Synthetic oligonucleotide
caccacggcgtaataaccgctttaggtgggtaatcaattggatatgatctcgttg

SEQ ID NO: 184633 - DNA, 55 bp, Artificial
  Synthetic oligonucleotide
cttactgcaggccagcgggatgccacacggacggtactggagaacactgaccgct

SEQ ID NO: 184634 - DNA, 55 bp, Artificial
  Synthetic oligonucleotide
cctgcctccaaccacgttgctaaaagatacgcggttaatgtcgctttgacttacg

SEQ ID NO: 184635 - DNA, 55 bp, Artificial
  Synthetic oligonucleotide
cctgccattcaccgtattcgccatgttgcgtggtaccggagaacatcagtgcacc

SEQ ID NO: 184636 - DNA, 55 bp, Artificial
  Synthetic oligonucleotide
ctgcgttgtaatgtgcacgctctgcctgcaatgaaccgtaagccagtgaacggga

SEQ ID NO: 184637 - DNA, 57 bp, Artificial
  Synthetic oligonucleotide
agtgttctaccaccgcctgagtcatatccagtaggtgcccctattccgtggccgaac

SEQ ID NO: 184638 - DNA, 55 bp, Artificial
  Synthetic oligonucleotide
ctgctactctaggtaatcctccagtaatgtcttttgttcctactgattcttgtgg

SEQ ID NO: 184639 - DNA, 55 bp, Artificial
  Synthetic oligonucleotide
ctgctcatggtgtcaactttccggtagtagtcacggggaagccaccggaacagac

SEQ ID NO: 184640 - DNA, 55 bp, Artificial
  Synthetic oligonucleotide
ctgctccaccagtatccgacacattctggctgtacgaaagagtacactgctgcaa

SEQ ID NO: 184641 - DNA, 55 bp, Artificial
  Synthetic oligonucleotide
ctgctgaaacacgcccctaacgtcatgggaagcgccacactgatggctgagcttt

SEQ ID NO: 184642 - DNA, 55 bp, Artificial
  Synthetic oligonucleotide
ctgctgaaagtactgcgctcgccgcatgtatctgacaaagcgtccggtgcgatgg

SEQ ID NO: 184643 - DNA, 55 bp, Artificial
  Synthetic oligonucleotide
cctgcacgccccggtggattttgggccacctgtcggccgtgaagcgttatagctt

SEQ ID NO: 184644 - DNA, 55 bp, Artificial
  Synthetic oligonucleotide
cctgattttcccggctaatgcatgggaaatatgaccaacgggctgacgcaatgcc

SEQ ID NO: 184645 - DNA, 55 bp, Artificial
  Synthetic oligonucleotide
cctgatttctgtaagtgaataaccgggagtgaaaagtgtgatctcaaagggaggc

SEQ ID NO: 184646 - DNA, 55 bp, Artificial
  Synthetic oligonucleotide
cacgccactaacaaactagcctgattagatttaacgcttcaaccccaggcagggc

SEQ ID NO: 184647 - DNA, 55 bp, Artificial
  Synthetic oligonucleotide
ctgctgggatctcgctggaataaacgtcagattcgttacctttagtatcgaacac

SEQ ID NO: 184648 - DNA, 60 bp, Artificial
  Synthetic oligonucleotide
agtgttgccagacgtgcaccatttcatgtaccagcgttgagagcgtatcggccagagaac

SEQ ID NO: 184649 - DNA, 55 bp, Artificial
  Synthetic oligonucleotide
ctgctgggtagcttagtcctgttccgtaaagccagcccggaaatggtagatcaat

SEQ ID NO: 184650 - DNA, 55 bp, Artificial
  Synthetic oligonucleotide
ctgctggtcacataaacgccgctcatacggctactgacaaaggcgacatcatcca

SEQ ID NO: 184651 - DNA, 55 bp, Artificial
  Synthetic oligonucleotide
cctgatcttgtgagtttacggttgcaacggtcagtacgtcagaatttacgcgttg

SEQ ID NO: 184652 - DNA, 55 bp, Artificial
  Synthetic oligonucleotide
cacgccaaccagtagcaggccgattacctcaacgctaaagcaaatcatcgctacg

SEQ ID NO: 184653 - DNA, 55 bp, Artificial
  Synthetic oligonucleotide
ctgcttgaggcactaagataaggttcggcagagaagtagtaagcaacgcaaacgt

SEQ ID NO: 184654 - DNA, 55 bp, Artificial
  Synthetic oligonucleotide
ctggaacgtaatggctaacgctttgatccaaagacagcttaccgctcacctgcgc

SEQ ID NO: 184655 - DNA, 55 bp, Artificial
  Synthetic oligonucleotide
ctggaagggatacccgcagctaaatcactgtacgaaaagtgtcagtcagcgacct

SEQ ID NO: 184656 - DNA, 55 bp, Artificial
  Synthetic oligonucleotide
ctggaatacatagattagttcgtaaaagtccatttgacgctactggtaaacggca

SEQ ID NO: 184657 - DNA, 55 bp, Artificial
  Synthetic oligonucleotide
cctgaggcggagcttcgcccctttgaaataccttgcttcctttcgaactacgctg

SEQ ID NO: 184658 - DNA, 55 bp, Artificial
  Synthetic oligonucleotide
cacgcagaagataaaggcaccggtaaatggattagtcaagatgctttagaacttc

SEQ ID NO: 184659 - DNA, 60 bp, Artificial
  Synthetic oligonucleotide
gcagggtgttcacgtcaaacagcggccgcgcctccttctggatgaagctgtccccgctga

SEQ ID NO: 184660 - DNA, 56 bp, Artificial
  Synthetic oligonucleotide
agtgttggttccgccagtgcctttaatcacgatagacccatagttaaagattcgtc

SEQ ID NO: 184661 - DNA, 55 bp, Artificial
  Synthetic oligonucleotide
cctgagcagttgacctggatcaatggggcgggagaacgctgcacattgactcttg

SEQ ID NO: 184662 - DNA, 55 bp, Artificial
  Synthetic oligonucleotide
ctggagctattgttcgtcatgttaatggcatgattgaaggagcatatgatccacg

SEQ ID NO: 184663 - DNA, 55 bp, Artificial
  Synthetic oligonucleotide
cctgaattcagccctaagcttgccgatggacgttctgcccgcatcacggtacgcc

SEQ ID NO: 184664 - DNA, 55 bp, Artificial
  Synthetic oligonucleotide
cctgaactcttcactacgcttaatcagcgaacgttcaacgcggaatattcgcagt

SEQ ID NO: 184665 - DNA, 54 bp, Artificial
  Synthetic oligonucleotide
ctggatgacgtgtaggggaaaccgttactgtcgatttatcgcaaccgtaagagg

SEQ ID NO: 184666 - DNA, 55 bp, Artificial
  Synthetic oligonucleotide
cctcttagcttccctggacgcggctagcctgccaaaagaattgagttatccaggc

SEQ ID NO: 184667 - DNA, 55 bp, Artificial
  Synthetic oligonucleotide
cctctgggacttgttactctaaggatcgccacttatcttcaccagcgatgaatcg

SEQ ID NO: 184668 - DNA, 55 bp, Artificial
  Synthetic oligonucleotide
cctctggaaacatagaatcatcccaaaacgtcaaaggcgctacattagaatccac

SEQ ID NO: 184669 - DNA, 55 bp, Artificial
  Synthetic oligonucleotide
cacgacgatacatcagagcgcgtccgctatccggaatactaccgaaccttgccac

SEQ ID NO: 184670 - DNA, 55 bp, Artificial
  Synthetic oligonucleotide
ctgccgaaaacgaaacaggcgcttgcagagagcgtcacgcgcgggatagacgctc

SEQ ID NO: 184671 - DNA, 55 bp, Artificial
  Synthetic oligonucleotide
agttaaggctaaactgaaagaacaggttttggtgactgcgctcctccaagccagt

SEQ ID NO: 184672 - DNA, 55 bp, Artificial
  Synthetic oligonucleotide
cctggagaaaattcgtcagaaacgccctcaggcgcttttgcctgtatgcatggtt

SEQ ID NO: 184673 - DNA, 55 bp, Artificial
  Synthetic oligonucleotide
cctggacgggtcagtaactgatgtcaaggtcgggcaaagtattcctggtactcct

SEQ ID NO: 184674 - DNA, 55 bp, Artificial
  Synthetic oligonucleotide
cctgctggctgcacttgtcgttgccggatacgaagaacggacagcccgtgacctc

SEQ ID NO: 184675 - DNA, 55 bp, Artificial
  Synthetic oligonucleotide
cacgcgtggtcattcctctggcgtacagggccagtatctgactgtccatgcccgt

SEQ ID NO: 184676 - DNA, 55 bp, Artificial
  Synthetic oligonucleotide
cctgctgccaggttaaattcaactcacggttaactgcctcaccaccgggtgagtc

SEQ ID NO: 184677 - DNA, 55 bp, Artificial
  Synthetic oligonucleotide
ctgcctaacaacgtgccttgcgtcctgtgagtctcatacgcggttactacgctgt

SEQ ID NO: 184678 - DNA, 55 bp, Artificial
  Synthetic oligonucleotide
ctgcctgtgccagtaacgtcagggtgtgttcccgtccaggcagttgttctaccga

SEQ ID NO: 184679 - DNA, 55 bp, Artificial
  Synthetic oligonucleotide
cctgctctacggaagaaataatgtccgtttgccgggcaagcaaactgaaagaaag

SEQ ID NO: 184680 - DNA, 55 bp, Artificial
  Synthetic oligonucleotide
cacgcgctaaatcggtgatagtcacggtgctcatgcttactccttaagggcgtta

SEQ ID NO: 184681 - DNA, 55 bp, Artificial
  Synthetic oligonucleotide
ctgcgaacttccctctgactcaggatatgatcaaatctgcgttaaaagctggacg

SEQ ID NO: 184682 - DNA, 56 bp, Artificial
  Synthetic oligonucleotide
gctgggaatcccattcataaattttacgctttttatcaccataccatcgggcccgc

SEQ ID NO: 184683 - DNA, 53 bp, Artificial
  Synthetic oligonucleotide
cacgcgccaactcagtttgatccgggttaaccactaactcccatactacgggg

SEQ ID NO: 184684 - DNA, 55 bp, Artificial
  Synthetic oligonucleotide
cctgctcgtaatagagctgggcgattttgacaatcaaccggatatcatcgctgtt

SEQ ID NO: 184685 - DNA, 55 bp, Artificial
  Synthetic oligonucleotide
ctgcgagggcgtatgataaggactgaatcgatggttaatatgtctagtcctgact

SEQ ID NO: 184686 - DNA, 55 bp, Artificial
  Synthetic oligonucleotide
cacgcgattcacagcccagatactggcccggggaaccatctgtcggtcaaggctg

SEQ ID NO: 184687 - DNA, 55 bp, Artificial
  Synthetic oligonucleotide
ccacgccagacagtttgccgttacgtctggtgagatagggtgaagacaggacgcg

SEQ ID NO: 184688 - DNA, 55 bp, Artificial
  Synthetic oligonucleotide
cctgctacagaagacgagagaatgtgcgttgtagaaactggtatacctgtataac

SEQ ID NO: 184689 - DNA, 55 bp, Artificial
  Synthetic oligonucleotide
ccacgcgtggaacggtaatccgtgttgagttggagacgattcgagatggtgtgta

SEQ ID NO: 184690 - DNA, 55 bp, Artificial
  Synthetic oligonucleotide
ctgcgcccgttggcgcaccaaactgatcattaataacggctagttcttcgcgctc

SEQ ID NO: 184691 - DNA, 55 bp, Artificial
  Synthetic oligonucleotide
ctgcgccggggaaccttcaacggccatggttaaatacatgccataccagggcgtt

SEQ ID NO: 184692 - DNA, 55 bp, Artificial
  Synthetic oligonucleotide
ctgcgcgaccacgatcttaacccgacagtaacgtgacagcggtctgacatgccgc

SEQ ID NO: 184693 - DNA, 60 bp, Artificial
  Synthetic oligonucleotide
gctggctcgatcatatccgtggccggaagatactactcctcccccgagtcgctctccaga

SEQ ID NO: 184694 - DNA, 55 bp, Artificial
  Synthetic oligonucleotide
ccacgggccttatgagtaattaacgctcatcccattcgtctgccgcagtacggcc

SEQ ID NO: 184695 - DNA, 55 bp, Artificial
  Synthetic oligonucleotide
ctgcgctccgcactctatcccattattggcgatcgcatatacggacctgtaggac

SEQ ID NO: 184696 - DNA, 55 bp, Artificial
  Synthetic oligonucleotide
ctgcgctcggcccttccggctggctggtttattgctgataaatctggagccggtg

SEQ ID NO: 184697 - DNA, 55 bp, Artificial
  Synthetic oligonucleotide
ctgcggccagacggtagaaacctcgccaagtaaagatctggtgacgatgccacat

SEQ ID NO: 184698 - DNA, 55 bp, Artificial
  Synthetic oligonucleotide
cacgccttattggcgccagttcctgtgtagcggcagctaccccgatggttcaccg

SEQ ID NO: 184699 - DNA, 55 bp, Artificial
  Synthetic oligonucleotide
cctgcgctgcgaatttctgatcccgattcgccgttaacgctgtagctcatccaat

SEQ ID NO: 184700 - DNA, 55 bp, Artificial
  Synthetic oligonucleotide
ctgcgtctgaattcagcattcgccgtcaaaagcgactacgttaagctgtgtcctg

SEQ ID NO: 184701 - DNA, 55 bp, Artificial
  Synthetic oligonucleotide
cctgcgccaaggtgcatcagccccatgccctgaagcagggcgttcagactttcca

SEQ ID NO: 184702 - DNA, 55 bp, Artificial
  Synthetic oligonucleotide
ctgcgtctgttattgtgatcatggcatctgctcaatagttgactactcttgtcgg

SEQ ID NO: 184703 - DNA, 55 bp, Artificial
  Synthetic oligonucleotide
cctgcgcagacactcgaaagatcctcaccccgaggcgaagtgttacatgcacaac

SEQ ID NO: 184704 - DNA, 59 bp, Artificial
  Synthetic oligonucleotide
agttacatcaataaccgcatgattgttcgccgtgcgtaacgccagtcgcattatttact

SEQ ID NO: 184705 - DNA, 51 bp, Artificial
  Synthetic oligonucleotide
ctgggaagggagcgtaaccgggaaggggcaacggtgcttcagggtaatccg

SEQ ID NO: 184706 - DNA, 52 bp, Artificial
  Synthetic oligonucleotide
ctgggacgaggaaacagaaagctggataacgttaaataacccgccaatcccc

SEQ ID NO: 184707 - DNA, 55 bp, Artificial
  Synthetic oligonucleotide
ctgggagtgttcttcgaaccacatttcatgctaactacaccagactgcggaggta

SEQ ID NO: 184708 - DNA, 55 bp, Artificial
  Synthetic oligonucleotide
ctgggattagtataaaccgtattcaacaacgaggagagggaatgccatattgggg

SEQ ID NO: 184709 - DNA, 55 bp, Artificial
  Synthetic oligonucleotide
cctccatcggagaaactgtccgaggttatgttgacgatgccgaaaatgatgagcg

SEQ ID NO: 184710 - DNA, 55 bp, Artificial
  Synthetic oligonucleotide
ctgggcatgtaagcgagtcagttcttcccgggctgtaccctaaatattgcgtcat

SEQ ID NO: 184711 - DNA, 55 bp, Artificial
  Synthetic oligonucleotide
cctccatcccaccgcccgcgctctttccagtccatcatcggttggctctacgaca

SEQ ID NO: 184712 - DNA, 55 bp, Artificial
  Synthetic oligonucleotide
cctccactaaccttgaaatgttataaccttcattcgcagatacagatataacggg

SEQ ID NO: 184713 - DNA, 55 bp, Artificial
  Synthetic oligonucleotide
ctggggatgtggatagcgcacgttgccgagtcggatcatcaggatccgcaaggct

SEQ ID NO: 184714 - DNA, 55 bp, Artificial
  Synthetic oligonucleotide
ctggggcgcttaattcgcctggtgaaagaataccatctgcttaacccggtgattg

SEQ ID NO: 184715 - DNA, 54 bp, Artificial
  Synthetic oligonucleotide
agtcccgtatattgccttttagttccgggttctctttacgccagtcactggctg

SEQ ID NO: 184716 - DNA, 54 bp, Artificial
  Synthetic oligonucleotide
ctggggtaccaaaacgactcgacttgtaaatgttccggacaaaactgaatcatc

SEQ ID NO: 184717 - DNA, 55 bp, Artificial
  Synthetic oligonucleotide
cacctctgtctgtatgcacgctgactttcccagtcgtttacgccgtcattgcacc

SEQ ID NO: 184718 - DNA, 55 bp, Artificial
  Synthetic oligonucleotide
ctggggttataaagatagtgtaacgccatcaggtagctattcttcggactggcag

SEQ ID NO: 184719 - DNA, 55 bp, Artificial
  Synthetic oligonucleotide
ctgggtaataccatcgaccatagtgtttacacgaccaaatccgctcatgcctcga

SEQ ID NO: 184720 - DNA, 55 bp, Artificial
  Synthetic oligonucleotide
cacctcccagatatgccacattcaggcactgtaccgacaatcagaatcatgagac

SEQ ID NO: 184721 - DNA, 55 bp, Artificial
  Synthetic oligonucleotide
cacctcatgcgacagcttgccgcagagtcaggcgttccgatcctggagcttacgg

SEQ ID NO: 184722 - DNA, 55 bp, Artificial
  Synthetic oligonucleotide
cctcattagttacaacattcacgcgttctgttcctttatccggtgccctgttcca

SEQ ID NO: 184723 - DNA, 55 bp, Artificial
  Synthetic oligonucleotide
cctcattagattgttgttgaagacaggcgtactcatttgccagagcggttaaccc

SEQ ID NO: 184724 - DNA, 55 bp, Artificial
  Synthetic oligonucleotide
ctggtactcattcggactaatgcccttctcgtgtcaagtctttccaggatcagtg

SEQ ID NO: 184725 - DNA, 55 bp, Artificial
  Synthetic oligonucleotide
cctcatggaagcttgcaggaaagtgaatggctcaacccgtgatgtgaggtagctg

SEQ ID NO: 184726 - DNA, 56 bp, Artificial
  Synthetic oligonucleotide
ggaagtgtcgcagttggtgaacgccatcgaaaaacgaaacgaggctgggttagcgc

SEQ ID NO: 184727 - DNA, 55 bp, Artificial
  Synthetic oligonucleotide
ccactccagccagatagttacctaagcgctatgcaatttaatataccgacgttgc

SEQ ID NO: 184728 - DNA, 55 bp, Artificial
  Synthetic oligonucleotide
ctggtattccagctctcaaagccatacctattccgtctccagtattaatataagc

SEQ ID NO: 184729 - DNA, 55 bp, Artificial
  Synthetic oligonucleotide
caccgttctgattggcaatgcaagcctgccgacaattcgttactataccgactgg

SEQ ID NO: 184730 - DNA, 55 bp, Artificial
  Synthetic oligonucleotide
ctggtcgatgcagattagcgtggtggatatggacccggccatcacggaactggtg

SEQ ID NO: 184731 - DNA, 52 bp, Artificial
  Synthetic oligonucleotide
ctggtcgcgggtaaatcgcgttcgactgaacagaaacggtccttttaccgtg

SEQ ID NO: 184732 - DNA, 55 bp, Artificial
  Synthetic oligonucleotide
ctggtcggaattaaattctttgccaacagccagatggatgccttcgtcagcgaca

SEQ ID NO: 184733 - DNA, 55 bp, Artificial
  Synthetic oligonucleotide
cctcaggcttgcgtccagagagagatattgttgacctgtaaagaacgtgtttatc

SEQ ID NO: 184734 - DNA, 55 bp, Artificial
  Synthetic oligonucleotide
ctggtcgggtgaatccccgctatggcggttactgctgccgctctcctggctgtat

SEQ ID NO: 184735 - DNA, 55 bp, Artificial
  Synthetic oligonucleotide
ctggtctgatttgtcataacgacaaccgcacctaaaatccagcgcttctaatcag

SEQ ID NO: 184736 - DNA, 55 bp, Artificial
  Synthetic oligonucleotide
caccgtgtgccaagggtagacgttggcaggtattcatcaaggggtagggacatgc

SEQ ID NO: 184737 - DNA, 60 bp, Artificial
  Synthetic oligonucleotide
ggaagtagtcgtgaacatctgctgcaacgcgctgtagctttccgaccacgcttgttgctg

SEQ ID NO: 184738 - DNA, 52 bp, Artificial
  Synthetic oligonucleotide
ccacgttactttattcgtaccccttataatggggtgttagccagccagaccc

SEQ ID NO: 184739 - DNA, 55 bp, Artificial
  Synthetic oligonucleotide
ctggcaaacctttgtgaacggctgcgtatactggtggtgtacgacgctgggtccg

SEQ ID NO: 184740 - DNA, 55 bp, Artificial
  Synthetic oligonucleotide
cctctgcagtgaaggttcgacgatcgatagcataaagttactgcgatgatagggg

SEQ ID NO: 184741 - DNA, 55 bp, Artificial
  Synthetic oligonucleotide
cctctctggacccggatatgaatgatgaactgtgcgtgacggtagtggcgaccgg

SEQ ID NO: 184742 - DNA, 55 bp, Artificial
  Synthetic oligonucleotide
ctggcataatgcacggcacatcacgaagtgcgcacttatacaatctctactccgt

SEQ ID NO: 184743 - DNA, 55 bp, Artificial
  Synthetic oligonucleotide
cctcgttttctttgcgcctgaacgtggcggcggaagatggcagtgaccggctggt

SEQ ID NO: 184744 - DNA, 55 bp, Artificial
  Synthetic oligonucleotide
ctggccaggcaatgtgacgaatgccatcgctgacatatattgctcgcgtgggacg

SEQ ID NO: 184745 - DNA, 52 bp, Artificial
  Synthetic oligonucleotide
cacgacatagcggggaagtttgcttctttgagaggcgggtttacgtttacgg

SEQ ID NO: 184746 - DNA, 55 bp, Artificial
  Synthetic oligonucleotide
cctcgtgtaggtcagtcgatgaataccggacatttcatcaagtagccagcgcttg

SEQ ID NO: 184747 - DNA, 55 bp, Artificial
  Synthetic oligonucleotide
cctcgtatggtaagcaatgcttctgcgttaggacgcaatggcgtacacgattggt

SEQ ID NO: 184748 - DNA, 58 bp, Artificial
  Synthetic oligonucleotide
ggaaggaaaagattaacggggccttcataaactgcatagaacgtgttgctctatgcag

SEQ ID NO: 184749 - DNA, 55 bp, Artificial
  Synthetic oligonucleotide
cctcgggagtatcaccccgcattgagtcacggattaagtgatagctttcccaggt

SEQ ID NO: 184750 - DNA, 55 bp, Artificial
  Synthetic oligonucleotide
ctggcgagcagcaaacttcacacattgcgatctgaccaattcggagttaggtgac

SEQ ID NO: 184751 - DNA, 55 bp, Artificial
  Synthetic oligonucleotide
cctcgcttgagccgtattccctgtggtgaaacgtgatagtggataccggatgtcc

SEQ ID NO: 184752 - DNA, 55 bp, Artificial
  Synthetic oligonucleotide
ccacgttcgtgcggtcgggttagtttgatgaccagtgcagtccggggaggatcaa

SEQ ID NO: 184753 - DNA, 55 bp, Artificial
  Synthetic oligonucleotide
cacgaagcggattacatcgagcgcaccgtcagcaaggtcatgggtctgcccagcg

SEQ ID NO: 184754 - DNA, 55 bp, Artificial
  Synthetic oligonucleotide
ctggcggcatggtatcaaccgattccggagccggtaaaagagaacgtgccggtca

SEQ ID NO: 184755 - DNA, 55 bp, Artificial
  Synthetic oligonucleotide
ctggcggccagacgaacgatccagacaacgctcagtattcggctcccaataagca

SEQ ID NO: 184756 - DNA, 55 bp, Artificial
  Synthetic oligonucleotide
cctcgcgccgatctgcctgcccgtcttgcaccgaatgcataacgacgagtttggc

SEQ ID NO: 184757 - DNA, 55 bp, Artificial
  Synthetic oligonucleotide
cctcgaggcatacctctctcatccatgtcgccagtcgcggcgaatcacagcgagc

SEQ ID NO: 184758 - DNA, 55 bp, Artificial
  Synthetic oligonucleotide
ccactatagcgagtaaagcaaccgcgctggcgagtactcaacaaccactgtagcg

SEQ ID NO: 184759 - DNA, 60 bp, Artificial
  Synthetic oligonucleotide
ggaagcgcacttatatgtttctctccttcgttgagaaacagtgcgctcctgcggagggct

SEQ ID NO: 184760 - DNA, 55 bp, Artificial
  Synthetic oligonucleotide
ctggcgtaattgcaggtaatgtcactcccaggctacgtatcgtctgaaggcgacc

SEQ ID NO: 184761 - DNA, 55 bp, Artificial
  Synthetic oligonucleotide
cacgaaatttcatttcgaggagtcattatgcttcgtaaggtacgtgaagctaacg

SEQ ID NO: 184762 - DNA, 55 bp, Artificial
  Synthetic oligonucleotide
ctggcgttgtgtgggtattgactaccgattacttgtagtcgagtacgtaattagc

SEQ ID NO: 184763 - DNA, 55 bp, Artificial
  Synthetic oligonucleotide
ctggctaaagtgacgcgagatcgtgaaatgaccgagttagatcgcgattttcctg

SEQ ID NO: 184764 - DNA, 55 bp, Artificial
  Synthetic oligonucleotide
cctcctgacggggaacctgagacggtttcacactctcaagcccggacagtgccct

SEQ ID NO: 184765 - DNA, 55 bp, Artificial
  Synthetic oligonucleotide
cctcctgaacggtgccgacgtatatataaatcgcgtaggaaagctttaaatgcga

SEQ ID NO: 184766 - DNA, 55 bp, Artificial
  Synthetic oligonucleotide
cctcctaacgggaactgaatgagctttatttcaatattcgcgaacaaccgtggga

SEQ ID NO: 184767 - DNA, 55 bp, Artificial
  Synthetic oligonucleotide
ccactattgctatcggcggcttctcaacgcatgacgccagcgtaggctattttga

SEQ ID NO: 184768 - DNA, 55 bp, Artificial
  Synthetic oligonucleotide
ctggctattgaatagcgtcggacaaggcgaatttggcggcgctccattcaagcga

SEQ ID NO: 184769 - DNA, 55 bp, Artificial
  Synthetic oligonucleotide
ctggctggtagacaccacaccgctgtctgttaatgccctcacaggcaacgccgcc

SEQ ID NO: 184770 - DNA, 60 bp, Artificial
  Synthetic oligonucleotide
atctacagtccagacagatgaataccctctgactgtcgatgttacccctccaacctacac

SEQ ID NO: 184771 - DNA, 49 bp, Artificial
  Synthetic oligonucleotide
atctggtcgggacgttatttaccgggtatttaattaaacgcattgggtt

SEQ ID NO: 184772 - DNA, 59 bp, Artificial
  Synthetic oligonucleotide
agtcgagcgacgtactaccgaaaattaaaatgtgatccagatctcgcaaaatgagacca

SEQ ID NO: 184773 - DNA, 55 bp, Artificial
  Synthetic oligonucleotide
ctggcttcgcttgggcctgaattctcgcgcatgatttgtggctattggcgcctga

SEQ ID NO: 184774 - DNA, 55 bp, Artificial
  Synthetic oligonucleotide
caatcatagacgcaatctttgcgggttttacccgacaggcgttacactctcgggt

SEQ ID NO: 184775 - DNA, 55 bp, Artificial
  Synthetic oligonucleotide
ccaggaatactttgcccgaccttgacatcagttactgacccgtcctggagagaaa

SEQ ID NO: 184776 - DNA, 54 bp, Artificial
  Synthetic oligonucleotide
ctttaccgggtaaggccccgttaaacgtgaccaatgacagtaatgcagcagcgg

SEQ ID NO: 184777 - DNA, 55 bp, Artificial
  Synthetic oligonucleotide
ccggtgctaaactgggctggtctcagtatcacgacactggctactacggtcacgg

SEQ ID NO: 184778 - DNA, 55 bp, Artificial
  Synthetic oligonucleotide
ccagcgagactcctgcgcaacgagcgacgtgagcgtatggcgaaagcgcgtttgt

SEQ ID NO: 184779 - DNA, 55 bp, Artificial
  Synthetic oligonucleotide
ccggcgtattcaatgtgcccgtcaccgcagcgggtgtcagctctcgcattgtcag

SEQ ID NO: 184780 - DNA, 55 bp, Artificial
  Synthetic oligonucleotide
gaaagcatggattgtcctgaataagtgctcaaccaatccgtcagacagcgaagcg

SEQ ID NO: 184781 - DNA, 55 bp, Artificial
  Synthetic oligonucleotide
ctttacggccgtggttcaattgttcaacagtatattcctgtgccacaacgcactc

SEQ ID NO: 184782 - DNA, 55 bp, Artificial
  Synthetic oligonucleotide
ccggcgtcatctttatataactcaatgatcttacttggctcatcactgacaaatg

SEQ ID NO: 184783 - DNA, 58 bp, Artificial
  Synthetic oligonucleotide
ggaagattgacggccgttcccatcaaagcgcctcggaggctgatgttttccagtggat

SEQ ID NO: 184784 - DNA, 55 bp, Artificial
  Synthetic oligonucleotide
ctttactaaccaaggactgcgcgttgctcacgtaccgcagcgaggttgtcgattc

SEQ ID NO: 184785 - DNA, 55 bp, Artificial
  Synthetic oligonucleotide
ccagcgccgatttaactatcgcttgtctacagcggtcgagaatggttgggatccc

SEQ ID NO: 184786 - DNA, 55 bp, Artificial
  Synthetic oligonucleotide
ccggctactggatcgttgccctcctgctgttgctgagtttgcagagctactggca

SEQ ID NO: 184787 - DNA, 55 bp, Artificial
  Synthetic oligonucleotide
ccagctctgatattttctacgtgagccgataaattggccgacgcaaattctcgcg

SEQ ID NO: 184788 - DNA, 55 bp, Artificial
  Synthetic oligonucleotide
ccggctcgtagcagtgagccgataagttcagggctagtatagcgtaagctactgt

SEQ ID NO: 184789 - DNA, 55 bp, Artificial
  Synthetic oligonucleotide
ctttcacggctaccatagacaccatttacggcaagtccacagtaacaagcgaggc

SEQ ID NO: 184790 - DNA, 55 bp, Artificial
  Synthetic oligonucleotide
ccggtgccagagaagccttgacccacggttgacgcttcaaccccagcgttactgc

SEQ ID NO: 184791 - DNA, 55 bp, Artificial
  Synthetic oligonucleotide
ctttcatatgggccggacatgatcgtcgaatggtctcctgccacggagcggtttc

SEQ ID NO: 184792 - DNA, 55 bp, Artificial
  Synthetic oligonucleotide
ccggtgcaatgtaggtattgcaagtcagcagtgtggataacgtgtctttcagctg

SEQ ID NO: 184793 - DNA, 55 bp, Artificial
  Synthetic oligonucleotide
gaaacgcgcataatgatcggcagtgaacataggacggtcgagacccggtgacgag

SEQ ID NO: 184794 - DNA, 60 bp, Artificial
  Synthetic oligonucleotide
agtcgccgggggcttcacgctcaaatttattgcatcatccagatcggagagcatgaaaaa

SEQ ID NO: 184795 - DNA, 55 bp, Artificial
  Synthetic oligonucleotide
ccggtgactaataacgccgcattgacgcgcaaggcacgcagtataacagcaaacg

SEQ ID NO: 184796 - DNA, 55 bp, Artificial
  Synthetic oligonucleotide
ctttccggttctgagttggttgctctgaccagagggtggctctcaatatccaacg

SEQ ID NO: 184797 - DNA, 55 bp, Artificial
  Synthetic oligonucleotide
gaaacgactgatatagcatccacactacgttctccccttgagtcgccccaacggg

SEQ ID NO: 184798 - DNA, 55 bp, Artificial
  Synthetic oligonucleotide
cacaaccctccacattatcggccaatccaccgctgcctatagccgttgagcgtct

SEQ ID NO: 184799 - DNA, 55 bp, Artificial
  Synthetic oligonucleotide
cacaaattgatcgttgcccggctcagggataagcgcatgatgtcctcctttggcc

SEQ ID NO: 184800 - DNA, 55 bp, Artificial
  Synthetic oligonucleotide
caataaagtgatagattgcaggataacgaccagtgaggccaagagataattcgcc

SEQ ID NO: 184801 - DNA, 55 bp, Artificial
  Synthetic oligonucleotide
cttggctggttctgctataacgcggctttgaagactcggaacaatcctgttcgca

SEQ ID NO: 184802 - DNA, 54 bp, Artificial
  Synthetic oligonucleotide
ccgtaaaaccatccgggttcccgcagagagagatccggctaccttgagtggaac

SEQ ID NO: 184803 - DNA, 55 bp, Artificial
  Synthetic oligonucleotide
cttggttcaccgaaactattggcgctttgggagctaatgaagctcaccccacaga

SEQ ID NO: 184804 - DNA, 55 bp, Artificial
  Synthetic oligonucleotide
ccggttttctatttgagctactgcctggatacataccgcgaaaacagcacgcctg

SEQ ID NO: 184805 - DNA, 57 bp, Artificial
  Synthetic oligonucleotide
ggaagaaatatccccttcggcagaccaggtggcctgattgcccgtcgaatcaagatt

SEQ ID NO: 184806 - DNA, 55 bp, Artificial
  Synthetic oligonucleotide
ccggttttcacgatatgggctgacagaggacgtcacggcatatccccaacgatcg

SEQ ID NO: 184807 - DNA, 55 bp, Artificial
  Synthetic oligonucleotide
ccggttggatcaggacggggtatagacgcggggaattgagttgttcgcagtcggc

SEQ ID NO: 184808 - DNA, 55 bp, Artificial
  Synthetic oligonucleotide
ccggcgcacgcgtagacaacggtgcttacctgtcagcggaactgactaaataagg

SEQ ID NO: 184809 - DNA, 55 bp, Artificial
  Synthetic oligonucleotide
ccggcggatatcacgtctcaccacctgtccgcagataaacccgacccgttcacgg

SEQ ID NO: 184810 - DNA, 55 bp, Artificial
  Synthetic oligonucleotide
ccggttgccatccacgggttaacaggcgttgccatagcgcagagaacggggtgtc

SEQ ID NO: 184811 - DNA, 55 bp, Artificial
  Synthetic oligonucleotide
caatacatctcctcaatataataaagcgcgtcacacaacgtactgtctgaaccga

SEQ ID NO: 184812 - DNA, 55 bp, Artificial
  Synthetic oligonucleotide
cttgtggtatgaaatatcggctcaggggactggcccgcttgcaaacatctcagag

SEQ ID NO: 184813 - DNA, 55 bp, Artificial
  Synthetic oligonucleotide
ccggttgcataaccgtcgcggccccggcgtgttgcaggagtatcgcgatttgttc

SEQ ID NO: 184814 - DNA, 53 bp, Artificial
  Synthetic oligonucleotide
ccggttaaacgttaatcaggctggtgggctttacatacccttgatcacggtaa

SEQ ID NO: 184815 - DNA, 55 bp, Artificial
  Synthetic oligonucleotide
gaaagtactggaaaatgaagccacgccggttaatgtagaagttacacggtgagcc

SEQ ID NO: 184816 - DNA, 53 bp, Artificial
  Synthetic oligonucleotide
agtcggtaacgactcaggactataaaaacaatgagttaataacgacccgactc

SEQ ID NO: 184817 - DNA, 55 bp, Artificial
  Synthetic oligonucleotide
caataccgccagctcttactgatgagcacgtaccgttatatatacgaaggctgga

SEQ ID NO: 184818 - DNA, 55 bp, Artificial
  Synthetic oligonucleotide
caatagaagtcaaaattagagatcgcgatatgaacgggcttgtacgttcctacgc

SEQ ID NO: 184819 - DNA, 55 bp, Artificial
  Synthetic oligonucleotide
cacaaaggtggcaggtgtaacgatcataaggcgcagtctgtgcggtacgggcacc

SEQ ID NO: 184820 - DNA, 55 bp, Artificial
  Synthetic oligonucleotide
ctttaatgtgcaaaatggccgactttgcctggtacttcgggcgtgccatctggtc

SEQ ID NO: 184821 - DNA, 53 bp, Artificial
  Synthetic oligonucleotide
ctttaattgtaagcggctcatttagaccgtctatcggtattcctccggttcgg

SEQ ID NO: 184822 - DNA, 55 bp, Artificial
  Synthetic oligonucleotide
ccagccgaccttgaatcaccaccacatgttcgataacgccggctttatgcggcgt

SEQ ID NO: 184823 - DNA, 55 bp, Artificial
  Synthetic oligonucleotide
ccgggagaccggatacggcaatatccatccatgagagatagttatcgacgctcac

SEQ ID NO: 184824 - DNA, 55 bp, Artificial
  Synthetic oligonucleotide
ccgggtggggttctgtgtgcaggtgcgtcgtaaggtcggtcagttcggatcagac

SEQ ID NO: 184825 - DNA, 55 bp, Artificial
  Synthetic oligonucleotide
ccgggatcgtccactgcatgtagctgttgccctttagcgtcccgttaacgttaac

SEQ ID NO: 184826 - DNA, 55 bp, Artificial
  Synthetic oligonucleotide
caattaccgccaacggtaacaaactgagttatccaaaatctgagcctcgccatct

SEQ ID NO: 184827 - DNA, 60 bp, Artificial
  Synthetic oligonucleotide
ggaactgcgagataggtgaacttggaacagtccttacagcaatgaatgcggcgtttaagc

SEQ ID NO: 184828 - DNA, 53 bp, Artificial
  Synthetic oligonucleotide
ccgggtctgcgttttgactatttgagcgaatccgggagtaattttagtcccag

SEQ ID NO: 184829 - DNA, 55 bp, Artificial
  Synthetic oligonucleotide
caatgtcaagcacgaatccagagatttacctctaactcattgaaacaaaaggcga

SEQ ID NO: 184830 - DNA, 55 bp, Artificial
  Synthetic oligonucleotide
ccgggcatgtataaatcgccgcaagccagtacatccacaaggcaacgtctgactg

SEQ ID NO: 184831 - DNA, 55 bp, Artificial
  Synthetic oligonucleotide
ccagctatcgttatttgatgaagggaggtcgtatgcaaacagtgacgcgctcatg

SEQ ID NO: 184832 - DNA, 55 bp, Artificial
  Synthetic oligonucleotide
ccgggcatgttacgagggctacggtacatcacatacagcggttttaggccggact

SEQ ID NO: 184833 - DNA, 55 bp, Artificial
  Synthetic oligonucleotide
caatctgcaacaacaggccacattacgtttatggtgaatcctaagtaccgtgagc

SEQ ID NO: 184834 - DNA, 55 bp, Artificial
  Synthetic oligonucleotide
gaaacacaacgtccgaaactggcctgttgccggtgtgaccatatcgtgcaagcac

SEQ ID NO: 184835 - DNA, 55 bp, Artificial
  Synthetic oligonucleotide
caatggggcgggagaacgctgcacattgactcttgaagttattcatagtaggtct

SEQ ID NO: 184836 - DNA, 55 bp, Artificial
  Synthetic oligonucleotide
caatggctcgttggtgcggttctcgctatgcttgcggtaatcataacgcttccgc

SEQ ID NO: 184837 - DNA, 54 bp, Artificial
  Synthetic oligonucleotide
ccgggccaacccagacgactaagtccgcgccctgtaagcgttttacgtctgatg

SEQ ID NO: 184838 - DNA, 56 bp, Artificial
  Synthetic oligonucleotide
ggaacgattagcgtagaggcaaaagaaagtgggaccgaccgcgttatcatcactgt

SEQ ID NO: 184839 - DNA, 52 bp, Artificial
  Synthetic oligonucleotide
ccagctcaacgcggggaaggtgaactttacctacggtcaaccctctcttttc

SEQ ID NO: 184840 - DNA, 55 bp, Artificial
  Synthetic oligonucleotide
ccgggctaacagtgtaatacattgctgtgtcgggtaagccattacgctatccgac

SEQ ID NO: 184841 - DNA, 55 bp, Artificial
  Synthetic oligonucleotide
caatcttcccagctctgtcaggccagtagtgccggatcgtggaccagatacgctg

SEQ ID NO: 184842 - DNA, 54 bp, Artificial
  Synthetic oligonucleotide
cttttccacgagcgtaaaactccagttctgttcgaaccggaatactgaactgcg

SEQ ID NO: 184843 - DNA, 55 bp, Artificial
  Synthetic oligonucleotide
cttttggatacctgtcgtaaagtaccaagcatgcgaggatgattagtacccggat

SEQ ID NO: 184844 - DNA, 55 bp, Artificial
  Synthetic oligonucleotide
ccggggaagtgggaacacagaaaattccggttcatgtacattttgcgatgtgcta

SEQ ID NO: 184845 - DNA, 55 bp, Artificial
  Synthetic oligonucleotide
ccggggtaagcgagtgcagccaacaaagaggcaacttgaaagatgacgggtatac

SEQ ID NO: 184846 - DNA, 54 bp, Artificial
  Synthetic oligonucleotide
ccggggccgaaaggcttgtcttcgcggaacaaggacaaggtgcagccgtcaagg

SEQ ID NO: 184847 - DNA, 54 bp, Artificial
  Synthetic oligonucleotide
gaaacgactaaaccggaaaactctggggtattcgaaatccacagaaatgcacga

SEQ ID NO: 184848 - DNA, 55 bp, Artificial
  Synthetic oligonucleotide
ctttcgcatttcactaccgccctttcgggtggcctcctgctgttctgagggtgca

SEQ ID NO: 184849 - DNA, 58 bp, Artificial
  Synthetic oligonucleotide
agtcgtgttcctacttgattgggatccgtattattaaatccaacatcgcactcaaatg

SEQ ID NO: 184850 - DNA, 55 bp, Artificial
  Synthetic oligonucleotide
gaaacgaattacagccgcccttctgacacccaactgcattatgtgactcagggcg

SEQ ID NO: 184851 - DNA, 55 bp, Artificial
  Synthetic oligonucleotide
ccagcggttcatcgtcagcttttcacgcgggttagataccgacgtcagctgccac

SEQ ID NO: 184852 - DNA, 55 bp, Artificial
  Synthetic oligonucleotide
ccggctgctgcatttacaagtttcctgcgttggtgtccattccagagcgcatctg

SEQ ID NO: 184853 - DNA, 55 bp, Artificial
  Synthetic oligonucleotide
ccggtcataatgcagaccggagatatccttcaggaaccatggcagggacgcccgg

SEQ ID NO: 184854 - DNA, 54 bp, Artificial
  Synthetic oligonucleotide
ccggtagtgttccggttgttcgggctgctctggataaagctactggttactggg

SEQ ID NO: 184855 - DNA, 55 bp, Artificial
  Synthetic oligonucleotide
caattgtagtgatctgcaatactggtgtctcagaaacactgacgacggtagagac

SEQ ID NO: 184856 - DNA, 55 bp, Artificial
  Synthetic oligonucleotide
ctttgaaccggggtgtgccgggttaatggtttctgcgctgacctgtgccatacgc

SEQ ID NO: 184857 - DNA, 55 bp, Artificial
  Synthetic oligonucleotide
gaaacccgcttatcgacgaaaagcacgtgcatgtgccttacaaatgctatattcc

SEQ ID NO: 184858 - DNA, 55 bp, Artificial
  Synthetic oligonucleotide
ccggtacatctggagtcgaccatacacttctgtggtgacttgtatgttcacctga

SEQ ID NO: 184859 - DNA, 54 bp, Artificial
  Synthetic oligonucleotide
ccggtacaacacgcataaactacaacctaacgtgctgattaacggggaatcaag

SEQ ID NO: 184860 - DNA, 60 bp, Artificial
  Synthetic oligonucleotide
agtctcgcggagtgagtcagcttttagcatggcgttacctctgtgatggagtcgctattg

SEQ ID NO: 184861 - DNA, 55 bp, Artificial
  Synthetic oligonucleotide
ccgggaagtcctgtttagcgcccctatagcgacagtgcgcggctattctgcggac

SEQ ID NO: 184862 - DNA, 55 bp, Artificial
  Synthetic oligonucleotide
caattcatacgattacgatatctccgatttgaaaaccccttacagcgatgaactg

SEQ ID NO: 184863 - DNA, 55 bp, Artificial
  Synthetic oligonucleotide
ctttgcgagcgtcgcaggataatcaacggataacgtagcatttactgatagcgtc

SEQ ID NO: 184864 - DNA, 55 bp, Artificial
  Synthetic oligonucleotide
ctttggcacggtgtattaccgcaggtcgagccagtgattgagctgctacagcagg

SEQ ID NO: 184865 - DNA, 55 bp, Artificial
  Synthetic oligonucleotide
caattacgcgcgtttaaaccgaggcatcgcactgtattatggcggccgcttctcg

SEQ ID NO: 184866 - DNA, 55 bp, Artificial
  Synthetic oligonucleotide
ctttggtactaccctgtacgattactgttcgctttcatcagtataacgtttagct

SEQ ID NO: 184867 - DNA, 55 bp, Artificial
  Synthetic oligonucleotide
ccagcgtacagttcttcgacccggctaatcccatgagtatcgtctgggtcggcgc

SEQ ID NO: 184868 - DNA, 55 bp, Artificial
  Synthetic oligonucleotide
ctttgtaagacgggttgctacgcaggaagttagcgtgcgcatccagcattgccgc

SEQ ID NO: 184869 - DNA, 55 bp, Artificial
  Synthetic oligonucleotide
ccgggttcccagcatatccactccggctgaaactgagagacaccgtttaccgtgg

SEQ ID NO: 184870 - DNA, 55 bp, Artificial
  Synthetic oligonucleotide
ccagcgttaacattcattgtcctcgttgtcagtctgcacaggtctaccgccatgg

SEQ ID NO: 184871 - DNA, 53 bp, Artificial
  Synthetic oligonucleotide
ggaacaggaaattccttgtccttccgtacgggaaatcagcggaggtgattccc

SEQ ID NO: 184872 - DNA, 55 bp, Artificial
  Synthetic oligonucleotide
ccagccagcagtaacaaagctggagcagcgcggaaatgatttaaagctggcgacg

SEQ ID NO: 184873 - DNA, 55 bp, Artificial
  Synthetic oligonucleotide
gaacactggaaaataagataccaagccagttgttgaacatcacccttgtgaatcc

SEQ ID NO: 184874 - DNA, 55 bp, Artificial
  Synthetic oligonucleotide
cacactgtaaatcatcagaagctgcacttgctatgctgagtacactctgctacga

SEQ ID NO: 184875 - DNA, 55 bp, Artificial
  Synthetic oligonucleotide
cacactagtctaactctctccgggtatctggccaatcagggtaagcgtgtggcac

SEQ ID NO: 184876 - DNA, 55 bp, Artificial
  Synthetic oligonucleotide
ccggatgtcctgcgcgtcagccgtaaccggaattaatcacacggtatgaattccc

SEQ ID NO: 184877 - DNA, 55 bp, Artificial
  Synthetic oligonucleotide
gaacatgccaagtctgcgggcacgcatagcactgtcctccaagtgtccaatgcgg

SEQ ID NO: 184878 - DNA, 55 bp, Artificial
  Synthetic oligonucleotide
gaacattagcgataacgcaaaatggaccgggatgacagatattattcaggggaca

SEQ ID NO: 184879 - DNA, 55 bp, Artificial
  Synthetic oligonucleotide
ccgtagtagccagtgtcgtgatactgagaccagcccagtttagcaccggtgtacc

SEQ ID NO: 184880 - DNA, 55 bp, Artificial
  Synthetic oligonucleotide
cttcttctatggatggtcaggttaaagcaattagatcggctctagataaatcagg

SEQ ID NO: 184881 - DNA, 55 bp, Artificial
  Synthetic oligonucleotide
ccgtacctggatgagcgtgacgttaagcgcgtcgggtatctggtggtgtctactg

SEQ ID NO: 184882 - DNA, 60 bp, Artificial
  Synthetic oligonucleotide
gcagcgcacaatgcggtggctatcactagtcgttttttcattgcatagtcctcgtaggtt

SEQ ID NO: 184883 - DNA, 58 bp, Artificial
  Synthetic oligonucleotide
agtctgcctacatctactcttccgctcgtttcgcaaacaacatctttgttgacggtaa

SEQ ID NO: 184884 - DNA, 55 bp, Artificial
  Synthetic oligonucleotide
ccgtaccggtagctatggatacggatgttaccggattcagcgccatagtgcaccg

SEQ ID NO: 184885 - DNA, 55 bp, Artificial
  Synthetic oligonucleotide
ccaggttctccatctgtccctgcaccgacggcagcgccagcgctaatgcctcttt

SEQ ID NO: 184886 - DNA, 55 bp, Artificial
  Synthetic oligonucleotide
ccgtaattggcctgcaggtggagtctgagcagttcggcagccagcaggtgacgcg

SEQ ID NO: 184887 - DNA, 55 bp, Artificial
  Synthetic oligonucleotide
ccgtaatgcgcgtaagcagcttggttaattagcccgatagccataaagcccctct

SEQ ID NO: 184888 - DNA, 55 bp, Artificial
  Synthetic oligonucleotide
cttcttcgtcgctgtgggtggagctgcggtcagttgtctggtacacgctcgtaag

SEQ ID NO: 184889 - DNA, 55 bp, Artificial
  Synthetic oligonucleotide
ccagccattccctgatgtcatgcccgaccattcgcgcctgttcaagatggcggga

SEQ ID NO: 184890 - DNA, 55 bp, Artificial
  Synthetic oligonucleotide
gaacactcaatacctccagtatgtacgtgagcagctaatggtagcgacagccgat

SEQ ID NO: 184891 - DNA, 55 bp, Artificial
  Synthetic oligonucleotide
ccgtaacgaaaatggaacgctgacgggagcgaagctgccaggaccggtaaacgca

SEQ ID NO: 184892 - DNA, 55 bp, Artificial
  Synthetic oligonucleotide
cacagattcaaagtgacggaccgttgtacgttcgctgtcgctgagatcgttccag

SEQ ID NO: 184893 - DNA, 55 bp, Artificial
  Synthetic oligonucleotide
gaacagttaacgttattggtccagcatcttatcagatctcttgcaagggcgctgg

SEQ ID NO: 184894 - DNA, 57 bp, Artificial
  Synthetic oligonucleotide
ggaaagcataaccgcctgggaatagcacttcagctcacaacggcccgttttctggga

SEQ ID NO: 184895 - DNA, 55 bp, Artificial
  Synthetic oligonucleotide
gaacagtttacgctctcgcttctcatccactatccacagtacctgttgtggggcg

SEQ ID NO: 184896 - DNA, 55 bp, Artificial
  Synthetic oligonucleotide
ccagggaatcctgaagggcagcgtcatttataccagtgcagacatgataaatgcg

SEQ ID NO: 184897 - DNA, 54 bp, Artificial
  Synthetic oligonucleotide
ccgtatcttgccgcaattgggagaggttaccccgtcgtgagccaaccgatttac

SEQ ID NO: 184898 - DNA, 55 bp, Artificial
  Synthetic oligonucleotide
gaacagggccgacaaatatcgcccctcagactactgacaaagcccgttattaggg

SEQ ID NO: 184899 - DNA, 55 bp, Artificial
  Synthetic oligonucleotide
cttgacgccttagagtccaaaaataaaggcacttcagagaagttgcgaagttttc

SEQ ID NO: 184900 - DNA, 55 bp, Artificial
  Synthetic oligonucleotide
ccggataccgaatccgataattacccttgacgatttaattcccctgacagatgag

SEQ ID NO: 184901 - DNA, 55 bp, Artificial
  Synthetic oligonucleotide
ccggatccgcggtattatcagaatgctggagggtcaggattaccgggtcctcagt

SEQ ID NO: 184902 - DNA, 55 bp, Artificial
  Synthetic oligonucleotide
ccgtatgggtacagcgtaaccagactccatccggggccatgcaaggttgtgcgta

SEQ ID NO: 184903 - DNA, 55 bp, Artificial
  Synthetic oligonucleotide
ccggatgcgctatgggataacggacgcatgacctgtatgcgctggaattctgcta

SEQ ID NO: 184904 - DNA, 55 bp, Artificial
  Synthetic oligonucleotide
ccgtatgtgggcgtggtgtctctgtgtcggttactggttcagctctccattcctg

SEQ ID NO: 184905 - DNA, 58 bp, Artificial
  Synthetic oligonucleotide
ggaaactatgcataacgtatacaatccgttatctaaatatgttttcgggatatcagta

SEQ ID NO: 184906 - DNA, 55 bp, Artificial
  Synthetic oligonucleotide
cacactgtcatcaagcgagctgagcgcgccttcccgccatttcaattcaccgtta

SEQ ID NO: 184907 - DNA, 55 bp, Artificial
  Synthetic oligonucleotide
cacagactgcaccagagcaggtggcactaagcgaagcggcaaattggcagatctg

SEQ ID NO: 184908 - DNA, 55 bp, Artificial
  Synthetic oligonucleotide
caagtccgggcgctacctgatgtcgattttggtgctattcagggtaactttgcgg

SEQ ID NO: 184909 - DNA, 55 bp, Artificial
  Synthetic oligonucleotide
ccgtataaagagtagtgcccagtttcaggcgtcctgatgtgctttcactatccag

SEQ ID NO: 184910 - DNA, 55 bp, Artificial
  Synthetic oligonucleotide
cttgaaatgagcgggccatgcatctcttcggatcttgcagagagaattcagtggc

SEQ ID NO: 184911 - DNA, 55 bp, Artificial
  Synthetic oligonucleotide
caaggtcgctcatctaaccgctatccctctactgtatcccggattcaaaggtcgg

SEQ ID NO: 184912 - DNA, 55 bp, Artificial
  Synthetic oligonucleotide
gaacatatgtggtttcaacgtaaggcattattaaacggtcgtaatggcaacctat

SEQ ID NO: 184913 - DNA, 55 bp, Artificial
  Synthetic oligonucleotide
caaggtcgcgtgttagtagttggtttcacagaccgtatcggttcacaaaactaca

SEQ ID NO: 184914 - DNA, 55 bp, Artificial
  Synthetic oligonucleotide
cttgatgtaccgcttagcgcagccagtttgtcaattttgcgaagaacacggcgtc

SEQ ID NO: 184915 - DNA, 55 bp, Artificial
  Synthetic oligonucleotide
gaaccataggtgtagggcatggagcaagaaatttgcgcggtactgtatgagccgt

SEQ ID NO: 184916 - DNA, 60 bp, Artificial
  Synthetic oligonucleotide
agtgacatggtacggctgggagggggacaggctgacgaccatccagacggcgcagagccg

SEQ ID NO: 184917 - DNA, 55 bp, Artificial
  Synthetic oligonucleotide
ccaggatgaactggtgaccgcgtttcgtgatatcgccccacaggctcccacccat

SEQ ID NO: 184918 - DNA, 52 bp, Artificial
  Synthetic oligonucleotide
ccgtcaatacgataggtgttaatacacagtttaaacctccctaagaccgtaa

SEQ ID NO: 184919 - DNA, 55 bp, Artificial
  Synthetic oligonucleotide
cttggcagtccgtataattctccacccgtcgcgcaatgcccgtcatatggcgtca

SEQ ID NO: 184920 - DNA, 54 bp, Artificial
  Synthetic oligonucleotide
cacaacggcagggttcaggttgcttactacacccacggcgtaaccgaggacctg

SEQ ID NO: 184921 - DNA, 55 bp, Artificial
  Synthetic oligonucleotide
ccggccggagataaaatccgtttatatcattgcgggtgtggcggatggtgcggat

SEQ ID NO: 184922 - DNA, 55 bp, Artificial
  Synthetic oligonucleotide
cttgcgggtgttcatcacataactgtacagggcatcattcagcggagtcattaac

SEQ ID NO: 184923 - DNA, 55 bp, Artificial
  Synthetic oligonucleotide
ccagcccaccttgtccgcgtttacgtcagaaattaatgcgattagcgcaaccatt

SEQ ID NO: 184924 - DNA, 55 bp, Artificial
  Synthetic oligonucleotide
gaaatggttacagcatttacttctgtacatgatgttgcacgtttcggttctgaag

SEQ ID NO: 184925 - DNA, 55 bp, Artificial
  Synthetic oligonucleotide
cttcggtcgcaaaacgaatggtctgggctgctgtagcggaaaggctaaagcctgc

SEQ ID NO: 184926 - DNA, 55 bp, Artificial
  Synthetic oligonucleotide
gaaccactaacttttaccatgtcatagtaacactctaaccattgagttacgaacg

SEQ ID NO: 184927 - DNA, 60 bp, Artificial
  Synthetic oligonucleotide
agtgaccatgcttaaatgagctgctggcgatattccgcttcctcgcacagacagagctgt

SEQ ID NO: 184928 - DNA, 55 bp, Artificial
  Synthetic oligonucleotide
ccgtaaccatagttagcctgagtggtatcccaggtacggtcgttcaccaggtcag

SEQ ID NO: 184929 - DNA, 55 bp, Artificial
  Synthetic oligonucleotide
cttgcgcaaggatcaccggtattcgtaacgctaataactgacgcgcttcactggt

SEQ ID NO: 184930 - DNA, 55 bp, Artificial
  Synthetic oligonucleotide
cttgcgaaatgcgaattatggatagcgggtaggatgttctgtgacgttatagaaa

SEQ ID NO: 184931 - DNA, 55 bp, Artificial
  Synthetic oligonucleotide
ccgtatttcacaacgtggccatcccactgatattgcaggggcggagtaaagattt

SEQ ID NO: 184932 - DNA, 55 bp, Artificial
  Synthetic oligonucleotide
ccaggcgaaccagaataccatccagtccccacaggatcagtgacattactgcggt

SEQ ID NO: 184933 - DNA, 55 bp, Artificial
  Synthetic oligonucleotide
ccaggcattacggcgctcacgtaccagtgctgttttgcgcacaatacggttgccg

SEQ ID NO: 184934 - DNA, 50 bp, Artificial
  Synthetic oligonucleotide
cacacgaactccgaccagacatttaccctaacccaaccgacggtttaccc

SEQ ID NO: 184935 - DNA, 55 bp, Artificial
  Synthetic oligonucleotide
cacacgatatcggtttggtggacgataggtaccagtcttaggcatcattcgatgg

SEQ ID NO: 184936 - DNA, 53 bp, Artificial
  Synthetic oligonucleotide
aaagccccgccgtcatccccgtttcagacgcgaagacatccccgctccggaaa

SEQ ID NO: 184937 - DNA, 54 bp, Artificial
  Synthetic oligonucleotide
ttttgtttggcgtgcggccgttcattggcgctctctccgcaagaattcgttaaa

SEQ ID NO: 184938 - DNA, 60 bp, Artificial
  Synthetic oligonucleotide
ggaaaatcccatgcgcattttgcccgtcgttgctgcagttacggctgcattcctggttgt

SEQ ID NO: 184939 - DNA, 54 bp, Artificial
  Synthetic oligonucleotide
cggcgaagctaaagcgggaagctgcaccctcaaacccaacggcatgcaaggttg

SEQ ID NO: 184940 - DNA, 54 bp, Artificial
  Synthetic oligonucleotide
aatcaacggggccactgcccgaaccggcaccccgtgagtgaattttaacgatca

SEQ ID NO: 184941 - DNA, 54 bp, Artificial
  Synthetic oligonucleotide
tgcagtaggagcacccagtatgaaaggatcatgcgctgtttagacaccggaacg

SEQ ID NO: 184942 - DNA, 54 bp, Artificial
  Synthetic oligonucleotide
tccgtacctatgtggacgaaccgatagtgggctggcactggtacaacgaacctc

SEQ ID NO: 184943 - DNA, 54 bp, Artificial
  Synthetic oligonucleotide
tacatatcgagcgggtaagaaaagaagggcgttaagcccgggcctgtgggccat

SEQ ID NO: 184944 - DNA, 54 bp, Artificial
  Synthetic oligonucleotide
tcgcttttcccagtccaaaacgagagtaagtatctactaacgctgaggagggca

SEQ ID NO: 184945 - DNA, 54 bp, Artificial
  Synthetic oligonucleotide
taaaagatatcactggtagcttcaatagcggactctggtttgtcgcttctctgt

SEQ ID NO: 184946 - DNA, 54 bp, Artificial
  Synthetic oligonucleotide
ccgggctcatccaaccggtgaatagctgaggtttccccgacagcgttaccatcg

SEQ ID NO: 184947 - DNA, 54 bp, Artificial
  Synthetic oligonucleotide
ccccggcgtgtagcccatgtccaccgccaggttctccatctgtccctgcaccga

SEQ ID NO: 184948 - DNA, 54 bp, Artificial
  Synthetic oligonucleotide
acccgcagcgttatagcgtttaaacccgctacgagcactctgctcgctgttgac

SEQ ID NO: 184949 - DNA, 57 bp, Artificial
  Synthetic oligonucleotide
gcttttgcgtgtctttggttcctttgagcaacctaagggtgaacatctttctggaca

SEQ ID NO: 184950 - DNA, 54 bp, Artificial
  Synthetic oligonucleotide
tcgcttttaacaattcgagttatttaggcaatagacctgaatgacataagggtc

SEQ ID NO: 184951 - DNA, 54 bp, Artificial
  Synthetic oligonucleotide
tcgctcacaacaataatacggctgacattggtctctttggtccagcgggtagcg

SEQ ID NO: 184952 - DNA, 54 bp, Artificial
  Synthetic oligonucleotide
cattctcacccctgcgaatgcaccgtcctggtgtagtgaccgttccgttctctg

SEQ ID NO: 184953 - DNA, 54 bp, Artificial
  Synthetic oligonucleotide
accaaagactcgtcgaaagcgcaaagcgcgattgagaactgggttgatgcctat

SEQ ID NO: 184954 - DNA, 54 bp, Artificial
  Synthetic oligonucleotide
tttttctccttcagctttaagtattgcagcttgtcttattccttctgcttctaa

SEQ ID NO: 184955 - DNA, 54 bp, Artificial
  Synthetic oligonucleotide
tcaggacaaccctgggtgtgtctatgattttacctatcaagggcgggttctgtg

SEQ ID NO: 184956 - DNA, 54 bp, Artificial
  Synthetic oligonucleotide
taccattggcgtaattctgacggtttcacagaagttggctaacacatgcgcata

SEQ ID NO: 184957 - DNA, 53 bp, Artificial
  Synthetic oligonucleotide
gtcctacagggagcaaaccgccagcggcggaaaaggaccggaatcgctaaccg

SEQ ID NO: 184958 - DNA, 51 bp, Artificial
  Synthetic oligonucleotide
cctggggtgtaaccaggcaaactgcccagcggtattttggccccgggtaaa

SEQ ID NO: 184959 - DNA, 54 bp, Artificial
  Synthetic oligonucleotide
tgccggatgcacacacctcatagtgctgcatccccacacatcacagtgccggaa

SEQ ID NO: 184960 - DNA, 60 bp, Artificial
  Synthetic oligonucleotide
gctttgataatggtcgctgccgcatcatgctcatcagtctacgccgtgacattaccgacc

SEQ ID NO: 184961 - DNA, 54 bp, Artificial
  Synthetic oligonucleotide
tttacgtttttaatatcagatgtatattctgtacttattataacttccataagc

SEQ ID NO: 184962 - DNA, 54 bp, Artificial
  Synthetic oligonucleotide
cggcctttatcgatcgcggtaaccgtctggttatggccgaaggcgccagtgcgc

SEQ ID NO: 184963 - DNA, 54 bp, Artificial
  Synthetic oligonucleotide
aatcacaaggagagggatgtatcagcagtgactgaaggttgacccgctgaagtg

SEQ ID NO: 184964 - DNA, 54 bp, Artificial
  Synthetic oligonucleotide
taccacgttcagcgatgaagcgccattgtgctcccggcaggttaatgcagtagc

SEQ ID NO: 184965 - DNA, 54 bp, Artificial
  Synthetic oligonucleotide
ttgtgtctttcatcaggtacgcgcccaagtgagtgcgctcctgcattatcacgt

SEQ ID NO: 184966 - DNA, 54 bp, Artificial
  Synthetic oligonucleotide
taagcgtgctgcggttagtcaccgcagcctgatcgcttaacgcgttaaggcttt

SEQ ID NO: 184967 - DNA, 54 bp, Artificial
  Synthetic oligonucleotide
aaaccgttaccgactcgcatccggcaattgtgggttacgatggcatcgcgatag

SEQ ID NO: 184968 - DNA, 52 bp, Artificial
  Synthetic oligonucleotide
taaaaaatccaaagaagattcgcctaagtttttcaatcttacagttatcttt

SEQ ID NO: 184969 - DNA, 54 bp, Artificial
  Synthetic oligonucleotide
cgcttgtttctacgaccggatatggcgacacataggagcgataagtctggctat

SEQ ID NO: 184970 - DNA, 54 bp, Artificial
  Synthetic oligonucleotide
aaacctctggtaattcacacgtcgcgcgtatgcattctcgctcttccggtcagc

SEQ ID NO: 184971 - DNA, 56 bp, Artificial
  Synthetic oligonucleotide
gctttcttgggatagacctagctcgcctcgcattttttttacattctttgcaaggg

SEQ ID NO: 184972 - DNA, 54 bp, Artificial
  Synthetic oligonucleotide
cattcatccttcggctggcgaccatgatttgactgcgaccacagctctgtcggg

SEQ ID NO: 184973 - DNA, 54 bp, Artificial
  Synthetic oligonucleotide
taaaacccattgcgtaagcaacaatattacgtgagtgagtcctaacgacagtta

SEQ ID NO: 184974 - DNA, 54 bp, Artificial
  Synthetic oligonucleotide
cattcatattgatggttacgcccgtcatttttacctcagtttccgctgttaatt

SEQ ID NO: 184975 - DNA, 54 bp, Artificial
  Synthetic oligonucleotide
tttcgaacgctggctcacaatctcgccacgccacctgaacacatcgctgacttt

SEQ ID NO: 184976 - DNA, 54 bp, Artificial
  Synthetic oligonucleotide
aagccgttttctgagtggggcgaagatgaaatcaggcgttttaatctgatagac

SEQ ID NO: 184977 - DNA, 54 bp, Artificial
  Synthetic oligonucleotide
tttcgcagtttgcaggccggacgcgtgattcgtcacgatcagccggagtttgtt

SEQ ID NO: 184978 - DNA, 54 bp, Artificial
  Synthetic oligonucleotide
tttcgccgcaacaactcttccccggcgcacaggctattatcgacgggttaacca

SEQ ID NO: 184979 - DNA, 54 bp, Artificial
  Synthetic oligonucleotide
tttcgggtgaaaccttaccttaccgggttcaccaatttgcgattgcgcctgcta

SEQ ID NO: 184980 - DNA, 51 bp, Artificial
  Synthetic oligonucleotide
ttttacaggggtattaaggggttgaaagactcttaccttgagggccatacg

SEQ ID NO: 184981 - DNA, 54 bp, Artificial
  Synthetic oligonucleotide
tttctggggccgagataatcaccaagcggtgataatacaacgttagcgatacca

SEQ ID NO: 184982 - DNA, 60 bp, Artificial
  Synthetic oligonucleotide
gctttagtggagcgcagataccaaaactgtcctttcagtgtagccgcagtcaggcatcca

SEQ ID NO: 184983 - DNA, 54 bp, Artificial
  Synthetic oligonucleotide
cggaggctgatcctgttcccatcattgcatatcccatttctgacataactgttc

SEQ ID NO: 184984 - DNA, 54 bp, Artificial
  Synthetic oligonucleotide
aaaagtgattgacgccccagagctgtagcagtaagatgcgccccgattcggcga

SEQ ID NO: 184985 - DNA, 54 bp, Artificial
  Synthetic oligonucleotide
acccaccaaatttctctgagatgtttgcaagcgggccagtcccctgagccgata

SEQ ID NO: 184986 - DNA, 54 bp, Artificial
  Synthetic oligonucleotide
aagcctttatccagcggccacacgctttgataaccgtcgtaaatctgcggcggc

SEQ ID NO: 184987 - DNA, 54 bp, Artificial
  Synthetic oligonucleotide
ccccagagtgttcatgacccggtgaatgtttacctgtcgccaggcggggctgtg

SEQ ID NO: 184988 - DNA, 54 bp, Artificial
  Synthetic oligonucleotide
ccacgtccacagacggatgccactgaacacaccgctaacctggctgatgccgcc

SEQ ID NO: 184989 - DNA, 54 bp, Artificial
  Synthetic oligonucleotide
tcgcaatagacggttcccagcccagacagcgcctggcattgtcgatactgggtt

SEQ ID NO: 184990 - DNA, 54 bp, Artificial
  Synthetic oligonucleotide
aagtagtcgaccattctaacgtcctaccattccaaggatcaccagaacaatccc

SEQ ID NO: 184991 - DNA, 54 bp, Artificial
  Synthetic oligonucleotide
tggctgtcccctagctgacctgagacggagcaagcattccgagccacgctacgg

SEQ ID NO: 184992 - DNA, 54 bp, Artificial
  Synthetic oligonucleotide
tggctaacatcaagctcaaactgtcaactgaatcaacgtatgacctgagaacgc

SEQ ID NO: 184993 - DNA, 59 bp, Artificial
  Synthetic oligonucleotide
atcttaacgccattaatcaaacagttaactgaagccgcgctgtctgcggaactcgactc

SEQ ID NO: 184994 - DNA, 59 bp, Artificial
  Synthetic oligonucleotide
gcttgtaagactttcaaattgcggagttaaaattataatcacaacgcatagtgattata

SEQ ID NO: 184995 - DNA, 54 bp, Artificial
  Synthetic oligonucleotide
ccggattttgtgcacgccgttaagcccgaaccacattgggctattccgcaaggg

SEQ ID NO: 184996 - DNA, 54 bp, Artificial
  Synthetic oligonucleotide
aaaagaagatcccgactcttctaaaggccgcgtcagtactgggcctggagaatg

SEQ ID NO: 184997 - DNA, 54 bp, Artificial
  Synthetic oligonucleotide
acgtcagcaaacagttcaacgctgatgctctgacctacggtgtattcttcgcct

SEQ ID NO: 184998 - DNA, 54 bp, Artificial
  Synthetic oligonucleotide
tgcggcgaagacgcatacgtcacgcaggcgcgggttcttccactgacgcgcccc

SEQ ID NO: 184999 - DNA, 54 bp, Artificial
  Synthetic oligonucleotide
ccggcgcacgctattgtaaggcgcgaggctaaggctcagaggatgaaaacagcg

SEQ ID NO: 185000 - DNA, 54 bp, Artificial
  Synthetic oligonucleotide
tcctgatactttcgtaccacataacctgacgggagaatgctcgccatacggcac

SEQ ID NO: 185001 - DNA, 54 bp, Artificial
  Synthetic oligonucleotide
acggcgtactgactctggcgtcgcgctccctgcgcggcattatgacgccgcgag

SEQ ID NO: 185002 - DNA, 54 bp, Artificial
  Synthetic oligonucleotide
acggcgacggctgattgctgaattggctcccgacatgcttctcccgagcaaaaa

SEQ ID NO: 185003 - DNA, 54 bp, Artificial
  Synthetic oligonucleotide
taacgataccactcgtctggggagagattattaatgcgtaagtctttgttagtg

SEQ ID NO: 185004 - DNA, 54 bp, Artificial
  Synthetic oligonucleotide
tgcgtccgttggagataatcccggcgcctgtaccacgatgaacgcgcaccagaa

SEQ ID NO: 185005 - DNA, 56 bp, Artificial
  Synthetic oligonucleotide
cgcgctactgccgtctggcgcggtcaaatggaggccgtcgtgtaagggagaggggg

SEQ ID NO: 185006 - DNA, 54 bp, Artificial
  Synthetic oligonucleotide
tttgccggtatatcccacaaacttggccataacgtcggtcatatgggatatctg

SEQ ID NO: 185007 - DNA, 54 bp, Artificial
  Synthetic oligonucleotide
aaaagagttatttaccgagcatagtagatgcaactgctggtttaggacgcgatg

SEQ ID NO: 185008 - DNA, 54 bp, Artificial
  Synthetic oligonucleotide
taaaccacccgcacgggtgccttagctctcctgctcgctatgattgacggcgat

SEQ ID NO: 185009 - DNA, 54 bp, Artificial
  Synthetic oligonucleotide
ccggctgtgggatgagtcagtgccgcttccctgcgacagaaaataacggactgc

SEQ ID NO: 185010 - DNA, 54 bp, Artificial
  Synthetic oligonucleotide
ccccgcctgctagcgagaagcaacgtccggctttcatccgttatgcgatgcagt

SEQ ID NO: 185011 - DNA, 54 bp, Artificial
  Synthetic oligonucleotide
aagccagagcaagggtgatgaacctgattcaggcagagaagcgggcagaagcaa

SEQ ID NO: 185012 - DNA, 54 bp, Artificial
  Synthetic oligonucleotide
tcgcgcggattttaatgatcggtgttaatcgatgtcaaatgtttcaccggataa

SEQ ID NO: 185013 - DNA, 54 bp, Artificial
  Synthetic oligonucleotide
ttttccgcaactgtatccagtgtaatcgttgtcaggttccagcatcggacgcga

SEQ ID NO: 185014 - DNA, 54 bp, Artificial
  Synthetic oligonucleotide
ccttccggttacgactggtacacacaccactatggcaccaaatggccgcgcggg

SEQ ID NO: 185015 - DNA, 54 bp, Artificial
  Synthetic oligonucleotide
catacgacctgtattatctgccctaggagctggaatagccatgactggaagtat

SEQ ID NO: 185016 - DNA, 60 bp, Artificial
  Synthetic oligonucleotide
catccttacctgcatgttgcacttacgcccggtagccgcattttttcccttgtcacatga

SEQ ID NO: 185017 - DNA, 54 bp, Artificial
  Synthetic oligonucleotide
tcatacgcgacccgaccatcaacataggtgcggtatatcgcgcgatcgtcaccc

SEQ ID NO: 185018 - DNA, 54 bp, Artificial
  Synthetic oligonucleotide
tttcagccagcggtcaacaaatttcacactatgacgtttctaatagatggtgca

SEQ ID NO: 185019 - DNA, 54 bp, Artificial
  Synthetic oligonucleotide
agcagcgattacgtgatggcgactaaggaaggcaacatgatcatgacccagggc

SEQ ID NO: 185020 - DNA, 54 bp, Artificial
  Synthetic oligonucleotide
tccgtgttttcgttaaacgcgatgtcgaagaatgcgttctgatccagtacgtga

SEQ ID NO: 185021 - DNA, 54 bp, Artificial
  Synthetic oligonucleotide
acatggtgacgttgggttcaaccatttcccgccagctcgcggcattaagccacg

SEQ ID NO: 185022 - DNA, 54 bp, Artificial
  Synthetic oligonucleotide
gtcatgccgcagtttaaagtcgacagtaagctcgtcttcgaacgcgatatggcg

SEQ ID NO: 185023 - DNA, 54 bp, Artificial
  Synthetic oligonucleotide
ccggctgaacgttgtataaacagtgacagcgtggtgacggttgagagggggacg

SEQ ID NO: 185024 - DNA, 54 bp, Artificial
  Synthetic oligonucleotide
tggattatcactgattgttcttgggttaatcatgcttgcatggatgctaacaca

SEQ ID NO: 185025 - DNA, 54 bp, Artificial
  Synthetic oligonucleotide
cctgtattatcgacgtaaaactggtcagtaagagtccttaactgtatgtagtcc

SEQ ID NO: 185026 - DNA, 54 bp, Artificial
  Synthetic oligonucleotide
gtatggtgacttcttgcatccccaccgggtaaccgtatggtaaaattgacccga

SEQ ID NO: 185027 - DNA, 58 bp, Artificial
  Synthetic oligonucleotide
cgcgccggattattgcgggaagacatgcgtcttaaaactcctgtggtgcgggacacgc

SEQ ID NO: 185028 - DNA, 54 bp, Artificial
  Synthetic oligonucleotide
cgcaaccaagtggagccgccgaaagtgcttaacgaaagtgaattggattgatga

SEQ ID NO: 185029 - DNA, 54 bp, Artificial
  Synthetic oligonucleotide
tggccacgcatacgatctttacttggacccacacaaatattgaggagacaatat

SEQ ID NO: 185030 - DNA, 54 bp, Artificial
  Synthetic oligonucleotide
gtcatcccagatgcggtggtaatctctggtacactgttcttctaccgataaacg

SEQ ID NO: 185031 - DNA, 54 bp, Artificial
  Synthetic oligonucleotide
cccaaatcccggcagagttataaacttgaccaggattttcccctcgctcaacaa

SEQ ID NO: 185032 - DNA, 54 bp, Artificial
  Synthetic oligonucleotide
gtatgtgcaatggaggtggtcctgcttgtctacgtttaaaagtaatgttgaatc

SEQ ID NO: 185033 - DNA, 54 bp, Artificial
  Synthetic oligonucleotide
tacagatgagctatgagtacgcgttttagggtttctcaacctgagacggcggaa

SEQ ID NO: 185034 - DNA, 54 bp, Artificial
  Synthetic oligonucleotide
acgtgccaatatcagtggacgcaatgagatggccgtgttgggttctgcgctcaa

SEQ ID NO: 185035 - DNA, 54 bp, Artificial
  Synthetic oligonucleotide
ttttattggcacccgcctctctggtaaacgttacgggcctcagagcggggatat

SEQ ID NO: 185036 - DNA, 54 bp, Artificial
  Synthetic oligonucleotide
taaagtcctggcgaccctcattatcagggataatgaccaacgttttttcacgat

SEQ ID NO: 185037 - DNA, 54 bp, Artificial
  Synthetic oligonucleotide
gtcagtcttagcgtcgggtttgcaggtacacgggaaggattatcaaccagtaac

SEQ ID NO: 185038 - DNA, 58 bp, Artificial
  Synthetic oligonucleotide
catcgataaacattacgggatggggcgaaactgccacctgttcgaaatgacgcgcaaa

SEQ ID NO: 185039 - DNA, 54 bp, Artificial
  Synthetic oligonucleotide
ttttagacaattgaaggagatcagtgaaggtatgcaagcgacctacttcggtcg

SEQ ID NO: 185040 - DNA, 54 bp, Artificial
  Synthetic oligonucleotide
catggcgcggaccgttaggtaacaacttctgactaccgtgttgattttcggagg

SEQ ID NO: 185041 - DNA, 54 bp, Artificial
  Synthetic oligonucleotide
agatgctgtgttgttaccgacattatcgggtaaaccgcgcacgaatgacgcgga

SEQ ID NO: 185042 - DNA, 54 bp, Artificial
  Synthetic oligonucleotide
tcgccactcagcgtgcagcgaagcgtctcttttccgacggtaagccgtgcgcca

SEQ ID NO: 185043 - DNA, 54 bp, Artificial
  Synthetic oligonucleotide
cgaggtggcagtgctcaccttgatccctttgttcgctgaatttcggtaagatgt

SEQ ID NO: 185044 - DNA, 54 bp, Artificial
  Synthetic oligonucleotide
tatggccatcatttacgatcgctcctgtgagttcgtcaaaagctattacgaccc

SEQ ID NO: 185045 - DNA, 54 bp, Artificial
  Synthetic oligonucleotide
gtgcttgaaacgcgccttgtgacgacgcaacccggcatgactacctgccatctg

SEQ ID NO: 185046 - DNA, 54 bp, Artificial
  Synthetic oligonucleotide
ccctgacccgaatggcatatttcagcgaacatgacctggctcttattaatgctc

SEQ ID NO: 185047 - DNA, 54 bp, Artificial
  Synthetic oligonucleotide
tatgctgttcgatgtggtacaaaagaaccctgccaattactttggattccatta

SEQ ID NO: 185048 - DNA, 54 bp, Artificial
  Synthetic oligonucleotide
aacgctgaaaaatgaaagcctgagccactatcgttttaagagccgggatgaagc

SEQ ID NO: 185049 - DNA, 58 bp, Artificial
  Synthetic oligonucleotide
catcgccgtttttctcactgtctccgttatgatgtacaccacttcttccagtaaccgc

SEQ ID NO: 185050 - DNA, 54 bp, Artificial
  Synthetic oligonucleotide
tctggcaactcgactttcgaggaacacggtccatggaaaaaaagaatcaatgga

SEQ ID NO: 185051 - DNA, 54 bp, Artificial
  Synthetic oligonucleotide
ttaaaacaagttaagcaaaaaaatatgcttgatgaagccttattccaacagtgt

SEQ ID NO: 185052 - DNA, 54 bp, Artificial
  Synthetic oligonucleotide
ttaaaattaggatttataatagaaggaagattgattcatgaatttttcagcaat

SEQ ID NO: 185053 - DNA, 53 bp, Artificial
  Synthetic oligonucleotide
agaaaaaatctttgagttttggtttgatagatagttggaaaatattagaagaa

SEQ ID NO: 185054 - DNA, 54 bp, Artificial
  Synthetic oligonucleotide
ttaacggctgttctgcatcagggttcgtcgtccagaaatcccttagcgttttga

SEQ ID NO: 185055 - DNA, 54 bp, Artificial
  Synthetic oligonucleotide
ttcacgcgcttgacttcgcgtgctttcatggattgcttagccattagtaaccct

SEQ ID NO: 185056 - DNA, 54 bp, Artificial
  Synthetic oligonucleotide
tagcgacgaaaacataacgagtgccgacctcctccttcgtcaacgtatggcgac

SEQ ID NO: 185057 - DNA, 54 bp, Artificial
  Synthetic oligonucleotide
catcttctctcatcttaaaccaaatcgcctgtgatggctgaagttttgtagagt

SEQ ID NO: 185058 - DNA, 54 bp, Artificial
  Synthetic oligonucleotide
acaaactgcgctgaatatggcgcgatgtatcaaaagccagagcctgacactgct

SEQ ID NO: 185059 - DNA, 54 bp, Artificial
  Synthetic oligonucleotide
gttagtcagacccaaacgggcttaccacaaaacgacgcagagtcatcatcgttt

SEQ ID NO: 185060 - DNA, 60 bp, Artificial
  Synthetic oligonucleotide
catcgcctgagacacctttacccgacggcgcattgaaatgagtgactgcgggtattgcga

SEQ ID NO: 185061 - DNA, 54 bp, Artificial
  Synthetic oligonucleotide
tatctaaattacaaagcgaaattaataaaaataatagcaagataagcaaagcaa

SEQ ID NO: 185062 - DNA, 54 bp, Artificial
  Synthetic oligonucleotide
acttttccacggaaattgtctgcatatatgtccatccccggcaactttacacaa

SEQ ID NO: 185063 - DNA, 54 bp, Artificial
  Synthetic oligonucleotide
ccatcctccggtgctggtctacacctgtcatttccgcggttttaccgcgctaat

SEQ ID NO: 185064 - DNA, 54 bp, Artificial
  Synthetic oligonucleotide
tattctcccgcaggcactcttcacgcagacgctttacatactcggcggttgcga

SEQ ID NO: 185065 - DNA, 54 bp, Artificial
  Synthetic oligonucleotide
gtgcactcagggcgagtgcgctatagatatgcaacgtcatcattatccctcacg

SEQ ID NO: 185066 - DNA, 54 bp, Artificial
  Synthetic oligonucleotide
accggtgtgatgttggcatcggatgacaacatggtgccctacagtgagcggcag

SEQ ID NO: 185067 - DNA, 54 bp, Artificial
  Synthetic oligonucleotide
aacatcgcatcgatgatatgacggcggtacgcacgcagcatacagccgtagtca

SEQ ID NO: 185068 - DNA, 54 bp, Artificial
  Synthetic oligonucleotide
gttcatggttcagtgaccacatcgttagttctgtctaatgcagtgcgtaaacag

SEQ ID NO: 185069 - DNA, 54 bp, Artificial
  Synthetic oligonucleotide
tactgagaccaacggtaattccgtatagtcaactataccatgaaatgcaccctg

SEQ ID NO: 185070 - DNA, 54 bp, Artificial
  Synthetic oligonucleotide
catcccggttccgcgaagcaaatagcacgtgcttgcggagtagagttgaccgag

SEQ ID NO: 185071 - DNA, 54 bp, Artificial
  Synthetic oligonucleotide
cgcgccggaaggaatttctacccgactgattccacaggggcggttcgtcactaa

SEQ ID NO: 185072 - DNA, 54 bp, Artificial
  Synthetic oligonucleotide
cgcgtaatgacgcgttatggtaaatcggtgccacaggcgtaagtatctgctaag

SEQ ID NO: 185073 - DNA, 54 bp, Artificial
  Synthetic oligonucleotide
tattagaatcattcccagatgaaagtattagtctggttatgactagtcctccct

SEQ ID NO: 185074 - DNA, 54 bp, Artificial
  Synthetic oligonucleotide
acacacctggcgacctcagagatacaactacgcctattgctatggcacgtactg

SEQ ID NO: 185075 - DNA, 54 bp, Artificial
  Synthetic oligonucleotide
tgagcgtcaaccctgttggtatttaggcaaagggtgccaggcacggctgcacat

SEQ ID NO: 185076 - DNA, 54 bp, Artificial
  Synthetic oligonucleotide
tctctcgtggatcgaagcggtaggaaccatcgccggcctgctctgtatttggct

SEQ ID NO: 185077 - DNA, 54 bp, Artificial
  Synthetic oligonucleotide
catttcggatggtttgcgcacaaagagataagcgtcattcaatccggccataga

SEQ ID NO: 185078 - DNA, 54 bp, Artificial
  Synthetic oligonucleotide
gtgcgacacaaggggtgtagtagggtgtcgtcaaactgaaaggtttgatagtct

SEQ ID NO: 185079 - DNA, 54 bp, Artificial
  Synthetic oligonucleotide
tgttatattccatcagccagcgctctgtgatttcccgtacttcgttcagagttc

SEQ ID NO: 185080 - DNA, 54 bp, Artificial
  Synthetic oligonucleotide
tctgaaagaagatttataatagaatatagttcgtataaagttggtttagtagaa

SEQ ID NO: 185081 - DNA, 54 bp, Artificial
  Synthetic oligonucleotide
tgagatatagcggttataagactagcaatagcgaggattacaggaggaaggttt

SEQ ID NO: 185082 - DNA, 60 bp, Artificial
  Synthetic oligonucleotide
cgcgcaaagagtggatcgactcgctgacgaatagcgggatgcgtgcggataaagcccgtt

SEQ ID NO: 185083 - DNA, 54 bp, Artificial
  Synthetic oligonucleotide
ttcccctgtgtactgcaggtttagcccggcaggatgagactgcagctgtctgta

SEQ ID NO: 185084 - DNA, 52 bp, Artificial
  Synthetic oligonucleotide
tagaagaaaaaaaaggaaaacttaacattggaatgatagagattattttacc

SEQ ID NO: 185085 - DNA, 54 bp, Artificial
  Synthetic oligonucleotide
ccgagcgaggcagtatgactattaagtacctgacaatcaataagtttaccgccg

SEQ ID NO: 185086 - DNA, 54 bp, Artificial
  Synthetic oligonucleotide
tatcaaagaccccatagagttcgatggccagaagcattatgtcgatacagtgga

SEQ ID NO: 185087 - DNA, 54 bp, Artificial
  Synthetic oligonucleotide
aacgcagcattatacgacctgtaccgcttccgctcggctcttgccacgtgcagg

SEQ ID NO: 185088 - DNA, 54 bp, Artificial
  Synthetic oligonucleotide
tagtgaaatcgaatcactccttaaagcagccaataccgggcctcatgcagcacg

SEQ ID NO: 185089 - DNA, 54 bp, Artificial
  Synthetic oligonucleotide
ttagttaaactgtgtaccgagagaaatcgtatcacatgagcgccgtacttcaac

SEQ ID NO: 185090 - DNA, 54 bp, Artificial
  Synthetic oligonucleotide
ttagtagaacttgtagaaataaattacatacacagacgtgctgagtttcaaatt

SEQ ID NO: 185091 - DNA, 54 bp, Artificial
  Synthetic oligonucleotide
tatatgccctgggcgaccgatcgacgccaggcggtaacaccgggcaatcaggtg

SEQ ID NO: 185092 - DNA, 54 bp, Artificial
  Synthetic oligonucleotide
tgaacaatacgatcccgcaacgcggggatacccagtggtcgcagtttgccgttg

SEQ ID NO: 185093 - DNA, 58 bp, Artificial
  Synthetic oligonucleotide
cgcgattcttgaatcccgatagacaataacaggtcgggatcaataccgtaatccctgc

SEQ ID NO: 185094 - DNA, 54 bp, Artificial
  Synthetic oligonucleotide
aacgcaaccacttcggttttgcgctcgccataacgacgcatcgcctcctggtct

SEQ ID NO: 185095 - DNA, 54 bp, Artificial
  Synthetic oligonucleotide
actgctattagaagatcctagttcttttattgcatttgtatatttttttgctat

SEQ ID NO: 185096 - DNA, 54 bp, Artificial
  Synthetic oligonucleotide
actgctgtattagaaatccgtgttgttcccagaccgttttcgaccattccaagg

SEQ ID NO: 185097 - DNA, 54 bp, Artificial
  Synthetic oligonucleotide
acgaaatatgcaagcgcgtgtaaagtgggttgaagggctcacgttcctcggaga

SEQ ID NO: 185098 - DNA, 54 bp, Artificial
  Synthetic oligonucleotide
tagtgacttacatccgctatagcgacccataaataccatctaccgtcagctttt

SEQ ID NO: 185099 - DNA, 54 bp, Artificial
  Synthetic oligonucleotide
gtgtcctttccgaaatccttatgatgaccgtagcgccagtgatctatgaacgcg

SEQ ID NO: 185100 - DNA, 54 bp, Artificial
  Synthetic oligonucleotide
tgaagcaactcgtacttttgtggcgtatatttcggggatgcttaccctcgcact

SEQ ID NO: 185101 - DNA, 54 bp, Artificial
  Synthetic oligonucleotide
gtgtctcattccgctttaattcgccgtatgcccggatcagttcactggtttcaa

SEQ ID NO: 185102 - DNA, 54 bp, Artificial
  Synthetic oligonucleotide
tgaagccgaaacaacgccgcgactgagtcgtcgattattccggacatatattcc

SEQ ID NO: 185103 - DNA, 53 bp, Artificial
  Synthetic oligonucleotide
aatgtctgggtcggggcaggttctgtaataactaagggaacaagtattgggtc

SEQ ID NO: 185104 - DNA, 55 bp, Artificial
  Synthetic oligonucleotide
gcagcgagaggttagtaacgtcatcataaatgcccaccgtaaaccgtggtttggg

SEQ ID NO: 185105 - DNA, 55 bp, Artificial
  Synthetic oligonucleotide
cgcgatccaacaattatatacgacggctaagttaaccggtatgaaacgcgttatc

SEQ ID NO: 185106 - DNA, 54 bp, Artificial
  Synthetic oligonucleotide
ccagcagtggcttaatacgcgctggacaacactgaatccggcgcattatgccga

SEQ ID NO: 185107 - DNA, 54 bp, Artificial
  Synthetic oligonucleotide
acctggcagccaagtccgttagaacatatcgaaatattagagcagcttcgtgtt

SEQ ID NO: 185108 - DNA, 54 bp, Artificial
  Synthetic oligonucleotide
gttaggatcgactgttagcagtctggataataccgtcacccttcagggagtcgt

SEQ ID NO: 185109 - DNA, 54 bp, Artificial
  Synthetic oligonucleotide
ccgtctgctgcatgaaccttcccttgaggcgttgccctggcgggaactggcggt

SEQ ID NO: 185110 - DNA, 54 bp, Artificial
  Synthetic oligonucleotide
ttaattcacaatacctgaagacgaagtgaaagagagtttaaacaaggcgcaagc

SEQ ID NO: 185111 - DNA, 54 bp, Artificial
  Synthetic oligonucleotide
tgacgctggcggtgaaataccgaagtaaaggtgagaatggcgaatattatggcg

SEQ ID NO: 185112 - DNA, 54 bp, Artificial
  Synthetic oligonucleotide
ttattacataaaccaggtgtatgatgtatatcatctaaatattgttctaaacag

SEQ ID NO: 185113 - DNA, 54 bp, Artificial
  Synthetic oligonucleotide
tctttgagtcttgtaatcaagttggtcagaactcgattacgatttgtaagtaga

SEQ ID NO: 185114 - DNA, 54 bp, Artificial
  Synthetic oligonucleotide
ttaattctagcaagggagctgcagttcgttctacacgtgctcaagttgatagac

SEQ ID NO: 185115 - DNA, 54 bp, Artificial
  Synthetic oligonucleotide
ccgtatatccactatagtgagtcgcataacggctgaagagagtaccgtgtatcc

SEQ ID NO: 185116 - DNA, 57 bp, Artificial
  Synthetic oligonucleotide
catcgggaataacctgaaccagacagcccgtaaggtgaacagcggacagtggtcttc

SEQ ID NO: 185117 - DNA, 54 bp, Artificial
  Synthetic oligonucleotide
tcttttcaacggctgtccctttactggctttcacgggcctgagctcgcagacaa

SEQ ID NO: 185118 - DNA, 54 bp, Artificial
  Synthetic oligonucleotide
tagggctttagccactcggcatacaaactcaaacgagggagcaaaacggccagc

SEQ ID NO: 185119 - DNA, 54 bp, Artificial
  Synthetic oligonucleotide
tgacgacttctataaacgtctggtcaatagcgtcccaggactgtcaggcgtcac

SEQ ID NO: 185120 - DNA, 54 bp, Artificial
  Synthetic oligonucleotide
gtggtacagatgatcctaaagctaatccttgggctatacacgtactgatacgta

SEQ ID NO: 185121 - DNA, 54 bp, Artificial
  Synthetic oligonucleotide
accttatcgataaaggatttacccgaatagcctgtattaccggcccgctggaca

SEQ ID NO: 185122 - DNA, 54 bp, Artificial
  Synthetic oligonucleotide
gtggtcagctccgctgcactcagccacgaatacccgtagcagtctgcctccgaa

SEQ ID NO: 185123 - DNA, 54 bp, Artificial
  Synthetic oligonucleotide
ccgtcgtgcgtatctcgggagaaatgggtaccggttctgaggtcggcgatggat

SEQ ID NO: 185124 - DNA, 54 bp, Artificial
  Synthetic oligonucleotide
aatggattgactcgaccgacgtggaccgtataattccacgcgtttcactccgcg

SEQ ID NO: 185125 - DNA, 54 bp, Artificial
  Synthetic oligonucleotide
gtttcaaagtggtactgctgtggggaggcgtcttaagcatggcggtcagtccgt

SEQ ID NO: 185126 - DNA, 54 bp, Artificial
  Synthetic oligonucleotide
gtttacggtggacatactcgttagtaatagcggaaacagtaagaggcgcagcgt

SEQ ID NO: 185127 - DNA, 57 bp, Artificial
  Synthetic oligonucleotide
cgcctgtatccgcccgccaagataccagagcgtcccgccactcacggtaaacaggaa

SEQ ID NO: 185128 - DNA, 54 bp, Artificial
  Synthetic oligonucleotide
aaatacatttttatctgatttaattaattcagacatacttataatagaactaaa

SEQ ID NO: 185129 - DNA, 54 bp, Artificial
  Synthetic oligonucleotide
tgtcataaatttaaagcacgcaaacaaccgttcacgatccagctctgccgtttt

SEQ ID NO: 185130 - DNA, 54 bp, Artificial
  Synthetic oligonucleotide
cgcatgtacaggaagatacatttcgggctaactggatcgctgtacgtaatcgcg

SEQ ID NO: 185131 - DNA, 52 bp, Artificial
  Synthetic oligonucleotide
aacttccttatattctgcattcgaaacctcttttttaatcccacggattaaa

SEQ ID NO: 185132 - DNA, 54 bp, Artificial
  Synthetic oligonucleotide
acagcatatattggctattggttaggcgctaactttcagggaaaggggattgta

SEQ ID NO: 185133 - DNA, 54 bp, Artificial
  Synthetic oligonucleotide
tcgtaagtttggcggctgctacgtcattggcatcagtcctacgccccagctgga

SEQ ID NO: 185134 - DNA, 54 bp, Artificial
  Synthetic oligonucleotide
aatccagttacccgccacctcaaaaataacgcctgtcatgccctgtaatgcgtt

SEQ ID NO: 185135 - DNA, 54 bp, Artificial
  Synthetic oligonucleotide
ttgcagatgatgttaaaatttcaagttttagaaacgaaataatgagcatggaac

SEQ ID NO: 185136 - DNA, 54 bp, Artificial
  Synthetic oligonucleotide
gtcgttgcctgataaccactccgtgcgttccattcaccgtgatagaccgcctga

SEQ ID NO: 185137 - DNA, 54 bp, Artificial
  Synthetic oligonucleotide
ttgcacagtttttatttttccttttacaccacataaatttacataatctccagt

SEQ ID NO: 185138 - DNA, 58 bp, Artificial
  Synthetic oligonucleotide
cgcctggttgccacgtactacattggcctgttctggcccgatgccatccgtaacaaaa

SEQ ID NO: 185139 - DNA, 54 bp, Artificial
  Synthetic oligonucleotide
gttgtacgcggtctcatgacctgatgtaaacgcataagccgcaccttggacact

SEQ ID NO: 185140 - DNA, 54 bp, Artificial
  Synthetic oligonucleotide
acagcaagtttaacggaatggctgacgcacgcatagcatcaccccgccggatcc

SEQ ID NO: 185141 - DNA, 54 bp, Artificial
  Synthetic oligonucleotide
tcacctgtcggactaggtgcaaatcgagttctaatggtcatagtaaacaacatc

SEQ ID NO: 185142 - DNA, 54 bp, Artificial
  Synthetic oligonucleotide
ttgagctcatcgcgccttctatgagtcgcgtagaagaaatgcagcgtaagaaaa

SEQ ID NO: 185143 - DNA, 52 bp, Artificial
  Synthetic oligonucleotide
cgaacgtataaccctcccaacgcttcactacgggaaaaatggggatgagtac

SEQ ID NO: 185144 - DNA, 54 bp, Artificial
  Synthetic oligonucleotide
ccgggttttgggcgtttcgaacacatatgcctgtaaccgctgcccctcgctgtt

SEQ ID NO: 185145 - DNA, 49 bp, Artificial
  Synthetic oligonucleotide
gttttaaagtcaagggataaatttagggtacgagtttaatagccgtacg

SEQ ID NO: 185146 - DNA, 54 bp, Artificial
  Synthetic oligonucleotide
gtttgtgctatttaaagcggactccgtaacaggcttaaacattcgcctaacatt

SEQ ID NO: 185147 - DNA, 54 bp, Artificial
  Synthetic oligonucleotide
tgcacatcaccccgtgcaccttccggtaacacaccgttctcattatacggacat

SEQ ID NO: 185148 - DNA, 54 bp, Artificial
  Synthetic oligonucleotide
gtttggtagtagtaaagcgctgcgggtatgggtgccttatagcacaatggccag

SEQ ID NO: 185149 - DNA, 58 bp, Artificial
  Synthetic oligonucleotide
catctaaaacccgtttcgtgcgtctgagagcttttgagcgcgtttgaggggctatctg

SEQ ID NO: 185150 - DNA, 54 bp, Artificial
  Synthetic oligonucleotide
cgcatactgccggaaggtggcccggacaaagctgcgctgttgcagcgactggct

SEQ ID NO: 185151 - DNA, 54 bp, Artificial
  Synthetic oligonucleotide
gtcgctaagatggtgatattcggtaaagcgaacgctgcgccgctgaaacccatt

SEQ ID NO: 185152 - DNA, 54 bp, Artificial
  Synthetic oligonucleotide
acgctgaacgctactggaattcaactcttgcgacaattgaaagggtcaaacaca

SEQ ID NO: 185153 - DNA, 54 bp, Artificial
  Synthetic oligonucleotide
tcggggcaggattttccagtgcgtacagccatttcgcttcctctgctatcagcc

SEQ ID NO: 185154 - DNA, 54 bp, Artificial
  Synthetic oligonucleotide
cattggcgaaagctataaaaactactgcctgcaagcggggggggtatatctgca

SEQ ID NO: 185155 - DNA, 54 bp, Artificial
  Synthetic oligonucleotide
aaaggcagtcagaaacggtgaacgggagcggattttaatccggtgccgtgaggc

SEQ ID NO: 185156 - DNA, 54 bp, Artificial
  Synthetic oligonucleotide
ttggtgatagtttcggtgtggttgtgggcaatttacctgttgaaaccggaggtg

SEQ ID NO: 185157 - DNA, 54 bp, Artificial
  Synthetic oligonucleotide
tcagaggcgactgcggcagtatccatcggtacgacgccagcctgtacgatacgc

SEQ ID NO: 185158 - DNA, 54 bp, Artificial
  Synthetic oligonucleotide
acgctagtggctaccgaaaccggtgcattaaccctggctgaaggcggtgcgttg

SEQ ID NO: 185159 - DNA, 54 bp, Artificial
  Synthetic oligonucleotide
ttgggagggattagaggagcactttaattcgttgaagaacgctaaagcctgggt

SEQ ID NO: 185160 - DNA, 60 bp, Artificial
  Synthetic oligonucleotide
cgcctgctaaaagcaagaattaagcataattagcggcgtagttcccgcatttggcactca

SEQ ID NO: 185161 - DNA, 54 bp, Artificial
  Synthetic oligonucleotide
accctatgcccgcgtgttggagagcacctggctgagcgatgtgctgtcgtggat

SEQ ID NO: 185162 - DNA, 54 bp, Artificial
  Synthetic oligonucleotide
cgaaacagcccgataacgtctggtatctggatctcatgaccgatatcgatatag

SEQ ID NO: 185163 - DNA, 54 bp, Artificial
  Synthetic oligonucleotide
aaataaagcagccagttaacgaaagggatatagatctgaccggactccatctcg

SEQ ID NO: 185164 - DNA, 54 bp, Artificial
  Synthetic oligonucleotide
agagaagaagcagctatatgctaattcttgcggtgcatgtgctttgttggttgc

SEQ ID NO: 185165 - DNA, 54 bp, Artificial
  Synthetic oligonucleotide
taccggggaagtcgatccccatacgggctggattatcgatttcgctgaactaaa

SEQ ID NO: 185166 - DNA, 54 bp, Artificial
  Synthetic oligonucleotide
ttctgaaggcggtagttattcaccccctgaatgacgttaacagagaggctgaga

SEQ ID NO: 185167 - DNA, 54 bp, Artificial
  Synthetic oligonucleotide
aacacgcagcgttctgataacgccggtctttccagacaatgcgaccagttaagt

SEQ ID NO: 185168 - DNA, 54 bp, Artificial
  Synthetic oligonucleotide
catgacgccggtttacttctgtccagctaagtggcaaaatacgcacaatagatt

SEQ ID NO: 185169 - DNA, 54 bp, Artificial
  Synthetic oligonucleotide
aatcggtgaccacaatgatccgttccgcaacttcgcacatccggcggtttaaac

SEQ ID NO: 185170 - DNA, 54 bp, Artificial
  Synthetic oligonucleotide
ttctattaattctgctggaggacgtatatcttttatttccacccttgtaatttt

SEQ ID NO: 185171 - DNA, 60 bp, Artificial
  Synthetic oligonucleotide
cgcctcttaatccacgatatctcatagcgtctgatccgtaaacttgattttttggagatc

SEQ ID NO: 185172 - DNA, 54 bp, Artificial
  Synthetic oligonucleotide
agaattgctagaagctacgcattatgggacccttatatggacccaccgactggg

SEQ ID NO: 185173 - DNA, 54 bp, Artificial
  Synthetic oligonucleotide
aacacgtggctgctatcttgaattgtgctcatttagtggtttctcctcggtgaa

SEQ ID NO: 185174 - DNA, 54 bp, Artificial
  Synthetic oligonucleotide
gttcgctgaccgtattcacatctcgtttcggcagtccgccgttgctggcacgtc

SEQ ID NO: 185175 - DNA, 54 bp, Artificial
  Synthetic oligonucleotide
gtgataaatggacaatattgagcagttacggaaagtcgctacacgtgcaggtaa

SEQ ID NO: 185176 - DNA, 54 bp, Artificial
  Synthetic oligonucleotide
tctcatccttccccgcatgggcagaatatttaatcgcggattcgtttgagagtt

SEQ ID NO: 185177 - DNA, 54 bp, Artificial
  Synthetic oligonucleotide
tgtgcctgcgcctgccggagcggcagcctgaaccggtgcggaagaggccgccgg

SEQ ID NO: 185178 - DNA, 54 bp, Artificial
  Synthetic oligonucleotide
tactaccaacagacgcggatcgcgcccggcaataatgtcagaaatgattccccg

SEQ ID NO: 185179 - DNA, 54 bp, Artificial
  Synthetic oligonucleotide
tattggggggatagctattgatagagagggtattgcattacctgaaaaaacttt

SEQ ID NO: 185180 - DNA, 54 bp, Artificial
  Synthetic oligonucleotide
actctggtggtgttatcacgaaaccttccacagttgggtatcgccaatttacgt

SEQ ID NO: 185181 - DNA, 54 bp, Artificial
  Synthetic oligonucleotide
ttcggctcgtgtatgtgaaagagtctcttttagacgagccattggagaggggag

SEQ ID NO: 185182 - DNA, 54 bp, Artificial
  Synthetic oligonucleotide
cgccgttgacgttcgggagccgccggcagggtcaggggcaacgcgcgggggatg

SEQ ID NO: 185183 - DNA, 54 bp, Artificial
  Synthetic oligonucleotide
ccgtttctttggcaatggttttgtagcgttcgccggtcaggacgttgagcaccg

SEQ ID NO: 185184 - DNA, 54 bp, Artificial
  Synthetic oligonucleotide
gtgatggcttgtcttgtgcaaatagagcggtcacttcacccagtgctgtggcga

SEQ ID NO: 185185 - DNA, 54 bp, Artificial
  Synthetic oligonucleotide
tgtgggtggctttctggtactcctgcgcaatacgatgtcagacagacagacggc

SEQ ID NO: 185186 - DNA, 54 bp, Artificial
  Synthetic oligonucleotide
tattgaaacctctagttcttcttttttataccctggaacgcttacagaaagctc

SEQ ID NO: 185187 - DNA, 54 bp, Artificial
  Synthetic oligonucleotide
gtctggataagacgcttacgaaaataacaacgctgccgttgaacatcttgcctg

SEQ ID NO: 185188 - DNA, 54 bp, Artificial
  Synthetic oligonucleotide
tgatggcctggcctgcgccaaggtgcatcagccccatgccctgaagcagggcgt

SEQ ID NO: 185189 - DNA, 53 bp, Artificial
  Synthetic oligonucleotide
acgcgacttgaaaacggtaagcatatcggtaagttttatattcccagcccaaa

SEQ ID NO: 185190 - DNA, 54 bp, Artificial
  Synthetic oligonucleotide
tcgtctgccgagcctctggggtgctcgttacctgtttaacggtcgaccagacct

SEQ ID NO: 185191 - DNA, 54 bp, Artificial
  Synthetic oligonucleotide
acacgggactactcccattttataatcgcggatattattgctatccgtgaaaat

SEQ ID NO: 185192 - DNA, 54 bp, Artificial
  Synthetic oligonucleotide
ttcttgctgcacgcttactacggaggacggttgtggcgcaggtcttaggtgaac

SEQ ID NO: 185193 - DNA, 60 bp, Artificial
  Synthetic oligonucleotide
cgccgtagccagaccgaaacaacggacacaagcaggtgtcgctcatcatcactaagagtc

SEQ ID NO: 185194 - DNA, 54 bp, Artificial
  Synthetic oligonucleotide
aaattgcacgggttatcggttcaggtcgcaaccaaccaaattcatttgccgcca

SEQ ID NO: 185195 - DNA, 54 bp, Artificial
  Synthetic oligonucleotide
ccatctctaatcgttctcgtctgatagtggccgtttccgtcagtagatgcatag

SEQ ID NO: 185196 - DNA, 54 bp, Artificial
  Synthetic oligonucleotide
tgtcttcttatcagtattactggcaacgccattcagtactggcactcaacgaat

SEQ ID NO: 185197 - DNA, 54 bp, Artificial
  Synthetic oligonucleotide
tcgttggcgtaacacgcagggtggaggattatacggactgtgtaataaagcgca

SEQ ID NO: 185198 - DNA, 54 bp, Artificial
  Synthetic oligonucleotide
tacggttacagtgaaatccgcttgccgattgtagagcagaccccgttattcaaa

SEQ ID NO: 185199 - DNA, 54 bp, Artificial
  Synthetic oligonucleotide
tgtgaatcgcgtggagaggggcgttgtaggcacagcggtactcgttgctggtca

SEQ ID NO: 185200 - DNA, 53 bp, Artificial
  Synthetic oligonucleotide
gtgaactgcgggtttcgcccgaacggacgtaagatctttaaggcgtgaaccac

SEQ ID NO: 185201 - DNA, 54 bp, Artificial
  Synthetic oligonucleotide
tgatagccatgagttccgtagcgctctgaccgtatcagatattatggttacact

SEQ ID NO: 185202 - DNA, 54 bp, Artificial
  Synthetic oligonucleotide
tctatctgaggagtgcgttgtggcacaggaatatactgttgaacaattaaacca

SEQ ID NO: 185203 - DNA, 54 bp, Artificial
  Synthetic oligonucleotide
ccaagtcgtgccctctcgaaagttttttttgccttgtgacaattcattatcagc

SEQ ID NO: 185204 - DNA, 60 bp, Artificial
  Synthetic oligonucleotide
cgccgcccggtcatattttcgcacagtgtgcgtttcacaaagtcgctcagcgatagccgg

SEQ ID NO: 185205 - DNA, 54 bp, Artificial
  Synthetic oligonucleotide
gtgaatatcggtcccggctgaggtatacctattactgccagtcattgtcggtgg

SEQ ID NO: 185206 - DNA, 54 bp, Artificial
  Synthetic oligonucleotide
aacaatacggaatgaccatttctagataacgcaatagctatggccgttccatag

SEQ ID NO: 185207 - DNA, 54 bp, Artificial
  Synthetic oligonucleotide
gacgaggcatccgtgctgcccctgacgcaggcaatctttaagcatcaatgtacc

SEQ ID NO: 185208 - DNA, 54 bp, Artificial
  Synthetic oligonucleotide
cggtcagcggacccgtcgatacttatcccctggcgaacctgagataaaattgac

SEQ ID NO: 185209 - DNA, 54 bp, Artificial
  Synthetic oligonucleotide
ggtctaccatcatggaaaccggagaaacgcgcctacggcttcgtagtgcgcaat

SEQ ID NO: 185210 - DNA, 54 bp, Artificial
  Synthetic oligonucleotide
gcacctggcgtgccgtttaacacgtagaaatgcccactgtcgcccagacgacgt

SEQ ID NO: 185211 - DNA, 54 bp, Artificial
  Synthetic oligonucleotide
gacgcagcctggactccgtttgcgtcaggacctcatgtttaccaccaaccaaaa

SEQ ID NO: 185212 - DNA, 54 bp, Artificial
  Synthetic oligonucleotide
caccgtaatggaaatctatccaatccgagcacataggatacacatcgttataac

SEQ ID NO: 185213 - DNA, 53 bp, Artificial
  Synthetic oligonucleotide
ctggtttacgaatgtcttactttcaacgtccgatgcaggtacccgaacaaacc

SEQ ID NO: 185214 - DNA, 54 bp, Artificial
  Synthetic oligonucleotide
atgcactaagagcggcggttatgatgtttaagcaatacctgcaagtaacgaaac

SEQ ID NO: 185215 - DNA, 60 bp, Artificial
  Synthetic oligonucleotide
gcagcaggtttactggccagcaccagaaaatcatataaccgcgacaaatcagaaagcgcc

SEQ ID NO: 185216 - DNA, 59 bp, Artificial
  Synthetic oligonucleotide
cgccgcaaagacgtggcctgccaccgggggggttgtggcgctcagtgatcctgtgagac

SEQ ID NO: 185217 - DNA, 54 bp, Artificial
  Synthetic oligonucleotide
ctggtgggtacagccttctgttatccgcaccttcagctcccggggtgacatgag

SEQ ID NO: 185218 - DNA, 54 bp, Artificial
  Synthetic oligonucleotide
atagcacatcacgtagcggaatcgtgagaagtcagcaaccgaccgtaccatacg

SEQ ID NO: 185219 - DNA, 50 bp, Artificial
  Synthetic oligonucleotide
ggtgaaagttccgctttggtcgattttaaccaacgttcaactaaacggtc

SEQ ID NO: 185220 - DNA, 54 bp, Artificial
  Synthetic oligonucleotide
caccgttttcaggcgggcagaacggtaaaaatcagccgttcgtcagagatccca

SEQ ID NO: 185221 - DNA, 54 bp, Artificial
  Synthetic oligonucleotide
gacgggcgcgataaatattgagaagcaccagcacagcatcatggtaatcagctt

SEQ ID NO: 185222 - DNA, 54 bp, Artificial
  Synthetic oligonucleotide
ggtgactgcgctcctccaagccagttaccttggttcacagagcgccaactcttt

SEQ ID NO: 185223 - DNA, 54 bp, Artificial
  Synthetic oligonucleotide
gacgggctttctatcggattcggttgtctgcgtaatgactttgagcgaacacct

SEQ ID NO: 185224 - DNA, 54 bp, Artificial
  Synthetic oligonucleotide
gcgtaaagtgatccgaatacacagccacctgagcaaagataccatcgggtaatg

SEQ ID NO: 185225 - DNA, 54 bp, Artificial
  Synthetic oligonucleotide
cacctggttaggatcgacgttcacggcagtgtcataggccgagtcgatgacatt

SEQ ID NO: 185226 - DNA, 54 bp, Artificial
  Synthetic oligonucleotide
ctggcgatatcgaaggaagtttgccggccttggccggcttctcgtccaggcacg

SEQ ID NO: 185227 - DNA, 56 bp, Artificial
  Synthetic oligonucleotide
cgccgatattgaaaacgtcatttcagatgttttcaaagagacgcgagttaaaatta

SEQ ID NO: 185228 - DNA, 54 bp, Artificial
  Synthetic oligonucleotide
atacggactcagaaacgactggtacgaacgccaaatggaacgagaagcgtttgt

SEQ ID NO: 185229 - DNA, 54 bp, Artificial
  Synthetic oligonucleotide
ctgttccttaagtctggcgttcgcgcgattgacaccaagtgtaagattgaacaa

SEQ ID NO: 185230 - DNA, 54 bp, Artificial
  Synthetic oligonucleotide
ggtattcgtgatactgctagggcccttcatatcagcattaatgcggttgttcgt

SEQ ID NO: 185231 - DNA, 51 bp, Artificial
  Synthetic oligonucleotide
cggttgagcccctgatttacgtaccgctcgaagttttcgcttattaccggg

SEQ ID NO: 185232 - DNA, 54 bp, Artificial
  Synthetic oligonucleotide
ggtcacagaaagcgccggacgggaccgcgtggacaccacgcagacgccgcgtaa

SEQ ID NO: 185233 - DNA, 54 bp, Artificial
  Synthetic oligonucleotide
ctgtgcgaggcgatatctgcttggtgcccataggtgccgttttaggagtgctgc

SEQ ID NO: 185234 - DNA, 54 bp, Artificial
  Synthetic oligonucleotide
atagtgtagaaggtcacgagaacatcacccaattagccgttaatcatggttact

SEQ ID NO: 185235 - DNA, 54 bp, Artificial
  Synthetic oligonucleotide
caccctcattcggcacgtattgcgtttcttgggccgaaaggctcctattctcat

SEQ ID NO: 185236 - DNA, 54 bp, Artificial
  Synthetic oligonucleotide
agcgggaatagctgcccaacgcagttacgcccaaaatcgacgataggctgccca

SEQ ID NO: 185237 - DNA, 54 bp, Artificial
  Synthetic oligonucleotide
atagtattgcggctaatcaagccaattcctacgtcttttcgctgttgcacgatc

SEQ ID NO: 185238 - DNA, 52 bp, Artificial
  Synthetic oligonucleotide
cgcccttgcaggtaaaggtaaatactcggatttttccctgcgaagctaaaaa

SEQ ID NO: 185239 - DNA, 54 bp, Artificial
  Synthetic oligonucleotide
caaagacgctatagccctgttcacagcttcgacagaggaatcactgaaaaaaca

SEQ ID NO: 185240 - DNA, 54 bp, Artificial
  Synthetic oligonucleotide
ggtcagttgttctacgtctctgagtgagccaattatcagcagaatacggatttt

SEQ ID NO: 185241 - DNA, 54 bp, Artificial
  Synthetic oligonucleotide
gaccgtaaagctggatccagtagtaagctttatccggggaactcgtgtgaggat

SEQ ID NO: 185242 - DNA, 54 bp, Artificial
  Synthetic oligonucleotide
ggcgtcgatagccatcggtatgtggtcattcaaccaaccgcacgtcaggtgttt

SEQ ID NO: 185243 - DNA, 54 bp, Artificial
  Synthetic oligonucleotide
agcggaaatattgtctcttgtgatcaccccgtgttcgtaggtctttatagaaaa

SEQ ID NO: 185244 - DNA, 54 bp, Artificial
  Synthetic oligonucleotide
caggtcatcacgttatagcgatcctggattaaggccgaccagaatgtcgcatcc

SEQ ID NO: 185245 - DNA, 52 bp, Artificial
  Synthetic oligonucleotide
ggcgtccctttactggttaacatggcagaaaatttaacgggacgatctttgg

SEQ ID NO: 185246 - DNA, 54 bp, Artificial
  Synthetic oligonucleotide
agggacgataaataatggtggggttaatcccaatggagcggaaatgggcatcca

SEQ ID NO: 185247 - DNA, 54 bp, Artificial
  Synthetic oligonucleotide
atgacccccttacgaggcgtgccctgagtaagcggaaagcctacgcgcctgccg

SEQ ID NO: 185248 - DNA, 54 bp, Artificial
  Synthetic oligonucleotide
gctaacgtcgccagatatcagcgtaaatcacattgatatgctcccagcaaatgg

SEQ ID NO: 185249 - DNA, 56 bp, Artificial
  Synthetic oligonucleotide
cgcccggttactggaacgctgcgagggtaaacgactggcagaatggatgcggcggg

SEQ ID NO: 185250 - DNA, 54 bp, Artificial
  Synthetic oligonucleotide
ggcccagtccatatagccttaaccgttacccttccactggctgagactgttcct

SEQ ID NO: 185251 - DNA, 54 bp, Artificial
  Synthetic oligonucleotide
gattgttctaaatctatgagaaacaagcttaatagtgatggatactattggtgc

SEQ ID NO: 185252 - DNA, 54 bp, Artificial
  Synthetic oligonucleotide
agcctgttagatgaaggttcccttgtggagttaggtagcgagctggagccaaaa

SEQ ID NO: 185253 - DNA, 54 bp, Artificial
  Synthetic oligonucleotide
gctagctgcaacccatgtcaccgccttagcattcagtgctgtcttgggtgggcc

SEQ ID NO: 185254 - DNA, 54 bp, Artificial
  Synthetic oligonucleotide
ctaactgattctccgtggcactgggccaactgcagcagtttttattcccatgag

SEQ ID NO: 185255 - DNA, 54 bp, Artificial
  Synthetic oligonucleotide
atggatgcgatgtacgctgagaatctatccaaggcagtctcgcatctcatccat

SEQ ID NO: 185256 - DNA, 54 bp, Artificial
  Synthetic oligonucleotide
gattcttgtcgcagtgtcaccacgtgaatatgattacgcctctactacagactt

SEQ ID NO: 185257 - DNA, 54 bp, Artificial
  Synthetic oligonucleotide
ggttcgaccgcgaaagtggagaagattggttattacgaacaggtgtgtcaggcg

SEQ ID NO: 185258 - DNA, 54 bp, Artificial
  Synthetic oligonucleotide
cacgggatcaattgcccggcaacaatcgtcagcgccatgtcttcacggtattcc

SEQ ID NO: 185259 - DNA, 54 bp, Artificial
  Synthetic oligonucleotide
agggttttctgataaaggttgctctcctgttattctgctaaataaattatccat

SEQ ID NO: 185260 - DNA, 60 bp, Artificial
  Synthetic oligonucleotide
catgacccaatgaagctacctcaaaactttgaatgctcgagcggcaggctaaatgaaatc

SEQ ID NO: 185261 - DNA, 54 bp, Artificial
  Synthetic oligonucleotide
atttgatcggaataacgccacttgtcagtggtgatgcctttggcgttaatcttg

SEQ ID NO: 185262 - DNA, 54 bp, Artificial
  Synthetic oligonucleotide
agcctctattattcaaatcaaagcgtggggaccggtaggatcggggctgttatc

SEQ ID NO: 185263 - DNA, 54 bp, Artificial
  Synthetic oligonucleotide
ggccactcttgactggttatctcacatcgatttacaccaatctgaggcctattg

SEQ ID NO: 185264 - DNA, 54 bp, Artificial
  Synthetic oligonucleotide
gctcaggcagggatacctgttgccatcgacgccaaccctgaatgggcgattgaa

SEQ ID NO: 185265 - DNA, 54 bp, Artificial
  Synthetic oligonucleotide
cacggtttttacgttaaagtggtaaccagagcacacagttcatccgtcaggcgt

SEQ ID NO: 185266 - DNA, 54 bp, Artificial
  Synthetic oligonucleotide
ataacactgttaagtgctcgccctgccaccgttgattgacgccgagcggtcgtt

SEQ ID NO: 185267 - DNA, 54 bp, Artificial
  Synthetic oligonucleotide
gcaagagcatgaagttccaattacaagtttattgcaagttggagatgctctacc

SEQ ID NO: 185268 - DNA, 53 bp, Artificial
  Synthetic oligonucleotide
cgtttcggtcctggtggttattttcgcgcaggatacgaaacgggtgctaatgt

SEQ ID NO: 185269 - DNA, 54 bp, Artificial
  Synthetic oligonucleotide
gcaacttcagcccactgcattgctcatgcttatgaacttttaactactggaaaa

SEQ ID NO: 185270 - DNA, 54 bp, Artificial
  Synthetic oligonucleotide
cagcatgatcacgattacaggcggacataacaatgggcatacctaacctgtcgg

SEQ ID NO: 185271 - DNA, 57 bp, Artificial
  Synthetic oligonucleotide
cgccccttcctgcgtcccggatacttccggcgactggctcagatccactccgtttgc

SEQ ID NO: 185272 - DNA, 54 bp, Artificial
  Synthetic oligonucleotide
gcaactaccagtgggggaccggcaatgactgaagtctggaccatttacggcggg

SEQ ID NO: 185273 - DNA, 54 bp, Artificial
  Synthetic oligonucleotide
cacgataccgtcttgtgccaaaccactattcaggtcgatacccgttgttgtcgt

SEQ ID NO: 185274 - DNA, 54 bp, Artificial
  Synthetic oligonucleotide
ggtgccgataagggatgttatggtaaatgacaacaaccgaaatactgtcgtgaa

SEQ ID NO: 185275 - DNA, 54 bp, Artificial
  Synthetic oligonucleotide
cgttttagacgtttaaatgaacatcgagcacgtgctttaagagcaatggtacaa

SEQ ID NO: 185276 - DNA, 54 bp, Artificial
  Synthetic oligonucleotide
gacgtgtgaccacactcacgggtctggacaccgttaaggctgcatgcggtgcag

SEQ ID NO: 185277 - DNA, 54 bp, Artificial
  Synthetic oligonucleotide
cggtaatcgatataacgtcgtgttgtggccatacatacgatggaacgttcggac

SEQ ID NO: 185278 - DNA, 54 bp, Artificial
  Synthetic oligonucleotide
cggtaaacgagtggtcattgtcagctccttatgacgcatgatgggctggggtca

SEQ ID NO: 185279 - DNA, 54 bp, Artificial
  Synthetic oligonucleotide
cgggttgtggacggaagccgttcccttgcggccaagcatcgggcgacattcgct

SEQ ID NO: 185280 - DNA, 54 bp, Artificial
  Synthetic oligonucleotide
cgttttgtgattaattccgagagccagtaacgtcatggtgacaggtcggggaga

SEQ ID NO: 185281 - DNA, 54 bp, Artificial
  Synthetic oligonucleotide
gactatctaacccaaggtaacagggtgtacaagaccgctgcaaccaaatctgcc

SEQ ID NO: 185282 - DNA, 60 bp, Artificial
  Synthetic oligonucleotide
cgctcgcagcgtcagcagacgtatgatggtccgtcgctgtgataaaccggataaaacagc

SEQ ID NO: 185283 - DNA, 54 bp, Artificial
  Synthetic oligonucleotide
atacccgcttccgggatgttggagagcagcccgccgaagccaatcggcagcagc

SEQ ID NO: 185284 - DNA, 54 bp, Artificial
  Synthetic oligonucleotide
ctgcgttcacgcaagatagcgaccagactgtccagattatcgcctaccgtattt

SEQ ID NO: 185285 - DNA, 54 bp, Artificial
  Synthetic oligonucleotide
atgcgtgttaatggtttaaccccgcaagatctcaaggcttatggtattcacgac

SEQ ID NO: 185286 - DNA, 54 bp, Artificial
  Synthetic oligonucleotide
atacagggcgtagcgtctcgcgaatctggcagcgcatccgggatgttaccgccg

SEQ ID NO: 185287 - DNA, 54 bp, Artificial
  Synthetic oligonucleotide
gatttagctatgactattctaatgtagatgagcgtttaacgtattcaatatatc

SEQ ID NO: 185288 - DNA, 54 bp, Artificial
  Synthetic oligonucleotide
ctgcgcgggctccctgcttaagccacatttcgttacagggttgcattgtcccgc

SEQ ID NO: 185289 - DNA, 54 bp, Artificial
  Synthetic oligonucleotide
agctttctgtcgcggagttggagagtaaaagctataagtgccagtaagggagcg

SEQ ID NO: 185290 - DNA, 54 bp, Artificial
  Synthetic oligonucleotide
gaaactagctatcgttgcattgctggcctcgcttcatgcggtgcccgctttggc

SEQ ID NO: 185291 - DNA, 54 bp, Artificial
  Synthetic oligonucleotide
gccgtggatggtcgcgtgaggaatgctgcttagcagacgatagcggtcggaacc

SEQ ID NO: 185292 - DNA, 54 bp, Artificial
  Synthetic oligonucleotide
atccatcttaatgcctcgcggttagcgttgacgattagcgatactgttcgtttc

SEQ ID NO: 185293 - DNA, 60 bp, Artificial
  Synthetic oligonucleotide
cgctccagaaagtccagatgacgcgggaactcttccgggcggtagcgtttgatgatgatg

SEQ ID NO: 185294 - DNA, 54 bp, Artificial
  Synthetic oligonucleotide
cgtctgatggctacatacggctgtcagtttacgcttacccaaagtcaataactg

SEQ ID NO: 185295 - DNA, 54 bp, Artificial
  Synthetic oligonucleotide
gaagcgcgcaatgtgcggtgttattggaatttctggggttaattcaatttctca

SEQ ID NO: 185296 - DNA, 54 bp, Artificial
  Synthetic oligonucleotide
atcgagttacaaataattgagctccgcgagattcggggtaaatagcatataaca

SEQ ID NO: 185297 - DNA, 54 bp, Artificial
  Synthetic oligonucleotide
atccatacagtggctaattccccgggcatccaggaaacattcgtcaattgagta

SEQ ID NO: 185298 - DNA, 54 bp, Artificial
  Synthetic oligonucleotide
cgtctgttatctgtatgtcgggagcgttcgtgaattggtgttccgttcactatg

SEQ ID NO: 185299 - DNA, 54 bp, Artificial
  Synthetic oligonucleotide
gccatccgtttgcgtgacggtgcggcccgtctgttcacctgatcctctggcaac

SEQ ID NO: 185300 - DNA, 54 bp, Artificial
  Synthetic oligonucleotide
caatcgctggttaggtttattgggaggactgtgaggtgtactggcaatagcgga

SEQ ID NO: 185301 - DNA, 54 bp, Artificial
  Synthetic oligonucleotide
gccatatcggcctggtaaatcaacgtctgtgacttagttgcaggaaacggctat

SEQ ID NO: 185302 - DNA, 54 bp, Artificial
  Synthetic oligonucleotide
gaagtccgggagcttatcgatgcctcgccttatgcgaaaaagtacacctccggc

SEQ ID NO: 185303 - DNA, 54 bp, Artificial
  Synthetic oligonucleotide
gccagtcccgcccctgtcagcacagagagcaacatcctcggtacgcgtaaatcc

SEQ ID NO: 185304 - DNA, 60 bp, Artificial
  Synthetic oligonucleotide
cgctcacgtggtaaatctggggatgtggatagcgcacgttgccgagtcggatcatcagga

SEQ ID NO: 185305 - DNA, 54 bp, Artificial
  Synthetic oligonucleotide
caatctgtacgttgtaaaacaatatctcgtctacggtgtggtacgttggatata

SEQ ID NO: 185306 - DNA, 54 bp, Artificial
  Synthetic oligonucleotide
agctgcggaacgactacggtgacccaacagtgctttaacatcgctggacttcgg

SEQ ID NO: 185307 - DNA, 54 bp, Artificial
  Synthetic oligonucleotide
gccagcgctaatgcctctttaatggcgtgcacgtccggcgcgcagttaagcttc

SEQ ID NO: 185308 - DNA, 54 bp, Artificial
  Synthetic oligonucleotide
cgtcatcgcctttccagacgcggattgtcggccccagataacgaccgttcactc

SEQ ID NO: 185309 - DNA, 54 bp, Artificial
  Synthetic oligonucleotide
gccgattatggacggctcgcggcttattgacgttttgagcgtaggcaaaccgaa

SEQ ID NO: 185310 - DNA, 54 bp, Artificial
  Synthetic oligonucleotide
ggggagatgtagtagtagatctcaatcgatccccagaacagtacggcagcagac

SEQ ID NO: 185311 - DNA, 54 bp, Artificial
  Synthetic oligonucleotide
aggagggactgaatgtaacacaattgaaccagcacctatttttgctccacaacc

SEQ ID NO: 185312 - DNA, 54 bp, Artificial
  Synthetic oligonucleotide
atcccgtaaacatccttttccgaagctgcggtgaaaacgtcaaatgctgcgtta

SEQ ID NO: 185313 - DNA, 53 bp, Artificial
  Synthetic oligonucleotide
ggggataacttataaagtccaccgccattaagaatcctacggaacttcccagc

SEQ ID NO: 185314 - DNA, 54 bp, Artificial
  Synthetic oligonucleotide
aggacacgacggtagcgattcatccaactgtgtgttctctctacaacccagcgg

SEQ ID NO: 185315 - DNA, 60 bp, Artificial
  Synthetic oligonucleotide
cgctcaaataaggggccatcgacatggataagcgttaactgttgcggcagcgacaatgta

SEQ ID NO: 185316 - DNA, 54 bp, Artificial
  Synthetic oligonucleotide
gccgccagccacggaacccggctgtattgcgatttcaatacgtaaaccatctct

SEQ ID NO: 185317 - DNA, 54 bp, Artificial
  Synthetic oligonucleotide
gccgccattcgctaaatgccataccaagctcctgctggcaacggagggataaag

SEQ ID NO: 185318 - DNA, 54 bp, Artificial
  Synthetic oligonucleotide
caagtaccgccgggtagtaaagatggtttacgccctgatggtacggcgtggcga

SEQ ID NO: 185319 - DNA, 54 bp, Artificial
  Synthetic oligonucleotide
ggggattatacgacctccccggtaaagcgcaaggatcgtccaggatcttcgtta

SEQ ID NO: 185320 - DNA, 54 bp, Artificial
  Synthetic oligonucleotide
cgtcgtttagtaccagcacgttaaacgatccgcatgacggggtatgggattact

SEQ ID NO: 185321 - DNA, 54 bp, Artificial
  Synthetic oligonucleotide
gcccggagggcgacgtttgttgagcctactgcgtggcgatcaccactcggctac

SEQ ID NO: 185322 - DNA, 54 bp, Artificial
  Synthetic oligonucleotide
gcccgcagggtcggtcagccggaatacgcgtttaatcacaagggcagtggtaat

SEQ ID NO: 185323 - DNA, 54 bp, Artificial
  Synthetic oligonucleotide
caatcatcggctcaagattaggctccgtaatcgtccatatacctaaaggaacgg

SEQ ID NO: 185324 - DNA, 54 bp, Artificial
  Synthetic oligonucleotide
cgtctctcacctcgtatcgcagaatcattgtggcaacagagtaagccgcataaa

SEQ ID NO: 185325 - DNA, 54 bp, Artificial
  Synthetic oligonucleotide
agcgttcgtccatgctgcccaacacgtagtagttgtcctgatgggtgtagtagt

SEQ ID NO: 185326 - DNA, 58 bp, Artificial
  Synthetic oligonucleotide
atctttagaagaagttcgtttgcttgctttgatagccgtgtagtagtaatggatcttc

SEQ ID NO: 185327 - DNA, 60 bp, Artificial
  Synthetic oligonucleotide
cgctattgggtgcggtataatcctgctctatagcatacctgggctcaggaagggctttta

SEQ ID NO: 185328 - DNA, 54 bp, Artificial
  Synthetic oligonucleotide
gcgagcaaccactcagtaaggcgacggaaaccagtccgaccaagagtgttttac

SEQ ID NO: 185329 - DNA, 54 bp, Artificial
  Synthetic oligonucleotide
atcaatggaataccggctactggatcgttgccctcctgctgttgctgagtttgc

SEQ ID NO: 185330 - DNA, 54 bp, Artificial
  Synthetic oligonucleotide
cgtgcttttagtctgtccggaatggataggccaataatgagtagaattgttgcg

SEQ ID NO: 185331 - DNA, 54 bp, Artificial
  Synthetic oligonucleotide
ggtaattggcccgatcagaccgcagttagctctgaagttaccaaggcactcgct

SEQ ID NO: 185332 - DNA, 54 bp, Artificial
  Synthetic oligonucleotide
cgtgggggctgctcatcagcggcggcactgccctcccgctcgctggccatccgt

SEQ ID NO: 185333 - DNA, 54 bp, Artificial
  Synthetic oligonucleotide
ggcttatcgatcatcgttagcatgctgagcgtcagtccagtatagtaaatcctc

SEQ ID NO: 185334 - DNA, 54 bp, Artificial
  Synthetic oligonucleotide
cttcattgcccccgttgccagtccgttcaggtttaccgtcacgggcagaaccca

SEQ ID NO: 185335 - DNA, 54 bp, Artificial
  Synthetic oligonucleotide
caggggcgctgtatgcgcccctttttaatatccgtgcccggactcctttccctg

SEQ ID NO: 185336 - DNA, 53 bp, Artificial
  Synthetic oligonucleotide
caaattgtttgaccactaccccctgaacggaggaatagacattggcggcccgg

SEQ ID NO: 185337 - DNA, 54 bp, Artificial
  Synthetic oligonucleotide
cgtaaaaccaacgagcggctgtctgaaataccgtatttcgagtgctacacagat

SEQ ID NO: 185338 - DNA, 59 bp, Artificial
  Synthetic oligonucleotide
catatggggggggaattggattctgggccgcattgtgtcctcatgacttagtttatgaa

SEQ ID NO: 185339 - DNA, 54 bp, Artificial
  Synthetic oligonucleotide
gacagtacccggcctgtagtgaaattcggcactgagcagtataccgcaattcac

SEQ ID NO: 185340 - DNA, 52 bp, Artificial
  Synthetic oligonucleotide
atatgtatttacttcaagatttcttttttttacaaaagtatttatagtttca

SEQ ID NO: 185341 - DNA, 54 bp, Artificial
  Synthetic oligonucleotide
gacataaatatccctacccctgacttcaatcgtcatcggctctttattaccggt

SEQ ID NO: 185342 - DNA, 54 bp, Artificial
  Synthetic oligonucleotide
ggctggcgtatcacgtcagtcagggcgcaaaccaatacgcaccgatgactggcg

SEQ ID NO: 185343 - DNA, 54 bp, Artificial
  Synthetic oligonucleotide
atctggcatcccgataacgcgtttcataccggttaacttagccgtcgtatataa

SEQ ID NO: 185344 - DNA, 54 bp, Artificial
  Synthetic oligonucleotide
gacatcacttccgagcagtttgggtttcatccatacttagtgaaacgcgtcaac

SEQ ID NO: 185345 - DNA, 54 bp, Artificial
  Synthetic oligonucleotide
gaccagtacagccgctttcttgttggtgtaggtcagaatatccagagcctgcga

SEQ ID NO: 185346 - DNA, 54 bp, Artificial
  Synthetic oligonucleotide
gaataccgatcactgtgttccgccggagcttatctatgcgcgatagtcgcccac

SEQ ID NO: 185347 - DNA, 54 bp, Artificial
  Synthetic oligonucleotide
agctgaggtttccccgacagcgttaccatcgttggcgtaccctgaagcggaata

SEQ ID NO: 185348 - DNA, 54 bp, Artificial
  Synthetic oligonucleotide
atcagaaagggagcgactgagtgttcccgaattatcggtaatcgtgttagatac

SEQ ID NO: 185349 - DNA, 59 bp, Artificial
  Synthetic oligonucleotide
catatgtataatggtagtctagccctcctttcaacaaggagtactcatggaaacctaca

SEQ ID NO: 185350 - DNA, 54 bp, Artificial
  Synthetic oligonucleotide
atcagaaaaccagcaacctaaaacgggggtatccagttcgggtaggcagtcaga

SEQ ID NO: 185351 - DNA, 54 bp, Artificial
  Synthetic oligonucleotide
cagcggccagaaacgaacgatgtctgagagcgggcggccccgtatgaattcatt

SEQ ID NO: 185352 - DNA, 54 bp, Artificial
  Synthetic oligonucleotide
agctcgattgcgtgcttgaaacgcgccttgtgacgacgcaacccggcatgacta

SEQ ID NO: 185353 - DNA, 54 bp, Artificial
  Synthetic oligonucleotide
agctccccccaacttttactattgcgtatagattccaaacattcacgcttaacc

SEQ ID NO: 185354 - DNA, 54 bp, Artificial
  Synthetic oligonucleotide
gcgactggctcgggttacgaggaacggtgaggacggtttcgcagcagccagact

SEQ ID NO: 185355 - DNA, 54 bp, Artificial
  Synthetic oligonucleotide
gaattcctcgcaacagctgatagctatcaaaagcacttccagtaatacctaacg

SEQ ID NO: 185356 - DNA, 54 bp, Artificial
  Synthetic oligonucleotide
cttgcagcctcgcagagatacgggtatatcactggaaacccgttgagagaagcg

SEQ ID NO: 185357 - DNA, 54 bp, Artificial
  Synthetic oligonucleotide
gcattgccgtatcaaccgccacactcgtctctgtgatcacactgattagcgagg

SEQ ID NO: 185358 - DNA, 54 bp, Artificial
  Synthetic oligonucleotide
cgtacaattaagggattatggtaaatatatgagctatgcgataactttaactgt

SEQ ID NO: 185359 - DNA, 54 bp, Artificial
  Synthetic oligonucleotide
gcattcgtgcttaccttgataacatattctattcggtcggggatagtcagtttg

SEQ ID NO: 185360 - DNA, 60 bp, Artificial
  Synthetic oligonucleotide
catatgtgggtgatggtgacacagcaaaaattgtgaatctccctgccgcatcattttttc

SEQ ID NO: 185361 - DNA, 54 bp, Artificial
  Synthetic oligonucleotide
atcgttatcatcacttttattgttagaggactaatgtatccgttaactaaagcc

SEQ ID NO: 185362 - DNA, 54 bp, Artificial
  Synthetic oligonucleotide
cgtaatacgactcactagtgggcagatcttcgaatgcatcgcgcgcaccgtacg

SEQ ID NO: 185363 - DNA, 54 bp, Artificial
  Synthetic oligonucleotide
atctaaaacgcgctctggtgcgttttttttgcgtaaggtatgcgatggtgctac

SEQ ID NO: 185364 - DNA, 54 bp, Artificial
  Synthetic oligonucleotide
cttgagtgagggccgataaaggcgagtaaagaagcgacaaataagaataacccg

SEQ ID NO: 185365 - DNA, 54 bp, Artificial
  Synthetic oligonucleotide
agctaaatcggaagaatcattagatccagacaacattcgacatgccgatatgtc

SEQ ID NO: 185366 - DNA, 54 bp, Artificial
  Synthetic oligonucleotide
attattaaagaacattctgcaaagcggcgaacgcattgtccgcgtgagccagga

SEQ ID NO: 185367 - DNA, 54 bp, Artificial
  Synthetic oligonucleotide
gcttttatcagcgcagggacattatttgcccgctgttctgactgcttcatagcc

SEQ ID NO: 185368 - DNA, 53 bp, Artificial
  Synthetic oligonucleotide
agcccctgtacgctgaactcaagaaaatcaaggaaaagacgggagggggaggc

SEQ ID NO: 185369 - DNA, 54 bp, Artificial
  Synthetic oligonucleotide
ctctacgacagagagttattatgcgcagctaccgtggcgtccgctcaacgaaca

SEQ ID NO: 185370 - DNA, 52 bp, Artificial
  Synthetic oligonucleotide
gtaaatggatcgggttttggggaataatcgacagggtttgccgttgggtgta

SEQ ID NO: 185371 - DNA, 60 bp, Artificial
  Synthetic oligonucleotide
cgctatcatctggcggtatccctgagaccgggcccatgttaaggcatgatcgagtaaggc

SEQ ID NO: 185372 - DNA, 54 bp, Artificial
  Synthetic oligonucleotide
agtgcatacgcgagacggtaagaaccacgacgtttccgtatgtaggagccatga

SEQ ID NO: 185373 - DNA, 54 bp, Artificial
  Synthetic oligonucleotide
atgttagcgtgagacggcgtgatattgcgaatatttcttgtccgaccactcctt

SEQ ID NO: 185374 - DNA, 52 bp, Artificial
  Synthetic oligonucleotide
agccccctgaaaacaattctggcgcgtttttttggtctggcctgttgtttcc

SEQ ID NO: 185375 - DNA, 54 bp, Artificial
  Synthetic oligonucleotide
agtgcatatttacccagccgcagcttacgataaaccccgtcttggatcccctca

SEQ ID NO: 185376 - DNA, 54 bp, Artificial
  Synthetic oligonucleotide
gatgattcaatgctgccggattggtgtgttaagcagcctcagccgctctgtctg

SEQ ID NO: 185377 - DNA, 54 bp, Artificial
  Synthetic oligonucleotide
gatacagctgcccctggatgtgcactgttaccgtcagtgtgactgggaaacatg

SEQ ID NO: 185378 - DNA, 54 bp, Artificial
  Synthetic oligonucleotide
ggacagaccaacagcctatgatcatgctgatttgcgccgcaggatgccgcagtt

SEQ ID NO: 185379 - DNA, 52 bp, Artificial
  Synthetic oligonucleotide
gtaaaattctaaattaactttattagcgtaagaatatattctcgttttgtaa

SEQ ID NO: 185380 - DNA, 54 bp, Artificial
  Synthetic oligonucleotide
cagagccgtatatgtactggatagtcgagcagattaagcaacgtaaaatgccga

SEQ ID NO: 185381 - DNA, 54 bp, Artificial
  Synthetic oligonucleotide
atgtgctttatactcgccttgttgatgaaacgcgatgggatgaataaccttatg

SEQ ID NO: 185382 - DNA, 60 bp, Artificial
  Synthetic oligonucleotide
catcaaacgataccgacacatcatcgctggtgtgcagccagttagcttcagcaaacggct

SEQ ID NO: 185383 - DNA, 54 bp, Artificial
  Synthetic oligonucleotide
ctctggtcagggcgtagccccaacaccccaaataacccttatactgtgccaaaa

SEQ ID NO: 185384 - DNA, 54 bp, Artificial
  Synthetic oligonucleotide
agtattggcaggatatactcccggtgaagcagatcttttacgacgagcaatggg

SEQ ID NO: 185385 - DNA, 54 bp, Artificial
  Synthetic oligonucleotide
atgtgacgggtgtggtatctttggcggtatgagcaggatttggcaggggcagca

SEQ ID NO: 185386 - DNA, 54 bp, Artificial
  Synthetic oligonucleotide
ctccataatcaagacaacatttcccacacaatggagtcagaacgatatgcccca

SEQ ID NO: 185387 - DNA, 54 bp, Artificial
  Synthetic oligonucleotide
ggatgatgccgttgcattacggttcgcaaatcgacgaacatcatgcggtacgta

SEQ ID NO: 185388 - DNA, 54 bp, Artificial
  Synthetic oligonucleotide
attcagtgcataaccagcagtcttaaacgggtcttgcagcagggctctatggga

SEQ ID NO: 185389 - DNA, 54 bp, Artificial
  Synthetic oligonucleotide
atttacctgattacaatataagatacaatctatataaagatataattacattta

SEQ ID NO: 185390 - DNA, 54 bp, Artificial
  Synthetic oligonucleotide
atgtccaccgccaggttctccatctgtccctgcaccgacggcagcgccagcgct

SEQ ID NO: 185391 - DNA, 54 bp, Artificial
  Synthetic oligonucleotide
agccggtaaggggcggtgctgaagacgaggtgtatatggggatggaacctccct

SEQ ID NO: 185392 - DNA, 54 bp, Artificial
  Synthetic oligonucleotide
cactggtcgagtaaacgtcccgcgtcagatggcaggtagtcatgccgggttgcg

SEQ ID NO: 185393 - DNA, 59 bp, Artificial
  Synthetic oligonucleotide
cgctatatcgatagtgttaaccagcgcaagtccattgttgaagacatccggcccctggt

SEQ ID NO: 185394 - DNA, 54 bp, Artificial
  Synthetic oligonucleotide
attactacgttgaaacaactggcagacggcacggcgaaaccagaagttcaggac

SEQ ID NO: 185395 - DNA, 54 bp, Artificial
  Synthetic oligonucleotide
attacgggccacaatgttgccgtcattgttggataaaacggccactgctcggtt

SEQ ID NO: 185396 - DNA, 54 bp, Artificial
  Synthetic oligonucleotide
cagtctttgaaccatgcggatgtcagtgcgtcggtaagcgccgagcaaacgctg

SEQ ID NO: 185397 - DNA, 54 bp, Artificial
  Synthetic oligonucleotide
attacgccatgtctggcatttacgttgtctggataccttaaagggcccgttgct

SEQ ID NO: 185398 - DNA, 54 bp, Artificial
  Synthetic oligonucleotide
attggatacctattcgatcctaacattcagcagagggtacgcaacaccagtagt

SEQ ID NO: 185399 - DNA, 54 bp, Artificial
  Synthetic oligonucleotide
ctcgccggtttgcaggtacatcgcgaagggtaatattgcgccctgactgacacg

SEQ ID NO: 185400 - DNA, 54 bp, Artificial
  Synthetic oligonucleotide
gatatctattactctttccatcatgtttattttatgtcctattctatcaacaaa

SEQ ID NO: 185401 - DNA, 54 bp, Artificial
  Synthetic oligonucleotide
agtccataagatcgagcgttaaacaggtgtgtaagtgcataaattagcatctga

SEQ ID NO: 185402 - DNA, 54 bp, Artificial
  Synthetic oligonucleotide
cagagtgcagggcaaaacataataatccccattctctacaggctcggggacgca

SEQ ID NO: 185403 - DNA, 54 bp, Artificial
  Synthetic oligonucleotide
gatatactaaagtaaagactttactttgtgtcgtagcatgctagattactgatc

SEQ ID NO: 185404 - DNA, 60 bp, Artificial
  Synthetic oligonucleotide
cgctatacgccaggtatatacgcgtgccgggcttcagtacaccagtgcccatttactgcg

SEQ ID NO: 185405 - DNA, 54 bp, Artificial
  Synthetic oligonucleotide
ctcggcaatgccgacacaattagggattccggtcacttgtctaacggtggctcg

SEQ ID NO: 185406 - DNA, 54 bp, Artificial
  Synthetic oligonucleotide
cagtctgctgacgcagtgatggatttgcagatctgcatgtcatgatatcgccgt

SEQ ID NO: 185407 - DNA, 54 bp, Artificial
  Synthetic oligonucleotide
ggcaagcggttttgagcgatgcttttcatacacaatcaagatctgaagcatcaa

SEQ ID NO: 185408 - DNA, 54 bp, Artificial
  Synthetic oligonucleotide
ggaaccgccatcactgttgtataatgaaaccgttttaaaagaatcggaatcacg

SEQ ID NO: 185409 - DNA, 54 bp, Artificial
  Synthetic oligonucleotide
ggaacccccttcacttatcatttatttatgcgtcacccgttatcaatggagttc

SEQ ID NO: 185410 - DNA, 54 bp, Artificial
  Synthetic oligonucleotide
cggctattatgaaactctctgtccctgaaagtggtcagaaactatcagcctgga

SEQ ID NO: 185411 - DNA, 54 bp, Artificial
  Synthetic oligonucleotide
gtaccagcgcccgctgctgtacgctgagctgtccagtacggacaatactgcgtc

SEQ ID NO: 185412 - DNA, 54 bp, Artificial
  Synthetic oligonucleotide
aggttgcctccctggtacgcatccagaaacgtcgcacaacgagggacatcgcct

SEQ ID NO: 185413 - DNA, 54 bp, Artificial
  Synthetic oligonucleotide
cagatatgccgggttacacacagagtatgtcctggctgaaggatctttctcata

SEQ ID NO: 185414 - DNA, 54 bp, Artificial
  Synthetic oligonucleotide
ctatccactgtcgggcaaaatgcgtcggcaccattcccacgcatagtcctgccg

SEQ ID NO: 185415 - DNA, 54 bp, Artificial
  Synthetic oligonucleotide
cgctacgaacgccctgttcccggtgaatcgggttcagatggatacctgttaaat

SEQ ID NO: 185416 - DNA, 53 bp, Artificial
  Synthetic oligonucleotide
cagaaatccggcaatactccccacttgccacttattaagtacacctaaaaggg

SEQ ID NO: 185417 - DNA, 54 bp, Artificial
  Synthetic oligonucleotide
attgctagcaacttccgtaacaccgaagacctctcttcttacctgaaacgccat

SEQ ID NO: 185418 - DNA, 54 bp, Artificial
  Synthetic oligonucleotide
cagtcgaaacgaccaggtagccgacgcgcttaacgtcgcgctcatccaggtaag

SEQ ID NO: 185419 - DNA, 54 bp, Artificial
  Synthetic oligonucleotide
attgcgttcagcgcgtttcagcggtgcgtacaattaagggattatggtaaatcc

SEQ ID NO: 185420 - DNA, 53 bp, Artificial
  Synthetic oligonucleotide
atgttcgaacaacgcgtaaattctgacgtactgaccgtttccaccgttaactc

SEQ ID NO: 185421 - DNA, 54 bp, Artificial
  Synthetic oligonucleotide
attatccacctgctgagcgcactgtgggagcgtctgttctgacacactcacgcc

SEQ ID NO: 185422 - DNA, 54 bp, Artificial
  Synthetic oligonucleotide
atttacgatctccgctggtggctgaaagcattcgcagttatcaaacgggacaac

SEQ ID NO: 185423 - DNA, 54 bp, Artificial
  Synthetic oligonucleotide
gctgcgccgtttgtgagaatacccggcgaacagcctcgcttcccagcctttgcc

SEQ ID NO: 185424 - DNA, 54 bp, Artificial
  Synthetic oligonucleotide
agtagatgtttttggttaactggcagattggcaacccctgataagtggtaacga

SEQ ID NO: 185425 - DNA, 54 bp, Artificial
  Synthetic oligonucleotide
gatgggtcggtatcagcagaaacaagtcacaaggcaccgtctctgtcagccgat

SEQ ID NO: 185426 - DNA, 60 bp, Artificial
  Synthetic oligonucleotide
cgctacagacgcgacgttcgcactgtcccccacaaccgctatcatctggcggtatccctg

SEQ ID NO: 185427 - DNA, 54 bp, Artificial
  Synthetic oligonucleotide
ctgacgtccgcttccagttcagccagttccggtttgagtaaatccgccgggcgg

SEQ ID NO: 185428 - DNA, 54 bp, Artificial
  Synthetic oligonucleotide
atgtaccagatttcatcgatgccgttagctttgcggttgaacagatacccggac

SEQ ID NO: 185429 - DNA, 54 bp, Artificial
  Synthetic oligonucleotide
ggtttaacaatcataactgggactacggcaaagcgatgcaggagagattaagcc

SEQ ID NO: 185430 - DNA, 54 bp, Artificial
  Synthetic oligonucleotide
gtactgatcctaataagagtcgctatagggtcgtaacaggatcgccaacgactc

SEQ ID NO: 185431 - DNA, 54 bp, Artificial
  Synthetic oligonucleotide
gtactgctcagcccaggctatacgctgtttctcataacgctgcttcagcaacgc

SEQ ID NO: 185432 - DNA, 54 bp, Artificial
  Synthetic oligonucleotide
atttcacctgatagttatggcctttccagctaacgatttcgaaagaaccccagt

SEQ ID NO: 185433 - DNA, 54 bp, Artificial
  Synthetic oligonucleotide
agccgttacccggcgtagcgaacattggcactcgtccaacggtggctggcgtgc

SEQ ID NO: 185434 - DNA, 54 bp, Artificial
  Synthetic oligonucleotide
aggtaacctctataactggtcccggattacctccgcaaattgagattaatagcg

SEQ ID NO: 185435 - DNA, 54 bp, Artificial
  Synthetic oligonucleotide
cagacgaatatactcaacaccatatccggtgccctcactgccttgctgcgcgca

SEQ ID NO: 185436 - DNA, 54 bp, Artificial
  Synthetic oligonucleotide
atggtctgagacgctttattcgcaatgtcggtttgcagttcgtcgtagataatg

SEQ ID NO: 185437 - DNA, 60 bp, Artificial
  Synthetic oligonucleotide
gcagattgctgaggtgatggctaaactacgaggtattgccggtgcgagtcttgttggtcc

SEQ ID NO: 185438 - DNA, 60 bp, Artificial
  Synthetic oligonucleotide
cgctaataattcctgctgtagcagctcaatcactggctcgacctgcggtaatacaccgtg

SEQ ID NO: 185439 - DNA, 54 bp, Artificial
  Synthetic oligonucleotide
ctcaaggtatcgttgttgcatgcaggcttttgggaatgggctgcgatgttactg

SEQ ID NO: 185440 - DNA, 54 bp, Artificial
  Synthetic oligonucleotide
ctcacctgcagagacgggagacccggaatcgacacactgaatacccccggacgt

SEQ ID NO: 185441 - DNA, 54 bp, Artificial
  Synthetic oligonucleotide
gtagaagttagggtcagaacggtcatcggaagcgtacacataatgtcgggtatg

SEQ ID NO: 185442 - DNA, 54 bp, Artificial
  Synthetic oligonucleotide
attcgagagtcgggtctgtttgcggtttgccgagaaccattcgctgttatcctc

SEQ ID NO: 185443 - DNA, 51 bp, Artificial
  Synthetic oligonucleotide
gagtaagtggtgaactggttccctaaaacgtaaaggtaaggcattacacgg

SEQ ID NO: 185444 - DNA, 54 bp, Artificial
  Synthetic oligonucleotide
gctggcaaccactgctagtggtgcagggagctgcacgccctgagaactcacccc

SEQ ID NO: 185445 - DNA, 54 bp, Artificial
  Synthetic oligonucleotide
attgaaccattctgatcttcggttgtatcgcacgcagccgaccatgagttattg

SEQ ID NO: 185446 - DNA, 54 bp, Artificial
  Synthetic oligonucleotide
gagggttatccgatggcgttccgcgcaaagtcatgtttccggtctgtgttagcg

SEQ ID NO: 185447 - DNA, 53 bp, Artificial
  Synthetic oligonucleotide
gggaatatgtgactcattacgcgtccatctgcaataaggtacgtaacccggcc

SEQ ID NO: 185448 - DNA, 53 bp, Artificial
  Synthetic oligonucleotide
tgcgagagagataagtcatcgtatccggtaaacactgctaaccataacataag

SEQ ID NO: 185449 - DNA, 57 bp, Artificial
  Synthetic oligonucleotide
cgctaataaagctgggtaatctgcacagtaaagactacttgttccaatctagggtcg

SEQ ID NO: 185450 - DNA, 53 bp, Artificial
  Synthetic oligonucleotide
actactaggctgtcacgtgcgctcaggttcaacaccgttctcccgtaagtggg

SEQ ID NO: 185451 - DNA, 53 bp, Artificial
  Synthetic oligonucleotide
gaaacggggtctggaacccggtatcttctgcgccatccatacgtatggccgtc

SEQ ID NO: 185452 - DNA, 53 bp, Artificial
  Synthetic oligonucleotide
ctcagccagaatgaatgtgtgtagatgacctaaaaatgatgaacaggaatatc

SEQ ID NO: 185453 - DNA, 53 bp, Artificial
  Synthetic oligonucleotide
ctatatcataatgtgggatgctatatgcgaaaggtgaaggttaatactgcgga

SEQ ID NO: 185454 - DNA, 53 bp, Artificial
  Synthetic oligonucleotide
ggatcatcttcatcgaggttactatacatcggttcgtcttgttgcggtgactc

SEQ ID NO: 185455 - DNA, 53 bp, Artificial
  Synthetic oligonucleotide
tattccgcgactgcacctgtatgtggcggattaacgtcccggcgtcatactgc

SEQ ID NO: 185456 - DNA, 51 bp, Artificial
  Synthetic oligonucleotide
ccgggaaaaaacatggggtgtgacgtatcacgagggcaggaacgggaaatt

SEQ ID NO: 185457 - DNA, 53 bp, Artificial
  Synthetic oligonucleotide
aatggaatacgcactagagcaccccgaatcaaacgccatatttcgcgcgtttg

SEQ ID NO: 185458 - DNA, 53 bp, Artificial
  Synthetic oligonucleotide
aataggccgatgttgtcacctacgaactttgccatagttcgcaggctttcaat

SEQ ID NO: 185459 - DNA, 53 bp, Artificial
  Synthetic oligonucleotide
gttcaagccagctcgcgtggatgttagccaaccgacgttggcgagacgacgtt

SEQ ID NO: 185460 - DNA, 60 bp, Artificial
  Synthetic oligonucleotide
cgcgttcttttctctggacgtggtgagacacgatgggtcggcgcctgtgcagtgacgtgt

SEQ ID NO: 185461 - DNA, 53 bp, Artificial
  Synthetic oligonucleotide
cttgatccagcccttaaactggcttatctagtgcctagaatgggtcgtgtttt

SEQ ID NO: 185462 - DNA, 53 bp, Artificial
  Synthetic oligonucleotide
ggaggcgcgagcgtcgctctcctcactctctggcaaacgacgtagattgtgct

SEQ ID NO: 185463 - DNA, 53 bp, Artificial
  Synthetic oligonucleotide
gttcaatctatttctaatggattgtcgactgcttcggtaaaattattatgtgg

SEQ ID NO: 185464 - DNA, 53 bp, Artificial
  Synthetic oligonucleotide
tgacgcgtgctactagctcgttaagttcagcgacattcgttacagccataatg

SEQ ID NO: 185465 - DNA, 53 bp, Artificial
  Synthetic oligonucleotide
cgccagcgtcaaacgttacattgcgcgcaatagcattcgtttttacaccctaa

SEQ ID NO: 185466 - DNA, 53 bp, Artificial
  Synthetic oligonucleotide
actcggtgataaagtggaggccgatgtctgggcgcaggggagagactacggta

SEQ ID NO: 185467 - DNA, 53 bp, Artificial
  Synthetic oligonucleotide
cgccagtccataaatcgtgtctctgcttgggttagcactaaccgttaatccct

SEQ ID NO: 185468 - DNA, 53 bp, Artificial
  Synthetic oligonucleotide
tgacgctggtcgctccgctccccgttttctggtgtacccaccacgggggcatt

SEQ ID NO: 185469 - DNA, 53 bp, Artificial
  Synthetic oligonucleotide
cgcccagagcgggacagacaagggaatatcccgttacgtcggccgcgtttcac

SEQ ID NO: 185470 - DNA, 53 bp, Artificial
  Synthetic oligonucleotide
ctcgacacgatgcttgtcccatatatgcctaaggccataggctccctcgagac

SEQ ID NO: 185471 - DNA, 60 bp, Artificial
  Synthetic oligonucleotide
catccaacgttcagaaggcgaaactctcctctaaattacacagaacctcatcacattgtc

SEQ ID NO: 185472 - DNA, 53 bp, Artificial
  Synthetic oligonucleotide
ctcgaatgatatgaagcttgttagaatgcattgtaataccaactatcgatccc

SEQ ID NO: 185473 - DNA, 53 bp, Artificial
  Synthetic oligonucleotide
tattatctcatcttcagacctgcattcctcaccataattccggtcttcctggc

SEQ ID NO: 185474 - DNA, 53 bp, Artificial
  Synthetic oligonucleotide
ggacaacgtacttagcgtgttgtccggtgaaccacaaaacgccgaaattgcgc

SEQ ID NO: 185475 - DNA, 53 bp, Artificial
  Synthetic oligonucleotide
actaagaaattcatgtgcctcttttacatccataccttgtttagttgcttctc

SEQ ID NO: 185476 - DNA, 53 bp, Artificial
  Synthetic oligonucleotide
aggcgtaatgcctgattttgagttagaggacgattttttctagctactgcgtt

SEQ ID NO: 185477 - DNA, 53 bp, Artificial
  Synthetic oligonucleotide
tatatcgtaaagaaaatgattgagccatacgaacgatcgcgtcgtatacagct

SEQ ID NO: 185478 - DNA, 53 bp, Artificial
  Synthetic oligonucleotide
gttcgttgtgcttcacctcccagcgttttcgcaattcccgcaactgctctttt

SEQ ID NO: 185479 - DNA, 53 bp, Artificial
  Synthetic oligonucleotide
cgtggtacgcgtggcattaggacgagcgattacgcaacagtggttccccggta

SEQ ID NO: 185480 - DNA, 53 bp, Artificial
  Synthetic oligonucleotide
cacagtgatccacacatgggggcgtgaccagcagtggcatccgcatatccatt

SEQ ID NO: 185481 - DNA, 53 bp, Artificial
  Synthetic oligonucleotide
catgcgtgctatttacccttgcgggacgggttgtgttgggaaacgattaaccg

SEQ ID NO: 185482 - DNA, 60 bp, Artificial
  Synthetic oligonucleotide
catccagcataaggttggcgcgcgcttctgattttgcagtgaaccagaccgtcgcatctt

SEQ ID NO: 185483 - DNA, 53 bp, Artificial
  Synthetic oligonucleotide
tagcagcagtgcaagtctgcacctgcgaggcatgacatgcaggagggcgctat

SEQ ID NO: 185484 - DNA, 53 bp, Artificial
  Synthetic oligonucleotide
gggcattgtcgttaatgatgttactgtcacctggcgtaacgggcacacagcac

SEQ ID NO: 185485 - DNA, 53 bp, Artificial
  Synthetic oligonucleotide
gaaacccgcgaactatccgatgactcaggcgcttatcaaagcctcactgaaag

SEQ ID NO: 185486 - DNA, 53 bp, Artificial
  Synthetic oligonucleotide
ctcaatcatttgattccgaaacggtcacctttagtgtccgttctgacaatcaa

SEQ ID NO: 185487 - DNA, 53 bp, Artificial
  Synthetic oligonucleotide
tgaatatcagcacagaaacccgcgaaattctgcgtaattacagggccgtgatt

SEQ ID NO: 185488 - DNA, 53 bp, Artificial
  Synthetic oligonucleotide
cttcggtgattgctgataccacttttatcccttggataccctgactgaatggg

SEQ ID NO: 185489 - DNA, 53 bp, Artificial
  Synthetic oligonucleotide
tgaattttaccctttcgccccgactgtgccgggctagcgtgtgggtacggctc

SEQ ID NO: 185490 - DNA, 53 bp, Artificial
  Synthetic oligonucleotide
tgcgagcaaggttttctaatcccatgttttcgccgagagtaattaaatccgaa

SEQ ID NO: 185491 - DNA, 53 bp, Artificial
  Synthetic oligonucleotide
cacagacagatgtctctagaattaatgaatcgatgtgacgaatgtaatatgtc

SEQ ID NO: 185492 - DNA, 53 bp, Artificial
  Synthetic oligonucleotide
ctcgccctgccaccgttgattgacgccgagcggtcgttaatgcacgttgagca

SEQ ID NO: 185493 - DNA, 59 bp, Artificial
  Synthetic oligonucleotide
catccaggtattctctttatcaccatacgtagtgcgagtgtccaccttaacgcagggct

SEQ ID NO: 185494 - DNA, 53 bp, Artificial
  Synthetic oligonucleotide
agtccctgcttccgggcagctaaccaggcttacggtaaacggcacgtaatcgg

SEQ ID NO: 185495 - DNA, 53 bp, Artificial
  Synthetic oligonucleotide
acgaccggaaggtaccgcccgtgctgcatttaaccgcaaccgttctcacttta

SEQ ID NO: 185496 - DNA, 53 bp, Artificial
  Synthetic oligonucleotide
gccgcacgtcataacgtacaggtcctgataaccgacagcgggcagcgaaccgg

SEQ ID NO: 185497 - DNA, 53 bp, Artificial
  Synthetic oligonucleotide
tgccgtgatgctctttgaacgtgcggaatactgggaagaacgggggcggtcag

SEQ ID NO: 185498 - DNA, 53 bp, Artificial
  Synthetic oligonucleotide
gaacctcaggccagtgataaacgataccagacggaccagaataccatccagcc

SEQ ID NO: 185499 - DNA, 53 bp, Artificial
  Synthetic oligonucleotide
tgatgccggcaacgggcacaccgaaggtctacgacgttcactactggtatgcc

SEQ ID NO: 185500 - DNA, 53 bp, Artificial
  Synthetic oligonucleotide
ccggtaataattactggtatcacgaaacgcagaccagcctgccctcacagcgc

SEQ ID NO: 185501 - DNA, 53 bp, Artificial
  Synthetic oligonucleotide
tgattgccgtaccccttcattggccggttattcatgtctgtcagtaactccct

SEQ ID NO: 185502 - DNA, 53 bp, Artificial
  Synthetic oligonucleotide
caattacgattggcccgaaagatgcgcctgtatattacgagttcactgaccct

SEQ ID NO: 185503 - DNA, 53 bp, Artificial
  Synthetic oligonucleotide
actctgtcgatataagacggtcaaagatcgtggcgttgacaagtacagcgtct

SEQ ID NO: 185504 - DNA, 58 bp, Artificial
  Synthetic oligonucleotide
cgcgtacgttacgccacctggctatcgatacggcctttatctccgccagcggctggga

SEQ ID NO: 185505 - DNA, 53 bp, Artificial
  Synthetic oligonucleotide
cgtgagcagcttatccggttatgtgccctgcgcatccgatatcgccgggcctg

SEQ ID NO: 185506 - DNA, 53 bp, Artificial
  Synthetic oligonucleotide
gaaaaccggtattcgtgttggattttgatgcgtcggattttgaccggtcagaa

SEQ ID NO: 185507 - DNA, 53 bp, Artificial
  Synthetic oligonucleotide
tgcagtcgcttacccgcggtttgaaactgcttgaatggatttctgaatcgcat

SEQ ID NO: 185508 - DNA, 53 bp, Artificial
  Synthetic oligonucleotide
acctcatgccgccagtgacgcagtagggttttctgaccactgaggcccaactg

SEQ ID NO: 185509 - DNA, 53 bp, Artificial
  Synthetic oligonucleotide
tgcatagcccctaaagaccccatccctcggtaactcttaaatgatcggccctg

SEQ ID NO: 185510 - DNA, 53 bp, Artificial
  Synthetic oligonucleotide
tatgtttgtgctcaacgtcttacgcagttcgaaaagatttcgcaccagttcac

SEQ ID NO: 185511 - DNA, 53 bp, Artificial
  Synthetic oligonucleotide
cagacaacccttgagaaaattttagccaagtacggacgactctgaggtatcta

SEQ ID NO: 185512 - DNA, 53 bp, Artificial
  Synthetic oligonucleotide
ctcccaccgatcctccatgactttacgccactgtctctaggactgctatgtgc

SEQ ID NO: 185513 - DNA, 53 bp, Artificial
  Synthetic oligonucleotide
aatcaacggggccggagcctccgccttttcctcgtgccatgaacttaaccagc

SEQ ID NO: 185514 - DNA, 53 bp, Artificial
  Synthetic oligonucleotide
ccgggccgtcagagctgtacatggcgcgacttaacgggtccacaaacaggcgg

SEQ ID NO: 185515 - DNA, 59 bp, Artificial
  Synthetic oligonucleotide
catcccgtttcctttcgccagatggctttgtgtggccgtcgcgtttgcagcgacttgag

SEQ ID NO: 185516 - DNA, 53 bp, Artificial
  Synthetic oligonucleotide
cgccacctgtgatatctcatccggagatattactcttgattatggaacaattc

SEQ ID NO: 185517 - DNA, 53 bp, Artificial
  Synthetic oligonucleotide
cagaggcaagggctatagcactcgtctgcgcgtgcctcgttcgttgggagctt

SEQ ID NO: 185518 - DNA, 53 bp, Artificial
  Synthetic oligonucleotide
tatggggaacaaccttaaccagatcgcccggaaagtgaatgccggtggtgccg

SEQ ID NO: 185519 - DNA, 53 bp, Artificial
  Synthetic oligonucleotide
ggacccatgtatctcagaaccctattttagtaatcctgggaaattaaccaacg

SEQ ID NO: 185520 - DNA, 53 bp, Artificial
  Synthetic oligonucleotide
gttgagtgggtgctgtatattgccgagattatcgtgtccgttgtcggctatat

SEQ ID NO: 185521 - DNA, 53 bp, Artificial
  Synthetic oligonucleotide
accttataacggggaaggactctgccggatgccgcgttgtgagggcttacgcc

SEQ ID NO: 185522 - DNA, 53 bp, Artificial
  Synthetic oligonucleotide
aggcaggaggatgtgttttcctctgctgtccggtggcctccagggatggtacc

SEQ ID NO: 185523 - DNA, 53 bp, Artificial
  Synthetic oligonucleotide
tgcgcgacaaatcacaaagtgcgcacttatacaatctccactccgtttcgatt

SEQ ID NO: 185524 - DNA, 53 bp, Artificial
  Synthetic oligonucleotide
gggccagtcactcaccgttctgcacctcttggctgtactggacgtgttccggt

SEQ ID NO: 185525 - DNA, 53 bp, Artificial
  Synthetic oligonucleotide
gggaatgtccaatttcctacccagtctttgccgatgtcttacattccctgtac

SEQ ID NO: 185526 - DNA, 56 bp, Artificial
  Synthetic oligonucleotide
cgcggtgcgcgtaatgagacgttatggtaaatctctaaaggcaatatttcccgttc

SEQ ID NO: 185527 - DNA, 53 bp, Artificial
  Synthetic oligonucleotide
agtagtcagacttaccgctgcgtgcgcggtaggtaaacgccggcacagaatag

SEQ ID NO: 185528 - DNA, 53 bp, Artificial
  Synthetic oligonucleotide
actcagcggcgaccagagcatccgcgcacaagcgctcgattgtcgatactgcg

SEQ ID NO: 185529 - DNA, 53 bp, Artificial
  Synthetic oligonucleotide
atcacctgctgcacgttaaccttgccatctcatcccggtcttcgtatgccccg

SEQ ID NO: 185530 - DNA, 53 bp, Artificial
  Synthetic oligonucleotide
cttgtcatagagtcatcgacaagtcactccagactatcagtaacttatgacga

SEQ ID NO: 185531 - DNA, 53 bp, Artificial
  Synthetic oligonucleotide
atcactgaatggcatgggctacgtaaagccatccccaatccaggctgagtgta

SEQ ID NO: 185532 - DNA, 53 bp, Artificial
  Synthetic oligonucleotide
tataacgaatggcatccgtatagtacactgggctatcgctcaccgagggaata

SEQ ID NO: 185533 - DNA, 53 bp, Artificial
  Synthetic oligonucleotide
aatgagctcaggattttatacgccaccgtcactcgctgatcgattgagtagtt

SEQ ID NO: 185534 - DNA, 53 bp, Artificial
  Synthetic oligonucleotide
gaaatgccttaggtactccatacgcacctcccaatcaaatattacttggttta

SEQ ID NO: 185535 - DNA, 53 bp, Artificial
  Synthetic oligonucleotide
accgtgactgcatgacacatacccatatcaactttattggttccggcttgcca

SEQ ID NO: 185536 - DNA, 52 bp, Artificial
  Synthetic oligonucleotide
ccaacctgcgggaaaacggtggtgtggggtgaaatcagcccgtttcgtccat

SEQ ID NO: 185537 - DNA, 60 bp, Artificial
  Synthetic oligonucleotide
cgcggattacgggcatggacagtcagatactggccctgtacgccagaggaatgaccacgc

SEQ ID NO: 185538 - DNA, 53 bp, Artificial
  Synthetic oligonucleotide
tatcagcgtttgccttaaatgtttctcgtggttatatttttttacggggtgaa

SEQ ID NO: 185539 - DNA, 53 bp, Artificial
  Synthetic oligonucleotide
aagtgactgggacggactgacccttttaatccgatccctgaaagagtgaaccc

SEQ ID NO: 185540 - DNA, 53 bp, Artificial
  Synthetic oligonucleotide
agtaaggaccgaaagtgtcgagtatgctgtttctagacgtaatcgaggttagt

SEQ ID NO: 185541 - DNA, 53 bp, Artificial
  Synthetic oligonucleotide
aggccgtgggtcggttaaactgccggacgtgtcccgtatgaactttgcggaga

SEQ ID NO: 185542 - DNA, 53 bp, Artificial
  Synthetic oligonucleotide
caataagtcttgcggttaaactttcgccaatcggcaattcttcgagtgatgcg

SEQ ID NO: 185543 - DNA, 53 bp, Artificial
  Synthetic oligonucleotide
aatctgtcgtgtaattgcagtgctcatatcggtcatttatgtcagacttgcgt

SEQ ID NO: 185544 - DNA, 53 bp, Artificial
  Synthetic oligonucleotide
aatctgcggcttagcttgcgtgaagaacgcaacggtttcagagcggctaaccc

SEQ ID NO: 185545 - DNA, 53 bp, Artificial
  Synthetic oligonucleotide
cagctgtttatcttcagtggccgtgcgcaggattgcaagctcgctggggtaga

SEQ ID NO: 185546 - DNA, 53 bp, Artificial
  Synthetic oligonucleotide
tgaggttttcatcgcgctatccgctatgctgggtgagtcgattactgatgtta

SEQ ID NO: 185547 - DNA, 53 bp, Artificial
  Synthetic oligonucleotide
cgcattgccacgctaaagacccggatgtgtgtaccaacgtcgggttggcgtgg

SEQ ID NO: 185548 - DNA, 57 bp, Artificial
  Synthetic oligonucleotide
gcagattatcttagtaatacaggtataaaatctttcatgtctaaccttataccttat

SEQ ID NO: 185549 - DNA, 59 bp, Artificial
  Synthetic oligonucleotide
catccgttcttgtattttctccctacgcacttttgctgcatttccccctgtcacatgaa

SEQ ID NO: 185550 - DNA, 53 bp, Artificial
  Synthetic oligonucleotide
ccagcggtccaagaggggactgccactgaagggccacccctgacgatacgcgg

SEQ ID NO: 185551 - DNA, 53 bp, Artificial
  Synthetic oligonucleotide
gaaatagcttttgtgcgcggtcggagtggtcccgacaagggtttacccgcagt

SEQ ID NO: 185552 - DNA, 53 bp, Artificial
  Synthetic oligonucleotide
tgatataacctccatgacgattgaatagttgagggctatctgtcacagattta

SEQ ID NO: 185553 - DNA, 53 bp, Artificial
  Synthetic oligonucleotide
caatttgccaatggtcgacgttgtgcggtgacggcgatccgtagtggagcctg

SEQ ID NO: 185554 - DNA, 53 bp, Artificial
  Synthetic oligonucleotide
tgcgcggtattaagctggcgggagacgataaagtcgtctctctgatcatccca

SEQ ID NO: 185555 - DNA, 53 bp, Artificial
  Synthetic oligonucleotide
taattcggctgtcatcggcgggattttaccaagccccggagcggtggcattta

SEQ ID NO: 185556 - DNA, 53 bp, Artificial
  Synthetic oligonucleotide
aggtcagggcaccggtgtaaaggtatccgggaatgtcctgaataatattaagt

SEQ ID NO: 185557 - DNA, 53 bp, Artificial
  Synthetic oligonucleotide
tacgggtagcagcaatcccccacttcgcatccttgcccaagtaaagataatgg

SEQ ID NO: 185558 - DNA, 53 bp, Artificial
  Synthetic oligonucleotide
ccacgttaattactttcgtgacatacccgtttgaaatcccccgcacttgcgac

SEQ ID NO: 185559 - DNA, 53 bp, Artificial
  Synthetic oligonucleotide
acgcctgtctgatagtatggctacgagtacagatatcatcgacgtgtttatcc

SEQ ID NO: 185560 - DNA, 59 bp, Artificial
  Synthetic oligonucleotide
cgcgctgacaacactttagcctgtctttggttaccatcccagcgacgggccatccagtg

SEQ ID NO: 185561 - DNA, 53 bp, Artificial
  Synthetic oligonucleotide
gcgtgatgtcagagaagtcgcgctggtacttgagctcacccctgaccatttgc

SEQ ID NO: 185562 - DNA, 53 bp, Artificial
  Synthetic oligonucleotide
acgcgacattccggcagtttctgacacaacctgacattgcccgggattttatg

SEQ ID NO: 185563 - DNA, 53 bp, Artificial
  Synthetic oligonucleotide
ctgaaggcgaagttttcctaattgggcaaaccgatcactcatgggattcccgt

SEQ ID NO: 185564 - DNA, 53 bp, Artificial
  Synthetic oligonucleotide
tcgcactttttcctggtcagaacaggcgacagtgggctgacacgatgataaat

SEQ ID NO: 185565 - DNA, 53 bp, Artificial
  Synthetic oligonucleotide
cagcagatacgttatcgcagtactggataaaacgtgccgaacaatatcaccca

SEQ ID NO: 185566 - DNA, 53 bp, Artificial
  Synthetic oligonucleotide
acagttttaacgaaatcaggcgcttgatccgagacaatcggtggacgcatcgg

SEQ ID NO: 185567 - DNA, 53 bp, Artificial
  Synthetic oligonucleotide
ggccttgccagtagacgtgcggaactgaccatctttgaagggaacccagtcct

SEQ ID NO: 185568 - DNA, 53 bp, Artificial
  Synthetic oligonucleotide
ccacggttcgtgctagtctgtctaacctcgattacaactagaaacagcatact

SEQ ID NO: 185569 - DNA, 53 bp, Artificial
  Synthetic oligonucleotide
gctggataaatacacgaattccgatggaaatcatacgcctgccatcaggcgta

SEQ ID NO: 185570 - DNA, 51 bp, Artificial
  Synthetic oligonucleotide
ccacggtaccgtgggttccggtaaatccgaagttatacgccggctactgaa

SEQ ID NO: 185571 - DNA, 60 bp, Artificial
  Synthetic oligonucleotide
cgcaccaatcggtatcaccgggtgatactgttcggcacgtttgatgtagtagtcactgag

SEQ ID NO: 185572 - DNA, 53 bp, Artificial
  Synthetic oligonucleotide
tacagagtcagtccgggtggggtactggattgacaggcgggcagaacccacct

SEQ ID NO: 185573 - DNA, 53 bp, Artificial
  Synthetic oligonucleotide
gcttactttttccagaaggaagcggactatcgacaactttgtccagatctcga

SEQ ID NO: 185574 - DNA, 53 bp, Artificial
  Synthetic oligonucleotide
agggcggaaatatgcgtcagtccgctaagctactgggtatttcacgtacggcg

SEQ ID NO: 185575 - DNA, 53 bp, Artificial
  Synthetic oligonucleotide
ctacgacacacctgaaatcgctacgaagcccgtaaacaaaggttttgccgcta

SEQ ID NO: 185576 - DNA, 53 bp, Artificial
  Synthetic oligonucleotide
cctccacgaatcccatgctaccgactctaaagctgcgtctaaacgcataagag

SEQ ID NO: 185577 - DNA, 53 bp, Artificial
  Synthetic oligonucleotide
cgcaaggttccgcgttggggcagccgtttcattattcgacactctaaattcga

SEQ ID NO: 185578 - DNA, 50 bp, Artificial
  Synthetic oligonucleotide
gcttaaaacgcttaacgtaggataatttcctttttccaagcggacccgta

SEQ ID NO: 185579 - DNA, 53 bp, Artificial
  Synthetic oligonucleotide
cctccagtaagccgccgttaccggtctgccaatcccccagcaaggcatttaca

SEQ ID NO: 185580 - DNA, 52 bp, Artificial
  Synthetic oligonucleotide
taaggtgaaaacaccgggcggctttatcacttacgaaacggaccgcgcgagg

SEQ ID NO: 185581 - DNA, 53 bp, Artificial
  Synthetic oligonucleotide
acagcccggtcatcgcagttctatgtgaactctcgattgctaggcccaaatgc

SEQ ID NO: 185582 - DNA, 59 bp, Artificial
  Synthetic oligonucleotide
cgcacactggatggtccttcgctgggatggtgaaactatgaaaaatggcaggttaagtg

SEQ ID NO: 185583 - DNA, 53 bp, Artificial
  Synthetic oligonucleotide
ggcgcggctggggcaattgcatggctaatggatgaacgctatgaatccatggc

SEQ ID NO: 185584 - DNA, 53 bp, Artificial
  Synthetic oligonucleotide
tcgctgccgtttccggtcttctgcgttgttgcgaggaggcgtatattacgcta

SEQ ID NO: 185585 - DNA, 53 bp, Artificial
  Synthetic oligonucleotide
gctgtgcgtcacagcgacagtatccaggcagggtttgcgccaaaaacgcggtt

SEQ ID NO: 185586 - DNA, 53 bp, Artificial
  Synthetic oligonucleotide
tcagcatcgtggtttaccgcttcaccatagcctgcaaagcgtaaacctttgtc

SEQ ID NO: 185587 - DNA, 53 bp, Artificial
  Synthetic oligonucleotide
ctggccgcatttatgtacattagctggtagcctcattgcgtaacattatcgca

SEQ ID NO: 185588 - DNA, 53 bp, Artificial
  Synthetic oligonucleotide
tcagccggcacgtcggtcgctcatggattaccgaagctctggcagaaattggc

SEQ ID NO: 185589 - DNA, 53 bp, Artificial
  Synthetic oligonucleotide
aggtccgggtcatccgttatacatgactggtccggcggcacatatctacgacg

SEQ ID NO: 185590 - DNA, 53 bp, Artificial
  Synthetic oligonucleotide
gctgactccgcatctctacgactgactagccctcgccaaacctttccacccgc

SEQ ID NO: 185591 - DNA, 53 bp, Artificial
  Synthetic oligonucleotide
tacccggcattccatcaatagattacaacgtaattgtcagcgtattcccttga

SEQ ID NO: 185592 - DNA, 53 bp, Artificial
  Synthetic oligonucleotide
cactaaagggatggttgcttgtgaactgatgttagcatccatcccgcaaagag

SEQ ID NO: 185593 - DNA, 60 bp, Artificial
  Synthetic oligonucleotide
cgcacactggatggcccttcgctgggatggtaatcagagacaggctaaaatgttgtcagc

SEQ ID NO: 185594 - DNA, 53 bp, Artificial
  Synthetic oligonucleotide
tcatcgccacatggtgctcaaaaccgttgttacagatatgcgtgagtaaactc

SEQ ID NO: 185595 - DNA, 53 bp, Artificial
  Synthetic oligonucleotide
cgatcgcaccggtatgtatgttcagccgcctgttacagtcaggcgcactggta

SEQ ID NO: 185596 - DNA, 53 bp, Artificial
  Synthetic oligonucleotide
accccgggtaacaggccgctcgtgcacagtacatgcaggttctccccccctgc

SEQ ID NO: 185597 - DNA, 53 bp, Artificial
  Synthetic oligonucleotide
accccggcactaattcaattgacggagatcactttatgaccactaaccaatgc

SEQ ID NO: 185598 - DNA, 53 bp, Artificial
  Synthetic oligonucleotide
taccgacgaatgccacaatcatcgagaacaacgctgggtattcgtatggatag

SEQ ID NO: 185599 - DNA, 53 bp, Artificial
  Synthetic oligonucleotide
ctaatgggggtaataacgagcaacctatgacgccggaaatgcgtaagctacaa

SEQ ID NO: 185600 - DNA, 53 bp, Artificial
  Synthetic oligonucleotide
cgatgaacttgccgcctggccgggcgcgcttgcagaccaggagcgcacccggc

SEQ ID NO: 185601 - DNA, 53 bp, Artificial
  Synthetic oligonucleotide
taccgcgtttgtttccatgatagcggaagtcatgatcttattgttgagtatca

SEQ ID NO: 185602 - DNA, 53 bp, Artificial
  Synthetic oligonucleotide
accatcgcgcgactgatgaaaagcatggggcttaccggcgtgcggcgggaaaa

SEQ ID NO: 185603 - DNA, 53 bp, Artificial
  Synthetic oligonucleotide
ctgattgtctgagttcgacaactgacggatttgttaagtcctggtcgggataa

SEQ ID NO: 185604 - DNA, 60 bp, Artificial
  Synthetic oligonucleotide
cgcacaacagcatccgaggtctgctctacgagacactctttggccttctcgcaagcactg

SEQ ID NO: 185605 - DNA, 53 bp, Artificial
  Synthetic oligonucleotide
tcatggttgactattaattgctcgctatctgcataagtgacgaactctttgac

SEQ ID NO: 185606 - DNA, 53 bp, Artificial
  Synthetic oligonucleotide
tccactcaatgctgctttaataccttgcagcgcggccaaccgaccattgctct

SEQ ID NO: 185607 - DNA, 53 bp, Artificial
  Synthetic oligonucleotide
tccaaccggtgaatagctgaggtttccccgacagcgttaccatcgttggcgta

SEQ ID NO: 185608 - DNA, 53 bp, Artificial
  Synthetic oligonucleotide
acccgcggcgtaatcctaagctggcacttgagcggcgtaatttggtcctgcgc

SEQ ID NO: 185609 - DNA, 53 bp, Artificial
  Synthetic oligonucleotide
tcgaaatagctcagattatgggccatgcctcagttagatctcagcagagttac

SEQ ID NO: 185610 - DNA, 53 bp, Artificial
  Synthetic oligonucleotide
acatccaccgaatatgcggactggcgacgttttactgcacgcattattttcag

SEQ ID NO: 185611 - DNA, 53 bp, Artificial
  Synthetic oligonucleotide
acatgaagatatgtacctaagcgcccttcgggaaaactatgctctggcgcaca

SEQ ID NO: 185612 - DNA, 53 bp, Artificial
  Synthetic oligonucleotide
ctgcgtgaatatccttcggtgcggacctctgataccatattctcgtggtctcg

SEQ ID NO: 185613 - DNA, 53 bp, Artificial
  Synthetic oligonucleotide
cctgcgccgttgatacctggagcattttcagtcggtgcgccagaacttgcggt

SEQ ID NO: 185614 - DNA, 53 bp, Artificial
  Synthetic oligonucleotide
gcgtttcgcgctatccaacagatcgagcgttgccagaccgagaacgtccagct

SEQ ID NO: 185615 - DNA, 59 bp, Artificial
  Synthetic oligonucleotide
cgcaattgttaacggcaagcttacgcttaagtagccagtattcatcttctctttatcaa

SEQ ID NO: 185616 - DNA, 53 bp, Artificial
  Synthetic oligonucleotide
ctgacgtcacggtgaccgcaggtgatgtcgcctgggtacgcaaaggcggtcac

SEQ ID NO: 185617 - DNA, 53 bp, Artificial
  Synthetic oligonucleotide
tcctaacggatcttttcggtagacaactgaacctggtgaaactgtgctgccaa

SEQ ID NO: 185618 - DNA, 53 bp, Artificial
  Synthetic oligonucleotide
ctaacctcgaaatcttcgaatccatttaccgtgaaggtatgcagccgcatgag

SEQ ID NO: 185619 - DNA, 53 bp, Artificial
  Synthetic oligonucleotide
aggtatacctcttgtaggctatacctcctgcttcacgttatcgcgcgattaac

SEQ ID NO: 185620 - DNA, 53 bp, Artificial
  Synthetic oligonucleotide
gctacccttgttcagtcatccgatgccgtaaacggcgcaagaatcctgaggta

SEQ ID NO: 185621 - DNA, 53 bp, Artificial
  Synthetic oligonucleotide
tcagtgctgtgacgagggagttaaccgcctgagtgacggcctcaagtgggtta

SEQ ID NO: 185622 - DNA, 53 bp, Artificial
  Synthetic oligonucleotide
cactcattgagccaaacgttgcacccacgttcatggcattaggatactgctct

SEQ ID NO: 185623 - DNA, 53 bp, Artificial
  Synthetic oligonucleotide
tccgcgccaactcatgcgctcaaagtgaatgctgaggccgtcacccactaatt

SEQ ID NO: 185624 - DNA, 53 bp, Artificial
  Synthetic oligonucleotide
cgatgcctgaccaattgaacccggtttgtgatcgttcagtttcgcgatcgctt

SEQ ID NO: 185625 - DNA, 53 bp, Artificial
  Synthetic oligonucleotide
tctgggtgaatgaggaaaagcatcgccatccggaggttggataaggcgctcgc

SEQ ID NO: 185626 - DNA, 60 bp, Artificial
  Synthetic oligonucleotide
catgtgcgaaaaactgcatgaggatgcggaacagctattccgcactctggctcttcgtct

SEQ ID NO: 185627 - DNA, 53 bp, Artificial
  Synthetic oligonucleotide
cttaatgcgcacaccgttttcggtacccgtaaaatgcaggtcctgtagggtga

SEQ ID NO: 185628 - DNA, 53 bp, Artificial
  Synthetic oligonucleotide
tctgctcgcgcggtgatggtagcgtatgcgagaggggcggatttagatcagtt

SEQ ID NO: 185629 - DNA, 53 bp, Artificial
  Synthetic oligonucleotide
tctgcacaaatggcttcgttctggatactgttgaccgcgagcgtagctgcctg

SEQ ID NO: 185630 - DNA, 53 bp, Artificial
  Synthetic oligonucleotide
cgttaaaccgcaccactgaccgcgaaatgttatcgcacggcctgttaccgggg

SEQ ID NO: 185631 - DNA, 53 bp, Artificial
  Synthetic oligonucleotide
acaagcagttggcagttcttatccgtcaactgacattgctgcgggatacgtct

SEQ ID NO: 185632 - DNA, 53 bp, Artificial
  Synthetic oligonucleotide
ggctaactaaatctgactggtttatccgtaacacaacacgctaacagggccgg

SEQ ID NO: 185633 - DNA, 53 bp, Artificial
  Synthetic oligonucleotide
tcacaacgtacggccaggagagtaggggcacaatagcgatgagtcgcctgggg

SEQ ID NO: 185634 - DNA, 53 bp, Artificial
  Synthetic oligonucleotide
cacccggctaacgctgtgggaaaggctctccgttgacccagatcctgcggtat

SEQ ID NO: 185635 - DNA, 53 bp, Artificial
  Synthetic oligonucleotide
ggaacacggggcatcgcttaccaatggcatcctgcaaatgtcaaaaggcgcag

SEQ ID NO: 185636 - DNA, 53 bp, Artificial
  Synthetic oligonucleotide
ctgtctatcgctggaatggtggcaactgattatattaagtttctgcctccaat

SEQ ID NO: 185637 - DNA, 60 bp, Artificial
  Synthetic oligonucleotide
cgcaattaggagttactcaacgagaagtgcaagaaatggaatctcgtatgtcgactcaag

SEQ ID NO: 185638 - DNA, 53 bp, Artificial
  Synthetic oligonucleotide
gcggagaccacggtattaacaggtgccgggtcagcaatagttgtcagaccttc

SEQ ID NO: 185639 - DNA, 53 bp, Artificial
  Synthetic oligonucleotide
taaccgctgtgctttaacatcctctgttattgcctctcttcgtctatttgggg

SEQ ID NO: 185640 - DNA, 53 bp, Artificial
  Synthetic oligonucleotide
ctagcagccaactgtatgccgactgtatcctccgaggggaaacggtaacaggc

SEQ ID NO: 185641 - DNA, 53 bp, Artificial
  Synthetic oligonucleotide
ctgtcatgctgaaagtattaccctaaccggatccgctgggttcgtcgcaatcg

SEQ ID NO: 185642 - DNA, 53 bp, Artificial
  Synthetic oligonucleotide
tattgctagagaatgtcttagatcaaaagtttaaggagtatttaacacctcta

SEQ ID NO: 185643 - DNA, 53 bp, Artificial
  Synthetic oligonucleotide
tcaaagattaagcgagctcgaacacacgggtttcgtacgcgtatgtcgacgaa

SEQ ID NO: 185644 - DNA, 53 bp, Artificial
  Synthetic oligonucleotide
ccgtccctaccattacccattcgccggaaagctgttgcattcgttcatgaacg

SEQ ID NO: 185645 - DNA, 53 bp, Artificial
  Synthetic oligonucleotide
tgaaaagcgttactggcgtgtggacgactgtcacggcgcaaacggtgtgcatt

SEQ ID NO: 185646 - DNA, 53 bp, Artificial
  Synthetic oligonucleotide
aatttcggccagcgggcaaggaaccgtcacttatggcaatgggcagtcggtag

SEQ ID NO: 185647 - DNA, 53 bp, Artificial
  Synthetic oligonucleotide
cagaactatgttcgaacaacgcgtaaattctgacgtactaaccgttgctactg

SEQ ID NO: 185648 - DNA, 57 bp, Artificial
  Synthetic oligonucleotide
catgtgggagatgggatctaaaatccccgtgcagaactttccatccagggggagaaa

SEQ ID NO: 185649 - DNA, 53 bp, Artificial
  Synthetic oligonucleotide
aattttcggggagatagttactgtcgttccgctaactgccagaacgcggaata

SEQ ID NO: 185650 - DNA, 53 bp, Artificial
  Synthetic oligonucleotide
ggctggcgtcagttcccgcatgctcagttcgcggtcattcggaataacacgaa

SEQ ID NO: 185651 - DNA, 53 bp, Artificial
  Synthetic oligonucleotide
cgaatttcgtaaactggtaacagctggcaaggttatatcagcatgagtaaggg

SEQ ID NO: 185652 - DNA, 53 bp, Artificial
  Synthetic oligonucleotide
gcgcctttgctgtgaaccaacagcgcgtattcgttaaacaggcggtaggcctg

SEQ ID NO: 185653 - DNA, 53 bp, Artificial
  Synthetic oligonucleotide
caccagtaccctctatagcagaagccgtaccaatggttcccgcacctaacagc

SEQ ID NO: 185654 - DNA, 53 bp, Artificial
  Synthetic oligonucleotide
catttgctgaacgcattagagcaactgcaacaggactatatgcagcggctgag

SEQ ID NO: 185655 - DNA, 53 bp, Artificial
  Synthetic oligonucleotide
tcaacccggtcagcgtgctgataccgttcaaggtgcttattctggaggtcagc

SEQ ID NO: 185656 - DNA, 53 bp, Artificial
  Synthetic oligonucleotide
cgtgttctctgcgttgacaatgcgttgcgtgaaaaccaaagcggtgccacgca

SEQ ID NO: 185657 - DNA, 53 bp, Artificial
  Synthetic oligonucleotide
tctgttatctgcgctttgtcagcgttatccggttcaccactggataaggcaat

SEQ ID NO: 185658 - DNA, 53 bp, Artificial
  Synthetic oligonucleotide
ccgtgcaatttcctccggagagggactgcctgagtcagggggggtgttgtgtc

SEQ ID NO: 185659 - DNA, 57 bp, Artificial
  Synthetic oligonucleotide
atgaagctcaaactcttccgcagttaattcgatgacggttaattccttgtaatggta

SEQ ID NO: 185660 - DNA, 58 bp, Artificial
  Synthetic oligonucleotide
cgcaattactaattctcctcgaaaagctcaacgaactagacctagatgagagggcgaa

SEQ ID NO: 185661 - DNA, 53 bp, Artificial
  Synthetic oligonucleotide
acactatttaattgaagagatagattggagggattgcattcattgggataagt

SEQ ID NO: 185662 - DNA, 53 bp, Artificial
  Synthetic oligonucleotide
tactgaatccaatcaggttacgggctgcattccccattacgggcaaacttaac

SEQ ID NO: 185663 - DNA, 53 bp, Artificial
  Synthetic oligonucleotide
cctatccgacgcaattcatgctcgatcctatcgttaaagaagagaatatctgg

SEQ ID NO: 185664 - DNA, 53 bp, Artificial
  Synthetic oligonucleotide
acactgccgaacccagtagggtaaagcttccctgtgttctgcggccaaataac

SEQ ID NO: 185665 - DNA, 53 bp, Artificial
  Synthetic oligonucleotide
tcacgttctatcatgcgttttttttctaagtcggcaggaagtatggatgttcg

SEQ ID NO: 185666 - DNA, 53 bp, Artificial
  Synthetic oligonucleotide
caccgtatcctttaggatatcttactacactaggacccttattatgcatatag

SEQ ID NO: 185667 - DNA, 53 bp, Artificial
  Synthetic oligonucleotide
taagcagggttgcgagcagtttatacgttaccgtgacagcagccggatcccgc

SEQ ID NO: 185668 - DNA, 53 bp, Artificial
  Synthetic oligonucleotide
tcgtcagaggcgcttacgagcgtgtatgaataactatccgcggtctttgctga

SEQ ID NO: 185669 - DNA, 53 bp, Artificial
  Synthetic oligonucleotide
ggcactgaatatccaacgtttacgcctgctgccggcggaactctctaccggta

SEQ ID NO: 185670 - DNA, 53 bp, Artificial
  Synthetic oligonucleotide
cctcaagtcactagttaaactaaaacttcagacaaacggtgcaccgctgaggg

SEQ ID NO: 185671 - DNA, 58 bp, Artificial
  Synthetic oligonucleotide
catgttgccagaaactgcatcagtttagtactgggtaaattttttacgcagaagagcc

SEQ ID NO: 185672 - DNA, 53 bp, Artificial
  Synthetic oligonucleotide
atagccgcccatttgctacctgtaatgatggctagaactataaccgtaagagt

SEQ ID NO: 185673 - DNA, 53 bp, Artificial
  Synthetic oligonucleotide
catgttaacttcggcactggtcgattgaatgacctaacacgcaaccaacttca

SEQ ID NO: 185674 - DNA, 53 bp, Artificial
  Synthetic oligonucleotide
tcagacaccactactgatctaacctctttgagtttccgcctgtccacaatgga

SEQ ID NO: 185675 - DNA, 53 bp, Artificial
  Synthetic oligonucleotide
ctctggctgctaacgcgcggcttgcctcaggcggtaagtcattccccgtaccg

SEQ ID NO: 185676 - DNA, 53 bp, Artificial
  Synthetic oligonucleotide
cgttgggcccagacccaaagcataaaatggcacttttaggccgccagtaacaa

SEQ ID NO: 185677 - DNA, 53 bp, Artificial
  Synthetic oligonucleotide
tctcaatggcggtagccagtttcgggttgacactggcatcagagccctgcggg

SEQ ID NO: 185678 - DNA, 53 bp, Artificial
  Synthetic oligonucleotide
tctcaacatcggtaagagccgcgccaaggtgttcgtggaaaagaacaccggtg

SEQ ID NO: 185679 - DNA, 53 bp, Artificial
  Synthetic oligonucleotide
ctgtcaacggtagtcacattacccgtaatttaaattatgacacgtaaaggttc

SEQ ID NO: 185680 - DNA, 53 bp, Artificial
  Synthetic oligonucleotide
cagatcatgacggaaaacaccgcaggccagacttaccgggcaacctattcacc

SEQ ID NO: 185681 - DNA, 53 bp, Artificial
  Synthetic oligonucleotide
cctaattcattcagggacaatgccctgtcacgtcgggttatcaagcggatcac

SEQ ID NO: 185682 - DNA, 58 bp, Artificial
  Synthetic oligonucleotide
cattaacagtggtggctacctgagtgtctacggggacggcagtgccgttgacattacc

SEQ ID NO: 185683 - DNA, 53 bp, Artificial
  Synthetic oligonucleotide
tctacgaaaaagttcttggcatgaatatttatcttgggcggttgatgtatttc

SEQ ID NO: 185684 - DNA, 51 bp, Artificial
  Synthetic oligonucleotide
acacgagttccttttacctggtaggcaaggtttactgccggttggcggtag

SEQ ID NO: 185685 - DNA, 53 bp, Artificial
  Synthetic oligonucleotide
ggcgtcttgcactaaccagacataatcttaatgcccacttaacttgcgctgag

SEQ ID NO: 185686 - DNA, 53 bp, Artificial
  Synthetic oligonucleotide
gcggcccgtaatgctttaggtcaggctcgttccggggcaacaattgtatcgag

SEQ ID NO: 185687 - DNA, 53 bp, Artificial
  Synthetic oligonucleotide
acacgcatctatcgcatcgcctttggatgtgtattaatacacaccattaaact

SEQ ID NO: 185688 - DNA, 53 bp, Artificial
  Synthetic oligonucleotide
taactacgcgctgtttgacgcgggaaaagtcagcggcaccgcctgccttaacg

SEQ ID NO: 185689 - DNA, 53 bp, Artificial
  Synthetic oligonucleotide
agtgagtgttatttagttcctggaaatactaactatgaaagccctgaccgtat

SEQ ID NO: 185690 - DNA, 53 bp, Artificial
  Synthetic oligonucleotide
tcgttttatgcaagctgtgaggcgctattccgccctgatttacgtgggaagcc

SEQ ID NO: 185691 - DNA, 53 bp, Artificial
  Synthetic oligonucleotide
ctgtaccgcttccgctcggctcttgccacgtgcaggagtctgggatggcagat

SEQ ID NO: 185692 - DNA, 53 bp, Artificial
  Synthetic oligonucleotide
aggtgacttcaaatctgtggcatctttcgcggtgacttacaagtaatcacccg

SEQ ID NO: 185693 - DNA, 60 bp, Artificial
  Synthetic oligonucleotide
cgcaataaagcgagctgcggtgatgtatttagcaacgtgatgttaccaacgccccgttca

SEQ ID NO: 185694 - DNA, 53 bp, Artificial
  Synthetic oligonucleotide
gcggctcaccggtatccgtcagtcgctttggacggcgggttcgctcatccgta

SEQ ID NO: 185695 - DNA, 53 bp, Artificial
  Synthetic oligonucleotide
gtcacgggttaaaacgcctttgaacatcggatcgtcattgagcaaagtacgca

SEQ ID NO: 185696 - DNA, 53 bp, Artificial
  Synthetic oligonucleotide
ttatacgtcaaagaggattaacttatgcgtacgtttagtggcaaacgtagtac

SEQ ID NO: 185697 - DNA, 53 bp, Artificial
  Synthetic oligonucleotide
aacctgcaaagccagttatatagcgcaaaacaactggttagcgagctggtagg

SEQ ID NO: 185698 - DNA, 53 bp, Artificial
  Synthetic oligonucleotide
gcagcgcccagtaaggtccgtaatagctgaggatcccaacaccatagaacgtt

SEQ ID NO: 185699 - DNA, 53 bp, Artificial
  Synthetic oligonucleotide
atctgtggcaaatttgcgaggacatgacggaagtctgccccgatgccaccatg

SEQ ID NO: 185700 - DNA, 53 bp, Artificial
  Synthetic oligonucleotide
ttatcgaaaagagtgcagtttcggcctaagccgtaatcggcaacgatttcttt

SEQ ID NO: 185701 - DNA, 53 bp, Artificial
  Synthetic oligonucleotide
agaataaagaccgcgcctctgcgctactgcaattcaataagctgcgggctaat

SEQ ID NO: 185702 - DNA, 53 bp, Artificial
  Synthetic oligonucleotide
cgcgtttggttaaggatctgccggaatcattctatgctcaggccgccacagag

SEQ ID NO: 185703 - DNA, 53 bp, Artificial
  Synthetic oligonucleotide
ggtcatcgactcgctgaattactcgatatcgtgacggccagactgggtatttc

SEQ ID NO: 185704 - DNA, 60 bp, Artificial
  Synthetic oligonucleotide
cattaattccgggtctgacatgcggccaatacccagatcgatctcgcctgatttcagacc

SEQ ID NO: 185705 - DNA, 53 bp, Artificial
  Synthetic oligonucleotide
gcagagtgagaaacctcgccagcgggatttaatcgctgccgtgcgcgctaggg

SEQ ID NO: 185706 - DNA, 53 bp, Artificial
  Synthetic oligonucleotide
gtgaggcagaatttgtgccgaggtatagccgtacttctcacacgcgagtttaa

SEQ ID NO: 185707 - DNA, 53 bp, Artificial
  Synthetic oligonucleotide
gcagacctgcgccattcgtgcaagcaagagaagttttgaatagcaatccaaaa

SEQ ID NO: 185708 - DNA, 53 bp, Artificial
  Synthetic oligonucleotide
gtcactgggcattcgctctcccatctggctgcttataacctgatcgccgatca

SEQ ID NO: 185709 - DNA, 53 bp, Artificial
  Synthetic oligonucleotide
ttcaacctgtagcattaatgcgtttaggattattcgttcccactttaaaatct

SEQ ID NO: 185710 - DNA, 53 bp, Artificial
  Synthetic oligonucleotide
gtgacgactgcctggtaatgacacgcgttaagccggtgcatccagaatatgcg

SEQ ID NO: 185711 - DNA, 53 bp, Artificial
  Synthetic oligonucleotide
gtcactgttgcctttgggattcaggcgttcaggtcacgcgtattctggacagc

SEQ ID NO: 185712 - DNA, 53 bp, Artificial
  Synthetic oligonucleotide
agattatttacagcttaatcatgttgaaatacggatttgtttctccgagtatt

SEQ ID NO: 185713 - DNA, 53 bp, Artificial
  Synthetic oligonucleotide
gtaaatcgtctgaggttgagacgttttgtaagtcatatgacaacggcgcattt

SEQ ID NO: 185714 - DNA, 53 bp, Artificial
  Synthetic oligonucleotide
agacacaatatggttaaatgcgtgactttaggagagcatgaaagttgttacgg

SEQ ID NO: 185715 - DNA, 60 bp, Artificial
  Synthetic oligonucleotide
cgcaagtcagccgcttgcaaccggagcggctaaacgtcagaccggactgagcgaagatat

SEQ ID NO: 185716 - DNA, 53 bp, Artificial
  Synthetic oligonucleotide
ttcacgtgacagcagctaccatctaggatacatcagttcaccctattatgtca

SEQ ID NO: 185717 - DNA, 53 bp, Artificial
  Synthetic oligonucleotide
ccctgtgacgatgcattcaatactggtcgagcaaattagctcattatggtcag

SEQ ID NO: 185718 - DNA, 53 bp, Artificial
  Synthetic oligonucleotide
gacgataaatatcaagcctgacagggggtaaggtgaaccaggaaattcatctg

SEQ ID NO: 185719 - DNA, 53 bp, Artificial
  Synthetic oligonucleotide
atgacctctaaaaccatgccattaaccgtcctagggccatctatggggagatt

SEQ ID NO: 185720 - DNA, 53 bp, Artificial
  Synthetic oligonucleotide
gcaccgttggatgatctggggtttgctgacatgttagatcagtgagctgtctg

SEQ ID NO: 185721 - DNA, 52 bp, Artificial
  Synthetic oligonucleotide
ccctctttgccgaaaatattcgacgcggtgagtaacccgacggataccagtt

SEQ ID NO: 185722 - DNA, 53 bp, Artificial
  Synthetic oligonucleotide
tttaaggttatcgaaacacaacgtccgaaactggcctgttgccggtgtgacca

SEQ ID NO: 185723 - DNA, 53 bp, Artificial
  Synthetic oligonucleotide
agcgcgtcatctcgacgcgctgttaacttctggacataacgttgtcggcgtat

SEQ ID NO: 185724 - DNA, 53 bp, Artificial
  Synthetic oligonucleotide
gagagtataagataaatggtaagcatgcagaagctgatgttgtattggagagt

SEQ ID NO: 185725 - DNA, 53 bp, Artificial
  Synthetic oligonucleotide
atctcacgtgcggtttttccttcacagaccaccgccgctcgggcgggaatact

SEQ ID NO: 185726 - DNA, 56 bp, Artificial
  Synthetic oligonucleotide
cattacgcgcaccgctcagacgggctcagggcgtttccggcggctacgggataaaa

SEQ ID NO: 185727 - DNA, 53 bp, Artificial
  Synthetic oligonucleotide
ttaagctttatcgggtgccacattatgaacgacgagagtgtggtctttggctt

SEQ ID NO: 185728 - DNA, 53 bp, Artificial
  Synthetic oligonucleotide
aaaataatactcttcaccctgcgcggagcctgagcaaactatggcgatcaata

SEQ ID NO: 185729 - DNA, 53 bp, Artificial
  Synthetic oligonucleotide
ggtaattcaacctagatgagtctgaggttgccacgggatagatgaaaacgcat

SEQ ID NO: 185730 - DNA, 53 bp, Artificial
  Synthetic oligonucleotide
cggattacccggcccatccataggcctcgccctgacgggtcgtcgcacgcgac

SEQ ID NO: 185731 - DNA, 53 bp, Artificial
  Synthetic oligonucleotide
gatatgatgacgggagcaacggatgagcgagaggggttacagcgcctattggc

SEQ ID NO: 185732 - DNA, 53 bp, Artificial
  Synthetic oligonucleotide
caggggactatccctacccgctcccgtcgtcttaacgaacaccgagcacgtgc

SEQ ID NO: 185733 - DNA, 53 bp, Artificial
  Synthetic oligonucleotide
gcataggtgggcttaatttcaggggctacgttttcacgaacgcttgagtgtat

SEQ ID NO: 185734 - DNA, 53 bp, Artificial
  Synthetic oligonucleotide
ggtacgaccaacggaatgaccatcagtaccgggctggagtatgggccagataa

SEQ ID NO: 185735 - DNA, 53 bp, Artificial
  Synthetic oligonucleotide
ggtacgcacctggttcaagaagatgatgcacgcgttgtacttacgcgcccaaa

SEQ ID NO: 185736 - DNA, 53 bp, Artificial
  Synthetic oligonucleotide
atctcgccgcgccgtccaaatacccgtatctgcgctgcacgcgtgtgttacag

SEQ ID NO: 185737 - DNA, 57 bp, Artificial
  Synthetic oligonucleotide
cattagcgctaatgcttgttataaagttagctctaacggaaaaggagcgggttatga

SEQ ID NO: 185738 - DNA, 53 bp, Artificial
  Synthetic oligonucleotide
agcacaccgttatcaaacggcgggttattctcggtgcagtacagcgctttacc

SEQ ID NO: 185739 - DNA, 53 bp, Artificial
  Synthetic oligonucleotide
gatcaggcagcgactggagggcctgacggatgaataaccccatggaaacgcga

SEQ ID NO: 185740 - DNA, 53 bp, Artificial
  Synthetic oligonucleotide
tttatgcgtggcaagcctgacaataacccgtgggggccagcgctgaccatgtt

SEQ ID NO: 185741 - DNA, 53 bp, Artificial
  Synthetic oligonucleotide
ccgacgttgccgcccctttgcgagcaatttgtaatgctgcgcccatagttgca

SEQ ID NO: 185742 - DNA, 53 bp, Artificial
  Synthetic oligonucleotide
agcgtcggacaaggcgaatttggcggcgctccattcaagcgatttttacgcgg

SEQ ID NO: 185743 - DNA, 53 bp, Artificial
  Synthetic oligonucleotide
ggtagtcatgccgggttgcgtcgtcacaaggcgcgtttcaagcacgcaatcga

SEQ ID NO: 185744 - DNA, 53 bp, Artificial
  Synthetic oligonucleotide
cggatactttgcaccatccggctttctgtattctgtgacgacgagaccttgtc

SEQ ID NO: 185745 - DNA, 53 bp, Artificial
  Synthetic oligonucleotide
ccatttcgctatacagcattgcccactgcgagtccgcaagcttgttttgtcct

SEQ ID NO: 185746 - DNA, 53 bp, Artificial
  Synthetic oligonucleotide
agaaccatcaacgttggtcccggttgggtagaccatctgataatcgctgctgg

SEQ ID NO: 185747 - DNA, 53 bp, Artificial
  Synthetic oligonucleotide
cggataagacgcatcaaacgtcgcatccggcaaaagtcaatcaggattcgctt

SEQ ID NO: 185748 - DNA, 60 bp, Artificial
  Synthetic oligonucleotide
cattatcatgctcgcagttaaactggcttatgcctttacactaaccttacgatgtccaac

SEQ ID NO: 185749 - DNA, 53 bp, Artificial
  Synthetic oligonucleotide
atgttcgctaattcggctgtcatcggcgggattttaccaagccccggagcggt

SEQ ID NO: 185750 - DNA, 53 bp, Artificial
  Synthetic oligonucleotide
caaatcaacgcgctgcatggttcctaccttcggaacgggggagggcaataaca

SEQ ID NO: 185751 - DNA, 53 bp, Artificial
  Synthetic oligonucleotide
agaacgcagattgggtttaacgactcggccattagcatcggagaatcattacg

SEQ ID NO: 185752 - DNA, 53 bp, Artificial
  Synthetic oligonucleotide
tttatatcacggccgccaatcaagggatcgcagaagtatggctagataatcgg

SEQ ID NO: 185753 - DNA, 53 bp, Artificial
  Synthetic oligonucleotide
gtcacccgatttgatgattggtgcgcttgcatcgtcatccgtgctcctctttg

SEQ ID NO: 185754 - DNA, 53 bp, Artificial
  Synthetic oligonucleotide
gtaacacaacgcaggtcgtgatccccccgaacagccgggactggcataccaat

SEQ ID NO: 185755 - DNA, 52 bp, Artificial
  Synthetic oligonucleotide
aaaccgaaaaccccgtgtcttctcgcaaagccgtcaacctcacggttgtcgc

SEQ ID NO: 185756 - DNA, 53 bp, Artificial
  Synthetic oligonucleotide
ggtcaagagtttgtgctgaactgggcgacactttctgcactgctgcccgccgc

SEQ ID NO: 185757 - DNA, 53 bp, Artificial
  Synthetic oligonucleotide
agcgacagtcctgtttgtgtctgcaaagggggcgcagtaccaactatcggcct

SEQ ID NO: 185758 - DNA, 53 bp, Artificial
  Synthetic oligonucleotide
ttggtactgctatgtcttgtacacctcatacggggtcgctagttaaggaagag

SEQ ID NO: 185759 - DNA, 60 bp, Artificial
  Synthetic oligonucleotide
cgcaagccgttatcgtatgcctacctcaatccgtaaagatcgcccgctgacgaatgacga

SEQ ID NO: 185760 - DNA, 53 bp, Artificial
  Synthetic oligonucleotide
gcaaatctgttaccgccggcggggattacggagccgtagagtggcaagcggga

SEQ ID NO: 185761 - DNA, 53 bp, Artificial
  Synthetic oligonucleotide
aaattggaagtcgagcgcgctaaaggtgaaatagaattccgccatgtcacctt

SEQ ID NO: 185762 - DNA, 53 bp, Artificial
  Synthetic oligonucleotide
aaaggtatcgggtgtgccgccattaatgatgaagccgtctgtggcgtgggtct

SEQ ID NO: 185763 - DNA, 53 bp, Artificial
  Synthetic oligonucleotide
ttggcttcgaaacgaatagtcgccgtaatgcaggggatgatcgtcaataagaa

SEQ ID NO: 185764 - DNA, 53 bp, Artificial
  Synthetic oligonucleotide
cgcttttgcgtgtgatgtgccgcaccgaaaggatttctgatacccgcgaccgt

SEQ ID NO: 185765 - DNA, 53 bp, Artificial
  Synthetic oligonucleotide
catagattcccgatctgtaggtagaggggcgccagagcgaataacccgaatgc

SEQ ID NO: 185766 - DNA, 51 bp, Artificial
  Synthetic oligonucleotide
aaattccccgtcagtgaggcgtgttttgtatcgaaaacaggggggaccgga

SEQ ID NO: 185767 - DNA, 53 bp, Artificial
  Synthetic oligonucleotide
cagtaaccgcacgtaaggtgctgacatcctgctcgcgtcaaaatgaagggcag

SEQ ID NO: 185768 - DNA, 53 bp, Artificial
  Synthetic oligonucleotide
aaatgtggcatccatgtatcctgagtacatgtaccatatttctgatagtgttg

SEQ ID NO: 185769 - DNA, 53 bp, Artificial
  Synthetic oligonucleotide
gactgcccactcgcgtttgaaactgttcgggctaatgtgctgtttaattgttc

SEQ ID NO: 185770 - DNA, 60 bp, Artificial
  Synthetic oligonucleotide
gcagacggtacatcgataaattccagaatggggaacgctgtctcctggattatatcgtga

SEQ ID NO: 185771 - DNA, 60 bp, Artificial
  Synthetic oligonucleotide
cgcaacttgcactttacgttagtgccagacgaggcttgtggctcgctcacatagagcaaa

SEQ ID NO: 185772 - DNA, 53 bp, Artificial
  Synthetic oligonucleotide
gtcgcccgtggagatgaataacgggccgggggattaaaaatccccgtgcagca

SEQ ID NO: 185773 - DNA, 53 bp, Artificial
  Synthetic oligonucleotide
gattacaaccttgaaccttccgccggagttctgactaacgcacagcgctcata

SEQ ID NO: 185774 - DNA, 53 bp, Artificial
  Synthetic oligonucleotide
cagtaagaggagtagactttgtgcctgtaaaaatttagccatgtttacgacag

SEQ ID NO: 185775 - DNA, 53 bp, Artificial
  Synthetic oligonucleotide
aaataacgcgcaatggtaaggggaaatgcgcaagatgtccgtgatagtgatat

SEQ ID NO: 185776 - DNA, 53 bp, Artificial
  Synthetic oligonucleotide
cgggtatactgtcgcactctctttacacccactttctcgcgtgcgaatccaac

SEQ ID NO: 185777 - DNA, 53 bp, Artificial
  Synthetic oligonucleotide
ggttaatttccaagttacgccctgtccgttatacggaggcatgacgttgccct

SEQ ID NO: 185778 - DNA, 53 bp, Artificial
  Synthetic oligonucleotide
aaatgctcaatcaccggcttccggtaatgcagccgacggtactggcatgctga

SEQ ID NO: 185779 - DNA, 53 bp, Artificial
  Synthetic oligonucleotide
ttgagcatgaatttgcatctagtcccatatctaaattaacatatccgatttct

SEQ ID NO: 185780 - DNA, 53 bp, Artificial
  Synthetic oligonucleotide
aaatgcacgacgcgtaaaggccgtaagccgcactgcgtgaaggggaaaggaac

SEQ ID NO: 185781 - DNA, 53 bp, Artificial
  Synthetic oligonucleotide
gattgttcgttcatcccgactccttttgtagttctgaaaagtacgattgtaac

SEQ ID NO: 185782 - DNA, 54 bp, Artificial
  Synthetic oligonucleotide
cgcaaaaagggacaggtagcgaaaagtaaggaagtggtctctactacgcttatc

SEQ ID NO: 185783 - DNA, 53 bp, Artificial
  Synthetic oligonucleotide
ttgctcgacttgttcgcgaagtttcctgttgtcgcgtcgtgtctgttcgtact

SEQ ID NO: 185784 - DNA, 53 bp, Artificial
  Synthetic oligonucleotide
ttgcgtcgtcacaaggcgcgtttcaagcacgcaatcgagctgcgttccctgcg

SEQ ID NO: 185785 - DNA, 53 bp, Artificial
  Synthetic oligonucleotide
atggagcgcctgccggcccagtatcagcccgtcatacttgaagctagacaggc

SEQ ID NO: 185786 - DNA, 53 bp, Artificial
  Synthetic oligonucleotide
cccgcgcgaattagcaagcgagaccgaatgccccactgcgctgaatttgcgag

SEQ ID NO: 185787 - DNA, 53 bp, Artificial
  Synthetic oligonucleotide
ttgcgcaaaatagccctttcgttgaattcagcgcggatagtcagcactttatc

SEQ ID NO: 185788 - DNA, 53 bp, Artificial
  Synthetic oligonucleotide
aaatctgacgatagcgttcagatcgcgacaaggggtcatgcctcgcaggctgg

SEQ ID NO: 185789 - DNA, 53 bp, Artificial
  Synthetic oligonucleotide
gtcctcagccatgagccagcgcacgaaaggcatggtgcgcatggtcagccaga

SEQ ID NO: 185790 - DNA, 53 bp, Artificial
  Synthetic oligonucleotide
ttgccgttggctcgggaacaccgttcagggttcagcgttcaagagcgaccact

SEQ ID NO: 185791 - DNA, 53 bp, Artificial
  Synthetic oligonucleotide
gacgctattaccgggaacgtccaacccgcatgaattcttaagccgtccgtaaa

SEQ ID NO: 185792 - DNA, 53 bp, Artificial
  Synthetic oligonucleotide
tttaaacgagtcatgaaacatcacgttagtctggaataaacttttcataacct

SEQ ID NO: 185793 - DNA, 57 bp, Artificial
  Synthetic oligonucleotide
cgcaaaaacaacgaaccacactagagaacatactggctaaatacggaaggatctgag

SEQ ID NO: 185794 - DNA, 53 bp, Artificial
  Synthetic oligonucleotide
aacattatggtaagacaatttactgatgaactctggtaattcaagcacagcct

SEQ ID NO: 185795 - DNA, 53 bp, Artificial
  Synthetic oligonucleotide
aacatggtcagcgctggcccccacgggttattgtcaggcttgccacgcataaa

SEQ ID NO: 185796 - DNA, 53 bp, Artificial
  Synthetic oligonucleotide
ttcgaacgcgtagcggcagtctatcagggctatcgctgagccgtgctcaaata

SEQ ID NO: 185797 - DNA, 50 bp, Artificial
  Synthetic oligonucleotide
cggtatactgttctaccggcggtaatttacccggcgggaagttgttacga

SEQ ID NO: 185798 - DNA, 53 bp, Artificial
  Synthetic oligonucleotide
atgccgattggtttacatcgtatgaccgattgtgattgaatagggtaaggagt

SEQ ID NO: 185799 - DNA, 53 bp, Artificial
  Synthetic oligonucleotide
gtctgattcaggctttgttaaagacgcaaccgctgtacgacacgcaggtttcg

SEQ ID NO: 185800 - DNA, 53 bp, Artificial
  Synthetic oligonucleotide
agccggataacggcgcttcgcttaatcgagcctaccacgcgtttcggttacgc

SEQ ID NO: 185801 - DNA, 53 bp, Artificial
  Synthetic oligonucleotide
ggtgatcggggctcataatcagcagtcgtgaggcgggacgtgtgcgcatgaca

SEQ ID NO: 185802 - DNA, 53 bp, Artificial
  Synthetic oligonucleotide
atgccttctgagtcgcgagcagaattagcgttaaacgcattaatagcccatcg

SEQ ID NO: 185803 - DNA, 53 bp, Artificial
  Synthetic oligonucleotide
atgtcggtcgccggttactgacaggaagcacgtgatgacgggagacgaattaa

SEQ ID NO: 185804 - DNA, 54 bp, Artificial
  Synthetic oligonucleotide
cgattttctggcgtttgttaacctgtggaattacctcggcgagcaacaaaaggc

SEQ ID NO: 185805 - DNA, 53 bp, Artificial
  Synthetic oligonucleotide
cccctgtatatcactccttggcatgagctgacgggaacgctaataggtggccg

SEQ ID NO: 185806 - DNA, 53 bp, Artificial
  Synthetic oligonucleotide
gtctatctgcgggaaaattttaacggtgtcagggtacagtgtggcgacttcat

SEQ ID NO: 185807 - DNA, 53 bp, Artificial
  Synthetic oligonucleotide
ttgtccgcggtaacccggcaacgcattatcctcctgacgtggtagagggtatt

SEQ ID NO: 185808 - DNA, 53 bp, Artificial
  Synthetic oligonucleotide
aaagcgcaaaatcgggactcacttgtagccctttaaaccgtgccaatggacca

SEQ ID NO: 185809 - DNA, 53 bp, Artificial
  Synthetic oligonucleotide
gacggttcgccttgctctggagcggcaaggcgctaccgagtggattaatggtg

SEQ ID NO: 185810 - DNA, 53 bp, Artificial
  Synthetic oligonucleotide
aacaggttgtcgattttacgctgtatgttggcctcgttatgctgatagttgct

SEQ ID NO: 185811 - DNA, 53 bp, Artificial
  Synthetic oligonucleotide
gtcgtgttatcttattagtcttgatacagcggagtgtaaggtgaactctgcac

SEQ ID NO: 185812 - DNA, 53 bp, Artificial
  Synthetic oligonucleotide
gtcatctgctgattcctgttcagtaacctgttaaataaagacgcgttaaccgg

SEQ ID NO: 185813 - DNA, 53 bp, Artificial
  Synthetic oligonucleotide
gtcgtgggatacacgccgcgatttctggtctcagacggactactacaagcagc

SEQ ID NO: 185814 - DNA, 53 bp, Artificial
  Synthetic oligonucleotide
atgtataccagtgacactgccattacaaagtcagcagcatcggatgagcgctc

SEQ ID NO: 185815 - DNA, 60 bp, Artificial
  Synthetic oligonucleotide
cattcgcacctgcgagaactctaccacgaactatgccataaacgtgaatatttccgtctg

SEQ ID NO: 185816 - DNA, 53 bp, Artificial
  Synthetic oligonucleotide
ggtgccagtcaacaacatccccgtgagtaccagggttcgggggccgtggcgat

SEQ ID NO: 185817 - DNA, 53 bp, Artificial
  Synthetic oligonucleotide
gtccaaaacaggcgattaaacacagagcccaacccatgaaccttctccttatc

SEQ ID NO: 185818 - DNA, 53 bp, Artificial
  Synthetic oligonucleotide
gcaacccgacaaccgccagactatgtagctcgcggataaaatattccgttatc

SEQ ID NO: 185819 - DNA, 53 bp, Artificial
  Synthetic oligonucleotide
ttctggcgctcggggatattattgggcggctgttcttcagactgattgagggg

SEQ ID NO: 185820 - DNA, 51 bp, Artificial
  Synthetic oligonucleotide
aaatttcgccgattaatgccccgagtaaggttgttaaaaccatcgccggaa

SEQ ID NO: 185821 - DNA, 53 bp, Artificial
  Synthetic oligonucleotide
cgggttgctacgcaggaagttagcgtgcgcatccagcattgccgcgaagtcag

SEQ ID NO: 185822 - DNA, 53 bp, Artificial
  Synthetic oligonucleotide
cagtccggcagcaaaactgaccacatcacgcccgatttatgcctgatgcggtg

SEQ ID NO: 185823 - DNA, 53 bp, Artificial
  Synthetic oligonucleotide
caacgtggtagtcaggaccaaccttcacagctttgtattccgtgtattcataa

SEQ ID NO: 185824 - DNA, 53 bp, Artificial
  Synthetic oligonucleotide
aacttatgcatgataggagtccggttgtgtggactgtgattttcacctctcgg

SEQ ID NO: 185825 - DNA, 53 bp, Artificial
  Synthetic oligonucleotide
ggggtcactccagaatcgaaccaaactgacctcagatctgaccaccaaattat

SEQ ID NO: 185826 - DNA, 60 bp, Artificial
  Synthetic oligonucleotide
cattcgggccataagtcggtgctatgggatctatctccacgcataaccgtcccagcttcc

SEQ ID NO: 185827 - DNA, 53 bp, Artificial
  Synthetic oligonucleotide
ccgctcaggtagcgctcatgcaggtattgatctaactcgttcagcatgatgtt

SEQ ID NO: 185828 - DNA, 53 bp, Artificial
  Synthetic oligonucleotide
gccagccggtagcgcaatattcatcctttgatgacacgctgagcggtatgaat

SEQ ID NO: 185829 - DNA, 53 bp, Artificial
  Synthetic oligonucleotide
tgggattcatggggtaatgagctggataccagtgttcatttaaccgagggagg

SEQ ID NO: 185830 - DNA, 53 bp, Artificial
  Synthetic oligonucleotide
tgggatatttaatacgatcggggctataaacccagcgcggatagcttaaccct

SEQ ID NO: 185831 - DNA, 53 bp, Artificial
  Synthetic oligonucleotide
gtactgaccctaacaagggtcgtcatagggtcgccatagggtcgtcaacgacc

SEQ ID NO: 185832 - DNA, 53 bp, Artificial
  Synthetic oligonucleotide
tggctggttaacgaggggcttagcgggctcatatcacttcccgatcggaaaac

SEQ ID NO: 185833 - DNA, 53 bp, Artificial
  Synthetic oligonucleotide
gtggttgtcttttcagggtaatctcccggcactgtaatttcttttgagtcccc

SEQ ID NO: 185834 - DNA, 52 bp, Artificial
  Synthetic oligonucleotide
gtggttgagggcacctgaccccgggtacgaagtggtttggcgtcaagtgggg

SEQ ID NO: 185835 - DNA, 53 bp, Artificial
  Synthetic oligonucleotide
agctgcatcggcaccgtggattcattaccggtgacagaggcattggcatccgc

SEQ ID NO: 185836 - DNA, 53 bp, Artificial
  Synthetic oligonucleotide
gaatagccgggtattcaaaatacgaagctctgcctttactcccggacggcaac

SEQ ID NO: 185837 - DNA, 57 bp, Artificial
  Synthetic oligonucleotide
cgattctgaggcgttatcggcaaaagacgcagcttcatacccccaagacggccaaaa

SEQ ID NO: 185838 - DNA, 53 bp, Artificial
  Synthetic oligonucleotide
cccataatgctgcatggcgtataaaatcttgatcaggtgtccagtctgggtgc

SEQ ID NO: 185839 - DNA, 53 bp, Artificial
  Synthetic oligonucleotide
atcggcctggggtcgttggctgcaatcgacacgcgtattttacacgcctctct

SEQ ID NO: 185840 - DNA, 53 bp, Artificial
  Synthetic oligonucleotide
tgtgccggtatgacgcgccatagagaatgccacgcttatcagcagcacaatcg

SEQ ID NO: 185841 - DNA, 53 bp, Artificial
  Synthetic oligonucleotide
tggctgaggcaacgcaggtgtttcctgattcacccacgctaattgccaggttc

SEQ ID NO: 185842 - DNA, 53 bp, Artificial
  Synthetic oligonucleotide
actgccgcacagtcacggatatgtcactcagctgccgtgtcagaatcccttcc

SEQ ID NO: 185843 - DNA, 53 bp, Artificial
  Synthetic oligonucleotide
gtggtgaacgcttgactgtagtggatacacctgtggggaaattaggtttaacg

SEQ ID NO: 185844 - DNA, 53 bp, Artificial
  Synthetic oligonucleotide
gccaaggctagatacaacgctcacttagtaatgtactgaccccttcgtaatca

SEQ ID NO: 185845 - DNA, 53 bp, Artificial
  Synthetic oligonucleotide
catctgtatcgttgacgagctcgctatcttataggagcattctgaataagcta

SEQ ID NO: 185846 - DNA, 53 bp, Artificial
  Synthetic oligonucleotide
ccgctggccagtcatattccggcaaccactttgcggcgcataacaaacgcaag

SEQ ID NO: 185847 - DNA, 53 bp, Artificial
  Synthetic oligonucleotide
ggggtttaacccggtgaatgataaatccgtttacctgtcacctgactatgagc

SEQ ID NO: 185848 - DNA, 60 bp, Artificial
  Synthetic oligonucleotide
cgcccagtatacctaccgaggtggcaacactcatgctatcagcggagaagtcaggagata

SEQ ID NO: 185849 - DNA, 53 bp, Artificial
  Synthetic oligonucleotide
ttttcagcgcctggagtaatctgaaaaggctgttgcgccagcgtaacgccgct

SEQ ID NO: 185850 - DNA, 53 bp, Artificial
  Synthetic oligonucleotide
ggggcgcgtattgaaggtgataagcgtaccctgcagacggcaaataactacac

SEQ ID NO: 185851 - DNA, 53 bp, Artificial
  Synthetic oligonucleotide
ggggcgatctgaaagccgctgcaccaaaaggtattgagccggtaattacactc

SEQ ID NO: 185852 - DNA, 53 bp, Artificial
  Synthetic oligonucleotide
gaagcgaaacctctgtggacagttttgtgaacggacagaaacccgccgaagaa

SEQ ID NO: 185853 - DNA, 53 bp, Artificial
  Synthetic oligonucleotide
ttttcatagcggacactcacttcaaagaacgccaccccaaaagatagcgtgac

SEQ ID NO: 185854 - DNA, 52 bp, Artificial
  Synthetic oligonucleotide
gcccattcacctggaagtttatacccgttgggaagagggacgctggaaaatt

SEQ ID NO: 185855 - DNA, 53 bp, Artificial
  Synthetic oligonucleotide
tgtaaaaatccgttccacctggaatggcaggtgatggagtggcgagaggaagc

SEQ ID NO: 185856 - DNA, 53 bp, Artificial
  Synthetic oligonucleotide
ttttatcggtcaggaacataatcacgtgatcgccttgctcaatgcgtaaattg

SEQ ID NO: 185857 - DNA, 53 bp, Artificial
  Synthetic oligonucleotide
actggcgtcacagcgcaatgagcgatcgcgttcagctgctgcgtaacgtggcg

SEQ ID NO: 185858 - DNA, 53 bp, Artificial
  Synthetic oligonucleotide
gcccatctgtcccaacccgataaatgctataactgccatatcgttctcctgaa

SEQ ID NO: 185859 - DNA, 56 bp, Artificial
  Synthetic oligonucleotide
cgccaccagtgtgatggttttcgcccgcctgtatgtacggcgtaacgtttctaaca

SEQ ID NO: 185860 - DNA, 53 bp, Artificial
  Synthetic oligonucleotide
caggccgaaaatgttaccagcattttcggccttcggtgactgctctaaagggg

SEQ ID NO: 185861 - DNA, 53 bp, Artificial
  Synthetic oligonucleotide
tggtaccggcccgcttagcgtcagtggtccatttgcaccaagtgcgtcagccg

SEQ ID NO: 185862 - DNA, 53 bp, Artificial
  Synthetic oligonucleotide
agctgtcatatgggccgccgtaggttggcaccattcccttagttggatgcgca

SEQ ID NO: 185863 - DNA, 53 bp, Artificial
  Synthetic oligonucleotide
tggtaacacgctggcactttatgccccaaatcggttcgttctggactgggtaa

SEQ ID NO: 185864 - DNA, 53 bp, Artificial
  Synthetic oligonucleotide
gtgtccctgcgccaacggtggcaccataaacgcccagcatccagagggtatct

SEQ ID NO: 185865 - DNA, 53 bp, Artificial
  Synthetic oligonucleotide
ttttagccagttgtccccaggtgatgcgaccgctagctttagctacaacgatc

SEQ ID NO: 185866 - DNA, 53 bp, Artificial
  Synthetic oligonucleotide
ggggcatccgttcacgcacacagaacggcgacaagtgcacgatcccgctgtta

SEQ ID NO: 185867 - DNA, 53 bp, Artificial
  Synthetic oligonucleotide
gaagtaattgataaaccgcgtaatgagaccgaatgctggcttgtgcatactgt

SEQ ID NO: 185868 - DNA, 53 bp, Artificial
  Synthetic oligonucleotide
agcaggggcgttttaatccgcgttgttacgccgacagagcgggggctgactgg

SEQ ID NO: 185869 - DNA, 53 bp, Artificial
  Synthetic oligonucleotide
atcctggcggcttgcaaccttataacggggaaggactctgccggatgccgcgt

SEQ ID NO: 185870 - DNA, 59 bp, Artificial
  Synthetic oligonucleotide
catgagattacgacgagagtaaaaggatcacaagaagatccggctgtttaccagtgatt

SEQ ID NO: 185871 - DNA, 53 bp, Artificial
  Synthetic oligonucleotide
aacttgatgttgtggcgtgccttacctgaaccgagtcttggtaggcgcagagc

SEQ ID NO: 185872 - DNA, 53 bp, Artificial
  Synthetic oligonucleotide
aacttgaagagggagactggtcgggatggtctgtcagtgtgcatagcccttgg

SEQ ID NO: 185873 - DNA, 53 bp, Artificial
  Synthetic oligonucleotide
tgggtgaaccgacatttggtaaaggcaccattcagcagtaccgttcattaaac

SEQ ID NO: 185874 - DNA, 53 bp, Artificial
  Synthetic oligonucleotide
tgtcatttgccatggctgctacagctgatgcacctacctgagcatctgcattg

SEQ ID NO: 185875 - DNA, 52 bp, Artificial
  Synthetic oligonucleotide
gggtcaaccgttgaggggcaatatttgacgggtcaactgttaacgggtcatt

SEQ ID NO: 185876 - DNA, 53 bp, Artificial
  Synthetic oligonucleotide
acttgcgacgcgctgattattgccactggagcttctgcacgctatctcggcct

SEQ ID NO: 185877 - DNA, 53 bp, Artificial
  Synthetic oligonucleotide
aacggcggtggaccggtactactggaatgcaaaaatgtacgtttctatgggca

SEQ ID NO: 185878 - DNA, 53 bp, Artificial
  Synthetic oligonucleotide
attcgcggttaccgaggccaacagcgccgtagcgcaactgactcaggtcgggc

SEQ ID NO: 185879 - DNA, 53 bp, Artificial
  Synthetic oligonucleotide
gtattataccgattatccgacaggcatgacggcttactgtgcgcataacccgg

SEQ ID NO: 185880 - DNA, 53 bp, Artificial
  Synthetic oligonucleotide
agcagcattgctggtagtatacgcagcacgatactctgctgccgttggttaac

SEQ ID NO: 185881 - DNA, 60 bp, Artificial
  Synthetic oligonucleotide
gcatgttgagtatacatgctcattatactggaaatactgagctatgcacactttttttac

SEQ ID NO: 185882 - DNA, 53 bp, Artificial
  Synthetic oligonucleotide
atgaatgtcccatccgggtttaccgcccgttcccacaggacaaatacccgcgc

SEQ ID NO: 185883 - DNA, 48 bp, Artificial
  Synthetic oligonucleotide
cgcatttttccggtttaccccggggaaaacatctctttttgcggtgtt

SEQ ID NO: 185884 - DNA, 53 bp, Artificial
  Synthetic oligonucleotide
gccaacaaccaaactcgtccccgccttattcaggccgacagacccaccaaaac

SEQ ID NO: 185885 - DNA, 53 bp, Artificial
  Synthetic oligonucleotide
caaccggctgtcaaactcactcatgccagaattaatccatgtcgtcggcacat

SEQ ID NO: 185886 - DNA, 53 bp, Artificial
  Synthetic oligonucleotide
gcattgtcagatacaatggagcaattttggagtgatgctacgggacagcttgg

SEQ ID NO: 185887 - DNA, 53 bp, Artificial
  Synthetic oligonucleotide
gtggatgagcggggcaatgcgctatggcgtggtattacgctgacccgtgatga

SEQ ID NO: 185888 - DNA, 53 bp, Artificial
  Synthetic oligonucleotide
attatcactatatgttgtgctgtaaccgtaggtgtattgttctatctaatgaa

SEQ ID NO: 185889 - DNA, 53 bp, Artificial
  Synthetic oligonucleotide
aacggatctgctggtccgcttgctggacccgagaacgcgctgatatgtcgata

SEQ ID NO: 185890 - DNA, 53 bp, Artificial
  Synthetic oligonucleotide
aaaacagagcaacaatacatcgctacattaagcaagggaaactgtcgcaatct

SEQ ID NO: 185891 - DNA, 53 bp, Artificial
  Synthetic oligonucleotide
gtggcctgctccccgaatctggtaagtagcttactcgcccggtcgattgacgc

SEQ ID NO: 185892 - DNA, 53 bp, Artificial
  Synthetic oligonucleotide
catcgctgagccgtttattcgttgagaatgcgtactgtattacagaaccgctt

SEQ ID NO: 185893 - DNA, 53 bp, Artificial
  Synthetic oligonucleotide
tgtgtcagccctgcatccccgctgtcgtggtacagccacaactggcggttaat

SEQ ID NO: 185894 - DNA, 60 bp, Artificial
  Synthetic oligonucleotide
cgcattgaacataacatccgcttggcgcaccacctcagacgcgctgagcgcgattctgag

SEQ ID NO: 185895 - DNA, 53 bp, Artificial
  Synthetic oligonucleotide
gtactgccccctgaattccgccctgagaatgaacctctatgtgaacctaagtt

SEQ ID NO: 185896 - DNA, 53 bp, Artificial
  Synthetic oligonucleotide
aaaagcagttccgccttatcatgaaaacacgtgatctgagcggggatccaccc

SEQ ID NO: 185897 - DNA, 53 bp, Artificial
  Synthetic oligonucleotide
cgtcatcatctctccgaccttgagttaggtaatgccccaggtgacccgctaat

SEQ ID NO: 185898 - DNA, 53 bp, Artificial
  Synthetic oligonucleotide
aacgccttctgtcgcgtcgtggatcagacccaataaagaactggcccgttatc

SEQ ID NO: 185899 - DNA, 53 bp, Artificial
  Synthetic oligonucleotide
gtgggtactcatcatgtgctgttagattgactttgcgtcctggttttccgcgt

SEQ ID NO: 185900 - DNA, 49 bp, Artificial
  Synthetic oligonucleotide
gggtagttccgggaaccgttgtcgggtaatgaatgggtttacctttcat

SEQ ID NO: 185901 - DNA, 53 bp, Artificial
  Synthetic oligonucleotide
gccaacgcctgaaaagagcgagagtggcttcacacgcggcggtatcagcagcc

SEQ ID NO: 185902 - DNA, 53 bp, Artificial
  Synthetic oligonucleotide
cggcgaaatgcgtcggtacggagagccggtatcaaccgcgtttgtggaatcca

SEQ ID NO: 185903 - DNA, 53 bp, Artificial
  Synthetic oligonucleotide
tgttaatgcggcacgaaaaccagataaatgactacctccgtcttgctggggta

SEQ ID NO: 185904 - DNA, 53 bp, Artificial
  Synthetic oligonucleotide
cgtagccagtccatcgctgataaacggcagtgaggcgcgggtttccgctacac

SEQ ID NO: 185905 - DNA, 60 bp, Artificial
  Synthetic oligonucleotide
catgatgcacgccacgtctcggcatgtgtccggtcgttccagtccctgacctttccaccg

SEQ ID NO: 185906 - DNA, 53 bp, Artificial
  Synthetic oligonucleotide
gatatcgcgacgtatggtctccatcgacactgagtactgctccgctagcccgg

SEQ ID NO: 185907 - DNA, 52 bp, Artificial
  Synthetic oligonucleotide
ccttctttttaagcactggcgatagacggaatatcacgccgcttatcgcgtg

SEQ ID NO: 185908 - DNA, 52 bp, Artificial
  Synthetic oligonucleotide
cgacctgtgatacgaacttcacgtacctgatcctgggctaactcattgataa

SEQ ID NO: 185909 - DNA, 52 bp, Artificial
  Synthetic oligonucleotide
ttgtcacaatcaccactcgacgactacgaaccaatctggcatgcgagactga

SEQ ID NO: 185910 - DNA, 52 bp, Artificial
  Synthetic oligonucleotide
agttcacctgattgggtaacgtggctttcggtgtattcgcggccaaatagct

SEQ ID NO: 185911 - DNA, 52 bp, Artificial
  Synthetic oligonucleotide
acgaaagtctgcaggcgatgagcgtaacgctggatagtaccattcagctcac

SEQ ID NO: 185912 - DNA, 52 bp, Artificial
  Synthetic oligonucleotide
gctcccgcataaaagtctccggtgggacaaacatggcgtatggctgtgtacc

SEQ ID NO: 185913 - DNA, 52 bp, Artificial
  Synthetic oligonucleotide
ggagacagcatttatgctggctttcttcggggttagacaagccgtaggcgcg

SEQ ID NO: 185914 - DNA, 52 bp, Artificial
  Synthetic oligonucleotide
gagacagtatctcctggcggggctcaataccgggcgcactgcattgcctgaa

SEQ ID NO: 185915 - DNA, 52 bp, Artificial
  Synthetic oligonucleotide
ttttgtggcccgctctgcgttttctaagtgttatccctcctgatttctaaaa

SEQ ID NO: 185916 - DNA, 60 bp, Artificial
  Synthetic oligonucleotide
cgcatctccggcaaagggcgtgcgctgcttgcgcggtacatccagcagaaccagcctcat

SEQ ID NO: 185917 - DNA, 52 bp, Artificial
  Synthetic oligonucleotide
atgggggatagttagaaagatgaagtattctaagctgttcctgtccgttggg

SEQ ID NO: 185918 - DNA, 52 bp, Artificial
  Synthetic oligonucleotide
ccttctgtaaggccgcattagagccggtatagtcaggccgcagactatcttc

SEQ ID NO: 185919 - DNA, 52 bp, Artificial
  Synthetic oligonucleotide
gaggcttatgacagttctgttagtgtgacctctcagaatgctattcttgacc

SEQ ID NO: 185920 - DNA, 52 bp, Artificial
  Synthetic oligonucleotide
ttgcgcataaagctgtaaggcaccgaagctggtagctgcgatagtggacgcg

SEQ ID NO: 185921 - DNA, 52 bp, Artificial
  Synthetic oligonucleotide
ggactgtgtcgatgcgtgatccatcttttgctttgcgtttgtcatgataggt

SEQ ID NO: 185922 - DNA, 52 bp, Artificial
  Synthetic oligonucleotide
ccatgttgatggggtcacgcgtggtcgccggcagggaggattatggcctgct

SEQ ID NO: 185923 - DNA, 52 bp, Artificial
  Synthetic oligonucleotide
tatcggtcattacgcacccgccttctcagtcagtaaagtcttaacgcgtgcg

SEQ ID NO: 185924 - DNA, 52 bp, Artificial
  Synthetic oligonucleotide
aaagtagaccgttactcattcgtcatgcatctggtctctcgggtggttggca

SEQ ID NO: 185925 - DNA, 52 bp, Artificial
  Synthetic oligonucleotide
ctgagtatccaccacggcccctgaaggctgtttgctgccaggtacgcatgcg

SEQ ID NO: 185926 - DNA, 52 bp, Artificial
  Synthetic oligonucleotide
tcatcgcccagtgcggtcagtttcgccgacagttccggttctgcatacaagg

SEQ ID NO: 185927 - DNA, 60 bp, Artificial
  Synthetic oligonucleotide
catgcaattgcgatgaaaatcgcggttgcgtatggtgtatggccatttaagggataaaga

SEQ ID NO: 185928 - DNA, 52 bp, Artificial
  Synthetic oligonucleotide
gagtcatgttgggatagtgaggatttagtcattggggcagtatatcgtgacc

SEQ ID NO: 185929 - DNA, 52 bp, Artificial
  Synthetic oligonucleotide
tccacgggttttagttcacgtgaatgcttcaaaaaagaaggtgcatctgcag

SEQ ID NO: 185930 - DNA, 52 bp, Artificial
  Synthetic oligonucleotide
tatcaactcggtggccgtacccgctataatctgacggatcgtccattacata

SEQ ID NO: 185931 - DNA, 52 bp, Artificial
  Synthetic oligonucleotide
ttttcttcattaacccgcgttctttcaacacctggtttgggtggaggaagcc

SEQ ID NO: 185932 - DNA, 52 bp, Artificial
  Synthetic oligonucleotide
ggaggcatgtaaacatctgcctgataccataaggtcaatctaagatttttta

SEQ ID NO: 185933 - DNA, 52 bp, Artificial
  Synthetic oligonucleotide
ttgctgaactccagatccacgctttctacgttaaacagtcgggattgtgcga

SEQ ID NO: 185934 - DNA, 52 bp, Artificial
  Synthetic oligonucleotide
gatgtagccgattgaggcgatagtttgcgccacgagaaaagcgcgctgtttt

SEQ ID NO: 185935 - DNA, 52 bp, Artificial
  Synthetic oligonucleotide
ttttcgttgcactgccacgggcgttttgttgacagcctgccgtctacggtgc

SEQ ID NO: 185936 - DNA, 52 bp, Artificial
  Synthetic oligonucleotide
ttttggagtaccgccggcccgctaaagactcctggttagctcccgtatgttt

SEQ ID NO: 185937 - DNA, 52 bp, Artificial
  Synthetic oligonucleotide
ttgggccgacgcttgcatataaccggcgctttgccaaagttccccgacatga

SEQ ID NO: 185938 - DNA, 60 bp, Artificial
  Synthetic oligonucleotide
catgcacatcgtggatttttctccggacatgagccatacacgcggcttccgttattctgc

SEQ ID NO: 185939 - DNA, 52 bp, Artificial
  Synthetic oligonucleotide
ctgatggctaccggtgccgtaacaacagcggtggggttgggaatattaatca

SEQ ID NO: 185940 - DNA, 52 bp, Artificial
  Synthetic oligonucleotide
aaagggggcgcagtaccaactatcggcctgaaaacctcgttttgggagccga

SEQ ID NO: 185941 - DNA, 52 bp, Artificial
  Synthetic oligonucleotide
gagtgataaggcaaccggatccagtagcggcagttcagcgttttatctatgg

SEQ ID NO: 185942 - DNA, 52 bp, Artificial
  Synthetic oligonucleotide
gctgcccgcgatactgatgatgtaagggattcgctggccgttagtgcccaga

SEQ ID NO: 185943 - DNA, 52 bp, Artificial
  Synthetic oligonucleotide
ttttcgcctgttcccgcttcgtgcttctgtgtcatacgttgctccttatcac

SEQ ID NO: 185944 - DNA, 52 bp, Artificial
  Synthetic oligonucleotide
ctcatgcagtaattccgtcagggtacgggcgtgggtatcgatcgcactgccg

SEQ ID NO: 185945 - DNA, 52 bp, Artificial
  Synthetic oligonucleotide
ttttccggttccacattgccgctttgcacagccttgccaatctggctgtact

SEQ ID NO: 185946 - DNA, 52 bp, Artificial
  Synthetic oligonucleotide
aaaacaggcaagtcgtgggtgtggtttgtactacgagatttatgcgtcccgt

SEQ ID NO: 185947 - DNA, 52 bp, Artificial
  Synthetic oligonucleotide
tcagttccacccatttgataacctacctgcttctgttagtgacctcttcccc

SEQ ID NO: 185948 - DNA, 52 bp, Artificial
  Synthetic oligonucleotide
ttttcccgctttatcacagcgacggaccatcatacgtccgctgtcgctgtga

SEQ ID NO: 185949 - DNA, 60 bp, Artificial
  Synthetic oligonucleotide
catgccagcagagatccgttaagtgcagacccggtgaccggcaatcacactgcgaccgat

SEQ ID NO: 185950 - DNA, 52 bp, Artificial
  Synthetic oligonucleotide
tccatgcaggctgcggagctcagcacgtctgaaccgacaaacggtaagtttg

SEQ ID NO: 185951 - DNA, 52 bp, Artificial
  Synthetic oligonucleotide
ccaccttgattaaataacgcgacttgcgctcagtgtacaacaggcatcgaac

SEQ ID NO: 185952 - DNA, 52 bp, Artificial
  Synthetic oligonucleotide
ttgctatgattagcggtttatcgaagttcgcacctccgatgaaccgcgccaa

SEQ ID NO: 185953 - DNA, 50 bp, Artificial
  Synthetic oligonucleotide
ggaacccgtttcgctacgtcaggacagaccctttaaaccgtctgggggat

SEQ ID NO: 185954 - DNA, 52 bp, Artificial
  Synthetic oligonucleotide
agtccagcccgacacaggaatgtaaccccgacccttggtatgagatccttgc

SEQ ID NO: 185955 - DNA, 52 bp, Artificial
  Synthetic oligonucleotide
agtctgaccatatacttcggaagaacgacgcacttctggcagcatctcgcgt

SEQ ID NO: 185956 - DNA, 52 bp, Artificial
  Synthetic oligonucleotide
ccccggcgatacagcatctgaccacagaaattctggcggaggagggacagta

SEQ ID NO: 185957 - DNA, 52 bp, Artificial
  Synthetic oligonucleotide
cagaacaaaggccgaccacagttgctccccacaccagaccgtgtatttgtcc

SEQ ID NO: 185958 - DNA, 52 bp, Artificial
  Synthetic oligonucleotide
cgaaggcgtctttgttgaagacccgaaaaacgatgaatgggctccgcacgtt

SEQ ID NO: 185959 - DNA, 52 bp, Artificial
  Synthetic oligonucleotide
tttgccgtggattaaacaggccagcgtcagaaaacagtggcctgatgaattg

SEQ ID NO: 185960 - DNA, 60 bp, Artificial
  Synthetic oligonucleotide
cgcatacgtcacgcaggcgcgggttcttccactgacgcgccccgtgatcgatggccttgg

SEQ ID NO: 185961 - DNA, 52 bp, Artificial
  Synthetic oligonucleotide
cacttttcacgtccaccgcccctgtctggataacacgtaaaacctgctatcc

SEQ ID NO: 185962 - DNA, 52 bp, Artificial
  Synthetic oligonucleotide
agtgagcaaatagatcttacccagcaatacggtcagttaccgcgcacatggc

SEQ ID NO: 185963 - DNA, 52 bp, Artificial
  Synthetic oligonucleotide
ctccttctgtagccattaatgcgctgtattgctttgtaagagaagcactggg

SEQ ID NO: 185964 - DNA, 52 bp, Artificial
  Synthetic oligonucleotide
aaaagagttggtagctcttgatccggcaaacaaaccaccgctggtagcggtg

SEQ ID NO: 185965 - DNA, 52 bp, Artificial
  Synthetic oligonucleotide
gatctggcaattgccagacggtagggtgttgaagtgtcgctaacatagtttc

SEQ ID NO: 185966 - DNA, 52 bp, Artificial
  Synthetic oligonucleotide
tttacgtaccatcatgaggccgatcagtaacgtgacatattctgcgatgacc

SEQ ID NO: 185967 - DNA, 52 bp, Artificial
  Synthetic oligonucleotide
gataagagttcgcgacgacgccaccataactcggcaaatcaacacctgtcgc

SEQ ID NO: 185968 - DNA, 52 bp, Artificial
  Synthetic oligonucleotide
gagatggaagcggtagccctaggaactatcgccataagttaaaagggggcga

SEQ ID NO: 185969 - DNA, 52 bp, Artificial
  Synthetic oligonucleotide
ggaaggttcaccccgctgtgaagggtataacccaccccccctgacggacgca

SEQ ID NO: 185970 - DNA, 52 bp, Artificial
  Synthetic oligonucleotide
tttcgtgcatggctatgcatacacgcaaaacttatcagcgcgattccgggcg

SEQ ID NO: 185971 - DNA, 60 bp, Artificial
  Synthetic oligonucleotide
cgcatacggtgccattctttatcggtcgcaggacagctctccatacgacgaccacggaag

SEQ ID NO: 185972 - DNA, 52 bp, Artificial
  Synthetic oligonucleotide
tttctgaggcgtaggtgagtcggaacagatctgactgtgcggccagattgcc

SEQ ID NO: 185973 - DNA, 52 bp, Artificial
  Synthetic oligonucleotide
cgacactactcacagagatgacgaagagtagttacaacacccatcattaaaa

SEQ ID NO: 185974 - DNA, 52 bp, Artificial
  Synthetic oligonucleotide
agtcgacgtcgtaaggccgccattctgacaagtagtgagtacaaagttcttg

SEQ ID NO: 185975 - DNA, 52 bp, Artificial
  Synthetic oligonucleotide
aaaatagcggagacaagaatgcgtgatatttagctgatactggcgcgctggg

SEQ ID NO: 185976 - DNA, 52 bp, Artificial
  Synthetic oligonucleotide
cgacaagacgttctcaagataagactgagcagtggacgtcacctgccctttc

SEQ ID NO: 185977 - DNA, 52 bp, Artificial
  Synthetic oligonucleotide
gatattaccagcgccacttaaaaccgcacgaaatataagggtgggttacccc

SEQ ID NO: 185978 - DNA, 52 bp, Artificial
  Synthetic oligonucleotide
ccccaaccgttccgccagtttgcgtgtcgtcagaccgtctacgccgacctcg

SEQ ID NO: 185979 - DNA, 52 bp, Artificial
  Synthetic oligonucleotide
tcaaatcatcgccgaaagtatgcagcccgcgggcgaaggcttgttgcagcag

SEQ ID NO: 185980 - DNA, 52 bp, Artificial
  Synthetic oligonucleotide
tttccatagttcccctggagagttaaataagcgctccgcaccatacagagcg

SEQ ID NO: 185981 - DNA, 52 bp, Artificial
  Synthetic oligonucleotide
tttcatacattagggctggatattattaagcgcgagtacgctgcgctgggga

SEQ ID NO: 185982 - DNA, 60 bp, Artificial
  Synthetic oligonucleotide
catgccggagagataaaaggccgtcaggatgtgattcaggcgctcacagaggcggggctt

SEQ ID NO: 185983 - DNA, 52 bp, Artificial
  Synthetic oligonucleotide
accgctgaccgcccacttaaaggactcactggcgactttgaatttcgggtca

SEQ ID NO: 185984 - DNA, 52 bp, Artificial
  Synthetic oligonucleotide
attgtctgcgcagagtcggccattgttggtgccatgaccgtggcaggacagg

SEQ ID NO: 185985 - DNA, 52 bp, Artificial
  Synthetic oligonucleotide
gagagtccttctagagaatgcgtgggaatctcgttcccctctgcctcggcta

SEQ ID NO: 185986 - DNA, 52 bp, Artificial
  Synthetic oligonucleotide
cacttccccatgctgaggcctgataacatattcctgggtaaccttccagggc

SEQ ID NO: 185987 - DNA, 52 bp, Artificial
  Synthetic oligonucleotide
accgtgtttgcaggcccctgttccgaagagcgactgaccgggtggatgctgg

SEQ ID NO: 185988 - DNA, 52 bp, Artificial
  Synthetic oligonucleotide
gcttacggcccgtctttaacaccgatcgctacccggagatagcgcgtcaggt

SEQ ID NO: 185989 - DNA, 52 bp, Artificial
  Synthetic oligonucleotide
ttgtttaagccggtaaactacacgatgataaggtacgctttgctgacgtgct

SEQ ID NO: 185990 - DNA, 52 bp, Artificial
  Synthetic oligonucleotide
cccctcctgttccatcgctgccatattagcgtcattaacagcgtccttaatt

SEQ ID NO: 185991 - DNA, 52 bp, Artificial
  Synthetic oligonucleotide
cccctctgaccgtagaaacccgctgatggctgataaatcggaactctcaaaa

SEQ ID NO: 185992 - DNA, 52 bp, Artificial
  Synthetic oligonucleotide
atgtgatgagttagccgcccagcttcgaaaaggagagctgcatatgatgttt

SEQ ID NO: 185993 - DNA, 55 bp, Artificial
  Synthetic oligonucleotide
atgacaaatttatagacaggttaaataacgaaattattcgccctgcgtattaatc

SEQ ID NO: 185994 - DNA, 60 bp, Artificial
  Synthetic oligonucleotide
cgcaggtagacctagcgcacgaactgatagaacaacaacgctagctagcttagctgatac

SEQ ID NO: 185995 - DNA, 52 bp, Artificial
  Synthetic oligonucleotide
aaaacgagcaacgagaaccaagtctgttaaaccggctgtgcaatgccctccg

SEQ ID NO: 185996 - DNA, 52 bp, Artificial
  Synthetic oligonucleotide
ctccattctgcctccgaagaaaagcatcaagttcggcggtcaggaatatccc

SEQ ID NO: 185997 - DNA, 51 bp, Artificial
  Synthetic oligonucleotide
aaagatcgtcccggtacgttaggtttgcccaacgtagggcagtggcgtaac

SEQ ID NO: 185998 - DNA, 52 bp, Artificial
  Synthetic oligonucleotide
tatctgtgacggttatgatcataaccagactcccgttcgtgctgacagcgta

SEQ ID NO: 185999 - DNA, 52 bp, Artificial
  Synthetic oligonucleotide
acccgtcaaatcttcaactacggcgcgggtgataggatcaacgtccgctttt

SEQ ID NO: 186000 - DNA, 52 bp, Artificial
  Synthetic oligonucleotide
ccccttcgtagcctttttccactgctcttcgtattcacagggcggtaatcca

SEQ ID NO: 186001 - DNA, 52 bp, Artificial
  Synthetic oligonucleotide
ttgtcgtcaattaaagcaacgatacaatgacagaacgccgcttgaaattaat

SEQ ID NO: 186002 - DNA, 52 bp, Artificial
  Synthetic oligonucleotide
tcagctggctgcctcgttcgtcaaagccgacagggtcgctcatatgataagc

SEQ ID NO: 186003 - DNA, 52 bp, Artificial
  Synthetic oligonucleotide
gatgggcaccgtatgtcggtgatgaccgaagatgtcctgtttaccgatgagc

SEQ ID NO: 186004 - DNA, 52 bp, Artificial
  Synthetic oligonucleotide
atgttatctgtcgcccgtggcctgacattactgactactggcggaaacccgg

SEQ ID NO: 186005 - DNA, 60 bp, Artificial
  Synthetic oligonucleotide
catgcgcatgagtggttgtccgtgggatgaaatagccaaagcggtaaaaagcacctatca

SEQ ID NO: 186006 - DNA, 52 bp, Artificial
  Synthetic oligonucleotide
tatgtctgttactgacgcggttcagaattagtcgttaatctgcgatagcgcc

SEQ ID NO: 186007 - DNA, 52 bp, Artificial
  Synthetic oligonucleotide
cgaccagtgcaatgctgagccttatgtatcagcgctcgccgcagccatgtaa

SEQ ID NO: 186008 - DNA, 52 bp, Artificial
  Synthetic oligonucleotide
gatgactggcttatcccgttcggtatcatgggcgcgcctgtctcgggtctga

SEQ ID NO: 186009 - DNA, 52 bp, Artificial
  Synthetic oligonucleotide
accgataatggccttgcgacgtcagactatgcgagctggcctgcgcatacta

SEQ ID NO: 186010 - DNA, 52 bp, Artificial
  Synthetic oligonucleotide
cgaccatacaagtccagcaaacctaccccttcgaatagccattgccggcact

SEQ ID NO: 186011 - DNA, 52 bp, Artificial
  Synthetic oligonucleotide
gataacgactggatacgctcagtcaacaacaaggggatttataccgggggtc

SEQ ID NO: 186012 - DNA, 52 bp, Artificial
  Synthetic oligonucleotide
ctctcctggccggataaaccagcctgtctgtagtcgttactgtggtacttta

SEQ ID NO: 186013 - DNA, 52 bp, Artificial
  Synthetic oligonucleotide
tatggccgtaacattccatcgcgcattcgacatgtgccttaacccgaagatt

SEQ ID NO: 186014 - DNA, 52 bp, Artificial
  Synthetic oligonucleotide
ggacctgtcagcgaatgccgatactgccctgataagcagtgccctgcggatg

SEQ ID NO: 186015 - DNA, 52 bp, Artificial
  Synthetic oligonucleotide
ctctctcgcgtcggctgtttgatgccacacttgatatgctggcgggtaagtt

SEQ ID NO: 186016 - DNA, 60 bp, Artificial
  Synthetic oligonucleotide
cgcaggccatacatgatagtcagatggcctgctaccatgttaacaatcgtcgacgggaca

SEQ ID NO: 186017 - DNA, 52 bp, Artificial
  Synthetic oligonucleotide
gagtttcactcttcatcccatgctcctaaaaggcgggttttccccgccgttg

SEQ ID NO: 186018 - DNA, 52 bp, Artificial
  Synthetic oligonucleotide
accgtgggcggtaaagtcccagtggccgttgttgcgcctcagtgaagcgata

SEQ ID NO: 186019 - DNA, 52 bp, Artificial
  Synthetic oligonucleotide
attcagaagggagcgttagaggttctggtaccgccgcagttcacggacttgc

SEQ ID NO: 186020 - DNA, 52 bp, Artificial
  Synthetic oligonucleotide
ctctgaaggtgggtcaaacattgcaggttgccaaagcaacggtacccgtgac

SEQ ID NO: 186021 - DNA, 52 bp, Artificial
  Synthetic oligonucleotide
cacagtattgtgatacgcgaaataaaacatcagcacgtcagttcagagtaag

SEQ ID NO: 186022 - DNA, 52 bp, Artificial
  Synthetic oligonucleotide
ttaaggcgaccaaggatagtaatctctggtgaacttgcccgttggggttgct

SEQ ID NO: 186023 - DNA, 52 bp, Artificial
  Synthetic oligonucleotide
ttaacgctaattccctccatatcagcgtttgagcacatgcagcctcaccgtt

SEQ ID NO: 186024 - DNA, 52 bp, Artificial
  Synthetic oligonucleotide
gcatggtttttgtgtttacaataccacggctagaccagaatatatggccaca

SEQ ID NO: 186025 - DNA, 52 bp, Artificial
  Synthetic oligonucleotide
ttaacaagttacctgcaggatttaatatctatggcgactggaaatattcgaa

SEQ ID NO: 186026 - DNA, 52 bp, Artificial
  Synthetic oligonucleotide
aacgcgatatcgatagcggtgcgatagacattttcatccggcaaggttacgt

SEQ ID NO: 186027 - DNA, 60 bp, Artificial
  Synthetic oligonucleotide
catgctgaacgcacagataggcgaggaaaatgcgtgaaaatcggtgaacgggtgcgcaat

SEQ ID NO: 186028 - DNA, 52 bp, Artificial
  Synthetic oligonucleotide
aacgcgctaaaaacgattctgacgcattttttatgtttaccctggtgtttcc

SEQ ID NO: 186029 - DNA, 52 bp, Artificial
  Synthetic oligonucleotide
gcgagactcccctgacaggaaccagttgtattttacccggtggtctgccgtc

SEQ ID NO: 186030 - DNA, 52 bp, Artificial
  Synthetic oligonucleotide
tgttgcataaagacctcgcatggagtgttccgatagttgggactataagaag

SEQ ID NO: 186031 - DNA, 52 bp, Artificial
  Synthetic oligonucleotide
aatgcctaacgctgacgcaggtttaccattgatcttgacgacaaagttatag

SEQ ID NO: 186032 - DNA, 52 bp, Artificial
  Synthetic oligonucleotide
tgactgccagccctttctcaaccgcggtgggaagccaggccacgttattact

SEQ ID NO: 186033 - DNA, 52 bp, Artificial
  Synthetic oligonucleotide
tgaggcgatgcccaaagtggctgactcgctgttgttgcgtgatgtacagacc

SEQ ID NO: 186034 - DNA, 52 bp, Artificial
  Synthetic oligonucleotide
tgtgttgctgcgttaaaacagcgattccaagcctccttgagggactaaactt

SEQ ID NO: 186035 - DNA, 52 bp, Artificial
  Synthetic oligonucleotide
gccaaggcctctgacgtacaccccggcatcagccacgcgtcaatggtacaac

SEQ ID NO: 186036 - DNA, 52 bp, Artificial
  Synthetic oligonucleotide
ctttcaccggaagctctggtggtggctaacccgattgcacagggggcctgtg

SEQ ID NO: 186037 - DNA, 52 bp, Artificial
  Synthetic oligonucleotide
gcctttggtctggcaggccattaacaggcccgtataatccagctcaaagcga

SEQ ID NO: 186038 - DNA, 60 bp, Artificial
  Synthetic oligonucleotide
cgcagcgctttaatctccgaaatcagtgcctcagacaccgatgcttcagtctcacccggc

SEQ ID NO: 186039 - DNA, 52 bp, Artificial
  Synthetic oligonucleotide
ctttccggaccgcgaggatcccaaaagccactgaataacgatccgcaatata

SEQ ID NO: 186040 - DNA, 52 bp, Artificial
  Synthetic oligonucleotide
tgatctacgatcacaccgcttaaatttaccagcagggctacctttaactggc

SEQ ID NO: 186041 - DNA, 52 bp, Artificial
  Synthetic oligonucleotide
gccactggtgggaagcgattgctatttgggctaaaggggtgaggttgattgt

SEQ ID NO: 186042 - DNA, 52 bp, Artificial
  Synthetic oligonucleotide
atcatgatccccaactcgaatcccgagcataaactagatgcagccaaaacgt

SEQ ID NO: 186043 - DNA, 52 bp, Artificial
  Synthetic oligonucleotide
ttacgccggcgctaacaatacaggctaaagttgagccgccaggctagacttt

SEQ ID NO: 186044 - DNA, 52 bp, Artificial
  Synthetic oligonucleotide
cttacccttgtcgccagaaatatccctgtaaccagcagatgccgggataact

SEQ ID NO: 186045 - DNA, 52 bp, Artificial
  Synthetic oligonucleotide
acaaaagccccgtgacagaatcacagggcttaggtactctaattcgcgcaga

SEQ ID NO: 186046 - DNA, 52 bp, Artificial
  Synthetic oligonucleotide
tcttatagccggagtcgtgggaattgagccagcgtcgtttcgcagcgcgcat

SEQ ID NO: 186047 - DNA, 52 bp, Artificial
  Synthetic oligonucleotide
ccagttttcaccgttaaccagatggaaacggtcgccatccggcatcatgtaa

SEQ ID NO: 186048 - DNA, 52 bp, Artificial
  Synthetic oligonucleotide
tcttctgtattcactaccgccggcccaagttaaagccacctcatgatgagag

SEQ ID NO: 186049 - DNA, 60 bp, Artificial
  Synthetic oligonucleotide
cgcagccctgaagcgagcctcgtatcgggttatgtcttcatgcagcgtagcattgacgtt

SEQ ID NO: 186050 - DNA, 52 bp, Artificial
  Synthetic oligonucleotide
ttaccctccgtgcttctgtttgcctcagtcagcggattaatcataacggtac

SEQ ID NO: 186051 - DNA, 52 bp, Artificial
  Synthetic oligonucleotide
gcgccatgccgcctacaagcggctgtctgagtacctctagcagtgccagggg

SEQ ID NO: 186052 - DNA, 52 bp, Artificial
  Synthetic oligonucleotide
gcgccaaaccccgtccgatcattccttatgagcatcctgatgcggcgatgta

SEQ ID NO: 186053 - DNA, 52 bp, Artificial
  Synthetic oligonucleotide
aacgattggatcctgtgcaggtggataagcggcggcggggttagaggcatta

SEQ ID NO: 186054 - DNA, 52 bp, Artificial
  Synthetic oligonucleotide
gcataatgatcagcaatgttcacgtcacagcttgccggtttcacactcttac

SEQ ID NO: 186055 - DNA, 52 bp, Artificial
  Synthetic oligonucleotide
ttacagcgtgttttcgttatccaacgtcgctgaaggcaatgcggtcgacaga

SEQ ID NO: 186056 - DNA, 52 bp, Artificial
  Synthetic oligonucleotide
atctcgtttatattaactgacctctcggactccttatgcctaaaaccccaac

SEQ ID NO: 186057 - DNA, 52 bp, Artificial
  Synthetic oligonucleotide
gcgcagtgctttgttaaccagaccattaaagccttcacgggcacccatatag

SEQ ID NO: 186058 - DNA, 52 bp, Artificial
  Synthetic oligonucleotide
tgaacacatgttgtgttgcgtaatccgggaaaatagtaatggaacgcagcct

SEQ ID NO: 186059 - DNA, 52 bp, Artificial
  Synthetic oligonucleotide
cttcatcgtgccagtgtcaccgtccctctccggccgacagagcaacctttca

SEQ ID NO: 186060 - DNA, 60 bp, Artificial
  Synthetic oligonucleotide
cgcagaggaataaacatgttgcagtggtggacgttgaccgatttcgcttcgctcacagat

SEQ ID NO: 186061 - DNA, 52 bp, Artificial
  Synthetic oligonucleotide
ttaatttggcgctcattctcaaccagatatcatccggaatgtcggcctcaca

SEQ ID NO: 186062 - DNA, 52 bp, Artificial
  Synthetic oligonucleotide
tgaacgcgttcaagcaagaatgacttccgatcttttcatgcaatctcttcaa

SEQ ID NO: 186063 - DNA, 52 bp, Artificial
  Synthetic oligonucleotide
aattacggcgtttatatcactgccagttagtccggctaaacgggcactatta

SEQ ID NO: 186064 - DNA, 52 bp, Artificial
  Synthetic oligonucleotide
gcatcccgatttggacttactcattccattcgtcaggaacgcccactgacta

SEQ ID NO: 186065 - DNA, 52 bp, Artificial
  Synthetic oligonucleotide
gcatgatgttgcacgctttggatccgaagtattacgtgcgtctcctagacaa

SEQ ID NO: 186066 - DNA, 52 bp, Artificial
  Synthetic oligonucleotide
gcccgagataaccgtggctgagcggaatacgttcgtccagttcgcgtgcttt

SEQ ID NO: 186067 - DNA, 52 bp, Artificial
  Synthetic oligonucleotide
tgggctagtaagatcgacgcccccaagagccaagcagtgaacacgaatgtct

SEQ ID NO: 186068 - DNA, 52 bp, Artificial
  Synthetic oligonucleotide
aagccgtttatgggggcaccgttatccgtgagaatgacgacggcacggtaaa

SEQ ID NO: 186069 - DNA, 52 bp, Artificial
  Synthetic oligonucleotide
tgcggagtgtgtgtaccgtgcatcattcgacgggcatcgcttcatgctgggg

SEQ ID NO: 186070 - DNA, 52 bp, Artificial
  Synthetic oligonucleotide
tgcggattcgttcagggcgctacaggccatcgttctgaatccgtgaccgcag

SEQ ID NO: 186071 - DNA, 59 bp, Artificial
  Synthetic oligonucleotide
catggcgtgttacaacgtaactccacgggcgggcgatacgatgaggatcttgtattgac

SEQ ID NO: 186072 - DNA, 52 bp, Artificial
  Synthetic oligonucleotide
ccgctcctttttgtttggcgtgcggccgttcattggcgctctctccgcaaga

SEQ ID NO: 186073 - DNA, 52 bp, Artificial
  Synthetic oligonucleotide
gcccgtaaaggttaattaaggcactggcacccggattaatcgtcttaaacgc

SEQ ID NO: 186074 - DNA, 52 bp, Artificial
  Synthetic oligonucleotide
gaacaacgcaatgctctgaatgggattcgtggcctgtttcggggggctgaca

SEQ ID NO: 186075 - DNA, 52 bp, Artificial
  Synthetic oligonucleotide
gaacaggaggtgtcgctgtcacatccggtggcgctcagatttccccggtctg

SEQ ID NO: 186076 - DNA, 52 bp, Artificial
  Synthetic oligonucleotide
ccgctgattatccggttacggcggggaaagtttttggccagcggcggtacat

SEQ ID NO: 186077 - DNA, 52 bp, Artificial
  Synthetic oligonucleotide
atccgtcatcaggaaaacgagtggacgccagtcgccttttgtctccgctgtc

SEQ ID NO: 186078 - DNA, 52 bp, Artificial
  Synthetic oligonucleotide
gccgacccgggaagagccagtctggagaatgtcctttccgtcatcgcacagc

SEQ ID NO: 186079 - DNA, 52 bp, Artificial
  Synthetic oligonucleotide
tggaatcggcgcgtgccactccatttcgatacccgatacaggatggtagaga

SEQ ID NO: 186080 - DNA, 52 bp, Artificial
  Synthetic oligonucleotide
tggcccgttttcatatggacaggttgcgattcgaaaagcgagtaacgcgata

SEQ ID NO: 186081 - DNA, 52 bp, Artificial
  Synthetic oligonucleotide
atccgaacaaatgtcgaacgctatgggtgcggttatatatttatgccgtcct

SEQ ID NO: 186082 - DNA, 60 bp, Artificial
  Synthetic oligonucleotide
cgcagacagaggtgcagttgtgtgtgattcaccagatacgcaactcgattaaatatgtcg

SEQ ID NO: 186083 - DNA, 52 bp, Artificial
  Synthetic oligonucleotide
caaggtagacaaaccacattcatcagataattgttcaactgatgcttgaacc

SEQ ID NO: 186084 - DNA, 52 bp, Artificial
  Synthetic oligonucleotide
ccggacgcatcctctgccggtatgtcaccggttgctgctatacctttcggca

SEQ ID NO: 186085 - DNA, 52 bp, Artificial
  Synthetic oligonucleotide
aaggatcggggcggcatgcaccgaagagagtgctgagggaatggctatcagc

SEQ ID NO: 186086 - DNA, 52 bp, Artificial
  Synthetic oligonucleotide
ctttgttccctccggtattaaccatcacctgtttgagaaccttcgccgcaag

SEQ ID NO: 186087 - DNA, 52 bp, Artificial
  Synthetic oligonucleotide
caatgcgcgcccagattcagcgaatcgtaaggcgataaactcaccccgccaa

SEQ ID NO: 186088 - DNA, 52 bp, Artificial
  Synthetic oligonucleotide
tgcaccacaccgtttgccgacctgaaggcagctatttacgacttcgcaccca

SEQ ID NO: 186089 - DNA, 52 bp, Artificial
  Synthetic oligonucleotide
tgtctgacggcctaaggagtgataaagtgacggccaatctttgcgacgtgag

SEQ ID NO: 186090 - DNA, 52 bp, Artificial
  Synthetic oligonucleotide
caatgaatcagctcagagacctgattcgcgaccgggccatgaataccctcgg

SEQ ID NO: 186091 - DNA, 52 bp, Artificial
  Synthetic oligonucleotide
tgtccgttaaactcaggctacctcactgtggcgttcacccttaactggccgg

SEQ ID NO: 186092 - DNA, 52 bp, Artificial
  Synthetic oligonucleotide
gaaaaggtttacgtgggtctaacaaacgtttgacacctggcgatggttagcc

SEQ ID NO: 186093 - DNA, 58 bp, Artificial
  Synthetic oligonucleotide
cgcactaattgttcacaaggcgcgtaacgaggaccgtaaagtgcggccaggcgctgta

SEQ ID NO: 186094 - DNA, 52 bp, Artificial
  Synthetic oligonucleotide
gcctatactcgcgatcacggattgaagcggctgaacggtattacgatgccga

SEQ ID NO: 186095 - DNA, 52 bp, Artificial
  Synthetic oligonucleotide
tgccagttgccacatcagcggaaggcttagcaaggtgccaccgatgaccgtt

SEQ ID NO: 186096 - DNA, 52 bp, Artificial
  Synthetic oligonucleotide
aatatcggggggtaccgtttgagaggtacgctgatgatattgtagtacattg

SEQ ID NO: 186097 - DNA, 52 bp, Artificial
  Synthetic oligonucleotide
gcctaatgccccaatgtggtactaatcaaaacggagcgaagcgacatcttca

SEQ ID NO: 186098 - DNA, 52 bp, Artificial
  Synthetic oligonucleotide
gaaggggcggtctgttataccagccatcggggcggcaatcaggcaatttgta

SEQ ID NO: 186099 - DNA, 52 bp, Artificial
  Synthetic oligonucleotide
tgccgtgtctgttggggttggaatcgtgagaatagttacccagcaggtgcaa

SEQ ID NO: 186100 - DNA, 52 bp, Artificial
  Synthetic oligonucleotide
aagagcgccctcaacaattagccgcgaggtcaggaggcacggaggtgccaaa

SEQ ID NO: 186101 - DNA, 52 bp, Artificial
  Synthetic oligonucleotide
tggttttttacgggcggcagctctcggtaagaaagttaattcactgactgat

SEQ ID NO: 186102 - DNA, 52 bp, Artificial
  Synthetic oligonucleotide
atccttcggctttcggactggaaggtctactgcagatgcgatagcacagtgc

SEQ ID NO: 186103 - DNA, 52 bp, Artificial
  Synthetic oligonucleotide
tgcgatccatcctgctaactccagttcgagtagctgagccactaccgctggc

SEQ ID NO: 186104 - DNA, 56 bp, Artificial
  Synthetic oligonucleotide
atgacacgctattttacgctactcagccagcgtttaggtgggcgcggtaagttaac

SEQ ID NO: 186105 - DNA, 60 bp, Artificial
  Synthetic oligonucleotide
cgcacgggaacgaacaataatgtagctgccgttatctgctttagccggcaggaagatctc

SEQ ID NO: 186106 - DNA, 52 bp, Artificial
  Synthetic oligonucleotide
gaagcacccctacacctgcatcgtctgctgtacggaggggctttcgcctacg

SEQ ID NO: 186107 - DNA, 52 bp, Artificial
  Synthetic oligonucleotide
gaagcaatcctgggtttcggagcctttaatcggcggaatccacggatatgaa

SEQ ID NO: 186108 - DNA, 52 bp, Artificial
  Synthetic oligonucleotide
atcctgtccgggtgcgttatatcccggtgcgattttccgcttcaaagcgtgt

SEQ ID NO: 186109 - DNA, 52 bp, Artificial
  Synthetic oligonucleotide
tggtcagataaaccataagttagacgggcgtacaaagataatttccatctca

SEQ ID NO: 186110 - DNA, 52 bp, Artificial
  Synthetic oligonucleotide
ttcttgcgtttaaggctaattgagttaaagaaagcgtctggtattcgtgacc

SEQ ID NO: 186111 - DNA, 52 bp, Artificial
  Synthetic oligonucleotide
tcgaaagttgaattaataatttggactactaatctatggacgcttcccgcta

SEQ ID NO: 186112 - DNA, 52 bp, Artificial
  Synthetic oligonucleotide
ttcttgcatgttgcttctccttaacacgcactatcgatccccatgttcgggg

SEQ ID NO: 186113 - DNA, 52 bp, Artificial
  Synthetic oligonucleotide
gactgaagcgcccgggtatgacgttctactctgtgacgggaggtgtgtcgcg

SEQ ID NO: 186114 - DNA, 52 bp, Artificial
  Synthetic oligonucleotide
tcgaagccatagccagcaagaccaccttattgtcgcagtgtgaatggcacat

SEQ ID NO: 186115 - DNA, 52 bp, Artificial
  Synthetic oligonucleotide
cacgccgactggccagattcagaatcatacgatattggtccagctagtattg

SEQ ID NO: 186116 - DNA, 55 bp, Artificial
  Synthetic oligonucleotide
cgcacctttgagactgtttaacaagtcttaacgatatccctgaaacgaccactta

SEQ ID NO: 186117 - DNA, 52 bp, Artificial
  Synthetic oligonucleotide
aaattgtcaggctgtgctaaggcctgccatatccctccgccacaattgtctt

SEQ ID NO: 186118 - DNA, 52 bp, Artificial
  Synthetic oligonucleotide
ccatctccgagagttaatctcgtcaaatgctaaatcgtgggggtcccctttg

SEQ ID NO: 186119 - DNA, 52 bp, Artificial
  Synthetic oligonucleotide
tcgcaaagcgacgcaatgcagcacgatgcaacacctaaaacagatcaatccg

SEQ ID NO: 186120 - DNA, 52 bp, Artificial
  Synthetic oligonucleotide
tcgcactttctacgctgaactgacggcgtttatcaccacggctgacgatcac

SEQ ID NO: 186121 - DNA, 52 bp, Artificial
  Synthetic oligonucleotide
cccgtcaccccagcgtacgccgttactgtttcaggccggcacctctgcacgc

SEQ ID NO: 186122 - DNA, 52 bp, Artificial
  Synthetic oligonucleotide
gcgtgacagcaacggacagttgagaacaacttcgcatcgctacgtctcgcag

SEQ ID NO: 186123 - DNA, 51 bp, Artificial
  Synthetic oligonucleotide
tcgccataaaggtcgccgacgtacattaaacgtaaccaaatttcggtacgg

SEQ ID NO: 186124 - DNA, 52 bp, Artificial
  Synthetic oligonucleotide
cacgagaggcgacggaatcacgcatcttctccatgcctactgtcgcgcccag

SEQ ID NO: 186125 - DNA, 52 bp, Artificial
  Synthetic oligonucleotide
cccgtgagagctcaggaacggtattgcaaaccgcgcccgggtttattgccgt

SEQ ID NO: 186126 - DNA, 52 bp, Artificial
  Synthetic oligonucleotide
ctggccacgccatcctatacactgggcgtaagagaagggagcactgtcggtt

SEQ ID NO: 186127 - DNA, 60 bp, Artificial
  Synthetic oligonucleotide
caggtgacgcttttaaagacggagaatgctgggcttaaagatgcagtgaatgctcgggat

SEQ ID NO: 186128 - DNA, 52 bp, Artificial
  Synthetic oligonucleotide
ctggccagtcctgctggcctcctgactgacgcctcgctttgctcgttgtcca

SEQ ID NO: 186129 - DNA, 52 bp, Artificial
  Synthetic oligonucleotide
ctggcgaaggctatgaacctctggtttccagtttatgacatcaatacaaaac

SEQ ID NO: 186130 - DNA, 52 bp, Artificial
  Synthetic oligonucleotide
ttcggggtttaacgagaatgtttgcctgtacggtacgaaatggccattcggg

SEQ ID NO: 186131 - DNA, 52 bp, Artificial
  Synthetic oligonucleotide
cctcgctgaaatttaatgacgctggcctgtgtgagtccggtgcagtcgataa

SEQ ID NO: 186132 - DNA, 52 bp, Artificial
  Synthetic oligonucleotide
ctggcgcacctaagtcgtcattcagcttcgggcgtatctgggatcagtacgg

SEQ ID NO: 186133 - DNA, 52 bp, Artificial
  Synthetic oligonucleotide
accagggtttcagagtgttcaccgcctcatccagtgagggcagcgtcagata

SEQ ID NO: 186134 - DNA, 52 bp, Artificial
  Synthetic oligonucleotide
aaatcgctcctgagccgtttgagggcgtttctggttaaaagatccggcctgt

SEQ ID NO: 186135 - DNA, 52 bp, Artificial
  Synthetic oligonucleotide
atggcagagaatgaagcgcgccgatccattgagcttcgtgcgccgaagagtg

SEQ ID NO: 186136 - DNA, 52 bp, Artificial
  Synthetic oligonucleotide
aaatctgcggggagcagatttgaacgtcgcgtgcgacgacccgtcagggcga

SEQ ID NO: 186137 - DNA, 52 bp, Artificial
  Synthetic oligonucleotide
tccctacccgctcccgtcgtcttaacgaacaccgagcacgtgccctgagggc

SEQ ID NO: 186138 - DNA, 60 bp, Artificial
  Synthetic oligonucleotide
cggtcagaccgattaaacataacatcccttgcgtgcaccgcctgagaggctctgagggcg

SEQ ID NO: 186139 - DNA, 52 bp, Artificial
  Synthetic oligonucleotide
ataacctgtgtcaccgcaccgcgtgataacggtctttgtgcatcgagcggtg

SEQ ID NO: 186140 - DNA, 52 bp, Artificial
  Synthetic oligonucleotide
cctgggttaaactggaggcctagtttaatagattatgtcatacctgtcaatg

SEQ ID NO: 186141 - DNA, 52 bp, Artificial
  Synthetic oligonucleotide
cctggcttgaccgcacggtaagcagcgtagagaaaaccggcgatcgaatgcg

SEQ ID NO: 186142 - DNA, 52 bp, Artificial
  Synthetic oligonucleotide
ttgagcttagcgatcgactcgttggaaagtccgctaacctgctgatagtcaa

SEQ ID NO: 186143 - DNA, 52 bp, Artificial
  Synthetic oligonucleotide
gctagtgctatctcagctttcggtgtcttaggggttttcttgatgaatgttc

SEQ ID NO: 186144 - DNA, 52 bp, Artificial
  Synthetic oligonucleotide
tccggaaatcatcgccaatttatcgcagaggacaacggtaagactgcagagt

SEQ ID NO: 186145 - DNA, 52 bp, Artificial
  Synthetic oligonucleotide
cacgctatcacgcggagtcctatgggacgtcaagtccagccttagggcctaa

SEQ ID NO: 186146 - DNA, 52 bp, Artificial
  Synthetic oligonucleotide
tccgtactgagtgacctgcaaaaccgtggagttgaagacattctgatagcct

SEQ ID NO: 186147 - DNA, 52 bp, Artificial
  Synthetic oligonucleotide
ataataaacaggggcgatgccggagtataaggagagttgagtggcctgtcat

SEQ ID NO: 186148 - DNA, 52 bp, Artificial
  Synthetic oligonucleotide
cacgcctttcggtgccgatacaaacagtggttcatataacccgtaccacaaa

SEQ ID NO: 186149 - DNA, 57 bp, Artificial
  Synthetic oligonucleotide
cggtcagaccgattaaacataacatcccttgcccgcacccccgcaggcgccctcagc

SEQ ID NO: 186150 - DNA, 52 bp, Artificial
  Synthetic oligonucleotide
tccgttaatgaaaatccttaagtagccgcttgttgttattgttccggcagtt

SEQ ID NO: 186151 - DNA, 52 bp, Artificial
  Synthetic oligonucleotide
gactgcgcgtcctgacgaggacttagagggattttgtcataggcggcataat

SEQ ID NO: 186152 - DNA, 52 bp, Artificial
  Synthetic oligonucleotide
tcctagcccataaattcgtatccgctaatctaatagaatcgccacaagttgg

SEQ ID NO: 186153 - DNA, 52 bp, Artificial
  Synthetic oligonucleotide
atggaatcgacaaccattgaacagcctggataataactcactatatactcag

SEQ ID NO: 186154 - DNA, 52 bp, Artificial
  Synthetic oligonucleotide
acatggcaacggacgtgcagaacgaactgggctatcagcgccgatgggaatc

SEQ ID NO: 186155 - DNA, 52 bp, Artificial
  Synthetic oligonucleotide
ttgacgccgttagctgggatgtttgaactccccacccacgcattaccggcat

SEQ ID NO: 186156 - DNA, 52 bp, Artificial
  Synthetic oligonucleotide
gcggcctattcgtagaggaagttttcttaattgtgaggctaacgagatggaa

SEQ ID NO: 186157 - DNA, 52 bp, Artificial
  Synthetic oligonucleotide
caccgccgcaatctcaggccaatggggtcgtcacggttactgatctggcact

SEQ ID NO: 186158 - DNA, 52 bp, Artificial
  Synthetic oligonucleotide
gacctggtgaggctgctttgtactctcaacagtgagccgctcgatgattacc

SEQ ID NO: 186159 - DNA, 52 bp, Artificial
  Synthetic oligonucleotide
tctacacaagaacaggcgtgtttcgagggggcatagaagactaaaatactgc

SEQ ID NO: 186160 - DNA, 57 bp, Artificial
  Synthetic oligonucleotide
caggtgggaccgtggtcccaggcagataagctgaccgacgacgcaggtgggaccgtg

SEQ ID NO: 186161 - DNA, 52 bp, Artificial
  Synthetic oligonucleotide
gcagacagagcggtcttttctgcacttaccgcgcagcttgagccgggacata

SEQ ID NO: 186162 - DNA, 52 bp, Artificial
  Synthetic oligonucleotide
cctacccggaatttcggccagcgggcaaggaaccgtcacttatggcaatggg

SEQ ID NO: 186163 - DNA, 52 bp, Artificial
  Synthetic oligonucleotide
atagctccgttttcgatctgcacgaatgccctgatagtgccgaatatagcta

SEQ ID NO: 186164 - DNA, 52 bp, Artificial
  Synthetic oligonucleotide
tctcctttcttgcgaccgaacattagttgcctcctttgttgacgcgacgaac

SEQ ID NO: 186165 - DNA, 52 bp, Artificial
  Synthetic oligonucleotide
caaatacaacgcatttggtgagcgaggctctattgttggtggttattgcacg

SEQ ID NO: 186166 - DNA, 52 bp, Artificial
  Synthetic oligonucleotide
ctgtgcgatgacggaaaggacattctccagactggctcttcccgggtcggct

SEQ ID NO: 186167 - DNA, 52 bp, Artificial
  Synthetic oligonucleotide
ttagtgccagctcgaaatggatgcgtggaatctgcgaacgttcagcctttgt

SEQ ID NO: 186168 - DNA, 52 bp, Artificial
  Synthetic oligonucleotide
gcgctcagatttccccggtctggtctgatatcggcatgacgcgtcccgttcg

SEQ ID NO: 186169 - DNA, 52 bp, Artificial
  Synthetic oligonucleotide
tctgacggaagagctattccatcgggactgcccccacgcgcccaggtgacag

SEQ ID NO: 186170 - DNA, 52 bp, Artificial
  Synthetic oligonucleotide
ttagtcttccctaaccaacgcacatacaacttattgtgtcagcgggtctaat

SEQ ID NO: 186171 - DNA, 60 bp, Artificial
  Synthetic oligonucleotide
cggtcacccggttctgtttcatgatatcgcgactgagtgcccggactgacagttcatcga

SEQ ID NO: 186172 - DNA, 52 bp, Artificial
  Synthetic oligonucleotide
gcagcttcagtggattaagaggggttaatgtggcctgtaccatctggttgca

SEQ ID NO: 186173 - DNA, 52 bp, Artificial
  Synthetic oligonucleotide
aacctgcgtccgaatccctggaataccaactccgttggggcgcaaaacttcg

SEQ ID NO: 186174 - DNA, 52 bp, Artificial
  Synthetic oligonucleotide
gcagggtgcagaacgagcgatatcaggagcagacacgtcacggctggctcat

SEQ ID NO: 186175 - DNA, 52 bp, Artificial
  Synthetic oligonucleotide
ttactgcatcaggtatgttttcacggttataagagcggccccatgtaacatc

SEQ ID NO: 186176 - DNA, 52 bp, Artificial
  Synthetic oligonucleotide
cttacaggactgttgctgaactatggcggaaaatcacaataacaacgctgac

SEQ ID NO: 186177 - DNA, 51 bp, Artificial
  Synthetic oligonucleotide
aacgaaaacaaggtccgagagctcgcgggtaaagtccgcgtccctggtctt

SEQ ID NO: 186178 - DNA, 52 bp, Artificial
  Synthetic oligonucleotide
aacgaaagaggctcaatcctccacaattgacaccacagtcggggttacgttg

SEQ ID NO: 186179 - DNA, 52 bp, Artificial
  Synthetic oligonucleotide
tcgctgtcacatccggtggcgctcagatttccccggtctggtctgatatcgg

SEQ ID NO: 186180 - DNA, 52 bp, Artificial
  Synthetic oligonucleotide
atacgttaccgtgacagcagccggatcccgccagacgatacgcagttacggc

SEQ ID NO: 186181 - DNA, 52 bp, Artificial
  Synthetic oligonucleotide
aacagtgacgggcgcacgtggggatcacggtatatcataaccagcgcaaagg

SEQ ID NO: 186182 - DNA, 60 bp, Artificial
  Synthetic oligonucleotide
caggttctgggggccattcgcgcaggcaatgccaaacgaatgaccatgactagctcaaat

SEQ ID NO: 186183 - DNA, 52 bp, Artificial
  Synthetic oligonucleotide
ctggcggggctcaataccgggcgcactgcattgcctgaatccagcgttcatc

SEQ ID NO: 186184 - DNA, 52 bp, Artificial
  Synthetic oligonucleotide
ctggcgtacttgaggaccagtacacggcaacaaagacgcgggttcagacagc

SEQ ID NO: 186185 - DNA, 52 bp, Artificial
  Synthetic oligonucleotide
atactcagtagcttgtcgttactgaaacagacattgagcatactgaacgctc

SEQ ID NO: 186186 - DNA, 52 bp, Artificial
  Synthetic oligonucleotide
gcgtaccgagggatataagtacgttgatcctacggggctggacaagtacaga

SEQ ID NO: 186187 - DNA, 52 bp, Artificial
  Synthetic oligonucleotide
atgcctgtcgcttcttcgagcgcacgtgcttgcctgaggctgtaaaccatga

SEQ ID NO: 186188 - DNA, 52 bp, Artificial
  Synthetic oligonucleotide
cccgttttttagccgtgcatgcaacaggtgcatggttttgcatgcgtcagac

SEQ ID NO: 186189 - DNA, 52 bp, Artificial
  Synthetic oligonucleotide
gcaatcgggttcgtgtcttcgtgtggtgcgatgcgggcgagatacaaagcgc

SEQ ID NO: 186190 - DNA, 52 bp, Artificial
  Synthetic oligonucleotide
atgcatgtagcgacagccatccccgacgtacaacacattgtcgagccgtttt

SEQ ID NO: 186191 - DNA, 52 bp, Artificial
  Synthetic oligonucleotide
gcaatgtgaaaagccacatcgtgaaggatcactacctgccttgttgtgcccc

SEQ ID NO: 186192 - DNA, 52 bp, Artificial
  Synthetic oligonucleotide
gcgggtttcgctcctggccgtcacgtcaaagcacgctggtaatgagtcaggt

SEQ ID NO: 186193 - DNA, 59 bp, Artificial
  Synthetic oligonucleotide
caggtttgccgtgttatccagcgctctgttatccccttccctggcttagcatgaaccga

SEQ ID NO: 186194 - DNA, 52 bp, Artificial
  Synthetic oligonucleotide
aacattttggttgaacctatatactaacttttctcgatgcctccccaatccc

SEQ ID NO: 186195 - DNA, 52 bp, Artificial
  Synthetic oligonucleotide
ttccccccttcatcagtactcctgacgctgtaaggagctgactgatgcagac

SEQ ID NO: 186196 - DNA, 52 bp, Artificial
  Synthetic oligonucleotide
ttccatgagatcattaagcgtattgacgatgttgattgcacaatcatcgacg

SEQ ID NO: 186197 - DNA, 52 bp, Artificial
  Synthetic oligonucleotide
ccatcatcgacatggcattactggtgagtttccatgccgcattactgtcctt

SEQ ID NO: 186198 - DNA, 52 bp, Artificial
  Synthetic oligonucleotide
atgacgtttattgtctgagaagaccgtcactggcgagccgcgtattaagcac

SEQ ID NO: 186199 - DNA, 52 bp, Artificial
  Synthetic oligonucleotide
ccatcataatcttctgctgaactgatcgggagcgcaattcagtagaaaagat

SEQ ID NO: 186200 - DNA, 52 bp, Artificial
  Synthetic oligonucleotide
gcggcgaccccgtaccggttgggatagcgtggcagcgtttcttgactcgcca

SEQ ID NO: 186201 - DNA, 52 bp, Artificial
  Synthetic oligonucleotide
ttcaccatggcgggtaaatcggcgttagtggcgcatactaatcgcacattaa

SEQ ID NO: 186202 - DNA, 48 bp, Artificial
  Synthetic oligonucleotide
cgttttggtattttccccccatcggggaaaagctgggttactgttagg

SEQ ID NO: 186203 - DNA, 52 bp, Artificial
  Synthetic oligonucleotide
cggtacctgcataaagatagtgacgccaggcgtagtgaagtccgtcatttca

SEQ ID NO: 186204 - DNA, 59 bp, Artificial
  Synthetic oligonucleotide
cggtaatagggtgcgtatctgaagaaaccgcgcgccagtcaacacgataagtgccagcg

SEQ ID NO: 186205 - DNA, 52 bp, Artificial
  Synthetic oligonucleotide
gttctcaaactaacattcaaaaagctaccacctataatggtccagtggatgc

SEQ ID NO: 186206 - DNA, 52 bp, Artificial
  Synthetic oligonucleotide
cgctcatcaggtgaggtggaacgcttgcacgtcttgcgacatattgtggcag

SEQ ID NO: 186207 - DNA, 52 bp, Artificial
  Synthetic oligonucleotide
catttccttccgaaacttcggataaagcatggacgctgtataaccccacccc

SEQ ID NO: 186208 - DNA, 52 bp, Artificial
  Synthetic oligonucleotide
gggccacccgctaatcccataacactgttaagtgctcgccctgccaccgttg

SEQ ID NO: 186209 - DNA, 52 bp, Artificial
  Synthetic oligonucleotide
gttcgcttaagccaggaggctaacgtgttagatcgtattaaactcggcttga

SEQ ID NO: 186210 - DNA, 52 bp, Artificial
  Synthetic oligonucleotide
ctaaaacaacaggggttatcttggctgatcaagtgaagtctttagactggaa

SEQ ID NO: 186211 - DNA, 52 bp, Artificial
  Synthetic oligonucleotide
agcgccagccccttatcctgtgcctgactgaacgatgtcagaaacgggatag

SEQ ID NO: 186212 - DNA, 52 bp, Artificial
  Synthetic oligonucleotide
cgtcgcccttcattcagcgtagactactggcaacagcatgcactgcgcacgg

SEQ ID NO: 186213 - DNA, 52 bp, Artificial
  Synthetic oligonucleotide
agggtaaaatgcgtcggtatgggcaaacgccggttatgggtgacctttaatc

SEQ ID NO: 186214 - DNA, 52 bp, Artificial
  Synthetic oligonucleotide
aggattcgaaccacgaaagtgaatgcaccgcgcaaatcacagatagacacgg

SEQ ID NO: 186215 - DNA, 56 bp, Artificial
  Synthetic oligonucleotide
gcactcagaagctcgcaaaaccgttctaaactttcagcgtagatttgggtgtttta

SEQ ID NO: 186216 - DNA, 52 bp, Artificial
  Synthetic oligonucleotide
cggtaacctatgccattacccccgataaaacgtcgattggcctttcgtggcg

SEQ ID NO: 186217 - DNA, 52 bp, Artificial
  Synthetic oligonucleotide
tacagcgtagccttggctccttaccgaagacgtgccagtcggtcacgaccaa

SEQ ID NO: 186218 - DNA, 52 bp, Artificial
  Synthetic oligonucleotide
cgatatctgactaatcatgtcagtctgaaaatcagtaccaatcttgacgaga

SEQ ID NO: 186219 - DNA, 52 bp, Artificial
  Synthetic oligonucleotide
acggacgtgggatactactttgttgtccagacgctggttagcgcgagcagca

SEQ ID NO: 186220 - DNA, 52 bp, Artificial
  Synthetic oligonucleotide
ggcagcctagtcgtcaaagcgttaatagaacgtaccggggttcctgcatatg

SEQ ID NO: 186221 - DNA, 52 bp, Artificial
  Synthetic oligonucleotide
tacggtatcgcgcgtgaactgccaggaaaagagcggcagtgcctgtctgcag

SEQ ID NO: 186222 - DNA, 52 bp, Artificial
  Synthetic oligonucleotide
catcacgcctgtgcttctgccaatcggagtgacgcaggataactggcaggcg

SEQ ID NO: 186223 - DNA, 52 bp, Artificial
  Synthetic oligonucleotide
gtgaaaacgtcatttcgtgagccatcttgtacgctccgtctgaaaatgtccg

SEQ ID NO: 186224 - DNA, 52 bp, Artificial
  Synthetic oligonucleotide
cgattaccgaaattccgatcaggagcgctacggccagcaaatctatcaccac

SEQ ID NO: 186225 - DNA, 52 bp, Artificial
  Synthetic oligonucleotide
agacagcttttcgcccgatgccagaaccaaacggcttacgactgtttacctc

SEQ ID NO: 186226 - DNA, 52 bp, Artificial
  Synthetic oligonucleotide
gggctatccgtcctagctcatccgcccgtaaaccgggatagtcgagtcggtt

SEQ ID NO: 186227 - DNA, 60 bp, Artificial
  Synthetic oligonucleotide
cgggtcagcatcagtcagtttctgatgcccgtaatagcctgaataacgcgacgtcagatg

SEQ ID NO: 186228 - DNA, 52 bp, Artificial
  Synthetic oligonucleotide
tacagtgctgattcggggcatcagagggataagccgtcccgcaggcggtaca

SEQ ID NO: 186229 - DNA, 52 bp, Artificial
  Synthetic oligonucleotide
cggaaacgtggccataacacgcacgcagtcaccctggataaaacgggacata

SEQ ID NO: 186230 - DNA, 52 bp, Artificial
  Synthetic oligonucleotide
gtccatagtagtcatggtcacacactattgttgatcacaaagccatctctgc

SEQ ID NO: 186231 - DNA, 52 bp, Artificial
  Synthetic oligonucleotide
ggcgattcgtcccaggttgtggtcagcggctatgtactgccgggtctacagg

SEQ ID NO: 186232 - DNA, 52 bp, Artificial
  Synthetic oligonucleotide
cgtttccctgttacccattgcgccgggggtggattttgcgaccgcgctctcc

SEQ ID NO: 186233 - DNA, 52 bp, Artificial
  Synthetic oligonucleotide
agatcagcagctggacttaaccgatcagaacactctgctgaacgtaacgcgg

SEQ ID NO: 186234 - DNA, 52 bp, Artificial
  Synthetic oligonucleotide
cgtgataagttaggcgaccataacaacccggaagagtatatccttagccagc

SEQ ID NO: 186235 - DNA, 52 bp, Artificial
  Synthetic oligonucleotide
gttggttcaaagatctttattcgtggggagaggggatgtatcctgccgaaaa

SEQ ID NO: 186236 - DNA, 52 bp, Artificial
  Synthetic oligonucleotide
agataagctgccggacagatgaatggcgtcaggcatatcttaacactcccca

SEQ ID NO: 186237 - DNA, 52 bp, Artificial
  Synthetic oligonucleotide
agagttcaggaacggcttgtttaacgcaggcttgctcgaaatacccgttaaa

SEQ ID NO: 186238 - DNA, 54 bp, Artificial
  Synthetic oligonucleotide
cgggtatggcgtggcccgtcaatagggatgtgacggtgagttgttccgggaggt

SEQ ID NO: 186239 - DNA, 52 bp, Artificial
  Synthetic oligonucleotide
taatgctcggcgtttggcgctgcgcatttcctgtagcagcgtgataaaagcg

SEQ ID NO: 186240 - DNA, 52 bp, Artificial
  Synthetic oligonucleotide
tagagaccgacatgatcagaggtaatattggtcgttccgctagtatcgtcgg

SEQ ID NO: 186241 - DNA, 52 bp, Artificial
  Synthetic oligonucleotide
acgccccagaatcgttctgaggccgttttagcggtgcgtgtaatgacgcgtt

SEQ ID NO: 186242 - DNA, 52 bp, Artificial
  Synthetic oligonucleotide
cggggtaccccctgaaatcgagccagtttgtggcacgccctacccggatggc

SEQ ID NO: 186243 - DNA, 52 bp, Artificial
  Synthetic oligonucleotide
ggttcaccgggttcactgaacttaagatagagattgcccgggctcgtggcac

SEQ ID NO: 186244 - DNA, 52 bp, Artificial
  Synthetic oligonucleotide
agcgaaccgctcattgccagccagcttgatgcactaattcgccagtttgact

SEQ ID NO: 186245 - DNA, 52 bp, Artificial
  Synthetic oligonucleotide
gttgcggccagaggcgttgcgttaagttaaaggtacacgcccgtaagcggcc

SEQ ID NO: 186246 - DNA, 52 bp, Artificial
  Synthetic oligonucleotide
ggttaagcagttccccaactgacctaaccttcgatcaaaccacctccccagg

SEQ ID NO: 186247 - DNA, 52 bp, Artificial
  Synthetic oligonucleotide
gttgcctcgccacaggcatcctgaccgacactctgccaccgaaagagggacg

SEQ ID NO: 186248 - DNA, 52 bp, Artificial
  Synthetic oligonucleotide
agaggaggccagcgctaatgcgaataattgccctcaacccgcccatggtctg

SEQ ID NO: 186249 - DNA, 60 bp, Artificial
  Synthetic oligonucleotide
cagtacatgcttaagagacacatctgccttgaaggttgacgttccagcattggttagctc

SEQ ID NO: 186250 - DNA, 52 bp, Artificial
  Synthetic oligonucleotide
cgagtccgcccctaagccggtaaattgcttgcggacataactgacctgttca

SEQ ID NO: 186251 - DNA, 52 bp, Artificial
  Synthetic oligonucleotide
tactgggacaataaggtagctgcgggtttcaccccgtggacagcggagcaaa

SEQ ID NO: 186252 - DNA, 52 bp, Artificial
  Synthetic oligonucleotide
taatttctctcgcaaggtcgctcatggagccgctatccctctacataatccc

SEQ ID NO: 186253 - DNA, 52 bp, Artificial
  Synthetic oligonucleotide
ggtggacgagggactgggaaatcgacttcgttggaattcctgcggattgctc

SEQ ID NO: 186254 - DNA, 52 bp, Artificial
  Synthetic oligonucleotide
gttgatgctcaagcacaatttatgagcggcgccagattcactgcgatgcagg

SEQ ID NO: 186255 - DNA, 52 bp, Artificial
  Synthetic oligonucleotide
ggcgatagccgtagcgttctgagtagggtatcgccgtgaacgtcagttcata

SEQ ID NO: 186256 - DNA, 52 bp, Artificial
  Synthetic oligonucleotide
agcgcaccgaagccgcctagtccacccatgacttccgggcgacgcgtctttt

SEQ ID NO: 186257 - DNA, 52 bp, Artificial
  Synthetic oligonucleotide
tacgaagagctcacccaccaggcgaatggtctcatcctgctgactcagcgta

SEQ ID NO: 186258 - DNA, 52 bp, Artificial
  Synthetic oligonucleotide
ggcattattcgcgctaattttgacccgctagctatcgctggggtgtaccgac

SEQ ID NO: 186259 - DNA, 52 bp, Artificial
  Synthetic oligonucleotide
gtgcctcaaagtttaggatcaggcaaaagcgatagtatgggagaatttgcta

SEQ ID NO: 186260 - DNA, 58 bp, Artificial
  Synthetic oligonucleotide
cggggtaatgccgttagttatcagtcgtggcgcaggtagtggggcacagaacgcagta

SEQ ID NO: 186261 - DNA, 52 bp, Artificial
  Synthetic oligonucleotide
acggaatattacagttccaagaagctacccctcctggaccagatacgtaccc

SEQ ID NO: 186262 - DNA, 52 bp, Artificial
  Synthetic oligonucleotide
agaaccataaccgcatctgtccatgagaagtgcattctgttttcgtggatgg

SEQ ID NO: 186263 - DNA, 52 bp, Artificial
  Synthetic oligonucleotide
catctggtgaggattgcagaggcaccggcggattaattgaggaaagttggag

SEQ ID NO: 186264 - DNA, 52 bp, Artificial
  Synthetic oligonucleotide
ggggcgcgcatggatttgctgtagccaatgaacggctgaagccatggtgtta

SEQ ID NO: 186265 - DNA, 52 bp, Artificial
  Synthetic oligonucleotide
ggtaatgtcactacagccatgttgatggggtcacgcgtggtcgccggcaggg

SEQ ID NO: 186266 - DNA, 52 bp, Artificial
  Synthetic oligonucleotide
ggggcggaagcagatcagaaactctatgtcccgctcagtttcgatgctatcc

SEQ ID NO: 186267 - DNA, 52 bp, Artificial
  Synthetic oligonucleotide
ggtaaacttaacacgcttctttgcaggcgtctagcggtcagtgtgagaaatc

SEQ ID NO: 186268 - DNA, 52 bp, Artificial
  Synthetic oligonucleotide
gtggatataacccagcgggccgtagttaaccgctttaaacgtcgccacgtca

SEQ ID NO: 186269 - DNA, 52 bp, Artificial
  Synthetic oligonucleotide
taccggtgcctatatcaccatcacacagaacatcgtcgactttgactctgac

SEQ ID NO: 186270 - DNA, 52 bp, Artificial
  Synthetic oligonucleotide
ggggcgttagcgccaaggcctctgacgtacaccccggcatcagccacgcgtc

SEQ ID NO: 186271 - DNA, 53 bp, Artificial
  Synthetic oligonucleotide
cggggcaggtcgcaactctggattttggtaacccgggccaactggacgcaaag

SEQ ID NO: 186272 - DNA, 52 bp, Artificial
  Synthetic oligonucleotide
agggttgcgggcgtcactgtattcagcggctgtttcaggaatctcacgcaga

SEQ ID NO: 186273 - DNA, 52 bp, Artificial
  Synthetic oligonucleotide
cagcaaattaccggagagaggaggcgcaaaaaaggcacgctttggtgaaaca

SEQ ID NO: 186274 - DNA, 52 bp, Artificial
  Synthetic oligonucleotide
agctatcaaacggaataaccgcaagattcacgctcgtaagttcctgtctacg

SEQ ID NO: 186275 - DNA, 52 bp, Artificial
  Synthetic oligonucleotide
ggggtaagacgtaggatttaatgggttacgccccagaatcgttctgaggccg

SEQ ID NO: 186276 - DNA, 52 bp, Artificial
  Synthetic oligonucleotide
cgcctgagaataggcgatcaagttgttaatgtaagaacatcttcgacagttc

SEQ ID NO: 186277 - DNA, 52 bp, Artificial
  Synthetic oligonucleotide
ggggtagcccattaaatgacgggtattggcaattaagaagggcagggcatca

SEQ ID NO: 186278 - DNA, 52 bp, Artificial
  Synthetic oligonucleotide
ctaagtatagaggccgtcatttcttttactgaggtttttccacaagaaccgg

SEQ ID NO: 186279 - DNA, 52 bp, Artificial
  Synthetic oligonucleotide
gggtaaagcgcgtgtagaaccgcgaataatcagctcgcaatccattaaacgc

SEQ ID NO: 186280 - DNA, 52 bp, Artificial
  Synthetic oligonucleotide
tacccccaacctggcggcgcgtaagctgttaagcccggaggtcgccaatgat

SEQ ID NO: 186281 - DNA, 52 bp, Artificial
  Synthetic oligonucleotide
gtgtataattctacacagactacatacaacctcaagtaacatgggtgttacc

SEQ ID NO: 186282 - DNA, 57 bp, Artificial
  Synthetic oligonucleotide
cagtatcgggcacagtacgctaaaggtgaggccaaggctcgaataaccttttctgac

SEQ ID NO: 186283 - DNA, 52 bp, Artificial
  Synthetic oligonucleotide
gtgtaagcggggaggaaactccccttactccacctgatggtattataggagc

SEQ ID NO: 186284 - DNA, 52 bp, Artificial
  Synthetic oligonucleotide
cggtgacacagcgccgaaatttagtttgcctgaccaggacggtgaggaaatt

SEQ ID NO: 186285 - DNA, 52 bp, Artificial
  Synthetic oligonucleotide
gttatgtttgtacatcatagtgttatgaagacggcagaggcaggactgagtc

SEQ ID NO: 186286 - DNA, 52 bp, Artificial
  Synthetic oligonucleotide
cgtccctctttcggtggcagagtgtcggtcaggatgcctgtggcgaggcaac

SEQ ID NO: 186287 - DNA, 52 bp, Artificial
  Synthetic oligonucleotide
ggccgtgcaatcaattgctcgcccgttcaccgttttcaggcgggcagaacgg

SEQ ID NO: 186288 - DNA, 52 bp, Artificial
  Synthetic oligonucleotide
tacggcatccttagagagcgggtatacatttagtatgggtacctttaaaggt

SEQ ID NO: 186289 - DNA, 52 bp, Artificial
  Synthetic oligonucleotide
ggccgccagagcttatctgcatttcgcgtctgacctcatcaatggcgcggac

SEQ ID NO: 186290 - DNA, 52 bp, Artificial
  Synthetic oligonucleotide
cgcgttttgttaacgtactggcgcatcgtcaggactggcaaggcgtgcttaa

SEQ ID NO: 186291 - DNA, 52 bp, Artificial
  Synthetic oligonucleotide
cgtcatgtcgccagcagcggtaagattcggttatgtcgctagccttttcccc

SEQ ID NO: 186292 - DNA, 52 bp, Artificial
  Synthetic oligonucleotide
agggtcagacttcccggcgcggcgggaacatacacggtcccctgatagtcgc

SEQ ID NO: 186293 - DNA, 56 bp, Artificial
  Synthetic oligonucleotide
cggggagttcctgaaccttcccaaaaatcgtcagatctctgaacgctcctcaccac

SEQ ID NO: 186294 - DNA, 52 bp, Artificial
  Synthetic oligonucleotide
ggcagtgcccgaagagcagttctggctacttgttgatatatccccgatacac

SEQ ID NO: 186295 - DNA, 52 bp, Artificial
  Synthetic oligonucleotide
gtgataatatcgggattcccgactaaaagaagagtgagctgcgaattagcgt

SEQ ID NO: 186296 - DNA, 52 bp, Artificial
  Synthetic oligonucleotide
cgccgaattagttaaatccggtatgaatcgtatagtaggagaccatataggg

SEQ ID NO: 186297 - DNA, 52 bp, Artificial
  Synthetic oligonucleotide
agcgggcatagcgaaccaaatcctcacgtaactgcttttcactcatgatagt

SEQ ID NO: 186298 - DNA, 52 bp, Artificial
  Synthetic oligonucleotide
actgatggaattatcctctctgaccgccgtctcacctgtcgatggtcgttac

SEQ ID NO: 186299 - DNA, 52 bp, Artificial
  Synthetic oligonucleotide
gtgcacatcgtggattttacggcgggcgtgagcccaacaggcggcttccgtt

SEQ ID NO: 186300 - DNA, 52 bp, Artificial
  Synthetic oligonucleotide
gtgcatcggaaccgtacagcgaagacatcgggccacggaccacttcaatacg

SEQ ID NO: 186301 - DNA, 52 bp, Artificial
  Synthetic oligonucleotide
aggacgccagtaaataaaatctcgtagtccgccggcatcagagacaggagta

SEQ ID NO: 186302 - DNA, 52 bp, Artificial
  Synthetic oligonucleotide
ggggatgatcgcccaatgtggcgggtgaggctcggtatggcgcttgtgatgc

SEQ ID NO: 186303 - DNA, 52 bp, Artificial
  Synthetic oligonucleotide
acgcgctaattttcgcatgttcgcttgcaagccctctggcacaagcgggagg

SEQ ID NO: 186304 - DNA, 53 bp, Artificial
  Synthetic oligonucleotide
cagtatgggcaacgggctggcgacgttcgttaccactggaaaactaaacttta

SEQ ID NO: 186305 - DNA, 52 bp, Artificial
  Synthetic oligonucleotide
cggtttaaattctgtagtagtcggtgcttctaatcatgttggaagacctatg

SEQ ID NO: 186306 - DNA, 52 bp, Artificial
  Synthetic oligonucleotide
gttaacgtttagccctaaccgtggaatgagcagccgcgacggatacgtaaac

SEQ ID NO: 186307 - DNA, 52 bp, Artificial
  Synthetic oligonucleotide
agcggttggtgtctggcactgccgccttctttaaagccccggttatcgcaag

SEQ ID NO: 186308 - DNA, 52 bp, Artificial
  Synthetic oligonucleotide
agcgtaactgaaggacagcgttattggtcatagaaagcgtttgcggagaaaa

SEQ ID NO: 186309 - DNA, 52 bp, Artificial
  Synthetic oligonucleotide
cggtttcggcattgttgtcgccctctttacgcttcgtttcctggtcggtctg

SEQ ID NO: 186310 - DNA, 52 bp, Artificial
  Synthetic oligonucleotide
aggtaatggtaaacccacggtatgccttggaatgacgacttatggaggtagg

SEQ ID NO: 186311 - DNA, 52 bp, Artificial
  Synthetic oligonucleotide
ctaacgtagctcatccaaccttacatcaggagttagtatgttggctttacgt

SEQ ID NO: 186312 - DNA, 52 bp, Artificial
  Synthetic oligonucleotide
actgcgcgagtacgacaaaattcatctgactgagctgcaccccagtgatttt

SEQ ID NO: 186313 - DNA, 52 bp, Artificial
  Synthetic oligonucleotide
taaacgtcagatcaggacccgctggtcactcacggatgacgtgataccccgc

SEQ ID NO: 186314 - DNA, 52 bp, Artificial
  Synthetic oligonucleotide
ctatggcagccttagcgcttctgcctatgtgcaacgctactggcgatcaaat

SEQ ID NO: 186315 - DNA, 58 bp, Artificial
  Synthetic oligonucleotide
cgggcgaggcgaatgcgtcttgcctggtataccgccgagtaagcctgggtgggattca

SEQ ID NO: 186316 - DNA, 52 bp, Artificial
  Synthetic oligonucleotide
ggatggcgtgattaaaccctggatgggcggagaaatatcgctgcgaagcgcc

SEQ ID NO: 186317 - DNA, 52 bp, Artificial
  Synthetic oligonucleotide
cggcagaatcgcgttcagcgcgttttagcggtgcgcgtaatgagacgttatg

SEQ ID NO: 186318 - DNA, 52 bp, Artificial
  Synthetic oligonucleotide
taaaccgggtggacaccacaagtcctgactggcctgatgtgcctgtaagcca

SEQ ID NO: 186319 - DNA, 52 bp, Artificial
  Synthetic oligonucleotide
ctatgatcgttatagatagatttacaggagaagttcaagctcttattggcag

SEQ ID NO: 186320 - DNA, 52 bp, Artificial
  Synthetic oligonucleotide
cgagcatgctgtcagggagagccacgacctggtcttcgagggactgttcgaa

SEQ ID NO: 186321 - DNA, 52 bp, Artificial
  Synthetic oligonucleotide
agcccgccacttgctatacgacagaagagtgatgctcatattgcgcgacaga

SEQ ID NO: 186322 - DNA, 52 bp, Artificial
  Synthetic oligonucleotide
cagagcgaccgtcggactaccgggcacaggcttatcttatactacacctacc

SEQ ID NO: 186323 - DNA, 52 bp, Artificial
  Synthetic oligonucleotide
cataaacaacgccaggcagagcattgacgtcgcggcctacagcttcaccagt

SEQ ID NO: 186324 - DNA, 52 bp, Artificial
  Synthetic oligonucleotide
gtaatcgcggtctgaagtaacaggttggagacgttacgggcgcttaagtagg

SEQ ID NO: 186325 - DNA, 52 bp, Artificial
  Synthetic oligonucleotide
taaaacgcggaatgcggtttgccctgaacagcgctgcgcgaatgtacggaat

SEQ ID NO: 186326 - DNA, 60 bp, Artificial
  Synthetic oligonucleotide
gcacgtgatctgagtagtcgtttcaattacacggtcgcatccttgcatacttgccgcctt

SEQ ID NO: 186327 - DNA, 60 bp, Artificial
  Synthetic oligonucleotide
cagtcaggcaaccacatcaagaatcttttaactgagattctgtcgatactacctcgcaca

SEQ ID NO: 186328 - DNA, 52 bp, Artificial
  Synthetic oligonucleotide
ctatcgccggaattctttaatccacaaccaggcaacggactgcccggactta

SEQ ID NO: 186329 - DNA, 52 bp, Artificial
  Synthetic oligonucleotide
actaacatccccagcgttttaaacgatccgctggagatagatgcgcccagat

SEQ ID NO: 186330 - DNA, 52 bp, Artificial
  Synthetic oligonucleotide
cgtggttctttatgctctcgggcattctgagtctctaccccgggtagctagc

SEQ ID NO: 186331 - DNA, 52 bp, Artificial
  Synthetic oligonucleotide
cggatgatctagatccgtacgacctggttttgctgagagaacggagcacagg

SEQ ID NO: 186332 - DNA, 52 bp, Artificial
  Synthetic oligonucleotide
actaccggattacctcagatccgttccctgaaccattcgtacatcgaccccc

SEQ ID NO: 186333 - DNA, 52 bp, Artificial
  Synthetic oligonucleotide
gggaaacgtggctcgtcttcccgcaggagcgttctagtgaaacggtatcccc

SEQ ID NO: 186334 - DNA, 52 bp, Artificial
  Synthetic oligonucleotide
gtttggctcagacttcaagaactctgcatcagtaatctcttgtacaccctct

SEQ ID NO: 186335 - DNA, 52 bp, Artificial
  Synthetic oligonucleotide
agtaagatctctcatatagtgctcatcattatcatgtgcccgaacccagtcg

SEQ ID NO: 186336 - DNA, 52 bp, Artificial
  Synthetic oligonucleotide
actatgtacagaactcaatgcgcaaggcagtataaacgtcgtcaattactca

SEQ ID NO: 186337 - DNA, 52 bp, Artificial
  Synthetic oligonucleotide
agggcgtacttggtcattttccttgactcctaacttattaggaggcacaatt

SEQ ID NO: 186338 - DNA, 60 bp, Artificial
  Synthetic oligonucleotide
cagtcagttattgcagagttcaggttgactgtatgaatacccgtattatccccggcaata

SEQ ID NO: 186339 - DNA, 52 bp, Artificial
  Synthetic oligonucleotide
acgtatcagcaagtcccgcgtcaagctcgttaacggccaacggatcaaaacc

SEQ ID NO: 186340 - DNA, 52 bp, Artificial
  Synthetic oligonucleotide
gtagatttcgggtcgtcgatacagcctttcttgttgaacggataccagccac

SEQ ID NO: 186341 - DNA, 52 bp, Artificial
  Synthetic oligonucleotide
cggcgcacaactttcaggataggtcagcaagcgagtcaacatacagcctatt

SEQ ID NO: 186342 - DNA, 52 bp, Artificial
  Synthetic oligonucleotide
taacggccacggacatacacggaaggcgtccccctcacgccatattccttaa

SEQ ID NO: 186343 - DNA, 52 bp, Artificial
  Synthetic oligonucleotide
taacgctctccggtagacgttcccacgtcagggcgcacaaatacgcgtccgt

SEQ ID NO: 186344 - DNA, 52 bp, Artificial
  Synthetic oligonucleotide
cgactgtcatccagccgtatacttgcgacataaatgcctgaacgccagtact

SEQ ID NO: 186345 - DNA, 52 bp, Artificial
  Synthetic oligonucleotide
cagcctccccggtgcacttttccagggcactcccgcaccatttctattcaga

SEQ ID NO: 186346 - DNA, 52 bp, Artificial
  Synthetic oligonucleotide
ggcgttatcccctgattgtgtggataacagtatcaccgcttttgagtgagca

SEQ ID NO: 186347 - DNA, 52 bp, Artificial
  Synthetic oligonucleotide
tataacctggcgaaatccacggcacatgccaaagtgcttaacgctacttcca

SEQ ID NO: 186348 - DNA, 52 bp, Artificial
  Synthetic oligonucleotide
aggcttgctttgtttagtgcgaaccatgttcttgcctatcgccatatctact

SEQ ID NO: 186349 - DNA, 60 bp, Artificial
  Synthetic oligonucleotide
cgggcatatagctatactccccgcatagctgaattgttggctatacggtttttagatggc

SEQ ID NO: 186350 - DNA, 52 bp, Artificial
  Synthetic oligonucleotide
taacttctcttgcattacgacgcacactgcgtggcgcccagtctcgactgcg

SEQ ID NO: 186351 - DNA, 52 bp, Artificial
  Synthetic oligonucleotide
taaatcagcccaggttcgtagctcatgctctttgttaacccgaatggaacat

SEQ ID NO: 186352 - DNA, 52 bp, Artificial
  Synthetic oligonucleotide
agccagttgtcctgtggttaaagcggagtgcgcggagtatgtcagtaagatg

SEQ ID NO: 186353 - DNA, 52 bp, Artificial
  Synthetic oligonucleotide
agcagtaagccgtcttccataaaccgcagcgccggtgctatctcctgaggcg

SEQ ID NO: 186354 - DNA, 52 bp, Artificial
  Synthetic oligonucleotide
taaagcgggtatattccggctgttattagctgtgcagagagtggcactctgt

SEQ ID NO: 186355 - DNA, 52 bp, Artificial
  Synthetic oligonucleotide
ggctctcactaaatgcttgaaccggacaggatcaagcacccgctgaaagatt

SEQ ID NO: 186356 - DNA, 52 bp, Artificial
  Synthetic oligonucleotide
cgtgttgttatgatgaccggtgccctctgcccggggtactggcagttacctc

SEQ ID NO: 186357 - DNA, 52 bp, Artificial
  Synthetic oligonucleotide
ctattacacgcgcttctcgtcttattactcaatttatggaacctatgggtct

SEQ ID NO: 186358 - DNA, 52 bp, Artificial
  Synthetic oligonucleotide
aggctagtcgggttacatgtcacattacaaagcccacaattggaacgacagc

SEQ ID NO: 186359 - DNA, 52 bp, Artificial
  Synthetic oligonucleotide
gtatgctgataacaggtcagctaaacagttaaagcagtatcagcgacgtatt

SEQ ID NO: 186360 - DNA, 57 bp, Artificial
  Synthetic oligonucleotide
cgggcaagcccagatttaactgtcttggcggacgatcgccggtgatcaataaccgcg

SEQ ID NO: 186361 - DNA, 52 bp, Artificial
  Synthetic oligonucleotide
tagtgatcttgactcacatgaagccagcagtggttcacgggccagccatgat

SEQ ID NO: 186362 - DNA, 52 bp, Artificial
  Synthetic oligonucleotide
taaagataacggtcgtgtagtggttgaaggtgttggtaccctgatgcaccac

SEQ ID NO: 186363 - DNA, 52 bp, Artificial
  Synthetic oligonucleotide
acgtgccgggctggcagactcacccagcagcaaaattcctgtaatggccgcc

SEQ ID NO: 186364 - DNA, 52 bp, Artificial
  Synthetic oligonucleotide
cgtgtgtcgggcttgtggatatacagagaacgccgatgtaaacggcgctcgc

SEQ ID NO: 186365 - DNA, 52 bp, Artificial
  Synthetic oligonucleotide
ggtttcaggtagggccccataatggtgtacgggattttctgaggatctgccc

SEQ ID NO: 186366 - DNA, 52 bp, Artificial
  Synthetic oligonucleotide
cgggcaggcaatgggttttgatatgggatggatgagcaaagggcatgcttac

SEQ ID NO: 186367 - DNA, 52 bp, Artificial
  Synthetic oligonucleotide
agccgtcacgacagatacccctgcccccattaccggtattccccggctgaca

SEQ ID NO: 186368 - DNA, 52 bp, Artificial
  Synthetic oligonucleotide
gtcatgcggcatcagtgcggattgtatgaaaagtgcaccatgtacggtgtga

SEQ ID NO: 186369 - DNA, 52 bp, Artificial
  Synthetic oligonucleotide
cgcattaatcctcgggtacaacgcttgtgatacgggatttataagcccctgg

SEQ ID NO: 186370 - DNA, 52 bp, Artificial
  Synthetic oligonucleotide
tagcagaattccatcataaggaagtcgtataacgttagtgttatcgttaaat

SEQ ID NO: 186371 - DNA, 55 bp, Artificial
  Synthetic oligonucleotide
cgggagaaggaaatttctggtccttccgtacgggaaatcagcagaggtgacgcac

SEQ ID NO: 186372 - DNA, 52 bp, Artificial
  Synthetic oligonucleotide
actcataacgctgttccgttgtgaaaatgtcgttgtattctctgcatctgtg

SEQ ID NO: 186373 - DNA, 52 bp, Artificial
  Synthetic oligonucleotide
aggcgacgcggagagagcaaaagggtgacgacgctaaacagggccatgacaa

SEQ ID NO: 186374 - DNA, 52 bp, Artificial
  Synthetic oligonucleotide
ggcgcagcatttttggaccgtctgctcgtgctgtgccagctcgctaccggtc

SEQ ID NO: 186375 - DNA, 52 bp, Artificial
  Synthetic oligonucleotide
cggaaggcaccaatatcgacaagttactgcgtgcgttagtcggggttatcct

SEQ ID NO: 186376 - DNA, 52 bp, Artificial
  Synthetic oligonucleotide
ggtttaatggtatctggcgtagcggtgcattaacggagagcgctatcgtgcg

SEQ ID NO: 186377 - DNA, 52 bp, Artificial
  Synthetic oligonucleotide
ccaaaacagccctttacgtgctgtccagcgtgacttgggatctgcgtacttg

SEQ ID NO: 186378 - DNA, 52 bp, Artificial
  Synthetic oligonucleotide
gtcatacccagaacctgcgtagcgggatgttcagttttcctctgccgataac

SEQ ID NO: 186379 - DNA, 52 bp, Artificial
  Synthetic oligonucleotide
gtcatcgtgggaaatatagctggcagatgtctcagcgaaacctaacaccatg

SEQ ID NO: 186380 - DNA, 52 bp, Artificial
  Synthetic oligonucleotide
gtcagtctgaggcaagggctttaccggagcgtctcttcagtgcgcctggcgt

SEQ ID NO: 186381 - DNA, 52 bp, Artificial
  Synthetic oligonucleotide
taatctgcgtcgggtaggttgatgtaacggcctattggtcacgcgccaacct

SEQ ID NO: 186382 - DNA, 60 bp, Artificial
  Synthetic oligonucleotide
cgtaatgccatgatggtggatgcaacattttgagtaaatacgattacagcggtttatcgg

SEQ ID NO: 186383 - DNA, 51 bp, Artificial
  Synthetic oligonucleotide
ggggcctcgccataccccgtaacgactgcgctcagtacccctgaatccata

SEQ ID NO: 186384 - DNA, 51 bp, Artificial
  Synthetic oligonucleotide
atatagtcagtttgtttcaggggcggctgagaatcctcgccaacactacga

SEQ ID NO: 186385 - DNA, 51 bp, Artificial
  Synthetic oligonucleotide
tctcttcctccccaaccgaaccgtcacgactgacaaccactgaccacgcgg

SEQ ID NO: 186386 - DNA, 51 bp, Artificial
  Synthetic oligonucleotide
gaagataagtgggcgcatacgtcagtacaagaccgtgccgctatcttgttt

SEQ ID NO: 186387 - DNA, 51 bp, Artificial
  Synthetic oligonucleotide
gtgttaccgcaacaaggccgaataaggaacgagacaaacgcctcaacggcc

SEQ ID NO: 186388 - DNA, 51 bp, Artificial
  Synthetic oligonucleotide
cgtcactatggcagggattaaaacccgggcttatcatcatggggtggatga

SEQ ID NO: 186389 - DNA, 51 bp, Artificial
  Synthetic oligonucleotide
gccttcttggcgcaactgggcccctaacatccgatagcctaagctctctcg

SEQ ID NO: 186390 - DNA, 51 bp, Artificial
  Synthetic oligonucleotide
cacaaaaaacgcactctaaccagccgtaagcagatcgtggggtctgaagcc

SEQ ID NO: 186391 - DNA, 51 bp, Artificial
  Synthetic oligonucleotide
ggggcaggcctaatatgcgccgcgctatacggttacctttcgccttaatca

SEQ ID NO: 186392 - DNA, 51 bp, Artificial
  Synthetic oligonucleotide
ctgtggtaagcagattgctatcaggccaaaaggttatttctgtacaggatg

SEQ ID NO: 186393 - DNA, 60 bp, Artificial
  Synthetic oligonucleotide
cagggataacgcatgttcgcgctcatgtatcagccgttcctctcttatctccagttctcg

SEQ ID NO: 186394 - DNA, 51 bp, Artificial
  Synthetic oligonucleotide
gcctggccaatgacaccatatcggacctgttagacggtgatgtaaagacca

SEQ ID NO: 186395 - DNA, 51 bp, Artificial
  Synthetic oligonucleotide
aatccatagcggataaataggataagtatccatatggatacgtagagcaca

SEQ ID NO: 186396 - DNA, 51 bp, Artificial
  Synthetic oligonucleotide
tctgtcatcgcccgtaggccctcgtctcagatgacccgaggattggcagtg

SEQ ID NO: 186397 - DNA, 51 bp, Artificial
  Synthetic oligonucleotide
gttactcagaaagtaagggtagtgccatcacttaacgtgacgccagacaat

SEQ ID NO: 186398 - DNA, 51 bp, Artificial
  Synthetic oligonucleotide
acaaagatctgccagcggggaaactatcagggaaaacgacggtaaaatcgg

SEQ ID NO: 186399 - DNA, 51 bp, Artificial
  Synthetic oligonucleotide
tggctatcataacaacactggttgatagcggatgaactcgtatatcagcaa

SEQ ID NO: 186400 - DNA, 51 bp, Artificial
  Synthetic oligonucleotide
aatctgtcgacgaacggaatgaccgaacacaacgtgtttattggcgatatc

SEQ ID NO: 186401 - DNA, 51 bp, Artificial
  Synthetic oligonucleotide
ggggatttttcgctggcgccgccgtatccgtttgtacaactggccacacta

SEQ ID NO: 186402 - DNA, 51 bp, Artificial
  Synthetic oligonucleotide
gggatttaatcaaatcccagccggtctatgagatccagtattacggtaaaa

SEQ ID NO: 186403 - DNA, 51 bp, Artificial
  Synthetic oligonucleotide
caccatcatacactaaatcagtaagttggcagcatcacccattatcttgat

SEQ ID NO: 186404 - DNA, 59 bp, Artificial
  Synthetic oligonucleotide
cgtaatctcaggctgaaaggggcgctgtatgagcaatcttttacaaatggggacagact

SEQ ID NO: 186405 - DNA, 51 bp, Artificial
  Synthetic oligonucleotide
gcgcgtgattggattaccgggtgatcatgtccgctatgatcctgtacgaaa

SEQ ID NO: 186406 - DNA, 51 bp, Artificial
  Synthetic oligonucleotide
atatcgccaggcagtcccagagcacgggagcctgccccgaacgaaaacgtg

SEQ ID NO: 186407 - DNA, 51 bp, Artificial
  Synthetic oligonucleotide
atcataaatgtcggtgtcatcatgcgctacgctctatggctccctgtacgt

SEQ ID NO: 186408 - DNA, 51 bp, Artificial
  Synthetic oligonucleotide
tgatcgtggacggcgttttttgcaaagtggaacaagactcactcccgggtc

SEQ ID NO: 186409 - DNA, 51 bp, Artificial
  Synthetic oligonucleotide
cgccttcactgaataaggaacctaagaaattccgcctttctgtgtcataaa

SEQ ID NO: 186410 - DNA, 49 bp, Artificial
  Synthetic oligonucleotide
ggggtccgaaaggacgccggtaccacttaggccggtaagaccaactccg

SEQ ID NO: 186411 - DNA, 51 bp, Artificial
  Synthetic oligonucleotide
ccgcccacaccagggctttttatcccccggcgatatgattgacaccccgta

SEQ ID NO: 186412 - DNA, 51 bp, Artificial
  Synthetic oligonucleotide
atcgcgcttagccggggtgtcaaaagccacggtttctcgggtgttgagtgg

SEQ ID NO: 186413 - DNA, 51 bp, Artificial
  Synthetic oligonucleotide
atcgcgagaaaccgtgggcatcttctcaccccgcaccccattgcgcccgct

SEQ ID NO: 186414 - DNA, 51 bp, Artificial
  Synthetic oligonucleotide
gaataaagcatgccggtgagtaggcaactcattccaacaggacccgcccca

SEQ ID NO: 186415 - DNA, 54 bp, Artificial
  Synthetic oligonucleotide
cagggattattataagtaaccctaagccgtaaaaaggcagcaacaagattccga

SEQ ID NO: 186416 - DNA, 51 bp, Artificial
  Synthetic oligonucleotide
ctttacgctacgggcagcagacctatcatctcctactcatccggtaaaaac

SEQ ID NO: 186417 - DNA, 51 bp, Artificial
  Synthetic oligonucleotide
tgtccgttaaactcaggctacctcacctcaggccatgtgcgcggtaactga

SEQ ID NO: 186418 - DNA, 51 bp, Artificial
  Synthetic oligonucleotide
atcagaatggatgctgtctttaggtgttattaatggtcgaaacatttggcg

SEQ ID NO: 186419 - DNA, 51 bp, Artificial
  Synthetic oligonucleotide
actgtcgatgtaggtttgccactcttggttggacagacggacgtcaacccc

SEQ ID NO: 186420 - DNA, 51 bp, Artificial
  Synthetic oligonucleotide
ctgtattacttcctgacggcttctgctatcgtcagcaacacatctgggctt

SEQ ID NO: 186421 - DNA, 51 bp, Artificial
  Synthetic oligonucleotide
cgttagtttcattcacctaccccgaagatgctcaagctaaatgggcagcaa

SEQ ID NO: 186422 - DNA, 51 bp, Artificial
  Synthetic oligonucleotide
taacctgcgcagttcctctcaggagccgcatttcctgcagccgcgaaggta

SEQ ID NO: 186423 - DNA, 51 bp, Artificial
  Synthetic oligonucleotide
ccactttcgccgtatgaaatctgggacaacggcacctttacatgcatgcgg

SEQ ID NO: 186424 - DNA, 51 bp, Artificial
  Synthetic oligonucleotide
gaaggttggtatttactccctggcgctcccgcaacagtattgtgcccaagg

SEQ ID NO: 186425 - DNA, 51 bp, Artificial
  Synthetic oligonucleotide
ccgcgtactccccactggttactgatacgccaggagctatctcccgcccat

SEQ ID NO: 186426 - DNA, 59 bp, Artificial
  Synthetic oligonucleotide
cgtaagtgagaagggtcgcagattatacaaccttgcattaggcccgttagcactcgcat

SEQ ID NO: 186427 - DNA, 51 bp, Artificial
  Synthetic oligonucleotide
aatcgcaatccggctgcccgtgggcacagtgtaatgagttggcagcgaact

SEQ ID NO: 186428 - DNA, 51 bp, Artificial
  Synthetic oligonucleotide
tctctatgacaacgaccaaacattactctccggaagtccgtgaacgggcag

SEQ ID NO: 186429 - DNA, 51 bp, Artificial
  Synthetic oligonucleotide
gaaggactctgccggatgccgcgttgtgagggcttacgccgtgcccgaacc

SEQ ID NO: 186430 - DNA, 51 bp, Artificial
  Synthetic oligonucleotide
ccgcgcaaagcgggaaagtgacgcacgcaagccctttcgacctgcaccaga

SEQ ID NO: 186431 - DNA, 51 bp, Artificial
  Synthetic oligonucleotide
gccattgtaattcggtggcttccatttgcgcccgatagcgtttgctggcgc

SEQ ID NO: 186432 - DNA, 51 bp, Artificial
  Synthetic oligonucleotide
ctgtctcttcaccggggatcgttatgcccatgtgctctcgtgtccagagaa

SEQ ID NO: 186433 - DNA, 51 bp, Artificial
  Synthetic oligonucleotide
ccgcgacacgtaccagccagtcccccatttgataagccacgcccgttctca

SEQ ID NO: 186434 - DNA, 51 bp, Artificial
  Synthetic oligonucleotide
gccatgttaaggagcggttaaacgacaatagcggccatattacctgtaggc

SEQ ID NO: 186435 - DNA, 51 bp, Artificial
  Synthetic oligonucleotide
gtgtcgtggattgagcggcgcacacctgacaggctgtaacggaggatgaga

SEQ ID NO: 186436 - DNA, 51 bp, Artificial
  Synthetic oligonucleotide
aagacaaacacaaccgccacgaccatttactgatgcgagtttgttatcggc

SEQ ID NO: 186437 - DNA, 60 bp, Artificial
  Synthetic oligonucleotide
atgaccgaacgaagtgagcgaatgaacgaggaggcgtcatgtcatctgccctgacatagt

SEQ ID NO: 186438 - DNA, 58 bp, Artificial
  Synthetic oligonucleotide
cgtaaccgcctgccaagttataaagccaccactcagattatatgtccggaagccgtga

SEQ ID NO: 186439 - DNA, 51 bp, Artificial
  Synthetic oligonucleotide
ctttaccgtaaaagtgttcatgctttaccgtaaaagtgttcatgcttcatg

SEQ ID NO: 186440 - DNA, 51 bp, Artificial
  Synthetic oligonucleotide
gcggcagtcataatgccactctccacgttggcatgcattcccgcagtattt

SEQ ID NO: 186441 - DNA, 51 bp, Artificial
  Synthetic oligonucleotide
acacgaatacctctaaatggatcgcccgtcaatgcgcaaaattcacaccaa

SEQ ID NO: 186442 - DNA, 51 bp, Artificial
  Synthetic oligonucleotide
aagaacctttcagcaacgaaatctggacatatgcagcgacgattttatagc

SEQ ID NO: 186443 - DNA, 51 bp, Artificial
  Synthetic oligonucleotide
cgcctcgtctgatatagcgcgaggcgcgacgactcaggatgcaggaatagc

SEQ ID NO: 186444 - DNA, 51 bp, Artificial
  Synthetic oligonucleotide
gcgcaacgtgagttgacgccataaccactcgaccggtccctgtcgccagaa

SEQ ID NO: 186445 - DNA, 51 bp, Artificial
  Synthetic oligonucleotide
aatgtggtgtcttatcctaaccagatggaggtctacccggatctgattgcc

SEQ ID NO: 186446 - DNA, 51 bp, Artificial
  Synthetic oligonucleotide
tgcggctggcagagcgtatttgatcgtctgtgatatgagcgatgtcttgag

SEQ ID NO: 186447 - DNA, 51 bp, Artificial
  Synthetic oligonucleotide
gcctattacgaaatgcattaggaacgccatatgctccatctaatcagatat

SEQ ID NO: 186448 - DNA, 51 bp, Artificial
  Synthetic oligonucleotide
cgcagtagccacctggtttatccccttgctttgttcctccgaggcgcagga

SEQ ID NO: 186449 - DNA, 57 bp, Artificial
  Synthetic oligonucleotide
cagggctttaagccacaggagagtatccccggctataacgcgaatccggacgagaca

SEQ ID NO: 186450 - DNA, 51 bp, Artificial
  Synthetic oligonucleotide
gttgcatgccagtagcgttcagttggcgggagacggcgtgaatattcactt

SEQ ID NO: 186451 - DNA, 51 bp, Artificial
  Synthetic oligonucleotide
gccggtcgatttgggttcaaagcaacaggcggcactcctatggcggaagcc

SEQ ID NO: 186452 - DNA, 51 bp, Artificial
  Synthetic oligonucleotide
gttcattaaaacgggcaatattttgtccgtaagtggccccctgaagtagcg

SEQ ID NO: 186453 - DNA, 51 bp, Artificial
  Synthetic oligonucleotide
aagtccgtgataaaagacggagaaagagatccaacaaatttggcattaact

SEQ ID NO: 186454 - DNA, 51 bp, Artificial
  Synthetic oligonucleotide
tgctcaccttccggtaaagtacctcagcctgttcgtgcagcttctcgcact

SEQ ID NO: 186455 - DNA, 51 bp, Artificial
  Synthetic oligonucleotide
aagtactgcggtcagagaaaactggcaatggaagcctactgtggcgtattg

SEQ ID NO: 186456 - DNA, 51 bp, Artificial
  Synthetic oligonucleotide
gttcaccattaggcgaaggcgtgcgcaataccgaactaccgggtaaccgcc

SEQ ID NO: 186457 - DNA, 51 bp, Artificial
  Synthetic oligonucleotide
aattgatcggtgggcgctgaaatagactcgaaatctcttgagcgacgctca

SEQ ID NO: 186458 - DNA, 51 bp, Artificial
  Synthetic oligonucleotide
aaggtggatttgacctacttctggcagtacgaacagctcagctctcatctg

SEQ ID NO: 186459 - DNA, 51 bp, Artificial
  Synthetic oligonucleotide
aaggtctgcgcttacacgcttatcgctgcgccgctgacgtctggactgtcg

SEQ ID NO: 186460 - DNA, 57 bp, Artificial
  Synthetic oligonucleotide
cgtaaccgaccaatcgcaatcctcagagtaccagataccgataacggagttaactga

SEQ ID NO: 186461 - DNA, 51 bp, Artificial
  Synthetic oligonucleotide
gtttagttccccagcataagacccgcctgagccggttaacagatcgtttaa

SEQ ID NO: 186462 - DNA, 51 bp, Artificial
  Synthetic oligonucleotide
tgccctaaactacacagaaacgcaccgtaattattcagtacagtgccattt

SEQ ID NO: 186463 - DNA, 51 bp, Artificial
  Synthetic oligonucleotide
gaaaccataccgatacgtcctggaagtagctcctgagcgtagaccagaatg

SEQ ID NO: 186464 - DNA, 51 bp, Artificial
  Synthetic oligonucleotide
ccgggcaggaaaacggctttaaacccttccttcgggaggtgcagacgcgcg

SEQ ID NO: 186465 - DNA, 51 bp, Artificial
  Synthetic oligonucleotide
atcaccctacactgagacaggtacagtattcatcctaatccgcagtctgta

SEQ ID NO: 186466 - DNA, 51 bp, Artificial
  Synthetic oligonucleotide
gcgacggttgcccagcgttatgctgtgccgaccatttacgatttcattagc

SEQ ID NO: 186467 - DNA, 51 bp, Artificial
  Synthetic oligonucleotide
aatatgtgcgccacgcagcgacgatgagcgataaacaagtcttcgaagcac

SEQ ID NO: 186468 - DNA, 51 bp, Artificial
  Synthetic oligonucleotide
cgtctgattttgtttgacggctatcacgtttcagcgccagatagcctaaaa

SEQ ID NO: 186469 - DNA, 51 bp, Artificial
  Synthetic oligonucleotide
tgcgaagaatcgcctgatttatgcgtagtgctgcgagtccagtcaagatag

SEQ ID NO: 186470 - DNA, 51 bp, Artificial
  Synthetic oligonucleotide
gttctcttcagtgacagtgagtcgccggataaggcacaacatcttctcaat

SEQ ID NO: 186471 - DNA, 51 bp, Artificial
  Synthetic oligonucleotide
cgtaaaacgccctggagcgattttgaggcgttttcagggggtaagacgtag

SEQ ID NO: 186472 - DNA, 51 bp, Artificial
  Synthetic oligonucleotide
atcaccgttaatcccgatggcgtagatattgccccgagattcttgcgtcac

SEQ ID NO: 186473 - DNA, 51 bp, Artificial
  Synthetic oligonucleotide
gcgagtttaaccacatggaagcaacgctgcacgggacaccgtaagcattgc

SEQ ID NO: 186474 - DNA, 51 bp, Artificial
  Synthetic oligonucleotide
cttgtagctaaggggaagggtaaagatgcgttaggtcaagtagatatctta

SEQ ID NO: 186475 - DNA, 51 bp, Artificial
  Synthetic oligonucleotide
tgccagagagcggtttgcatacggtggcgatattgtcgcactagcgaattc

SEQ ID NO: 186476 - DNA, 51 bp, Artificial
  Synthetic oligonucleotide
actcgtttcaccttaagaaacgtggtgcgggcagccaggccaggttggcga

SEQ ID NO: 186477 - DNA, 51 bp, Artificial
  Synthetic oligonucleotide
catgcccgtttgtcagtccggctgcacatctcccggtaagtccgttcgcgg

SEQ ID NO: 186478 - DNA, 51 bp, Artificial
  Synthetic oligonucleotide
aaggcgtagcaagcgtcgctctgggacaacattggtcaggcaatagcgcgc

SEQ ID NO: 186479 - DNA, 51 bp, Artificial
  Synthetic oligonucleotide
gttgcggctaatgggaagtgggagttatcgaccgatcagcttccggaaggg

SEQ ID NO: 186480 - DNA, 51 bp, Artificial
  Synthetic oligonucleotide
tcttcctcttacaatccaataactttgttgaatgtcgggacgagtaatacc

SEQ ID NO: 186481 - DNA, 51 bp, Artificial
  Synthetic oligonucleotide
tcttccctgggacgacgcctgtctgaccttccacgaaactcgccgtatcgt

SEQ ID NO: 186482 - DNA, 50 bp, Artificial
  Synthetic oligonucleotide
cggtttgtcattcgcctcaaaaccgggcagggaacacccgcccggttttg

SEQ ID NO: 186483 - DNA, 51 bp, Artificial
  Synthetic oligonucleotide
cgccaatacacatccccgggcaacatgcgtccagaccaccgtgtaacgccc

SEQ ID NO: 186484 - DNA, 51 bp, Artificial
  Synthetic oligonucleotide
caccagccgctataacaatagcatgaccagcggcagtatcccatatatgag

SEQ ID NO: 186485 - DNA, 51 bp, Artificial
  Synthetic oligonucleotide
caatggcctcagcggcttgcgtaaagaatcttcgcaacacgcaccaaaggt

SEQ ID NO: 186486 - DNA, 51 bp, Artificial
  Synthetic oligonucleotide
atcatgtaatgggataacagtttacgaacccgctgtggctttatatgtgat

SEQ ID NO: 186487 - DNA, 51 bp, Artificial
  Synthetic oligonucleotide
gggagaatcgcacagcgtcacgcgatcgctgaccggtaacccccacgcttt

SEQ ID NO: 186488 - DNA, 51 bp, Artificial
  Synthetic oligonucleotide
tggatttacgtaaagcggcaaaaggtcagatgtgtacagtcagaattcctg

SEQ ID NO: 186489 - DNA, 51 bp, Artificial
  Synthetic oligonucleotide
tggatttgatgacatcgcagatgtcgaaaccaatgttaaaccccgtggcgg

SEQ ID NO: 186490 - DNA, 51 bp, Artificial
  Synthetic oligonucleotide
aaggataaggtacgtcggtattatatcaacgcttatagctcgaagagcaat

SEQ ID NO: 186491 - DNA, 51 bp, Artificial
  Synthetic oligonucleotide
aaggaaatcgctctacgggcatatcggggcggggaagttcgcagtgcatat

SEQ ID NO: 186492 - DNA, 51 bp, Artificial
  Synthetic oligonucleotide
gcgaaatcccgcaaggttacaggggtgtaccaggccggaaatcgcgtagcg

SEQ ID NO: 186493 - DNA, 59 bp, Artificial
  Synthetic oligonucleotide
cggttcaaacaggctggacatctgacgtccctcggcttcccttgcagccagaacggcgc

SEQ ID NO: 186494 - DNA, 51 bp, Artificial
  Synthetic oligonucleotide
cgccaataccgcttgcgcctgctgccaggtaacatcacgtggtagatcgtg

SEQ ID NO: 186495 - DNA, 51 bp, Artificial
  Synthetic oligonucleotide
gttcaacctcgacgctaccatcccgggaagacaaacacgtcaaccgcttca

SEQ ID NO: 186496 - DNA, 51 bp, Artificial
  Synthetic oligonucleotide
ccagcaaaggctgttgtgctccggagtgagtgaaaaaatttttctgagtgg

SEQ ID NO: 186497 - DNA, 51 bp, Artificial
  Synthetic oligonucleotide
cttgttatagcatcggtgtcgcttgtgataatcggtgtcgcttgtgataat

SEQ ID NO: 186498 - DNA, 51 bp, Artificial
  Synthetic oligonucleotide
cacatgctatgttacgcattaaatctgattggaaagaacgtcatgattcgg

SEQ ID NO: 186499 - DNA, 51 bp, Artificial
  Synthetic oligonucleotide
tggaaagactgactggactaagccgccccatgatagtgaaaggagtagcca

SEQ ID NO: 186500 - DNA, 51 bp, Artificial
  Synthetic oligonucleotide
gccgcatcataacgtaaacctcgtacgccatattttcgcatttcacgaacg

SEQ ID NO: 186501 - DNA, 51 bp, Artificial
  Synthetic oligonucleotide
ccggagaggcgcgtgataaagcgaatcgggaagcgtcggccagacaaaaag

SEQ ID NO: 186502 - DNA, 51 bp, Artificial
  Synthetic oligonucleotide
gcgcattggcaaagcgatgtagaggctgggcgtttaatgggagcatcggtt

SEQ ID NO: 186503 - DNA, 51 bp, Artificial
  Synthetic oligonucleotide
tgcacgatggttagtaggagccggatcagtctgaatcttggttacctcggg

SEQ ID NO: 186504 - DNA, 56 bp, Artificial
  Synthetic oligonucleotide
cggttatctaaatcgccaacctgcaatttatagtctccggatgccaggcccgggtc

SEQ ID NO: 186505 - DNA, 51 bp, Artificial
  Synthetic oligonucleotide
atatgttgtcctaatgtttggcttcaacggggcgtttcgctgtagaccccc

SEQ ID NO: 186506 - DNA, 51 bp, Artificial
  Synthetic oligonucleotide
ccgtctcttctgggggaatacagcaagtgacatcagggcgttttgttatcc

SEQ ID NO: 186507 - DNA, 51 bp, Artificial
  Synthetic oligonucleotide
caatgccaccccacgtggctctaccccaagtgggcggttgctaagcacgtt

SEQ ID NO: 186508 - DNA, 51 bp, Artificial
  Synthetic oligonucleotide
acgttgccagatttcccgcggccttcaccgcacgctgttttgcaccttgca

SEQ ID NO: 186509 - DNA, 51 bp, Artificial
  Synthetic oligonucleotide
gttatgggtgttgtacgagccatttgattcctctgattctcggacgttcta

SEQ ID NO: 186510 - DNA, 51 bp, Artificial
  Synthetic oligonucleotide
tcttgtccgtaggaagagtacaaacgccgatccttggcctgatagtgcgcc

SEQ ID NO: 186511 - DNA, 51 bp, Artificial
  Synthetic oligonucleotide
ttggggccaatttatctatatactcgccacaagttcccacctgtgtacaaa

SEQ ID NO: 186512 - DNA, 51 bp, Artificial
  Synthetic oligonucleotide
ttggtggcctgccatcgcccgacaatcagcaacttaccgccacggtcagag

SEQ ID NO: 186513 - DNA, 51 bp, Artificial
  Synthetic oligonucleotide
catacatacgcccatcaattctagagtgacccttcaaaatacgattacgta

SEQ ID NO: 186514 - DNA, 51 bp, Artificial
  Synthetic oligonucleotide
gatgggggggctttcaataggcggtgtaggtgacgccatttctataaccaa

SEQ ID NO: 186515 - DNA, 57 bp, Artificial
  Synthetic oligonucleotide
cagggtctacactgtttaacgctattcgccgtgacgtttcatctttcaggagttgta

SEQ ID NO: 186516 - DNA, 51 bp, Artificial
  Synthetic oligonucleotide
atgtcatacagcgtggattgggaaagctcgggatgggacaagcgggtattg

SEQ ID NO: 186517 - DNA, 51 bp, Artificial
  Synthetic oligonucleotide
cccgaaaagacacgagcttaacgccactggcagcggccactggtaagcagg

SEQ ID NO: 186518 - DNA, 51 bp, Artificial
  Synthetic oligonucleotide
aaagcgattgtcgccttgtctccagatggtaagcatgcaacttcggcattt

SEQ ID NO: 186519 - DNA, 51 bp, Artificial
  Synthetic oligonucleotide
gtcataaatgaaactccttatgacacaggttagtgaagccgtgaaaatcga

SEQ ID NO: 186520 - DNA, 51 bp, Artificial
  Synthetic oligonucleotide
attgttagcgtcatatccgcttagtgtgggtattctggcagggcagtggat

SEQ ID NO: 186521 - DNA, 51 bp, Artificial
  Synthetic oligonucleotide
aaacgcattaaacgcctgcacctcaggatcgatggcgtcacgctgggtaaa

SEQ ID NO: 186522 - DNA, 51 bp, Artificial
  Synthetic oligonucleotide
gtcagcggttatccggatatgaatgccctgaatgaagggcagcgactgaaa

SEQ ID NO: 186523 - DNA, 51 bp, Artificial
  Synthetic oligonucleotide
gtcacgtttctgccgccgttcattcacagcagactttggcaggattcgcct

SEQ ID NO: 186524 - DNA, 51 bp, Artificial
  Synthetic oligonucleotide
aaacctgactgagctggaaaaggaggtttagctctaggaatggcccgatta

SEQ ID NO: 186525 - DNA, 51 bp, Artificial
  Synthetic oligonucleotide
cggaggaaggcaccccacagggtgcggtcatctcaccgctgctggcaaaca

SEQ ID NO: 186526 - DNA, 58 bp, Artificial
  Synthetic oligonucleotide
cggtgtcaactggtcagctattgctcagttagtaacggaaaacgcactagaaaaggca

SEQ ID NO: 186527 - DNA, 51 bp, Artificial
  Synthetic oligonucleotide
cataaactcaccggcaacctaagacttaccgatatagcgcaagcggtaaat

SEQ ID NO: 186528 - DNA, 51 bp, Artificial
  Synthetic oligonucleotide
tttactcccaatgtgatttgatggtcaatgagtcaggaataatcccgtgaa

SEQ ID NO: 186529 - DNA, 51 bp, Artificial
  Synthetic oligonucleotide
tttactggcagcgattcaggcgaaaacgtcaggagagatacgggaatatat

SEQ ID NO: 186530 - DNA, 51 bp, Artificial
  Synthetic oligonucleotide
gatctgctaattgtcgtggggatgttcttaaccggcttcgatgctccaaca

SEQ ID NO: 186531 - DNA, 51 bp, Artificial
  Synthetic oligonucleotide
tttatacctatcgctggagtccgacaacaggcccgcaatggacacgccacg

SEQ ID NO: 186532 - DNA, 51 bp, Artificial
  Synthetic oligonucleotide
ccccgctacattgcgcctcaccgtataattccggcttggtgtggatattac

SEQ ID NO: 186533 - DNA, 51 bp, Artificial
  Synthetic oligonucleotide
cataaacagatcataaaaattgtccatcagagtacatgctcatccagtagc

SEQ ID NO: 186534 - DNA, 51 bp, Artificial
  Synthetic oligonucleotide
tttcacaacgtactggaatcgctgggtttgtaggccgggtaagcgccaccc

SEQ ID NO: 186535 - DNA, 51 bp, Artificial
  Synthetic oligonucleotide
attaagcccgcgtccaccggcctttatcgccctcaacgaaccggaaaacag

SEQ ID NO: 186536 - DNA, 51 bp, Artificial
  Synthetic oligonucleotide
catagccggaacttgcatccagaccgcgttcccatgccgagtcagcgcata

SEQ ID NO: 186537 - DNA, 60 bp, Artificial
  Synthetic oligonucleotide
cggtgggttgtctatatgctggctgtcatgtggtctgttttaggtatactatccagagta

SEQ ID NO: 186538 - DNA, 51 bp, Artificial
  Synthetic oligonucleotide
agagccgccaaacagcgcattagcgaccgcataggagagaccgacccctaa

SEQ ID NO: 186539 - DNA, 51 bp, Artificial
  Synthetic oligonucleotide
aaattaaccttcaagaccgatcttgagaagctagagcgcgaaaaagcagct

SEQ ID NO: 186540 - DNA, 51 bp, Artificial
  Synthetic oligonucleotide
gatttacacgctaccgacagcgatgctctggtgctgagctctaacggaaaa

SEQ ID NO: 186541 - DNA, 51 bp, Artificial
  Synthetic oligonucleotide
agcgaatgcgttcctgtatccgggttacgcggcgtctgcgtggtgtccacg

SEQ ID NO: 186542 - DNA, 51 bp, Artificial
  Synthetic oligonucleotide
ttgagcaggtggaaacacaggaaaatagccaggagtccgaatccagaatag

SEQ ID NO: 186543 - DNA, 51 bp, Artificial
  Synthetic oligonucleotide
cgctgggttttccgccgcgattaatttcttcaccagcgcacgaatagccgt

SEQ ID NO: 186544 - DNA, 51 bp, Artificial
  Synthetic oligonucleotide
gtccttctgcttgccagcaagtgtgtcggggagcgtattgcccgcggtgtc

SEQ ID NO: 186545 - DNA, 51 bp, Artificial
  Synthetic oligonucleotide
cgctgtgagttgatgatatagcccaaaaccacaggggccagcctcatagca

SEQ ID NO: 186546 - DNA, 51 bp, Artificial
  Synthetic oligonucleotide
gactgtgcgacgacctcgttttcttcattaacgatgtctacccactccgtg

SEQ ID NO: 186547 - DNA, 51 bp, Artificial
  Synthetic oligonucleotide
aaatcgtcgtcagccagttccaaccggttccgcccccgaaccatgacgcaa

SEQ ID NO: 186548 - DNA, 56 bp, Artificial
  Synthetic oligonucleotide
atgaccgttttcataaccttgcggtactgagccagtaactccggtgaacgctcaac

SEQ ID NO: 186549 - DNA, 60 bp, Artificial
  Synthetic oligonucleotide
cggtgcttcagttatggccgaaactctgacgcgcaaagagtggatcgactcgctgacgaa

SEQ ID NO: 186550 - DNA, 51 bp, Artificial
  Synthetic oligonucleotide
atggctatgagtcgtttagtcgtagtatctaatcgaattgcccccccggat

SEQ ID NO: 186551 - DNA, 51 bp, Artificial
  Synthetic oligonucleotide
gactgttgccccggcgactgccataactaccttatttttacgctgcataac

SEQ ID NO: 186552 - DNA, 51 bp, Artificial
  Synthetic oligonucleotide
gtcctcacgcggagggctgcttgtagcaccgtcgggtcgtcatacaagggg

SEQ ID NO: 186553 - DNA, 51 bp, Artificial
  Synthetic oligonucleotide
gattcatttaaaccagccatacggatatgcagggaacgtcaaccaactctc

SEQ ID NO: 186554 - DNA, 51 bp, Artificial
  Synthetic oligonucleotide
agcctccctgatattccggcatcattttttgcgccagcgcgtacacatacg

SEQ ID NO: 186555 - DNA, 51 bp, Artificial
  Synthetic oligonucleotide
aaatcagtcaagcgtcggggccacctaacgtattctgacgacgggagtttt

SEQ ID NO: 186556 - DNA, 51 bp, Artificial
  Synthetic oligonucleotide
gattcagtttgcgcttaaatccctttcagagcgcgatgcgtcttttgacca

SEQ ID NO: 186557 - DNA, 51 bp, Artificial
  Synthetic oligonucleotide
aaatcaccggcgcacgcgtagacaacggtgcttacctgtcagcggaactga

SEQ ID NO: 186558 - DNA, 51 bp, Artificial
  Synthetic oligonucleotide
atttgagtgacggcatagcccgcagtttgttcgttatagccatcagagcca

SEQ ID NO: 186559 - DNA, 51 bp, Artificial
  Synthetic oligonucleotide
atttctggcgcgacgcatcttcgagttaaaacaggcgtggcatcagtttag

SEQ ID NO: 186560 - DNA, 60 bp, Artificial
  Synthetic oligonucleotide
cagggttgatgcattgacctggcgataatgctgtaatatgtcagcctcaaccccctgccg

SEQ ID NO: 186561 - DNA, 51 bp, Artificial
  Synthetic oligonucleotide
ggttggaacgcctggttactccccgcttaccgtatctcgaccgttcgcgcc

SEQ ID NO: 186562 - DNA, 51 bp, Artificial
  Synthetic oligonucleotide
cgctttccatgttgtctttgggggcagcttatctggcgcaactcccgggcg

SEQ ID NO: 186563 - DNA, 51 bp, Artificial
  Synthetic oligonucleotide
gatgtcaccaccacgtttagtcgattaggtaacccgcgattattcaacgac

SEQ ID NO: 186564 - DNA, 51 bp, Artificial
  Synthetic oligonucleotide
agccgttgccctggtttgccagtctgaccgccagttttgccttttatccgg

SEQ ID NO: 186565 - DNA, 51 bp, Artificial
  Synthetic oligonucleotide
ttggctttgagttctcgcgaaccactgaaatgactttagtgccaacgttgt

SEQ ID NO: 186566 - DNA, 51 bp, Artificial
  Synthetic oligonucleotide
gtatctccactacggaagcaggtgaaaggctcattaacgaagttggcccgt

SEQ ID NO: 186567 - DNA, 51 bp, Artificial
  Synthetic oligonucleotide
agcagcgggtaataatgtaccggtgaaatatcgtctgatggaccttatgca

SEQ ID NO: 186568 - DNA, 51 bp, Artificial
  Synthetic oligonucleotide
cagtggctcctgatgacggacgcattcgggttccggagtccgctatcccgt

SEQ ID NO: 186569 - DNA, 51 bp, Artificial
  Synthetic oligonucleotide
cggccaacaccgacagttagcgcctgctctggacgcagtaactaaacccgt

SEQ ID NO: 186570 - DNA, 51 bp, Artificial
  Synthetic oligonucleotide
cccagtaaccttatcggcgacaacgagcggtcaccttgtgcgttcgcccat

SEQ ID NO: 186571 - DNA, 60 bp, Artificial
  Synthetic oligonucleotide
cagggttggcgtcgatggcaacaggtatccctgcctgagcgccggaaataacaatcagtg

SEQ ID NO: 186572 - DNA, 51 bp, Artificial
  Synthetic oligonucleotide
gagttctgacattcacctcattagtcagcaagatttcgttcgttctcaatt

SEQ ID NO: 186573 - DNA, 51 bp, Artificial
  Synthetic oligonucleotide
gaggcggcgctccacagtattgcgggtcatatcaatgtagcggtagcggct

SEQ ID NO: 186574 - DNA, 51 bp, Artificial
  Synthetic oligonucleotide
gtataatcacttggttagctttgaattgagctacattccagccccctcagc

SEQ ID NO: 186575 - DNA, 51 bp, Artificial
  Synthetic oligonucleotide
cagttcgtgaggtatttcgagcgctgcgccaatctggcgactaattgacat

SEQ ID NO: 186576 - DNA, 51 bp, Artificial
  Synthetic oligonucleotide
ttttcatgtcgctttgttatctttgaggctacggggtctgatatgattagt

SEQ ID NO: 186577 - DNA, 51 bp, Artificial
  Synthetic oligonucleotide
aaaaccgttacgctcggtcagggctttcacttcatgcaacgtggtggttgg

SEQ ID NO: 186578 - DNA, 51 bp, Artificial
  Synthetic oligonucleotide
gtagtacgactacgtaaatcacttataacacgcgtactaatctcgttcagt

SEQ ID NO: 186579 - DNA, 51 bp, Artificial
  Synthetic oligonucleotide
aaaaccggctcaccgaatcccgtattctggcccgggcgaatcccctactgg

SEQ ID NO: 186580 - DNA, 51 bp, Artificial
  Synthetic oligonucleotide
aaaacaggttgcgtaacgccacatataagtaactggttaccacaataatcg

SEQ ID NO: 186581 - DNA, 51 bp, Artificial
  Synthetic oligonucleotide
ttttggcccgcctgtcggcagggaagcgttataacttttttcgctggtcag

SEQ ID NO: 186582 - DNA, 60 bp, Artificial
  Synthetic oligonucleotide
caggtaaagattcaggagcgccaattccagatcgcattgctgataagttgcgtgataaag

SEQ ID NO: 186583 - DNA, 51 bp, Artificial
  Synthetic oligonucleotide
ttttggctgacccgcctgagagagcgaggctgccacggtatctaacttggc

SEQ ID NO: 186584 - DNA, 51 bp, Artificial
  Synthetic oligonucleotide
cggcgacgataagaaccgatcaggggccggaatttagctgccgcgcattgg

SEQ ID NO: 186585 - DNA, 51 bp, Artificial
  Synthetic oligonucleotide
ttttgtctctgcccgtcgcccgcatttaccataatgtccgcattatgcctg

SEQ ID NO: 186586 - DNA, 51 bp, Artificial
  Synthetic oligonucleotide
agccagaataattgaaaatacgggaagggatgttacgccgcattatcaact

SEQ ID NO: 186587 - DNA, 50 bp, Artificial
  Synthetic oligonucleotide
aaaacaatgagttaataacgacccgactctagacccgactccccgtttgg

SEQ ID NO: 186588 - DNA, 51 bp, Artificial
  Synthetic oligonucleotide
tttttacgacaggaatagcttggaagggtgtgattttaatagagccaaact

SEQ ID NO: 186589 - DNA, 51 bp, Artificial
  Synthetic oligonucleotide
tttttcacgggcatactttccctcacgcgcaatataagcggcatgaggaga

SEQ ID NO: 186590 - DNA, 51 bp, Artificial
  Synthetic oligonucleotide
cccaatgcttcctttagggttcattaagactaaattattgcatccggttag

SEQ ID NO: 186591 - DNA, 51 bp, Artificial
  Synthetic oligonucleotide
attacagtaacgcgcaatcaactgatcggcataacgctgtaaatctacccc

SEQ ID NO: 186592 - DNA, 51 bp, Artificial
  Synthetic oligonucleotide
aaaatgtaggcttgtctccctcaatccggacacctccggcggcatacgaca

SEQ ID NO: 186593 - DNA, 55 bp, Artificial
  Synthetic oligonucleotide
caggtaataaaaaacgcttgagccaaggattagctccacgggctaggaataaaga

SEQ ID NO: 186594 - DNA, 51 bp, Artificial
  Synthetic oligonucleotide
attacatcctttccatctaaggagcccttgggcacaacgcatgcaaatatg

SEQ ID NO: 186595 - DNA, 51 bp, Artificial
  Synthetic oligonucleotide
gagcattactgcgaactgattgctgcactgaaattacgataccgagctcga

SEQ ID NO: 186596 - DNA, 51 bp, Artificial
  Synthetic oligonucleotide
cccaacagcggcgttggtccattcatcatgcagcctgaagggatgggacgc

SEQ ID NO: 186597 - DNA, 51 bp, Artificial
  Synthetic oligonucleotide
ccccattaataaaatagccagaacgctaatgatttgccctactccttttgg

SEQ ID NO: 186598 - DNA, 51 bp, Artificial
  Synthetic oligonucleotide
tttccggctgtaatcagtccgttttcgtacctgcgatcagtgacaaacggt

SEQ ID NO: 186599 - DNA, 51 bp, Artificial
  Synthetic oligonucleotide
ccccatgatggatggtttatggctctgtccacgataccggcgacggacccg

SEQ ID NO: 186600 - DNA, 51 bp, Artificial
  Synthetic oligonucleotide
cggcttcccacctcgctgctgggtatcgaatgcctggagacggaacgcatc

SEQ ID NO: 186601 - DNA, 51 bp, Artificial
  Synthetic oligonucleotide
tttcgaatgcctcaagcgccatcgcttcgtggttgcctttaaccgacgtaa

SEQ ID NO: 186602 - DNA, 51 bp, Artificial
  Synthetic oligonucleotide
tttcgaccatccgaactgcattgcctttatccgcagtggcaccgacgaata

SEQ ID NO: 186603 - DNA, 51 bp, Artificial
  Synthetic oligonucleotide
agcacggctatggtaagcgcaccgtcccggcggagtatcctaccaagtcac

SEQ ID NO: 186604 - DNA, 55 bp, Artificial
  Synthetic oligonucleotide
cggtgcttagcaccgttcgccttaacattaggctgtgtcccttaattacctaggc

SEQ ID NO: 186605 - DNA, 51 bp, Artificial
  Synthetic oligonucleotide
aaaagtttgtgtctctatggtggtgatacagccatagaggcaatttgcaaa

SEQ ID NO: 186606 - DNA, 51 bp, Artificial
  Synthetic oligonucleotide
aaaagttgccgaagaaatatccgttgcccgtagccagatgttatctctgga

SEQ ID NO: 186607 - DNA, 51 bp, Artificial
  Synthetic oligonucleotide
agcacttcacgaggcaccggtttagggataatcccgcgaaatagtgaactg

SEQ ID NO: 186608 - DNA, 51 bp, Artificial
  Synthetic oligonucleotide
aaaagtgtgctaaccgacagtgaatggcgctcaattaataacggacagtga

SEQ ID NO: 186609 - DNA, 51 bp, Artificial
  Synthetic oligonucleotide
gatatagtgtatctgacatgattaacagaggtgggacatttttagggtcag

SEQ ID NO: 186610 - DNA, 51 bp, Artificial
  Synthetic oligonucleotide
tttgaatctagccggacaaatgcggacgggtcaaccggtttacgagtactg

SEQ ID NO: 186611 - DNA, 51 bp, Artificial
  Synthetic oligonucleotide
cggcactaggactgccttcccgcccagctcatttgcctccgtcatcgccct

SEQ ID NO: 186612 - DNA, 51 bp, Artificial
  Synthetic oligonucleotide
aaaagggccacgctgcacgttaaaggaaaacgcctgcggccgtccggtagc

SEQ ID NO: 186613 - DNA, 51 bp, Artificial
  Synthetic oligonucleotide
gtaccaggtacaggtagcatggcatagtagccaccgcctcagagatgaccg

SEQ ID NO: 186614 - DNA, 51 bp, Artificial
  Synthetic oligonucleotide
aaaaggctggacgagtgggagagcgccttcggggaatggcggaaaatgtca

SEQ ID NO: 186615 - DNA, 60 bp, Artificial
  Synthetic oligonucleotide
cggtgctgataacagatgttatggtaaatcagagtcacctgcactgttactctgaaccgg

SEQ ID NO: 186616 - DNA, 51 bp, Artificial
  Synthetic oligonucleotide
cggcagaccgctgcgacgtcattcagtggggcatcgcgacccatttgcgac

SEQ ID NO: 186617 - DNA, 51 bp, Artificial
  Synthetic oligonucleotide
tttgattcgctgtaacaatacggctgccggagagtgctattgaggtgaggc

SEQ ID NO: 186618 - DNA, 51 bp, Artificial
  Synthetic oligonucleotide
ccccaacagccattgcggcatctccagcgttaaaaacgaccactggcactc

SEQ ID NO: 186619 - DNA, 51 bp, Artificial
  Synthetic oligonucleotide
cagtgcctggacacgaccatgatattggaacccggaacggtcaaaggacac

SEQ ID NO: 186620 - DNA, 51 bp, Artificial
  Synthetic oligonucleotide
gatacaggttcgcgccatgtatccgcccacgtctctgacccggtatgaact

SEQ ID NO: 186621 - DNA, 51 bp, Artificial
  Synthetic oligonucleotide
cccatgtcaacaattgccattcaattagcatacgtgtttccaaccggattg

SEQ ID NO: 186622 - DNA, 51 bp, Artificial
  Synthetic oligonucleotide
ttaactaaagcacgacaagtacctgcttgcatccaaccatatgaacttgat

SEQ ID NO: 186623 - DNA, 51 bp, Artificial
  Synthetic oligonucleotide
caaccaagctggcaaagtacttcatctcagtcaagacagggagcggactca

SEQ ID NO: 186624 - DNA, 51 bp, Artificial
  Synthetic oligonucleotide
gtgctgcgaaagggccggtgtcgtggtaatgctaatgtcgtgagataaccc

SEQ ID NO: 186625 - DNA, 51 bp, Artificial
  Synthetic oligonucleotide
agcgtgatggtatggcctccgatattaaaattggcgatctgcctattctta

SEQ ID NO: 186626 - DNA, 59 bp, Artificial
  Synthetic oligonucleotide
cggtgagcttttttacgaatccggtgtacgtgagagtatgaatgctctgaccgaagtca

SEQ ID NO: 186627 - DNA, 51 bp, Artificial
  Synthetic oligonucleotide
cgtaaccagatacactcctgatgacccggattatgataacaactttctgta

SEQ ID NO: 186628 - DNA, 51 bp, Artificial
  Synthetic oligonucleotide
catcctatcccaggtggagctaatgcaaaaccattcatcacttatcataat

SEQ ID NO: 186629 - DNA, 51 bp, Artificial
  Synthetic oligonucleotide
cgtaaagggcgctattcttgggcggtagatagtcctgaaaatgtgttcgat

SEQ ID NO: 186630 - DNA, 51 bp, Artificial
  Synthetic oligonucleotide
ttacaccgcatttgtcgtaaaaccatacacactgcgggcctataagccagg

SEQ ID NO: 186631 - DNA, 51 bp, Artificial
  Synthetic oligonucleotide
catccggtggcgctcagatttccccggtctggtctgatatcggcatgacgc

SEQ ID NO: 186632 - DNA, 51 bp, Artificial
  Synthetic oligonucleotide
agaacatggtatcggtagatatatgggtttgataaccttagaagtaggagg

SEQ ID NO: 186633 - DNA, 51 bp, Artificial
  Synthetic oligonucleotide
gcagtgctgaatacgaccggccaaggaaacggtggttgtggacacacctgc

SEQ ID NO: 186634 - DNA, 51 bp, Artificial
  Synthetic oligonucleotide
gtgcctaaagacgtctttatgggcgttgatgaactgcaggtagggatgcgt

SEQ ID NO: 186635 - DNA, 51 bp, Artificial
  Synthetic oligonucleotide
agcgtcgctctgggacaacattggtcaggcaatagcgcgcccattacggtt

SEQ ID NO: 186636 - DNA, 51 bp, Artificial
  Synthetic oligonucleotide
ttacggggtgggaaaggtactgaaaggaaactggctgaatgaaaatagtct

SEQ ID NO: 186637 - DNA, 59 bp, Artificial
  Synthetic oligonucleotide
cggtgacgtgcctcggtctattcactgccacgtgaggtttcgcactaattcgcactaac

SEQ ID NO: 186638 - DNA, 51 bp, Artificial
  Synthetic oligonucleotide
cgcgtagattcaccctcgacaggcaaaacaaatatcgcctgattgaactca

SEQ ID NO: 186639 - DNA, 51 bp, Artificial
  Synthetic oligonucleotide
gaccacctcgtccaaatgtagcgtctatataaataccatcgctaacaatat

SEQ ID NO: 186640 - DNA, 51 bp, Artificial
  Synthetic oligonucleotide
aacctggttagaggatgaatgcacttttaccacttcacctggggtataaaa

SEQ ID NO: 186641 - DNA, 51 bp, Artificial
  Synthetic oligonucleotide
gtgcatgacaaaaggaataacaaactggctgtaataaggcgctgaataagt

SEQ ID NO: 186642 - DNA, 51 bp, Artificial
  Synthetic oligonucleotide
gcaggcccctgttccgaagagcgactgaccgggtggatgctggacgaaata

SEQ ID NO: 186643 - DNA, 51 bp, Artificial
  Synthetic oligonucleotide
agaagcattctaagggaggtagccatgattaagagcataattcagcaggga

SEQ ID NO: 186644 - DNA, 51 bp, Artificial
  Synthetic oligonucleotide
ttatagtgtaggtgccagttatggcgttataaagttaatcagcgaccctcc

SEQ ID NO: 186645 - DNA, 51 bp, Artificial
  Synthetic oligonucleotide
ccgaatagaatgcctgtaataagatttaacgatggaagtcaacaggtgtac

SEQ ID NO: 186646 - DNA, 51 bp, Artificial
  Synthetic oligonucleotide
gaccctaattaccagggaaaaggatatgctgtttctgctacaaaattagca

SEQ ID NO: 186647 - DNA, 51 bp, Artificial
  Synthetic oligonucleotide
caacgtcaagtggagatctgctttcgcatttgagcagagtgagtgcacgac

SEQ ID NO: 186648 - DNA, 58 bp, Artificial
  Synthetic oligonucleotide
cggtctacctagtgccgggccgaatttctccagtacacccatagcctcatagacagac

SEQ ID NO: 186649 - DNA, 51 bp, Artificial
  Synthetic oligonucleotide
caggcgtgggaaccagccatagcagcggtgttgcgggatcaacaaaggccc

SEQ ID NO: 186650 - DNA, 51 bp, Artificial
  Synthetic oligonucleotide
gtggtggcgataccttcagtaaaaccgtatagccaaccggatgacatgatg

SEQ ID NO: 186651 - DNA, 51 bp, Artificial
  Synthetic oligonucleotide
ccgcattcagctcttccctggctcccggatttagcacagggtccgggtaaa

SEQ ID NO: 186652 - DNA, 51 bp, Artificial
  Synthetic oligonucleotide
gccacggactttattaatccgaatgattacgacaaaccgatccaggacgtt

SEQ ID NO: 186653 - DNA, 51 bp, Artificial
  Synthetic oligonucleotide
atcggagcatactatgggagcatcgcatgggagcgtggttacgctcctata

SEQ ID NO: 186654 - DNA, 51 bp, Artificial
  Synthetic oligonucleotide
aacgtcgctgcaccgcaacacgtcattgctcaaccttcagcgcaacctgct

SEQ ID NO: 186655 - DNA, 51 bp, Artificial
  Synthetic oligonucleotide
atcggcgacaacgagcggtcaccttgtgcgttcgcccatggttggcatatt

SEQ ID NO: 186656 - DNA, 51 bp, Artificial
  Synthetic oligonucleotide
gccacagtcacctgtcccatttgcgggtctaaatcgactcagccagtctca

SEQ ID NO: 186657 - DNA, 51 bp, Artificial
  Synthetic oligonucleotide
aacggtaggtaccagcgttagaaacccggcagtcgtcgtgacagggccgac

SEQ ID NO: 186658 - DNA, 51 bp, Artificial
  Synthetic oligonucleotide
cgtaggttatattgttagtggggtaagctacaggttatagggttgagcatg

SEQ ID NO: 186659 - DNA, 60 bp, Artificial
  Synthetic oligonucleotide
gcacgagaaagagctggagcttgaacgctcgcagcgtcagcagacgtatgatggtccgtc

SEQ ID NO: 186660 - DNA, 60 bp, Artificial
  Synthetic oligonucleotide
cggtctacagtcatctgacatcgtaactcgccctcgggtgggggtgtcgctgtctgttgc

SEQ ID NO: 186661 - DNA, 51 bp, Artificial
  Synthetic oligonucleotide
ccgattcccgggcacacttagcctgtgtcaggccggcatatacctcagtag

SEQ ID NO: 186662 - DNA, 51 bp, Artificial
  Synthetic oligonucleotide
ccgattaaggcagtctaattgccgtgttggcgagcctgaaaagtaatcgcg

SEQ ID NO: 186663 - DNA, 51 bp, Artificial
  Synthetic oligonucleotide
gggtatcaacctcgaaggccagaaagaactgctgggtatgtggctggccga

SEQ ID NO: 186664 - DNA, 51 bp, Artificial
  Synthetic oligonucleotide
gaatgctaaacatacgcgcgaggtgcaggtacgcatactggcgccctgatg

SEQ ID NO: 186665 - DNA, 51 bp, Artificial
  Synthetic oligonucleotide
cgtactcttattcgttttatgcagagggcgatgccgtgtccagtcatgtga

SEQ ID NO: 186666 - DNA, 51 bp, Artificial
  Synthetic oligonucleotide
gcatttgcgtcgttaactgcattacattcataaagacattgtcgccctgca

SEQ ID NO: 186667 - DNA, 51 bp, Artificial
  Synthetic oligonucleotide
agctataaacccaaaacaggtgtgttcctgtatggctgcattaactctgat

SEQ ID NO: 186668 - DNA, 51 bp, Artificial
  Synthetic oligonucleotide
caggcttgtgcttgccgctgctggatttgcggatagatatccaccagtttt

SEQ ID NO: 186669 - DNA, 51 bp, Artificial
  Synthetic oligonucleotide
cagggaagccgtctttagtccgcaggcaggaacggttgagatcgtcgagta

SEQ ID NO: 186670 - DNA, 51 bp, Artificial
  Synthetic oligonucleotide
aacgctgtttggcgagtcatctggcgcacgtagcctgttatcgctgtgctg

SEQ ID NO: 186671 - DNA, 57 bp, Artificial
  Synthetic oligonucleotide
cggatgtttcttcaacaccccttgtgcaccatatgagcggaaacgacgattaaacag

SEQ ID NO: 186672 - DNA, 51 bp, Artificial
  Synthetic oligonucleotide
gacaagccgcagccgtcaggctgcctactcgaaaccagaagaccagctttt

SEQ ID NO: 186673 - DNA, 51 bp, Artificial
  Synthetic oligonucleotide
ccgatatttcggggcgagggcgtttcttgcatcgcaatatgaaccagttga

SEQ ID NO: 186674 - DNA, 51 bp, Artificial
  Synthetic oligonucleotide
agctacccccgtgcggctaacgtctactccagtgtccagggtgtggtggtc

SEQ ID NO: 186675 - DNA, 51 bp, Artificial
  Synthetic oligonucleotide
ccgataattttatcgctaccagtaatagggagttaaatgatggctgagagt

SEQ ID NO: 186676 - DNA, 51 bp, Artificial
  Synthetic oligonucleotide
ttaacaccttacggcaaaaattagcgactcgggtaaaaatagcgcacctcg

SEQ ID NO: 186677 - DNA, 51 bp, Artificial
  Synthetic oligonucleotide
gtctggctggacgccattcactataaagtccgggaggatggtcgttaccag

SEQ ID NO: 186678 - DNA, 51 bp, Artificial
  Synthetic oligonucleotide
caaaacttcgatcattttttcgttgtgaccagtattaaacatagtttttag

SEQ ID NO: 186679 - DNA, 51 bp, Artificial
  Synthetic oligonucleotide
gtctgctgtgccggcacacttttgatataggtcgccagtgcgctcatatct

SEQ ID NO: 186680 - DNA, 51 bp, Artificial
  Synthetic oligonucleotide
ggtgaagccatcccccgtgcgtcctcacgcggagggcttgtcgtagcaccg

SEQ ID NO: 186681 - DNA, 51 bp, Artificial
  Synthetic oligonucleotide
ggtgatacccgaggccggatgttcaatataacggctggcaatctgcggaat

SEQ ID NO: 186682 - DNA, 60 bp, Artificial
  Synthetic oligonucleotide
cggatagcggaagtacgctgacagattctcccatttgcgtcgccacgactggagcaccac

SEQ ID NO: 186683 - DNA, 51 bp, Artificial
  Synthetic oligonucleotide
caaaacttccttcctgaacccggtgacggatatcggctggtcctgtatttt

SEQ ID NO: 186684 - DNA, 51 bp, Artificial
  Synthetic oligonucleotide
ggtgatgcagcgacaatgaatgttcagtcggatatccatgaccgcacagag

SEQ ID NO: 186685 - DNA, 51 bp, Artificial
  Synthetic oligonucleotide
ttcggttgcacgtaaccaaggaatcgccagggctagaggccgttggattgc

SEQ ID NO: 186686 - DNA, 51 bp, Artificial
  Synthetic oligonucleotide
aacacgttgatctcaagccttggcggggaggcggatagaacggcgcatgag

SEQ ID NO: 186687 - DNA, 51 bp, Artificial
  Synthetic oligonucleotide
gcaagcggataaagctgagggcaatgctcactccgacactgagccgggacc

SEQ ID NO: 186688 - DNA, 51 bp, Artificial
  Synthetic oligonucleotide
ttcgtgtcttcgtgtggtgcgatgcgggcgagatacaaagcgccatcgggc

SEQ ID NO: 186689 - DNA, 51 bp, Artificial
  Synthetic oligonucleotide
ttctaagtggggaaatccatattcaatgtatgaaaatggcgatgataggga

SEQ ID NO: 186690 - DNA, 51 bp, Artificial
  Synthetic oligonucleotide
cccgtgacgaatcagcagtaagccgtcttccataaaccgcagcgccggtgc

SEQ ID NO: 186691 - DNA, 51 bp, Artificial
  Synthetic oligonucleotide
caaaacctatgcgcattaccgcccgttccgagagccgtgaggcccttagcg

SEQ ID NO: 186692 - DNA, 51 bp, Artificial
  Synthetic oligonucleotide
cccgtactgcctgagtctgctgataccctctaatgctgcgggactgcccgg

SEQ ID NO: 186693 - DNA, 56 bp, Artificial
  Synthetic oligonucleotide
cggagttaccaatccatgttttccgaattccacggatttccacacgaccatactga

SEQ ID NO: 186694 - DNA, 51 bp, Artificial
  Synthetic oligonucleotide
ggtgcaggttacacggcaggcgttaccgcgcggcataactgggactatata

SEQ ID NO: 186695 - DNA, 51 bp, Artificial
  Synthetic oligonucleotide
gacgtgacggactggaatcacgcggaaaagattgtaatttaagcaccgcat

SEQ ID NO: 186696 - DNA, 51 bp, Artificial
  Synthetic oligonucleotide
agacttatcaactgacgcctaactcgtccaagtcggttcagcccgtggccc

SEQ ID NO: 186697 - DNA, 51 bp, Artificial
  Synthetic oligonucleotide
aacacctctcctttctcggctgtagaaccgagtctaacagtttcgtatcag

SEQ ID NO: 186698 - DNA, 51 bp, Artificial
  Synthetic oligonucleotide
aacacatgaaatggctgttagcctatgcatggcgcggttttcaacgtaccg

SEQ ID NO: 186699 - DNA, 51 bp, Artificial
  Synthetic oligonucleotide
aacacacccggtaaaattaatacacagtgccggattgacacacagcgaaat

SEQ ID NO: 186700 - DNA, 51 bp, Artificial
  Synthetic oligonucleotide
ttctgcggttgtgtcgtcagtcggacgtccgtcggtaaggagatacacgac

SEQ ID NO: 186701 - DNA, 51 bp, Artificial
  Synthetic oligonucleotide
ggtgcgatccgaaattctccgtatggtgcgacctgcacattgatagtctgc

SEQ ID NO: 186702 - DNA, 51 bp, Artificial
  Synthetic oligonucleotide
ttctggatacctcgcattctgcgatgagcaacatccagcagcggtttgtta

SEQ ID NO: 186703 - DNA, 51 bp, Artificial
  Synthetic oligonucleotide
aacaactcaattccccgcgtctataccccgtcctgatccaaccgggcactg

SEQ ID NO: 186704 - DNA, 56 bp, Artificial
  Synthetic oligonucleotide
cggagataagtatgtcacaatctaaaaaactaatacaagcagttcgaatttattta

SEQ ID NO: 186705 - DNA, 51 bp, Artificial
  Synthetic oligonucleotide
cgggttacctgctgacgaaagcacgtactgagccggacgctgcccccagta

SEQ ID NO: 186706 - DNA, 51 bp, Artificial
  Synthetic oligonucleotide
ggtggtgcaacaccaggcatggtaacgcgtagtccggcgttctgaccgacc

SEQ ID NO: 186707 - DNA, 51 bp, Artificial
  Synthetic oligonucleotide
ttatgtcggagctcaccaatgccgctgatgaacaaatgcgtggtattcacg

SEQ ID NO: 186708 - DNA, 51 bp, Artificial
  Synthetic oligonucleotide
ttatgtgaaccgttctaacgaaagacagtgacaaccgccccgtccagtgcg

SEQ ID NO: 186709 - DNA, 51 bp, Artificial
  Synthetic oligonucleotide
ttattgttaactggcgttaggctatcccctgcccccactggtttcatagcc

SEQ ID NO: 186710 - DNA, 51 bp, Artificial
  Synthetic oligonucleotide
ttatttaaccgtggtaacagggtgtacaagaccgctgccaccaaatctgtc

SEQ ID NO: 186711 - DNA, 51 bp, Artificial
  Synthetic oligonucleotide
agcggcacgattgcgatcggctgaggcggctagctctttattccgggtggc

SEQ ID NO: 186712 - DNA, 51 bp, Artificial
  Synthetic oligonucleotide
ccatcacaaaaccgccattatggacagattcgaaaagcacgtttttgcggg

SEQ ID NO: 186713 - DNA, 51 bp, Artificial
  Synthetic oligonucleotide
gcactggcgaaactgggtgatcacaccggggataatgcgtggcttaaccga

SEQ ID NO: 186714 - DNA, 51 bp, Artificial
  Synthetic oligonucleotide
caggtcaaagcaggcgatatcatgaccacgagactggaggacggctggctt

SEQ ID NO: 186715 - DNA, 60 bp, Artificial
  Synthetic oligonucleotide
cggactgaaatcaccgtcagagcagcagagattacttgtgttactggcagagaaaaaaaa

SEQ ID NO: 186716 - DNA, 51 bp, Artificial
  Synthetic oligonucleotide
gcacgtgcctgcatgagtatgcaacgtattcctgcgaaaccaggacgagcg

SEQ ID NO: 186717 - DNA, 51 bp, Artificial
  Synthetic oligonucleotide
agacactttcactttggcctctgccgcaatgtagactctcagcgttctgcg

SEQ ID NO: 186718 - DNA, 51 bp, Artificial
  Synthetic oligonucleotide
caaaccagtgatggtcacagccatcaatttgtatcagctcgccagtacatg

SEQ ID NO: 186719 - DNA, 51 bp, Artificial
  Synthetic oligonucleotide
ggtctaatggcttaacgttgtctagtgcggggcgtgagatgttttcgccca

SEQ ID NO: 186720 - DNA, 51 bp, Artificial
  Synthetic oligonucleotide
ccctggcgacgacggctaaatagctggtcgagcaaggaggtcacgtgagat

SEQ ID NO: 186721 - DNA, 51 bp, Artificial
  Synthetic oligonucleotide
gacgcacattgtcaaagccccgcgcaaaggtacggaactgattcaggcgac

SEQ ID NO: 186722 - DNA, 51 bp, Artificial
  Synthetic oligonucleotide
atgagactggcaacaatactaccgcctacaaccatggttatagcatcgctt

SEQ ID NO: 186723 - DNA, 51 bp, Artificial
  Synthetic oligonucleotide
cgctactcactcgaattacttctccaggttcaaataaagtttttggtctag

SEQ ID NO: 186724 - DNA, 51 bp, Artificial
  Synthetic oligonucleotide
ccctgaatcatgccaggcgtgaacccagtcatagataactctgagactaca

SEQ ID NO: 186725 - DNA, 51 bp, Artificial
  Synthetic oligonucleotide
aaccatcaagataccgattactgacgctaaccctgtcattgaattagcttg

SEQ ID NO: 186726 - DNA, 56 bp, Artificial
  Synthetic oligonucleotide
cggaatccggaggtattgcgtgcagagacggtatcggaaaggcggtcaaggaacgc

SEQ ID NO: 186727 - DNA, 51 bp, Artificial
  Synthetic oligonucleotide
gtctgttgttcacgccggttaggggatctttaagcgccacctcatttagag

SEQ ID NO: 186728 - DNA, 51 bp, Artificial
  Synthetic oligonucleotide
ttccatcccgaaagaaacgctcatcgcagcccggtttagtgcacgttctag

SEQ ID NO: 186729 - DNA, 51 bp, Artificial
  Synthetic oligonucleotide
agcgcgtcttgacatgataaccgaccccaatacatggcggcaataatgatc

SEQ ID NO: 186730 - DNA, 51 bp, Artificial
  Synthetic oligonucleotide
caaacatcagccagtgtgggacataacatcgagacagacaccgctgaactg

SEQ ID NO: 186731 - DNA, 51 bp, Artificial
  Synthetic oligonucleotide
ttccatttgctggctcagcgactggatttttccctgttcgctacggtattc

SEQ ID NO: 186732 - DNA, 51 bp, Artificial
  Synthetic oligonucleotide
aaccagccatagcagcggtgttgcgggatcaacaaaggccccgggctgaca

SEQ ID NO: 186733 - DNA, 51 bp, Artificial
  Synthetic oligonucleotide
caaaattcagactcctgactgtatttgtagtcagttggccaaaccgtggca

SEQ ID NO: 186734 - DNA, 51 bp, Artificial
  Synthetic oligonucleotide
cgctaggcgggaaaacttacaccgctaccgtgcaggggaatttaagctgga

SEQ ID NO: 186735 - DNA, 51 bp, Artificial
  Synthetic oligonucleotide
agaccggactgagagccacacctgatttctccgtatcataactgtgacgcg

SEQ ID NO: 186736 - DNA, 51 bp, Artificial
  Synthetic oligonucleotide
cgtttcggacataaatgcctgtcagcgcgaaattgaaggcttaacctggtc

SEQ ID NO: 186737 - DNA, 59 bp, Artificial
  Synthetic oligonucleotide
cggaataagtggtccatggagtcagttaccaacgggatctcggtatcacatgataatcc

SEQ ID NO: 186738 - DNA, 51 bp, Artificial
  Synthetic oligonucleotide
cctctacctaattcatttctacccgacgtttatgaagccgcagcggggtta

SEQ ID NO: 186739 - DNA, 51 bp, Artificial
  Synthetic oligonucleotide
gcgtctggcggagcaggcctatattcgcaccagcgcatggagttctttact

SEQ ID NO: 186740 - DNA, 51 bp, Artificial
  Synthetic oligonucleotide
gcgtctgtaaaggccgtgggtcggttaaactgccggacgtgtcccgtatga

SEQ ID NO: 186741 - DNA, 51 bp, Artificial
  Synthetic oligonucleotide
acgggcgggtgcgtactgaacgttatccagtaattctcgggtgtcttcgac

SEQ ID NO: 186742 - DNA, 51 bp, Artificial
  Synthetic oligonucleotide
acgggcagatcttcttgagatccttaagcgagcgtcgtaatctcttgacca

SEQ ID NO: 186743 - DNA, 51 bp, Artificial
  Synthetic oligonucleotide
tagagtccacccacgtatcgttaaagatgtactgagtattgctgtcatcgg

SEQ ID NO: 186744 - DNA, 51 bp, Artificial
  Synthetic oligonucleotide
ctcgctgggatgtcccgaaactaaaatctggctcctctgactggactcgag

SEQ ID NO: 186745 - DNA, 51 bp, Artificial
  Synthetic oligonucleotide
tagagggtatagtattagtaccaatatgtcctcatactgtatcatcccgtc

SEQ ID NO: 186746 - DNA, 51 bp, Artificial
  Synthetic oligonucleotide
cattccttgcccgcaccgctccggacgggttcagcgtgaaagcggcgttag

SEQ ID NO: 186747 - DNA, 51 bp, Artificial
  Synthetic oligonucleotide
cacgcagaaccgatcccgaaagagcgcaaatgccaacgcagcgccttattc

SEQ ID NO: 186748 - DNA, 56 bp, Artificial
  Synthetic oligonucleotide
cggaaggatgatataataattcggctcacacatttatttgagggtaaacagtcggt

SEQ ID NO: 186749 - DNA, 51 bp, Artificial
  Synthetic oligonucleotide
cgttttatatcttcacgtacaaaagaccaagtgagtatagtaacgggtcca

SEQ ID NO: 186750 - DNA, 51 bp, Artificial
  Synthetic oligonucleotide
tcaagtaattacgctaatgagatatgggctgtatttacaaatacagccgcg

SEQ ID NO: 186751 - DNA, 51 bp, Artificial
  Synthetic oligonucleotide
ctataaatggagctcataattgtagacgcgtagaagtagatcctagtcttc

SEQ ID NO: 186752 - DNA, 51 bp, Artificial
  Synthetic oligonucleotide
cacgcagcatgatagcatcaggctcaatcaattgtggtacgacagtgatgc

SEQ ID NO: 186753 - DNA, 51 bp, Artificial
  Synthetic oligonucleotide
gcgtgcgtcgaactcacttgctcgatatcaaccaggcgcggttttagaaac

SEQ ID NO: 186754 - DNA, 51 bp, Artificial
  Synthetic oligonucleotide
ggcgaagcacacccttgcagctgtagcggcccgtctaaagtgaaggcacgg

SEQ ID NO: 186755 - DNA, 51 bp, Artificial
  Synthetic oligonucleotide
acataaatagccattctaagctccttcgtcagatagttgattaccagtatc

SEQ ID NO: 186756 - DNA, 51 bp, Artificial
  Synthetic oligonucleotide
tagacatcagcgtgacaacgtcacattcggatgccgatttctgcactatcg

SEQ ID NO: 186757 - DNA, 51 bp, Artificial
  Synthetic oligonucleotide
tcacacccgccatggcgcacttttcatacaatcctcactgatgccaaatga

SEQ ID NO: 186758 - DNA, 51 bp, Artificial
  Synthetic oligonucleotide
aggttgggcacctttgctaattggtgctcctgatgctccggtcaatgggta

SEQ ID NO: 186759 - DNA, 52 bp, Artificial
  Synthetic oligonucleotide
cggaacgggtgttatggtaaaaactatgtggtttagatagtgtaatttacaa

SEQ ID NO: 186760 - DNA, 51 bp, Artificial
  Synthetic oligonucleotide
ctgctctccgatccgtgggtgtttcagcatgaagttgagaccattgcggcg

SEQ ID NO: 186761 - DNA, 51 bp, Artificial
  Synthetic oligonucleotide
tcgaaatcgcacggcatgacgccagcttttgcataccggtagccttcccgc

SEQ ID NO: 186762 - DNA, 51 bp, Artificial
  Synthetic oligonucleotide
ggcaatgtcatgctgatcaatggattgggtcgctgactgccgggaaatgcg

SEQ ID NO: 186763 - DNA, 51 bp, Artificial
  Synthetic oligonucleotide
tcctgttcatgcggtgaggccatcccctgtgcgtcctcccgcgcaaggctt

SEQ ID NO: 186764 - DNA, 51 bp, Artificial
  Synthetic oligonucleotide
acatcagtcaggcccgcaggtactgtgccgtgacccggtaacctgattgct

SEQ ID NO: 186765 - DNA, 51 bp, Artificial
  Synthetic oligonucleotide
tacaggacttccctgcaccgccgacactctaccggccacaaagagaggaac

SEQ ID NO: 186766 - DNA, 51 bp, Artificial
  Synthetic oligonucleotide
tcctgcgcctcatactgcaatgactgtgtctgactctcagccgatttcccc

SEQ ID NO: 186767 - DNA, 51 bp, Artificial
  Synthetic oligonucleotide
ggattacattcggtactacaacacccggcgaatcagccttaaatttaacgg

SEQ ID NO: 186768 - DNA, 51 bp, Artificial
  Synthetic oligonucleotide
ctccgaaaatataatccgttccgtatcagaagatgtctctcgtctttatcc

SEQ ID NO: 186769 - DNA, 51 bp, Artificial
  Synthetic oligonucleotide
accgtgcagcaaacggaaagactcactctgccggtcccgggggttgaccca

SEQ ID NO: 186770 - DNA, 60 bp, Artificial
  Synthetic oligonucleotide
gcacctcatgatgacatcattgcacacacagatttttacacatggcaagcggttttgagc

SEQ ID NO: 186771 - DNA, 60 bp, Artificial
  Synthetic oligonucleotide
cataccagagcaacgcatcctagaggtagaggtacggcgtaccagagaggagacatccgc

SEQ ID NO: 186772 - DNA, 51 bp, Artificial
  Synthetic oligonucleotide
cgagcgcctttagtaacacgcaggccacgaacagttaccggagtagtgact

SEQ ID NO: 186773 - DNA, 51 bp, Artificial
  Synthetic oligonucleotide
tcgggagtacatgttccaccggtaagtttccagccttccagtgcgaccggt

SEQ ID NO: 186774 - DNA, 51 bp, Artificial
  Synthetic oligonucleotide
acgcaacgctgcgggggaatagcgattgaagaaccgttctgcgcgggaata

SEQ ID NO: 186775 - DNA, 51 bp, Artificial
  Synthetic oligonucleotide
ctgggctaacatgagactggtcgcgcctgcggtgataggctggttactggc

SEQ ID NO: 186776 - DNA, 51 bp, Artificial
  Synthetic oligonucleotide
ggattgtagtgggatttgacctcctctgccatcatgagcgtaatcattccg

SEQ ID NO: 186777 - DNA, 51 bp, Artificial
  Synthetic oligonucleotide
gcggtttatcgggtggtttgttgccggttttacctgactgccaccccgttc

SEQ ID NO: 186778 - DNA, 51 bp, Artificial
  Synthetic oligonucleotide
tattaagcccggtcgatacggccataaccggcgctctcgcagatgtagcgc

SEQ ID NO: 186779 - DNA, 51 bp, Artificial
  Synthetic oligonucleotide
acggtaacacagcacggctatggtaagcgcaccgtcccggcggagtatcct

SEQ ID NO: 186780 - DNA, 51 bp, Artificial
  Synthetic oligonucleotide
accgtcgcgaggtggcgtatattacgctttcctctttcagagtcaaccctc

SEQ ID NO: 186781 - DNA, 51 bp, Artificial
  Synthetic oligonucleotide
acagcctctcccgtaacaccgggtccgttatccagaacctcaatacggcgt

SEQ ID NO: 186782 - DNA, 60 bp, Artificial
  Synthetic oligonucleotide
catacccgaccgctttcactcatcactggtagctctgactcacggctcatataatcaata

SEQ ID NO: 186783 - DNA, 51 bp, Artificial
  Synthetic oligonucleotide
tcggatgatgtacgctactgcaggacaatatttctggttcccggacaactg

SEQ ID NO: 186784 - DNA, 51 bp, Artificial
  Synthetic oligonucleotide
cagccagcccttgcacatacagggggaggcaatggagccgggaaggtcacc

SEQ ID NO: 186785 - DNA, 51 bp, Artificial
  Synthetic oligonucleotide
cattttcagggaaaataggacgggtacagttattaggatcaggagctattt

SEQ ID NO: 186786 - DNA, 51 bp, Artificial
  Synthetic oligonucleotide
cgcaagctgcaactttctatggacccgatgctcgatatgatggggatgcag

SEQ ID NO: 186787 - DNA, 51 bp, Artificial
  Synthetic oligonucleotide
gcgtataaccgcgcaacaaattttacgttctcgcgtccagttaaacttccc

SEQ ID NO: 186788 - DNA, 51 bp, Artificial
  Synthetic oligonucleotide
tagcataaacgttaggccatttagtggtcatgaacgcggcgcattatcggc

SEQ ID NO: 186789 - DNA, 51 bp, Artificial
  Synthetic oligonucleotide
gcgtatgttggcgaaagcatcccgttatacacgaactacacaatcgaaccc

SEQ ID NO: 186790 - DNA, 51 bp, Artificial
  Synthetic oligonucleotide
acagcgtgaagctaatccgttagggttcacagtgaccagttaccagcgtga

SEQ ID NO: 186791 - DNA, 51 bp, Artificial
  Synthetic oligonucleotide
ctggcctgtcatggatactgacccgtccacattacggcgcgtcagacgtcg

SEQ ID NO: 186792 - DNA, 51 bp, Artificial
  Synthetic oligonucleotide
acaggacgccagcgggcagtcatgtcccggaaaagggtgtcggttccctcc

SEQ ID NO: 186793 - DNA, 60 bp, Artificial
  Synthetic oligonucleotide
cggaaatggacactttgtaatcagccgcccggatgtggatttacatcgtcagcgtagtga

SEQ ID NO: 186794 - DNA, 51 bp, Artificial
  Synthetic oligonucleotide
tcgcggccctcactggtttggctcatgctgacgatactgctatccagcaga

SEQ ID NO: 186795 - DNA, 51 bp, Artificial
  Synthetic oligonucleotide
cgaggcgaaattagttgggtggatgcgaatctcagcgtagctgaaatccgt

SEQ ID NO: 186796 - DNA, 51 bp, Artificial
  Synthetic oligonucleotide
tattgggatgatcagctacaactgaacgttaacgcgccgctgtatcagggc

SEQ ID NO: 186797 - DNA, 51 bp, Artificial
  Synthetic oligonucleotide
ctcgcgagcagtttaacgatctcatttccgcgctggttaagcgcacgctat

SEQ ID NO: 186798 - DNA, 51 bp, Artificial
  Synthetic oligonucleotide
tcgcggagaaggagttaccgccgggcgaacgtgaaacaggaggccactgaa

SEQ ID NO: 186799 - DNA, 51 bp, Artificial
  Synthetic oligonucleotide
acaggccaatccccctccctgctaagccataacccagcccgccgtcacgta

SEQ ID NO: 186800 - DNA, 51 bp, Artificial
  Synthetic oligonucleotide
gctagtaatatttgtcctagtacttgattggttttatgagcccctccatgt

SEQ ID NO: 186801 - DNA, 51 bp, Artificial
  Synthetic oligonucleotide
acggaaaggagtgtcgaccagggaaagcgacgaggtaaatcaagggtcgat

SEQ ID NO: 186802 - DNA, 51 bp, Artificial
  Synthetic oligonucleotide
acggaaagactcactctgccggtcccgggggttgacccacgtaccctcgtg

SEQ ID NO: 186803 - DNA, 51 bp, Artificial
  Synthetic oligonucleotide
tccgatcaatctattaattatgcgttaattaaaatctgcaacatattcggt

SEQ ID NO: 186804 - DNA, 60 bp, Artificial
  Synthetic oligonucleotide
cggaaatcatgtcatatcttggcggatcgcatgattaccagggctaggtcgaaaccttga

SEQ ID NO: 186805 - DNA, 51 bp, Artificial
  Synthetic oligonucleotide
acgctgtctgcttcgagcgtcagagtctatgagacgacaataactcagtcc

SEQ ID NO: 186806 - DNA, 51 bp, Artificial
  Synthetic oligonucleotide
cactgcgctgcgtcgcattattttcccgcaggccttacgccggatgatccc

SEQ ID NO: 186807 - DNA, 51 bp, Artificial
  Synthetic oligonucleotide
agttaagtgctatatattttcgtgtccgggggtaccctaagagggtgcgca

SEQ ID NO: 186808 - DNA, 51 bp, Artificial
  Synthetic oligonucleotide
ccttgcacaacttaaacacgttaatccttctcctgatgttggagcttctat

SEQ ID NO: 186809 - DNA, 51 bp, Artificial
  Synthetic oligonucleotide
accagcgttagaaacccggcagtcgtcgtgacagggccgaccattgagcta

SEQ ID NO: 186810 - DNA, 51 bp, Artificial
  Synthetic oligonucleotide
ctgcaacgttatcatcataagcgctttcaatacgtatcacggcgttttcat

SEQ ID NO: 186811 - DNA, 51 bp, Artificial
  Synthetic oligonucleotide
taccggaaacggcgctgaggcagtggggctgacagaatggatgcacgtcat

SEQ ID NO: 186812 - DNA, 51 bp, Artificial
  Synthetic oligonucleotide
ctgacgtaaaagttaatgggagtgagcctgtagtaggcttcgttgcacgtt

SEQ ID NO: 186813 - DNA, 51 bp, Artificial
  Synthetic oligonucleotide
tcccattaacctgactcaggtaacgggagaggattgcgccggataaacaga

SEQ ID NO: 186814 - DNA, 51 bp, Artificial
  Synthetic oligonucleotide
tcagttcagttgcaccggtaacacctccccgtccgctaagaacgggtgagc

SEQ ID NO: 186815 - DNA, 60 bp, Artificial
  Synthetic oligonucleotide
cggaaagagccggagatgagcgacaacacacctggcgacctcagagatacaactacgcct

SEQ ID NO: 186816 - DNA, 51 bp, Artificial
  Synthetic oligonucleotide
tacgcaagcgccagacggtgtggtgttattaagcagtgacccgaaacgcac

SEQ ID NO: 186817 - DNA, 51 bp, Artificial
  Synthetic oligonucleotide
cacgtagcgtctggatgtgtttattgatcccggcgcgactcatccccagtg

SEQ ID NO: 186818 - DNA, 51 bp, Artificial
  Synthetic oligonucleotide
acgcgctttcaataaccagatggcctggctgcgtgacaggggatacgcgac

SEQ ID NO: 186819 - DNA, 51 bp, Artificial
  Synthetic oligonucleotide
cacgtcctaatcgtattaatagtgaaatacgtgcgataaaagttcgtctta

SEQ ID NO: 186820 - DNA, 51 bp, Artificial
  Synthetic oligonucleotide
tcatcatccagacgcattgtcagatacttaaccagcgacttaccatagata

SEQ ID NO: 186821 - DNA, 51 bp, Artificial
  Synthetic oligonucleotide
ctgattacgccggaagggtttacgctgcttaatggcggtcccaagtaccgg

SEQ ID NO: 186822 - DNA, 51 bp, Artificial
  Synthetic oligonucleotide
ggccaaaagagggcatgccagcccgccacttgcagcactatgccaccgctc

SEQ ID NO: 186823 - DNA, 51 bp, Artificial
  Synthetic oligonucleotide
ctacaaggggtaatgtcgttagtaacaacatggtattttcagcctagttgg

SEQ ID NO: 186824 - DNA, 51 bp, Artificial
  Synthetic oligonucleotide
taccgtctgtcaccccacataccggcgtgggcagctgagataatcgcaacg

SEQ ID NO: 186825 - DNA, 51 bp, Artificial
  Synthetic oligonucleotide
ctgagttgagtccctgtcgctaccagttgagcgagccggtcccatgcaacc

SEQ ID NO: 186826 - DNA, 60 bp, Artificial
  Synthetic oligonucleotide
cgcttgcgtgcgccaagttatcgcgtacttgctgcaccgactcaccgaacactgtcaggg

SEQ ID NO: 186827 - DNA, 51 bp, Artificial
  Synthetic oligonucleotide
ctgataactcgccaacagtggcgactgatggaaacgggcatctaatagcgg

SEQ ID NO: 186828 - DNA, 51 bp, Artificial
  Synthetic oligonucleotide
accccctggggtgtcgaacgctccatgtttatgtcaccgctgggcgtgccg

SEQ ID NO: 186829 - DNA, 51 bp, Artificial
  Synthetic oligonucleotide
agttgtagtgactaacagagacagcctagagcaaaatcgagtagggcaacg

SEQ ID NO: 186830 - DNA, 51 bp, Artificial
  Synthetic oligonucleotide
accccaacacattgatgcgctcatttatcctgcataaccgactctatgttg

SEQ ID NO: 186831 - DNA, 51 bp, Artificial
  Synthetic oligonucleotide
gctctacaatctcttgcggcatataaaggtcacggcctacgtattgctcgt

SEQ ID NO: 186832 - DNA, 51 bp, Artificial
  Synthetic oligonucleotide
tcattcgttttaatatcgtcaatagcccggccctgatcgctggctgccatt

SEQ ID NO: 186833 - DNA, 51 bp, Artificial
  Synthetic oligonucleotide
cctgcgccgcaggtagaatgcacgccgtttatccaatttgcgccacttccg

SEQ ID NO: 186834 - DNA, 51 bp, Artificial
  Synthetic oligonucleotide
tactggaattgaagaatggttggtcccattcaaacggtgcatatgtggtta

SEQ ID NO: 186835 - DNA, 51 bp, Artificial
  Synthetic oligonucleotide
gcttggatactgggaaactcgttctacgggcgcgggtaacaatgagcataa

SEQ ID NO: 186836 - DNA, 51 bp, Artificial
  Synthetic oligonucleotide
gcttgaacatacttgcttagccgcgatctttaaatcacccagcgtagatac

SEQ ID NO: 186837 - DNA, 60 bp, Artificial
  Synthetic oligonucleotide
cgcttcaccacgaatgctgccttgttgctcatttatcaggtgctagttgcgtactgcgag

SEQ ID NO: 186838 - DNA, 51 bp, Artificial
  Synthetic oligonucleotide
cgatgttacgctcgttacaacaggtaaatagtcttaattgggatgtcagaa

SEQ ID NO: 186839 - DNA, 51 bp, Artificial
  Synthetic oligonucleotide
accgaatcccgtattctggcccgggcgaatcccctactggtgaatgccgtt

SEQ ID NO: 186840 - DNA, 51 bp, Artificial
  Synthetic oligonucleotide
tactgaaaccagccgccatcctgaaacacggtagtgctgccgttctctgaa

SEQ ID NO: 186841 - DNA, 51 bp, Artificial
  Synthetic oligonucleotide
tcacggggcttctgttatcgtgcagccttcccatatgaatcaatgcgaggc

SEQ ID NO: 186842 - DNA, 51 bp, Artificial
  Synthetic oligonucleotide
tcactgctacccgaaatcgccgatataccacgacgaaccggacagcgtggg

SEQ ID NO: 186843 - DNA, 51 bp, Artificial
  Synthetic oligonucleotide
acgccgcgggtaggccgcctgctgtcactctacgttgatgatagcgtggcc

SEQ ID NO: 186844 - DNA, 51 bp, Artificial
  Synthetic oligonucleotide
taccactgacatcgatagatcccgccgatagcattgaccccacctccagtg

SEQ ID NO: 186845 - DNA, 51 bp, Artificial
  Synthetic oligonucleotide
ggcactgctctggtggcggtgaatctatcaagcgaagaaccctaccacgat

SEQ ID NO: 186846 - DNA, 51 bp, Artificial
  Synthetic oligonucleotide
agtgcgcttacgggcgaaacggtctttatcagagaaacgccagagcgggga

SEQ ID NO: 186847 - DNA, 51 bp, Artificial
  Synthetic oligonucleotide
ccacaccgtcgacatgactcaggcgaactgggaaagtttctaatcgctgag

SEQ ID NO: 186848 - DNA, 57 bp, Artificial
  Synthetic oligonucleotide
cgcttagacataccatgacctcactttttaggctcaatcaacggtgaattttttgta

SEQ ID NO: 186849 - DNA, 51 bp, Artificial
  Synthetic oligonucleotide
ggcagagggtcacgcgtgtacatcattcggtagcgtgaatagtccacctca

SEQ ID NO: 186850 - DNA, 51 bp, Artificial
  Synthetic oligonucleotide
ctacgccgttatcggaacggtcgtggcacgccttcttaagccggaccagta

SEQ ID NO: 186851 - DNA, 51 bp, Artificial
  Synthetic oligonucleotide
gcttaccaataacactggctcttaacactcgcggctggttaattatatgta

SEQ ID NO: 186852 - DNA, 51 bp, Artificial
  Synthetic oligonucleotide
tccggtgggagaaaacttgtcattttgacctgttcgccattcggggggggg

SEQ ID NO: 186853 - DNA, 51 bp, Artificial
  Synthetic oligonucleotide
ctctttctatcggcgaattatccaggcaattccctctgcgactcatacttt

SEQ ID NO: 186854 - DNA, 51 bp, Artificial
  Synthetic oligonucleotide
gctgtgcgtacaatttcggacttagggtaaatatactttacttcatgggat

SEQ ID NO: 186855 - DNA, 51 bp, Artificial
  Synthetic oligonucleotide
ataagcgatctgggtgcggtgaatgagcacgcatactgggcccgagttggc

SEQ ID NO: 186856 - DNA, 51 bp, Artificial
  Synthetic oligonucleotide
agtgtccaatgagttggggcgaaattgtccatcagttcttgttaagatcgg

SEQ ID NO: 186857 - DNA, 51 bp, Artificial
  Synthetic oligonucleotide
tccggccacgtatgacgtttcgctgctgaagacgcctgccagtgcgataaa

SEQ ID NO: 186858 - DNA, 51 bp, Artificial
  Synthetic oligonucleotide
tcagcgggaaactaagcgtcctggccccgttgggatttggcactgactacg

SEQ ID NO: 186859 - DNA, 60 bp, Artificial
  Synthetic oligonucleotide
cgctgttacggatgatgccgcgtaagcgtgactgaccgtcctgtatgacgtttgtcgcag

SEQ ID NO: 186860 - DNA, 51 bp, Artificial
  Synthetic oligonucleotide
acgtatatcctgtacaatagccagataggcctcacggggtctaacccttta

SEQ ID NO: 186861 - DNA, 51 bp, Artificial
  Synthetic oligonucleotide
catgtccagtacaccgcttatcaccaccacgtgttcgatcactccggattc

SEQ ID NO: 186862 - DNA, 51 bp, Artificial
  Synthetic oligonucleotide
agtattggtaggggcagaaatatccgtatgttctgctctgtaagtggtttt

SEQ ID NO: 186863 - DNA, 51 bp, Artificial
  Synthetic oligonucleotide
agtacctttaatccgttgaacgaattgccttcccattcaaaccaccggatc

SEQ ID NO: 186864 - DNA, 51 bp, Artificial
  Synthetic oligonucleotide
ctggtgcaagtatctgatttcccgatggtttaatagcaattccgtcaccta

SEQ ID NO: 186865 - DNA, 51 bp, Artificial
  Synthetic oligonucleotide
acagacgaccaggagcgacgaaaccggcacagccgttgtgaccctgacacg

SEQ ID NO: 186866 - DNA, 51 bp, Artificial
  Synthetic oligonucleotide
ctgtaatagcggcgttcatccgggttgtgatctttgtaaatagacaggtag

SEQ ID NO: 186867 - DNA, 51 bp, Artificial
  Synthetic oligonucleotide
cgacgatggcagaagctatcgcctaccgcgcaaccttcgcctatcgtgagc

SEQ ID NO: 186868 - DNA, 51 bp, Artificial
  Synthetic oligonucleotide
tatcgccctgcaataaccaacctttcacgttcaaatcgtattcattagcat

SEQ ID NO: 186869 - DNA, 51 bp, Artificial
  Synthetic oligonucleotide
agtacaaatatatcctcgtaaacgttcaataattgaccataatgtcgctgt

SEQ ID NO: 186870 - DNA, 57 bp, Artificial
  Synthetic oligonucleotide
cgctgtcgatcttaaagccgaaaaagtaataaccaaggccatgactgagccgactta

SEQ ID NO: 186871 - DNA, 51 bp, Artificial
  Synthetic oligonucleotide
taaggcacccggccaggtggacttactgcatgcgtttgtgaaaacgtgcca

SEQ ID NO: 186872 - DNA, 51 bp, Artificial
  Synthetic oligonucleotide
tatgatggctacggattacccggcttatttagtggctgacgttaatcctga

SEQ ID NO: 186873 - DNA, 51 bp, Artificial
  Synthetic oligonucleotide
ctccaactatatgacgcacttcaactccatcattacgacccacctcaatac

SEQ ID NO: 186874 - DNA, 51 bp, Artificial
  Synthetic oligonucleotide
ctcagcgcgattttaagcaccaacccccccccgtaacacccaaatccatac

SEQ ID NO: 186875 - DNA, 51 bp, Artificial
  Synthetic oligonucleotide
ggatcatcttttgctatctcagaaggcagcactccgtaaatcgcaatcccc

SEQ ID NO: 186876 - DNA, 51 bp, Artificial
  Synthetic oligonucleotide
acgacgtgggagggatttacctgcttgcggccgaatatgagcgctacgggg

SEQ ID NO: 186877 - DNA, 51 bp, Artificial
  Synthetic oligonucleotide
ctcactccgcacactttaactactgacgagcgttattggcgcgtagcgcga

SEQ ID NO: 186878 - DNA, 51 bp, Artificial
  Synthetic oligonucleotide
tcgttactcggcccatccatgagcctcgcctctgtgaggccgctgcaagca

SEQ ID NO: 186879 - DNA, 51 bp, Artificial
  Synthetic oligonucleotide
acacggaggtacttaacgaccggacgacggatgtgaaacatgaccatacgg

SEQ ID NO: 186880 - DNA, 51 bp, Artificial
  Synthetic oligonucleotide
ctattgtgcagagagcacgctgccgcatagtagactatggggctaatgaga

SEQ ID NO: 186881 - DNA, 60 bp, Artificial
  Synthetic oligonucleotide
gcaccgtcgtttactagaacgctgtgatggaaaacaactcgctgcttggatgcggcagac

SEQ ID NO: 186882 - DNA, 60 bp, Artificial
  Synthetic oligonucleotide
catacgttccatgaaccttactgaatactgcgactatgttgaaagtgaaggctacattga

SEQ ID NO: 186883 - DNA, 51 bp, Artificial
  Synthetic oligonucleotide
acgaatacgctgcactgcgtaagtggtaaatgccgttccttgcaaagcgtc

SEQ ID NO: 186884 - DNA, 51 bp, Artificial
  Synthetic oligonucleotide
tcgtcggataatcacagatgcgagaggcggtattcgaatattgcggttcat

SEQ ID NO: 186885 - DNA, 51 bp, Artificial
  Synthetic oligonucleotide
tatagcggttacgtggctcgtaagtaccttatcaatcgccaacaaactgaa

SEQ ID NO: 186886 - DNA, 51 bp, Artificial
  Synthetic oligonucleotide
acgtaacagagacagcacgttctgtgggacctggttagcctgcgccagaac

SEQ ID NO: 186887 - DNA, 51 bp, Artificial
  Synthetic oligonucleotide
tcgtacctgcggccggatcgttcagagcaaacggccccattaagccttctg

SEQ ID NO: 186888 - DNA, 51 bp, Artificial
  Synthetic oligonucleotide
cgttgaacggcagcacaattcttggttccgtgactaggttgcggcaggccg

SEQ ID NO: 186889 - DNA, 51 bp, Artificial
  Synthetic oligonucleotide
tagttgctgcgcagagtgaggttgtgagacttaatgatcgcctgtgtaaca

SEQ ID NO: 186890 - DNA, 51 bp, Artificial
  Synthetic oligonucleotide
ctcacaaccagcagctatcagttctttcaacaggtcagcagatttcatatg

SEQ ID NO: 186891 - DNA, 51 bp, Artificial
  Synthetic oligonucleotide
acgaggcattactgcctcttgccctataataataggtcgtattacactcca

SEQ ID NO: 186892 - DNA, 51 bp, Artificial
  Synthetic oligonucleotide
cgagacgctaacaggcttcagtattcggtattaaatacactttaccggttt

SEQ ID NO: 186893 - DNA, 59 bp, Artificial
  Synthetic oligonucleotide
catactgcggccagccctgacggatagcgcggtaagcccacttgcgtgttttatcgaaa

SEQ ID NO: 186894 - DNA, 51 bp, Artificial
  Synthetic oligonucleotide
cgttgcggggatccgacgccagtacggttcaccgatgagaatgatcccgcc

SEQ ID NO: 186895 - DNA, 50 bp, Artificial
  Synthetic oligonucleotide
gcttaacgcttacggcagaccgctgcgacgtcattcagtggggcatcgcg

SEQ ID NO: 186896 - DNA, 50 bp, Artificial
  Synthetic oligonucleotide
cggtcaagaccgcccctgaaattgcaacgcctagccagcccgcatgttca

SEQ ID NO: 186897 - DNA, 50 bp, Artificial
  Synthetic oligonucleotide
gcaattagtcctgcaaagtaattaacccatcttatgggtagtaagtattg

SEQ ID NO: 186898 - DNA, 50 bp, Artificial
  Synthetic oligonucleotide
tatcagactaacctgccgtttgatcttaacggcagagcttatgactatac

SEQ ID NO: 186899 - DNA, 50 bp, Artificial
  Synthetic oligonucleotide
atgcaacgacacccgtctcaccggataatcgcggccactatagccagccg

SEQ ID NO: 186900 - DNA, 50 bp, Artificial
  Synthetic oligonucleotide
acgcctgccgtggattaagcaggtgagcgtcagaaagcagtggcctgacg

SEQ ID NO: 186901 - DNA, 50 bp, Artificial
  Synthetic oligonucleotide
aaccactgaggcatcagcaacgcgaccatctgcactgcgagcgtggtagg

SEQ ID NO: 186902 - DNA, 50 bp, Artificial
  Synthetic oligonucleotide
agcgcggcgggataattcggacaccgccacaagttgcgaaaacttggcaa

SEQ ID NO: 186903 - DNA, 50 bp, Artificial
  Synthetic oligonucleotide
agcatcagtactgagcagggctttctcgccccagcggctatctgccggat

SEQ ID NO: 186904 - DNA, 60 bp, Artificial
  Synthetic oligonucleotide
cgctgaatcatggacagggcagaatgttcgttatgtgggagcagttgcggacgcctgata

SEQ ID NO: 186905 - DNA, 50 bp, Artificial
  Synthetic oligonucleotide
aaccagccgttatccctgccggtggcaagacccaagagctcacgcacacg

SEQ ID NO: 186906 - DNA, 50 bp, Artificial
  Synthetic oligonucleotide
cgctagccaaaccaaagattctgagcgcaattattttaggttcgtcatca

SEQ ID NO: 186907 - DNA, 50 bp, Artificial
  Synthetic oligonucleotide
ctattacccgcactcctttcgggaagtttccggtataagctccattatta

SEQ ID NO: 186908 - DNA, 50 bp, Artificial
  Synthetic oligonucleotide
atgcaaccgataaccacagggatgcggatagcgttgtcgcccgcacagcg

SEQ ID NO: 186909 - DNA, 50 bp, Artificial
  Synthetic oligonucleotide
gcacaggtgaactccccttgcgcctcagacagccacaaatagtcccccgg

SEQ ID NO: 186910 - DNA, 50 bp, Artificial
  Synthetic oligonucleotide
aaccagccaaaccgttgcacctagccgcggggcgttagtgaaagccagct

SEQ ID NO: 186911 - DNA, 50 bp, Artificial
  Synthetic oligonucleotide
aaccagccgcctgaaagcgaggacagttgggcatcaccattcaagcccaa

SEQ ID NO: 186912 - DNA, 50 bp, Artificial
  Synthetic oligonucleotide
acgccgttccttgcatggtgtgagcagcacggggcaaaacattgtgctga

SEQ ID NO: 186913 - DNA, 50 bp, Artificial
  Synthetic oligonucleotide
cggtcgccgttcaggcttctgggcaaccctgttcggtggttgtgcacagt

SEQ ID NO: 186914 - DNA, 50 bp, Artificial
  Synthetic oligonucleotide
agcatccgcccaacgggtaggctccggcagacgatattgccttatgcact

SEQ ID NO: 186915 - DNA, 60 bp, Artificial
  Synthetic oligonucleotide
cgctgaaggtcggtgcttcagttatggccgaaactctgacgcgcaaagagtggatcgact

SEQ ID NO: 186916 - DNA, 50 bp, Artificial
  Synthetic oligonucleotide
acccggtaccctgtgccccgcgctgatagacctcggaggccgcgtaacgt

SEQ ID NO: 186917 - DNA, 50 bp, Artificial
  Synthetic oligonucleotide
aacccttttgttacggtattagggccggaaagcagtggtcacttccgctt

SEQ ID NO: 186918 - DNA, 50 bp, Artificial
  Synthetic oligonucleotide
aacccttcgctcattggagtctggcagcgcgggagtgacaataggtgcct

SEQ ID NO: 186919 - DNA, 50 bp, Artificial
  Synthetic oligonucleotide
agccagcgatttagcgcacgtgcagtggatattgccgcgcgataacaccc

SEQ ID NO: 186920 - DNA, 50 bp, Artificial
  Synthetic oligonucleotide
attcgtcggggccatcgtattatcgcgggcatttcattaatgcgcgatat

SEQ ID NO: 186921 - DNA, 50 bp, Artificial
  Synthetic oligonucleotide
aacccgttgtgggcaaaacgacaaggtgtcacccttctgtgcggcgccag

SEQ ID NO: 186922 - DNA, 50 bp, Artificial
  Synthetic oligonucleotide
acccgtaatggtgtaccttggatgacggtgctagtgatgtctgtcgtctt

SEQ ID NO: 186923 - DNA, 50 bp, Artificial
  Synthetic oligonucleotide
aacccgtcttgacgcacgcagcggcgattttcaccgacgtttgaccggcc

SEQ ID NO: 186924 - DNA, 50 bp, Artificial
  Synthetic oligonucleotide
aacccgccaacaaccgctgccaaaaagtgtcgagatctggcgcttgtggg

SEQ ID NO: 186925 - DNA, 50 bp, Artificial
  Synthetic oligonucleotide
ttttctcccctggtccgggagaatgtcgcccgctggaaacgtctctggtg

SEQ ID NO: 186926 - DNA, 54 bp, Artificial
  Synthetic oligonucleotide
cgctgaaatccgtgaaactcgtaaagaacttacggtggcctggcttgaacttcc

SEQ ID NO: 186927 - DNA, 50 bp, Artificial
  Synthetic oligonucleotide
ggtctagagttggcaggatttcagcatgtaggatttgttgagttaaacaa

SEQ ID NO: 186928 - DNA, 50 bp, Artificial
  Synthetic oligonucleotide
agtgtaagtgcaccggaaggctcactttcgctacaggggacggcggggct

SEQ ID NO: 186929 - DNA, 50 bp, Artificial
  Synthetic oligonucleotide
gtcttcgtggggaaaaccacgcattaattaactggccctgaagttgtata

SEQ ID NO: 186930 - DNA, 50 bp, Artificial
  Synthetic oligonucleotide
gacgcaagccgcattccctgacggttttctctggggcgcttccacctcgg

SEQ ID NO: 186931 - DNA, 50 bp, Artificial
  Synthetic oligonucleotide
acccgtagtgtgccgggatgtaattcgtggggtcttgcccgcatcatgcc

SEQ ID NO: 186932 - DNA, 50 bp, Artificial
  Synthetic oligonucleotide
ttttctatcgctcctgacatgacatcctgcaccgttgctttgtcataacc

SEQ ID NO: 186933 - DNA, 50 bp, Artificial
  Synthetic oligonucleotide
aaccccgtacagtggcgcaggtgagacaggacccgttagccgcgggggaa

SEQ ID NO: 186934 - DNA, 50 bp, Artificial
  Synthetic oligonucleotide
aaccccggcacttgccatccgactgtctgctgcgctggggagtaatccgg

SEQ ID NO: 186935 - DNA, 50 bp, Artificial
  Synthetic oligonucleotide
aacccacccaacgacgccgtaccacccgagcagcctttgacccaactcca

SEQ ID NO: 186936 - DNA, 50 bp, Artificial
  Synthetic oligonucleotide
aacccaagctgccatacgcgcgggctatgcacctaaacgcgctagcgaaa

SEQ ID NO: 186937 - DNA, 60 bp, Artificial
  Synthetic oligonucleotide
cgctctagcgctgcattttccctctgccatatgaagcactttcgcgaagtgttactcctc

SEQ ID NO: 186938 - DNA, 50 bp, Artificial
  Synthetic oligonucleotide
attctgcgggtactcaggaagtctatggcagcgccacggctaccaccgtg

SEQ ID NO: 186939 - DNA, 50 bp, Artificial
  Synthetic oligonucleotide
gtaggggtgattcattcctttgcccgccataaggttatcggcgataaagt

SEQ ID NO: 186940 - DNA, 50 bp, Artificial
  Synthetic oligonucleotide
gctgtcttcccgtcgtttttcgtctcaattttcgccgtcaaaccgtccag

SEQ ID NO: 186941 - DNA, 50 bp, Artificial
  Synthetic oligonucleotide
agacaggcgcgataatatcgtcacgcagcacccgtgatggctgggttgcc

SEQ ID NO: 186942 - DNA, 50 bp, Artificial
  Synthetic oligonucleotide
acccgtccgatgaagccttcgcacgccgcattatccgacgagccaccctt

SEQ ID NO: 186943 - DNA, 50 bp, Artificial
  Synthetic oligonucleotide
gtaggttggtgctttaacagtaccgtcgtcaacgtttaccgatgaacccc

SEQ ID NO: 186944 - DNA, 50 bp, Artificial
  Synthetic oligonucleotide
acccgtggcaatcgcaattgccccagtgacggctagtgcaccgtgacatt

SEQ ID NO: 186945 - DNA, 50 bp, Artificial
  Synthetic oligonucleotide
acgcctgcggctttgtgctcctcgctctggtgttatgaaagcgtgaggcg

SEQ ID NO: 186946 - DNA, 50 bp, Artificial
  Synthetic oligonucleotide
agactgccccgccagcctagtgcactgcccgccaggtgtttaccgagcag

SEQ ID NO: 186947 - DNA, 50 bp, Artificial
  Synthetic oligonucleotide
ggatgacaacatagtgagccgccaagctgatgataaatacgcgcatagct

SEQ ID NO: 186948 - DNA, 59 bp, Artificial
  Synthetic oligonucleotide
catagcgtattacaagcaagtactcggggtaggtatacagactttcgtcatgatcctct

SEQ ID NO: 186949 - DNA, 50 bp, Artificial
  Synthetic oligonucleotide
cagatccgcattatcgccggtctctggcgcggacgtaaactgccggttct

SEQ ID NO: 186950 - DNA, 50 bp, Artificial
  Synthetic oligonucleotide
ttctacagcgagcagggtctgtccctgcgtctcaaactgccacgccggaa

SEQ ID NO: 186951 - DNA, 50 bp, Artificial
  Synthetic oligonucleotide
acgccgccagtgtggcgacgggcgacagtcagcacagacggagcttactc

SEQ ID NO: 186952 - DNA, 50 bp, Artificial
  Synthetic oligonucleotide
tcacgtgaatcttgcggtttatgtaccccgtgcagagaaggtttaccatg

SEQ ID NO: 186953 - DNA, 50 bp, Artificial
  Synthetic oligonucleotide
accgaaccggacgctcattcaccgcacccagctccgttattgcccgcaga

SEQ ID NO: 186954 - DNA, 50 bp, Artificial
  Synthetic oligonucleotide
cagaccccatgtttgcccagcgatacgcagagccttaaagcgccctggct

SEQ ID NO: 186955 - DNA, 50 bp, Artificial
  Synthetic oligonucleotide
tcacggggccgctggataagactccggcacgcatgcgccttaaaggttat

SEQ ID NO: 186956 - DNA, 50 bp, Artificial
  Synthetic oligonucleotide
ttttcagtcgttctttgcctgccagagtcgtgtacgtgatttaagtcgcc

SEQ ID NO: 186957 - DNA, 50 bp, Artificial
  Synthetic oligonucleotide
cgagaaggcggttggggaaaacggagcgcaatatcgccgggccaatactc

SEQ ID NO: 186958 - DNA, 50 bp, Artificial
  Synthetic oligonucleotide
cgctccagtatgtgtggcgaatggtgcgaccatcggggctggtaccacgg

SEQ ID NO: 186959 - DNA, 60 bp, Artificial
  Synthetic oligonucleotide
cgggaagcattactggccgtcagccagtcagaataggagagtgctcgcgcatcagacata

SEQ ID NO: 186960 - DNA, 50 bp, Artificial
  Synthetic oligonucleotide
cccaatgacgcgccgcaacccactaacgggggatgatcgcccaatgtggc

SEQ ID NO: 186961 - DNA, 50 bp, Artificial
  Synthetic oligonucleotide
ccatctactactagcgcaagatctatttcattaccttgtgtaccatgacg

SEQ ID NO: 186962 - DNA, 50 bp, Artificial
  Synthetic oligonucleotide
ttctcgttaatgattggtctacgtagcttcccataaggttatatccattt

SEQ ID NO: 186963 - DNA, 50 bp, Artificial
  Synthetic oligonucleotide
aacacctgttgataggcgctatcccgtgcgcgccgcgagttatccagctc

SEQ ID NO: 186964 - DNA, 50 bp, Artificial
  Synthetic oligonucleotide
attcaggcagcggggatattctgcttgattaatgtggctcattagacgta

SEQ ID NO: 186965 - DNA, 50 bp, Artificial
  Synthetic oligonucleotide
accgaatttcaagccaggaagcgccgatgcccgtagcccatgtagccctg

SEQ ID NO: 186966 - DNA, 50 bp, Artificial
  Synthetic oligonucleotide
aggtctgcaacccgtgatgaatttcgcccggcgttgtgacggctaacgcc

SEQ ID NO: 186967 - DNA, 50 bp, Artificial
  Synthetic oligonucleotide
cagacaggcctagaattgatgcctggcagacgctggtaaatcaccattac

SEQ ID NO: 186968 - DNA, 50 bp, Artificial
  Synthetic oligonucleotide
tatccaggcaacaccgtcgccagatctgaccattgccaatagtgttgctg

SEQ ID NO: 186969 - DNA, 50 bp, Artificial
  Synthetic oligonucleotide
aaaacctgcgcgcggtcatacacggcacccctgaatcgttgcgctgaggt

SEQ ID NO: 186970 - DNA, 59 bp, Artificial
  Synthetic oligonucleotide
cgggaaccgtcatctgtaccctctgccatgccatccgccatgattaaatcctcgttcgt

SEQ ID NO: 186971 - DNA, 50 bp, Artificial
  Synthetic oligonucleotide
ggcacgaccgggggccgggttgcgctctctatgccatttacggggtagct

SEQ ID NO: 186972 - DNA, 50 bp, Artificial
  Synthetic oligonucleotide
aacacagccgggttctctgcagccgcacatggtgacgccattacaagcct

SEQ ID NO: 186973 - DNA, 50 bp, Artificial
  Synthetic oligonucleotide
cccgtaagctcaaaggacttgttataacggatacgccaagtgttccctgt

SEQ ID NO: 186974 - DNA, 50 bp, Artificial
  Synthetic oligonucleotide
accgatgccttagcgcgccacagagaagcaattcgcacgattggcgcccg

SEQ ID NO: 186975 - DNA, 50 bp, Artificial
  Synthetic oligonucleotide
agtagtagcggggacgactggagaggccgcgacactggagcgtgaagagc

SEQ ID NO: 186976 - DNA, 50 bp, Artificial
  Synthetic oligonucleotide
cagatccctgtccgaagttgcgccactatacctgaaccgctgcgccggtt

SEQ ID NO: 186977 - DNA, 50 bp, Artificial
  Synthetic oligonucleotide
agcgagcagatttcaaggcctcattgccggtagatatccagctgccgccc

SEQ ID NO: 186978 - DNA, 50 bp, Artificial
  Synthetic oligonucleotide
ggtcttctaaaacccaggattcgtgatagctcgactgaaaatagaggtcg

SEQ ID NO: 186979 - DNA, 50 bp, Artificial
  Synthetic oligonucleotide
cgatatcaaatattactcctgatcaaaacaatgagcgtactagactagac

SEQ ID NO: 186980 - DNA, 50 bp, Artificial
  Synthetic oligonucleotide
aacatggcacgccggagaagccataagaaccgcgatttgccgccaaacct

SEQ ID NO: 186981 - DNA, 60 bp, Artificial
  Synthetic oligonucleotide
cagtctgcgcggacaggtttcagcacaggagcgtaaaggatgagcgataaccgcacgatt

SEQ ID NO: 186982 - DNA, 50 bp, Artificial
  Synthetic oligonucleotide
accctgaaccgcccttttcgtcaggttctccccgtgtggcatccgcgaaa

SEQ ID NO: 186983 - DNA, 50 bp, Artificial
  Synthetic oligonucleotide
cggtatttaacctgcctgtgttcagggttaggtgggcaccggcccctccc

SEQ ID NO: 186984 - DNA, 50 bp, Artificial
  Synthetic oligonucleotide
gcaatctggcgcgtttccttcacgcagagggcgcgtactcgcctccatga

SEQ ID NO: 186985 - DNA, 50 bp, Artificial
  Synthetic oligonucleotide
gtctggataaacagctgctaccagcggacaaacgtactggcgcttcaacg

SEQ ID NO: 186986 - DNA, 50 bp, Artificial
  Synthetic oligonucleotide
gtagtgtcttgcgtgcaataagctgcttctcttcataaaacgatgaagcg

SEQ ID NO: 186987 - DNA, 50 bp, Artificial
  Synthetic oligonucleotide
cggccgcaggaaccgattatagccagttcgttaccgaccgtttcgtgaaa

SEQ ID NO: 186988 - DNA, 50 bp, Artificial
  Synthetic oligonucleotide
aacatcatgctgttgcgggcacggtagattaaaacgtcccgatacgtaac

SEQ ID NO: 186989 - DNA, 50 bp, Artificial
  Synthetic oligonucleotide
agccaggcgttgttaagcaccgtgcccgatctcgctaaccgaacggtgtt

SEQ ID NO: 186990 - DNA, 50 bp, Artificial
  Synthetic oligonucleotide
gagggtaatatgtagtacggatttaagatcgatacagtatattctggacc

SEQ ID NO: 186991 - DNA, 50 bp, Artificial
  Synthetic oligonucleotide
agacgaaggtgtccggcgttgcccccgtcaccacggatacccgttttgcg

SEQ ID NO: 186992 - DNA, 50 bp, Artificial
  Synthetic oligonucleotide
gaaatttcccgcccaaaattaacctcttttttctacaaacaggtccgcga

SEQ ID NO: 186993 - DNA, 55 bp, Artificial
  Synthetic oligonucleotide
ctctcaaccccattatatcgcgattttgtttatgtgtcaaaaactattaagtttc

SEQ ID NO: 186994 - DNA, 60 bp, Artificial
  Synthetic oligonucleotide
tgcgtaaaagcggcgcgggcatactatcacgcatatcacgtccgggttgaataagcgcgt

SEQ ID NO: 186995 - DNA, 52 bp, Artificial
  Synthetic oligonucleotide
aggtctatcacgtcagtcctattattatcaatcaaaaccaaagaaagacgaa

SEQ ID NO: 186996 - DNA, 52 bp, Artificial
  Synthetic oligonucleotide
tgataggaggccgtttcttttgaatagactaatggggtgattcgaacatcgc

SEQ ID NO: 186997 - DNA, 52 bp, Artificial
  Synthetic oligonucleotide
ttttatccctaacgaccgagccatcgtttcgttgtttcctgtcgcaatatag

SEQ ID NO: 186998 - DNA, 52 bp, Artificial
  Synthetic oligonucleotide
gtcgctccataaggaaaccctagtttaaatgctgcgttatgcgctaaagatc

SEQ ID NO: 186999 - DNA, 52 bp, Artificial
  Synthetic oligonucleotide
gtattcactcggctatgagtgctcaaaaggcgtatgaactatgtccaagtgc

SEQ ID NO: 187000 - DNA, 52 bp, Artificial
  Synthetic oligonucleotide
atggactgctcttgttttctgactagtgccaaggtcggggtctgtactcgtc

SEQ ID NO: 187001 - DNA, 52 bp, Artificial
  Synthetic oligonucleotide
ctttaaacctatcgttgatcgatgagggatttgaaggagcaattgctgtagc

SEQ ID NO: 187002 - DNA, 52 bp, Artificial
  Synthetic oligonucleotide
gagaatttgttcggggttactggtagaaggacgattggtttggagtcagatt

SEQ ID NO: 187003 - DNA, 52 bp, Artificial
  Synthetic oligonucleotide
gagcaccgtgaataaagaggttgtgaaatcaacgctctaacctgagtgctag

SEQ ID NO: 187004 - DNA, 52 bp, Artificial
  Synthetic oligonucleotide
catcataaagatctaatgatgatagagttgacacagcattccggttggcccc

SEQ ID NO: 187005 - DNA, 57 bp, Artificial
  Synthetic oligonucleotide
tgccaccaaggcacttggcggacaaggggttatttcggtagccagtcatgtcttcgg

SEQ ID NO: 187006 - DNA, 52 bp, Artificial
  Synthetic oligonucleotide
gatagcgactacggatcattaaggccatttctgtcggtgagtattctgcagt

SEQ ID NO: 187007 - DNA, 52 bp, Artificial
  Synthetic oligonucleotide
taggaaaagtcgttgttagtggtccgttcaacggataagcaataatacgccg

SEQ ID NO: 187008 - DNA, 52 bp, Artificial
  Synthetic oligonucleotide
tgttctcaactcggttatcaatgctgatctagcaaaatcttcagttttgact

SEQ ID NO: 187009 - DNA, 52 bp, Artificial
  Synthetic oligonucleotide
gattcatgataaagcgagcattattgatgcgttcttctcatttgcgcaagca

SEQ ID NO: 187010 - DNA, 52 bp, Artificial
  Synthetic oligonucleotide
cggttatacttccttcgcgaccttctgatcctaatgcaatgactctcccaga

SEQ ID NO: 187011 - DNA, 52 bp, Artificial
  Synthetic oligonucleotide
tactagctctttaccaagggaacgtatggaaatttatgccgctgaagcttta

SEQ ID NO: 187012 - DNA, 52 bp, Artificial
  Synthetic oligonucleotide
gcagttatttgcagtagttggcggcgcatggtttatttacgatggtcctgct

SEQ ID NO: 187013 - DNA, 52 bp, Artificial
  Synthetic oligonucleotide
taccaagtcgttgcagcaccagaaatttcgtttacgcaatatcaagggccag

SEQ ID NO: 187014 - DNA, 52 bp, Artificial
  Synthetic oligonucleotide
gcccggtagaaggttataattcactaggctggcggcgtgtttacactacttc

SEQ ID NO: 187015 - DNA, 52 bp, Artificial
  Synthetic oligonucleotide
gccgtttaggcgtgattgggttacagctgtacttccatgcaaatggtattga

SEQ ID NO: 187016 - DNA, 60 bp, Artificial
  Synthetic oligonucleotide
tgattctcccttaggtcaaattggtgatgcaacgattgttgttcctggtgcaactaaatc

SEQ ID NO: 187017 - DNA, 52 bp, Artificial
  Synthetic oligonucleotide
tgccgaatgaagtcaacgaaccccatggattgctggcgtatcacttttatga

SEQ ID NO: 187018 - DNA, 52 bp, Artificial
  Synthetic oligonucleotide
acaagttactatctgatacgttaatggcgctactttatgataaccaccaaga

SEQ ID NO: 187019 - DNA, 52 bp, Artificial
  Synthetic oligonucleotide
acaatcattgtgctcgtcattgtaatcgccttcgttcggatacctgtttctt

SEQ ID NO: 187020 - DNA, 52 bp, Artificial
  Synthetic oligonucleotide
acaattgtccgaattgcttttgcaacacgcccttgtttaccgatgatacgtc

SEQ ID NO: 187021 - DNA, 52 bp, Artificial
  Synthetic oligonucleotide
gctatgatggtgactgtttatcgtcggttggatggggaaaatgctgagacag

SEQ ID NO: 187022 - DNA, 52 bp, Artificial
  Synthetic oligonucleotide
acatcccgcccggcaaatacgcaaccaaagccggatggggcgcagacaaccc

SEQ ID NO: 187023 - DNA, 52 bp, Artificial
  Synthetic oligonucleotide
ttccattgtaacagcaacaggaaccagtgaagcgattccacaagtggggaaa

SEQ ID NO: 187024 - DNA, 51 bp, Artificial
  Synthetic oligonucleotide
aacgtatactaatcattagtatttagtactctcttttacgtatggagtgca

SEQ ID NO: 187025 - DNA, 51 bp, Artificial
  Synthetic oligonucleotide
cgcagggttaaaagttggaatcgtgttgaatccagaaacgccagttagcac

SEQ ID NO: 187026 - DNA, 51 bp, Artificial
  Synthetic oligonucleotide
atcgttggggcaatgcgaaccaatggccagcaagtgcacgagcaaacggct

SEQ ID NO: 187027 - DNA, 57 bp, Artificial
  Synthetic oligonucleotide
tgactatcaccttcttagataatgccctaacctttgaaccaaataaaagtgattcta

SEQ ID NO: 187028 - DNA, 51 bp, Artificial
  Synthetic oligonucleotide
tttgtttataccgattgctcgcagaaagtgcttgaccatccctttttgtcg

SEQ ID NO: 187029 - DNA, 51 bp, Artificial
  Synthetic oligonucleotide
atggcatgaacactccttggttattggttttttggtaattctattatacca

SEQ ID NO: 187030 - DNA, 51 bp, Artificial
  Synthetic oligonucleotide
atcgcctagcagtataacattacttcccaccgggaatttagggttcgcagc

SEQ ID NO: 187031 - DNA, 51 bp, Artificial
  Synthetic oligonucleotide
aaaaggtatatcgggtgtggtatcactcggtcgagttcagacaccggtaaa

SEQ ID NO: 187032 - DNA, 51 bp, Artificial
  Synthetic oligonucleotide
ataggtaccgatgcccaatgcggggcgtaaattgccgtcgtttaatgtcag

SEQ ID NO: 187033 - DNA, 51 bp, Artificial
  Synthetic oligonucleotide
cacaacgtagaaaaaattcggtagatttttttactgcgtataagtgcgccc

SEQ ID NO: 187034 - DNA, 51 bp, Artificial
  Synthetic oligonucleotide
aaacaatgcttgtctcttccaatgcttcataggtcaaaccattttcccgtg

SEQ ID NO: 187035 - DNA, 51 bp, Artificial
  Synthetic oligonucleotide
ttctggctgtaattccgaccacccacgaagccatagatacgtccggttctg

SEQ ID NO: 187036 - DNA, 51 bp, Artificial
  Synthetic oligonucleotide
ttatttgtggggtaaaatagacgaaaatctgtctgagaagtcgcttgcagc

SEQ ID NO: 187037 - DNA, 51 bp, Artificial
  Synthetic oligonucleotide
ttaggagggacacaaggggaaccggggcatgctttaacagggacgaccccc

SEQ ID NO: 187038 - DNA, 54 bp, Artificial
  Synthetic oligonucleotide
tcttaggtgttgtactacctacctgcggatcggggttatcgggttgcaccgtcg

SEQ ID NO: 187039 - DNA, 51 bp, Artificial
  Synthetic oligonucleotide
ttacccgaaatgtccggtgaaaccatctattatgcaggggtaactcgttca

SEQ ID NO: 187040 - DNA, 51 bp, Artificial
  Synthetic oligonucleotide
catcaatcctaatcgcggccaggcacctgccaatgaaccaacagtgcccga

SEQ ID NO: 187041 - DNA, 51 bp, Artificial
  Synthetic oligonucleotide
catttgttagtaaggtactgttctatggggcgcttaccatcgtgtaatcac

SEQ ID NO: 187042 - DNA, 51 bp, Artificial
  Synthetic oligonucleotide
ccaaaatcacgaaccttcgtaaggaaactagtgagtttctaggtttcaact

SEQ ID NO: 187043 - DNA, 51 bp, Artificial
  Synthetic oligonucleotide
ccatttatttctgtgcgctgctagttcatctactggttttacttccggacg

SEQ ID NO: 187044 - DNA, 51 bp, Artificial
  Synthetic oligonucleotide
cccatatacgccacaattaacccgcccagtgagctccccgcacaaagcgta

SEQ ID NO: 187045 - DNA, 51 bp, Artificial
  Synthetic oligonucleotide
ccgtggggcagcagggcgcaaatctccgttaggtggacgcgcaaaagttgg

SEQ ID NO: 187046 - DNA, 51 bp, Artificial
  Synthetic oligonucleotide
cctttagtaacaggttatgggattgagataatgtcaaacgggcgactttat

SEQ ID NO: 187047 - DNA, 51 bp, Artificial
  Synthetic oligonucleotide
cgacatacaacttcctccatgatacataagactgcatacgcagttataagt

SEQ ID NO: 187048 - DNA, 51 bp, Artificial
  Synthetic oligonucleotide
ggttcggactgctttggtagtttctcgttttaataatccggtatacgccac

SEQ ID NO: 187049 - DNA, 55 bp, Artificial
  Synthetic oligonucleotide
tctgtttatgaacgtagttttgtctgtttatgaacgtagttttgtctgtttagaa

SEQ ID NO: 187050 - DNA, 51 bp, Artificial
  Synthetic oligonucleotide
agagaacgacaccggaacaagcgatccacagcatcaggttaagcgcgggga

SEQ ID NO: 187051 - DNA, 51 bp, Artificial
  Synthetic oligonucleotide
cttaacgttcttttccacgaataaacatagtcttctgcagtaacaggtgta

SEQ ID NO: 187052 - DNA, 51 bp, Artificial
  Synthetic oligonucleotide
ggtgcattcgcctcagtggctggcgaccgagtagcgacgtatcaagctgct

SEQ ID NO: 187053 - DNA, 51 bp, Artificial
  Synthetic oligonucleotide
tcattacgcccacctgacgttgcctgtgtcgctcccatgcgatgcaatgct

SEQ ID NO: 187054 - DNA, 51 bp, Artificial
  Synthetic oligonucleotide
agaatggcggaacgtattcttttgagttggctaaacaattttctattaata

SEQ ID NO: 187055 - DNA, 51 bp, Artificial
  Synthetic oligonucleotide
acttaatagacgaacgccctttacaagtatgtgtagcgccaaaccacccct

SEQ ID NO: 187056 - DNA, 51 bp, Artificial
  Synthetic oligonucleotide
ggggctgctgtgtagcttcataggtgggctccacagaatcggtgggtggca

SEQ ID NO: 187057 - DNA, 51 bp, Artificial
  Synthetic oligonucleotide
tatcggctatcccagcccaggctgatctactccttgcagggacgcacagcg

SEQ ID NO: 187058 - DNA, 51 bp, Artificial
  Synthetic oligonucleotide
gagagtgattctaaggagtatatgggtgttagtagagtttagtgtgtggta

SEQ ID NO: 187059 - DNA, 51 bp, Artificial
  Synthetic oligonucleotide
gatacccatcatgttataattcgggattgcgcgctctgaacctagataagt

SEQ ID NO: 187060 - DNA, 60 bp, Artificial
  Synthetic oligonucleotide
tctctttcacgttgattggtctgatgatcttagtgaaatgactgccaaagttaaagtaac

SEQ ID NO: 187061 - DNA, 51 bp, Artificial
  Synthetic oligonucleotide
gatacgtatccagaatggggaacggtatgtaacatcggggaagagctagtc

SEQ ID NO: 187062 - DNA, 51 bp, Artificial
  Synthetic oligonucleotide
gcaagcttaggcgttgtccgctcatttagcacatgcgccatccaacgcgga

SEQ ID NO: 187063 - DNA, 51 bp, Artificial
  Synthetic oligonucleotide
gcagtaacttcgttacttcgtatttatgctataaaacttaactgttagtta

SEQ ID NO: 187064 - DNA, 51 bp, Artificial
  Synthetic oligonucleotide
gccacaattaacccgcccagtgagctccccgcacaaagcgtatactcgcgg

SEQ ID NO: 187065 - DNA, 51 bp, Artificial
  Synthetic oligonucleotide
gggacattcacattttctgcggttctgtaaataatgaactctcctgtacgc

SEQ ID NO: 187066 - DNA, 51 bp, Artificial
  Synthetic oligonucleotide
actaattggtggccgatagccttctggaattgttagtatcgttgaatcatt

SEQ ID NO: 187067 - DNA, 51 bp, Artificial
  Synthetic oligonucleotide
gtttgctgacatagccagttgtgaatagcttctagtctactgtcaggttcg

SEQ ID NO: 187068 - DNA, 51 bp, Artificial
  Synthetic oligonucleotide
gtttagtacttttgctagttgatcgttggctagacgattagcagataatct

SEQ ID NO: 187069 - DNA, 51 bp, Artificial
  Synthetic oligonucleotide
acgcttgcaccgaggtggtcgtgataatgctggaccctgccggcaagtgtg

SEQ ID NO: 187070 - DNA, 51 bp, Artificial
  Synthetic oligonucleotide
gctgacactctatagaatcccactctctagcacttgcttctgtagttgaac

SEQ ID NO: 187071 - DNA, 54 bp, Artificial
  Synthetic oligonucleotide
tctcttaggttatcgggtgttgcccgcttatttcgcaccacctaagcggcgggg

SEQ ID NO: 187072 - DNA, 51 bp, Artificial
  Synthetic oligonucleotide
gctgcaagcgacttctcagacagattttcgtctattttaccccacaaataa

SEQ ID NO: 187073 - DNA, 51 bp, Artificial
  Synthetic oligonucleotide
gcttacggttcactgtctattgctgttcagtattttatggaagcgaccatt

SEQ ID NO: 187074 - DNA, 51 bp, Artificial
  Synthetic oligonucleotide
ggatattctactacgtaaccaccaactctacacgccaccaaggagcgtgat

SEQ ID NO: 187075 - DNA, 51 bp, Artificial
  Synthetic oligonucleotide
cgcccagtgagctccccgcacaaagcgtatactcgcggtctggcttggtcc

SEQ ID NO: 187076 - DNA, 51 bp, Artificial
  Synthetic oligonucleotide
cggaaagctagaaattgtttataaccgacctaatggctatacaccactact

SEQ ID NO: 187077 - DNA, 51 bp, Artificial
  Synthetic oligonucleotide
cgggtagctgtcgtctctccgcgaatcgatgtgtgccgcgaactgttccct

SEQ ID NO: 187078 - DNA, 51 bp, Artificial
  Synthetic oligonucleotide
gtatcaagccgaccaaagcaaacgttaaaggcacaacgatagacaatatac

SEQ ID NO: 187079 - DNA, 51 bp, Artificial
  Synthetic oligonucleotide
cgtaagagggtgtgagcactacatcgtttaacttgtcctgtgtaaaaccta

SEQ ID NO: 187080 - DNA, 51 bp, Artificial
  Synthetic oligonucleotide
cgtgaccatctattgctagcccaacggctgattcgagaaaccatcgagccg

SEQ ID NO: 187081 - DNA, 51 bp, Artificial
  Synthetic oligonucleotide
aagccgtttagcgcacttcgtaaatcgccgttggtcgctcgcgagagatgc

SEQ ID NO: 187082 - DNA, 54 bp, Artificial
  Synthetic oligonucleotide
tcggcgaaaaaggggacaacttcaatcaagggtacgtcagaaaactggagataa

SEQ ID NO: 187083 - DNA, 51 bp, Artificial
  Synthetic oligonucleotide
agcgccccatgaagcggagcttagtgaggattcaaaacgccgcttgcatga

SEQ ID NO: 187084 - DNA, 51 bp, Artificial
  Synthetic oligonucleotide
gtctactgacccaggtgcattcgcctcagtggctggcgaccgagtagcgac

SEQ ID NO: 187085 - DNA, 51 bp, Artificial
  Synthetic oligonucleotide
gtacgtgaactcaaaaggaaatgtgtatgttatttacgagagtaagtccgc

SEQ ID NO: 187086 - DNA, 51 bp, Artificial
  Synthetic oligonucleotide
tcgtggatcgagtaggtggcggagatgcttttgcaggtggcgtgctccatg

SEQ ID NO: 187087 - DNA, 51 bp, Artificial
  Synthetic oligonucleotide
agcctatggttgaagctactagaaatggcgcaattaaagggtggcgcttat

SEQ ID NO: 187088 - DNA, 51 bp, Artificial
  Synthetic oligonucleotide
ctgatcggctcttcaaccccaaatgccgacgtttcataacgcgttgccggc

SEQ ID NO: 187089 - DNA, 51 bp, Artificial
  Synthetic oligonucleotide
ctctagtcctgggcgcgagatgtccccagttacgatgacacggtctaagct

SEQ ID NO: 187090 - DNA, 51 bp, Artificial
  Synthetic oligonucleotide
gtgacgagtacttgatctttgtcggcggtaaagggacctgaagcagagcgt

SEQ ID NO: 187091 - DNA, 51 bp, Artificial
  Synthetic oligonucleotide
ctcccaccactaatgctggcgaaaggcctagcgtcacgcccacaccgaata

SEQ ID NO: 187092 - DNA, 51 bp, Artificial
  Synthetic oligonucleotide
gtaatgcggggaaagaacttagtgcccgcttggctctagttgacatggcaa

SEQ ID NO: 187093 - DNA, 57 bp, Artificial
  Synthetic oligonucleotide
tcgctcaacatcgattgtaacgtcctttctcaaacaaaaagagaacacagtttagct

SEQ ID NO: 187094 - DNA, 51 bp, Artificial
  Synthetic oligonucleotide
ctagctggcagcaaagttagtgcatcatgaatggaatgggcacccgctgtc

SEQ ID NO: 187095 - DNA, 51 bp, Artificial
  Synthetic oligonucleotide
ctagatttccccactcagaatgatcataaagcaaacctttcaccataatcc

SEQ ID NO: 187096 - DNA, 50 bp, Artificial
  Synthetic oligonucleotide
gtcccgccttgaccataaggtccacagttacgcgctttgaatcttgcata

SEQ ID NO: 187097 - DNA, 50 bp, Artificial
  Synthetic oligonucleotide
gtaaactgcgcttgagcagtcgtaactattcgggccaagacgagcactca

SEQ ID NO: 187098 - DNA, 50 bp, Artificial
  Synthetic oligonucleotide
accgcgcgacttgggtaggcaatcgttggggcaatgcgaaccaatggcca

SEQ ID NO: 187099 - DNA, 50 bp, Artificial
  Synthetic oligonucleotide
acggattccactatcatcacagtcggcgaaatgagctctacgacgatcga

SEQ ID NO: 187100 - DNA, 50 bp, Artificial
  Synthetic oligonucleotide
acgaatctttgggaaggtcagggtctatcttctcagctagcgatggtagg

SEQ ID NO: 187101 - DNA, 50 bp, Artificial
  Synthetic oligonucleotide
ggcatagtaagtcgacttcgatacctcgagtacgttcgttaatgtacgta

SEQ ID NO: 187102 - DNA, 50 bp, Artificial
  Synthetic oligonucleotide
accggattatggcatgccatcggttgcttgtcaggtacagggagctgttg

SEQ ID NO: 187103 - DNA, 50 bp, Artificial
  Synthetic oligonucleotide
gtcggaacaaataatcggattggagaccaagtgggatttccgattggtcg

SEQ ID NO: 187104 - DNA, 59 bp, Artificial
  Synthetic oligonucleotide
ctcgcctgaggcgagccagtcaatggatctaatccaacaatctaacgatttttttactg

SEQ ID NO: 187105 - DNA, 60 bp, Artificial
  Synthetic oligonucleotide
tcgattattggtggaatcgcagtcacttatcgtgatgcctcaaaaatcctaggacctatt

SEQ ID NO: 187106 - DNA, 50 bp, Artificial
  Synthetic oligonucleotide
acgcattgtaagttctggtgaatgttttaccgtcgctaagattctcttcc

SEQ ID NO: 187107 - DNA, 50 bp, Artificial
  Synthetic oligonucleotide
caatgatttattagcgattgtttctagtcaactttttgaaaaagacgtgt

SEQ ID NO: 187108 - DNA, 50 bp, Artificial
  Synthetic oligonucleotide
acgcagcattggttccaccatcaccgtaaatgctggccccatttagagat

SEQ ID NO: 187109 - DNA, 50 bp, Artificial
  Synthetic oligonucleotide
gggtaggcaatcgttggggcaatgcgaaccaatggccagcaagtgcacga

SEQ ID NO: 187110 - DNA, 50 bp, Artificial
  Synthetic oligonucleotide
acgattaacaacgaaggacaattagtcacggacaagcataccttgactaa

SEQ ID NO: 187111 - DNA, 50 bp, Artificial
  Synthetic oligonucleotide
acgaatccattccctagcagcagtttagataaaagttcctttagcggtgg

SEQ ID NO: 187112 - DNA, 50 bp, Artificial
  Synthetic oligonucleotide
caaaaaccgataaaacacaagcccatttgtgtatccaatcctttagccca

SEQ ID NO: 187113 - DNA, 50 bp, Artificial
  Synthetic oligonucleotide
caagtagcgttgaatgtctacgggcaaacaggcttaccttgcaatcgttg

SEQ ID NO: 187114 - DNA, 50 bp, Artificial
  Synthetic oligonucleotide
gttagcaacagacaacgttgtagaagtcacgcaatctttaaatacagcgg

SEQ ID NO: 187115 - DNA, 50 bp, Artificial
  Synthetic oligonucleotide
ttgtcgatgaacggtctcttggccggtggcgtgttagcctttgcccgtgg

SEQ ID NO: 187116 - DNA, 57 bp, Artificial
  Synthetic oligonucleotide
tccgttgacgattatccgtttagaacgtgaaatgaaaattgcacaaacgcagttaga

SEQ ID NO: 187117 - DNA, 50 bp, Artificial
  Synthetic oligonucleotide
aaaagtggggcgataaccaaagacataagttcgtacataaacagcacccc

SEQ ID NO: 187118 - DNA, 50 bp, Artificial
  Synthetic oligonucleotide
gtaggggaaatcacgttgccgttagctatcgctactgttggtggtgccac

SEQ ID NO: 187119 - DNA, 50 bp, Artificial
  Synthetic oligonucleotide
acgaaagtgtcaccaatcaaagacttacttcgtgtcaaagattccaaagg

SEQ ID NO: 187120 - DNA, 50 bp, Artificial
  Synthetic oligonucleotide
acctagacataacaaacaagagcgtatatataggcaagaccgtagcacaa

SEQ ID NO: 187121 - DNA, 50 bp, Artificial
  Synthetic oligonucleotide
ggtgcatcaggtaacaacagcgcaacccagacacttgcgacccagccgca

SEQ ID NO: 187122 - DNA, 50 bp, Artificial
  Synthetic oligonucleotide
tgagcaacgacgacttacgacgggcaattagttggactgtctaacggggt

SEQ ID NO: 187123 - DNA, 50 bp, Artificial
  Synthetic oligonucleotide
tgaccaaaactacggacgaaactatgaccaaaagtaggtactatattatg

SEQ ID NO: 187124 - DNA, 50 bp, Artificial
  Synthetic oligonucleotide
tgcatgagctagccactgtcggcctacaaacagcccgtcccatggaagcc

SEQ ID NO: 187125 - DNA, 50 bp, Artificial
  Synthetic oligonucleotide
cggtaaagaaatgcgtaagtatgcggtcgttgtaatatgatcactcacta

SEQ ID NO: 187126 - DNA, 50 bp, Artificial
  Synthetic oligonucleotide
cgactgcctgaaattagtgaacgtgctagctttctgctagccggtgctag

SEQ ID NO: 187127 - DNA, 57 bp, Artificial
  Synthetic oligonucleotide
tcccgatgactttgttagtcagtatcgtgtagttgatcctgtgtcctttaaaccaat

SEQ ID NO: 187128 - DNA, 50 bp, Artificial
  Synthetic oligonucleotide
cgttgaaagtaaccaaagtcggtactgccgaaaacgaagcactaaacggt

SEQ ID NO: 187129 - DNA, 50 bp, Artificial
  Synthetic oligonucleotide
aacggcggagcagaaccaaacgagcgccggcacagcagcttctcccgaca

SEQ ID NO: 187130 - DNA, 50 bp, Artificial
  Synthetic oligonucleotide
agcgagaccaactagcaggggaacctgtcgcgccactcttggcacgaatc

SEQ ID NO: 187131 - DNA, 50 bp, Artificial
  Synthetic oligonucleotide
cgaatatggtattgctatatcttctgtcgctcgatgggtgaagcaatatt

SEQ ID NO: 187132 - DNA, 50 bp, Artificial
  Synthetic oligonucleotide
tcggatcaggatttattctaccaggtgtgagcggcggggcactcgcagct

SEQ ID NO: 187133 - DNA, 50 bp, Artificial
  Synthetic oligonucleotide
tcgctccaaattcgcctaacccacgggcaaaggctaacacgccaccggcc

SEQ ID NO: 187134 - DNA, 50 bp, Artificial
  Synthetic oligonucleotide
tcctctaacgtttgaaaactcgcaagaaatacctaactgagcggagggga

SEQ ID NO: 187135 - DNA, 50 bp, Artificial
  Synthetic oligonucleotide
ccgatttatacgcataagaaggtaaacataccagatgaggtaagcacgaa

SEQ ID NO: 187136 - DNA, 50 bp, Artificial
  Synthetic oligonucleotide
ccccgtttcgctcttacgcgcttaatggatacaaaactcctagcagtata

SEQ ID NO: 187137 - DNA, 50 bp, Artificial
  Synthetic oligonucleotide
aagtcgatgtcacgattgcacctcccgctggtaaatagggctcggcggct

SEQ ID NO: 187138 - DNA, 58 bp, Artificial
  Synthetic oligonucleotide
tccatgtctgcagcaatcaaaaaaggggactgggtttcaggtattactcaagtaagtc

SEQ ID NO: 187139 - DNA, 50 bp, Artificial
  Synthetic oligonucleotide
gctcgcgtttgtgcttacggtagcatggatgaagtaaattcttgggtcgg

SEQ ID NO: 187140 - DNA, 50 bp, Artificial
  Synthetic oligonucleotide
gctcagcagtcgtcgggctaggatgaccagacagattcgcgcttggtccg

SEQ ID NO: 187141 - DNA, 50 bp, Artificial
  Synthetic oligonucleotide
cactgaagggatacgtaaagaacgggcgatactagacgacttgaaagccc

SEQ ID NO: 187142 - DNA, 50 bp, Artificial
  Synthetic oligonucleotide
gcggcaaattttcctttaagacacgggcatagcgtcggtagataacttca

SEQ ID NO: 187143 - DNA, 50 bp, Artificial
  Synthetic oligonucleotide
ttatatccgtaatacgcgtaacaaacacattcattaataacaatcaacac

SEQ ID NO: 187144 - DNA, 50 bp, Artificial
  Synthetic oligonucleotide
agtttgccggtcctttagaaatcgttgcttatcctcaggtaacatggatc

SEQ ID NO: 187145 - DNA, 50 bp, Artificial
  Synthetic oligonucleotide
gccgctacccaggcttttatggtaggtggtgcaatcgtcttagggctttt

SEQ ID NO: 187146 - DNA, 50 bp, Artificial
  Synthetic oligonucleotide
gcccgccacccaagtgatactgggggtagaggtgtcgtcacgactgccaa

SEQ ID NO: 187147 - DNA, 50 bp, Artificial
  Synthetic oligonucleotide
gccaagcgaacgagattatcccgatgaatctgacggcttattcggagtga

SEQ ID NO: 187148 - DNA, 50 bp, Artificial
  Synthetic oligonucleotide
gcatcgtacagtcgacgatagtggcctctttgcgcgtacaaagtttcatg

SEQ ID NO: 187149 - DNA, 55 bp, Artificial
  Synthetic oligonucleotide
tccagtcaaagaatattagatacctggcgggacgcccaattataccagttagttt

SEQ ID NO: 187150 - DNA, 50 bp, Artificial
  Synthetic oligonucleotide
tagaccaacatttccggtgctgggtagaaacggtcaaccttattatgacc

SEQ ID NO: 187151 - DNA, 50 bp, Artificial
  Synthetic oligonucleotide
tatgcgctacaggaagagagttagcgattagcattcatgccagaccttat

SEQ ID NO: 187152 - DNA, 50 bp, Artificial
  Synthetic oligonucleotide
agtggctggcgaccgagtagcgacgtatcaagctgcttctggcaaagcgc

SEQ ID NO: 187153 - DNA, 50 bp, Artificial
  Synthetic oligonucleotide
gaccatcatttaagcaatagttcgtgggtcaaacaagccgtcgtagtccc

SEQ ID NO: 187154 - DNA, 50 bp, Artificial
  Synthetic oligonucleotide
tgtcccgctgataatatggtcagcacgcaaactgactgttgctactgcgt

SEQ ID NO: 187155 - DNA, 50 bp, Artificial
  Synthetic oligonucleotide
acttgtagctggtaaagccaatagttgacttagttgccctctgcaataat

SEQ ID NO: 187156 - DNA, 50 bp, Artificial
  Synthetic oligonucleotide
agaatatccgactgcgcttctaaaggctcggcttgttccgttgctactgg

SEQ ID NO: 187157 - DNA, 60 bp, Artificial
  Synthetic oligonucleotide
tcatattctcgaatgatttctacacgtggctttccagctaagtaaagattgacgatttgt

SEQ ID NO: 187158 - DNA, 60 bp, Artificial
  Synthetic oligonucleotide
tcaatctgtcgcatcgaaacgaaataatattcctagaaaatcactgaattatcgaacacc

SEQ ID NO: 187159 - DNA, 60 bp, Artificial
  Synthetic oligonucleotide
tcaactacacgatactgactaacaaagtcatcgggaatatctacaatatcgcaagcaata

SEQ ID NO: 187160 - DNA, 54 bp, Artificial
  Synthetic oligonucleotide
tttttgggtttagatcaaaggagttaatgacggaatctcgtggaatcgttctta

SEQ ID NO: 187161 - DNA, 56 bp, Artificial
  Synthetic oligonucleotide
ttttcggagagtaagacgggtaaagaattcagcgaaacgtcgaatgaagcgcaatc

SEQ ID NO: 187162 - DNA, 58 bp, Artificial
  Synthetic oligonucleotide
ctcgactcataacaacaagttctgttgttaatggatctaaatttctttctatacattc

SEQ ID NO: 187163 - DNA, 57 bp, Artificial
  Synthetic oligonucleotide
ttgttagcaaagctggccctagataacgaagcaaaaaatacaccaggttttgttgca

SEQ ID NO: 187164 - DNA, 59 bp, Artificial
  Synthetic oligonucleotide
ttgttaagagtgcttactcaggtaaatataaaggcgcaagcaaaacctatgtgcaagaa

SEQ ID NO: 187165 - DNA, 60 bp, Artificial
  Synthetic oligonucleotide
ttgtgccgaggataaggagttgacggctaaaccactagcctattaagctgacatttgcta

SEQ ID NO: 187166 - DNA, 58 bp, Artificial
  Synthetic oligonucleotide
ttgtctaaggctagtttagccaaaaggggattatctccgacacctactgtagcaatca

SEQ ID NO: 187167 - DNA, 53 bp, Artificial
  Synthetic oligonucleotide
ttggggtacaacaaccgtccggttgttaatgaacgatgtttctgaataccgta

SEQ ID NO: 187168 - DNA, 60 bp, Artificial
  Synthetic oligonucleotide
ttggcttgattgctgtctatctgttccgtgtcctgtttgaatacagtcggagttatctct

SEQ ID NO: 187169 - DNA, 60 bp, Artificial
  Synthetic oligonucleotide
ttggcggtcttgtgccgctagttgagcaaagagcgagctgagttgctgtcaagaaagggg

SEQ ID NO: 187170 - DNA, 60 bp, Artificial
  Synthetic oligonucleotide
ttgagaagcggttgagacacgtgcatatccatatttcgtcatttggtccacctactttta

SEQ ID NO: 187171 - DNA, 56 bp, Artificial
  Synthetic oligonucleotide
ttgaacgactcctaccagtatttttggtaggagtcgttcaaaatatcgcaacatgg

SEQ ID NO: 187172 - DNA, 59 bp, Artificial
  Synthetic oligonucleotide
ttcttgggtacgttattctctccaacaattcaacgagctgcaaagcagctactctaaaa

SEQ ID NO: 187173 - DNA, 60 bp, Artificial
  Synthetic oligonucleotide
ctcctctgtcgagtcgccggcatctcacgggcggcctattacaaatggttgaatcgcacc

SEQ ID NO: 187174 - DNA, 52 bp, Artificial
  Synthetic oligonucleotide
ttccctccgtcagaaaaccgtttaaataacgactgcctgaaattagtgaacg

SEQ ID NO: 187175 - DNA, 54 bp, Artificial
  Synthetic oligonucleotide
ttaccgtaagcaagttttaacggattatgaacctgccaactacaaagagttctc

SEQ ID NO: 187176 - DNA, 60 bp, Artificial
  Synthetic oligonucleotide
tgttcgcaagtattcacatagttatgaatgggcagaagatctactgtcctatttgaatga

SEQ ID NO: 187177 - DNA, 53 bp, Artificial
  Synthetic oligonucleotide
tgtgttagcgcaatggtaggttcgggggttttcgacttaccaaaaaatatgtc

SEQ ID NO: 187178 - DNA, 58 bp, Artificial
  Synthetic oligonucleotide
tgtggggttagatagtgaatcgagctatggattcgatttcggttataaaatccttcaa

SEQ ID NO: 187179 - DNA, 51 bp, Artificial
  Synthetic oligonucleotide
tgtcgggcgtttaacaaaaggagccgaactacgtaccaccactaacggaaa

SEQ ID NO: 187180 - DNA, 58 bp, Artificial
  Synthetic oligonucleotide
tgtaggctaccgtatcaataagtagaatgtatgaccgacttagataattaaacattct

SEQ ID NO: 187181 - DNA, 53 bp, Artificial
  Synthetic oligonucleotide
tgtaacgtttgcgacactctttccgttagtggtggtacgtagttcggctcctt

SEQ ID NO: 187182 - DNA, 55 bp, Artificial
  Synthetic oligonucleotide
tggttgcttttgaacaccccgtttatacccttcagcaacaggaacaatattcaaa

SEQ ID NO: 187183 - DNA, 59 bp, Artificial
  Synthetic oligonucleotide
tggttatcaaactcttttccacgatcagtatgaaaaatctcaacctctgtcagaggttg

SEQ ID NO: 187184 - DNA, 60 bp, Artificial
  Synthetic oligonucleotide
ctcacttcttgaaggggcgacagctgtgaatcgttcgggcttagttggtggtcatgcagg

SEQ ID NO: 187185 - DNA, 59 bp, Artificial
  Synthetic oligonucleotide
tggtgcgacaacgttgttaccaaattcgattatgggtcgtggaaattatgctctagcaa

SEQ ID NO: 187186 - DNA, 53 bp, Artificial
  Synthetic oligonucleotide
tggtgactgactaaggaacaacgaacctacaaaacttagaggaaaggtgtaac

SEQ ID NO: 187187 - DNA, 60 bp, Artificial
  Synthetic oligonucleotide
gttcgatcgatcccattagcatggaagtacagctgtaagccaatcacacctagtctattc

SEQ ID NO: 187188 - DNA, 60 bp, Artificial
  Synthetic oligonucleotide
gtgttcacttggtgtaattggactaagcaaataatcgctgacagcaatcgcattttttgt

SEQ ID NO: 187189 - DNA, 58 bp, Artificial
  Synthetic oligonucleotide
gtggctcgtgcaaatgctattagagtaagaacaaaatgggattctacgtctaagacgg

SEQ ID NO: 187190 - DNA, 57 bp, Artificial
  Synthetic oligonucleotide
gtggattactatgtgcatcttcccgacgttaggggggatggacagttgggcgactac

SEQ ID NO: 187191 - DNA, 60 bp, Artificial
  Synthetic oligonucleotide
gtgccgctagttgagcaaagagcgagctgagttgctgtcaagaaaggggttaattagatg

SEQ ID NO: 187192 - DNA, 60 bp, Artificial
  Synthetic oligonucleotide
gtcgcaagtagctggtgttaatgcacagctgattgcttggattaccacggccatcgggat

SEQ ID NO: 187193 - DNA, 60 bp, Artificial
  Synthetic oligonucleotide
gtcacttgtgacagcgaaatccctcggagagcgtttggaattgtgatagtcatgtcacaa

SEQ ID NO: 187194 - DNA, 60 bp, Artificial
  Synthetic oligonucleotide
gtcactgataaagctccttcactaagtagtgcgtttaatcgactgcattctgaaggattg

SEQ ID NO: 187195 - DNA, 57 bp, Artificial
  Synthetic oligonucleotide
ctcaaatcaacataccctagaacgatctctgctacaaaatccataagaacggaaccc

SEQ ID NO: 187196 - DNA, 60 bp, Artificial
  Synthetic oligonucleotide
gtatactgtcacgataaaagcaacagtataccagtatacttacgatcatattttggagta

SEQ ID NO: 187197 - DNA, 55 bp, Artificial
  Synthetic oligonucleotide
gtagaagtgaatctggactttcctacgaaatgtttgtaatgtttactaaattcaa

SEQ ID NO: 187198 - DNA, 57 bp, Artificial
  Synthetic oligonucleotide
ggtttaatgaaggccaatgatctcttacgacgatcaggatatttttcggacaagtat

SEQ ID NO: 187199 - DNA, 57 bp, Artificial
  Synthetic oligonucleotide
ggtgacgggggcaaggtttatcaaatttcgcctgaaggctatgtacagtggggcgca

SEQ ID NO: 187200 - DNA, 58 bp, Artificial
  Synthetic oligonucleotide
ggtcagtgttaaggaatttgaagataatccaactaaattcctcagctaatctattcaa

SEQ ID NO: 187201 - DNA, 56 bp, Artificial
  Synthetic oligonucleotide
ggtagtgggggataatttgtcacactatgggggataaattgtcacactatggggga

SEQ ID NO: 187202 - DNA, 56 bp, Artificial
  Synthetic oligonucleotide
gggttggcggtgctatttatcccattaggctggggtaattggcaaggggcagttgc

SEQ ID NO: 187203 - DNA, 54 bp, Artificial
  Synthetic oligonucleotide
ggggtgttcaaaagcaaccaagttttaacaaaacagcaggttacgagcagataa

SEQ ID NO: 187204 - DNA, 55 bp, Artificial
  Synthetic oligonucleotide
gggggataaattgtcacactatgggggataaattgtcacactatgggggataaat

SEQ ID NO: 187205 - DNA, 60 bp, Artificial
  Synthetic oligonucleotide
gggcatacgacaatgagcggtcataaaactattgagaggacacacgtccgtaaaagcatg

SEQ ID NO: 187206 - DNA, 58 bp, Artificial
  Synthetic oligonucleotide
ctatctgttccgtgtcctgtttgaatacagtcggagttatctcttagttatcctagga

SEQ ID NO: 187207 - DNA, 60 bp, Artificial
  Synthetic oligonucleotide
ggctcgatcattcgagtgtttatagccaacagcaccacaccttctatcgatgggtcttgt

SEQ ID NO: 187208 - DNA, 60 bp, Artificial
  Synthetic oligonucleotide
ggctatagcaatcaagtaaagagttttctggctgaaaaagaggcaacgcgctatgcctca

SEQ ID NO: 187209 - DNA, 56 bp, Artificial
  Synthetic oligonucleotide
ggctagcgatccttctaaaaaatatacctatcgatcccgagccaaaacaaatcagt

SEQ ID NO: 187210 - DNA, 60 bp, Artificial
  Synthetic oligonucleotide
ggattgctatatctgttcgatcgatcccattagcatggaagtacagctgtaagccaatca

SEQ ID NO: 187211 - DNA, 60 bp, Artificial
  Synthetic oligonucleotide
ggattatgagcgacacaatgagtagttgggattgggaacttcctcgtggaacattaatca

SEQ ID NO: 187212 - DNA, 60 bp, Artificial
  Synthetic oligonucleotide
ggatgctccttgatgcgctcatgtatactgcgccgaaaagcttgtttcccacgtttttct

SEQ ID NO: 187213 - DNA, 58 bp, Artificial
  Synthetic oligonucleotide
tcaaattcctgtgggggttagatagtgaatcgagctatggattcgatttcggttataa

SEQ ID NO: 187214 - DNA, 60 bp, Artificial
  Synthetic oligonucleotide
tcaaatgcaggtgcggacttacttcgtcattatgaataacagcattgtagacggataaat

SEQ ID NO: 187215 - DNA, 60 bp, Artificial
  Synthetic oligonucleotide
tattgccaaaaatactacgaagtttaaatgcacagctgcagcatggcgcataagtatttc

SEQ ID NO: 187216 - DNA, 60 bp, Artificial
  Synthetic oligonucleotide
tattatctgtgatagggatcttcatctggtgtgaaaaccctggtctcgtttctaagatcg

SEQ ID NO: 187217 - DNA, 55 bp, Artificial
  Synthetic oligonucleotide
ctagtttacctgaaagtacctgctagtaaagtgctagcgaagaacgaaagtgtac

SEQ ID NO: 187218 - DNA, 60 bp, Artificial
  Synthetic oligonucleotide
tatgtttacttgagcaccattgtacataatgtacgtatcattgatgctagtataccctgc

SEQ ID NO: 187219 - DNA, 60 bp, Artificial
  Synthetic oligonucleotide
tatctcattactacactaaagcaaacggtaactcattgaatgattattacaacagaacca

SEQ ID NO: 187220 - DNA, 58 bp, Artificial
  Synthetic oligonucleotide
tagttttgaacggattattgaagtgtgtgaagccgttcaactaaacacattcattgaa

SEQ ID NO: 187221 - DNA, 60 bp, Artificial
  Synthetic oligonucleotide
taggcggaaatgtgaatcaaatcgccaagtggtgcaatacccatcaacacgacatttcag

SEQ ID NO: 187222 - DNA, 56 bp, Artificial
  Synthetic oligonucleotide
tagctatgctatcgaccgggaaagtctagttgaaaaattactagataatgggtccg

SEQ ID NO: 187223 - DNA, 60 bp, Artificial
  Synthetic oligonucleotide
tagcccaccatcttcgatctacataatcatttaattggataccattctcaccatacattt

SEQ ID NO: 187224 - DNA, 60 bp, Artificial
  Synthetic oligonucleotide
tagcatctggggaagttcaactgattccttgtcaccacgtgcaagcggttggcccaatgg

SEQ ID NO: 187225 - DNA, 60 bp, Artificial
  Synthetic oligonucleotide
tacgtgatgaagggactcgcgaagtctattttgataaatatagcttagcaggtttagcta

SEQ ID NO: 187226 - DNA, 58 bp, Artificial
  Synthetic oligonucleotide
taccgttgacaaggtaaatcatttggttaggctctatttgcttgtctgaagatcttta

SEQ ID NO: 187227 - DNA, 60 bp, Artificial
  Synthetic oligonucleotide
tacaagcattgtgggatcactcgaacgttgttggtaatgcgccaacatttctacgagata

SEQ ID NO: 187228 - DNA, 60 bp, Artificial
  Synthetic oligonucleotide
ctagagcgcctgcaagaggatggaccccgcgatgttcttccaaagtcggcaatccttgat

SEQ ID NO: 187229 - DNA, 58 bp, Artificial
  Synthetic oligonucleotide
taataactgttaggtattagcaacctcatgggagagtaagtattgacataggtagtgg

SEQ ID NO: 187230 - DNA, 59 bp, Artificial
  Synthetic oligonucleotide
taagtcacatctatgaactaaaacttgtgaaatcaaagtagcgagtttcgccaagtgcg

SEQ ID NO: 187231 - DNA, 57 bp, Artificial
  Synthetic oligonucleotide
taagggctatgagattaccgcccgcgtcccctctgtcctgattgccgggccgtccaa

SEQ ID NO: 187232 - DNA, 58 bp, Artificial
  Synthetic oligonucleotide
taacgaggatggcaccgatgaaatttgttcgttggatgtccgcaaggtcaatgggtac

SEQ ID NO: 187233 - DNA, 56 bp, Artificial
  Synthetic oligonucleotide
taacactttttagtacagcgctattggtatcagccccacttgttagttttgcggac

SEQ ID NO: 187234 - DNA, 59 bp, Artificial
  Synthetic oligonucleotide
taaagatgggtctgtatggaatccgacagacataatttatggacgtgcttttgattttg

SEQ ID NO: 187235 - DNA, 54 bp, Artificial
  Synthetic oligonucleotide
gttttgcacccgatcgatagtttgttaggcagttggggaagcgaccttttagaa

SEQ ID NO: 187236 - DNA, 56 bp, Artificial
  Synthetic oligonucleotide
gtttatagcgtaaaagaaattacggaaatgactggtattagcaaggcaacactcta

SEQ ID NO: 187237 - DNA, 48 bp, Artificial
  Synthetic oligonucleotide
gttgtaaaacggggcttttagggggtagaaatgtgggtttaaggacat

SEQ ID NO: 187238 - DNA, 55 bp, Artificial
  Synthetic oligonucleotide
gttggtagtcagataaaaagttgttggtagtcagataaaaagttgttggtagtca

SEQ ID NO: 187239 - DNA, 60 bp, Artificial
  Synthetic oligonucleotide
ctagaacctcatttttcacgtgcggatattgcttgcgatattgtagatattcccgatgac

SEQ ID NO: 187240 - DNA, 58 bp, Artificial
  Synthetic oligonucleotide
gttcggtgttcagtcttagaaaacaatccttcagaatgcagtcgattaaacgcactac

SEQ ID NO: 187241 - DNA, 57 bp, Artificial
  Synthetic oligonucleotide
aagagtatctttaaagcctctgaacttgaattgacacgtgaaagaaaagagcacttc

SEQ ID NO: 187242 - DNA, 56 bp, Artificial
  Synthetic oligonucleotide
ataacgtataacaaaagccgaaatgattataacccgcatttccatgtattatggcg

SEQ ID NO: 187243 - DNA, 58 bp, Artificial
  Synthetic oligonucleotide
aggcaaattaaggggtgctaaacaactgctagtaggtgctagagatgtgctataaagg

SEQ ID NO: 187244 - DNA, 60 bp, Artificial
  Synthetic oligonucleotide
agctcatattgctggataatgttcattctaatcgactccatttattatcctggtaaaatt

SEQ ID NO: 187245 - DNA, 56 bp, Artificial
  Synthetic oligonucleotide
aagatttgatactaacaccaaatgttgtatacccccaaacaatacacatattttga

SEQ ID NO: 187246 - DNA, 59 bp, Artificial
  Synthetic oligonucleotide
acgttctctagggggcgaaataatcaatctatcgtctatgtcagacgtccgtatcaatc

SEQ ID NO: 187247 - DNA, 57 bp, Artificial
  Synthetic oligonucleotide
aaaattggaaccacagcgagaatttatcgtgcaaattggtactcttgatgattttcg

SEQ ID NO: 187248 - DNA, 60 bp, Artificial
  Synthetic oligonucleotide
actagtattgcctatgtgcagtgctcgtgtggctgtcttgcaagtagagtgtcgagtgat

SEQ ID NO: 187249 - DNA, 60 bp, Artificial
  Synthetic oligonucleotide
actatggatcaggtatattcgagccttctaaaactgcaagacgattatttgctgcactta

SEQ ID NO: 187250 - DNA, 51 bp, Artificial
  Synthetic oligonucleotide
gaaatactgaaccccaagttaaaaccctccttcggctgtcgctaataaaaa

SEQ ID NO: 187251 - DNA, 59 bp, Artificial
  Synthetic oligonucleotide
cgttggggtaacctatagcaagcttgtgtacactgattcgcttcagctggatttattta

SEQ ID NO: 187252 - DNA, 60 bp, Artificial
  Synthetic oligonucleotide
actatttctggttcttgactgctagctggatgcaaaaggatgccaattactcggtggccg

SEQ ID NO: 187253 - DNA, 56 bp, Artificial
  Synthetic oligonucleotide
acattcgaatttgtcgttcactggcacgactaccccaatatgccgtttctaactta

SEQ ID NO: 187254 - DNA, 53 bp, Artificial
  Synthetic oligonucleotide
actctaaaacgatgttccgcttgttaaaacaattccgaaccaaaggatatgcc

SEQ ID NO: 187255 - DNA, 60 bp, Artificial
  Synthetic oligonucleotide
agtggatgttcgagagaatgtgcaaggtagcagtgcaagtcaaccaaaaacagtagatgt

SEQ ID NO: 187256 - DNA, 59 bp, Artificial
  Synthetic oligonucleotide
atagtgtttcctgcaaatcgtgtagctgacaaagttttcgaccagctcactcctttcta

SEQ ID NO: 187257 - DNA, 51 bp, Artificial
  Synthetic oligonucleotide
accgcaccctttgaaaagggcgcccccaaacttcgctaacgctaggttggc

SEQ ID NO: 187258 - DNA, 55 bp, Artificial
  Synthetic oligonucleotide
acctttacggaaactacttgtactagctccgtaactcatactcattatacgaata

SEQ ID NO: 187259 - DNA, 56 bp, Artificial
  Synthetic oligonucleotide
agccactgtttggaccaccataaccgaagttaataccgcctgccgctaaccagcga

SEQ ID NO: 187260 - DNA, 56 bp, Artificial
  Synthetic oligonucleotide
aagcgataaatacgattctgaccgaggcaaccaaattaggtgtgacaaaaatcgaa

SEQ ID NO: 187261 - DNA, 60 bp, Artificial
  Synthetic oligonucleotide
aaatcgtgcacttattgttgcttaggaggatgctcatgtacaaatcacaaccctacgtcc

SEQ ID NO: 187262 - DNA, 60 bp, Artificial
  Synthetic oligonucleotide
cgtgctagctttctgctagccggtgctagtaatgtgctaatttggtgctaaaaacctgct

SEQ ID NO: 187263 - DNA, 55 bp, Artificial
  Synthetic oligonucleotide
agttgtcggtcttcgagttaccaacggtaaccctcataccgaacggcattcatca

SEQ ID NO: 187264 - DNA, 58 bp, Artificial
  Synthetic oligonucleotide
aaccttatgtagatattcaaattttcgaagatgcacttcctctgttaaatgacttaga

SEQ ID NO: 187265 - DNA, 59 bp, Artificial
  Synthetic oligonucleotide
aaagcatttagccgtatcaaacaacctctgacagaggttgagatttttcatactgatcg

SEQ ID NO: 187266 - DNA, 59 bp, Artificial
  Synthetic oligonucleotide
acaagccctcatgccaatgtccgttctcataatgggctttaacatgggtatcgtttgaa

SEQ ID NO: 187267 - DNA, 56 bp, Artificial
  Synthetic oligonucleotide
agttggacagacgagaacgaacctataaccaacagcgaaccaacgagctacgaaga

SEQ ID NO: 187268 - DNA, 57 bp, Artificial
  Synthetic oligonucleotide
agtacgcaatatggacacgtggcttatgtgggtgcgaaacgttcttaattgaaaaga

SEQ ID NO: 187269 - DNA, 58 bp, Artificial
  Synthetic oligonucleotide
aggtgaagcgttgttaaaatacatcaagtcaaaattcgcccgtgcgatgctaggtgta

SEQ ID NO: 187270 - DNA, 52 bp, Artificial
  Synthetic oligonucleotide
aaccaatttatgggcgttctggtaagttagaaacggcatattggggtagtcg

SEQ ID NO: 187271 - DNA, 55 bp, Artificial
  Synthetic oligonucleotide
aattctaaatattctgttcggtattcaatgttcatcgtacccgttttactacata

SEQ ID NO: 187272 - DNA, 57 bp, Artificial
  Synthetic oligonucleotide
aagaattcaagcaacaaatcgtcaatctttacttagctggaaagccacgtgtagaaa

SEQ ID NO: 187273 - DNA, 58 bp, Artificial
  Synthetic oligonucleotide
cggttctgttggctccgttggtgtaataggtggctctacagggtctacaggtggctca

SEQ ID NO: 187274 - DNA, 52 bp, Artificial
  Synthetic oligonucleotide
actacctacctgcggatcggggttatcgggttgcaccgtcgttgttcctggt

SEQ ID NO: 187275 - DNA, 56 bp, Artificial
  Synthetic oligonucleotide
acgagtatttctcacaataatcgtgaattaacggacagccaaaaaaataatgattg

SEQ ID NO: 187276 - DNA, 53 bp, Artificial
  Synthetic oligonucleotide
actagccttggcaacagcgaaacaaaaagtggtagaattaaccgagacccaaa

SEQ ID NO: 187277 - DNA, 57 bp, Artificial
  Synthetic oligonucleotide
aggtatttggctagcaaatatagagcttgccaaacccttttagtgagctttactcat

SEQ ID NO: 187278 - DNA, 50 bp, Artificial
  Synthetic oligonucleotide
ataaaaactaaatgtcggttcataaaaactaaatgtcggttcataaaaac

SEQ ID NO: 187279 - DNA, 58 bp, Artificial
  Synthetic oligonucleotide
ataaagcgtattggagtgccttacctttacaatctaatgaagtgcctgaatacacgta

SEQ ID NO: 187280 - DNA, 58 bp, Artificial
  Synthetic oligonucleotide
aaacctgatcttcaggctggactttataaatacggcgagattggatttggtccattca

SEQ ID NO: 187281 - DNA, 53 bp, Artificial
  Synthetic oligonucleotide
aaacatgattgaaagcttaatttcgttgattatcgccccactttttgtgggtt

SEQ ID NO: 187282 - DNA, 57 bp, Artificial
  Synthetic oligonucleotide
aaagtattctttagctggtgtcacgttgcctaaaaagtcttatctactgatgaacag

SEQ ID NO: 187283 - DNA, 60 bp, Artificial
  Synthetic oligonucleotide
agtcagataaaaagttgttggtaccatctgctcttccttagagccacgtggcacacagcc

SEQ ID NO: 187284 - DNA, 56 bp, Artificial
  Synthetic oligonucleotide
cggtagttatgcaatgaaggtgttttaacgttcgcttttacatgattaaatggtga

SEQ ID NO: 187285 - DNA, 57 bp, Artificial
  Synthetic oligonucleotide
atatggaaacaagaatgggcaacagcctatttttacaccggttgtagcttagcaata

SEQ ID NO: 187286 - DNA, 58 bp, Artificial
  Synthetic oligonucleotide
atatgggcaacgaaatttggtgcttttttcgatcgggatcaatacagcgtatcgaatc

SEQ ID NO: 187287 - DNA, 56 bp, Artificial
  Synthetic oligonucleotide
acgtcataatcagttactatgtagtaaaacgggtacgatgaacattgaataccgaa

SEQ ID NO: 187288 - DNA, 53 bp, Artificial
  Synthetic oligonucleotide
acggcgaatcggaagataattgggataccgtttttcaatcgttcgttcaacga

SEQ ID NO: 187289 - DNA, 54 bp, Artificial
  Synthetic oligonucleotide
aagggcaactggttgaacaaggggctcatgacgacctccgttataatcaggggg

SEQ ID NO: 187290 - DNA, 60 bp, Artificial
  Synthetic oligonucleotide
actgcgtatgcagtcttatgtatcatggaggaagttgtatgtcgttaaaaaattatgtct

SEQ ID NO: 187291 - DNA, 60 bp, Artificial
  Synthetic oligonucleotide
aatcattttgaggtgattacatggcaaatgaaattgtgaagtaccatcatgaattaaata

SEQ ID NO: 187292 - DNA, 54 bp, Artificial
  Synthetic oligonucleotide
atcggaagccgtaccatatttaacggtcatacaaatattgacttaaacaatccg

SEQ ID NO: 187293 - DNA, 56 bp, Artificial
  Synthetic oligonucleotide
accgtatgtccaggtgacgtgagagggcgattgatttcgccctactcgattaaaag

SEQ ID NO: 187294 - DNA, 56 bp, Artificial
  Synthetic oligonucleotide
acggcgtctacaaagggcggcccaaattatacagtgcagacgcaaaagatccccaa

SEQ ID NO: 187295 - DNA, 52 bp, Artificial
  Synthetic oligonucleotide
cgggacttatcatagccggcccctattttgaacttaattgggggccaaatta

SEQ ID NO: 187296 - DNA, 54 bp, Artificial
  Synthetic oligonucleotide
agacttacttcgtgtcaaagattctaaaggggaagacattacgaaccagttcac

SEQ ID NO: 187297 - DNA, 55 bp, Artificial
  Synthetic oligonucleotide
aagggggagcttgcgctcctttgacaagcggttatttgcaccaaatacggaggta

SEQ ID NO: 187298 - DNA, 58 bp, Artificial
  Synthetic oligonucleotide
accgccaattgagccacctgtagaccctgtagagccacctattacaccaacggagcca

SEQ ID NO: 187299 - DNA, 59 bp, Artificial
  Synthetic oligonucleotide
atcgtattcgtaaaatgagtggagatataaccatatctcattactacactaaagcaaac

SEQ ID NO: 187300 - DNA, 57 bp, Artificial
  Synthetic oligonucleotide
atcgtgagtggcgtaatgcagggacttactcttcccacgttgtaggtgacgggggca

SEQ ID NO: 187301 - DNA, 56 bp, Artificial
  Synthetic oligonucleotide
aagtccgcacctgcatttgaatattgttcctgttgctgaagggtataaacggggtg

SEQ ID NO: 187302 - DNA, 60 bp, Artificial
  Synthetic oligonucleotide
aatacatttaccacgaacgctaatgcttcacaggctatcccatcaagaggcgacaaacca

SEQ ID NO: 187303 - DNA, 57 bp, Artificial
  Synthetic oligonucleotide
aaatttagatccattaacaacagaacttgttgttatgagtcgaggtgacaatactgg

SEQ ID NO: 187304 - DNA, 56 bp, Artificial
  Synthetic oligonucleotide
aaattctcggctattcttgtggagaacataaagatgccgttctagtaaaaaaagca

SEQ ID NO: 187305 - DNA, 59 bp, Artificial
  Synthetic oligonucleotide
agcacatggtcaagcattcctagataagtgttacgatatcaacgacgaaatttgtttaa

SEQ ID NO: 187306 - DNA, 60 bp, Artificial
  Synthetic oligonucleotide
ggatcggttagaaatgtatggtgagaatggtatccaattaaatgattatgtagatcgaag

SEQ ID NO: 187307 - DNA, 54 bp, Artificial
  Synthetic oligonucleotide
acatttgctaaaaaatggccagtccattttttggccaacctagcgttagcgaag

SEQ ID NO: 187308 - DNA, 59 bp, Artificial
  Synthetic oligonucleotide
agatacttctgttgcgaaaaaacattgtttcatcagtgagaaagtccgctggtctgtcg

SEQ ID NO: 187309 - DNA, 54 bp, Artificial
  Synthetic oligonucleotide
acgctaaaacgacgtgggtatcgtataagaattgctaacgtagtcaatccttat

SEQ ID NO: 187310 - DNA, 52 bp, Artificial
  Synthetic oligonucleotide
aaaaggcacactaaaacctccaaaagagtttaccggtcgctatggtcttaca

SEQ ID NO: 187311 - DNA, 60 bp, Artificial
  Synthetic oligonucleotide
atataccattgtgattagagatggcgctaagtgggctgatggtacacaaataactgccag

SEQ ID NO: 187312 - DNA, 55 bp, Artificial
  Synthetic oligonucleotide
cgctacttttcgtgctgcgtcattcgtataaaatcttagtccgattaaacgtacc

SEQ ID NO: 187313 - DNA, 59 bp, Artificial
  Synthetic oligonucleotide
agtgtattggaattaaggtagattgacaaaagagtgatcaaataggtatacttcattca

SEQ ID NO: 187314 - DNA, 59 bp, Artificial
  Synthetic oligonucleotide
gagtggagatataaccatatctcattactacactaaagcaaacggtaactcattgaatg

SEQ ID NO: 187315 - DNA, 59 bp, Artificial
  Synthetic oligonucleotide
cgattcttacaaaagtattccagatggggtccgatgagtctcacaggcacgtgattcct

SEQ ID NO: 187316 - DNA, 59 bp, Artificial
  Synthetic oligonucleotide
ctgcaccccaacttcccctaagtgtgaaagctgtccgcttcagcaatattgtgcggcct

SEQ ID NO: 187317 - DNA, 54 bp, Artificial
  Synthetic oligonucleotide
ggatagcgaaaaggagcctatcctttttgctatcctactaccctccttttacta

SEQ ID NO: 187318 - DNA, 59 bp, Artificial
  Synthetic oligonucleotide
gtagaaatcattcgagaatatgaactaacggcttcagcatttgacaaatgggtaaagca

SEQ ID NO: 187319 - DNA, 59 bp, Artificial
  Synthetic oligonucleotide
ggagcatagcctgtagaaattagtgttaaatatccgtggtatcgacgcttaactgctgt

SEQ ID NO: 187320 - DNA, 59 bp, Artificial
  Synthetic oligonucleotide
catatcgtggaacaactgggtgcagtgcagaccccggcaaaaggcgagctgaatgtagc

SEQ ID NO: 187321 - DNA, 57 bp, Artificial
  Synthetic oligonucleotide
aagttacagacgaggcgatggatccaaaacctgggaagttgccgtcaagcggcactg

SEQ ID NO: 187322 - DNA, 53 bp, Artificial
  Synthetic oligonucleotide
tcttccaaagcgaaagcccgaaccgcttcataagaaggtccgccgggaactaa

SEQ ID NO: 187323 - DNA, 59 bp, Artificial
  Synthetic oligonucleotide
gctacattcagctcgccttttgccggggtctgcactgcacccagttgttccacgatatg

SEQ ID NO: 187324 - DNA, 59 bp, Artificial
  Synthetic oligonucleotide
taagcaagcggctgcaaccaacgcaagtcctcatcgaaattccccataacgagtgcagg

SEQ ID NO: 187325 - DNA, 58 bp, Artificial
  Synthetic oligonucleotide
actaggtttaggtcagtggacggatacagctgatggtggtcgtaggcatactttgtta

SEQ ID NO: 187326 - DNA, 59 bp, Artificial
  Synthetic oligonucleotide
acatgctaccaagggagatactattcagcgatatatgaccttattaaaccttaatgatg

SEQ ID NO: 187327 - DNA, 59 bp, Artificial
  Synthetic oligonucleotide
gaggtgattacatggcaaatgaaattgtgaagtaccatcatgaattaaatacgattccc

SEQ ID NO: 187328 - DNA, 59 bp, Artificial
  Synthetic oligonucleotide
ggataatttgtcacactatgggggataaattgtcacactatgggggataaattgtcaca

SEQ ID NO: 187329 - DNA, 53 bp, Artificial
  Synthetic oligonucleotide
ccttaatggtttttctgaactgtctccagtctctgtagttttgtttataaagt

SEQ ID NO: 187330 - DNA, 58 bp, Artificial
  Synthetic oligonucleotide
aacattcttagcgtttcgtctcgaactacagtatctaatcgtgataagtcaagtggct

SEQ ID NO: 187331 - DNA, 55 bp, Artificial
  Synthetic oligonucleotide
cataaagaacttgtatgctggggtgttgccctttattttcaatattagttaagta

SEQ ID NO: 187332 - DNA, 58 bp, Artificial
  Synthetic oligonucleotide
gagattctgtttttttcgacctcgatataatcagcgtctattccttctatagcgtccc

SEQ ID NO: 187333 - DNA, 58 bp, Artificial
  Synthetic oligonucleotide
agatgattagcagataaccatgcaagttgtcctagcccacacgtctatccgcaagacg

SEQ ID NO: 187334 - DNA, 58 bp, Artificial
  Synthetic oligonucleotide
taaaaccataaagctcacagaacacttccacagataatcccaaacgaccaatgataaa

SEQ ID NO: 187335 - DNA, 56 bp, Artificial
  Synthetic oligonucleotide
gcaagccgatttgagtgatcgtgtttaaattattttaagggagtttagagagaatg

SEQ ID NO: 187336 - DNA, 58 bp, Artificial
  Synthetic oligonucleotide
ttgacgagtattacaatagaggaattcaagaggctccgtgatggatttgagtatccag

SEQ ID NO: 187337 - DNA, 55 bp, Artificial
  Synthetic oligonucleotide
cgtcgctggttagcggcaggcggtattaacttcggttatggtggtccaaacagtg

SEQ ID NO: 187338 - DNA, 58 bp, Artificial
  Synthetic oligonucleotide
tgacacagcattccggttggcccccttttcgtatgcacatcataaccacccttcaaaa

SEQ ID NO: 187339 - DNA, 60 bp, Artificial; identical to SEQ ID NO: 2993
  Synthetic oligonucleotide

SEQ ID NO: 187340 - DNA, 58 bp, Artificial
  Synthetic oligonucleotide
gtttgatagagaacaaccaaccgctgtctttgtaatgctaagtgacgcggatacgtct

SEQ ID NO: 187341 - DNA, 58 bp, Artificial
  Synthetic oligonucleotide
cctgataaaataagtcaagtcattctgaatcagcgatctaatggaagcgagatatatc

SEQ ID NO: 187342 - DNA, 58 bp, Artificial
  Synthetic oligonucleotide
tgaccgaaaaacggctgaacaactttatcatgcttcgatacaatggttggaacaacga

SEQ ID NO: 187343 - DNA, 58 bp, Artificial
  Synthetic oligonucleotide
tataaagggtgctagtttggtgctagttactgctaaatacgtgctagtttaggtgcta

SEQ ID NO: 187344 - DNA, 58 bp, Artificial
  Synthetic oligonucleotide
cgtgggaagtattttgtacgtgtattacaccgacaaatgttagcgcagatgatcgtta

SEQ ID NO: 187345 - DNA, 54 bp, Artificial
  Synthetic oligonucleotide
cggaaaaggtatccgatcaacttttaatataagtagttggtagctacttacata

SEQ ID NO: 187346 - DNA, 54 bp, Artificial
  Synthetic oligonucleotide
ccgcctttaaaattatcaatcggtatatccgttttgtagataaagacgattcca

SEQ ID NO: 187347 - DNA, 58 bp, Artificial
  Synthetic oligonucleotide
cagaccctgcttacctcatgaagttacaggccacatacaacagcttaggcaaacagtt

SEQ ID NO: 187348 - DNA, 58 bp, Artificial
  Synthetic oligonucleotide
gaatcatttgcgagagtcatttgcggaatcggcagacgatttgaaacgagaattagat

SEQ ID NO: 187349 - DNA, 58 bp, Artificial
  Synthetic oligonucleotide
gttatagcttcaacttccttatacgatttacctgaagtaagcagttcatatgcgtgcc

SEQ ID NO: 187350 - DNA, 60 bp, Artificial
  Synthetic oligonucleotide
ggaatagagatgacgctatctatcacttattcttagatgaggcgtacaagatcgcagaga

SEQ ID NO: 187351 - DNA, 52 bp, Artificial
  Synthetic oligonucleotide
gataataagtgtttccttcgttatttactcattaacaagaaattttttccca

SEQ ID NO: 187352 - DNA, 57 bp, Artificial
  Synthetic oligonucleotide
cattgaaggattttataaccgaaatcgaatccatagctcgattcactatctaacccc

SEQ ID NO: 187353 - DNA, 56 bp, Artificial
  Synthetic oligonucleotide
ccaacgctgaaatcgcaacagtgtaaaaaaagccctcctattctcagtaggagggc

SEQ ID NO: 187354 - DNA, 57 bp, Artificial
  Synthetic oligonucleotide
gctgacattagaattggatttatacgaatgctatctgctgttcttacactacttcct

SEQ ID NO: 187355 - DNA, 57 bp, Artificial
  Synthetic oligonucleotide
gctttctatgtactagacaagcctgcatacgtgacgaagaaatcaaattttaaagtg

SEQ ID NO: 187356 - DNA, 57 bp, Artificial
  Synthetic oligonucleotide
acgtatgctgatgaagccagaatgtttacgaaaggtcattcggaggacaatttacgt

SEQ ID NO: 187357 - DNA, 57 bp, Artificial
  Synthetic oligonucleotide
tggatcactaaataaatccagctgaagcgaatcggtgtacacaagcttgctataggt

SEQ ID NO: 187358 - DNA, 54 bp, Artificial
  Synthetic oligonucleotide
cctgcaacacgtttagaaacagtgcagtcccgcttaacggaaacaaccgaggcc

SEQ ID NO: 187359 - DNA, 57 bp, Artificial
  Synthetic oligonucleotide
gagatacaatagacaatgagtcatataaagaggtggcttcagtggtagcttataaac

SEQ ID NO: 187360 - DNA, 57 bp, Artificial
  Synthetic oligonucleotide
ttgtctcggagcgattccttttaccaacagctcagtccattccgctgtataaggcag

SEQ ID NO: 187361 - DNA, 52 bp, Artificial
  Synthetic oligonucleotide
cttgcttgttacggcattaggtggggcgttggtttggttagtaccttgggcg

SEQ ID NO: 187362 - DNA, 60 bp, Artificial
  Synthetic oligonucleotide
gctttaagtaaccaacatgacatcgctatttatttcgctgatccagggactccttcgcaa

SEQ ID NO: 187363 - DNA, 53 bp, Artificial
  Synthetic oligonucleotide
agagtacagtagcaagctgggtaacaagaaaccgtaccgtaaagacgttgcct

SEQ ID NO: 187364 - DNA, 55 bp, Artificial
  Synthetic oligonucleotide
tctattaggcacgtttttccagttggacgaattttatcggtggttagttgcctca

SEQ ID NO: 187365 - DNA, 57 bp, Artificial
  Synthetic oligonucleotide
ctctagcaagccataatatgggcgttgaagggcaaatgttcacgtctattcataagt

SEQ ID NO: 187366 - DNA, 57 bp, Artificial
  Synthetic oligonucleotide
aagcaacacattcacattgaagacgaacgagcgtattttactcatgacaacttatcc

SEQ ID NO: 187367 - DNA, 57 bp, Artificial
  Synthetic oligonucleotide
ataatgccgtagctgaatcaacttataagtcgttgaaagtagaatttgtctatcaat

SEQ ID NO: 187368 - DNA, 57 bp, Artificial
  Synthetic oligonucleotide
gcagtccggaagattgcgtgaggaacttgctaacttgcttaatgtgagggggcaagt

SEQ ID NO: 187369 - DNA, 57 bp, Artificial
  Synthetic oligonucleotide
acgacagtttggaattgtcctatcaagtgttacgcgataagacaagaacaatcagaa

SEQ ID NO: 187370 - DNA, 57 bp, Artificial
  Synthetic oligonucleotide
atggtcaaggatatgcattgctatacaatcgtggtagcgctaatactgatagtgccc

SEQ ID NO: 187371 - DNA, 57 bp, Artificial
  Synthetic oligonucleotide
ctggtgtaaaggaattaaccctagggtgagtggtagtgaagcacttgatgggatgta

SEQ ID NO: 187372 - DNA, 57 bp, Artificial
  Synthetic oligonucleotide
gccgcatgcatttaacgcgcaacgggattccatcattagccatcacggtgcctgtta

SEQ ID NO: 187373 - DNA, 60 bp, Artificial
  Synthetic oligonucleotide
gctggataatgttcattctaatcgactccatttattatcctggtaaaattcgatatgacg

SEQ ID NO: 187374 - DNA, 52 bp, Artificial
  Synthetic oligonucleotide
tcaccacaaaagtttaaaagatccacgtgggttttatttaggaactacgtca

SEQ ID NO: 187375 - DNA, 57 bp, Artificial
  Synthetic oligonucleotide
atcgttcccgcaatgcccaacatgttagttgctatgctagacgttaggttcataatc

SEQ ID NO: 187376 - DNA, 57 bp, Artificial
  Synthetic oligonucleotide
ttaaattcaagtattatcgagagcctaaaaggaatcgagacgatcaaggcctacagt

SEQ ID NO: 187377 - DNA, 57 bp, Artificial
  Synthetic oligonucleotide
tgctctagtccatcttgcgattcagttaggattctttgtacctctagaggactaaag

SEQ ID NO: 187378 - DNA, 55 bp, Artificial
  Synthetic oligonucleotide
cgacgaaatacgtcatatcgaattttaccaggataataaatggggtcgattagaa

SEQ ID NO: 187379 - DNA, 57 bp, Artificial
  Synthetic oligonucleotide
gttagcaactaatgtcattgaacacgagaaaagaacgcataaaatgatggaacatgg

SEQ ID NO: 187380 - DNA, 57 bp, Artificial
  Synthetic oligonucleotide
cgaatgaatattttaacgccttatttcctaatggtagatcattctttgactgatagt

SEQ ID NO: 187381 - DNA, 56 bp, Artificial
  Synthetic oligonucleotide
gaagaactgacttattgagcacatttactagcagaaacaagatatgagagaggttg

SEQ ID NO: 187382 - DNA, 56 bp, Artificial
  Synthetic oligonucleotide
gttgcagaaagtaggtaaaagttttgagagttgcatacatacgtgtctcatcgatc

SEQ ID NO: 187383 - DNA, 56 bp, Artificial
  Synthetic oligonucleotide
agagagcgtgtctactcgaatatagtggtgattaacatagattaggcgatcatatt

SEQ ID NO: 187384 - DNA, 60 bp, Artificial
  Synthetic oligonucleotide
gctggaagtttcagcaacagatgtttacgccatcagtaatgctagctatacaaatgagtt

SEQ ID NO: 187385 - DNA, 56 bp, Artificial
  Synthetic oligonucleotide
cttttgtctgattcagcaatagtcgtccaatatttgagtgctgacattagaattgg

SEQ ID NO: 187386 - DNA, 56 bp, Artificial
  Synthetic oligonucleotide
tcgcaggttgagggtgcgtttcgtgtgctttctttcgtataactgggcgccctcat

SEQ ID NO: 187387 - DNA, 56 bp, Artificial
  Synthetic oligonucleotide
acgtccgagtccaacgagtccgtgtgccgaagcacacattgaacagtgttcgccgg

SEQ ID NO: 187388 - DNA, 56 bp, Artificial
  Synthetic oligonucleotide
ctataagcaacctgatatagacaagagagttattaagcctatccgtcaagaactaa

SEQ ID NO: 187389 - DNA, 56 bp, Artificial
  Synthetic oligonucleotide
gagtggctggctagataagttggaattaatcggtgttcctatcgctgttagccctc

SEQ ID NO: 187390 - DNA, 56 bp, Artificial
  Synthetic oligonucleotide
actctagaaatttcggttgctgcagacgtcatttctttagaaatgttataacgctt

SEQ ID NO: 187391 - DNA, 56 bp, Artificial
  Synthetic oligonucleotide
agtagctttatatcgtcgatctactgtagaaggcttaacatcactattatctgtgc

SEQ ID NO: 187392 - DNA, 56 bp, Artificial
  Synthetic oligonucleotide
cgtgtcttggaagattcagatgtattaacacactggactcctaacgtgtattcatg

SEQ ID NO: 187393 - DNA, 56 bp, Artificial
  Synthetic oligonucleotide
gcactagatcgtttaagaactgcggtagatgtcgcttggaagaagccttacgattt

SEQ ID NO: 187394 - DNA, 55 bp, Artificial
  Synthetic oligonucleotide
aattacttgggcgtcagatacgttcgtaaaaagtgttactagctctgatttacga

SEQ ID NO: 187395 - DNA, 57 bp, Artificial
  Synthetic oligonucleotide
gctacggaaaaatgaatcatttagatattccgtttcaacaattacgtgaacacgtca

SEQ ID NO: 187396 - DNA, 56 bp, Artificial
  Synthetic oligonucleotide
tacgtccattccgcaacaaatccttcattatgctttgcttcgttgtctaaggctag

SEQ ID NO: 187397 - DNA, 52 bp, Artificial
  Synthetic oligonucleotide
aattcgcctaacccacgggcaaaggctaacacgccaccggccaagagaccgt

SEQ ID NO: 187398 - DNA, 56 bp, Artificial
  Synthetic oligonucleotide
cgccacctgcaaaagcatctccgccacctactcgatccacgattggggtgattcta

SEQ ID NO: 187399 - DNA, 56 bp, Artificial
  Synthetic oligonucleotide
cgatatggttagtaagtaataactgaatacggtttctcaatgacagcgtaatgacc

SEQ ID NO: 187400 - DNA, 56 bp, Artificial
  Synthetic oligonucleotide
gcctgcgcccacgagataggccatcacgacacgcggtaaccgaacattccagatga

SEQ ID NO: 187401 - DNA, 56 bp, Artificial
  Synthetic oligonucleotide
gcgactgaatactttgaagaacgagatcagtatttaaaaggttatgagagtgatcg

SEQ ID NO: 187402 - DNA, 56 bp, Artificial
  Synthetic oligonucleotide
gtagcgttccacaggaagcccgcaggctttaataagctgtatgacaaccggcagac

SEQ ID NO: 187403 - DNA, 56 bp, Artificial
  Synthetic oligonucleotide
ccactcgtggccttagttggcggcttgctagcggctgttgggattttggtaatcgc

SEQ ID NO: 187404 - DNA, 56 bp, Artificial
  Synthetic oligonucleotide
atgatattaccgtatattgatgttaacgttacatacaccttgcctataagggatct

SEQ ID NO: 187405 - DNA, 56 bp, Artificial
  Synthetic oligonucleotide
catggagcacgccacctgcaaaagcatctccgccacctactcgatccacgattggg

SEQ ID NO: 187406 - DNA, 60 bp, Artificial
  Synthetic oligonucleotide
gcggttttgtcaggtcactatgttgtaacgacacttcatgcggttaatgcacgtgcgata

SEQ ID NO: 187407 - DNA, 56 bp, Artificial
  Synthetic oligonucleotide
caccagctggaggtaatgatcaagcagcggacgatacgggcgcaccagaagaacct

SEQ ID NO: 187408 - DNA, 54 bp, Artificial
  Synthetic oligonucleotide
ttcttttacgacgtttgtgtacatcgcgtttatctttatctgggtggcgaaagg

SEQ ID NO: 187409 - DNA, 56 bp, Artificial
  Synthetic oligonucleotide
gggattggaaaacaggtcatgtatggactatatgccattaccaattttatttggac

SEQ ID NO: 187410 - DNA, 56 bp, Artificial
  Synthetic oligonucleotide
gtggcgaatttgattatggtgtaaggggagcagaccatgaaatactaatgtttgat

SEQ ID NO: 187411 - DNA, 55 bp, Artificial
  Synthetic oligonucleotide
gatctcgattctctgtatggctatatgtacgatcagctagtcagtgccaatgtcc

SEQ ID NO: 187412 - DNA, 55 bp, Artificial
  Synthetic oligonucleotide
gatctatggcacattctgttgggaaggttgtagtaagtaaagtattatccatggg

SEQ ID NO: 187413 - DNA, 54 bp, Artificial
  Synthetic oligonucleotide
gatcctgtgaactaccgtaaatagtatctaagcgagtaggggttagttcctccg

SEQ ID NO: 187414 - DNA, 55 bp, Artificial
  Synthetic oligonucleotide
gatcccgaataattttgagatcgagcaatttacagtgaccgctgggatgcgccac

SEQ ID NO: 187415 - DNA, 55 bp, Artificial
  Synthetic oligonucleotide
gatcccctttattcacttgcaatgaagcctcttcatacaagaccttttcgccaaa

SEQ ID NO: 187416 - DNA, 55 bp, Artificial
  Synthetic oligonucleotide
gatctttaagacatgtttagttgttttagggtatcttggttaggattgcgccttg

SEQ ID NO: 187417 - DNA, 59 bp, Artificial
  Synthetic oligonucleotide
gcctatttttccaaagaagattttcatgagttgctagatattcctaaaagctataagca

SEQ ID NO: 187418 - DNA, 55 bp, Artificial
  Synthetic oligonucleotide
acccttcgacgccagagaagccacaagacctagccaacactaggctccttcacgt

SEQ ID NO: 187419 - DNA, 55 bp, Artificial
  Synthetic oligonucleotide
gtggactagcaaagctatccaaactttcatgaaccatctcatgccaatcagttgc

SEQ ID NO: 187420 - DNA, 55 bp, Artificial
  Synthetic oligonucleotide
gatatgtggcgggatgtcaccggtttggatggcattaacgaggatggcaccgatg

SEQ ID NO: 187421 - DNA, 55 bp, Artificial
  Synthetic oligonucleotide
ggtggaacgccgttaggaaatatggtcataaagcttggtttggatagttctgatt

SEQ ID NO: 187422 - DNA, 55 bp, Artificial
  Synthetic oligonucleotide
gatatcgacctgaagttagtatgaagaaaacagatttgcaagcggctgttacttt

SEQ ID NO: 187423 - DNA, 55 bp, Artificial
  Synthetic oligonucleotide
aatgctttcctgtaggacactgacggagattaccagtctcccgagccttacaggg

SEQ ID NO: 187424 - DNA, 55 bp, Artificial
  Synthetic oligonucleotide
gatagcctgtgtatcaaatgccgtcataggcgcttctatgactcctgtgtctgag

SEQ ID NO: 187425 - DNA, 55 bp, Artificial
  Synthetic oligonucleotide
ggtgtggacgaaggtattgttttaagagcgggccaacctagcctgtcagccccaa

SEQ ID NO: 187426 - DNA, 55 bp, Artificial
  Synthetic oligonucleotide
gatacctgacaggacgcccaattataccagttagttttgtacaacataggaaccc

SEQ ID NO: 187427 - DNA, 55 bp, Artificial
  Synthetic oligonucleotide
tagtctattcgctcttgaatggattgaccttgtctgtgacactgatgatctatga

SEQ ID NO: 187428 - DNA, 51 bp, Artificial
  Synthetic oligonucleotide
gccgtacaggcgacctttttcaagcaacgttcgggggattgggggataccc

SEQ ID NO: 187429 - DNA, 55 bp, Artificial
  Synthetic oligonucleotide
ggtgtggagctaggaacatggacgagccctggagattttgctgatatccgcggta

SEQ ID NO: 187430 - DNA, 55 bp, Artificial
  Synthetic oligonucleotide
gataaatagtatggttggagctagcgaggctgcgatttatagtatcgcttacact

SEQ ID NO: 187431 - DNA, 55 bp, Artificial
  Synthetic oligonucleotide
gagtgtccaagtagaagctgtcgtagaaggggaagtccttcccattaagttggta

SEQ ID NO: 187432 - DNA, 55 bp, Artificial
  Synthetic oligonucleotide
ggttattaatgggttcgttgtggcaagtcttggtaatgtttggtatgcattgggg

SEQ ID NO: 187433 - DNA, 55 bp, Artificial
  Synthetic oligonucleotide
gtggaacatttggactaatcagcatgatacgtgctacgattaccccatcgcctac

SEQ ID NO: 187434 - DNA, 55 bp, Artificial
  Synthetic oligonucleotide
ggtttatgggcaggtttgaccaacatgcgaacttatgcatcggcaactgcagggg

SEQ ID NO: 187435 - DNA, 55 bp, Artificial
  Synthetic oligonucleotide
gagtgaagcgaatcgttggtcggcagctgtccccaacaagctgaaaattacgtta

SEQ ID NO: 187436 - DNA, 55 bp, Artificial
  Synthetic oligonucleotide
gagtctcctttggaaagctggtttgggatactacacttcaaatagatctcttctc

SEQ ID NO: 187437 - DNA, 55 bp, Artificial
  Synthetic oligonucleotide
gtgactcaactgaggtcgggacagaatcgtttagctccgagaaccaagtaggtac

SEQ ID NO: 187438 - DNA, 55 bp, Artificial
  Synthetic oligonucleotide
gagtctaaaggattgacaacgcttgatagtgagcataaacttaatgtacgctagt

SEQ ID NO: 187439 - DNA, 60 bp, Artificial
  Synthetic oligonucleotide
gccattgatctcagttaggagtacaatgttttttgcagaaaacatactcgaataggactg

SEQ ID NO: 187440 - DNA, 55 bp, Artificial
  Synthetic oligonucleotide
gcagacgtagccattcatagagatgatgaaaacaatcctcatgctcacattatgc

SEQ ID NO: 187441 - DNA, 55 bp, Artificial
  Synthetic oligonucleotide
gcagaagcgctcgtggaccgccgtggtcgtacgaagccagaggacgaactaagcg

SEQ ID NO: 187442 - DNA, 55 bp, Artificial
  Synthetic oligonucleotide
gcactttctcccagaccactcgctactttcccagcacctaaaattgtgttgatcg

SEQ ID NO: 187443 - DNA, 55 bp, Artificial
  Synthetic oligonucleotide
gtggggtgtacgtcacttggttaccgtgaaacacttcagctgtctgcaaaagttg

SEQ ID NO: 187444 - DNA, 55 bp, Artificial
  Synthetic oligonucleotide
gtgggagcaaagcgagcactccttttagcgaacaacgtgagcgaagcatttccag

SEQ ID NO: 187445 - DNA, 55 bp, Artificial
  Synthetic oligonucleotide
gcactattaatcactcggttatcacgtaaataggaagcgacgttttcgtcagcta

SEQ ID NO: 187446 - DNA, 55 bp, Artificial
  Synthetic oligonucleotide
ggtcagaggaacatcgtcagaagaatgatacttttcggtctccccatcagcttcc

SEQ ID NO: 187447 - DNA, 55 bp, Artificial
  Synthetic oligonucleotide
acccgcggaaatattaacgcaggttggccatcaacagttaatcgatacatcattg

SEQ ID NO: 187448 - DNA, 55 bp, Artificial
  Synthetic oligonucleotide
tagaccgcagctatagcatgaggggttgcagctgttgctccattcatgaggtcta

SEQ ID NO: 187449 - DNA, 55 bp, Artificial
  Synthetic oligonucleotide
gcacaaggcgcaaattatccgttggcaggagaattcaacagttcttatgtaaccg

SEQ ID NO: 187450 - DNA, 56 bp, Artificial
  Synthetic oligonucleotide
gcactcctagttggatcaattggtagtgtggtttattcggtaaagaactaatggtc

SEQ ID NO: 187451 - DNA, 55 bp, Artificial
  Synthetic oligonucleotide
gcacaacgcgttagtagggtaacagataaactaggattgtcttatgttgcacggg

SEQ ID NO: 187452 - DNA, 55 bp, Artificial
  Synthetic oligonucleotide
gcaatcgttgaatgctgatcattcgtgatacttaagatctttgcaccgtatcgct

SEQ ID NO: 187453 - DNA, 55 bp, Artificial
  Synthetic oligonucleotide
gcaatcgttagcggttcgccatcagcacgaattccttcaagtggcggctgatctg

SEQ ID NO: 187454 - DNA, 55 bp, Artificial
  Synthetic oligonucleotide
gcaagtctagcctcaggaataggcattgttttaggaacgatattaggaacgaatc

SEQ ID NO: 187455 - DNA, 55 bp, Artificial
  Synthetic oligonucleotide
gcaagtaaagctactgcatcaaccgtgttgtatccttctaaaacgccatttgtca

SEQ ID NO: 187456 - DNA, 55 bp, Artificial
  Synthetic oligonucleotide
tagaccgtttggcccatcgggctcatgtgttggatctcagtggtccatcttttcg

SEQ ID NO: 187457 - DNA, 55 bp, Artificial
  Synthetic oligonucleotide
gtggctccagggcgtcggcatgacgttagacttttagcaggttgtactctgatcg

SEQ ID NO: 187458 - DNA, 55 bp, Artificial
  Synthetic oligonucleotide
ggtccgctttgcttagcgccccttgcgcagtcccaatcgtatcgatgacttggtc

SEQ ID NO: 187459 - DNA, 55 bp, Artificial
  Synthetic oligonucleotide
ggtccttcgatctataacccgatcgacaatctggaaaacgccacgaaccgtcgcg

SEQ ID NO: 187460 - DNA, 55 bp, Artificial
  Synthetic oligonucleotide
aatgtaacgcgctgaagtcattatcgcagaccacggctgtgagttggtgcgcctc

SEQ ID NO: 187461 - DNA, 58 bp, Artificial
  Synthetic oligonucleotide
gcaaattttgttccgggtacagccacgcaagcagctatctcggtagccccattaggcg

SEQ ID NO: 187462 - DNA, 55 bp, Artificial
  Synthetic oligonucleotide
ggtcgaatggacttacctacacttactatttctgctagtagcggttggttagatc

SEQ ID NO: 187463 - DNA, 55 bp, Artificial
  Synthetic oligonucleotide
ggtcggcgaccagattatgacagatattcggggagctaacgcagcgggtatacgc

SEQ ID NO: 187464 - DNA, 54 bp, Artificial
  Synthetic oligonucleotide
gattttattctacgttgtcgggttatccagcttgcaaccgttccttgtgggtag

SEQ ID NO: 187465 - DNA, 55 bp, Artificial
  Synthetic oligonucleotide
tagccaaacaagcgggacggtataaaggacgtccgacagagtatgcgccaaattc

SEQ ID NO: 187466 - DNA, 55 bp, Artificial
  Synthetic oligonucleotide
gattgagggccaagcgcatgccccagcgaagtatagtaagtttgtctactctact

SEQ ID NO: 187467 - DNA, 55 bp, Artificial
  Synthetic oligonucleotide
tagccagtagcgaaaggctcagtgtagatttagaatcggttatccagtcctacaa

SEQ ID NO: 187468 - DNA, 55 bp, Artificial
  Synthetic oligonucleotide
aatgtaaccaacctaccaacattaccagaaaggaccaccgtaacagatgtcactc

SEQ ID NO: 187469 - DNA, 54 bp, Artificial
  Synthetic oligonucleotide
ggtgaagggtcccgacaaagggccactaaactgatagctgctttagaaaccgaa

SEQ ID NO: 187470 - DNA, 55 bp, Artificial
  Synthetic oligonucleotide
gattagtggccacccaaactttgtcactagttttgcgattgctcccatgtactaa

SEQ ID NO: 187471 - DNA, 55 bp, Artificial
  Synthetic oligonucleotide
gatgacggttggtatcggtgcaccattcgtatttagccatggagcgaatccagca

SEQ ID NO: 187472 - DNA, 54 bp, Artificial
  Synthetic oligonucleotide
cttccttgaaaatcttacttacaagtgtaataccttgagccgtgaacttaagaa

SEQ ID NO: 187473 - DNA, 59 bp, Artificial
  Synthetic oligonucleotide
gcaaataaagttggtaatcataagatacacctccttccagtcgcaagactgtcggatag

SEQ ID NO: 187474 - DNA, 55 bp, Artificial
  Synthetic oligonucleotide
gtcgtacattctgaatcccaatgtaattgtaaggttcagttgtacttagcgttgc

SEQ ID NO: 187475 - DNA, 55 bp, Artificial
  Synthetic oligonucleotide
gaccatagggccgaccaccagtaatgtaggtattaccaggcaacttaaactctcc

SEQ ID NO: 187476 - DNA, 55 bp, Artificial
  Synthetic oligonucleotide
gaccaaataccaacataaggtgcgtctgtgtaacttagtgtaatcccatgttgac

SEQ ID NO: 187477 - DNA, 55 bp, Artificial
  Synthetic oligonucleotide
gacatcgctatttatttcgctgatccagggactccttcgcaacgagcactgaatg

SEQ ID NO: 187478 - DNA, 55 bp, Artificial
  Synthetic oligonucleotide
aatcgaagccatttcgcacgctgactgatactacatccccttcaaatatccccac

SEQ ID NO: 187479 - DNA, 55 bp, Artificial
  Synthetic oligonucleotide
gacaatctcgtatatgtgatgcgcagaataggggaacctccttacagagattccc

SEQ ID NO: 187480 - DNA, 50 bp, Artificial
  Synthetic oligonucleotide
gaattaaaccgaaacgagagccttttccgtaagtggaaagttgtccttcg

SEQ ID NO: 187481 - DNA, 55 bp, Artificial
  Synthetic oligonucleotide
gtcgtacaagatacacccgcaggggttgttcatgggaaggtacaattagacggag

SEQ ID NO: 187482 - DNA, 55 bp, Artificial
  Synthetic oligonucleotide
gtagttgctatcacaggagaaaacggtccagaaatgtttgatgcgttagttgatc

SEQ ID NO: 187483 - DNA, 55 bp, Artificial
  Synthetic oligonucleotide
gtcggtatacgtgcgataagtggcaggagtagtcaaaccgaccgtaatcccattc

SEQ ID NO: 187484 - DNA, 60 bp, Artificial
  Synthetic oligonucleotide
gcaaaggagcgtagcgactgcgcaacgaccggagggagtgaagtagaatgtgagagcttg

SEQ ID NO: 187485 - DNA, 55 bp, Artificial
  Synthetic oligonucleotide
gtcgcgaagaacaggttgtacttttctcaagtaacgaagaaccgtactctcagag

SEQ ID NO: 187486 - DNA, 53 bp, Artificial
  Synthetic oligonucleotide
gaagtcaaaagactggggatttatcaggtatttggtctaagggatttaactac

SEQ ID NO: 187487 - DNA, 55 bp, Artificial
  Synthetic oligonucleotide
gtcaacaacgtggtgttaacgcttctaatcctacaccagttggacagcaggaaag

SEQ ID NO: 187488 - DNA, 55 bp, Artificial
  Synthetic oligonucleotide
gaagtagtttgttcatctgttgtggagacatcccataatcagccgcgatttgact

SEQ ID NO: 187489 - DNA, 55 bp, Artificial
  Synthetic oligonucleotide
gaagctggttcgggctggtcgtgctatgaacgctggggtatatttcgtgacccaa

SEQ ID NO: 187490 - DNA, 55 bp, Artificial
  Synthetic oligonucleotide
gaagattggtcgattagcgataaactagacgtcaaacatgacaaatttagtggcc

SEQ ID NO: 187491 - DNA, 55 bp, Artificial
  Synthetic oligonucleotide
gtcacgattggcattggagataacccaatgttagccaagctggccctagataacg

SEQ ID NO: 187492 - DNA, 55 bp, Artificial
  Synthetic oligonucleotide
gtcactatgttgtaacgacacttcatgcggttaatgcacgtgcgatacctagacg

SEQ ID NO: 187493 - DNA, 55 bp, Artificial
  Synthetic oligonucleotide
gaactgctttcgtggtttctcgtcttaataatccggtatacgccacatacacccc

SEQ ID NO: 187494 - DNA, 55 bp, Artificial
  Synthetic oligonucleotide
gaacgtgggaagccaagaacgtggagcgcacacacgcaaagaagcggatataagg

SEQ ID NO: 187495 - DNA, 56 bp, Artificial
  Synthetic oligonucleotide
gattgtagttaaaaaatatagacctcaaaggtctaataaaccgatcatggataggc

SEQ ID NO: 187496 - DNA, 54 bp, Artificial
  Synthetic oligonucleotide
gaacgagtttctccctatacgtctgcttatactgaagggaatttggaaggttta

SEQ ID NO: 187497 - DNA, 55 bp, Artificial
  Synthetic oligonucleotide
acttgcataagccaacgctaagccaacaggaccatagccacacccaacgtctagc

SEQ ID NO: 187498 - DNA, 55 bp, Artificial
  Synthetic oligonucleotide
gtcctagcgctgcttcaacggacaacaacattgctcctttcgttaaagtaagaag

SEQ ID NO: 187499 - DNA, 55 bp, Artificial
  Synthetic oligonucleotide
aatcagatttctggtcagctttatgctgaacgctctttaggaaatgcaaccgaga

SEQ ID NO: 187500 - DNA, 55 bp, Artificial
  Synthetic oligonucleotide
aatcagacatagtaggtggagtatcgatgagaacaaaatcgtattccggcttgac

SEQ ID NO: 187501 - DNA, 55 bp, Artificial
  Synthetic oligonucleotide
gtcagcttaccggcagagttgacaacattagatacgacgcaaacaacggataaag

SEQ ID NO: 187502 - DNA, 55 bp, Artificial
  Synthetic oligonucleotide
gaaatctgaaaccactagacgcacttgttcacggacttttatagggtagcgcaag

SEQ ID NO: 187503 - DNA, 55 bp, Artificial
  Synthetic oligonucleotide
gtcagggagatacattaagtcgcctaacaaatgatttagatacggttggacaatc

SEQ ID NO: 187504 - DNA, 55 bp, Artificial
  Synthetic oligonucleotide
agaacagtatgattggtgccggttccttagtgacccaaggaacagtgattccgcc

SEQ ID NO: 187505 - DNA, 55 bp, Artificial
  Synthetic oligonucleotide
gtcagtatcgtgtagttgatcctgtgtcctttaaaccaatttatgggcgttctgg

SEQ ID NO: 187506 - DNA, 60 bp, Artificial
  Synthetic oligonucleotide
gatcatccatggcgtaagctgttgcccacttcaatccgaatggtcgatctctgtattgat

SEQ ID NO: 187507 - DNA, 55 bp, Artificial
  Synthetic oligonucleotide
gtaacctacagtgtagaccagctcattacagagggagaaaatacaaagaccgtcc

SEQ ID NO: 187508 - DNA, 55 bp, Artificial
  Synthetic oligonucleotide
gtaacggtgacttacccgactacaaaacagtcaacaataacagtccgctatatgg

SEQ ID NO: 187509 - DNA, 55 bp, Artificial
  Synthetic oligonucleotide
tagttaaaccgccatgtggtagatcagtacggcctaataggtaatccgtcgatac

SEQ ID NO: 187510 - DNA, 55 bp, Artificial
  Synthetic oligonucleotide
gtaaggaatggtgatcgtcgttacttcatgggttgtttggttaggcatgggcagt

SEQ ID NO: 187511 - DNA, 55 bp, Artificial
  Synthetic oligonucleotide
gaggatatttggggttacggacagcaattgattaacgaggttggtgttgattgct

SEQ ID NO: 187512 - DNA, 55 bp, Artificial
  Synthetic oligonucleotide
gaggagattcctttgactcaatccgttagttcaggacgttctgaatggggaagcg

SEQ ID NO: 187513 - DNA, 55 bp, Artificial
  Synthetic oligonucleotide
gtgaccaccagtgtagcttaacacagacatacgacgtttatcgagatcatgggac

SEQ ID NO: 187514 - DNA, 55 bp, Artificial
  Synthetic oligonucleotide
gagcgtcgtgaactaggtgtgatcaatatcggtggaccaggattcatcgagatcg

SEQ ID NO: 187515 - DNA, 55 bp, Artificial
  Synthetic oligonucleotide
aatgcgctttacgcttccgtagtatttgagtatacgtttggtaattcgcagatac

SEQ ID NO: 187516 - DNA, 55 bp, Artificial
  Synthetic oligonucleotide
gtgaaatactggaaacgaggagacatagacaccgcaacacagttaaccaacactt

SEQ ID NO: 187517 - DNA, 60 bp, Artificial
  Synthetic oligonucleotide
gatatgccagtagaagaaccatcatcacgagtagtacgaaaatcatcaagagtaccaatt

SEQ ID NO: 187518 - DNA, 55 bp, Artificial
  Synthetic oligonucleotide
gagagtggacgtgacttagcatattcgattgacttgaaagacggcatttatcaga

SEQ ID NO: 187519 - DNA, 55 bp, Artificial
  Synthetic oligonucleotide
gtctagttgcgacggatgcagtccataagaatcgtgtaccggttttaggaaccgc

SEQ ID NO: 187520 - DNA, 55 bp, Artificial
  Synthetic oligonucleotide
gtactgtcctaaacgcctaaggcacagaaatgtgtcgggtagaacatgattgaag

SEQ ID NO: 187521 - DNA, 55 bp, Artificial
  Synthetic oligonucleotide
gtcgttgtaaattggtggctgcttctttcatcgtcgtttcactgtaacggatcgg

SEQ ID NO: 187522 - DNA, 55 bp, Artificial
  Synthetic oligonucleotide
gtagagcagttttgtgagttgcatggctataagcagagtacagtagcaagctggg

SEQ ID NO: 187523 - DNA, 55 bp, Artificial
  Synthetic oligonucleotide
aatgcacacctaaaggacgactggcggaaaacagttgtcttctaacacattagcc

SEQ ID NO: 187524 - DNA, 55 bp, Artificial
  Synthetic oligonucleotide
gagaatagctgtttggctcgctgatcacaataggcgttgttacgtggcgggtggt

SEQ ID NO: 187525 - DNA, 55 bp, Artificial
  Synthetic oligonucleotide
gtaggcgctctgattaagaacttactcacacgctattcacgcttctttgatttac

SEQ ID NO: 187526 - DNA, 55 bp, Artificial
  Synthetic oligonucleotide
gagaaatgtacccgacttctcagtaatcatggccacactggtaattcaagtgatc

SEQ ID NO: 187527 - DNA, 55 bp, Artificial
  Synthetic oligonucleotide
gtcgttcactggcacgactaccccaatatgccgtttctaacttaccagaacgccc

SEQ ID NO: 187528 - DNA, 60 bp, Artificial
  Synthetic oligonucleotide
gacgtggccatgagtgccgtttttgtcttgattacactcgctgttctttggacagtgggc

SEQ ID NO: 187529 - DNA, 55 bp, Artificial
  Synthetic oligonucleotide
gactttgcctaattgtgaaggagcaacagacaaggctagtccgcgataccgtccg

SEQ ID NO: 187530 - DNA, 55 bp, Artificial
  Synthetic oligonucleotide
gactgctgtggcggtaggggcaggtgctattgcgatctgtttgtttggataccat

SEQ ID NO: 187531 - DNA, 55 bp, Artificial
  Synthetic oligonucleotide
gactaacaaagtcatcgggaatatctacaatatcgcaagcaatatccgcacgtga

SEQ ID NO: 187532 - DNA, 55 bp, Artificial
  Synthetic oligonucleotide
actgatagccttggcgtaagttgggacaagcagctaacagtcgatcggcaatctc

SEQ ID NO: 187533 - DNA, 55 bp, Artificial
  Synthetic oligonucleotide
gacgtgacaatagaggtcgaatcttaaagactggagagagccaacgaaaagacgg

SEQ ID NO: 187534 - DNA, 55 bp, Artificial
  Synthetic oligonucleotide
tatgcagtgactgtattattgaaagaagaccttcgtttgctaggacttcatgcac

SEQ ID NO: 187535 - DNA, 55 bp, Artificial
  Synthetic oligonucleotide
gacgcattaatttcggtccttctgtgtaaggtgtaccgatcatgttttcgattcc

SEQ ID NO: 187536 - DNA, 55 bp, Artificial
  Synthetic oligonucleotide
gacgaagattcacttatgaagacaacgaattattcagagatacacttaatgatcc

SEQ ID NO: 187537 - DNA, 55 bp, Artificial
  Synthetic oligonucleotide
tatgtgtaaagtcgcttacatgctttagtggtaatcctaatctagcagagatcca

SEQ ID NO: 187538 - DNA, 55 bp, Artificial
  Synthetic oligonucleotide
gtaggggtgctaacagaggttccagttatgttgatgcttgtgagattcgtgaata

SEQ ID NO: 187539 - DNA, 60 bp, Artificial
  Synthetic oligonucleotide
gaatgttcggttaccgcgtgtcgtgatggcctatctcgtgggcgcaggcttagcagtaag

SEQ ID NO: 187540 - DNA, 55 bp, Artificial
  Synthetic oligonucleotide
gctcccatgaactggacaaaggagttctggtggaattgaaaggtcgtgggtgcag

SEQ ID NO: 187541 - DNA, 55 bp, Artificial
  Synthetic oligonucleotide
gctcaggcgattggactagttgatgataccgtggacgtacaaaatttgtattcac

SEQ ID NO: 187542 - DNA, 55 bp, Artificial
  Synthetic oligonucleotide
ggcgatcgttcgataagtcggaacccgttcttgcgtcaaccagcgagcatagagg

SEQ ID NO: 187543 - DNA, 55 bp, Artificial
  Synthetic oligonucleotide
gctcagcagtaaacctgcgtggatcgataaacttgatctcgatttctcggtcgcc

SEQ ID NO: 187544 - DNA, 53 bp, Artificial
  Synthetic oligonucleotide
gtttatagctcagtcgggtaagtgttcggtaacgggtgaagaactaaatgttc

SEQ ID NO: 187545 - DNA, 55 bp, Artificial
  Synthetic oligonucleotide
gctattagagtaagaacaaaatgggattctacgtctaagacggttgatgagggag

SEQ ID NO: 187546 - DNA, 55 bp, Artificial
  Synthetic oligonucleotide
gtttcagtgtcgcaattcttatctgcttgctggtagcgtttgtattcaaacgggt

SEQ ID NO: 187547 - DNA, 55 bp, Artificial
  Synthetic oligonucleotide
ggcggcctccctttgcataagcccttaatctatgaccattgggagtccaacccga

SEQ ID NO: 187548 - DNA, 55 bp, Artificial
  Synthetic oligonucleotide
gctaccactgtttctggcgcctcaactaaacttacacgtgccacatccccgacac

SEQ ID NO: 187549 - DNA, 55 bp, Artificial
  Synthetic oligonucleotide
ggcgtcgtttcatctacgcctaaatgcccagtaactacgaaagcttgaatatccg

SEQ ID NO: 187550 - DNA, 58 bp, Artificial
  Synthetic oligonucleotide
gaatgacctttaaccactgttcgataatcatccgcataagtaccaaagcgataggtat

SEQ ID NO: 187551 - DNA, 55 bp, Artificial
  Synthetic oligonucleotide
gctacaccttctaacgtatgttttggtgctgcatatgaccaaataccaccacccg

SEQ ID NO: 187552 - DNA, 54 bp, Artificial
  Synthetic oligonucleotide
gttattacaagttacgacctcggcgctttctttaactttctgtggtgcattacc

SEQ ID NO: 187553 - DNA, 55 bp, Artificial
  Synthetic oligonucleotide
gctaacaaagattcgttaacacttatagcacctgaagacgctgttgctatagctg

SEQ ID NO: 187554 - DNA, 55 bp, Artificial
  Synthetic oligonucleotide
ggctacggcatcgatcgttaaattctcgattcccgtatctgtattcatcagatca

SEQ ID NO: 187555 - DNA, 55 bp, Artificial
  Synthetic oligonucleotide
gttagtatccgttaggttgttttcgattttatgaatagccatgattgcttcaggc

SEQ ID NO: 187556 - DNA, 55 bp, Artificial
  Synthetic oligonucleotide
gcgttagcaattatcacaaaatctgacccacaagtgaccgtaggtttggctgttc

SEQ ID NO: 187557 - DNA, 55 bp, Artificial
  Synthetic oligonucleotide
ggctccgaaactgggccatgcatcagcagaaacaatcgcagctttagctgaacga

SEQ ID NO: 187558 - DNA, 55 bp, Artificial
  Synthetic oligonucleotide
gttagcgagtgatttaggactaacaccgccgactgagacaacggataaaattgag

SEQ ID NO: 187559 - DNA, 54 bp, Artificial
  Synthetic oligonucleotide
gcgttaaaatgtagtgttgacctgtggtttaaagaaacgacgttggcacgaatg

SEQ ID NO: 187560 - DNA, 55 bp, Artificial
  Synthetic oligonucleotide
gcgtaaactcattcatcgtaatcaatcagccgtatctgaaatagcacttcgttgg

SEQ ID NO: 187561 - DNA, 55 bp, Artificial
  Synthetic oligonucleotide
gaaccgaagacatgactggctaccgaaataaccccttgtccgccaagtgccttgg

SEQ ID NO: 187562 - DNA, 55 bp, Artificial
  Synthetic oligonucleotide
ggctgacagtggcagttaggacgatcccacaggtctccttgttgtgggtttgctt

SEQ ID NO: 187563 - DNA, 55 bp, Artificial
  Synthetic oligonucleotide
actaaacatgcaaataggtaatcatgagatacacgaaagccctagagaagtcgga

SEQ ID NO: 187564 - DNA, 55 bp, Artificial
  Synthetic oligonucleotide
gcggtggctcaaaagaacggtacctcagtgaatggcaatacaacatggtataagc

SEQ ID NO: 187565 - DNA, 55 bp, Artificial
  Synthetic oligonucleotide
ggctggactttataaatacggcgagattggatttggtccattcaccggattcttc

SEQ ID NO: 187566 - DNA, 55 bp, Artificial
  Synthetic oligonucleotide
gcggcgatactaggctgggggtcgggtacacagggcatagcacgcaatttgtggg

SEQ ID NO: 187567 - DNA, 55 bp, Artificial
  Synthetic oligonucleotide
gcgctaagctccgagaaccaagagaaggtacgttcattatcgaatcactgcattc

SEQ ID NO: 187568 - DNA, 55 bp, Artificial
  Synthetic oligonucleotide
gcgccgatagaagggataggagaatggcgccagataagataagcttactttacga

SEQ ID NO: 187569 - DNA, 55 bp, Artificial
  Synthetic oligonucleotide
gcgcaatgcgaaaactaaaattatcgacacactgccacaactaggcggtcaatta

SEQ ID NO: 187570 - DNA, 55 bp, Artificial
  Synthetic oligonucleotide
gggaaaatacgaaggtgaacatcatagacacgccaggacatatggatttcttagc

SEQ ID NO: 187571 - DNA, 55 bp, Artificial
  Synthetic oligonucleotide
gggaatgagacgagacgacgtttccgattttatgttactgggcttgccactagcg

SEQ ID NO: 187572 - DNA, 60 bp, Artificial
  Synthetic oligonucleotide
cagtctgaatggctagatatgtggcgggatgtcaccggtttggatggcattaacgaggat

SEQ ID NO: 187573 - DNA, 55 bp, Artificial
  Synthetic oligonucleotide
ggacttagaacgagcgattttagtcgaggaagtgacgaaattacgcacgatccaa

SEQ ID NO: 187574 - DNA, 55 bp, Artificial
  Synthetic oligonucleotide
ggactaagctcgattaagtctgtaaaaggcgatatagcctaggcatcatggggtc

SEQ ID NO: 187575 - DNA, 55 bp, Artificial
  Synthetic oligonucleotide
gttcttgaagcggctcgcaaaaccgcattaattgatacgcaattggaaacacttc

SEQ ID NO: 187576 - DNA, 55 bp, Artificial
  Synthetic oligonucleotide
ggacgaaggacaaatacggacatgcgaaagctaaaccatgcccagtatgtaatcg

SEQ ID NO: 187577 - DNA, 55 bp, Artificial
  Synthetic oligonucleotide
ggaccggttggaacgattgactccgccaggttccttgactaagccagcgattgaa

SEQ ID NO: 187578 - DNA, 55 bp, Artificial
  Synthetic oligonucleotide
ggacacgtggcttatgtgggtgcgaaacgttcttaattgaaaagattaagcacgt

SEQ ID NO: 187579 - DNA, 55 bp, Artificial
  Synthetic oligonucleotide
acgtaactcgcgtgcacgaatgccgtcgttaaccatcatatcctttgctatggtc

SEQ ID NO: 187580 - DNA, 55 bp, Artificial
  Synthetic oligonucleotide
ggacaaattgataactcgttttggcgcgtgtcaacgcctgcatacgtcgctaaag

SEQ ID NO: 187581 - DNA, 55 bp, Artificial
  Synthetic oligonucleotide
acgtagcctgctggttgtgcgttgaccccgctcccagaactaaagacccctagta

SEQ ID NO: 187582 - DNA, 55 bp, Artificial
  Synthetic oligonucleotide
ggaaacccaccgaccaatcgcattagagactcatccgaataactttgttcagtgg

SEQ ID NO: 187583 - DNA, 59 bp, Artificial
  Synthetic oligonucleotide
cttatctcatagacgtgtggctagattttgggcttgtgtttcgcaagcgttgactaaaa

SEQ ID NO: 187584 - DNA, 54 bp, Artificial
  Synthetic oligonucleotide
caggaacaacgacggtgcaacccgataaccccgatccgcaggtaggtagtacaa

SEQ ID NO: 187585 - DNA, 55 bp, Artificial
  Synthetic oligonucleotide
ggagcattctaagcaacgactagcttgactacaagacatctcgtctgtcacaagg

SEQ ID NO: 187586 - DNA, 55 bp, Artificial
  Synthetic oligonucleotide
ggagtgccttacctttacaatctaatgaagtgcctgaatacacgtacacaatcgc

SEQ ID NO: 187587 - DNA, 55 bp, Artificial
  Synthetic oligonucleotide
gcttctgtcccagcctccttattccgaataaatggtgtccaaaagcttgcatctg

SEQ ID NO: 187588 - DNA, 55 bp, Artificial
  Synthetic oligonucleotide
gttgcaatcggacagtcagaaagtgggctacttggtgtagagttcgatcctaagt

SEQ ID NO: 187589 - DNA, 55 bp, Artificial
  Synthetic oligonucleotide
ggataccatttgagaataaacctaatgatatgcgacgtaaatggggtgtatcctt

SEQ ID NO: 187590 - DNA, 55 bp, Artificial
  Synthetic oligonucleotide
gttcgtgagatacgccgatcggtttgcatatataagttcttcctacttccgcttt

SEQ ID NO: 187591 - DNA, 55 bp, Artificial
  Synthetic oligonucleotide
ggatcatcggagcgatctttgcctgatcacgttcttattgtacgggaacgcctag

SEQ ID NO: 187592 - DNA, 55 bp, Artificial
  Synthetic oligonucleotide
gctggagggaaaggaatgcatctactcataggcgaggttgttggtcttctaggtc

SEQ ID NO: 187593 - DNA, 55 bp, Artificial
  Synthetic oligonucleotide
gctgctttaaatcgcgagacgatcaaagacacgtggcttgtttctatggatggac

SEQ ID NO: 187594 - DNA, 55 bp, Artificial
  Synthetic oligonucleotide
gctgcagtaggtgtcggagataatcccttgttagccaaacttgccttagacaacg

SEQ ID NO: 187595 - DNA, 60 bp, Artificial
  Synthetic oligonucleotide
cagctctattttcatgcaaatgggattgatcggacagatatagctgtaccaccagaacca

SEQ ID NO: 187596 - DNA, 55 bp, Artificial
  Synthetic oligonucleotide
accaactacgcctagcggactgcactcgatgggtgaaacggatagtacaatttct

SEQ ID NO: 187597 - DNA, 55 bp, Artificial
  Synthetic oligonucleotide
gttgcggaacagcaacgtcactttcccttgtacgaagaatggcagtcgctgcctg

SEQ ID NO: 187598 - DNA, 55 bp, Artificial
  Synthetic oligonucleotide
gctgatagcagtaccactccaactaccagtcagacaacagatagttcaacaactg

SEQ ID NO: 187599 - DNA, 55 bp, Artificial
  Synthetic oligonucleotide
gctgaccttgcggacttaggttctgtgatggcaaatgtctactatagaaaagaag

SEQ ID NO: 187600 - DNA, 55 bp, Artificial
  Synthetic oligonucleotide
ggcaagtcgccgtacacgtaagccgtaactgccccacctaaagtgtccatgacta

SEQ ID NO: 187601 - DNA, 55 bp, Artificial
  Synthetic oligonucleotide
gttgggtggacacatgtcgattcgttaaatgagagggactttaattatgcggtaa

SEQ ID NO: 187602 - DNA, 55 bp, Artificial
  Synthetic oligonucleotide
gctcttctcgtaaagtcaacgtgacaaactgacgattggtttgttgcaccgctaa

SEQ ID NO: 187603 - DNA, 55 bp, Artificial
  Synthetic oligonucleotide
gttcgataatcatccgcataagtaccaaagcgataggtattaggtgtccaatgcg

SEQ ID NO: 187604 - DNA, 55 bp, Artificial
  Synthetic oligonucleotide
gctccctttgcctagctacgtgtaggtggtatacttataactgcgtatgcagtct

SEQ ID NO: 187605 - DNA, 55 bp, Artificial
  Synthetic oligonucleotide
ggccccatttcaatagaccacgtaatttcgcctgtgtaatgcccaggtctttgat

SEQ ID NO: 187606 - DNA, 59 bp, Artificial
  Synthetic oligonucleotide
cagaatcttactatgccagaatggcttgacaagatgggttaccaatcattaactaaggg

SEQ ID NO: 187607 - DNA, 55 bp, Artificial
  Synthetic oligonucleotide
gttaccacggattgtgctagcggtccttgcgggcgcagctttaggcttaagcggc

SEQ ID NO: 187608 - DNA, 55 bp, Artificial
  Synthetic oligonucleotide
aattattgcgattattgcggttggcttagtcttcaacgctgctggagtaaaagac

SEQ ID NO: 187609 - DNA, 55 bp, Artificial
  Synthetic oligonucleotide
tacatcgccctactccgtctatccagatacgacatttgtcgggtacacaccacat

SEQ ID NO: 187610 - DNA, 55 bp, Artificial
  Synthetic oligonucleotide
ggggtgctaaacaactgctagtaggtgctagagatgtgctataaagggtgctagt

SEQ ID NO: 187611 - DNA, 55 bp, Artificial
  Synthetic oligonucleotide
gtgtgaaatcactgaccgccatgctgtggatcactgcaaagtaagtatgtgccga

SEQ ID NO: 187612 - DNA, 55 bp, Artificial
  Synthetic oligonucleotide
gccatgcctttctttctgaggagagaggtcaggagcagtagcgcagcgactcttg

SEQ ID NO: 187613 - DNA, 55 bp, Artificial
  Synthetic oligonucleotide
gccagaatggcttgacaagatgggttaccaatcattaactaagggtggaaacatc

SEQ ID NO: 187614 - DNA, 55 bp, Artificial
  Synthetic oligonucleotide
gtggtccacgattcgaaagcctatcaactaaaagcgccaatcggcagtgcagggt

SEQ ID NO: 187615 - DNA, 55 bp, Artificial
  Synthetic oligonucleotide
gggtatcattcacgtgccttctggcttcgtattggtgggaggacatttagcggat

SEQ ID NO: 187616 - DNA, 55 bp, Artificial
  Synthetic oligonucleotide
aattattatcggacgttagttgctagctatttaccgacagacgagcaacacccat

SEQ ID NO: 187617 - DNA, 60 bp, Artificial
  Synthetic oligonucleotide
cagaagacggtggtttgacaatcgagctattaactaacattgcattgaagtatgtaatcg

SEQ ID NO: 187618 - DNA, 55 bp, Artificial
  Synthetic oligonucleotide
gccaacggaactaaccgccatgacctatcttataaagatagcgagcgattcatgt

SEQ ID NO: 187619 - DNA, 55 bp, Artificial
  Synthetic oligonucleotide
gcattcctgcatctgttaatcgccgatgttgcgtgtgcgacacaccgttcgtcac

SEQ ID NO: 187620 - DNA, 55 bp, Artificial
  Synthetic oligonucleotide
gcatgtgtgtggcgtaagctatggacagtaatcactggaatctgtgcacgtctac

SEQ ID NO: 187621 - DNA, 55 bp, Artificial
  Synthetic oligonucleotide
gcatgatggagtttcagttagaccaagagtggcggttacgtcccatcaaaggcga

SEQ ID NO: 187622 - DNA, 54 bp, Artificial
  Synthetic oligonucleotide
gggtcggtttcagatgaaatcaaggaacgtacctatgacttaaaatccaaagga

SEQ ID NO: 187623 - DNA, 54 bp, Artificial
  Synthetic oligonucleotide
gggttgatttatatcagtcacgtaccgtgatttgggaaggaatcggacggttta

SEQ ID NO: 187624 - DNA, 55 bp, Artificial
  Synthetic oligonucleotide
ggtaagggtatcagcaaatgatcttgacgaactcaaacgtcgttgtaatgaagtg

SEQ ID NO: 187625 - DNA, 55 bp, Artificial
  Synthetic oligonucleotide
ggtaatcataagatacacctccttccagtcgcaagactgtcggataggcgacaag

SEQ ID NO: 187626 - DNA, 55 bp, Artificial
  Synthetic oligonucleotide
gcatccgttggtaaaactcgtggacgaaacaagtccttgcaaaagattgcgcaag

SEQ ID NO: 187627 - DNA, 55 bp, Artificial
  Synthetic oligonucleotide
ggtacactgatgcgtatctatgatccaggaatgatcatgttgcctcggatgaaag

SEQ ID NO: 187628 - DNA, 60 bp, Artificial
  Synthetic oligonucleotide
cacttactgctaagcctgcgcccacgagataggccatcacgacacgcggtaaccgaacat

SEQ ID NO: 187629 - DNA, 55 bp, Artificial
  Synthetic oligonucleotide
gcataccaaacattaccaagacttgccacaacgaacccattaataaccctgcgat

SEQ ID NO: 187630 - DNA, 55 bp, Artificial
  Synthetic oligonucleotide
gcagtttcacaccgatcacgtacgcatatttattacggattgctgttccgtctac

SEQ ID NO: 187631 - DNA, 55 bp, Artificial
  Synthetic oligonucleotide
ggtacagcgagttcataatccattcccattaacacgatagattccgttccacacg

SEQ ID NO: 187632 - DNA, 55 bp, Artificial
  Synthetic oligonucleotide
ggtacctactcacctaagcttacggcctgtaagtattgtcagtctcatgcgaacg

SEQ ID NO: 187633 - DNA, 55 bp, Artificial
  Synthetic oligonucleotide
gcagtatgcaagacaggacggatagtattgtggttcgcgtggataaaagtgtgcg

SEQ ID NO: 187634 - DNA, 55 bp, Artificial
  Synthetic oligonucleotide
ggtacgaggtttctaattctcctagaagcactgtgtcaacatgggaacatggtgg

SEQ ID NO: 187635 - DNA, 55 bp, Artificial
  Synthetic oligonucleotide
tactaggggtctttagttctgggagcggggtcaacgcacaaccagcaggctacgt

SEQ ID NO: 187636 - DNA, 55 bp, Artificial
  Synthetic oligonucleotide
gcaggcgaatcagcttctaacgttgcacagcagtcgcaacatatccagcacaacg

SEQ ID NO: 187637 - DNA, 55 bp, Artificial
  Synthetic oligonucleotide
gcaggattccgaccgctcgtgagcttgctgaagcgagtcaacgaataaaggccag

SEQ ID NO: 187638 - DNA, 55 bp, Artificial
  Synthetic oligonucleotide
gcagatgtagatcctcgaccagttgagaaagtcgattgcttgacgatctccgaca

SEQ ID NO: 187639 - DNA, 58 bp, Artificial
  Synthetic oligonucleotide
caccgcctataaactggccaagattattcaacgtgtgatttataaccatatgggattg

SEQ ID NO: 187640 - DNA, 55 bp, Artificial
  Synthetic oligonucleotide
gggagcgaccgccaagttttcgcaagaagcgattatgcgggactcaaaatcagcc

SEQ ID NO: 187641 - DNA, 54 bp, Artificial
  Synthetic oligonucleotide
gcgattaatgtcccacttaacaaaattcccgcctacaacaaatccgctaacgag

SEQ ID NO: 187642 - DNA, 55 bp, Artificial
  Synthetic oligonucleotide
gggagcggagagcttatcgagggagaagtaattagtttgttagctaatgtagcgg

SEQ ID NO: 187643 - DNA, 55 bp, Artificial
  Synthetic oligonucleotide
gggcaaacgctgttgctcctatatgggaagctggtaatgtctatcttccgcaccc

SEQ ID NO: 187644 - DNA, 55 bp, Artificial
  Synthetic oligonucleotide
gcgatccgtttctttgatcgctacggcagcaaaacttcctccacttatcgcgtgt

SEQ ID NO: 187645 - DNA, 55 bp, Artificial
  Synthetic oligonucleotide
gcgagggcgtattaaaagtcgacagcttcgtcactcaccaagtagacctgtattg

SEQ ID NO: 187646 - DNA, 55 bp, Artificial
  Synthetic oligonucleotide
gcgagattcgttgagcttgaattaaaacatgaggggtatacgacagaagtacact

SEQ ID NO: 187647 - DNA, 55 bp, Artificial
  Synthetic oligonucleotide
gcgagaatggaaccgaactgaatgaaattctgcctaagatgagccctctgaatcc

SEQ ID NO: 187648 - DNA, 55 bp, Artificial
  Synthetic oligonucleotide
gggcaacaatacaaggccgcggttacgtggaatcttgtgactggaccttaacaag

SEQ ID NO: 187649 - DNA, 55 bp, Artificial
  Synthetic oligonucleotide
acgattaaagaattttgccagagagtcccagcaaacgggagattctgaaggcaaa

SEQ ID NO: 187650 - DNA, 60 bp, Artificial
  Synthetic oligonucleotide
caccaacttatctcgaatcgacacgtcatttccgtgttctactgggttatatcgcatgtc

SEQ ID NO: 187651 - DNA, 55 bp, Artificial
  Synthetic oligonucleotide
gcgacaaatgtggactatgggtatacgggataaggaacttctcactattatccgc

SEQ ID NO: 187652 - DNA, 55 bp, Artificial
  Synthetic oligonucleotide
gcctttacaggttgtcgtaagagtgaagttctagccttgcagtggaaagacctag

SEQ ID NO: 187653 - DNA, 52 bp, Artificial
  Synthetic oligonucleotide
gggccaaaagtgtttaactccgagaaccacgtaggtaaggattaagatatcc

SEQ ID NO: 187654 - DNA, 55 bp, Artificial
  Synthetic oligonucleotide
gccttgtgagtatgctaaaagttgacggcttaaacgttgataccttgccagtatc

SEQ ID NO: 187655 - DNA, 55 bp, Artificial
  Synthetic oligonucleotide
gggcgttgcttcaaggcgggtaagtatgcctcaacttgaaaggacagcttttcac

SEQ ID NO: 187656 - DNA, 55 bp, Artificial
  Synthetic oligonucleotide
gcctcgctcacttcattattacgagtatcataagtgacttgatctggacgcccga

SEQ ID NO: 187657 - DNA, 55 bp, Artificial
  Synthetic oligonucleotide
gggctatggggatctattacacgaagaaacgacgtgcacggacagcgttgttgag

SEQ ID NO: 187658 - DNA, 55 bp, Artificial
  Synthetic oligonucleotide
ggggcaaacgatcaatggtggtcaatgttatgggctcacggcttattatgttcga

SEQ ID NO: 187659 - DNA, 55 bp, Artificial
  Synthetic oligonucleotide
ggggcacacccgatttgcgcaagtcccgtcgcagctttacgaccgaatgcacctg

SEQ ID NO: 187660 - DNA, 55 bp, Artificial
  Synthetic oligonucleotide
gccgttaagctccaattcggttgcgttttcttaatccgcagatacggattgcggg

SEQ ID NO: 187661 - DNA, 60 bp, Artificial
  Synthetic oligonucleotide
caattactatcttctaatctgtatatgctcgaagtataatttgattcgtcagcaagcatc

SEQ ID NO: 187662 - DNA, 55 bp, Artificial
  Synthetic oligonucleotide
ggggcagccagtaaacgccaatgagatcctcctacagtatcatagttggcaaggc

SEQ ID NO: 187663 - DNA, 55 bp, Artificial
  Synthetic oligonucleotide
ggggcgaaataatcaatctatcgtctatgtcagacgtccgtatcaatccatttca

SEQ ID NO: 187664 - DNA, 54 bp, Artificial
  Synthetic oligonucleotide
gccggtagccggtttgtctactataaaggattaggtgcccgtcttgaacgagct

SEQ ID NO: 187665 - DNA, 55 bp, Artificial
  Synthetic oligonucleotide
taagtgagtcttcgggtctatatttgcgtaatttagcttttgatacgcagggacg

SEQ ID NO: 187666 - DNA, 55 bp, Artificial
  Synthetic oligonucleotide
ggggcggcaggttctagttacttatcttggcaagaaggcaattggagtttagtcg

SEQ ID NO: 187667 - DNA, 55 bp, Artificial
  Synthetic oligonucleotide
gccgattcgcttggttgcctaagtcatgcagactagacggattgccaataatccg

SEQ ID NO: 187668 - DNA, 55 bp, Artificial
  Synthetic oligonucleotide
gccgatcgactgttagctgcttgtcccaacttacgccaaggctatcagttatacc

SEQ ID NO: 187669 - DNA, 55 bp, Artificial
  Synthetic oligonucleotide
gccctttgccagagctgccccaccttgtggttgctagcggacttggttcatcagg

SEQ ID NO: 187670 - DNA, 53 bp, Artificial
  Synthetic oligonucleotide
gcccttagtactgggaaacaagtaagcctccggatctaagggtgcggtttagc

SEQ ID NO: 187671 - DNA, 55 bp, Artificial
  Synthetic oligonucleotide
gttagattgtgaaagccgatagctgaatgaaataaactgcgggtgcgccctttcc

SEQ ID NO: 187672 - DNA, 57 bp, Artificial
  Synthetic oligonucleotide
caatcggtgaaacacgttagaggagcgaaaatggagcctgtaaggcgactggtagcg

SEQ ID NO: 187673 - DNA, 55 bp, Artificial
  Synthetic oligonucleotide
gcccttaaatttattctggcacggtatgcatgcgccgaacatgtttcttttccgc

SEQ ID NO: 187674 - DNA, 55 bp, Artificial
  Synthetic oligonucleotide
agtgcgcaactcagctgcctagttttggctggtcggagttacgaagtaggatggt

SEQ ID NO: 187675 - DNA, 55 bp, Artificial
  Synthetic oligonucleotide
agtgaccgctcgcttagcgatcatggcaggagcacaatatgtggtaagcccaacc

SEQ ID NO: 187676 - DNA, 55 bp, Artificial
  Synthetic oligonucleotide
ccagccacaagaagccattacagcagttaggagtgaattttatggcatatccaat

SEQ ID NO: 187677 - DNA, 55 bp, Artificial
  Synthetic oligonucleotide
ccaggaaacgttggtaatggatatgtttcaggacttaaagtagatgctggtgtcg

SEQ ID NO: 187678 - DNA, 55 bp, Artificial
  Synthetic oligonucleotide
ccagtctctagcttgcgcttttgaagcatcgctaacattaccagtcattgcatcc

SEQ ID NO: 187679 - DNA, 55 bp, Artificial
  Synthetic oligonucleotide
ccagtgcctgctattcaaacaggaaaaccacaacttattgtttctgatccaagtc

SEQ ID NO: 187680 - DNA, 55 bp, Artificial
  Synthetic oligonucleotide
ccatcaactgcatacatcttaactgatctctggcacagtaccattggtcgtgacg

SEQ ID NO: 187681 - DNA, 55 bp, Artificial
  Synthetic oligonucleotide
ccatgttgtgagagttttgtcaaaggaccgtcgaagtcttatctccatgatgatt

SEQ ID NO: 187682 - DNA, 55 bp, Artificial
  Synthetic oligonucleotide
ccatttacacggggtacccacgagcgcagttcgcttctttaatgtctatggtccc

SEQ ID NO: 187683 - DNA, 57 bp, Artificial
  Synthetic oligonucleotide
caagccgcagaattagattcacaaccaggaacaacgacggtgcaacctgataacccc

SEQ ID NO: 187684 - DNA, 55 bp, Artificial
  Synthetic oligonucleotide
cccacctaatcaatggtttgacaggcgaatcttttgaaatgatgcgagacaatgt

SEQ ID NO: 187685 - DNA, 55 bp, Artificial
  Synthetic oligonucleotide
aaatctcggtgtactgcccgcacatgatgtagttacggcccagacgtgagaggtc

SEQ ID NO: 187686 - DNA, 55 bp, Artificial
  Synthetic oligonucleotide
ccccaataatgagcacctcatccgagttggggctatttcatcgattgcttcgtca

SEQ ID NO: 187687 - DNA, 55 bp, Artificial
  Synthetic oligonucleotide
ccccttagatcttcatgatacaatcctagttatgggaccggggcctattggtctg

SEQ ID NO: 187688 - DNA, 55 bp, Artificial
  Synthetic oligonucleotide
cccgatcatactgagcggacaattcttctgctgacaagtcacgaccgatctccgt

SEQ ID NO: 187689 - DNA, 55 bp, Artificial
  Synthetic oligonucleotide
agtctatcgcttgatgcatatccatgggatccaatcggtcatccgccggaagcgg

SEQ ID NO: 187690 - DNA, 55 bp, Artificial
  Synthetic oligonucleotide
cccgtatccgccaactagacctagtccgattacttggaagatgactttcaagata

SEQ ID NO: 187691 - DNA, 55 bp, Artificial
  Synthetic oligonucleotide
aacaaggactatcacgaagctagtaagcgagcgaatactttaacttcaatgctct

SEQ ID NO: 187692 - DNA, 55 bp, Artificial
  Synthetic oligonucleotide
catgattgctgaacaagcgtaccgaatctaaacgacgtcaggcacaaggcattaa

SEQ ID NO: 187693 - DNA, 55 bp, Artificial
  Synthetic oligonucleotide
catgctaatagactcatatctagaacgcattaagtatttacctgtctggttcgct

SEQ ID NO: 187694 - DNA, 60 bp, Artificial
  Synthetic oligonucleotide
cttaaatcaggacttttctactgaaacgatctgtgagaaatgggcagctgacattacgta

SEQ ID NO: 187695 - DNA, 58 bp, Artificial
  Synthetic oligonucleotide
caagatcagtcgtaaggatggcgagtttgcaaagggagcaaaacactctccacgaaaa

SEQ ID NO: 187696 - DNA, 55 bp, Artificial
  Synthetic oligonucleotide
catggttactgaccgcacttgtgctccgtggcgttgaagtttcaagtaccgtaca

SEQ ID NO: 187697 - DNA, 55 bp, Artificial
  Synthetic oligonucleotide
cattaatacctgaactgctgacgaaatagccaaataatttactgacgacggtccg

SEQ ID NO: 187698 - DNA, 55 bp, Artificial
  Synthetic oligonucleotide
cattagacgcgacttgtgccccgcaaaacatcaaatatccgacggatacggagct

SEQ ID NO: 187699 - DNA, 55 bp, Artificial
  Synthetic oligonucleotide
cattatctgttaatagaagtaacccttctgtatcgccatcgagtctgcccactgg

SEQ ID NO: 187700 - DNA, 50 bp, Artificial
  Synthetic oligonucleotide
aaagtagcggcccaaacggtcaaacggagtggtggaacgttgggaagtaa

SEQ ID NO: 187701 - DNA, 55 bp, Artificial
  Synthetic oligonucleotide
cattcccgcaatgatagttaaccgattaaagttttccctaactggactattcaca

SEQ ID NO: 187702 - DNA, 55 bp, Artificial
  Synthetic oligonucleotide
tgtctcttgtgggatcactgcagatttcacaaggatcttcttccgttatatttcc

SEQ ID NO: 187703 - DNA, 55 bp, Artificial
  Synthetic oligonucleotide
aaatcattaagacatcaaacgttcccataccaccaggaaccatagttaacatccc

SEQ ID NO: 187704 - DNA, 55 bp, Artificial
  Synthetic oligonucleotide
ccaaatccgaacgtcatgtccgttttcagcgaggacttgtgctaaagcagtcccc

SEQ ID NO: 187705 - DNA, 55 bp, Artificial
  Synthetic oligonucleotide
ccaaattcgattatgggtcgtggaaattatgctctagcaagccataatatgggcg

SEQ ID NO: 187706 - DNA, 60 bp, Artificial
  Synthetic oligonucleotide
caaccagcaattgcagctgggcaaccaaaagtgacgaataatggcaaaacatataccatt

SEQ ID NO: 187707 - DNA, 55 bp, Artificial
  Synthetic oligonucleotide
ccaacggtaaccctcataccgaacggcattcatcacccacctatagaggatgggc

SEQ ID NO: 187708 - DNA, 53 bp, Artificial
  Synthetic oligonucleotide
ccaactaacgtactcacgattaaaggccgttcaaaattcatcctccctagtag

SEQ ID NO: 187709 - DNA, 55 bp, Artificial
  Synthetic oligonucleotide
ccaagccgctggactaccttgacgactacgggtgtatgttgcacctttatacata

SEQ ID NO: 187710 - DNA, 55 bp, Artificial
  Synthetic oligonucleotide
ccaattcaacattagtcgttgacctagttcctaatgaaccgaacgaatcagaaca

SEQ ID NO: 187711 - DNA, 55 bp, Artificial
  Synthetic oligonucleotide
ccacacgtaaattctgcacgtctccaagatgcgagatactgtcttctgtcaagac

SEQ ID NO: 187712 - DNA, 55 bp, Artificial
  Synthetic oligonucleotide
tggcggcacagaagttatggacgcaaatactcgacaagatacaattatgagactc

SEQ ID NO: 187713 - DNA, 55 bp, Artificial
  Synthetic oligonucleotide
ccgttcctcgtcatttaaagtatcaacataggcgtccattgcaagtttgactatt

SEQ ID NO: 187714 - DNA, 55 bp, Artificial
  Synthetic oligonucleotide
ccgttgaattagtcgttgtttctgacgtagcttgagtgaccaagccagtctcccc

SEQ ID NO: 187715 - DNA, 55 bp, Artificial
  Synthetic oligonucleotide
cctaaaggtccgcctagcacaccaacgagcatcccgatcaatccacccgttgatg

SEQ ID NO: 187716 - DNA, 55 bp, Artificial
  Synthetic oligonucleotide
cctatggctgtcggggtttacaaggcactcgctgaagcggggctatcgattccta

SEQ ID NO: 187717 - DNA, 56 bp, Artificial
  Synthetic oligonucleotide
caaagtgaaagaacgtcataatcagttactatgtagtaaaacgggtacgatgaaca

SEQ ID NO: 187718 - DNA, 55 bp, Artificial
  Synthetic oligonucleotide
cctcataaagattcaatgcgctaatgctacgtccagagcctttagcggtcgtacc

SEQ ID NO: 187719 - DNA, 55 bp, Artificial
  Synthetic oligonucleotide
cctccaatcgtgctcgtagtgcatcctcagactgtcccacatgccgttccatcgt

SEQ ID NO: 187720 - DNA, 55 bp, Artificial
  Synthetic oligonucleotide
cctccacccacgccgaagattatctcgtagaaatgttggcgcattaccaacaacg

SEQ ID NO: 187721 - DNA, 53 bp, Artificial
  Synthetic oligonucleotide
cctcgaaagtgggaattactcgacctttgtataattcggcaatgggtaaagcc

SEQ ID NO: 187722 - DNA, 55 bp, Artificial
  Synthetic oligonucleotide
cctcgaaatagatatttaggtcgtaagcgccccatagaacagtaccttactaaca

SEQ ID NO: 187723 - DNA, 55 bp, Artificial
  Synthetic oligonucleotide
cctgaatcgcttgacactctgctcgcaagacacccacacgtacactgaacgtatg

SEQ ID NO: 187724 - DNA, 55 bp, Artificial
  Synthetic oligonucleotide
cctgggattaaataatctgtatccgcaaacgttgaggatgctaactgtagatcac

SEQ ID NO: 187725 - DNA, 55 bp, Artificial
  Synthetic oligonucleotide
ccttcacgttcatggtcagccctaaagaacctattcattatggttataacgtcca

SEQ ID NO: 187726 - DNA, 55 bp, Artificial
  Synthetic oligonucleotide
ccttccgatgtagatctcaccggtttcatctagccgtcgaatcacagccaccaca

SEQ ID NO: 187727 - DNA, 55 bp, Artificial
  Synthetic oligonucleotide
ccttgtacgttcatcacttacaaaggccatactgcgtcgagtaaccgcagacagc

SEQ ID NO: 187728 - DNA, 58 bp, Artificial
  Synthetic oligonucleotide
atttccgaattgcgtcaaacggccgtaaaagagcgtgagagcgtttctgatgagttga

SEQ ID NO: 187729 - DNA, 55 bp, Artificial
  Synthetic oligonucleotide
ccttgtatagttcacttaaatatcggcttgcattgcttcgatcgatagttaagcg

SEQ ID NO: 187730 - DNA, 55 bp, Artificial
  Synthetic oligonucleotide
ccttgtttgactcgactataagtgagcggtgtaatgatcccttgaactaattctt

SEQ ID NO: 187731 - DNA, 55 bp, Artificial
  Synthetic oligonucleotide
ccctcttctgaagagtccgcttcgtgtgagtttaaggaaggcacatggacgtgtc

SEQ ID NO: 187732 - DNA, 55 bp, Artificial
  Synthetic oligonucleotide
cccttatctacggccaatcgaagactaggattcattgctggatctatgccaccag

SEQ ID NO: 187733 - DNA, 55 bp, Artificial
  Synthetic oligonucleotide
cccttgagatttcgactggaaatgctataaccactgttcagcaaacgttcgaagc

SEQ ID NO: 187734 - DNA, 55 bp, Artificial
  Synthetic oligonucleotide
ccgaaaagagcgaaagtgagtcggcatgctttagttagtaaccgtgcttcacaag

SEQ ID NO: 187735 - DNA, 55 bp, Artificial
  Synthetic oligonucleotide
ccgaacgaatggcgattacaatagctatggatcgtcgtctgtggaacttagagag

SEQ ID NO: 187736 - DNA, 55 bp, Artificial
  Synthetic oligonucleotide
ccgacattaggtccgatcggcttagtcacaaagcaccgaatcttgtttatgcaag

SEQ ID NO: 187737 - DNA, 55 bp, Artificial
  Synthetic oligonucleotide
ccgacgaatctggtcagacctatgactacgcaatacaagaaacacccgttgaagg

SEQ ID NO: 187738 - DNA, 55 bp, Artificial
  Synthetic oligonucleotide
ccgattaacaaaattcctccagctaatgctagcaacaggttattaaattctcccg

SEQ ID NO: 187739 - DNA, 57 bp, Artificial
  Synthetic oligonucleotide
attgacacctgaactacctgttgcttcgtccgcaaaactaacaagtggggctgatac

SEQ ID NO: 187740 - DNA, 55 bp, Artificial
  Synthetic oligonucleotide
ccgcaatgaagaaagaggcagtacagagtgctcacttcgaaaagggtgcaccgca

SEQ ID NO: 187741 - DNA, 55 bp, Artificial
  Synthetic oligonucleotide
ccgccaccgtgtaaatagacgacatagttcgttgattcagtcgtagcggggtaga

SEQ ID NO: 187742 - DNA, 55 bp, Artificial
  Synthetic oligonucleotide
ccgcgaacattcaatatcaaggtataggctaattgaatccattcaatcgtcgctt

SEQ ID NO: 187743 - DNA, 55 bp, Artificial
  Synthetic oligonucleotide
ccgcgaggaagtgtaagtcgattgaacgggtttagttgcttcgataatccgaagc

SEQ ID NO: 187744 - DNA, 55 bp, Artificial
  Synthetic oligonucleotide
ccgctgtacgaactttacaagtgttggctccattggttgttatgatgcctctttc

SEQ ID NO: 187745 - DNA, 55 bp, Artificial
  Synthetic oligonucleotide
ccggaatcgattcaatcattgactataagtcgaggcgttttgtcttctttcctac

SEQ ID NO: 187746 - DNA, 55 bp, Artificial
  Synthetic oligonucleotide
agtaggaaaggcgactaactccccttgttgtatgtaatgtgctgcttgtttgacc

SEQ ID NO: 187747 - DNA, 54 bp, Artificial
  Synthetic oligonucleotide
ccggtgaacctgtttgccagccccgtcgtccaaatagtcggatagataaagtac

SEQ ID NO: 187748 - DNA, 55 bp, Artificial
  Synthetic oligonucleotide
ccgtacgttattcaaatctgggtggacgatcatatgaccttctctcacacgatcc

SEQ ID NO: 187749 - DNA, 55 bp, Artificial
  Synthetic oligonucleotide
ccgtatgtttcatgcaggcgacccaatcggttatgccgacttaacaagcccctac

SEQ ID NO: 187750 - DNA, 55 bp, Artificial
  Synthetic oligonucleotide
attcgccttgtatgctttaagaccatttgttaatattaaggaacggaactctcaa

SEQ ID NO: 187751 - DNA, 55 bp, Artificial
  Synthetic oligonucleotide
ccgtgcggaaacaaagaatgcctatattggacaaatcaacatgactactgcatca

SEQ ID NO: 187752 - DNA, 55 bp, Artificial
  Synthetic oligonucleotide
aaaagtgacggcaccgaagctaaggcgccttcatggtaacgataaaattgcggtc

SEQ ID NO: 187753 - DNA, 55 bp, Artificial
  Synthetic oligonucleotide
ttgtcccaataagtgtcagtatttaaacctgtcctcggtgttgtttgcactcgct

SEQ ID NO: 187754 - DNA, 55 bp, Artificial
  Synthetic oligonucleotide
caacgcgaacaatcgcgtaaggtgttctgattaatgcgccaccacaacgttcctc

SEQ ID NO: 187755 - DNA, 55 bp, Artificial
  Synthetic oligonucleotide
caacgggaataagcattgcagccccgactactgcaccggaagcggtatacgatta

SEQ ID NO: 187756 - DNA, 55 bp, Artificial
  Synthetic oligonucleotide
caacgtcttgcatatatacgcctttatagtggagtactacatttacgagattcgg

SEQ ID NO: 187757 - DNA, 55 bp, Artificial
  Synthetic oligonucleotide
ttggtgatgcaacgattgttgttcctggtgcaactaaatcaggcagtggcgtgaa

SEQ ID NO: 187758 - DNA, 55 bp, Artificial
  Synthetic oligonucleotide
caactgcaaaggaaaatcctagaaattatacctctagtcagcgtaagtcggtggc

SEQ ID NO: 187759 - DNA, 55 bp, Artificial
  Synthetic oligonucleotide
caacttcaatcaagggtacgtcagaaaactggagataacgtataacaaaagccga

SEQ ID NO: 187760 - DNA, 53 bp, Artificial
  Synthetic oligonucleotide
caagaaacaacgaaaacgacctaagagatggtatcggggacgtggttgtgacg

SEQ ID NO: 187761 - DNA, 60 bp, Artificial
  Synthetic oligonucleotide
attcagcctaatcactatgtcaacggctcgccaatcaattgtttcggctgaaggaacgtc

SEQ ID NO: 187762 - DNA, 55 bp, Artificial
  Synthetic oligonucleotide
caagaatcaaaaggtcgttccccactctttaagaccatcaaacattcattcagcc

SEQ ID NO: 187763 - DNA, 55 bp, Artificial
  Synthetic oligonucleotide
caagacaggcggctagcaagcttagaacggaataaacgcatcattgacaaagtgc

SEQ ID NO: 187764 - DNA, 54 bp, Artificial
  Synthetic oligonucleotide
aaaatggttcccaaacaggagttgcgtctatttgatcgggtactgcttttccac

SEQ ID NO: 187765 - DNA, 55 bp, Artificial
  Synthetic oligonucleotide
ttgcttgtccgttcattatctctgataaaccaaggattgccgatacgtgtgtcat

SEQ ID NO: 187766 - DNA, 55 bp, Artificial
  Synthetic oligonucleotide
ttgcttaaaccgtataaattgacctgaatctccttaattcgtcttagagacgatc

SEQ ID NO: 187767 - DNA, 55 bp, Artificial
  Synthetic oligonucleotide
atacgcggaatgcgctgtaagaccaatagataaatcacgcccgaaaacattgcac

SEQ ID NO: 187768 - DNA, 55 bp, Artificial
  Synthetic oligonucleotide
ttgcagacctgttgaaattgaaccgttctactgtctatcggcatagaaccagtgg

SEQ ID NO: 187769 - DNA, 55 bp, Artificial
  Synthetic oligonucleotide
caatgctcttcgcgatttgctagccggacactacttatcgggtgtttctcgtggg

SEQ ID NO: 187770 - DNA, 55 bp, Artificial
  Synthetic oligonucleotide
caattacggtggtatcattgatttctcgcggttttgccgtatttgcgattttcgc

SEQ ID NO: 187771 - DNA, 55 bp, Artificial
  Synthetic oligonucleotide
atgaagtgcttggtagggataccttaagacaagtgatcgctaactttgggaacgg

SEQ ID NO: 187772 - DNA, 60 bp, Artificial
  Synthetic oligonucleotide
attcaagacaactgggcaacgatctgtcaacaaataagagagcgacactacaagccccaa

SEQ ID NO: 187773 - DNA, 55 bp, Artificial
  Synthetic oligonucleotide
atgacgtggcacgctactacattgaagaaacgggtgctttaggcgaagtaccagc

SEQ ID NO: 187774 - DNA, 55 bp, Artificial
  Synthetic oligonucleotide
atgctttggacgtaagagatcggttaggacatgaagacattgagacaacgctagg

SEQ ID NO: 187775 - DNA, 55 bp, Artificial
  Synthetic oligonucleotide
ttttgctacccgtaaatcaggggagatcatttctcgttttctagacgcaaataaa

SEQ ID NO: 187776 - DNA, 55 bp, Artificial
  Synthetic oligonucleotide
atggatgccttgttcaccagtacgagtcaatggggtgtcgcaccagccttgcaca

SEQ ID NO: 187777 - DNA, 55 bp, Artificial
  Synthetic oligonucleotide
tttctcgggcaaatcataaagcatcaaacggttcagactaacagaaaactcgttg

SEQ ID NO: 187778 - DNA, 55 bp, Artificial
  Synthetic oligonucleotide
tttccctacttcggtattgatacccgcagtcacattgtctgtattgactaatttt

SEQ ID NO: 187779 - DNA, 55 bp, Artificial
  Synthetic oligonucleotide
atgtttgttcctcgaagtcggatgatccaaagtgggatgtatcgtccagtcttag

SEQ ID NO: 187780 - DNA, 55 bp, Artificial
  Synthetic oligonucleotide
attatcgtgcagctactttacggggcaggaatgagtcaatcgcttgcagtatttt

SEQ ID NO: 187781 - DNA, 55 bp, Artificial
  Synthetic oligonucleotide
tttcaatacaagtggacaagtaggggcgtatcaaaatcggatcaatgaagccacg

SEQ ID NO: 187782 - DNA, 55 bp, Artificial
  Synthetic oligonucleotide
attcaagccgcccaactgacagcgattcagctccatggaacggttctgccatctt

SEQ ID NO: 187783 - DNA, 55 bp, Artificial
  Synthetic oligonucleotide
attagatacgcaaccaggaacaacgacggtgcaacccgataaccccgatccgcag

SEQ ID NO: 187784 - DNA, 55 bp, Artificial
  Synthetic oligonucleotide
atccttgcactgcatcaacgactttcgaggtatcattggctaaagaaagcgtcac

SEQ ID NO: 187785 - DNA, 55 bp, Artificial
  Synthetic oligonucleotide
atccaacagcagacagtccacgcaggcgacgtgcgaagcggaagtcgcaggtgtg

SEQ ID NO: 187786 - DNA, 54 bp, Artificial
  Synthetic oligonucleotide
attcgttttaggatccggctaggagagtcccgctcggacactaagagttccgag

SEQ ID NO: 187787 - DNA, 55 bp, Artificial
  Synthetic oligonucleotide
caaacgtcctaggtcataacgaatttagcggtcatggatctaatcaatgcccggg

SEQ ID NO: 187788 - DNA, 55 bp, Artificial
  Synthetic oligonucleotide
caaatcatgttatttgccgtccagataacattacacgttcctgtagcctatacgg

SEQ ID NO: 187789 - DNA, 55 bp, Artificial
  Synthetic oligonucleotide
caaatgatacaggacaccaaaactgaagatgattcaggtaactttggacgtatct

SEQ ID NO: 187790 - DNA, 55 bp, Artificial
  Synthetic oligonucleotide
caaccaagttttaacaaaacagcaggttacgagcagataaagagaatgtcgagtg

SEQ ID NO: 187791 - DNA, 55 bp, Artificial
  Synthetic oligonucleotide
ttatgccaaggattaccattggtccagctagttttacgttagcaagtcacgtccc

SEQ ID NO: 187792 - DNA, 55 bp, Artificial
  Synthetic oligonucleotide
cagcaacagatgtttacgccatcagtaatgctagctatacaaatgagtttcccga

SEQ ID NO: 187793 - DNA, 55 bp, Artificial
  Synthetic oligonucleotide
cagcagtcaatctgattctatggatcgcctgttctctagtggtcgtcacattccg

SEQ ID NO: 187794 - DNA, 58 bp, Artificial
  Synthetic oligonucleotide
atgattgtcaggttgaaatgtgtacgattggcgagatgaaaaaggttttgaatagtta

SEQ ID NO: 187795 - DNA, 55 bp, Artificial
  Synthetic oligonucleotide
cagcgctattggtatcagccccacttgttagttttgcggacgaagcaacaggtag

SEQ ID NO: 187796 - DNA, 55 bp, Artificial
  Synthetic oligonucleotide
ttaggcgaggttgtggttacacaatgagcttctgggaaatcccacagtatcgaag

SEQ ID NO: 187797 - DNA, 55 bp, Artificial
  Synthetic oligonucleotide
caggattgctgtatcacggatacgactgtacgagaactgcattttgggcgcatcc

SEQ ID NO: 187798 - DNA, 54 bp, Artificial
  Synthetic oligonucleotide
caggcttacaaacgctttagaaaatataacgccgattgtaccgtatcaacccaa

SEQ ID NO: 187799 - DNA, 55 bp, Artificial
  Synthetic oligonucleotide
caggtattactgatccagcggcttggttattagggctaggttgactatctggcac

SEQ ID NO: 187800 - DNA, 55 bp, Artificial
  Synthetic oligonucleotide
cagtactatacaccaagtcaagatactcaaagttataatccttacgctggacagg

SEQ ID NO: 187801 - DNA, 55 bp, Artificial
  Synthetic oligonucleotide
cagtcatgatcgctcaagcgttgttagaaagtgcatatggtacttccggattagc

SEQ ID NO: 187802 - DNA, 55 bp, Artificial
  Synthetic oligonucleotide
agtttaaatgcacagctgcagcatggcgcataagtatttcgccaacaaataggac

SEQ ID NO: 187803 - DNA, 55 bp, Artificial
  Synthetic oligonucleotide
ttaaccagaatcattcgttccgcttactccggaaaatatcaagcagcgcacagag

SEQ ID NO: 187804 - DNA, 55 bp, Artificial
  Synthetic oligonucleotide
catagctttatccctagaagggagtaggcaagtgtcaacttttgaagcaattcaa

SEQ ID NO: 187805 - DNA, 58 bp, Artificial
  Synthetic oligonucleotide
ctgtaggtgttgctccctttgcctagctacgtgtaggtggtatacttataactgcgta

SEQ ID NO: 187806 - DNA, 59 bp, Artificial
  Synthetic oligonucleotide
atgatcaatcatagctaaaaatggttcccaaacaggagttgcgtctatttgatcgggta

SEQ ID NO: 187807 - DNA, 55 bp, Artificial
  Synthetic oligonucleotide
ttaaacgtgaaggagcaatgcctaaactcgtccgttcaaccttgttaggtgaaga

SEQ ID NO: 187808 - DNA, 55 bp, Artificial
  Synthetic oligonucleotide
catcgaagtgccgccaaatcctttctgggcttccattggtttatctgtatcaccg

SEQ ID NO: 187809 - DNA, 55 bp, Artificial
  Synthetic oligonucleotide
catctggtcccatagtaacggaacctgtggaaggctgcagatcccctgataacac

SEQ ID NO: 187810 - DNA, 55 bp, Artificial
  Synthetic oligonucleotide
tgtgttgatgcccatgtgaagcaagatttctaagccatttggtgtcgtaatgccg

SEQ ID NO: 187811 - DNA, 55 bp, Artificial
  Synthetic oligonucleotide
ttgattgacaccaacttcaacggcagaagcacctaaacgagaagcaggcatcccc

SEQ ID NO: 187812 - DNA, 55 bp, Artificial
  Synthetic oligonucleotide
ttgatctatttatcaaacttcatggcggcgggagcaaagcaaagcgtgattattt

SEQ ID NO: 187813 - DNA, 55 bp, Artificial
  Synthetic oligonucleotide
ttgagtacctagatatccaatcaagcgtccatcaagaactaacggactacggtca

SEQ ID NO: 187814 - DNA, 55 bp, Artificial
  Synthetic oligonucleotide
cacaccagcaaccacatagtaactaccaaggacagctaccccgatataggtccca

SEQ ID NO: 187815 - DNA, 55 bp, Artificial
  Synthetic oligonucleotide
ttgaaacgactaaagcattacttccacctttgctctcgcttttcgtagttgcttc

SEQ ID NO: 187816 - DNA, 55 bp, Artificial
  Synthetic oligonucleotide
cacacttaccgaaggacgtacaattcgctcttgaatatcctatgagttcagacga

SEQ ID NO: 187817 - DNA, 57 bp, Artificial
  Synthetic oligonucleotide
atcttaattagactgtctctattacttggattatctggccttttactattgcttaaa

SEQ ID NO: 187818 - DNA, 55 bp, Artificial
  Synthetic oligonucleotide
cacagacgatggcgacatgcgatataacccagtagaacacggaaatgacgtgtcg

SEQ ID NO: 187819 - DNA, 55 bp, Artificial
  Synthetic oligonucleotide
cacagactcaagtcctgaaatttatcaagacggtaaaacgtacgtggtttatgac

SEQ ID NO: 187820 - DNA, 55 bp, Artificial
  Synthetic oligonucleotide
caccagaagcaacatagccactgtttggaccaccataaccgaagttaataccgcc

SEQ ID NO: 187821 - DNA, 55 bp, Artificial
  Synthetic oligonucleotide
caccagtaaagccactagctaaaagtgcacgacgcgggatatttgctataaagcc

SEQ ID NO: 187822 - DNA, 55 bp, Artificial
  Synthetic oligonucleotide
cacccatggaaggaccaatcaaattccctgcgatggctcctgtagccaatgtccc

SEQ ID NO: 187823 - DNA, 55 bp, Artificial
  Synthetic oligonucleotide
cacccgctctaagatcagaagctgtcacttcagtaccatatagtttatttggacc

SEQ ID NO: 187824 - DNA, 55 bp, Artificial
  Synthetic oligonucleotide
caccctcgttggtatgctttccttaggtgtttactcatatggacaattggcccac

SEQ ID NO: 187825 - DNA, 55 bp, Artificial
  Synthetic oligonucleotide
cacctattccatcaggctccatgtgctctacatagatttgatacgaacctcccgc

SEQ ID NO: 187826 - DNA, 55 bp, Artificial
  Synthetic oligonucleotide
cacctattgccaagtgtcattattagccagtgggcgtatgagagtgagtggggac

SEQ ID NO: 187827 - DNA, 55 bp, Artificial
  Synthetic oligonucleotide
ataacacccttacaaattccgtcttctactacgagttgctcaacaattccttgtc

SEQ ID NO: 187828 - DNA, 58 bp, Artificial
  Synthetic oligonucleotide
cggagcgaagctaggaacagattatgaaaaggacgtgattaaacatgagttggaccac

SEQ ID NO: 187829 - DNA, 55 bp, Artificial
  Synthetic oligonucleotide
cacgaggtgttcgtttagttcgagggattgattatagcgagctattaaaagttcc

SEQ ID NO: 187830 - DNA, 55 bp, Artificial
  Synthetic oligonucleotide
cagaaaaccttgttccacaatcgctaagtttgtttagctttgttgaaagcagtag

SEQ ID NO: 187831 - DNA, 55 bp, Artificial
  Synthetic oligonucleotide
ataaaacaggcatctctagtaaaattgttaaagctagccaaccgattgtcgccaa

SEQ ID NO: 187832 - DNA, 55 bp, Artificial
  Synthetic oligonucleotide
cgttccataagttgtatctgtcagctgaatcggggcacctgtagcattatgtaag

SEQ ID NO: 187833 - DNA, 53 bp, Artificial
  Synthetic oligonucleotide
cgttcgaaaatcacccgcacgcttacggcttgttcgacgtttcaattcggctt

SEQ ID NO: 187834 - DNA, 55 bp, Artificial
  Synthetic oligonucleotide
agacgtccgtatcaatccatttcaaatctactcacgcaatacgctagatgtcgat

SEQ ID NO: 187835 - DNA, 55 bp, Artificial
  Synthetic oligonucleotide
cgttgacgacacctgtagctgtatcttgtgttgtaacccaagcgattggccgagg

SEQ ID NO: 187836 - DNA, 55 bp, Artificial
  Synthetic oligonucleotide
cgttgcgggtaataccgtaacactgaagggcacgcattaaggcgtcatcttaatg

SEQ ID NO: 187837 - DNA, 55 bp, Artificial
  Synthetic oligonucleotide
tctatgccagcaaagctggaacggtcgttaaagcggagtttcacccttcatgggg

SEQ ID NO: 187838 - DNA, 55 bp, Artificial
  Synthetic oligonucleotide
cgtttaaacgactggctgacaaggacgtgtataagtcttctgccatctcattcgc

SEQ ID NO: 187839 - DNA, 59 bp, Artificial
  Synthetic oligonucleotide
cggaatcctagtttatccgtctacaatgctgttattcataatgacgaagtaagtccgca

SEQ ID NO: 187840 - DNA, 55 bp, Artificial
  Synthetic oligonucleotide
cgtttaaataacgactgcctgaaattagtgaacgtgctagctttctgctagccgg

SEQ ID NO: 187841 - DNA, 55 bp, Artificial
  Synthetic oligonucleotide
cgtttagaacgtgaaatgaaaattgcacaaacgcagttagaacaagccgttgacg

SEQ ID NO: 187842 - DNA, 55 bp, Artificial
  Synthetic oligonucleotide
cgtttccatatgcataccgcattcttggggaacaagatatggagggatagggagt

SEQ ID NO: 187843 - DNA, 55 bp, Artificial
  Synthetic oligonucleotide
cgtttcggtctcctcttgagcgattaatggttccgaattgtagtaactggcgccc

SEQ ID NO: 187844 - DNA, 55 bp, Artificial
  Synthetic oligonucleotide
ctaagttatggtaaaatccctaccgcaatcgaccaagtgcgaatcaatcgtttgg

SEQ ID NO: 187845 - DNA, 55 bp, Artificial
  Synthetic oligonucleotide
ctaatgctcaattcttccgaggtaggaatgtcttccgagcgaagaaacaacggcg

SEQ ID NO: 187846 - DNA, 55 bp, Artificial
  Synthetic oligonucleotide
ctacacaacggtcgacgtggcctatcaacatgcgcttcatttactagaagcgggg

SEQ ID NO: 187847 - DNA, 55 bp, Artificial
  Synthetic oligonucleotide
tcgtttagcttatgatatcttcgtggatcgcatccgaaaatatatcggcggatac

SEQ ID NO: 187848 - DNA, 55 bp, Artificial
  Synthetic oligonucleotide
tcgttcctaacaataaattaccgacatttccgtgcataccgtatgttccatcgtc

SEQ ID NO: 187849 - DNA, 55 bp, Artificial
  Synthetic oligonucleotide
tcgtggaaaatcaggatcctccatcgttcgtccttcacggataggctgattggga

SEQ ID NO: 187850 - DNA, 60 bp, Artificial
  Synthetic oligonucleotide
cggaaatgcggttacttcttatcatcataaagatctaatgatgatagagttgacacagca

SEQ ID NO: 187851 - DNA, 55 bp, Artificial
  Synthetic oligonucleotide
tctggaggacatccgtctactctatgaccaggcgaacggcacatacgggtaccgt

SEQ ID NO: 187852 - DNA, 55 bp, Artificial
  Synthetic oligonucleotide
cgtcaataaataccttatgcgctttaacgtcccaaccgtctgctttacctgtgta

SEQ ID NO: 187853 - DNA, 55 bp, Artificial
  Synthetic oligonucleotide
cgtcgtttcaaaatccgcaggttagataaggacgacttcggctatctgattgaac

SEQ ID NO: 187854 - DNA, 55 bp, Artificial
  Synthetic oligonucleotide
cgtgaaaatgataagggatcaaaaccaagacgaagattcacttatgaagacaacg

SEQ ID NO: 187855 - DNA, 55 bp, Artificial
  Synthetic oligonucleotide
tctgcgactgtagtaggctgtctgtctaacggctccgcatccccaaccatcgcat

SEQ ID NO: 187856 - DNA, 55 bp, Artificial
  Synthetic oligonucleotide
cgtgaccgttttattcgctacatcggtctgtgcgattgcaaccacagcgcctgta

SEQ ID NO: 187857 - DNA, 55 bp, Artificial
  Synthetic oligonucleotide
cgtgattcgtcaggctccctgcgatgttttaatagtgcactctgattctaatggt

SEQ ID NO: 187858 - DNA, 55 bp, Artificial
  Synthetic oligonucleotide
cgtgcaaattggtactcttgatgattttcgtactactcgtgatgatggttcttct

SEQ ID NO: 187859 - DNA, 55 bp, Artificial
  Synthetic oligonucleotide
cgtgcacatctacgattcggctttgtcctgcgaagtcaaaattccaaatgcggtc

SEQ ID NO: 187860 - DNA, 55 bp, Artificial
  Synthetic oligonucleotide
aagtccccgatccacccatcgtagccgttacaagctgtcactactgggatccctg

SEQ ID NO: 187861 - DNA, 60 bp, Artificial
  Synthetic oligonucleotide
cgctagataatgtgcaacaagggattaaacatgctattcagttaatcagtagtgccctta

SEQ ID NO: 187862 - DNA, 55 bp, Artificial
  Synthetic oligonucleotide
cgtggacgtggctatattagtgacggaggaatgccaagagaggcttattctccat

SEQ ID NO: 187863 - DNA, 55 bp, Artificial
  Synthetic oligonucleotide
cttaccactaagccatcgtttcacttccgataatcggtcataactaacactgacg

SEQ ID NO: 187864 - DNA, 55 bp, Artificial
  Synthetic oligonucleotide
cgtgggtgatcacgcgtttattggctctgcaacgaacattgttgcgccagtcacg

SEQ ID NO: 187865 - DNA, 53 bp, Artificial
  Synthetic oligonucleotide
cgtggtggaacaacgtgtagtgttttaggaaatggttgtggtaagtcacgtgg

SEQ ID NO: 187866 - DNA, 55 bp, Artificial
  Synthetic oligonucleotide
cgtgtggaaagcctgctctccaccagcccagattccaacaatggcgaagacagag

SEQ ID NO: 187867 - DNA, 55 bp, Artificial
  Synthetic oligonucleotide
cgttagaattgaatcaccacaacgtaagcgccccatagaacagtacctgtacgtc

SEQ ID NO: 187868 - DNA, 52 bp, Artificial
  Synthetic oligonucleotide
cgttatggggtttcaacggaatttgtacgaactggcggaacacgcctaggaa

SEQ ID NO: 187869 - DNA, 55 bp, Artificial
  Synthetic oligonucleotide
cgttcactacaacgaagaggattacctagcttagacgaaatttcagatcctattg

SEQ ID NO: 187870 - DNA, 55 bp, Artificial
  Synthetic oligonucleotide
ctgttgagttcgtcatttcgaatccagaaggtgtaccttattctgcgattggtca

SEQ ID NO: 187871 - DNA, 55 bp, Artificial
  Synthetic oligonucleotide
tccccattctgtggggcagttccagtgatacgaataaacgccaagtaacctagtg

SEQ ID NO: 187872 - DNA, 55 bp, Artificial
  Synthetic oligonucleotide
cgccttttttcggtcatcaagcattagattgtagaccttacggacacaaccaaaa

SEQ ID NO: 187873 - DNA, 55 bp, Artificial
  Synthetic oligonucleotide
ctctgtaccaatgcgcttaacggagcccatttcagtggaagttcgtggcgagtgc

SEQ ID NO: 187874 - DNA, 55 bp, Artificial
  Synthetic oligonucleotide
ctctgtggagcgtcgttaccaacgaatcccaaagcgacttgcaagtttcgtgctg

SEQ ID NO: 187875 - DNA, 55 bp, Artificial
  Synthetic oligonucleotide
ctgacagtgcgaggatatgaattgacgttacgaaagtcagaggctgaattagtct

SEQ ID NO: 187876 - DNA, 55 bp, Artificial
  Synthetic oligonucleotide
ctgaccgaagggtaggcgttagtcggaagtattggaatgtgaatcgaaaatggca

SEQ ID NO: 187877 - DNA, 55 bp, Artificial
  Synthetic oligonucleotide
tcgaatccacttttgcagagatgaatcatcaggagtataaaccatttgaagggat

SEQ ID NO: 187878 - DNA, 55 bp, Artificial
  Synthetic oligonucleotide
ctgagaatcggcgactccctcgtggtaatgcattactgcaactccgctatttcct

SEQ ID NO: 187879 - DNA, 55 bp, Artificial
  Synthetic oligonucleotide
tccttcagaaagttccgctaacgcaaattccaacttgtcatcaattgaatggacc

SEQ ID NO: 187880 - DNA, 55 bp, Artificial
  Synthetic oligonucleotide
ctgcacgaaaatttcctagaggtaggaactgtatctaatatgccggaggtcgcaa

SEQ ID NO: 187881 - DNA, 55 bp, Artificial
  Synthetic oligonucleotide
ctggtagcatccttggtatgaaccgtaatctattgatgaaagcttctgttcgttt

SEQ ID NO: 187882 - DNA, 55 bp, Artificial
  Synthetic oligonucleotide
ctgcatgataaatcgccccaccggaagtctcaaacaagtaattgactgcgatacg

SEQ ID NO: 187883 - DNA, 55 bp, Artificial
  Synthetic oligonucleotide
cgccttgttggtcatcatacgaacgtgtttgtagttcgccatttaccccgactaa

SEQ ID NO: 187884 - DNA, 55 bp, Artificial
  Synthetic oligonucleotide
ctgccgatattttgactgtcatgggcggttcagcaatagatactattgagcagac

SEQ ID NO: 187885 - DNA, 55 bp, Artificial
  Synthetic oligonucleotide
ctggaatccttatacgattaagaatagattaggtgtgattggcttacagctgtac

SEQ ID NO: 187886 - DNA, 55 bp, Artificial
  Synthetic oligonucleotide
tccgtattcataaccagtagcctctaaaacgtagtccatcggtgggatacctagc

SEQ ID NO: 187887 - DNA, 55 bp, Artificial
  Synthetic oligonucleotide
aaggggccataactgccaatttgtggtgtttgagtgatcgtgaagctatgattcg

SEQ ID NO: 187888 - DNA, 55 bp, Artificial
  Synthetic oligonucleotide
ctgggcaacgatctgtcaacaaataagagagcgacactacaagccccaacctgta

SEQ ID NO: 187889 - DNA, 55 bp, Artificial
  Synthetic oligonucleotide
ctgggtcaaaggtgctttactgcttgttggtggagcgatcgtttatttcttgatt

SEQ ID NO: 187890 - DNA, 55 bp, Artificial
  Synthetic oligonucleotide
tcgtattccggcttgactggctcaagtaaatctttcaagacggagattctgtttt

SEQ ID NO: 187891 - DNA, 55 bp, Artificial
  Synthetic oligonucleotide
tcgtaatcaatcagccgtatctgaaatagcacttcgttggatcaggagccatcct

SEQ ID NO: 187892 - DNA, 55 bp, Artificial
  Synthetic oligonucleotide
agcaccacgtgttgtcactaaagcagctagcgaaacaaaccaagtcatgttagtg

SEQ ID NO: 187893 - DNA, 55 bp, Artificial
  Synthetic oligonucleotide
ctattccctatggtttagtgcagctatttaaccgagtagagccagacggaaagcg

SEQ ID NO: 187894 - DNA, 56 bp, Artificial
  Synthetic oligonucleotide
cgatctcgaacaccgatttataacgtcattaatttcttgaaagaaggccatacggc

SEQ ID NO: 187895 - DNA, 55 bp, Artificial
  Synthetic oligonucleotide
tcgggacacttaattcgacttcatagacgaaggaaccgttgctaccccgatggct

SEQ ID NO: 187896 - DNA, 55 bp, Artificial
  Synthetic oligonucleotide
agattctgaatcactggctattgatattctgacattccttacggggatttcctct

SEQ ID NO: 187897 - DNA, 55 bp, Artificial
  Synthetic oligonucleotide
ctcacatgcaccgtctacagcggaaacttggacgttccatgactactctaggggc

SEQ ID NO: 187898 - DNA, 55 bp, Artificial
  Synthetic oligonucleotide
ctcagtcaatagatccgttagcaggatattctgatctacaaattgagtacgcacg

SEQ ID NO: 187899 - DNA, 55 bp, Artificial
  Synthetic oligonucleotide
ctccaacaattcaacgagctgcaaagcagctactctaaaacgatgttccgcttgt

SEQ ID NO: 187900 - DNA, 55 bp, Artificial
  Synthetic oligonucleotide
tcggagcaattgattgaccacgggagtaaagtgctgttggctcgtcaacagtttg

SEQ ID NO: 187901 - DNA, 55 bp, Artificial
  Synthetic oligonucleotide
ctccctattgtctattgggacataagtgaatagcttatggactgtcttagtagag

SEQ ID NO: 187902 - DNA, 55 bp, Artificial
  Synthetic oligonucleotide
ctccgccttgcttgctggtcttaagaaagagtagtactattattgcaaacgtaat

SEQ ID NO: 187903 - DNA, 55 bp, Artificial
  Synthetic oligonucleotide
ctcgaacgttgttggtaatgcgccaacatttctacgagataatcttcggcgtggg

SEQ ID NO: 187904 - DNA, 55 bp, Artificial
  Synthetic oligonucleotide
tcgcaggaattgcaaccttctttgtgatcacaccaaagtatagttcacaagccca

SEQ ID NO: 187905 - DNA, 52 bp, Artificial
  Synthetic oligonucleotide
cgaggtcaaaacgtcgtatacgagcttttagaggggaataagagggttcgcg

SEQ ID NO: 187906 - DNA, 55 bp, Artificial
  Synthetic oligonucleotide
ctctacgttgtacccgataagctagtacccaagcatcactaggcaacgtggtctc

SEQ ID NO: 187907 - DNA, 54 bp, Artificial
  Synthetic oligonucleotide
cttaaaccacgtgggtctacatcgggatgacgtagtttcaaaagatcgacaacg

SEQ ID NO: 187908 - DNA, 55 bp, Artificial
  Synthetic oligonucleotide
tcgagccttctaaaactgcaagacgattatttgctgcacttagaacgtcacagac

SEQ ID NO: 187909 - DNA, 55 bp, Artificial
  Synthetic oligonucleotide
ctctcctggataaattcattaaggatctgatcatccaaattttggccatgatcgc

SEQ ID NO: 187910 - DNA, 55 bp, Artificial
  Synthetic oligonucleotide
tgcaagaggttttgcggagaattgtattattacgcatccttttgacaatcggggc

SEQ ID NO: 187911 - DNA, 55 bp, Artificial
  Synthetic oligonucleotide
cgattaagtcatgtgttttaaatgcacctttggagaattgttcatctcctcgacg

SEQ ID NO: 187912 - DNA, 55 bp, Artificial
  Synthetic oligonucleotide
cgcaaaatgctaaaagctccagttgtattgcctaatggtactattcaatttcccg

SEQ ID NO: 187913 - DNA, 55 bp, Artificial
  Synthetic oligonucleotide
cgcaagctttcggggtgtaggtaaggacaccgtaaaagacattcgtcattcgatg

SEQ ID NO: 187914 - DNA, 55 bp, Artificial
  Synthetic oligonucleotide
cgcacctataggaagtctcaccctgaggaacgcgtgccatgcacgaaaaccgtct

SEQ ID NO: 187915 - DNA, 55 bp, Artificial
  Synthetic oligonucleotide
cgcacgaaagaattacacgcgaagtggtcaggtggtcgaattcaaaactgggcta

SEQ ID NO: 187916 - DNA, 57 bp, Artificial
  Synthetic oligonucleotide
ctgattagcgagttcctgcttagaaacttgtagctccttttgaacgtctttgtattc

SEQ ID NO: 187917 - DNA, 56 bp, Artificial
  Synthetic oligonucleotide
cgagagggttcaaacgaatggtagaagacgcgggaatgacccgcagcatgtcccgg

SEQ ID NO: 187918 - DNA, 55 bp, Artificial
  Synthetic oligonucleotide
cgcacgctgggtcgttaacaagtctgtcatggaagtcgctagatccaccgtcgac

SEQ ID NO: 187919 - DNA, 55 bp, Artificial
  Synthetic oligonucleotide
cgcagaaatgattatacgccacatttaggaatgattgcggacatgttacgtcacc

SEQ ID NO: 187920 - DNA, 55 bp, Artificial
  Synthetic oligonucleotide
cgcatgggaattcgtgggacgaaccgagttggctttctatgggaggtccgcaaat

SEQ ID NO: 187921 - DNA, 55 bp, Artificial
  Synthetic oligonucleotide
ctttcgcatgtccgtatttgtccttcgtccagacaactcgttctcccttgcattt

SEQ ID NO: 187922 - DNA, 55 bp, Artificial
  Synthetic oligonucleotide
cttgtgagggtcgttttgcgtgtagcaggattcaacgtcgctaccatgatcgtgt

SEQ ID NO: 187923 - DNA, 55 bp, Artificial
  Synthetic oligonucleotide
tgatacaacttaaatacgacattggcagaaagcccatgaaagttggtgacgataa

SEQ ID NO: 187924 - DNA, 55 bp, Artificial
  Synthetic oligonucleotide
cgccgagtaaaccactggttttatcacgaacatagctttcagcttccttgaaatc

SEQ ID NO: 187925 - DNA, 55 bp, Artificial
  Synthetic oligonucleotide
cgcctggcacagacaaccaaagaccaggtacttataaagaagtcggtcctagagg

SEQ ID NO: 187926 - DNA, 55 bp, Artificial
  Synthetic oligonucleotide
tgactcacggtcatttatcgaatgtccgatttggtttgacacagttagcaatcga

SEQ ID NO: 187927 - DNA, 55 bp, Artificial
  Synthetic oligonucleotide
cttgatgtcgttgtctaggttttcgaaggatgtttcatgtttagccacgactaag

SEQ ID NO: 187928 - DNA, 59 bp, Artificial
  Synthetic oligonucleotide
ccttttaagtatacacctgatggaggacaatacccgtctcatgacacgaatcagtatac

SEQ ID NO: 187929 - DNA, 55 bp, Artificial
  Synthetic oligonucleotide
cgcgactatttcttgcgctaccctagaaaagtccgtgaacaagtacgtctagtgg

SEQ ID NO: 187930 - DNA, 55 bp, Artificial
  Synthetic oligonucleotide
tggcaaggctaaccaacgattcgttgcaatctgatcgattttgtcactcatcgat

SEQ ID NO: 187931 - DNA, 55 bp, Artificial
  Synthetic oligonucleotide
cctttcaagcaccaagcaatgttcaatccacgcttacgtacaactggcgggcgct

SEQ ID NO: 187932 - DNA, 55 bp, Artificial
  Synthetic oligonucleotide
cctttggaataaccaacgtagactgtgatacattccgtttgacaatgcgcttttc

SEQ ID NO: 187933 - DNA, 55 bp, Artificial
  Synthetic oligonucleotide
tggatgggcggtatctgtgttgcctccaatacggaagccagtctccaccccaaaa

SEQ ID NO: 187934 - DNA, 55 bp, Artificial
  Synthetic oligonucleotide
cgaagctacaaacccaaattacacccgtgcaaactgcgctaacgaaacgagctgc

SEQ ID NO: 187935 - DNA, 55 bp, Artificial
  Synthetic oligonucleotide
tgctgaagccgttagttcatattctcgaatgatttctacacgtggctttccagct

SEQ ID NO: 187936 - DNA, 55 bp, Artificial
  Synthetic oligonucleotide
aacgcttcgggtacagcgagttcgtaatccattcccattagcacgatagattccg

SEQ ID NO: 187937 - DNA, 55 bp, Artificial
  Synthetic oligonucleotide
tgctccgagtctatgatctgtatcaaacctgttcctatgccttgtggaatgacga

SEQ ID NO: 187938 - DNA, 55 bp, Artificial
  Synthetic oligonucleotide
cgactattgaactgttcaagatggatcatttgagtgggcaaccgactaggtaatc

SEQ ID NO: 187939 - DNA, 54 bp, Artificial
  Synthetic oligonucleotide
ccttgaaggaacggttcaccctactcatgaagacgccaaaaacgatccaaacga

SEQ ID NO: 187940 - DNA, 55 bp, Artificial
  Synthetic oligonucleotide
tgcgtaccgttcaaaggaacacatgatcgaggggattggactagtgatcacttca

SEQ ID NO: 187941 - DNA, 55 bp, Artificial
  Synthetic oligonucleotide
cgactgtatcattttctagatattgtaagaaaagttcgcgctcgggttttgagtc

SEQ ID NO: 187942 - DNA, 55 bp, Artificial
  Synthetic oligonucleotide
cgacttggttggcatattgagaggcacgtcccaagttctcgccatcttcggcagt

SEQ ID NO: 187943 - DNA, 55 bp, Artificial
  Synthetic oligonucleotide
aggttcacccctttcatttatatgtggacctactgaggcaatgttcgtgaggaca

SEQ ID NO: 187944 - DNA, 55 bp, Artificial
  Synthetic oligonucleotide
tgccgtaacttgtgtggagtcgcatgggtaaggtgtttatgtcggcgttcaatgg

SEQ ID NO: 187945 - DNA, 55 bp, Artificial
  Synthetic oligonucleotide
cgagttatttctaccatgaaatctttacctaacgtcaactgagcaccagtggttg

SEQ ID NO: 187946 - DNA, 54 bp, Artificial
  Synthetic oligonucleotide
cgatacgccgtttacacctaacgaaccaaatcagggaacatccggattactgac

SEQ ID NO: 187947 - DNA, 55 bp, Artificial
  Synthetic oligonucleotide
cgatagctgtttaataattgataggttccaacagaacggctggtttcgttaacca

SEQ ID NO: 187948 - DNA, 55 bp, Artificial
  Synthetic oligonucleotide
cggctatactgatgaaccattggcagtaacaccatgcggaattcactaccttgcg

SEQ ID NO: 187949 - DNA, 55 bp, Artificial
  Synthetic oligonucleotide
cggctatatgtcgacagatgtgcctgttagtttcatgttaacgaatggaccatca

SEQ ID NO: 187950 - DNA, 55 bp, Artificial
  Synthetic oligonucleotide
ccgtcattggctatcaattttcgtttaaaccggaaatcaagcaagcagacgactt

SEQ ID NO: 187951 - DNA, 55 bp, Artificial
  Synthetic oligonucleotide
agcgttagcgcccctctcacgttgcttgatataacctagactagatcgttaacgt

SEQ ID NO: 187952 - DNA, 55 bp, Artificial
  Synthetic oligonucleotide
tgaaggaccttcattttcgtgatccccggtaacaccaagcgcccgtccggatgag

SEQ ID NO: 187953 - DNA, 55 bp, Artificial
  Synthetic oligonucleotide
tcttggatagctcttcgttgctcgatactacgataaaggctctcttccgaaagtg

SEQ ID NO: 187954 - DNA, 55 bp, Artificial
  Synthetic oligonucleotide
cggtaattaagcgcgtatcgcctctcttgactgtcccgacaaaacacgcacctgc

SEQ ID NO: 187955 - DNA, 55 bp, Artificial
  Synthetic oligonucleotide
cggtcatcggtataggcttaggtgtgaccatgactacctcgactgtcagtgcaca

SEQ ID NO: 187956 - DNA, 55 bp, Artificial
  Synthetic oligonucleotide
cggtctctgtcgaaagatacactaccgcaagaatactcttctcatggcagcatgg

SEQ ID NO: 187957 - DNA, 53 bp, Artificial
  Synthetic oligonucleotide
cggttaatagtcattggccaacctgcgttaatatttccacgggtttcgacttg

SEQ ID NO: 187958 - DNA, 55 bp, Artificial
  Synthetic oligonucleotide
cggttctaagcctaccgctcgaatcgcttctagagcgacgtcgactgctcgtggg

SEQ ID NO: 187959 - DNA, 55 bp, Artificial
  Synthetic oligonucleotide
agcgctagaggaataaatccactacaaagcgaaaagtggttggatagctacgttc

SEQ ID NO: 187960 - DNA, 55 bp, Artificial
  Synthetic oligonucleotide
tctggcgcttggaaaagcaatacgacttcatatcttgatgcaaccgcatggctag

SEQ ID NO: 187961 - DNA, 56 bp, Artificial
  Synthetic oligonucleotide
ccggatttacagcacacagattggggattttcttatgacccggttggattaagata

SEQ ID NO: 187962 - DNA, 53 bp, Artificial
  Synthetic oligonucleotide
cttcaactatcggacaaacgatcaagtccgttggtggtttctaaggggaagct

SEQ ID NO: 187963 - DNA, 55 bp, Artificial
  Synthetic oligonucleotide
cgtaatccgaatgacctgtgtttgatttctgttgcttggttgtagtacgttctct

SEQ ID NO: 187964 - DNA, 55 bp, Artificial
  Synthetic oligonucleotide
cgtacttgtcgcctgcttcgggaagtacatgtgtaatcattgatcggcgaattcg

SEQ ID NO: 187965 - DNA, 55 bp, Artificial
  Synthetic oligonucleotide
cgtagatagcctctgtcaagactatcaatggaagaaaccacggatttatcggcaa

SEQ ID NO: 187966 - DNA, 51 bp, Artificial
  Synthetic oligonucleotide
cgcgccgcctcttaaggtaaacttccgaccaaatagttctaactgtttccc

SEQ ID NO: 187967 - DNA, 52 bp, Artificial
  Synthetic oligonucleotide
cttcttgggttaaacgaggctatgaagttactgtccttacggggatacctaa

SEQ ID NO: 187968 - DNA, 55 bp, Artificial
  Synthetic oligonucleotide
cgctccttctagctataagcgcacaggaagacgagagaagcttcctgagtgggca

SEQ ID NO: 187969 - DNA, 55 bp, Artificial
  Synthetic oligonucleotide
cgctcgccgtatgcgtgttttaattgcttcgatgataaattggttgtgaatatcg

SEQ ID NO: 187970 - DNA, 55 bp, Artificial
  Synthetic oligonucleotide
cttcatataaggaatctcaacaagccaaacaagagcgtccagcagttaagtccga

SEQ ID NO: 187971 - DNA, 55 bp, Artificial
  Synthetic oligonucleotide
cgctctctcctcgataaatggaagtgaggagcataccatccggccactggacatc

SEQ ID NO: 187972 - DNA, 60 bp, Artificial
  Synthetic oligonucleotide
ccgagatctatcttagttcccatgttgttagtcacactaccgcggaatgtcacactcgta

SEQ ID NO: 187973 - DNA, 55 bp, Artificial
  Synthetic oligonucleotide
cgctgcattcagctttatggttgccatcttcagtagtgacaacaacagttgtggt

SEQ ID NO: 187974 - DNA, 55 bp, Artificial
  Synthetic oligonucleotide
cgctttcaagcattgctttgagcgttttggcactcaatctgtctaaattgacggc

SEQ ID NO: 187975 - DNA, 55 bp, Artificial
  Synthetic oligonucleotide
cgctttcgtgataagtataaatgtacgatttgtcataaaccagtgtttggtcgtg

SEQ ID NO: 187976 - DNA, 55 bp, Artificial
  Synthetic oligonucleotide
cggaaggacgaatattgttgaggttttagaaccatgtaaaacaacacagttctca

SEQ ID NO: 187977 - DNA, 55 bp, Artificial
  Synthetic oligonucleotide
cggaatctacacgactataggaattggcgataacccgctacttgctaaactagcc

SEQ ID NO: 187978 - DNA, 55 bp, Artificial
  Synthetic oligonucleotide
cggacccattcgtatatcgaatatggaggaacgggtaatcaagcagactatgcga

SEQ ID NO: 187979 - DNA, 55 bp, Artificial
  Synthetic oligonucleotide
cggacgaagagacaagtaatcgatgcgaataagcatctttaccctatatcagcga

SEQ ID NO: 187980 - DNA, 55 bp, Artificial
  Synthetic oligonucleotide
cggactgattgttttgaacatgcctatcctcaaccaatgagaactttcgacgaaa

SEQ ID NO: 187981 - DNA, 55 bp, Artificial
  Synthetic oligonucleotide
cggagcatacccactgcacttggtggctccaagatgcggagagcgtggtaggctt

SEQ ID NO: 187982 - DNA, 55 bp, Artificial
  Synthetic oligonucleotide
cggagtattcgtcaaagaggccgatttgtaaggttcgaggtggaagagatgcgaa

SEQ ID NO: 187983 - DNA, 56 bp, Artificial
  Synthetic oligonucleotide
cccgtgtgaccatatgttgggtctactgtccaacctgttccccattggccacctcg

SEQ ID NO: 187984 - DNA, 54 bp, Artificial
  Synthetic oligonucleotide
ttttgtattaccatctactcaagaatttcgtcaagtcgatgaaccctggttcca

SEQ ID NO: 187985 - DNA, 54 bp, Artificial
  Synthetic oligonucleotide
ttttcacgtgaaagatacgcctaataatcatgctgtaggtctaatgatggaggc

SEQ ID NO: 187986 - DNA, 54 bp, Artificial
  Synthetic oligonucleotide
tcactaggcaatggcctcggtacaaatggtagtgcctacaatccgaaactaagt

SEQ ID NO: 187987 - DNA, 54 bp, Artificial
  Synthetic oligonucleotide
aaaaacgttgcgatagtcgtcaaaaatgatttcattcgctaaggttgtggcacc

SEQ ID NO: 187988 - DNA, 54 bp, Artificial
  Synthetic oligonucleotide
taagtacgcatatgaatagtttattagacggacaagcatggttgccagctcata

SEQ ID NO: 187989 - DNA, 54 bp, Artificial
  Synthetic oligonucleotide
tgatgtaagacatgctgaagccccatgaaagggacttgacgtccggcgtctaat

SEQ ID NO: 187990 - DNA, 54 bp, Artificial
  Synthetic oligonucleotide
tgataccagttaaagcaatccctagtttaagaccaccttctaatgcgcgagtgg

SEQ ID NO: 187991 - DNA, 54 bp, Artificial
  Synthetic oligonucleotide
tggtccactagtaccaggtttttgatctccaggtataataggttctcctccgtt

SEQ ID NO: 187992 - DNA, 54 bp, Artificial
  Synthetic oligonucleotide
gttgagtcggaagtgcccacttcccgcccgttaattgccagcgtcacaccgcgc

SEQ ID NO: 187993 - DNA, 54 bp, Artificial
  Synthetic oligonucleotide
tacatcgtctttagtcgatcaatgttcacttcctcattgatcgttgcacctata

SEQ ID NO: 187994 - DNA, 56 bp, Artificial
  Synthetic oligonucleotide
cccgcctgtaggtgcgcatgggaattcgtgggacgaaccgagttggctttctatgg

SEQ ID NO: 187995 - DNA, 54 bp, Artificial
  Synthetic oligonucleotide
tgtacggactgaacaatcaagtttcatttccgagcggccgacaatcacatccgg

SEQ ID NO: 187996 - DNA, 54 bp, Artificial
  Synthetic oligonucleotide
gttatttaagccgtaaatcacgcccgtgtgaccatatgttgggtctactgtcca

SEQ ID NO: 187997 - DNA, 54 bp, Artificial
  Synthetic oligonucleotide
tgtcgcatcaattaagtccgagaaggagtgagctgaatcctgcctaatacgggt

SEQ ID NO: 187998 - DNA, 54 bp, Artificial
  Synthetic oligonucleotide
aaaactatgtgttctcgctcgtctcagaagttatgtaagtggctgacaaccact

SEQ ID NO: 187999 - DNA, 54 bp, Artificial
  Synthetic oligonucleotide
aatggcagaaatgaaacgcttgaataaagagaagcaacaggagcgtcttgttgc

SEQ ID NO: 188000 - DNA, 54 bp, Artificial
  Synthetic oligonucleotide
ttacaatacacgagaagtgcgaaataccaggaggtaacatttcgagcattgcct

SEQ ID NO: 188001 - DNA, 54 bp, Artificial
  Synthetic oligonucleotide
tcgattggatgaccggcggtatagaagctgacccgtggtcccaccatcacatga

SEQ ID NO: 188002 - DNA, 54 bp, Artificial
  Synthetic oligonucleotide
aaaatccttttacgcgagcgtagaatgtgtagaacgtggcttagatccccttaa

SEQ ID NO: 188003 - DNA, 54 bp, Artificial
  Synthetic oligonucleotide
ttggtaagtgtccctcaactatgggctcaactcgactaagtaattggccatcac

SEQ ID NO: 188004 - DNA, 54 bp, Artificial
  Synthetic oligonucleotide
ttggtgtaccttgtggtttcgtcaagtgttcgatgtacttagatacttcgtttt

SEQ ID NO: 188005 - DNA, 54 bp, Artificial
  Synthetic oligonucleotide
ccactaaaaccgtcttagagagccttatatggcgttctaagactaaaccaattc

SEQ ID NO: 188006 - DNA, 54 bp, Artificial
  Synthetic oligonucleotide
tttaggcttggcagtcttgttagaagcgaatatggagcaaacacataaggatgt

SEQ ID NO: 188007 - DNA, 54 bp, Artificial
  Synthetic oligonucleotide
cataggttgcttgcgctaaacttaaggcgtggggtaaccgattgaaatttgaat

SEQ ID NO: 188008 - DNA, 54 bp, Artificial
  Synthetic oligonucleotide
caacggcggctgcttttcacgaccaaggcttggcaacgattggtgtcacggtcg

SEQ ID NO: 188009 - DNA, 54 bp, Artificial
  Synthetic oligonucleotide
gcacgggcgaattttgacatgatgtattttaacaacgcttcaccttcaaactgc

SEQ ID NO: 188010 - DNA, 54 bp, Artificial
  Synthetic oligonucleotide
cacacgcaaagaagcggatataaggaaagtagtagtatataacttatagttatc

SEQ ID NO: 188011 - DNA, 54 bp, Artificial
  Synthetic oligonucleotide
actcatgttatcagcatttctcttggcatttgttgctctcgtagctcgttgata

SEQ ID NO: 188012 - DNA, 52 bp, Artificial
  Synthetic oligonucleotide
ctcggcttttagataagtccaaaccaatccaacaaggctccccacttaagtt

SEQ ID NO: 188013 - DNA, 54 bp, Artificial
  Synthetic oligonucleotide
agctgcagcgatccattccgtagatggctatgccctacacttaccaccatgagt

SEQ ID NO: 188014 - DNA, 54 bp, Artificial
  Synthetic oligonucleotide
gcgattaagtatatggcaggaggggctggtagtgctgattttggttcagcccgg

SEQ ID NO: 188015 - DNA, 54 bp, Artificial
  Synthetic oligonucleotide
ctattggcttatctaagcgaaaaaagtcttgctagtgagccttatttgaacctg

SEQ ID NO: 188016 - DNA, 60 bp, Artificial
  Synthetic oligonucleotide
ccacagcgagaatttatcgtgcaaattggtactcttgatgattttcgtactactcgtgat

SEQ ID NO: 188017 - DNA, 54 bp, Artificial
  Synthetic oligonucleotide
cgatctccgactaatcctcgtttcatgaaccatacggggctctttattactctc

SEQ ID NO: 188018 - DNA, 54 bp, Artificial
  Synthetic oligonucleotide
gtacgctgaccaataacttgctcgacgcttttgtagttatttgcccatttatgg

SEQ ID NO: 188019 - DNA, 54 bp, Artificial
  Synthetic oligonucleotide
ccttatgtggggcacgtgtggcatggcgcatacactcatgcggaacaacggatg

SEQ ID NO: 188020 - DNA, 54 bp, Artificial
  Synthetic oligonucleotide
gcggctagctcaggatgccactgaatgcctaagatcggtgcgccataggcggtg

SEQ ID NO: 188021 - DNA, 54 bp, Artificial
  Synthetic oligonucleotide
aggtctattaccgcttaggatggcgagtctaagtttatgaaggaggtgctctaa

SEQ ID NO: 188022 - DNA, 54 bp, Artificial
  Synthetic oligonucleotide
cgacattgcctatactgtgcatcaaatcaaacgacaccccttgaaggtaataga

SEQ ID NO: 188023 - DNA, 54 bp, Artificial
  Synthetic oligonucleotide
cgacggatcgaattctaattacgtatgagatttattacaacgtgacagacgaga

SEQ ID NO: 188024 - DNA, 54 bp, Artificial
  Synthetic oligonucleotide
ccaatcgtccaaccgattggtcctaaaatgacatgtgcagccaatactgtcggt

SEQ ID NO: 188025 - DNA, 54 bp, Artificial
  Synthetic oligonucleotide
gacgccgtcagagatttatgatgcaccaaggagtcgctatgttgcttcgtttat

SEQ ID NO: 188026 - DNA, 54 bp, Artificial
  Synthetic oligonucleotide
ctgactttcgttcactaaagctgcggcaacaatatgtggcaagtgacttagagc

SEQ ID NO: 188027 - DNA, 60 bp, Artificial
  Synthetic oligonucleotide
ctctccacgaaaagcaatgataattgctgtgcttgcgctagcatacacactgatcatggg

SEQ ID NO: 188028 - DNA, 56 bp, Artificial
  Synthetic oligonucleotide
ccaagtgcgttataacttgtaggttcacccctttcatttatatgtggacctactga

SEQ ID NO: 188029 - DNA, 54 bp, Artificial
  Synthetic oligonucleotide
caatagtcaccgtttgttagtcacaggaaaacgcgtgccatatacaccggctgc

SEQ ID NO: 188030 - DNA, 54 bp, Artificial
  Synthetic oligonucleotide
cgtatcaaacagctgtgctttagccgacagcagatcatctcgctgactcgttaa

SEQ ID NO: 188031 - DNA, 54 bp, Artificial
  Synthetic oligonucleotide
gctaaggttaacgttacaatcacggttagtgtttctggtacagctgccaccgct

SEQ ID NO: 188032 - DNA, 54 bp, Artificial
  Synthetic oligonucleotide
atctttggcaaagcgttctcgtagagcttgactgttattgccgctgacagccgt

SEQ ID NO: 188033 - DNA, 53 bp, Artificial
  Synthetic oligonucleotide
aaacgacgtacaagagcccctgctagagactagtaagcggattaatcggatcg

SEQ ID NO: 188034 - DNA, 53 bp, Artificial
  Synthetic oligonucleotide
ctggctttgctaggattagccgcaggtgtaacgaacacgattttctctgcgaa

SEQ ID NO: 188035 - DNA, 53 bp, Artificial
  Synthetic oligonucleotide
tacagtgcgttttgctcctaacactcggtcagatacccatccgccgacgatac

SEQ ID NO: 188036 - DNA, 53 bp, Artificial
  Synthetic oligonucleotide
cagctgggtcgtccaagatatttatggtacgaatcatgatccgagaacctttg

SEQ ID NO: 188037 - DNA, 53 bp, Artificial
  Synthetic oligonucleotide
gccccaagtgtcagccgtacagctagcgattcccgccacaaatccccaaagga

SEQ ID NO: 188038 - DNA, 53 bp, Artificial
  Synthetic oligonucleotide
tccgactcgttttgcggaagtcttagttgttgcttcgccgtgtcctttaattc

SEQ ID NO: 188039 - DNA, 57 bp, Artificial
  Synthetic oligonucleotide
ccaaaacctcaggatgggcacataatgaggttgcctgttttgttggtaagtggtgac

SEQ ID NO: 188040 - DNA, 53 bp, Artificial
  Synthetic oligonucleotide
cagacgtagcattgcctcatgcgcgatcagaagatggcgttaatcagttaggc

SEQ ID NO: 188041 - DNA, 53 bp, Artificial
  Synthetic oligonucleotide
ctggcgaactggcccaacaaatgtaaaactcgcctgacttggtccaattaaaa

SEQ ID NO: 188042 - DNA, 53 bp, Artificial
  Synthetic oligonucleotide
cccgtgttcctacgcgaactgtcattggcgcagcaaacaatttctcgggggct

SEQ ID NO: 188043 - DNA, 52 bp, Artificial
  Synthetic oligonucleotide
acaggttctacagctacttgggaacctattactgccccttttaagaccgttc

SEQ ID NO: 188044 - DNA, 53 bp, Artificial
  Synthetic oligonucleotide
aagaatcgtaaccgtgtaagcaataaatggcgcacgaatgacacgcatcaacg

SEQ ID NO: 188045 - DNA, 53 bp, Artificial
  Synthetic oligonucleotide
gtttgcacttccgctcgtggccttagttggcggcttgctagcggctgttggga

SEQ ID NO: 188046 - DNA, 53 bp, Artificial
  Synthetic oligonucleotide
tcctcgagcggtaggaagccacagcacctctaagcggatggattcgccccgat

SEQ ID NO: 188047 - DNA, 53 bp, Artificial
  Synthetic oligonucleotide
tgtcacgaagatcgcttccgtcccgttattcaattcgctttcgacgtattcca

SEQ ID NO: 188048 - DNA, 53 bp, Artificial
  Synthetic oligonucleotide
gaacatctgtttctgtcacatcagcaaccgttagtccttctaacgggtccatg

SEQ ID NO: 188049 - DNA, 53 bp, Artificial
  Synthetic oligonucleotide
gacagaaaagaatagctcaaatgaactacctgatgtatctttgcataactggt

SEQ ID NO: 188050 - DNA, 55 bp, Artificial
  Synthetic oligonucleotide
ccaaaaaatggactggccattttttagcaaatgtcagcttaataggctagtggtt

SEQ ID NO: 188051 - DNA, 53 bp, Artificial
  Synthetic oligonucleotide
agtggctgacaaccacttatgtaattttgataagtctttcggactgacaatcc

SEQ ID NO: 188052 - DNA, 53 bp, Artificial
  Synthetic oligonucleotide
cgagcagtgttgacgcactctcgacctttacggaaactacttcacctagttcc

SEQ ID NO: 188053 - DNA, 53 bp, Artificial
  Synthetic oligonucleotide
tgtgtgggtctccgttcatactggagcttttagcttttctcctagcgtttaac

SEQ ID NO: 188054 - DNA, 53 bp, Artificial
  Synthetic oligonucleotide
cattcacaagttacgtgagttgtctggaacagatttagagggaacttccgctt

SEQ ID NO: 188055 - DNA, 53 bp, Artificial
  Synthetic oligonucleotide
gaggttccaaacgttgccaggaagtccagaatacgctgttgtcacgcttaaaa

SEQ ID NO: 188056 - DNA, 53 bp, Artificial
  Synthetic oligonucleotide
catgaaacagcagacgatgaactaaccacaccaacaccgactgttgccagtct

SEQ ID NO: 188057 - DNA, 53 bp, Artificial
  Synthetic oligonucleotide
taggtgtcacaggctgagaagggttcgtcgggttgacaggtggcgtgacagta

SEQ ID NO: 188058 - DNA, 53 bp, Artificial
  Synthetic oligonucleotide
cccacgggcaaaggctaacacgccaccggccaagagaccgttcatcgacaaag

SEQ ID NO: 188059 - DNA, 53 bp, Artificial
  Synthetic oligonucleotide
tcatcgtactagtgcttgtagcagtggttttcggcggtgcagctgcgatgggc

SEQ ID NO: 188060 - DNA, 53 bp, Artificial
  Synthetic oligonucleotide
gattcgtgacgcggaccaacaagccgccttatggaaccacgtgcaaacaggcg

SEQ ID NO: 188061 - DNA, 59 bp, Artificial
  Synthetic oligonucleotide
cattatattgaacgtacttcaaattcattaactctgatgaatttatttagtctctttca

SEQ ID NO: 188062 - DNA, 53 bp, Artificial
  Synthetic oligonucleotide
gcaaatcaagctctccgctagcgcctctgctatatccttgaaatttagttaag

SEQ ID NO: 188063 - DNA, 53 bp, Artificial
  Synthetic oligonucleotide
tcattgaacaacagcctttacgctatgacatggtactagaagaaggaggggcg

SEQ ID NO: 188064 - DNA, 53 bp, Artificial
  Synthetic oligonucleotide
tactgtcacgccacctgtcaacccgacgaacccttctcagcctgtgacaccta

SEQ ID NO: 188065 - DNA, 53 bp, Artificial
  Synthetic oligonucleotide
ttaaattgattgggccgggcatagcaatgatattgttggcgcgatgagcgaaa

SEQ ID NO: 188066 - DNA, 53 bp, Artificial
  Synthetic oligonucleotide
tactacctatgagcaaaattcagagcgtgggcgagttgtagcaaagtataatc

SEQ ID NO: 188067 - DNA, 53 bp, Artificial
  Synthetic oligonucleotide
agtcccctcacttcctcacgaaaacgagtccattcagcaggagcctgttctgg

SEQ ID NO: 188068 - DNA, 53 bp, Artificial
  Synthetic oligonucleotide
agtttaatacggggatttcttctgggaacgccaaagcgaatagcttgatcgtt

SEQ ID NO: 188069 - DNA, 53 bp, Artificial
  Synthetic oligonucleotide
agcgtgcagagatggaagcgcttgtacgtccgctatgggggatcgcaccttat

SEQ ID NO: 188070 - DNA, 53 bp, Artificial
  Synthetic oligonucleotide
ggggtagtaaagcatttgcttgtcgtggctcttgtgctgattgcgtatcccta

SEQ ID NO: 188071 - DNA, 53 bp, Artificial
  Synthetic oligonucleotide
gttaaccagtcgatatgggtttaacgtagcgattgctttgcgaatgtcagaag

SEQ ID NO: 188072 - DNA, 56 bp, Artificial
  Synthetic oligonucleotide
catgtttagagacgctgtaacccgcatggttgagccttaaaatcgtccttataaaa

SEQ ID NO: 188073 - DNA, 53 bp, Artificial
  Synthetic oligonucleotide
tgcgttagttccttgcctgcataatactgaaacatcttatgccaaatactgcc

SEQ ID NO: 188074 - DNA, 53 bp, Artificial
  Synthetic oligonucleotide
acgaggatttgcccgtacaattcctgcattcttaatggcatacggagttgaag

SEQ ID NO: 188075 - DNA, 53 bp, Artificial
  Synthetic oligonucleotide
ggtcaacgagttctactagtcgatgcagatttacgtaaacccgtcgtctataa

SEQ ID NO: 188076 - DNA, 53 bp, Artificial
  Synthetic oligonucleotide
ggtcccgccgacagccaaattgtcgcataactcgatccgttttgctcctcggc

SEQ ID NO: 188077 - DNA, 53 bp, Artificial
  Synthetic oligonucleotide
aagcgcttgtacgtccgctatgggggatcgcaccttattggacagcgtgccaa

SEQ ID NO: 188078 - DNA, 53 bp, Artificial
  Synthetic oligonucleotide
caacatagataaatcgctgcgggatcatatactccatcaccgtttcactcagt

SEQ ID NO: 188079 - DNA, 53 bp, Artificial
  Synthetic oligonucleotide
atatctttgcgcggcaaatgacaacgccgatcaaagccttagcggacagtgcg

SEQ ID NO: 188080 - DNA, 53 bp, Artificial
  Synthetic oligonucleotide
ggttgggagcgtgagttagtcggtactaacaaaatcaaagatgttcacgaata

SEQ ID NO: 188081 - DNA, 53 bp, Artificial
  Synthetic oligonucleotide
ttgtttgtactggaactactcgtaagagccgtgcaaacaacgtgttgcatggc

SEQ ID NO: 188082 - DNA, 53 bp, Artificial
  Synthetic oligonucleotide
cgactaacaacacttgggatatacgttgctacttttgttaacgatggaatagg

SEQ ID NO: 188083 - DNA, 60 bp, Artificial
  Synthetic oligonucleotide
catgccgcttcagaggatggggcctttcctcgtgcttttgcacatgtttccaagagaaat

SEQ ID NO: 188084 - DNA, 53 bp, Artificial
  Synthetic oligonucleotide
ctagctccgcaagtagacactggggaactgattgatgtcgctgtagcacagcg

SEQ ID NO: 188085 - DNA, 53 bp, Artificial
  Synthetic oligonucleotide
gtactaaacagagcgtggaaccttatactgagttatcgggacaatcgatcaag

SEQ ID NO: 188086 - DNA, 53 bp, Artificial
  Synthetic oligonucleotide
atggcagcttctttggatgtcgtatattcgacggtattacaaaatggtatccg

SEQ ID NO: 188087 - DNA, 53 bp, Artificial
  Synthetic oligonucleotide
gtagtaggatcaggaattgtggttgccaaccgcgtattagagcctagagaggt

SEQ ID NO: 188088 - DNA, 53 bp, Artificial
  Synthetic oligonucleotide
gtagtgcgactgccgtacaaatggcgatcaatacactgtcatacagcgaattg

SEQ ID NO: 188089 - DNA, 53 bp, Artificial
  Synthetic oligonucleotide
aaaacctgctagtcactgctaggaatctgctagtttgggtgctagaaacctgc

SEQ ID NO: 188090 - DNA, 53 bp, Artificial
  Synthetic oligonucleotide
ctacataataccctgttgaacgatattgcattaacaaacgaaacaatgtttta

SEQ ID NO: 188091 - DNA, 53 bp, Artificial
  Synthetic oligonucleotide
cgccattaatcacggcttgtggtaaaggagtgccatacagacttacattattc

SEQ ID NO: 188092 - DNA, 53 bp, Artificial
  Synthetic oligonucleotide
gctattcgtggaaaatcaggatcctccatcgttcgtccttcacgaatgggctg

SEQ ID NO: 188093 - DNA, 53 bp, Artificial
  Synthetic oligonucleotide
agagactagattattcaacaaggatcacagaggtatttggactcaacgagagc

SEQ ID NO: 188094 - DNA, 59 bp, Artificial
  Synthetic oligonucleotide
tggggttgaccgtatctcagtgagtccatacaagaaatggtctagagggtatcttgaac

SEQ ID NO: 188095 - DNA, 53 bp, Artificial
  Synthetic oligonucleotide
tgaacggaacccaacattaaaggactcatcacgttcaacgaatccgaccgtgt

SEQ ID NO: 188096 - DNA, 53 bp, Artificial
  Synthetic oligonucleotide
gctgtgtttgcaccaggtaagattgaaatcatggagtcaccgcttgtctcaac

SEQ ID NO: 188097 - DNA, 50 bp, Artificial
  Synthetic oligonucleotide
aaggcggtttgtttgaggttcaagtacccaacgaagaaagactaacaacg

SEQ ID NO: 188098 - DNA, 53 bp, Artificial
  Synthetic oligonucleotide
gcttcagtaacagtataagtgatttcggctaaatctcccgtcttagctaatac

SEQ ID NO: 188099 - DNA, 53 bp, Artificial
  Synthetic oligonucleotide
tgcgtatgccgctatggttaagacgtttagttacacgactcctagctgttatt

SEQ ID NO: 188100 - DNA, 53 bp, Artificial
  Synthetic oligonucleotide
cggaggcatagcggttgagcttacagcagcaatcttagcggtaataggagttt

SEQ ID NO: 188101 - DNA, 53 bp, Artificial
  Synthetic oligonucleotide
acgcccactgcggctatcggggttctgtttattgtgatccgtgcggttaccga

SEQ ID NO: 188102 - DNA, 53 bp, Artificial
  Synthetic oligonucleotide
caagcggtggaacgtcggaccatggccgaacgaaaactcgccgaaaaagggca

SEQ ID NO: 188103 - DNA, 53 bp, Artificial
  Synthetic oligonucleotide
ggcgtgacgatcgagtttctggcctatcgcccactccggaattccacccggat

SEQ ID NO: 188104 - DNA, 53 bp, Artificial
  Synthetic oligonucleotide
atacaggaaaggcaagttatcacaagacaatgacggtgatattcgtcgggctg

SEQ ID NO: 188105 - DNA, 58 bp, Artificial
  Synthetic oligonucleotide
tggcactcaaaattaatgcgacaaatgtggactatgggtatacgggataaggaacttc

SEQ ID NO: 188106 - DNA, 53 bp, Artificial
  Synthetic oligonucleotide
ttgcgccgttacgtggcagtgggaccagatgatggtcgaacagacactgtatg

SEQ ID NO: 188107 - DNA, 52 bp, Artificial
  Synthetic oligonucleotide
tctagaagcccatagcgacccccaggatctgtttcgcagtaccggacacgcg

SEQ ID NO: 188108 - DNA, 52 bp, Artificial
  Synthetic oligonucleotide
tccttacactatttataatgttgtaaacgacatgcagagacggaggattaaa

SEQ ID NO: 188109 - DNA, 52 bp, Artificial
  Synthetic oligonucleotide
tgggcgaaattcatcaccacgcgtatgttcaaaacactagacagcaaaccag

SEQ ID NO: 188110 - DNA, 52 bp, Artificial
  Synthetic oligonucleotide
cgacgtttctttaatgctattcgaaaagatgaccataccattcataccacga

SEQ ID NO: 188111 - DNA, 52 bp, Artificial
  Synthetic oligonucleotide
tcgctggttacgatcataccgttagaggcgagttcccacagctacttgatcc

SEQ ID NO: 188112 - DNA, 52 bp, Artificial
  Synthetic oligonucleotide
tcctacaagcaagatgaagcccctcgttatcatgcgagagatttagcgattt

SEQ ID NO: 188113 - DNA, 52 bp, Artificial
  Synthetic oligonucleotide
ctgtaatcaaaggcttgttatcaagtgccggcaatacagatcgttcagctac

SEQ ID NO: 188114 - DNA, 52 bp, Artificial
  Synthetic oligonucleotide
tgcgggtatttgcggcgttgagtggggcgttgctagtcggggtgccgttagg

SEQ ID NO: 188115 - DNA, 52 bp, Artificial
  Synthetic oligonucleotide
agaatctcaatataagctatattttcctcgtgttggtctaataattgccacc

SEQ ID NO: 188116 - DNA, 59 bp, Artificial
  Synthetic oligonucleotide
tggaccaccgagaacaaacacgaacaattgaaacacaagcaagaacgcttgcaaatgga

SEQ ID NO: 188117 - DNA, 52 bp, Artificial
  Synthetic oligonucleotide
cttattacttgatgcagggcagcattttcacgacctctcggtaaacggagtt

SEQ ID NO: 188118 - DNA, 52 bp, Artificial
  Synthetic oligonucleotide
tcagctagtcattatactagctgaccatacttacatttgggacctcttatgc

SEQ ID NO: 188119 - DNA, 52 bp, Artificial
  Synthetic oligonucleotide
tccggatggcgcctgacaacgccagttggcagattcagcatcccattttgct

SEQ ID NO: 188120 - DNA, 52 bp, Artificial
  Synthetic oligonucleotide
agtacctacgtggttctcggagttaaacacttctgtcccgacctcttcccga

SEQ ID NO: 188121 - DNA, 52 bp, Artificial
  Synthetic oligonucleotide
agagccagacaattggaaacccaacagcaccccgattgcggcgtgagctgcc

SEQ ID NO: 188122 - DNA, 52 bp, Artificial
  Synthetic oligonucleotide
aagctaatcgttgaaaactaaacacttgcgcacgaatactcgcaaagctctc

SEQ ID NO: 188123 - DNA, 52 bp, Artificial
  Synthetic oligonucleotide
tcttgtgccagctgactcggcaatcctgcacgggataattggcggcgtagtt

SEQ ID NO: 188124 - DNA, 52 bp, Artificial
  Synthetic oligonucleotide
cactcattatccactgatttttcgtgttgctgatcgtcagaaatcgacgata

SEQ ID NO: 188125 - DNA, 52 bp, Artificial
  Synthetic oligonucleotide
caccactgaaatgcgatcaagtaagcttgcattcgctctacctgctcggatt

SEQ ID NO: 188126 - DNA, 52 bp, Artificial
  Synthetic oligonucleotide
gttgatggcagatttggttgggagcgtgagttagtcggtactaacaaaatca

SEQ ID NO: 188127 - DNA, 60 bp, Artificial
  Synthetic oligonucleotide
tgctaagttgggcattgtttcacgaatggatttagctcaagctattcgtgcacgtacaag

SEQ ID NO: 188128 - DNA, 52 bp, Artificial
  Synthetic oligonucleotide
ggaatgaatctaagggtaaggagttgtaattcatgggagtaactttagctga

SEQ ID NO: 188129 - DNA, 52 bp, Artificial
  Synthetic oligonucleotide
ggagaagtaattagtttgttagctaatgtggcggtagttaaagcaatcggaa

SEQ ID NO: 188130 - DNA, 52 bp, Artificial
  Synthetic oligonucleotide
caattgttactgcattgggcgaaccaaacccgaaagtcgctgctacgtcaat

SEQ ID NO: 188131 - DNA, 52 bp, Artificial
  Synthetic oligonucleotide
caattggcaagattcatattggcaatcacatagtccagagattcgtagagtc

SEQ ID NO: 188132 - DNA, 52 bp, Artificial
  Synthetic oligonucleotide
ggcgcgaaaaccctggtaacaactcaccgtgagagtagccgatagaaagggc

SEQ ID NO: 188133 - DNA, 52 bp, Artificial
  Synthetic oligonucleotide
caatcggattctgtcacattcgttaaaatcgctctatccttagaggctctaa

SEQ ID NO: 188134 - DNA, 52 bp, Artificial
  Synthetic oligonucleotide
acccacttagtcaatcgcgaccaaacggatccatatatcgaaagctcgaaaa

SEQ ID NO: 188135 - DNA, 52 bp, Artificial
  Synthetic oligonucleotide
caacgagtgaactgccaagtcatttcatgagtcatatcgcacgcttgtcggt

SEQ ID NO: 188136 - DNA, 52 bp, Artificial
  Synthetic oligonucleotide
caaccaggtgaatgtttagtatctgttcgtcgctggttagcggcaggcggta

SEQ ID NO: 188137 - DNA, 52 bp, Artificial
  Synthetic oligonucleotide
aaaagacgagaaggttcctctacgccatggtgtgttcggtcaagagacttgc

SEQ ID NO: 188138 - DNA, 53 bp, Artificial
  Synthetic oligonucleotide
attaattggaggaaccttaattagacaaattcccgtaatgactgggtgtggaa

SEQ ID NO: 188139 - DNA, 55 bp, Artificial
  Synthetic oligonucleotide
gctgaaattagagcaacattcaaacactctgacatcggaacaattggtgggttcc

SEQ ID NO: 188140 - DNA, 55 bp, Artificial
  Synthetic oligonucleotide
ggagagtcagcaccaatttacttaacacttggaacagatatccaaatgcctacac

SEQ ID NO: 188141 - DNA, 55 bp, Artificial
  Synthetic oligonucleotide
ggcattcagaagttttggcccattaccaattggttctaatgcaagagaaacatta

SEQ ID NO: 188142 - DNA, 55 bp, Artificial
  Synthetic oligonucleotide
gtaccagcaattgtgatatctcccaacgctaaaataactttgtcccctggatctg

SEQ ID NO: 188143 - DNA, 55 bp, Artificial
  Synthetic oligonucleotide
gtaccaggtcgtgatggaagtacaaacgtgcaattagcaacaaaagctgaatata

SEQ ID NO: 188144 - DNA, 55 bp, Artificial
  Synthetic oligonucleotide
gtcgctgaaactggggctgctgctcactgaagatataaagagggtgaagttgtag

SEQ ID NO: 188145 - DNA, 55 bp, Artificial
  Synthetic oligonucleotide
gtcttgttttgtatcagcaacagcgttaattacagccataacttgacgtaatggg

SEQ ID NO: 188146 - DNA, 52 bp, Artificial
  Synthetic oligonucleotide
ttttaagcgagttaatgtacacgggattaactccttggcccaaaggcccaaa

SEQ ID NO: 188147 - DNA, 55 bp, Artificial
  Synthetic oligonucleotide
aagctcctaaagctgatccacggataactggtgctccgtctccatcgaagtcgta

SEQ ID NO: 188148 - DNA, 55 bp, Artificial
  Synthetic oligonucleotide
aattaatcctgcttgaaccccagcacaagcaacaagcccaagtgaagtagacagt

SEQ ID NO: 188149 - DNA, 58 bp, Artificial
  Synthetic oligonucleotide
tgtttcgatatctgaaccaattggggcaccgtgtactgcactagtcccttgttttgtg

SEQ ID NO: 188150 - DNA, 55 bp, Artificial
  Synthetic oligonucleotide
cacctattggtacaacagttcgtgattcaattgcaacagctattactggtagtgg

SEQ ID NO: 188151 - DNA, 55 bp, Artificial
  Synthetic oligonucleotide
ccaggtactacagttactcccattcctggacatgtaacattcaatgctcctgcaa

SEQ ID NO: 188152 - DNA, 55 bp, Artificial
  Synthetic oligonucleotide
ccatcaacgattgttgctttaacatcgatcattgggtatccagcaacaaccccgt

SEQ ID NO: 188153 - DNA, 55 bp, Artificial
  Synthetic oligonucleotide
ccgattattcctaaaataccaaaaggtgctgcatttgttcaaactccagctgaag

SEQ ID NO: 188154 - DNA, 55 bp, Artificial
  Synthetic oligonucleotide
cctctgcgcttatagtctttggatgggtcctaaggcaggtcgacaacccgttatg

SEQ ID NO: 188155 - DNA, 55 bp, Artificial
  Synthetic oligonucleotide
cctgctgcactacccctaccagggccaacaattatgtcatttcttctagcaaaag

SEQ ID NO: 188156 - DNA, 54 bp, Artificial
  Synthetic oligonucleotide
cgttcaatggcttatgcttttatcgggcgtaaacaaaagaaacgtgactttaga

SEQ ID NO: 188157 - DNA, 55 bp, Artificial
  Synthetic oligonucleotide
ctaacttcaccaggtgtcatttgaggatatcttgttagtaaataactaacaggtg

SEQ ID NO: 188158 - DNA, 55 bp, Artificial
  Synthetic oligonucleotide
ctatcaaacattggtggagaagtattggctttcgtctgataataggaggtagagg

SEQ ID NO: 188159 - DNA, 55 bp, Artificial
  Synthetic oligonucleotide
ctctgtctaaacctaattggtcttgaacatcgtgtccaattaaagctggtgcgat

SEQ ID NO: 188160 - DNA, 57 bp, Artificial
  Synthetic oligonucleotide
ggtactgttccttacaacagtgtttatgctgtagttaaatttggattagatggattc

SEQ ID NO: 188161 - DNA, 55 bp, Artificial
  Synthetic oligonucleotide
ctgaagccattggtattccattttcttgagctaatcatcccatgcttgaaatacc

SEQ ID NO: 188162 - DNA, 54 bp, Artificial
  Synthetic oligonucleotide
ttcgaccaattctcattcgttaggattttcagtcggcttaaaagcgtcaatatc

SEQ ID NO: 188163 - DNA, 53 bp, Artificial
  Synthetic oligonucleotide
attatccaaacacagttgacgcatatgtaattagtggtactgcttgacataac

SEQ ID NO: 188164 - DNA, 52 bp, Artificial
  Synthetic oligonucleotide
tctatcaacggctaaacttcctccagctggaacttgtgcatattcagccgct

SEQ ID NO: 188165 - DNA, 51 bp, Artificial
  Synthetic oligonucleotide
actgttgatgaaatttcacaagcgtgtggatctaccacaattgtagcgatt

SEQ ID NO: 188166 - DNA, 51 bp, Artificial
  Synthetic oligonucleotide
tagtgctgcaattcattgtgcatatccctttgctgaatcactccaactttt

SEQ ID NO: 188167 - DNA, 50 bp, Artificial
  Synthetic oligonucleotide
caaatatacacaagtttctgcggactatatcattagatttgcaaacttat

SEQ ID NO: 188168 - DNA, 50 bp, Artificial
  Synthetic oligonucleotide
aagtatatgctctggtcaaaggaccagcaccaagttttattccaccgaag

SEQ ID NO: 188169 - DNA, 57 bp, Artificial
  Synthetic oligonucleotide
gaagcgcaacatactttgcaggtatagttgttgcatattcagctagtgagtacttcg

SEQ ID NO: 188170 - DNA, 54 bp, Artificial
  Synthetic oligonucleotide
gggaacgaactacaaataattataggtccggatgcttataaacttaaagacgca

SEQ ID NO: 188171 - DNA, 55 bp, Artificial
  Synthetic oligonucleotide
ctttctgaagctagcggatttgaaggagatagttttgctcaatctacaggatgag

SEQ ID NO: 188172 - DNA, 55 bp, Artificial
  Synthetic oligonucleotide
gaagatatattgctccatgaagtcttactgtaacaagctcaggtccttgaggaac

SEQ ID NO: 188173 - DNA, 53 bp, Artificial
  Synthetic oligonucleotide
gcgattcgaacactaaccacccttttactaattcgggcactgggttaatgaat

SEQ ID NO: 188174 - DNA, 55 bp, Artificial
  Synthetic oligonucleotide
gctccaacctgagttgatgggtctttacttctcattgcacaaactttagcaacag

SEQ ID NO: 188175 - DNA, 60 bp, Artificial
  Synthetic oligonucleotide
tggcagcgcctaccgtgagccaatatgcggcaattacagcactacgtgattgcgataggg

SEQ ID NO: 188176 - DNA, 60 bp, Artificial
  Synthetic oligonucleotide
gtccgatgatttgcacaacctcgctatgcgttgctgccgaaagttcgattgccgcctcat

SEQ ID NO: 188177 - DNA, 55 bp, Artificial
  Synthetic oligonucleotide
ctgaattacggtattgaggacggtttgacaggaatgccatatgtccagactgcag

SEQ ID NO: 188178 - DNA, 55 bp, Artificial
  Synthetic oligonucleotide
ctctcttgtttacacctcgagaaatgttgcgtagtgctcaaaagagtacggatgc

SEQ ID NO: 188179 - DNA, 55 bp, Artificial
  Synthetic oligonucleotide
ctcctatataatcggagtaagaatcactccaattgactgccggatagtgacgagc

SEQ ID NO: 188180 - DNA, 55 bp, Artificial
  Synthetic oligonucleotide
ctatctgctcatatttcggtgcgatatactgcttcttgtcaggcgcaagtccgtt

SEQ ID NO: 188181 - DNA, 55 bp, Artificial
  Synthetic oligonucleotide
ctatctagtggagagatggtcgcccttagtatgagtaagtctctagtaatcggac

SEQ ID NO: 188182 - DNA, 55 bp, Artificial
  Synthetic oligonucleotide
ctagctattagaactggttcagattcgactcaaattgaaggaagttgggtttggg

SEQ ID NO: 188183 - DNA, 55 bp, Artificial
  Synthetic oligonucleotide
ctagcctattgattaacagactctgtacgaagcacagtgccttcgactctacggc

SEQ ID NO: 188184 - DNA, 55 bp, Artificial
  Synthetic oligonucleotide
ctacgtgataaatagccacaaccacttgaatgatagcagtctcctgtcttagtaa

SEQ ID NO: 188185 - DNA, 55 bp, Artificial
  Synthetic oligonucleotide
ctaagtatcctctggcacgaatagaaaccatcgagtccgtgattaaatcataagc

SEQ ID NO: 188186 - DNA, 55 bp, Artificial
  Synthetic oligonucleotide
ctaagcaaagtagcgccaatatgttcgattgtgtgtgcagccttaggatctaaag

SEQ ID NO: 188187 - DNA, 60 bp, Artificial
  Synthetic oligonucleotide
tatgcatcaagcttagatcatgttggagcttttactcgtaatgttcgtgacatggcaatt

SEQ ID NO: 188188 - DNA, 53 bp, Artificial
  Synthetic oligonucleotide
ctaacattaccgattagtgccgggagaagtttgtcggtattagtggaaaccgc

SEQ ID NO: 188189 - DNA, 55 bp, Artificial
  Synthetic oligonucleotide
ctaaacgaaatagcgcgtatccataacaagcataaccaatgacttggccaactaa

SEQ ID NO: 188190 - DNA, 55 bp, Artificial
  Synthetic oligonucleotide
cgtgaccttggtaacctaactgattgacttgtccaagtgtgtagccgaagaggtt

SEQ ID NO: 188191 - DNA, 55 bp, Artificial
  Synthetic oligonucleotide
cgtcggattaatggagattttaggaggtggtgtagtgttgcaagaggggacctcg

SEQ ID NO: 188192 - DNA, 55 bp, Artificial
  Synthetic oligonucleotide
cgtccgctgcaggtttgtagatacgagcgcaggagactgcgatttccggatggcg

SEQ ID NO: 188193 - DNA, 55 bp, Artificial
  Synthetic oligonucleotide
cgtccctttaaagctgctcaacatatcgctcttaaacgtctcactcgtgaacgtt

SEQ ID NO: 188194 - DNA, 55 bp, Artificial
  Synthetic oligonucleotide
cgtacctatcctgttttggataaggatggtagggttgtaggagctatctcgcgtt

SEQ ID NO: 188195 - DNA, 55 bp, Artificial
  Synthetic oligonucleotide
cggtatcactgcatatcaaggtagtgtaagtgtaccgccaaagccaatcgtggca

SEQ ID NO: 188196 - DNA, 55 bp, Artificial
  Synthetic oligonucleotide
cggtatcactaggcttgtgcgtatgccaaagacaagtcggacatgttatttctac

SEQ ID NO: 188197 - DNA, 55 bp, Artificial
  Synthetic oligonucleotide
gatccgtaaggcacatcgtacaaaccctgaagcagtcatctgcgttgtgggctgt

SEQ ID NO: 188198 - DNA, 60 bp, Artificial
  Synthetic oligonucleotide
aggcgctctcggtattgcgaacatgtggatggcaatctttgcggatactggggttgcgat

SEQ ID NO: 188199 - DNA, 55 bp, Artificial
  Synthetic oligonucleotide
gatacagcgtatctacgaaagtggaggacagagcgctgtgtggtctatcaatggg

SEQ ID NO: 188200 - DNA, 55 bp, Artificial
  Synthetic oligonucleotide
gagtttcattcttatccgaactactgaaagctacctttagctttcttggcaaggt

SEQ ID NO: 188201 - DNA, 55 bp, Artificial
  Synthetic oligonucleotide
gagcactgattttaccggtgcttcttccacttgcgccataagcaattcgatcggc

SEQ ID NO: 188202 - DNA, 55 bp, Artificial
  Synthetic oligonucleotide
gagatacgtgtgattcctgccattgaatgtgataccttgtttgacggattggaag

SEQ ID NO: 188203 - DNA, 55 bp, Artificial
  Synthetic oligonucleotide
gacgtactaaatcatccggcttactacgatacaatgttacaattccataaggatc

SEQ ID NO: 188204 - DNA, 55 bp, Artificial
  Synthetic oligonucleotide
gacccggagggaaacgaattggagattacagggccttatgatatgacagattgtg

SEQ ID NO: 188205 - DNA, 55 bp, Artificial
  Synthetic oligonucleotide
gaccagaaatcaaatcgtgtattattgcgccatatcgctcgtgataaacgtgtac

SEQ ID NO: 188206 - DNA, 55 bp, Artificial
  Synthetic oligonucleotide
gaattgccgataacatacaacctgttcctgtgattcgtgacatcattgcacaacc

SEQ ID NO: 188207 - DNA, 55 bp, Artificial
  Synthetic oligonucleotide
gaattcggacatctcgcaaaggcttaagctccacaaatgatatcgcaacatccct

SEQ ID NO: 188208 - DNA, 55 bp, Artificial
  Synthetic oligonucleotide
gaagatctaaactttcccgcagtcttccgtcagtcttaagcttcatctcaccgct

SEQ ID NO: 188209 - DNA, 60 bp, Artificial
  Synthetic oligonucleotide
tagatgcagtcgcaagccccgcaattggaagtgtcaggctcttagtcatctcgtcaccga

SEQ ID NO: 188210 - DNA, 55 bp, Artificial
  Synthetic oligonucleotide
gaacaccatattgcaaggatatcgtatgtccggatggctgtgtgaaatttcgtat

SEQ ID NO: 188211 - DNA, 55 bp, Artificial
  Synthetic oligonucleotide
gaaaccttagcacatgttcgtagtgaaaagctagatcgtctcttcactcataagt

SEQ ID NO: 188212 - DNA, 54 bp, Artificial
  Synthetic oligonucleotide
gaaacaaaactacgatgctctccgtaatttattccttcacgcggaccaatcccc

SEQ ID NO: 188213 - DNA, 55 bp, Artificial
  Synthetic oligonucleotide
cttttgtagcgattacaatttcttcccgtttagcatactcctgaagcgctcgtcc

SEQ ID NO: 188214 - DNA, 55 bp, Artificial
  Synthetic oligonucleotide
ctttcgcttagtcgacatagacgagaaagctgccattatttagcgtgcctatagc

SEQ ID NO: 188215 - DNA, 55 bp, Artificial
  Synthetic oligonucleotide
cttaggcatagcacccgggaccctgtatgatgtacaggaaatagtaaaaccaggc

SEQ ID NO: 188216 - DNA, 55 bp, Artificial
  Synthetic oligonucleotide
cttaggagggatagatactcctgaatgatcctcagagtggtgaactaagttatct

SEQ ID NO: 188217 - DNA, 55 bp, Artificial
  Synthetic oligonucleotide
cttaggagaagttgtacctctaggagttgtaagatttatcatgggtaatagtgga

SEQ ID NO: 188218 - DNA, 55 bp, Artificial
  Synthetic oligonucleotide
ctgttcaagccggtagaatttaccgtgttgtttcagcagtccagcaacgcttctg

SEQ ID NO: 188219 - DNA, 55 bp, Artificial
  Synthetic oligonucleotide
tcgcgtggtaaacgggctacttgtacacaagctcgtgctggtttgtgggctgaga

SEQ ID NO: 188220 - DNA, 60 bp, Artificial
  Synthetic oligonucleotide
cgagaggtgattcatgcagcacgcaatcaagggtatgagtttatgcttgcgacgggccga

SEQ ID NO: 188221 - DNA, 55 bp, Artificial
  Synthetic oligonucleotide
tcgacataaaacacatgccacatcctgccttaacgcaacttggaacaggtatcat

SEQ ID NO: 188222 - DNA, 55 bp, Artificial
  Synthetic oligonucleotide
tccgggcagacgttgcgggtaaccatcgtgcgttgcccgatacgaggcgagtgca

SEQ ID NO: 188223 - DNA, 55 bp, Artificial
  Synthetic oligonucleotide
tccagtagcttcggtacgaatcaaggatccaccgaatgttaatcctttacctgtc

SEQ ID NO: 188224 - DNA, 55 bp, Artificial
  Synthetic oligonucleotide
tcatgactgcatctacatctttcacgcaatcatgaatagtagaatgaagtgtcgc

SEQ ID NO: 188225 - DNA, 55 bp, Artificial
  Synthetic oligonucleotide
tcataaccgctttctgtcgtatctgcgacctcaaatccgaatttctttgcgaagg

SEQ ID NO: 188226 - DNA, 55 bp, Artificial
  Synthetic oligonucleotide
tagaaatcggagatggattagctgtctccaaaagaattcgttagaaatgaccgga

SEQ ID NO: 188227 - DNA, 55 bp, Artificial
  Synthetic oligonucleotide
tacagcgaatttgcacgataatccagcgtatcaatatgcggttagtcgtcgtatc

SEQ ID NO: 188228 - DNA, 55 bp, Artificial
  Synthetic oligonucleotide
tacagagaattaaaccgacactggtggtttcgttcggcatgcgaatatcacggtc

SEQ ID NO: 188229 - DNA, 55 bp, Artificial
  Synthetic oligonucleotide
tacacctgcgtatgtccccttattggaaccggcagcaccgctaaccgttccactt

SEQ ID NO: 188230 - DNA, 55 bp, Artificial
  Synthetic oligonucleotide
taagttttgaccaggcactcggacatgttacaaccaaagcagaaggaccgttgat

SEQ ID NO: 188231 - DNA, 59 bp, Artificial
  Synthetic oligonucleotide
gattgaagaactttcagaatggaagcacaaagactaatcctaagaccagcaagtccgat

SEQ ID NO: 188232 - DNA, 55 bp, Artificial
  Synthetic oligonucleotide
taaattcatgtgcgaagcgtgccctggtaacctgttccgcagtttcccgcacacg

SEQ ID NO: 188233 - DNA, 54 bp, Artificial
  Synthetic oligonucleotide
gttttagccgtaatacgacgagaatccgaaccaatactttcctcactaataatc

SEQ ID NO: 188234 - DNA, 52 bp, Artificial
  Synthetic oligonucleotide
gttgctatcggggtaattggggttacaattgttgtgaatttaattaccttac

SEQ ID NO: 188235 - DNA, 55 bp, Artificial
  Synthetic oligonucleotide
gttcatattggagtcagtgagtctactgcttcacaggatgcatgtcgtatcgaac

SEQ ID NO: 188236 - DNA, 55 bp, Artificial
  Synthetic oligonucleotide
gtgttgtagaagggtctcgagatgaacgtggtagcattacaaaccacctcggtag

SEQ ID NO: 188237 - DNA, 55 bp, Artificial
  Synthetic oligonucleotide
gtgcgtgggaaaacgaaacacgtgataagctgtgcagaaacgtgatggactttag

SEQ ID NO: 188238 - DNA, 55 bp, Artificial
  Synthetic oligonucleotide
gtgcgtagcctggctcacgtaaatgtgcatggacatcaatcagcccgggaagcag

SEQ ID NO: 188239 - DNA, 55 bp, Artificial
  Synthetic oligonucleotide
gtgcacttgcagatgtactacaaaaggaacgcggacctaactgtatcgcagctcg

SEQ ID NO: 188240 - DNA, 55 bp, Artificial
  Synthetic oligonucleotide
gtgagccaaggtgaacgtatcattgcgaaaataattgatgtgagcgaaggaccgc

SEQ ID NO: 188241 - DNA, 55 bp, Artificial
  Synthetic oligonucleotide
gtcgaaaatagtctgccaaagatacgtgttgtgctaaccagtctaactttgatcc

SEQ ID NO: 188242 - DNA, 55 bp, Artificial
  Synthetic oligonucleotide
cttttgtccttacccatgtataatttgcttaaaaggaggtgtcgatatgaggaaa

SEQ ID NO: 188243 - DNA, 55 bp, Artificial
  Synthetic oligonucleotide
ttgttaaggagtacactcatccgtgccataaccaaaagcatctgattcgctacag

SEQ ID NO: 188244 - DNA, 55 bp, Artificial
  Synthetic oligonucleotide
ttgccatattcgctgtaagcccagcagtaattggaacgagtgttaaccagaagag

SEQ ID NO: 188245 - DNA, 55 bp, Artificial
  Synthetic oligonucleotide
ttgatttcggagatagcgtcaggtcgatgatagcagcagccagtatgatacgggc

SEQ ID NO: 188246 - DNA, 55 bp, Artificial
  Synthetic oligonucleotide
ttcgtattcgcattcgctccttgaaatcaaccattgaaaagaaaagtgcacgtgc

SEQ ID NO: 188247 - DNA, 55 bp, Artificial
  Synthetic oligonucleotide
ttcgcttgcaagcagacaagttcctacctgtactccacaagcccctagagcatac

SEQ ID NO: 188248 - DNA, 55 bp, Artificial
  Synthetic oligonucleotide
ttattggggatcgaaaccccgtaaacgaacgatatgcaagagcagagatctacct

SEQ ID NO: 188249 - DNA, 55 bp, Artificial
  Synthetic oligonucleotide
ttatgttgtcactatatggaacgatcggtggagtaacgtggttacttctagctcc

SEQ ID NO: 188250 - DNA, 55 bp, Artificial
  Synthetic oligonucleotide
ttacgttttgatacataggagatcctgccgaacttagcgtatgtgcttgagaacg

SEQ ID NO: 188251 - DNA, 55 bp, Artificial
  Synthetic oligonucleotide
ttaccggattttcgtcatatggagctggagggaagcagcatcagactcacccgtc

SEQ ID NO: 188252 - DNA, 55 bp, Artificial
  Synthetic oligonucleotide
tgtcttttgccggagtccttccacagctgggcactagcacagttcagacggcggt

SEQ ID NO: 188253 - DNA, 60 bp, Artificial
  Synthetic oligonucleotide
gggcatccatgttcaaatccaaaggaccatgcggctcatgcatgcggacacagtacgcaa

SEQ ID NO: 188254 - DNA, 55 bp, Artificial
  Synthetic oligonucleotide
tgtaatctgcatgaatagcacaacctagaatattgcccatcgtggcatcgatgcc

SEQ ID NO: 188255 - DNA, 55 bp, Artificial
  Synthetic oligonucleotide
tgtaaacgcagtcgacctcaggactggccagacaggcttgatagttgtcggcaat

SEQ ID NO: 188256 - DNA, 55 bp, Artificial
  Synthetic oligonucleotide
tgggcatcgggcgatacggcattagctgtatagaaatttccggaactattcttat

SEQ ID NO: 188257 - DNA, 55 bp, Artificial
  Synthetic oligonucleotide
tggatttagacgttatatggttcggcatatcgttggtggactaattcaagttggg

SEQ ID NO: 188258 - DNA, 55 bp, Artificial
  Synthetic oligonucleotide
tgctatccacaccatcgccataagcatcgacatacgtatatccaccgaaaatctc

SEQ ID NO: 188259 - DNA, 55 bp, Artificial
  Synthetic oligonucleotide
tgccgactgacacttcatttgcgggcgaggaatggtacgatcagatggaggtctg

SEQ ID NO: 188260 - DNA, 55 bp, Artificial
  Synthetic oligonucleotide
tgcattacgcaatcgtagcgacacagatcgtattaacgttgttacgccaactgca

SEQ ID NO: 188261 - DNA, 55 bp, Artificial
  Synthetic oligonucleotide
tgagtttatgcttgcgacgggccgaaattatgagagtgctgcgtctatagcggaa

SEQ ID NO: 188262 - DNA, 55 bp, Artificial
  Synthetic oligonucleotide
tgaggatgataccgtgattgccatactcgatatttcacaggtgaccaaagggcac

SEQ ID NO: 188263 - DNA, 54 bp, Artificial
  Synthetic oligonucleotide
tctacaaggtagacgggttggcaaaagtaaacgcttggattttcgaatctgacg

SEQ ID NO: 188264 - DNA, 60 bp, Artificial
  Synthetic oligonucleotide
atcactcggtgaaatcgagtgactacatacactaaaaggctgtggtgggtggcgaattca

SEQ ID NO: 188265 - DNA, 55 bp, Artificial
  Synthetic oligonucleotide
tcggtaaagagtgacagcatcttcttaggtatcgtcagtacactttccttttgtc

SEQ ID NO: 188266 - DNA, 54 bp, Artificial
  Synthetic oligonucleotide
tcggaagaattattgttgtatccggcatttaagaagggcgttatgtttgtaggg

SEQ ID NO: 188267 - DNA, 55 bp, Artificial
  Synthetic oligonucleotide
ggctatttactcaaagttacgggtgacaatgagcaactggttacctcacttggcc

SEQ ID NO: 188268 - DNA, 55 bp, Artificial
  Synthetic oligonucleotide
ggcggtgcaatttatgatcgtagtgtatacttcacccggctgtgcttcctgccga

SEQ ID NO: 188269 - DNA, 55 bp, Artificial
  Synthetic oligonucleotide
ggcggacttctctgcatggtggagtgtgcgatcctgttactggctctgcttccgg

SEQ ID NO: 188270 - DNA, 55 bp, Artificial
  Synthetic oligonucleotide
ggccactttacttaccgccttcatacgtttactgcgtgcggcaattaacatagaa

SEQ ID NO: 188271 - DNA, 55 bp, Artificial
  Synthetic oligonucleotide
ggcagagcctgtaatagctctgataccggctacaaggcatgcagtacaaatgcgg

SEQ ID NO: 188272 - DNA, 52 bp, Artificial
  Synthetic oligonucleotide
ggcacaatttaaaggttctcaaggggctaagggagaacaaggtataccggga

SEQ ID NO: 188273 - DNA, 55 bp, Artificial
  Synthetic oligonucleotide
ggattactgcttgtcagcgttgccctgtcgtttacttcttcctgcccgatcgatc

SEQ ID NO: 188274 - DNA, 55 bp, Artificial
  Synthetic oligonucleotide
ggatgtagccgatcatgcacttgccggagtcggtattacgtttcccatcatcacc

SEQ ID NO: 188275 - DNA, 60 bp, Artificial
  Synthetic oligonucleotide
gtgcccatacaccacttacatccggtccatcaacacgcacgcttgacactgcaatgcgta

SEQ ID NO: 188276 - DNA, 55 bp, Artificial
  Synthetic oligonucleotide
ggatccacgctggtagccacgcacgcttaaacatgcctggaagcgtaggtgcacc

SEQ ID NO: 188277 - DNA, 55 bp, Artificial
  Synthetic oligonucleotide
ggatacatggttgaatgtccagatgtacaaaagataggattacatgatgtgctca

SEQ ID NO: 188278 - DNA, 55 bp, Artificial
  Synthetic oligonucleotide
ggaggactaggaagtgcactagccgatgtagccggaggatatggacactacttct

SEQ ID NO: 188279 - DNA, 55 bp, Artificial
  Synthetic oligonucleotide
ggacggtgtccacgattgataacgtataactccgtatcacgactcttcgccagca

SEQ ID NO: 188280 - DNA, 55 bp, Artificial
  Synthetic oligonucleotide
gcttaatgtcggtgttgaattacggtatgtatggtgacgtttgatttgacccatg

SEQ ID NO: 188281 - DNA, 55 bp, Artificial
  Synthetic oligonucleotide
gctgtggttatagcggagtaatcgaaggacacatttgtccgaagtgtggtcgtga

SEQ ID NO: 188282 - DNA, 55 bp, Artificial
  Synthetic oligonucleotide
gctgtacgtaaaatcttatgctgttgtatatccggactaggttcatcctttattg

SEQ ID NO: 188283 - DNA, 55 bp, Artificial
  Synthetic oligonucleotide
gctgcctcatattgatctgtacctgcccatgtccgttttacctttcccgtctggg

SEQ ID NO: 188284 - DNA, 55 bp, Artificial
  Synthetic oligonucleotide
gctcttgtaggtcatcgagagtacgattttctaatagagcctttagatagtctgc

SEQ ID NO: 188285 - DNA, 55 bp, Artificial
  Synthetic oligonucleotide
gctcgtgtactcgatggaaaactgaagctacgcgttccaaatgctctgtgagcat

SEQ ID NO: 188286 - DNA, 60 bp, Artificial
  Synthetic oligonucleotide
gagcaaatgaattacttgcgaggttgaattgcattatgagaagaattgaacacaatcatg

SEQ ID NO: 188287 - DNA, 60 bp, Artificial
  Synthetic oligonucleotide
atccaccgcggcagctcaattgcaccccctggaacaccacaagcgagtcatattgacagc

SEQ ID NO: 188288 - DNA, 55 bp, Artificial
  Synthetic oligonucleotide
gctcagcgaaatcggtcctaacggctcgaatatcgtgcagtaactcagcgttgcc

SEQ ID NO: 188289 - DNA, 55 bp, Artificial
  Synthetic oligonucleotide
gctatgtttagtggtggtgcatcgagtgcatatgttgcttatcgtatggcacaac

SEQ ID NO: 188290 - DNA, 55 bp, Artificial
  Synthetic oligonucleotide
gctaaagaaccggatggaattgcgtctactgatacatcagcacggtctcccaaac

SEQ ID NO: 188291 - DNA, 55 bp, Artificial
  Synthetic oligonucleotide
gcgtgtatgcacgaagtgcatgttggattcggttcccaagctgacttaaaacgcg

SEQ ID NO: 188292 - DNA, 55 bp, Artificial
  Synthetic oligonucleotide
gtcatggctctcgtattaatacacgtgcgaattctacattgctaggtggtaagac

SEQ ID NO: 188293 - DNA, 55 bp, Artificial
  Synthetic oligonucleotide
gtcacattctgatactgcgttctgacaacaacatttcttgcggtatcgaaacgac

SEQ ID NO: 188294 - DNA, 55 bp, Artificial
  Synthetic oligonucleotide
gtcaatgtctatgtgcagggtgtccgggttattggttaatcggagggtatcatga

SEQ ID NO: 188295 - DNA, 55 bp, Artificial
  Synthetic oligonucleotide
gtcaatgattaatctgcggacttgatgtcaacactaatgtgtgcttgaaatactc

SEQ ID NO: 188296 - DNA, 55 bp, Artificial
  Synthetic oligonucleotide
gtcaagggtaggaataactgccacaagcgtatctgttggggtatcaccatctggt

SEQ ID NO: 188297 - DNA, 55 bp, Artificial
  Synthetic oligonucleotide
gtagtgcgacccaacaaagtaagtcaaccagtaagtcgggtgtgagtgtatcggg

SEQ ID NO: 188298 - DNA, 60 bp, Artificial
  Synthetic oligonucleotide
attacctggccacacccatgacaacggttctcagtgggtcagcaacctcgcacttcatcg

SEQ ID NO: 188299 - DNA, 55 bp, Artificial
  Synthetic oligonucleotide
gtacgttatccacaacgatgttccatacaggagttgatcctcgtacgatgacccc

SEQ ID NO: 188300 - DNA, 55 bp, Artificial
  Synthetic oligonucleotide
gtacgtacccaatgcaaagtgggtatgcgtacccagtatcaacttaccaaccacc

SEQ ID NO: 188301 - DNA, 55 bp, Artificial
  Synthetic oligonucleotide
gtacggcatatcccttctgctcctcactcggtcgcacaataagctgtaaatcgga

SEQ ID NO: 188302 - DNA, 55 bp, Artificial
  Synthetic oligonucleotide
gtacgagatcccgttctcacacgccattgtcgcgtatcaataatcataccggcca

SEQ ID NO: 188303 - DNA, 54 bp, Artificial
  Synthetic oligonucleotide
ggttcgcaatgcgactattacctggaaccgaccatttacttggagttcgtttac

SEQ ID NO: 188304 - DNA, 53 bp, Artificial
  Synthetic oligonucleotide
ggttatcgtgttgaaccagcttatagcgctttatggtttaagaaccccggttc

SEQ ID NO: 188305 - DNA, 55 bp, Artificial
  Synthetic oligonucleotide
ggttagttactaatgaaccaactgctgtgttattggcagttgctaactgctgtga

SEQ ID NO: 188306 - DNA, 55 bp, Artificial
  Synthetic oligonucleotide
ggtgtagtgctcatgtgtcatggattcaccaatcattcgggcgactatgatgtat

SEQ ID NO: 188307 - DNA, 55 bp, Artificial
  Synthetic oligonucleotide
ggtgtagcacccaatcgttttcttgcgaaaatggcgagtgatatgcgcaagccca

SEQ ID NO: 188308 - DNA, 55 bp, Artificial
  Synthetic oligonucleotide
ggtaccaatcgtagtcattggaaatcgtatgagtgatgaaaccgtaggatctgtc

SEQ ID NO: 188309 - DNA, 57 bp, Artificial
  Synthetic oligonucleotide
aagaaattagataggaataagcgtgccagtggtcgtggtgcccgttaaatacattca

SEQ ID NO: 188310 - DNA, 55 bp, Artificial
  Synthetic oligonucleotide
gggtttgctgtctattttacgaacagtatgtcttatcagatgcgaataggagttg

SEQ ID NO: 188311 - DNA, 53 bp, Artificial
  Synthetic oligonucleotide
gggttcccgtgtaatcgggaatggtataccccgcatattgaatcgatccggtt

SEQ ID NO: 188312 - DNA, 55 bp, Artificial
  Synthetic oligonucleotide
gggtcgatcttacgcagctgcaccttacctttgacccagttattacgtgcagtat

SEQ ID NO: 188313 - DNA, 55 bp, Artificial
  Synthetic oligonucleotide
gggtattagcatctggccctgtaacatttagcgtaataaattcttgcctttcacg

SEQ ID NO: 188314 - DNA, 55 bp, Artificial
  Synthetic oligonucleotide
ggctgattaccttttgatgacaaatccataattgaaagacggttaaatccccagg

SEQ ID NO: 188315 - DNA, 55 bp, Artificial
  Synthetic oligonucleotide
ggctccctatatgcttctggcagtattccttggtgtgacgggatttctgtgtgcg

SEQ ID NO: 188316 - DNA, 55 bp, Artificial
  Synthetic oligonucleotide
cattgggttatgcccaaggtgaaatggcgagtcgtttagacatatctgtgaaaga

SEQ ID NO: 188317 - DNA, 55 bp, Artificial
  Synthetic oligonucleotide
cattctacataagcaaaatgaaacgggtatcctgtctgttcctacagcgggatgc

SEQ ID NO: 188318 - DNA, 55 bp, Artificial
  Synthetic oligonucleotide
catcgtctttagcgatggcctcagcaatgaacactacttatgagggaaatagccc

SEQ ID NO: 188319 - DNA, 55 bp, Artificial
  Synthetic oligonucleotide
catccaaagagtcctgataatcaagcgtcaatccctctgcactttcgaatcgcac

SEQ ID NO: 188320 - DNA, 57 bp, Artificial
  Synthetic oligonucleotide
ttgggtctccatcgaaatttgcggcacaaatcaaagcggaggcggttattcgccaag

SEQ ID NO: 188321 - DNA, 55 bp, Artificial
  Synthetic oligonucleotide
cataatgtggaattgtataacgaatcttatgaggcaccggggagaggaatggacg

SEQ ID NO: 188322 - DNA, 55 bp, Artificial
  Synthetic oligonucleotide
cagttgtataggcatccttgaacgcacacatataggctggagtacggctatagcc

SEQ ID NO: 188323 - DNA, 55 bp, Artificial
  Synthetic oligonucleotide
cagtcgattacctgcggccagataagccgatcttcctactttggagacggttctc

SEQ ID NO: 188324 - DNA, 55 bp, Artificial
  Synthetic oligonucleotide
cagggatgtggcaagctaatggtcgaagtgatgtggagtttagttatcggtgtaa

SEQ ID NO: 188325 - DNA, 55 bp, Artificial
  Synthetic oligonucleotide
caggagaattcacagtcggattacaaaatatacgggttcagattaccgaagggcc

SEQ ID NO: 188326 - DNA, 54 bp, Artificial
  Synthetic oligonucleotide
cagctaacgaaggagaacctcgggacgggtatactggagcggttgatccaaaag

SEQ ID NO: 188327 - DNA, 55 bp, Artificial
  Synthetic oligonucleotide
cagatagaacctaatccctatcagccacgtatcgaatttaacgatgaagcactaa

SEQ ID NO: 188328 - DNA, 55 bp, Artificial
  Synthetic oligonucleotide
cagaatggaagcacaaagactaatcctaagaccagcaagtccgatttgtagctgc

SEQ ID NO: 188329 - DNA, 55 bp, Artificial
  Synthetic oligonucleotide
cacttaagccagaggattttgtggttctaactggtagtgttgcatcgggaatgtc

SEQ ID NO: 188330 - DNA, 55 bp, Artificial
  Synthetic oligonucleotide
cactgcatactaagcgtaacggtatctggacagaaacattaagctgtacagcacg

SEQ ID NO: 188331 - DNA, 56 bp, Artificial
  Synthetic oligonucleotide
aaactcgcttgggtcggcacctttcaatttcagaggttgccgcgacttcataggcc

SEQ ID NO: 188332 - DNA, 55 bp, Artificial
  Synthetic oligonucleotide
cactccatatctcagacccttatcccgtggtcgttctgtacttggcatttcacga

SEQ ID NO: 188333 - DNA, 55 bp, Artificial
  Synthetic oligonucleotide
cacgtgggatcaactcatgtccgtagatcttttaccgctcgaatcgttagcacga

SEQ ID NO: 188334 - DNA, 55 bp, Artificial
  Synthetic oligonucleotide
cacgagtatggaacgaagcttcttcttggtctaaacgatctaactggtttctccc

SEQ ID NO: 188335 - DNA, 55 bp, Artificial
  Synthetic oligonucleotide
caccacaacgtagatctgtcgcataaacacgtgctccatgtaatggcgtaggacc

SEQ ID NO: 188336 - DNA, 55 bp, Artificial
  Synthetic oligonucleotide
ccgaagtcgtgctcggactattctcgttgttgatagcgcactgctgtacctcggt

SEQ ID NO: 188337 - DNA, 55 bp, Artificial
  Synthetic oligonucleotide
ccccggtttcctgtatcatggaaagggatgaggaatatacgcccttcatgactct

SEQ ID NO: 188338 - DNA, 55 bp, Artificial
  Synthetic oligonucleotide
cccatggtgaatacgattatcggctgggttgttactgcaatcggtcttgtagctc

SEQ ID NO: 188339 - DNA, 55 bp, Artificial
  Synthetic oligonucleotide
cccaatatgaacgaagtcttccaccaacgttccatgatccttcagtttgtggtcc

SEQ ID NO: 188340 - DNA, 55 bp, Artificial
  Synthetic oligonucleotide
cccaaatagagtcgataagtccgtgattataaggtattccctgtgcatccagcat

SEQ ID NO: 188341 - DNA, 55 bp, Artificial
  Synthetic oligonucleotide
ccatttaaggataactccgccgagcacggagtatagttgcactaaagcggtgagt

SEQ ID NO: 188342 - DNA, 59 bp, Artificial
  Synthetic oligonucleotide
tcggcgggaacatggacctatccatggggtggtcatcacatgggggtggatttagcttc

SEQ ID NO: 188343 - DNA, 55 bp, Artificial
  Synthetic oligonucleotide
ccattgttccgtccatactcaaatcactcgatacgaaattcattccgtcaaactc

SEQ ID NO: 188344 - DNA, 55 bp, Artificial
  Synthetic oligonucleotide
ccattatcaaccggtatgtcaatctataccgcattagatccaacgattcaaaccg

SEQ ID NO: 188345 - DNA, 55 bp, Artificial
  Synthetic oligonucleotide
ccatagcctctcttatcactaaaccataaacaggtcccataaacgagatctctgg

SEQ ID NO: 188346 - DNA, 55 bp, Artificial
  Synthetic oligonucleotide
ccacgttcgacatattcttttcttacaggttcgatgaatcctagccccatcggtg

SEQ ID NO: 188347 - DNA, 55 bp, Artificial
  Synthetic oligonucleotide
ccacgaaccaatcgcttgatacgaccagcagtagcgaacgttgaccaagcactca

SEQ ID NO: 188348 - DNA, 55 bp, Artificial
  Synthetic oligonucleotide
ccacacaagcagtaagtctgcctgtacctatactataacgcgcgaatgtgaagga

SEQ ID NO: 188349 - DNA, 55 bp, Artificial
  Synthetic oligonucleotide
ccaattcgcaatcgagcgctgacttgctgctgccttaaagcgattggtatggcca

SEQ ID NO: 188350 - DNA, 55 bp, Artificial
  Synthetic oligonucleotide
ccaattccgcagtgatcgtcttacctacgactggataggtgatcttggtgtacgt

SEQ ID NO: 188351 - DNA, 55 bp, Artificial
  Synthetic oligonucleotide
ccaactgtcacgattattggggcatgttgaggtagaatcattgacgaaagaattt

SEQ ID NO: 188352 - DNA, 55 bp, Artificial
  Synthetic oligonucleotide
ccaaatgctcgccctactagcgatagaaaaccacgagttacgctacgtggtgtag

SEQ ID NO: 188353 - DNA, 59 bp, Artificial
  Synthetic oligonucleotide
ctccatacgctatcacggtgcgcagagggtacagcaccactcgcttaaaggcagagggc

SEQ ID NO: 188354 - DNA, 55 bp, Artificial
  Synthetic oligonucleotide
ccaaaccaataatttgcctgctgacttactagacctgccaacgaacctaccacgg

SEQ ID NO: 188355 - DNA, 55 bp, Artificial
  Synthetic oligonucleotide
cattgtaaacagcttcttgtaggcttcatctgttccaactacactcaaggctacc

SEQ ID NO: 188356 - DNA, 55 bp, Artificial
  Synthetic oligonucleotide
agtcaatgaggttaccgggtgtagcacttgttaatgttcccaaatatgagaaccc

SEQ ID NO: 188357 - DNA, 51 bp, Artificial
  Synthetic oligonucleotide
agggaaccctacgcacggtgttgtgaaaggggcgaaagattttaattctta

SEQ ID NO: 188358 - DNA, 55 bp, Artificial
  Synthetic oligonucleotide
aggagttagtatgccgcgcaaagccatgcgtacaaagcataatgaaacatggcgg

SEQ ID NO: 188359 - DNA, 55 bp, Artificial
  Synthetic oligonucleotide
agcttatgtatgtacaatcgaaaaccgtcattcgccataatagctgggcatactc

SEQ ID NO: 188360 - DNA, 55 bp, Artificial
  Synthetic oligonucleotide
agctgatgtggttagacctatacgtgttctcttacgatcacgatgcacttctgtt

SEQ ID NO: 188361 - DNA, 55 bp, Artificial
  Synthetic oligonucleotide
agcgaatactagtggtagtcactgtattatcatgtcttcttactggatgttcaag

SEQ ID NO: 188362 - DNA, 55 bp, Artificial
  Synthetic oligonucleotide
agccaacgaacaagagcatgatgttcaatctcattccattgtctatacacaaacg

SEQ ID NO: 188363 - DNA, 55 bp, Artificial
  Synthetic oligonucleotide
acgcttcaattagagaagcatcgataggatgaccactcccattaatttccgtctc

SEQ ID NO: 188364 - DNA, 59 bp, Artificial
  Synthetic oligonucleotide
tcgacagccatctaccaaaatgcggtcactggcaatacagccatctccgccttcccaat

SEQ ID NO: 188365 - DNA, 55 bp, Artificial
  Synthetic oligonucleotide
acgaaggacaatggtgtgtaataggtattccttctgtagagtgggcaaaggttgt

SEQ ID NO: 188366 - DNA, 55 bp, Artificial
  Synthetic oligonucleotide
accatgagattccacttccatcacacagaggatcaattcgacatgatccgccatg

SEQ ID NO: 188367 - DNA, 55 bp, Artificial
  Synthetic oligonucleotide
accatatggtgaatttagaggaggatatgcttgctctggtcgtggattttggtgg

SEQ ID NO: 188368 - DNA, 55 bp, Artificial
  Synthetic oligonucleotide
acatacttgagcgtgcataacgcataacccctgctgttagggcaattccaagaac

SEQ ID NO: 188369 - DNA, 55 bp, Artificial
  Synthetic oligonucleotide
acaattacacttcttgcgattgcgatgaatgcactcggtgtggatgcgatcagtt

SEQ ID NO: 188370 - DNA, 55 bp, Artificial
  Synthetic oligonucleotide
aatcacagcgcccactcatcgtatcctttaaagtgatagcaccacgatctaaggt

SEQ ID NO: 188371 - DNA, 55 bp, Artificial
  Synthetic oligonucleotide
aagattcgtaccatattcccactgcatacgcaaagcattcgcatacgactgagag

SEQ ID NO: 188372 - DNA, 55 bp, Artificial
  Synthetic oligonucleotide
aacacagttttcagaggctgcttcatatgttccagagatgcggccagatgcagtg

SEQ ID NO: 188373 - DNA, 55 bp, Artificial
  Synthetic oligonucleotide
aaaggatacgatagagaagcgtgacatcactcccttacatcccctgcatgtgttg

SEQ ID NO: 188374 - DNA, 53 bp, Artificial
  Synthetic oligonucleotide
aaaaccatctactgtccctaccaaaatccctttaggactcttgccaggaccac

SEQ ID NO: 188375 - DNA, 56 bp, Artificial
  Synthetic oligonucleotide
tccgttaacgatctcacaacatgcccgcggaactggtaaaccaccggctatttcag

SEQ ID NO: 188376 - DNA, 55 bp, Artificial
  Synthetic oligonucleotide
cacacggtgtaggtctagcaattcttactccgagatggctagagtatatccttgc

SEQ ID NO: 188377 - DNA, 55 bp, Artificial
  Synthetic oligonucleotide
caatcgagattcgactgttctggtctagttaactgggctttctatcaatcaggtg

SEQ ID NO: 188378 - DNA, 55 bp, Artificial
  Synthetic oligonucleotide
caagtcgccacgtagctatggaataccgcttatggctccatcagtcaatgaccgg

SEQ ID NO: 188379 - DNA, 55 bp, Artificial
  Synthetic oligonucleotide
caagcatacgatatgtcatattagctactcgtaaaccatgatcaatcaatcgcga

SEQ ID NO: 188380 - DNA, 55 bp, Artificial
  Synthetic oligonucleotide
caagatgtatgcgacagtttctgccgtagattatcagcaggttgctaccgtgtat

SEQ ID NO: 188381 - DNA, 52 bp, Artificial
  Synthetic oligonucleotide
caagaaagaaccttcccaactgactttactttaactggtgtttatggcgaaa

SEQ ID NO: 188382 - DNA, 55 bp, Artificial
  Synthetic oligonucleotide
caaatggcactatgaacccttatcatgacgagtttgcaccattaagtgtccaagg

SEQ ID NO: 188383 - DNA, 55 bp, Artificial
  Synthetic oligonucleotide
attaggggtttcttttggacttgcatcaggaacagttatggggaatacagttgca

SEQ ID NO: 188384 - DNA, 55 bp, Artificial
  Synthetic oligonucleotide
atgaacctcatggtttagctattggcgcaagacatctcactatctctacatgtgg

SEQ ID NO: 188385 - DNA, 55 bp, Artificial
  Synthetic oligonucleotide
atctttatatggcgcattactagcaccaccctacacaatacagaccaaagagcag

SEQ ID NO: 188386 - DNA, 59 bp, Artificial
  Synthetic oligonucleotide
agccgctgtactcgactgcataagtgccgtgattaccgttcccaccagaattgcggaga

SEQ ID NO: 188387 - DNA, 55 bp, Artificial
  Synthetic oligonucleotide
atctgaccggactggggcatgactgcccggttctgctgagcgccaatgtcaaggg

SEQ ID NO: 188388 - DNA, 55 bp, Artificial
  Synthetic oligonucleotide
atccgatgatagaccgggctcgaccttcatacccacattaacctccaactctcga

SEQ ID NO: 188389 - DNA, 55 bp, Artificial
  Synthetic oligonucleotide
atccaggaggacttcgtacaagaagtacaaaggttatgcgtgaaaactacactgt

SEQ ID NO: 188390 - DNA, 55 bp, Artificial
  Synthetic oligonucleotide
atcacggtgcgcagagggtacagcaccactcgcttaaaggcagagggcctttctg

SEQ ID NO: 188391 - DNA, 55 bp, Artificial
  Synthetic oligonucleotide
atcaaaatgccccgtggaggggttggtgtgattccaatgaatgctagcgatagct

SEQ ID NO: 188392 - DNA, 55 bp, Artificial
  Synthetic oligonucleotide
atagacggttctatgaacatcatggtgtggaatatcgctccatgttacgggcggc

SEQ ID NO: 188393 - DNA, 55 bp, Artificial
  Synthetic oligonucleotide
ataataccgactgacagagtcatcttcccttttagctgccccattgacaatcgtg

SEQ ID NO: 188394 - DNA, 55 bp, Artificial
  Synthetic oligonucleotide
ataagcgtgccagtggtcgtggtgcccgttaaatacattcaatttacattcacgc

SEQ ID NO: 188395 - DNA, 55 bp, Artificial
  Synthetic oligonucleotide
ataaatagtttgggaaggcatatttctatcatcaacgaggcaaactcccaaggct

SEQ ID NO: 188396 - DNA, 55 bp, Artificial
  Synthetic oligonucleotide
cgcctctaactacggtcttttgtcccataagacgattaccggcggagtaatatgc

SEQ ID NO: 188397 - DNA, 60 bp, Artificial
  Synthetic oligonucleotide
tgcgcctatgagtgcaacggtggctgctaagctggcaaacggaatctacgatcacccgat

SEQ ID NO: 188398 - DNA, 59 bp, Artificial
  Synthetic oligonucleotide
ttcgctcccccgaggactccctgcccaccagttgaggatagctacgagctcgcctgagg

SEQ ID NO: 188399 - DNA, 55 bp, Artificial
  Synthetic oligonucleotide
cgccctgacgtgccttaacgttatattgagttccatccgcactgaccgcatggac

SEQ ID NO: 188400 - DNA, 55 bp, Artificial
  Synthetic oligonucleotide
ccggcacgacccgatgtaagtatttggtgcatgtgttctcgatcgtttaccaatg

SEQ ID NO: 188401 - DNA, 55 bp, Artificial
  Synthetic oligonucleotide
ccggccgtcaccggtctgagggcgttcagatccgccttgcagatatggcatcgta

SEQ ID NO: 188402 - DNA, 55 bp, Artificial
  Synthetic oligonucleotide
cgcatccaagcgatgcgtaaacattttggatgggataaaacagacaccatcgaat

SEQ ID NO: 188403 - DNA, 55 bp, Artificial
  Synthetic oligonucleotide
cgcaatgtagtccaacatagagctataggaataggttgtcgcatcaatgccctgt

SEQ ID NO: 188404 - DNA, 55 bp, Artificial
  Synthetic oligonucleotide
cgcaatctccttacttgagtcatacccacgcgaaggatctagcttatctgcaacg

SEQ ID NO: 188405 - DNA, 55 bp, Artificial
  Synthetic oligonucleotide
cgcaagggaccaagactggaattttatcgagtcttcactggataccattgacgtc

SEQ ID NO: 188406 - DNA, 55 bp, Artificial
  Synthetic oligonucleotide
cgcaaagcgactgttactggaaatcgcccaggagtgactaaggctcaacagatta

SEQ ID NO: 188407 - DNA, 55 bp, Artificial
  Synthetic oligonucleotide
cgatttcagaaaagctccgcttaggcagtcaacaggataaggacaattatcgccg

SEQ ID NO: 188408 - DNA, 55 bp, Artificial
  Synthetic oligonucleotide
cgattgacgagcctctaattgttccgcaatacgacgagctactaagcgagcgtct

SEQ ID NO: 188409 - DNA, 58 bp, Artificial
  Synthetic oligonucleotide
cggaagctaaatccacccccatgtgatgaccaccccatggataggtccatgttcccgc

SEQ ID NO: 188410 - DNA, 55 bp, Artificial
  Synthetic oligonucleotide
cgatgtcctcttacaagcaatctatgggtattcacaccatagggcgtgcaagtca

SEQ ID NO: 188411 - DNA, 55 bp, Artificial
  Synthetic oligonucleotide
cgatgcgttgggaaattggcttgcgttcaactggttcgcgatggaatgcggacgc

SEQ ID NO: 188412 - DNA, 55 bp, Artificial
  Synthetic oligonucleotide
cgagcgaattcttgcgatacctattaccactggaatctctggtactattggcgca

SEQ ID NO: 188413 - DNA, 55 bp, Artificial
  Synthetic oligonucleotide
cgaagaggaaatcggtgtatttgtaccggtagagttacgtcgtttggcagatcac

SEQ ID NO: 188414 - DNA, 55 bp, Artificial
  Synthetic oligonucleotide
cgaacgttatgattgcggaattgttgacacgtaaattagatccggaagtgtacca

SEQ ID NO: 188415 - DNA, 53 bp, Artificial
  Synthetic oligonucleotide
cctgttccaaccattaccgcaccgggtaacgctaattcaccaagtttcactct

SEQ ID NO: 188416 - DNA, 55 bp, Artificial
  Synthetic oligonucleotide
cctgtgctaagtagtgagacatcagtcgaaatcttagctatcctctgctgggagg

SEQ ID NO: 188417 - DNA, 55 bp, Artificial
  Synthetic oligonucleotide
cctctcatgatttcgactgtaggtaaaccacagaatacttcccatggtccaattg

SEQ ID NO: 188418 - DNA, 55 bp, Artificial
  Synthetic oligonucleotide
cctaagatttcagcaagtttcttcgatgccactggatcttatgtaatgggttata

SEQ ID NO: 188419 - DNA, 54 bp, Artificial
  Synthetic oligonucleotide
ccgataaaacgcctaaccctccgtgatttgagacagccgccgctaagttagaac

SEQ ID NO: 188420 - DNA, 52 bp, Artificial
  Synthetic oligonucleotide
tacgtgtttccggtaagggtgaacgtggggcaaatggtggaccgaacggtga

SEQ ID NO: 188421 - DNA, 55 bp, Artificial
  Synthetic oligonucleotide
cggtaaagttttccgtccgatgccacgcatcttatgaacaggtaaaggccatagt

SEQ ID NO: 188422 - DNA, 53 bp, Artificial
  Synthetic oligonucleotide
cgggatacgggttaaggaaagtacggttatgaatcctaatctggatcccaaga

SEQ ID NO: 188423 - DNA, 55 bp, Artificial
  Synthetic oligonucleotide
cgggacctcaatctccgtttacgggcacagggattcaagctgaccagtgctcccg

SEQ ID NO: 188424 - DNA, 55 bp, Artificial
  Synthetic oligonucleotide
cgctcgttacgctttcccactatgatccaccggttgtactggcaacaaagtatcg

SEQ ID NO: 188425 - DNA, 55 bp, Artificial
  Synthetic oligonucleotide
ccgcggctgcggtaccattcagtataaacacgattcaagcacagcgaaatctgac

SEQ ID NO: 188426 - DNA, 55 bp, Artificial
  Synthetic oligonucleotide
ccgctactaggcaatgggttacctagcgattgggactagcaatcttcccctccgc

SEQ ID NO: 188427 - DNA, 55 bp, Artificial
  Synthetic oligonucleotide
ccggataaatttccaactttaggggctcataatgtgcgttcttacattatgcctg

SEQ ID NO: 188428 - DNA, 55 bp, Artificial
  Synthetic oligonucleotide
cgcgtggctcttgtatatacgcaggatacttatacagcacaggatatcgtgcaag

SEQ ID NO: 188429 - DNA, 55 bp, Artificial
  Synthetic oligonucleotide
ccgctatgcgtgtttccagaggaattcagacggggcgtatgtgggtgaatacgta

SEQ ID NO: 188430 - DNA, 54 bp, Artificial
  Synthetic oligonucleotide
tttccgccaccttgatttacgaactaatcgggccattgtctgctaagtttgcct

SEQ ID NO: 188431 - DNA, 51 bp, Artificial
  Synthetic oligonucleotide
tacgggacaacaattacgtgtttccggtaagggtgaacgtggggcaaatgg

SEQ ID NO: 188432 - DNA, 53 bp, Artificial
  Synthetic oligonucleotide
cgcgaccaatacggccaagataacaaccaccggggtatacacttccgcaaact

SEQ ID NO: 188433 - DNA, 54 bp, Artificial
  Synthetic oligonucleotide
aaacgatcatttcatcgcgggtatcctgaacaccgttggatcccttagcgatat

SEQ ID NO: 188434 - DNA, 54 bp, Artificial
  Synthetic oligonucleotide
cttggacgtgacatctggacacgtgtttggattggaacgcgagtttctttgtat

SEQ ID NO: 188435 - DNA, 54 bp, Artificial
  Synthetic oligonucleotide
tatgctcctgtcataggattgttggagccgataccacctccatccggatagtta

SEQ ID NO: 188436 - DNA, 54 bp, Artificial
  Synthetic oligonucleotide
aaatgtatcctttcgtctgctgagtggggagcacgttggtctagtcggggccaa

SEQ ID NO: 188437 - DNA, 54 bp, Artificial
  Synthetic oligonucleotide
ctagaaacgcctatttgatcccctagttcactctgagataagttgaacttcgta

SEQ ID NO: 188438 - DNA, 54 bp, Artificial
  Synthetic oligonucleotide
agcaataccggctccagtgcgggcaggtataagattgagctgaccggcgattgg

SEQ ID NO: 188439 - DNA, 54 bp, Artificial
  Synthetic oligonucleotide
tgctcgataacgcctttattcataactgcaacacggtctgaaatcgcaaaacat

SEQ ID NO: 188440 - DNA, 54 bp, Artificial
  Synthetic oligonucleotide
tgactcgacaggtgggaacacttctttatccgcgttctaatcaaagtttaaccg

SEQ ID NO: 188441 - DNA, 54 bp, Artificial
  Synthetic oligonucleotide
actgagagcggtgccacgaccgttgaagctgctgtaatggcggtggaggaacag

SEQ ID NO: 188442 - DNA, 58 bp, Artificial
  Synthetic oligonucleotide
agttgccccgctgcgtgaagttcccggaaagatagctgcaattaactggaacacgcca

SEQ ID NO: 188443 - DNA, 54 bp, Artificial
  Synthetic oligonucleotide
tacgtcccaggaggaccattagtgttagacgttagtgcttttgatcagtatcgc

SEQ ID NO: 188444 - DNA, 54 bp, Artificial
  Synthetic oligonucleotide
gtgacaatgcaacgattcaacccaacagcactcctatttataaaggataactag

SEQ ID NO: 188445 - DNA, 54 bp, Artificial
  Synthetic oligonucleotide
tcgtgaaattactggtgcaaacgaaataaaacgagtgtgtggtattgagtgttc

SEQ ID NO: 188446 - DNA, 54 bp, Artificial
  Synthetic oligonucleotide
cgcaagggcggtctccaaggtcggaaaggctgcatatctctccgcagggaatcg

SEQ ID NO: 188447 - DNA, 54 bp, Artificial
  Synthetic oligonucleotide
agaattcttcagcccagacaaatagacccgattctgcgtcaaggtctgactaac

SEQ ID NO: 188448 - DNA, 54 bp, Artificial
  Synthetic oligonucleotide
agatcctaaggtagaagttgtttgcggcatcgtaatcggtaaacgatcataccc

SEQ ID NO: 188449 - DNA, 54 bp, Artificial
  Synthetic oligonucleotide
gcgatacgtgccggaggaacaacgattcgctcgtacacatcgagcttgggggta

SEQ ID NO: 188450 - DNA, 54 bp, Artificial
  Synthetic oligonucleotide
ccactgggcactgcgcgaaggctataagcgtatccttgtcgttcgtacaagacc

SEQ ID NO: 188451 - DNA, 54 bp, Artificial
  Synthetic oligonucleotide
ccataccagtgtgatatgttcagcggtggaggtaccgacgcgggcaatgcagga

SEQ ID NO: 188452 - DNA, 54 bp, Artificial
  Synthetic oligonucleotide
gccctcagatcgcacttgtgcgtgtgaaagccgccctgttgaacagtagccgcc

SEQ ID NO: 188453 - DNA, 59 bp, Artificial
  Synthetic oligonucleotide
cggtgcgcctgtatcgatggcatccatgccacgtactaaaccatccgtaccacccatgg

SEQ ID NO: 188454 - DNA, 54 bp, Artificial
  Synthetic oligonucleotide
gctagaacgtgttatgagggtacataaggaaatgcgtgggttagaccgataccg

SEQ ID NO: 188455 - DNA, 53 bp, Artificial
  Synthetic oligonucleotide
ccggtaaaacgccacttgcaccacaagttggggccgtaacaatacggtgacca

SEQ ID NO: 188456 - DNA, 54 bp, Artificial
  Synthetic oligonucleotide
gcaggggaaggatggcgcatctattaagcttccggaccgcatgaaggcgttgca

SEQ ID NO: 188457 - DNA, 54 bp, Artificial
  Synthetic oligonucleotide
cccttataggttccggtgaataccagagagcccttttcgattacctgacgctcg

SEQ ID NO: 188458 - DNA, 54 bp, Artificial
  Synthetic oligonucleotide
gaattatcttaaccggtgcacgtattccactcgcctatgtgataggacaacctc

SEQ ID NO: 188459 - DNA, 53 bp, Artificial
  Synthetic oligonucleotide
gtaaccaagtcacgtccgctgacttccattgtttcatgtaagctgcctttcca

SEQ ID NO: 188460 - DNA, 53 bp, Artificial
  Synthetic oligonucleotide
ggttcttcgtttaccagcattgcatgaacaagctcctcggctgtaaacgtttt

SEQ ID NO: 188461 - DNA, 53 bp, Artificial
  Synthetic oligonucleotide
gtcgcccatatgaaagtatcctccagtagctggattgggaattctaatactga

SEQ ID NO: 188462 - DNA, 53 bp, Artificial
  Synthetic oligonucleotide
gtgtatctcctgtttccggccgtacggtatacaacacatatgtcgtattcgct

SEQ ID NO: 188463 - DNA, 53 bp, Artificial
  Synthetic oligonucleotide
gagatcacgctgttgctacgagtattccatgacttagtggcaagtgcacgcat

SEQ ID NO: 188464 - DNA, 59 bp, Artificial
  Synthetic oligonucleotide
taaggccgctaccgcagtgattggtagtgggtgttcacttgctagtgccggtgccatgg

SEQ ID NO: 188465 - DNA, 53 bp, Artificial
  Synthetic oligonucleotide
attcgtgcgcatggctatgcggtattaaatgacagcgatgatatcaatacgag

SEQ ID NO: 188466 - DNA, 53 bp, Artificial
  Synthetic oligonucleotide
tacatttaatccccttggaggttcgttcgcggtataatgtagtgcttcataat

SEQ ID NO: 188467 - DNA, 53 bp, Artificial
  Synthetic oligonucleotide
tacgattgacggcggaacgatctatgtcgatgccaacggagatggagtggata

SEQ ID NO: 188468 - DNA, 53 bp, Artificial
  Synthetic oligonucleotide
aggtaaatatactttgtcctacacctgacgcttcactgatagccacacgtcta

SEQ ID NO: 188469 - DNA, 53 bp, Artificial
  Synthetic oligonucleotide
tcagcccacaaaccagcacgagcttgtgtacaagtagcccgtttaccacgcga

SEQ ID NO: 188470 - DNA, 53 bp, Artificial
  Synthetic oligonucleotide
agaggatacacaactaattcaacaggtgaaggtttctcatggtcaatggaagg

SEQ ID NO: 188471 - DNA, 53 bp, Artificial
  Synthetic oligonucleotide
gatcgtatgagacagcacaggttatgaagggcggtttatcacttctggaagtc

SEQ ID NO: 188472 - DNA, 53 bp, Artificial
  Synthetic oligonucleotide
tgccacgaccgttgaagctgctgtaatggcggtggaggaacaggcaccagtcg

SEQ ID NO: 188473 - DNA, 53 bp, Artificial
  Synthetic oligonucleotide
tggcgcaagcattcctccgtctgtcctgaaggagactgtccgagaaccccacg

SEQ ID NO: 188474 - DNA, 53 bp, Artificial
  Synthetic oligonucleotide
aaggcagtcgccgtttcccgtgaggtatccgcgagaagcgtgatgatatccgc

SEQ ID NO: 188475 - DNA, 59 bp, Artificial
  Synthetic oligonucleotide
gaaggtgtcgatacgcttgggtccgcttgattgcggtcttcagtccatgtgccatcgcc

SEQ ID NO: 188476 - DNA, 53 bp, Artificial
  Synthetic oligonucleotide
ttagcaatgggtggtactaacaaatccgctctaactgggcctgtatataatcc

SEQ ID NO: 188477 - DNA, 53 bp, Artificial
  Synthetic oligonucleotide
aagagaactttctaattacgagcctaccatcctaaaacggtttgctgatgatc

SEQ ID NO: 188478 - DNA, 53 bp, Artificial
  Synthetic oligonucleotide
aacaggatggatcgcatcgtgatccgaatagacttcacggctcgcactatcgg

SEQ ID NO: 188479 - DNA, 53 bp, Artificial
  Synthetic oligonucleotide
cctttggtgttaacacataccttcctaacactgccatatcactcggtgcttta

SEQ ID NO: 188480 - DNA, 53 bp, Artificial
  Synthetic oligonucleotide
cacttctccaatcatgtgtcatatcagtgtctattaaggtggcacaaatggta

SEQ ID NO: 188481 - DNA, 53 bp, Artificial
  Synthetic oligonucleotide
catccaaaccgcattttgcgtataataaaccgcaatctttcgaacaggtacgg

SEQ ID NO: 188482 - DNA, 53 bp, Artificial
  Synthetic oligonucleotide
cgaaccggtaactctccaaatcggatcccttcagataacgattcaattctcgc

SEQ ID NO: 188483 - DNA, 52 bp, Artificial
  Synthetic oligonucleotide
tgcgccagcttaccctcgacgaattggatcgcgtggagctgacagcgaatga

SEQ ID NO: 188484 - DNA, 52 bp, Artificial
  Synthetic oligonucleotide
ggcaaagacagcaaacagatatccctcagcggtatgcttatcatacacggtg

SEQ ID NO: 188485 - DNA, 52 bp, Artificial
  Synthetic oligonucleotide
cataccggataccaaactgcctactataagcagattctgctgcgtatgatca

SEQ ID NO: 188486 - DNA, 55 bp, Artificial
  Synthetic oligonucleotide
gcaagactgaaatcgcaagagaaactcttttcgccccgacgacaactccccgttc

SEQ ID NO: 188487 - DNA, 52 bp, Artificial
  Synthetic oligonucleotide
atcgttaccatatttcgattaatcgtatcggaatggaagcaacacgcatcgc

SEQ ID NO: 188488 - DNA, 52 bp, Artificial
  Synthetic oligonucleotide
tactacaatcaaaacgcgacttagaatctaggcttgcatccacattcacctt

SEQ ID NO: 188489 - DNA, 52 bp, Artificial
  Synthetic oligonucleotide
aataccatgcttggggcggctgttattgtatcgatgataagtatccttgata

SEQ ID NO: 188490 - DNA, 52 bp, Artificial
  Synthetic oligonucleotide
atggcgtattcgcatcacccagcaacaacctacaagtgacggcgggcacagg

SEQ ID NO: 188491 - DNA, 52 bp, Artificial
  Synthetic oligonucleotide
gtatagcgctgttcttaagttaccgatatgcatatagccggtcggactaggc

SEQ ID NO: 188492 - DNA, 52 bp, Artificial
  Synthetic oligonucleotide
gtactgaagttgtagggacgtattatgggtgggactactgtctgtctcgatg

SEQ ID NO: 188493 - DNA, 52 bp, Artificial
  Synthetic oligonucleotide
tccactcataggggcatccggggtaaacgctggagcgtgatgatagtcgcct

SEQ ID NO: 188494 - DNA, 52 bp, Artificial
  Synthetic oligonucleotide
gtacgggatgtgtgggaggaggaagccttaaagaagctgcctgcctatgcgt

SEQ ID NO: 188495 - DNA, 52 bp, Artificial
  Synthetic oligonucleotide
acatgaggtttcactacctgtttatgccgctccgattagtggtattcgtttg

SEQ ID NO: 188496 - DNA, 52 bp, Artificial
  Synthetic oligonucleotide
tttccgtgacttgaagagcggttaacaacaaagccgccacgtaccaaagtcc

SEQ ID NO: 188497 - DNA, 59 bp, Artificial
  Synthetic oligonucleotide
gggaactactatccaccgcggcagctcaattgcaccccctggaacaccacaagcgagtc

SEQ ID NO: 188498 - DNA, 52 bp, Artificial
  Synthetic oligonucleotide
tttcccctcgtatgaattggcgcttgttttaccccttacaataacaagcgcc

SEQ ID NO: 188499 - DNA, 52 bp, Artificial
  Synthetic oligonucleotide
taccgcctttcctggcggtggccccgttaatatggctgtgtatacagtgcga

SEQ ID NO: 188500 - DNA, 52 bp, Artificial
  Synthetic oligonucleotide
acaatgagttgtgaggatcgctgtcgtgcccaatatcgcagctgtatgaaca

SEQ ID NO: 188501 - DNA, 52 bp, Artificial
  Synthetic oligonucleotide
ccgatcaaatcatgagtggggtagagccttataataccgatcgcatagaacc

SEQ ID NO: 188502 - DNA, 52 bp, Artificial
  Synthetic oligonucleotide
ggttggtatcaaatcgaggtaggaatgactagtagtgctttaacggttcgac

SEQ ID NO: 188503 - DNA, 52 bp, Artificial
  Synthetic oligonucleotide
gccacgttgtcctgcctctgtaccccggtgtgcacagcgagctgctcgtctg

SEQ ID NO: 188504 - DNA, 52 bp, Artificial
  Synthetic oligonucleotide
atagagaagtgctgccaagactacgctatgtgaattgtgtcagcggtgcact

SEQ ID NO: 188505 - DNA, 52 bp, Artificial
  Synthetic oligonucleotide
acgcggggtgtttaaggcaccggcaaatgaggttgtacgcggctgtaccggt

SEQ ID NO: 188506 - DNA, 52 bp, Artificial
  Synthetic oligonucleotide
aaagcgtcgggactgaagtccctcccacaaggaacactcttctcacacagga

SEQ ID NO: 188507 - DNA, 51 bp, Artificial
  Synthetic oligonucleotide
agtcagtgcgaaggtgcgtataatctcgatggtaagggattaagtgttagt

SEQ ID NO: 188508 - DNA, 60 bp, Artificial
  Synthetic oligonucleotide
tctccggtatttgccggtggagcgatggcacttagctcggtaagcgtagtaagcaatgct

SEQ ID NO: 188509 - DNA, 59 bp, Artificial
  Synthetic oligonucleotide
gcgctctccggtccgcgagatgtgattgtctcagcgggtactacgcgactgatcaacgt

SEQ ID NO: 188510 - DNA, 51 bp, Artificial
  Synthetic oligonucleotide
ccacatttcggggccagccgaagtcgtcggtggcttggaattcgtgacgat

SEQ ID NO: 188511 - DNA, 51 bp, Artificial
  Synthetic oligonucleotide
gcgatccactgctttgtatagatgcctatcgcttagcagctaccacctttc

SEQ ID NO: 188512 - DNA, 51 bp, Artificial
  Synthetic oligonucleotide
acccctgccatccgccaatgagcgtcagcgcaatgggggtgtagcttcccg

SEQ ID NO: 188513 - DNA, 51 bp, Artificial
  Synthetic oligonucleotide
ggctcgaaaagtgtctcccgcaaggcgatttgtcccggtcgcaacgcaaca

SEQ ID NO: 188514 - DNA, 51 bp, Artificial
  Synthetic oligonucleotide
cccacgagggcctgcgtaaggcatatggaacactgctgcaggatgcgtgta

SEQ ID NO: 188515 - DNA, 51 bp, Artificial
  Synthetic oligonucleotide
cactgacggggcacaagtcgtgccctaccgcccctataccggtgccctccc

SEQ ID NO: 188516 - DNA, 51 bp, Artificial
  Synthetic oligonucleotide
cggaaacaggcagtgatctcatgttcccgatgtttatcataggcatggggt

SEQ ID NO: 188517 - DNA, 51 bp, Artificial
  Synthetic oligonucleotide
aggcctttgcgagggcagaggtaatggaaagcggcagctgtttcgcacagg

SEQ ID NO: 188518 - DNA, 51 bp, Artificial
  Synthetic oligonucleotide
gcgacaagtgctaacttaggacccggatttgacgttgcagggttggcactg

SEQ ID NO: 188519 - DNA, 51 bp, Artificial
  Synthetic oligonucleotide
aggaacgcggtttgccggagttcacagacagcgagattgcagcggattggg

SEQ ID NO: 188520 - DNA, 59 bp, Artificial
  Synthetic oligonucleotide
acccatgacaacggttctcagtgggtcagcaacctcgcacttcatcgcaagctcctgta

SEQ ID NO: 188521 - DNA, 51 bp, Artificial
  Synthetic oligonucleotide
tatgtccgtcaggatcataaaatcgaacgactctttgaccccatgcatatt

SEQ ID NO: 188522 - DNA, 51 bp, Artificial
  Synthetic oligonucleotide
acgagttaacggtccaaccatgacctgagattctaattgatattctccacc

SEQ ID NO: 188523 - DNA, 51 bp, Artificial
  Synthetic oligonucleotide
gaaaacggagattttgagcgatttgcgttgtttaatcgatacagagtaagc

SEQ ID NO: 188524 - DNA, 51 bp, Artificial
  Synthetic oligonucleotide
tcaggacttggcggattaacatgtgcttctcatctatcagtacttgggtac

SEQ ID NO: 188525 - DNA, 51 bp, Artificial
  Synthetic oligonucleotide
agcttcgccccatcgtaccgctgactcaatgctcctgcagtcgcaagcccg

SEQ ID NO: 188526 - DNA, 51 bp, Artificial
  Synthetic oligonucleotide
cgcgcacatcccatgcctaatctgggtacaacggcctccggttgctcatcc

SEQ ID NO: 188527 - DNA, 51 bp, Artificial
  Synthetic oligonucleotide
agccatccgcacaggctatgggaagcaacagggtgtttggcaggaatccga

SEQ ID NO: 188528 - DNA, 51 bp, Artificial
  Synthetic oligonucleotide
cgctcaccgctcgctgcaaaatcccgagtccgcatcaggagccgcatgtga

SEQ ID NO: 188529 - DNA, 51 bp, Artificial
  Synthetic oligonucleotide
gctgtcacactatgctctgtcaaaggaacaagtgtaatattttgcaatcgt

SEQ ID NO: 188530 - DNA, 51 bp, Artificial
  Synthetic oligonucleotide
agagtcgccctgcacgctcgaatgcctgactgacgctctattcgaccgctc

SEQ ID NO: 188531 - DNA, 59 bp, Artificial
  Synthetic oligonucleotide
cgcgctcactgctgtttccgaagcaacctatatccgagttgtggaagggatcgccgtta

SEQ ID NO: 188532 - DNA, 51 bp, Artificial
  Synthetic oligonucleotide
cccaaacgcctgtgatccagtgccggggtctgctgtatcactgcatcggtg

SEQ ID NO: 188533 - DNA, 51 bp, Artificial
  Synthetic oligonucleotide
tcgggtatcatccggggctcccccacgtctgtctttccgtcagcggagtct

SEQ ID NO: 188534 - DNA, 51 bp, Artificial
  Synthetic oligonucleotide
tcgggtgtccttctacacagtcggtagattatacggattttgcggcaccat

SEQ ID NO: 188535 - DNA, 51 bp, Artificial
  Synthetic oligonucleotide
agaacacagtgccgagcgacgtctgctgtactgacgctcatcccgaagcgt

SEQ ID NO: 188536 - DNA, 51 bp, Artificial
  Synthetic oligonucleotide
attactagctggtaaagcgggttgcagcaatgcgattagctgggtacacat

SEQ ID NO: 188537 - DNA, 51 bp, Artificial
  Synthetic oligonucleotide
attagtgctatgaatcgccagttagattggatagccgattctatgcaatgg

SEQ ID NO: 188538 - DNA, 51 bp, Artificial
  Synthetic oligonucleotide
gaagcagataccgcatgtgcgtcgcgaaccggacgtaattgaacgaattca

SEQ ID NO: 188539 - DNA, 51 bp, Artificial
  Synthetic oligonucleotide
ggggaatcgctacatgattccctacatagacagatacaagacgttcccgtt

SEQ ID NO: 188540 - DNA, 51 bp, Artificial
  Synthetic oligonucleotide
cgcaaggcgatttgtcccggtcgcaacgcaacaggactcgcactcgcaacg

SEQ ID NO: 188541 - DNA, 51 bp, Artificial
  Synthetic oligonucleotide
ctatggaactgggcacggcacagccacgcgcactgacggggcacaagtcgt

SEQ ID NO: 188542 - DNA, 59 bp, Artificial
  Synthetic oligonucleotide
tctccgcaattctggtgggaacggtaatcacggcacttatgcagtcgagtacagcggct

SEQ ID NO: 188543 - DNA, 51 bp, Artificial
  Synthetic oligonucleotide
atcgccgcaagacgatgagcgatgatatggtcaaggtggcccggacactgg

SEQ ID NO: 188544 - DNA, 51 bp, Artificial
  Synthetic oligonucleotide
gtctacacttgataaagtgaatgtgtcatggaaggatgaacatgttgcttg

SEQ ID NO: 188545 - DNA, 51 bp, Artificial
  Synthetic oligonucleotide
ttcagctgctacttatgaacaagcagttagggcatatgcttatggagcacg

SEQ ID NO: 188546 - DNA, 51 bp, Artificial
  Synthetic oligonucleotide
cggtttcagagcccgcatgaaaacggtcggaggacgtaaagttttagcccg

SEQ ID NO: 188547 - DNA, 51 bp, Artificial
  Synthetic oligonucleotide
atcgatggcggttttcgactcgtaaagcatccaagagacatccccatctat

SEQ ID NO: 188548 - DNA, 51 bp, Artificial
  Synthetic oligonucleotide
gtgattatggaattgatcgtagtatggtagcaggatatggacatgacgatc

SEQ ID NO: 188549 - DNA, 51 bp, Artificial
  Synthetic oligonucleotide
ggatctaaactaaagtcatacccacgattttgtaaggaaactccatctacg

SEQ ID NO: 188550 - DNA, 51 bp, Artificial
  Synthetic oligonucleotide
cataagtaccataccctgtccgccaccataaggtgtatcatccacactctt

SEQ ID NO: 188551 - DNA, 51 bp, Artificial
  Synthetic oligonucleotide
aagggccacgggggcggtttgtgatggacctacagtatggccttcacgaac

SEQ ID NO: 188552 - DNA, 51 bp, Artificial
  Synthetic oligonucleotide
catcgcttagatagcaatcacttgtcggtcgagctggttgattaaaacgaa

SEQ ID NO: 188553 - DNA, 59 bp, Artificial
  Synthetic oligonucleotide
tgtatccatcgaaagtgtggtgcccatagcattgcgggggtaaaaatgcgtgtgcgccc

SEQ ID NO: 188554 - DNA, 51 bp, Artificial
  Synthetic oligonucleotide
cgtaagtcctaagatactcgcagcttctgttactcgattcatcttatcccc

SEQ ID NO: 188555 - DNA, 51 bp, Artificial
  Synthetic oligonucleotide
tgggttctgtcaattctcaatgtatgccgccagacaactcaggggattggc

SEQ ID NO: 188556 - DNA, 51 bp, Artificial
  Synthetic oligonucleotide
gaccaatacttattagatgtaccattactgcgggttacacaagcacgcatt

SEQ ID NO: 188557 - DNA, 51 bp, Artificial
  Synthetic oligonucleotide
atttgccagtatgatctcgacgtgttaatcactataggatcccaagctaga

SEQ ID NO: 188558 - DNA, 50 bp, Artificial
  Synthetic oligonucleotide
ttttatcatgcgttgtaagagaatcgtttgcagcgacgttaccccatgct

SEQ ID NO: 188559 - DNA, 50 bp, Artificial
  Synthetic oligonucleotide
ccgcgactcggcgttatgagagaagcgcattcttcccctgcgggcggaag

SEQ ID NO: 188560 - DNA, 50 bp, Artificial
  Synthetic oligonucleotide
tgactaggcttaatccatacagcgtaaacacgaccaacccgccctgtccg

SEQ ID NO: 188561 - DNA, 50 bp, Artificial
  Synthetic oligonucleotide
cccgcgtgagcacgctgactgagacgatgatccaggtgggtcaagctcgg

SEQ ID NO: 188562 - DNA, 50 bp, Artificial
  Synthetic oligonucleotide
ttgcgactggctcgaaaagtgtctcccgcaaggcgatttgtcccggtcgc

SEQ ID NO: 188563 - DNA, 50 bp, Artificial
  Synthetic oligonucleotide
ttgcgtatccgccggatggacttcccctgatgctatatggcccgacagga

SEQ ID NO: 188564 - DNA, 59 bp, Artificial
  Synthetic oligonucleotide
gctgtcaatatgactcgcttgtggtgttccagggggtgcaattgagctgccgcggtgga

SEQ ID NO: 188565 - DNA, 50 bp, Artificial
  Synthetic oligonucleotide
acggatgcgaactggagcgaaactgtagcgaaggcgccgctggatcacgg

SEQ ID NO: 188566 - DNA, 50 bp, Artificial
  Synthetic oligonucleotide
acgttcgtcacttgtttccattgccgatatctttagagcacggattattg

SEQ ID NO: 188567 - DNA, 50 bp, Artificial
  Synthetic oligonucleotide
ccgccctacgatcccatcggctgtcagaccggctaacttctggaaggcca

SEQ ID NO: 188568 - DNA, 50 bp, Artificial
  Synthetic oligonucleotide
acgcgatcgcatccctgcacgttccatgcttcggcaccgagcatacggaa

SEQ ID NO: 188569 - DNA, 50 bp, Artificial
  Synthetic oligonucleotide
cccaggtctgccgccctacgatcccatcggctgtcagaccggctaacttc

SEQ ID NO: 188570 - DNA, 50 bp, Artificial
  Synthetic oligonucleotide
ggacgcggtgttacggcatgggatggtagcggagtgtatagcggacgcaa

SEQ ID NO: 188571 - DNA, 50 bp, Artificial
  Synthetic oligonucleotide
cagctcggtctttcccggggctaatgcttccatcgccctcagcacgcagt

SEQ ID NO: 188572 - DNA, 50 bp, Artificial
  Synthetic oligonucleotide
cgctccagacgcccgattgcgaccgcttcacccttgacaccgcgcacaca

SEQ ID NO: 188573 - DNA, 50 bp, Artificial
  Synthetic oligonucleotide
aagcgtgcggaagtatctccgcccgcggacagaacccgggaaactgagct

SEQ ID NO: 188574 - DNA, 50 bp, Artificial
  Synthetic oligonucleotide
tgtcgccgcaagaaagcttccgataatgccgacagccgctccgctcagca

SEQ ID NO: 188575 - DNA, 55 bp, Artificial
  Synthetic oligonucleotide
ggtcccgacccccatgtaggctttcgtcacccccagtgaatgtagtacatccagg

SEQ ID NO: 188576 - DNA, 50 bp, Artificial
  Synthetic oligonucleotide
cggagtccttccacagctgggcactagcacagttcagacggcggtctggt

SEQ ID NO: 188577 - DNA, 50 bp, Artificial
  Synthetic oligonucleotide
accgccgcttcgttgggccggctgctgaaatcccggggattaaaagtcgc

SEQ ID NO: 188578 - DNA, 50 bp, Artificial
  Synthetic oligonucleotide
cgtccagccgccgaatctgcgtaagcgccaaaggttcccattccgctttt

SEQ ID NO: 188579 - DNA, 50 bp, Artificial
  Synthetic oligonucleotide
cccactagctaccacgagtaaggttccatctgtatgagcactaaccaatg

SEQ ID NO: 188580 - DNA, 50 bp, Artificial
  Synthetic oligonucleotide
cagccgctgtgatggcaagaggatttgaccgtgacacacgccgcagcagc

SEQ ID NO: 188581 - DNA, 50 bp, Artificial
  Synthetic oligonucleotide
ccggctgaatcctccgctccaacaactgtgcagtgcacactcccgcgtcg

SEQ ID NO: 188582 - DNA, 50 bp, Artificial
  Synthetic oligonucleotide
cttggggcgtgaaggaattgattacgtatcttgcagctgtactttaacga

SEQ ID NO: 188583 - DNA, 50 bp, Artificial
  Synthetic oligonucleotide
ccgggcggaatacgacagctacggtgtgctgagcgttacgtccaacagcg

SEQ ID NO: 188584 - DNA, 50 bp, Artificial
  Synthetic oligonucleotide
gacctcatcataacagatatccgtaggcaataccacattgtccatatctc

SEQ ID NO: 188585 - DNA, 50 bp, Artificial
  Synthetic oligonucleotide
atcacttccggaatggcgctgtgaatgccgccggtctgaatccccacgtc

SEQ ID NO: 188586 - DNA, 58 bp, Artificial
  Synthetic oligonucleotide
atccgggctgcatccatcgtaacagcggttgagggagatacaaaccggttacgcgtca

SEQ ID NO: 188587 - DNA, 50 bp, Artificial
  Synthetic oligonucleotide
ccggggctcccccacgtctgtctttccgtcagcggagtctcatgcgcgta

SEQ ID NO: 188588 - DNA, 50 bp, Artificial
  Synthetic oligonucleotide
ctatgccgcgtattcagccgcagttgaggcccagctgcaagatcagctgg

SEQ ID NO: 188589 - DNA, 50 bp, Artificial
  Synthetic oligonucleotide
gtgaccgggacaatccgcaaacgcaactacgctaagcagattgcaggcat

SEQ ID NO: 188590 - DNA, 50 bp, Artificial
  Synthetic oligonucleotide
ccgggttagggaaaggcattaccgccgcttcgttgggccggctgctgaaa

SEQ ID NO: 188591 - DNA, 50 bp, Artificial
  Synthetic oligonucleotide
gtcttttctaatcgttattcgaccataatggtgtgtcgttgcctctacgg

SEQ ID NO: 188592 - DNA, 50 bp, Artificial
  Synthetic oligonucleotide
gtcgttgtggatcgcgtttccatgagggcgtgggattcaggaatgccgcg

SEQ ID NO: 188593 - DNA, 50 bp, Artificial
  Synthetic oligonucleotide
atctgtgacgacgccactctgatatcgcgagcagaccagacagccgccca

SEQ ID NO: 188594 - DNA, 50 bp, Artificial
  Synthetic oligonucleotide
atgggacgctgctccagtatggccgcaagatgaggggacacactgctgtg

SEQ ID NO: 188595 - DNA, 50 bp, Artificial
  Synthetic oligonucleotide
gtactaccaaccactagccgaagacaaggtatccatcgtaaggtgtgaac

SEQ ID NO: 188596 - DNA, 50 bp, Artificial
  Synthetic oligonucleotide
atgtcgtgccgttagtcgcgatgctgcgcaactttgaacgagccggcgat

SEQ ID NO: 188597 - DNA, 56 bp, Artificial
  Synthetic oligonucleotide
gtcgtgccatcgtagcgagactctgccacgttcaccgttaaaggggtcccaacgct

SEQ ID NO: 188598 - DNA, 50 bp, Artificial
  Synthetic oligonucleotide
ggggcatattgttggcgctccaatcgcttaatagatacaataagaatcta

SEQ ID NO: 188599 - DNA, 50 bp, Artificial
  Synthetic oligonucleotide
ggttttctcactcggacgaccatgcggcatacttccgcgtaccccgctgg

SEQ ID NO: 188600 - DNA, 50 bp, Artificial
  Synthetic oligonucleotide
ggtttcttcccgccaagtgcagccatggcaggaatctatgcccgcacaga

SEQ ID NO: 188601 - DNA, 50 bp, Artificial
  Synthetic oligonucleotide
ccggtaaccgcgttccttgtacaaacggtaagcgttcttaaccaccgcta

SEQ ID NO: 188602 - DNA, 50 bp, Artificial
  Synthetic oligonucleotide
cgaattggcgtgtgagccggagcttaacggaaatccggacggcgagaggc

SEQ ID NO: 188603 - DNA, 50 bp, Artificial
  Synthetic oligonucleotide
caacgagcgcaatacgtagtttcttatagttacgtgtatggtagcgcgat

SEQ ID NO: 188604 - DNA, 50 bp, Artificial
  Synthetic oligonucleotide
catgcatgcagccccgcttgcggtaagacggaatcgtcgccacgcctaaa

SEQ ID NO: 188605 - DNA, 50 bp, Artificial
  Synthetic oligonucleotide
gacagggaacacacgctacattaactagagctgaagtatccggaacaggc

SEQ ID NO: 188606 - DNA, 50 bp, Artificial
  Synthetic oligonucleotide
caagtaactgttgtgctagagtaacctcttccgtaaccggatggggaaat

SEQ ID NO: 188607 - DNA, 50 bp, Artificial
  Synthetic oligonucleotide
cagccacgcgcactgacggggcacaagtcgtgccctaccgcccctatacc

SEQ ID NO: 188608 - DNA, 58 bp, Artificial
  Synthetic oligonucleotide
gcgtatgtctgatactattcgtagtgttttagatgagcgtttaattaattcggttgtg

SEQ ID NO: 188609 - DNA, 50 bp, Artificial
  Synthetic oligonucleotide
ccggttcttaacgccattccgacacccatgccgcctaaaagtccgccgta

SEQ ID NO: 188610 - DNA, 50 bp, Artificial
  Synthetic oligonucleotide
tcgcagacagcatgcgggaggtcgtgtctggtacagtggatcaccgcttc

SEQ ID NO: 188611 - DNA, 50 bp, Artificial
  Synthetic oligonucleotide
agattgacagccggatttgcctgactgcctcctacctcgcttggtccgga

SEQ ID NO: 188612 - DNA, 50 bp, Artificial
  Synthetic oligonucleotide
ggcctgtgtcatgcataaggggccataccggacactcccccgggcttatc

SEQ ID NO: 188613 - DNA, 50 bp, Artificial
  Synthetic oligonucleotide
agcacgggaaaagcctgggggacaaacggtacgaaatactggcgcggccg

SEQ ID NO: 188614 - DNA, 50 bp, Artificial
  Synthetic oligonucleotide
tccggtaccgatcctgcgaaaacagagatcgcagccaacgacgggtacgc

SEQ ID NO: 188615 - DNA, 50 bp, Artificial
  Synthetic oligonucleotide
cgtgcatttaaggttttagttgctgctacaatggtagttactagcacaca

SEQ ID NO: 188616 - DNA, 50 bp, Artificial
  Synthetic oligonucleotide
tccggcaataacactttctgttacggcagcgggaagctcctaccgcccgg

SEQ ID NO: 188617 - DNA, 50 bp, Artificial
  Synthetic oligonucleotide
cgcggtccgtgcgggaagctatgaagtatccggatcgctcgatggggaaa

SEQ ID NO: 188618 - DNA, 50 bp, Artificial
  Synthetic oligonucleotide
tcacttatactggtagtactgactggcgtgaccgtgcttataaagggact

SEQ ID NO: 188619 - DNA, 60 bp, Artificial
  Synthetic oligonucleotide
acgttgatcagtcgcgtagtacccgctgagacaatcacatctcgcggaccggagagcgcg

SEQ ID NO: 188620 - DNA, 58 bp, Artificial
  Synthetic oligonucleotide
tataggcgcaggctgctttcgctccgaaaattatgttgatcggacgtggcggcagttc

SEQ ID NO: 188621 - DNA, 50 bp, Artificial
  Synthetic oligonucleotide
tatggactctaatctgatgcttgcgtcctgtatctagtgtacattcaacg

SEQ ID NO: 188622 - DNA, 50 bp, Artificial
  Synthetic oligonucleotide
tatgcggtgacgattctgggctgcacggtacttatccgctggcacaaccg

SEQ ID NO: 188623 - DNA, 50 bp, Artificial
  Synthetic oligonucleotide
tatcgatgctgggcatgtctgggtctccctggaagccggttattgtgcgg

SEQ ID NO: 188624 - DNA, 50 bp, Artificial
  Synthetic oligonucleotide
tacgatccgcacaaccgtcatttgtttgggacgctgggggatggcgtggt

SEQ ID NO: 188625 - DNA, 50 bp, Artificial
  Synthetic oligonucleotide
cgaacgggttcctgtggcgggcgttcagtttcatcagctgacggaaccga

SEQ ID NO: 188626 - DNA, 50 bp, Artificial
  Synthetic oligonucleotide
agttgctaggctatccggtgcttttagccgccggcagtctgggcggtctg

SEQ ID NO: 188627 - DNA, 50 bp, Artificial
  Synthetic oligonucleotide
cgccacatccggctgaatcctccgctccaacaactgtgcagtgcacactc

SEQ ID NO: 188628 - DNA, 50 bp, Artificial
  Synthetic oligonucleotide
ataacaccactagagaagataggacgaaatgttcctccctccagtattaa

SEQ ID NO: 188629 - DNA, 50 bp, Artificial
  Synthetic oligonucleotide
ataaccgccagacacttcgcacgccggggcactgtaaatcttgttgcccc

SEQ ID NO: 188630 - DNA, 50 bp, Artificial
  Synthetic oligonucleotide
taagtatgctagcgctactacagaagcacctaaggttgttacacaagtaa

SEQ ID NO: 188631 - DNA, 58 bp, Artificial
  Synthetic oligonucleotide
tatgggttcggcttacgcctcacctatcatccgcggaatcgcctctcttcgctcggca

SEQ ID NO: 188632 - DNA, 50 bp, Artificial
  Synthetic oligonucleotide
ataagcgattgaagcctccggagcataccccagcgacttccccgccagat

SEQ ID NO: 188633 - DNA, 50 bp, Artificial
  Synthetic oligonucleotide
gcggtgaagctgattgtgggacggcctttaggcccggtgcctttcgctcc

SEQ ID NO: 188634 - DNA, 50 bp, Artificial
  Synthetic oligonucleotide
gggacactgacgctggctcatccggcactgtatccctctcttaccgcgca

SEQ ID NO: 188635 - DNA, 50 bp, Artificial
  Synthetic oligonucleotide
atactcccttgcagtcacagtccgggcgtgcagccgtattcaggcggtga

SEQ ID NO: 188636 - DNA, 58 bp, Artificial
  Synthetic oligonucleotide
ccataggaccaatcccccagaactgaccgcaaggcgatcaggctacgcacccactttc

SEQ ID NO: 188637 - DNA, 58 bp, Artificial
  Synthetic oligonucleotide
cgtggatcgctccgcaggaattccccggttatcacgccttgtgacaacgcctataggc

SEQ ID NO: 188638 - DNA, 58 bp, Artificial
  Synthetic oligonucleotide
tccatgacttgacagaccgggaaccatctccatacgctatcacggtgcgcagagggta

SEQ ID NO: 188639 - DNA, 57 bp, Artificial
  Synthetic oligonucleotide
tccattccctagtggagtaatgatcggtgccaatcccccgagcggtaatacctcgcc

SEQ ID NO: 188640 - DNA, 58 bp, Artificial
  Synthetic oligonucleotide
aataggctctgttgccgcgatgtttgggttatgggattgcaaggcgctccaaagcgtc

SEQ ID NO: 188641 - DNA, 58 bp, Artificial
  Synthetic oligonucleotide
gctccatgcgaattacctggccacacccatgacaacggttctcagtgggtcagcaacc

SEQ ID NO: 188642 - DNA, 57 bp, Artificial
  Synthetic oligonucleotide
tctatatgccgagcgaagagaggcgattccgcggatgataggtgaggcgtaagccga

SEQ ID NO: 188643 - DNA, 57 bp, Artificial
  Synthetic oligonucleotide
aattccgggacagctggcgtggataaaacataccccatgcgatccgccgtcaagtct

SEQ ID NO: 188644 - DNA, 59 bp, Artificial
  Synthetic oligonucleotide
ggagtcatttagtctgtggcctgaaatgacatagacaagggtcaaattgacttttgtcc

SEQ ID NO: 188645 - DNA, 57 bp, Artificial
  Synthetic oligonucleotide
tgcgggcattcaggctatggttgcggcacgtaaacaaaccggccttccgattgtcag

SEQ ID NO: 188646 - DNA, 57 bp, Artificial
  Synthetic oligonucleotide
tggcaccggcactagcaagtgaacacccactaccaatcactgcggtagcggccttaa

SEQ ID NO: 188647 - DNA, 57 bp, Artificial
  Synthetic oligonucleotide
aacgcgataggacgttgccatccaaacgcctgccatctttcaacgtaccaccgacga

SEQ ID NO: 188648 - DNA, 57 bp, Artificial
  Synthetic oligonucleotide
aggcagagagtatcgcaccttgctgccgcttcctatgtggtcgctgtggtgcattac

SEQ ID NO: 188649 - DNA, 57 bp, Artificial
  Synthetic oligonucleotide
cgtggcgatggcacatggactgaagaccgcaatcaagcggacccaagcgtatcgaca

SEQ ID NO: 188650 - DNA, 52 bp, Artificial
  Synthetic oligonucleotide
gggcaaactctacctttcccgccaaagcagctttgacccccggaacgtcttc

SEQ ID NO: 188651 - DNA, 57 bp, Artificial
  Synthetic oligonucleotide
gtggcgaatagagtaattgtcttgttagagaaatcatacgcttctaggaatgtattg

SEQ ID NO: 188652 - DNA, 56 bp, Artificial
  Synthetic oligonucleotide
ttgccagataagcttatttgctggaacacggtaactgcttcaatgagtggaacagg

SEQ ID NO: 188653 - DNA, 56 bp, Artificial
  Synthetic oligonucleotide
acactggcgcagggcataactcctgtgcgcaagcagttcaggaagcctaccactct

SEQ ID NO: 188654 - DNA, 56 bp, Artificial
  Synthetic oligonucleotide
gccttaattcgataatatgactctaacgcatcttctcgatattcaatcgtatcacc

SEQ ID NO: 188655 - DNA, 52 bp, Artificial
  Synthetic oligonucleotide
tcggtgccaatcccccgagcggtaatacctcgcctttaatcgttcccttaac

SEQ ID NO: 188656 - DNA, 56 bp, Artificial
  Synthetic oligonucleotide
ctaattgcatgacggaataaaataccatcagtattccactcgtcaatagaactacc

SEQ ID NO: 188657 - DNA, 56 bp, Artificial
  Synthetic oligonucleotide
ccgatactaaagtaccatcctttaaacgtataattcgactcgaatattcatctgcc

SEQ ID NO: 188658 - DNA, 56 bp, Artificial
  Synthetic oligonucleotide
ctcaggcgagctcgtagctatcctcaactggtgggcagggagtcctcgggggagcg

SEQ ID NO: 188659 - DNA, 55 bp, Artificial
  Synthetic oligonucleotide
gatgtagcccataaaacgtaatatctgctggaaacacgacacgtcgccagacctc

SEQ ID NO: 188660 - DNA, 55 bp, Artificial
  Synthetic oligonucleotide
gatgctcgtataagacgcatcagcacttcgcaaagtactcataagtgatcaagag

SEQ ID NO: 188661 - DNA, 55 bp, Artificial
  Synthetic oligonucleotide
gatgacattccgacttctaggaacgcatcccgacaatgtccccagtatgataacc

SEQ ID NO: 188662 - DNA, 55 bp, Artificial
  Synthetic oligonucleotide
gatgtacgagtcccagttgaagacaataatccggccatacgccgcattgaaagct

SEQ ID NO: 188663 - DNA, 55 bp, Artificial
  Synthetic oligonucleotide
gatgaaagtctggctccgcttgtgaaccagtgcaaggctaccatatcgtatcccc

SEQ ID NO: 188664 - DNA, 55 bp, Artificial
  Synthetic oligonucleotide
gatgaacagtcattttcttaccatgcagctacagttgcaggactctgtcgtcatt

SEQ ID NO: 188665 - DNA, 55 bp, Artificial
  Synthetic oligonucleotide
gatccgtatatgggaagcgtattacaatgagaccggtcattatcgggaggaaacg

SEQ ID NO: 188666 - DNA, 60 bp, Artificial
  Synthetic oligonucleotide
atgactcgcttgtggtgttccagggggtgcaattgagctgccgcggtggatagtagttcc

SEQ ID NO: 188667 - DNA, 55 bp, Artificial
  Synthetic oligonucleotide
gcgtgcatgctttgcgcgacttgccgcaataagagcgaacacaaccaaaccgata

SEQ ID NO: 188668 - DNA, 55 bp, Artificial
  Synthetic oligonucleotide
gcgtgaagtgagattcacaacacgctttatgtggtaataatcatgaccagatttg

SEQ ID NO: 188669 - DNA, 55 bp, Artificial
  Synthetic oligonucleotide
gcgtatagtttaagttatctagggatgaatttaggattggtgttagcaccaagca

SEQ ID NO: 188670 - DNA, 55 bp, Artificial
  Synthetic oligonucleotide
gcggcacttggtctactgttgtttaccggtattactgcgtatgatgcacagaaaa

SEQ ID NO: 188671 - DNA, 55 bp, Artificial
  Synthetic oligonucleotide
gcgcggagtgcataaggctcccgcaaatgaggttgtccgcagctgtaccgggtta

SEQ ID NO: 188672 - DNA, 55 bp, Artificial
  Synthetic oligonucleotide
gccttgatacccctcgtttgttcgtgcaagcactaatgaatcgtaataagactca

SEQ ID NO: 188673 - DNA, 55 bp, Artificial
  Synthetic oligonucleotide
gccgggtatctataccgtaaccgagcaggcatacgataagtacgagccgcaggaa

SEQ ID NO: 188674 - DNA, 55 bp, Artificial
  Synthetic oligonucleotide
gccgccatgaagtaagacataacggtaaaggttaatgtaaccacatattgaccga

SEQ ID NO: 188675 - DNA, 55 bp, Artificial
  Synthetic oligonucleotide
gccctaaagcgaaagcctgaagcaatctagcgtcgttagttccaacaaagtggtg

SEQ ID NO: 188676 - DNA, 55 bp, Artificial
  Synthetic oligonucleotide
gcccaatcgccgtagctccggcatgaaagaacggcaaattgatcaccgccagacc

SEQ ID NO: 188677 - DNA, 60 bp, Artificial
  Synthetic oligonucleotide
gaccgggaaccatctccatacgctatcacggtgcgcagagggtacagcaccactcgctta

SEQ ID NO: 188678 - DNA, 55 bp, Artificial
  Synthetic oligonucleotide
gccatactccccgcctaaagcaagaaaatcgcgacacataccgtcctctttacgc

SEQ ID NO: 188679 - DNA, 55 bp, Artificial
  Synthetic oligonucleotide
gccagcattgtcggacttatgaccgtaggagcaatgacagcgacaatggtttccg

SEQ ID NO: 188680 - DNA, 55 bp, Artificial
  Synthetic oligonucleotide
gccactaacagtgattccgacagatggcaaggctcctcaagagatgttacagcca

SEQ ID NO: 188681 - DNA, 55 bp, Artificial
  Synthetic oligonucleotide
gcatactcatggatgtgagcagggtatctatgtcaagatgcagtacttcaacaag

SEQ ID NO: 188682 - DNA, 55 bp, Artificial
  Synthetic oligonucleotide
gcatacagggtatctgcgaattacgcgacatcatgccgactctgttagctttgtg

SEQ ID NO: 188683 - DNA, 55 bp, Artificial
  Synthetic oligonucleotide
gcagtatcgctatgcaaattggaatatacaaacccggggataaatgtctagacgg

SEQ ID NO: 188684 - DNA, 55 bp, Artificial
  Synthetic oligonucleotide
gcacccggtgttaaaataacacgtgctactgaagactttctacgtccagttcctc

SEQ ID NO: 188685 - DNA, 55 bp, Artificial
  Synthetic oligonucleotide
gcacacacgtggtgttttatcaatggctcgtacaatggtcaaagattcagcgagt

SEQ ID NO: 188686 - DNA, 55 bp, Artificial
  Synthetic oligonucleotide
gcaaagcgagctagagtaggtgtgagtctagccaatgcttatgtgtgaaacgccc

SEQ ID NO: 188687 - DNA, 55 bp, Artificial
  Synthetic oligonucleotide
ctgcaccttgtaagaccctgtactaccataatctgaaccctgcgctgtagcttcc

SEQ ID NO: 188688 - DNA, 55 bp, Artificial
  Synthetic oligonucleotide
gcggaagggatgggtcatgtcagcgcgccaatatcgtaaggctttgcggaatcgc

SEQ ID NO: 188689 - DNA, 53 bp, Artificial
  Synthetic oligonucleotide
gacatagggcgggcagtaatgggtgtggcaccaaggtgaaaggggtttacgtt

SEQ ID NO: 188690 - DNA, 50 bp, Artificial
  Synthetic oligonucleotide
aaacgggcggtacctcgcctattccagcgacaccaatgggtccgagcgtt

SEQ ID NO: 188691 - DNA, 50 bp, Artificial
  Synthetic oligonucleotide
aaacttcggcggggtaagctggtatgcgacaatcggccttccgtgggtgc

SEQ ID NO: 188692 - DNA, 50 bp, Artificial
  Synthetic oligonucleotide
aaagacgctcatgccaggcgtgcgtgtgctcttcgctctcacgcccgacc

SEQ ID NO: 188693 - DNA, 50 bp, Artificial
  Synthetic oligonucleotide
aaagcgcggtttccggtgactgggcaaaggtgagccctcctgcgcctttg

SEQ ID NO: 188694 - DNA, 50 bp, Artificial
  Synthetic oligonucleotide
aaaggcttggctagggtgccgttacgtcaggcttcgtcagggtaggtcgc

SEQ ID NO: 188695 - DNA, 50 bp, Artificial
  Synthetic oligonucleotide
aacacgctatcgtagccgagcgtggatatgcggaacggctggccaccaaa

SEQ ID NO: 188696 - DNA, 50 bp, Artificial
  Synthetic oligonucleotide
tagcttgggttggcccaatatttcgcatgactctctttgcttgaccgtcg

SEQ ID NO: 188697 - DNA, 50 bp, Artificial
  Synthetic oligonucleotide
aaccaaaaacccccgccgcggtttgtttgggcaagtaccaatcgcgagga

SEQ ID NO: 188698 - DNA, 50 bp, Artificial
  Synthetic oligonucleotide
aaccaactttgcttcgaatgcgaccgcagcgaccgtgggcactcccatcg

SEQ ID NO: 188699 - DNA, 50 bp, Artificial
  Synthetic oligonucleotide
aaccggagcagcaatgcggcttacgtctgcctgggcagcaatcggagcgg

SEQ ID NO: 188700 - DNA, 55 bp, Artificial
  Synthetic oligonucleotide
gacatagcttgcgatgtgaaccttgcaggcggcgtttatgtgatcgacggtgggc

SEQ ID NO: 188701 - DNA, 50 bp, Artificial
  Synthetic oligonucleotide
aacgcgttctacgggcggaacttgctatcgaccccgaaccaacgtcgctg

SEQ ID NO: 188702 - DNA, 50 bp, Artificial
  Synthetic oligonucleotide
aacgcttttcaagtacgagcccccggcctaccctccccgaccatacgata

SEQ ID NO: 188703 - DNA, 50 bp, Artificial
  Synthetic oligonucleotide
aacggcccgcatcagtcggcgattagggtcgagcacactagtgcgtgaaa

SEQ ID NO: 188704 - DNA, 50 bp, Artificial
  Synthetic oligonucleotide
aagaagcgacagtcatgcggcctgcctaagcgattggtgctgaggtggct

SEQ ID NO: 188705 - DNA, 50 bp, Artificial
  Synthetic oligonucleotide
aagacgcccgctaggggacgcgtgagcgattgacgtgaggacttcgatga

SEQ ID NO: 188706 - DNA, 50 bp, Artificial
  Synthetic oligonucleotide
aagcagtgcgcaggacgggcacttcgctcggaggtgttgcgagaccggca

SEQ ID NO: 188707 - DNA, 50 bp, Artificial
  Synthetic oligonucleotide
aagcgagagcggacgacacgccttgtctcacgtcggccagcccattccct

SEQ ID NO: 188708 - DNA, 50 bp, Artificial
  Synthetic oligonucleotide
aagcgggtccgatttgccgacctcaccagtagcgtcaatgaccaggctcg

SEQ ID NO: 188709 - DNA, 50 bp, Artificial
  Synthetic oligonucleotide
aaggccaaacctctgcggtggcaatccacgctcaattggccctgacgttc

SEQ ID NO: 188710 - DNA, 50 bp, Artificial
  Synthetic oligonucleotide
aaggctgcgctttaatgacaagcgacggcacacccacgcaatccggccgc

SEQ ID NO: 188711 - DNA, 55 bp, Artificial
  Synthetic oligonucleotide
gaacgatcccattcagacgatctcgtccgatgcatgctggctaccgcatgcaatc

SEQ ID NO: 188712 - DNA, 50 bp, Artificial
  Synthetic oligonucleotide
aagggaaccgattgcgcttgtaagcgatgcgggaacgcctctggtctccg

SEQ ID NO: 188713 - DNA, 50 bp, Artificial
  Synthetic oligonucleotide
aagggcggttgcctcgcgactagggctttcggcgatgaatgagaaccccc

SEQ ID NO: 188714 - DNA, 50 bp, Artificial
  Synthetic oligonucleotide
aaggggcactacgttgtgaccggctcgaaggcaggacgcgacagctttaa

SEQ ID NO: 188715 - DNA, 50 bp, Artificial
  Synthetic oligonucleotide
aaggtgcgaaacggcatgtcggtcacaccagtcattggcgcgagcagcac

SEQ ID NO: 188716 - DNA, 50 bp, Artificial
  Synthetic oligonucleotide
agccacgtcgagcgaggcataaacaggcaggccttgaaacttcgctgcgg

SEQ ID NO: 188717 - DNA, 50 bp, Artificial
  Synthetic oligonucleotide
agcatggaccacaggccccctgttctcggccctttgactcgtgcataggt

SEQ ID NO: 188718 - DNA, 50 bp, Artificial
  Synthetic oligonucleotide
agcatctcgctccataaatcgggcgcataccggaaaaccggacgtcgcga

SEQ ID NO: 188719 - DNA, 50 bp, Artificial
  Synthetic oligonucleotide
agcagctgctgcggttgtgaaaatcggcttttgcaagacacgcctcccct

SEQ ID NO: 188720 - DNA, 50 bp, Artificial
  Synthetic oligonucleotide
agcagcggcccgcagaaccggcaagcacctatttcgcgaattacgaacta

SEQ ID NO: 188721 - DNA, 50 bp, Artificial
  Synthetic oligonucleotide
agcaatggctccaaaggaagggtttcgagatcatgtccactcactcaaat

SEQ ID NO: 188722 - DNA, 55 bp, Artificial
  Synthetic oligonucleotide
ctttgccgacccttccttgcctgtgcgattgccgaccgctgcatcttcccaaaac

SEQ ID NO: 188723 - DNA, 50 bp, Artificial
  Synthetic oligonucleotide
agagtccttggcaagtccccatgtgccccaagcgatcattgcgacgattg

SEQ ID NO: 188724 - DNA, 50 bp, Artificial
  Synthetic oligonucleotide
agaggggccttgagcggatttccggtccatcctgacgaagtcacgcctgc

SEQ ID NO: 188725 - DNA, 50 bp, Artificial
  Synthetic oligonucleotide
agagagacgcccatttcctacacccaaccggcttgctaagccgaccgcgc

SEQ ID NO: 188726 - DNA, 50 bp, Artificial
  Synthetic oligonucleotide
agacccaggcagagtacgtccgggcaagggcagaagggttcatgcaacgc

SEQ ID NO: 188727 - DNA, 50 bp, Artificial
  Synthetic oligonucleotide
agaattgcatggccgcatctagcggtggcgagacgcacaagtacccacgg

SEQ ID NO: 188728 - DNA, 50 bp, Artificial
  Synthetic oligonucleotide
agaacacacagggtaccgagggggagaccgttcgtccccttgagaaccgc

SEQ ID NO: 188729 - DNA, 50 bp, Artificial
  Synthetic oligonucleotide
actgcctcggagggatcacacgctcgaacgtcatccaggtttgccgcgag

SEQ ID NO: 188730 - DNA, 50 bp, Artificial
  Synthetic oligonucleotide
actgatgccgagtggggtcgttgcgtcggctttttgggtcaaaggggcct

SEQ ID NO: 188731 - DNA, 50 bp, Artificial
  Synthetic oligonucleotide
actccgcaggtgggccggggaaggtgatctgtggcacgtactgaaatccg

SEQ ID NO: 188732 - DNA, 50 bp, Artificial
  Synthetic oligonucleotide
actccgaaccccggggctactttccgctcccgcgaacgccaaaagagtcc

SEQ ID NO: 188733 - DNA, 52 bp, Artificial
  Synthetic oligonucleotide
cttccttagcgggtaatttagcgtaaggtagtcacacggtcaggggacaacc

SEQ ID NO: 188734 - DNA, 50 bp, Artificial
  Synthetic oligonucleotide
actatcgagcggtcccaccccaattgcgcccagccctgtagggcgatccc

SEQ ID NO: 188735 - DNA, 50 bp, Artificial
  Synthetic oligonucleotide
actagtccttgttgctcccagtgcactgcgaaggggtccgcatgccacct

SEQ ID NO: 188736 - DNA, 50 bp, Artificial
  Synthetic oligonucleotide
actaagcggactgctcggggcaaagcactggtacaatcgcggcggagtgt

SEQ ID NO: 188737 - DNA, 50 bp, Artificial
  Synthetic oligonucleotide
acgttggcagcatccctcgcttggagagatcggagcgcgcgacctttttg

SEQ ID NO: 188738 - DNA, 50 bp, Artificial
  Synthetic oligonucleotide
acgttccgctgactgtctcgttggaacgggaccgggtgtaggcatcacgc

SEQ ID NO: 188739 - DNA, 50 bp, Artificial
  Synthetic oligonucleotide
acgggcacttcgctcggaggtgttgcgagaccggcactggtccagacccc

SEQ ID NO: 188740 - DNA, 50 bp, Artificial
  Synthetic oligonucleotide
acggctgcattgagactgccctgcagcactttgatcgctcgcgggatgcg

SEQ ID NO: 188741 - DNA, 50 bp, Artificial
  Synthetic oligonucleotide
acggccagcgcgcgactatccgcatcgaccgatgatgtccgtcttccacc

SEQ ID NO: 188742 - DNA, 50 bp, Artificial
  Synthetic oligonucleotide
acggagggctgtctgcaacggtccggcttgcccgattctgaacagtccgg

SEQ ID NO: 188743 - DNA, 50 bp, Artificial
  Synthetic oligonucleotide
acggaccgccggtaaagctgcgcacgactgtgaccgaggagcgacctcaa

SEQ ID NO: 188744 - DNA, 55 bp, Artificial
  Synthetic oligonucleotide
ctggctgatcccacatcgggaagtgtccgctacgctcgaaccaatgcaccgtcgc

SEQ ID NO: 188745 - DNA, 50 bp, Artificial
  Synthetic oligonucleotide
acgcttcctccttgctcacgcacgaagccgtcaattcgccgcgacaatcg

SEQ ID NO: 188746 - DNA, 50 bp, Artificial
  Synthetic oligonucleotide
acgctcggtccccctggtttgtgaccatctgcgccgcccaaatgcgacac

SEQ ID NO: 188747 - DNA, 50 bp, Artificial
  Synthetic oligonucleotide
acgattcatcgcgtgctccttgctttaacgctgtccccggcgcgacccta

SEQ ID NO: 188748 - DNA, 50 bp, Artificial
  Synthetic oligonucleotide
acgcagcccttccatcgtgacgggcccattaaggcttcgtcccgctgttg

SEQ ID NO: 188749 - DNA, 50 bp, Artificial
  Synthetic oligonucleotide
acgcagtttctgcaagcgagccagtctaccagggtgcggctccaacccct

SEQ ID NO: 188750 - DNA, 50 bp, Artificial
  Synthetic oligonucleotide
acgccacttgacccggtgcatagaccgagcttgcgagattggcaggagcc

SEQ ID NO: 188751 - DNA, 50 bp, Artificial
  Synthetic oligonucleotide
attcgcgacgggaaacttcgctccgtgaaagccggcaaccgacggctgat

SEQ ID NO: 188752 - DNA, 50 bp, Artificial
  Synthetic oligonucleotide
attccgggatcggtgaattcgcgaactggatcttgagaccgtccgaagtg

SEQ ID NO: 188753 - DNA, 50 bp, Artificial
  Synthetic oligonucleotide
attccatgcccgctaccagccgattcgggcctgcggataccaacacaagg

SEQ ID NO: 188754 - DNA, 50 bp, Artificial
  Synthetic oligonucleotide
attcaccaagggccgacacatgaatgcgatttcacgcctggcggtcaggg

SEQ ID NO: 188755 - DNA, 55 bp, Artificial
  Synthetic oligonucleotide
ctgcctattacacgttggaccgcagcacttgtttgcgttaggcggtaaggctggc

SEQ ID NO: 188756 - DNA, 50 bp, Artificial
  Synthetic oligonucleotide
acgcgacaattgcgggggctgatcccttcgtcaagcagtagcggggccga

SEQ ID NO: 188757 - DNA, 50 bp, Artificial
  Synthetic oligonucleotide
atggcgaccgcgctatccggacatgatctacgtgcgctcgaaagaggcag

SEQ ID NO: 188758 - DNA, 50 bp, Artificial
  Synthetic oligonucleotide
atggccgcatctagcggtggcgagacgcacaagtacccacggcattttta

SEQ ID NO: 188759 - DNA, 50 bp, Artificial
  Synthetic oligonucleotide
atcgtagccgagcgtggatatgcggaacggctggccaccaaagcgactgt

SEQ ID NO: 188760 - DNA, 50 bp, Artificial
  Synthetic oligonucleotide
acgcgactggattgcttccaccctctgcgctcggtaaagcgccgcattcc

SEQ ID NO: 188761 - DNA, 50 bp, Artificial
  Synthetic oligonucleotide
atcgcgcgcaagtcgaacgcttcagggtcctcaacggtctcggagcgaat

SEQ ID NO: 188762 - DNA, 50 bp, Artificial
  Synthetic oligonucleotide
acgcggcctacgatgcaagggttgcaggcgagggcacatggacccagtgg

SEQ ID NO: 188763 - DNA, 50 bp, Artificial
  Synthetic oligonucleotide
agtgggtctcaggaccctggcgataccgctcggcgcacggagaaaattac

SEQ ID NO: 188764 - DNA, 50 bp, Artificial
  Synthetic oligonucleotide
aggtctcgctcgaactcccgactctggtgcttttcgtgatcggcctcccc

SEQ ID NO: 188765 - DNA, 50 bp, Artificial
  Synthetic oligonucleotide
agggccctcattccatcgccctagcgtgactccaatggcgtatcgtgcgc

SEQ ID NO: 188766 - DNA, 55 bp, Artificial
  Synthetic oligonucleotide
cggtctttcgacacgtggagcaatttcgatcaaacgcgtatatcgcgaaatggcc

SEQ ID NO: 188767 - DNA, 50 bp, Artificial
  Synthetic oligonucleotide
aggcggggttggtcataccgacatcgagcgtagtctggccgatccggacg

SEQ ID NO: 188768 - DNA, 50 bp, Artificial
  Synthetic oligonucleotide
aggcgataggcgatgcacacacaacccatcagcgggtgcggtgcttacca

SEQ ID NO: 188769 - DNA, 50 bp, Artificial
  Synthetic oligonucleotide
aggcacgttgccgctcgctggagcttacacagcacgccatcacggagttg

SEQ ID NO: 188770 - DNA, 50 bp, Artificial
  Synthetic oligonucleotide
acgcggggcacagcgttttgcaacgccttggacttagagatttccgccgc

SEQ ID NO: 188771 - DNA, 50 bp, Artificial
  Synthetic oligonucleotide
aggaccgcggcgtttttcggttgttcttggcgcccgtgggcattcggcag

SEQ ID NO: 188772 - DNA, 50 bp, Artificial
  Synthetic oligonucleotide
aggacacacaatggcgaccgcgctatccggacatgatctacgtgcgctcg

SEQ ID NO: 188773 - DNA, 50 bp, Artificial
  Synthetic oligonucleotide
agcgacccatagggtaacggtcacggctagctcgcgctccccttggagat

SEQ ID NO: 188774 - DNA, 50 bp, Artificial
  Synthetic oligonucleotide
agcctcggctgcgccccatacagagcgcgccaatgtctgagccattctat

SEQ ID NO: 188775 - DNA, 50 bp, Artificial
  Synthetic oligonucleotide
agcctaaggctgctcgctactccgaccagcaaggcggctatgcccgatag

SEQ ID NO: 188776 - DNA, 50 bp, Artificial
  Synthetic oligonucleotide
agccgccccaagaaccaccggagcctccccagtgacccatacattcgatc

SEQ ID NO: 188777 - DNA, 55 bp, Artificial
  Synthetic oligonucleotide
cggtatcgatcgtgatatagaccgtggtcatccgtacagaagcttccgacagtaa

SEQ ID NO: 188778 - DNA, 50 bp, Artificial
  Synthetic oligonucleotide
agcccacttgattaatgttagtgcacacggtccaacggccagcgcgcgac

SEQ ID NO: 188779 - DNA, 55 bp, Artificial
  Synthetic oligonucleotide
cgggaatttcagccatagtcgtctctcctttgcaaactgctgaccgactagcggt

SEQ ID NO: 188780 - DNA, 55 bp, Artificial
  Synthetic oligonucleotide
gcgctccggacttcccatcataaagcgctatgcgcacgagccggttccatggacg

SEQ ID NO: 188781 - DNA, 55 bp, Artificial
  Synthetic oligonucleotide
cgcagggatcgcggcagtcctttctgatctgatagcgaacggtcattggtcgatc

SEQ ID NO: 188782 - DNA, 55 bp, Artificial
  Synthetic oligonucleotide
cgcagagtgcgtttgccagtatcaccatcggatatcccgattgcactattcggtg

SEQ ID NO: 188783 - DNA, 55 bp, Artificial
  Synthetic oligonucleotide
cgattgattgtctcggccaaatcggcccgggtcaaagtgcccactgaacgcatgc

SEQ ID NO: 188784 - DNA, 55 bp, Artificial
  Synthetic oligonucleotide
cgacgcttcagttcgttgttgagccgcgctgtctctcccgattgttccatctggg

SEQ ID NO: 188785 - DNA, 55 bp, Artificial
  Synthetic oligonucleotide
cctggtcacgcgtatcgtcgccacggacaagttggtcctagtttccatagcatgg

SEQ ID NO: 188786 - DNA, 55 bp, Artificial
  Synthetic oligonucleotide
ccccgggaatcgaaatgtagtcatgcgatgtaggcgaaacggatgacattggcga

SEQ ID NO: 188787 - DNA, 55 bp, Artificial
  Synthetic oligonucleotide
catgctgcaccttgtttagcaacccgctcacttcttgcgtttcgcccttcaacag

SEQ ID NO: 188788 - DNA, 55 bp, Artificial
  Synthetic oligonucleotide
catgcgtccgcatataacccgggaagcagtcccgaacgatgaggtggctgtccgg

SEQ ID NO: 188789 - DNA, 55 bp, Artificial
  Synthetic oligonucleotide
catcgtgaggcctgtcggccatagaatcgtctcccagacggaatcttacgcttgc

SEQ ID NO: 188790 - DNA, 55 bp, Artificial
  Synthetic oligonucleotide
tccatctttcccgatgggatgcgtgggtatgattgagggctaacggttcaggctg

SEQ ID NO: 188791 - DNA, 55 bp, Artificial
  Synthetic oligonucleotide
gcgacaggctcgttagccatcggtgcaggggccgcgagtattgcttatccgcatt

SEQ ID NO: 188792 - DNA, 55 bp, Artificial
  Synthetic oligonucleotide
tatgttccattcgggaaggattcgcaattcatcctttcacagccccgttccggcg

SEQ ID NO: 188793 - DNA, 55 bp, Artificial
  Synthetic oligonucleotide
tagtcgcgccgcggattaccgccgacgtgcctcgccccgagatcatcattcgccc

SEQ ID NO: 188794 - DNA, 55 bp, Artificial
  Synthetic oligonucleotide
ttcgcgccccttttctttgcggctacgcatttcggcgctaagggccgggcctcat

SEQ ID NO: 188795 - DNA, 55 bp, Artificial
  Synthetic oligonucleotide
taacgcatgacaacacagcggttccgaggcgtgcgcattttcctactcgccgcgc

SEQ ID NO: 188796 - DNA, 55 bp, Artificial
  Synthetic oligonucleotide
ttggacatatgcccaaggctaagatcggaaccctaaaattcggtaaagcgaacgc

SEQ ID NO: 188797 - DNA, 55 bp, Artificial
  Synthetic oligonucleotide
gtggaccgcatgttacacggtcctagggctaaaatccgtcctcctttcaaatggc

SEQ ID NO: 188798 - DNA, 55 bp, Artificial
  Synthetic oligonucleotide
ggtgcagaatgacgatgagcgctgaactacgaggtgcagcgaaagccagactcct

SEQ ID NO: 188799 - DNA, 55 bp, Artificial
  Synthetic oligonucleotide
gggccggtgtcttgacgtggcaacacacccttcccatctgacgaagacaactacc

SEQ ID NO: 188800 - DNA, 55 bp, Artificial
  Synthetic oligonucleotide
gggacttcgctcacttagctattacgctttgtagagccgccaacattccggctcg

SEQ ID NO: 188801 - DNA, 55 bp, Artificial
  Synthetic oligonucleotide
tttagcatttgcgcattcgccgctagaggcagcggcgcacacccactccagccga

SEQ ID NO: 188802 - DNA, 55 bp, Artificial
  Synthetic oligonucleotide
gccgttcggccataaataagtcttcctgtcgtgaatgcctgcgcagcgaggcgcc

SEQ ID NO: 188803 - DNA, 55 bp, Artificial
  Synthetic oligonucleotide
ggctcggtataattggttcggttcactcaagcccgtgaggtgagccaatgaacgc

SEQ ID NO: 188804 - DNA, 53 bp, Artificial
  Synthetic oligonucleotide
aacttaaccggtggaccaccctgatggggcaggtcaggtggaagactacaacc

SEQ ID NO: 188805 - DNA, 55 bp, Artificial
  Synthetic oligonucleotide
ggcgcatgtcgcttgtgtgacggtttccacagatcgctttgccgctacggcatcc

SEQ ID NO: 188806 - DNA, 55 bp, Artificial
  Synthetic oligonucleotide
ggcagcgaggatcgcaaattgcgagctgaacccgccaatccttctgtctatccgc

SEQ ID NO: 188807 - DNA, 55 bp, Artificial
  Synthetic oligonucleotide
ggacgcacgcgtcaggcgcgttgcattcggtggaggcagtcccaacgcgatcgag

SEQ ID NO: 188808 - DNA, 55 bp, Artificial
  Synthetic oligonucleotide
ggaatctcgtaaaccagttggtaagtggtttcccttaatggcgagtgcatgagtg

SEQ ID NO: 188809 - DNA, 55 bp, Artificial
  Synthetic oligonucleotide
gcgtcccagggtatagattggcgtgaagcctccgtagatcagtctgggtcccgcg

SEQ ID NO: 188810 - DNA, 55 bp, Artificial
  Synthetic oligonucleotide
gcggtccctccagatggctgtaacgagcggaggtctattaggcgtatgaccttcc

SEQ ID NO: 188811 - DNA, 55 bp, Artificial
  Synthetic oligonucleotide
gcggcatcgtacaatagctatcggaggtttcagctctgatgaaaaccctcttcgc

SEQ ID NO: 188812 - DNA, 55 bp, Artificial
  Synthetic oligonucleotide
gcggaccgaacagacagcaactatcgtgactattctgacggacatctcgcaacgc

SEQ ID NO: 188813 - DNA, 55 bp, Artificial
  Synthetic oligonucleotide
gcccgtgtacgagactgacagtcccggtcaattcgattagcgcccaaagctttcc

SEQ ID NO: 188814 - DNA, 54 bp, Artificial
  Synthetic oligonucleotide
cagccaccaatccattgcggcaagctatccaccgcaaggccttctgccaaatgt

SEQ ID NO: 188815 - DNA, 54 bp, Artificial
  Synthetic oligonucleotide
atccgcatgccattgggccttttcgtattcacactgctctatggcggaatgaca

SEQ ID NO: 188816 - DNA, 54 bp, Artificial
  Synthetic oligonucleotide
ttgcgaaggacggttcttggacagtacggttgcgagaaaggtcgatgctccgct
